United States Patent Application Publication US 2013/0332133 A1 - sequence listing, part 4

SEQ ID NO: 82440 - protein, 525 aa, Unknown
  Bacterial polypetide isolated from the Sargasso Sea
MTKKSKIDHYTDKEALDFHNKGKSGKIEIISSKSLTTKRDLSLAYSPGVAVPVKEISKNPDAAYEYTSKGNLVAVISNGSAILGLGNLGALASKPVMEGKAVLFKRFADINAIDIEIDNKNSDEIIKCIQNIGNSFGGINLEDIAAPDCFIIERKLRETLDIPIFHDDQHGTAIITSAALINALDISKKKPGEVKVVVNGAGASALACANLFKSIGIKTQNIIMLDTKGVIYKGRDNVDQFKSAYAVETKLRTLKEAIKGADVFLGLSAKDVLTREMVKSMAKNPIIFACANPDPEIKPELVDEVRSDAIVATGRSDYPNQVNNLIGFPYIFRGALDVRAKEINEEMKIAAAKAIAGLAREEVPDEVVNAYGGERPRYGKEYIIPSTFDPRLISRIPAAVAEAAMKSGVARKKISDIEAYKDQLTNRLDPSMSIMQGINSQIKKRPKTVVFAEGEDENMLKAAIAYKNSRLGTPIVIGNEKRVKEQLKEIGLDENYKIKIVNSTDKDKRELYKKKLYSKLQRQGL

SEQ ID NO: 82441 - protein, 286 aa, Unknown
  Bacterial polypetide isolated from the Sargasso Sea
MAKNSKDILRKAALDYHAQPRPGKLEIRATKPMANGRDLARAYSPGVAEASIAIDNNPDDVSKYTSRANLVAVVSNGSAVLGLGNIGALASKPVMEGKAVLFKKFANIDCFDLEVNENDPKRLADIICALEPTFGAINLEDIRAPDCFDVEKICRSRMKIPVFHDDQHGTAIVVCAAAKNALLVAKKQFENIKIVSTGGGAAGIACLNMLVKLGVKKKNIWLLDKHGLVYEGRSVDMNSEKSAFAQYTDFRTLQEVIKDADMFLGLSGPNVLKPALIKKMSAKPII

SEQ ID NO: 82442 - protein, 762 aa, Unknown
  Bacterial polypetide isolated from the Sargasso Sea
MKKNKIEHYSDKEALEFHISNKSGKIEINSSKPMISKRDLALAYSPGVAAPVKEIYKNSERAYDYTTKGNLVAVISNGSAVLGLGNLGAIASKPVMEGKAVLFKRFADIDAIDLEIDSKDPIEIINSIKNFAVSFGGINLEDIAAPECFIIEENLKKILDIPVFHDDQHGTAIITSAALINSIHITKKKISKIKVVVNGAGASAMACSDLFLKLGVKKNNLTMIDSKGVISFDRKGLNKWKLKYAKKTKDKNLYDALENADVFLGLSSAGILKKEMIKRMAKNPIIFACANPDPEILPEEAYKIRKDAIIATGRSDYANQVNNLIGFPYIFRGALDVRAKTINEEMKISAANAIAKLARERVPDEVAAAMGGDRPKYGKDYIIPSTFDPRLISVIPVAVAIAAIKSGVARKNIENFNLYSEQLKQRLDPSVTILQGINSKVKKNPKTVVFADGEDENTLKAAIAFKNGGLGTPIIVAKENVVKQRLKEIGYRENLDIKIVNSTDKKLREKYVKFLFKKMQRDQGLLERDCDRMIRNDRVIWSSCMVECGDADAMVTGNTRRYSQSLEKIKKVIPPRKGEIMFGLNMVVSKGKTVFIGDTSVNEYPSSEELADIAISSARVVRLFGFDPRVAFLSHSTFGQPITSRTKHIRDAVEILKEKKVDFKFDGDMQPDVALNDEYSDLYPFSEIVGNANILIMPGQHSAAISNKIMKALGGAKIIGPLLIGLAQPIEIAPLRSSTSEILDLASVAAYSAGVIKYKKTY

SEQ ID NO: 82443 - protein, 299 aa, Unknown
  Bacterial polypetide isolated from the Sargasso Sea
MSIEFNDKVAIVTGAGGGIGKEHALELARRGAKVVVNDLGGSVDGSGASDAAEEVVELIKSEGGEAISNGASVTDLDAVKNMVQQTMDEWGRIDILVNNAGILRDKSFHKVSIEDFNLVMDVHFQGSLNCTHTIFPIMREQEYGRIIFTSSASGVYGNFGQTNYGSAKMAMIGLMNTLKLEGQNKNIFTNSITPVAYTRMTEGLIPEDFGQNLKSEYITPAVIYLASDQAPNGVIIAAGAGVFSRINIQESMGVSLGTGEDMTPENIHANWDKISDMTNARALQNGGEQTLKFFELINK

SEQ ID NO: 82444 - protein, 310 aa, Unknown
  Bacterial polypetide isolated from the Sargasso Sea
MAQDVNSPDYTIGVIGTGTMGRGIAQIAVTGGFQVKMYDAQDGAAVKAEEFIHRMVNRAAEKGQMSEDDAKAANSRLQIVSGLAEFAGCGMVVEAIVENLDIKKGLFNELEGIVAEDTILASNTSSLSVTQIAAGCDKPERVAGYHFFNPVPLLKVVEVVNGQMTAPWVAEKLDSISRKCGHEPVRTQDTPGFLVNHAGRGLYTEGARILAEGIAEPHNVDDVLREGGANFRMGPFELMDTTGLDVSGVVMESIYEQFYQEQRFKPQAFIRNRMAAGLYGLKVGQGFYTYEDNRKVLPEESAPPTDLPES

SEQ ID NO: 82445 - protein, 273 aa, Unknown
  Bacterial polypetide isolated from the Sargasso Sea
MKSILVTGSSSGIGAAICEHFSQIGWKVFGSVRNQNDGDKLTDICGENFTPLIFDVTDINAINEAANLVESHLGKNGLNCLVNNAGINISGPMEYVESDEVRKVFEVNVMGPLNCSQSFLPALKKSTSSTIINISSMAGKIGLPMQGSYCGSKFALEGISESMRRELQIHNIKVVVIGPGAIESSIWDKFEKDEMEEQYKDTEYTSAIKKMDGTLKRARSIAIPAHRVAKKVEKIVNSKNPRPRYVVAGITDKMLNLIPRKILDRAFKRLLTK

SEQ ID NO: 82446 - protein, 292 aa, Unknown
  Bacterial polypetide isolated from the Sargasso Sea
MVCDNLEIRKITVIGSGTMGAGIAQVCCESGFETILFDKYPESIKNGIAKINAFWDKGISKGKTTTEQKEIWSSFLNTSDKLISAVSDADLVIEAVPEIIDLKIKIFQELDEFTKPNCILATNTSSLSITKIAKSTKNPKRVIGMHFFNPVPLMKLLEIIKHNEISNEIVEITKNIASSMNKTAIVVKDSPGFATSRLGVVLGNEAIRMLAEGVASASDIDYAMNLGYRHPMGPLELSDLVGLDVRRDILLGLAEATGDSSYLPHPLLEKLVEKGELGKKTDKGIYNWINNQ

SEQ ID NO: 82447 - protein, 255 aa, Unknown
  Bacterial polypetide isolated from the Sargasso Sea
MFNLKDKVAIVTGASRGIGKAIAIQLSNAGAKVVVSSRKLEECEKVADEIKNMGGKADVIPCHVGRKDEICNLVKETINKYNSIDILVSNAGTNPAFGPLAKLNDEAFDKVLDVNLKSSIWLVNEASPYLKKNKTSSIIIMSSISALFGTKDIGAYGISKAAEVSLVKNLAVELGPHGIRVNAIAPGLIKTEFSRALWSDKDKLKKQNENTPLQRIGHPEDISGIAHFLASDASSFITGQLIVADGGETITSTLT

SEQ ID NO: 82448 - protein, 250 aa, Unknown
  Bacterial polypetide isolated from the Sargasso Sea
MNRLPNKVALISGGARGIGEYAARLFVKEGASVIIGDKDLSKCEKTIKELQKEGYDCSAVPLDVTKESDWVDAISYIESKYNKLDILVNNAGIYSTIPIEETPLDDFNSVISVNLTGLFLGTKHSIPALRKAGGGSIVNMSSTAGLVGNSGSGAYGASKGGVRSFTKYTAVQHAVENIRANSIHPGPIETDMLADKFSDLESRSASESKIPMGRIGTAKEVAMAILFLASDESSYITGAELTIDGGLTAR

SEQ ID NO: 82449 - protein, 245 aa, Unknown
  Bacterial polypetide isolated from the Sargasso Sea
MNNLKDKNIIVTGASGGIGNSIVKKLYESGANILATGTRIEKLEQLKKDFEKINILKFDISETQKIEEFIDDATKELGGSLDCIINNAGITQDNLAIRMSLDEWKKVIDLNLTSTFLISKFAIKKMLKNKFGKIVNITSVVGHTGNLGQANYTASKAGIIAMSKSLAIEYAKKNINVNCISPGFIKTAMTDKIDEKFKETIIAKIPSARLGEPDDIANAVVFLCSNQADYINGETLHINGGMYMA

SEQ ID NO: 82450 - protein, 248 aa, Unknown
  Bacterial polypetide isolated from the Sargasso Sea
MNSLTGKTALVTGASRGIGRATALTLAAAGAQVLVHYGSGETDATAVVDEIRRAGGKAETIATDLRSPDGPHKLAERVRTIIGGRLDVLVANAGIARAASIEETTVEDFDALFAVNVRAPFFLVQQLLPALCKGSSIVLLSSLAARASVGTLSAYSATKGAVDTLVKHWAAALGPRGIRVNAVAPGVVETEMSSFTKTDAGREATLGMQALQRLAQPDDIASVVAFLASDQSRWITGDTLRVDGGSKL

SEQ ID NO: 82451 - protein, 300 aa, Unknown
  Bacterial polypetide isolated from the Sargasso Sea
MSIEFNDKVAIVTGAGGGIGKEHALELARRGAKVVVNDLGGSVDGSGTSDAAEEVVELIKSSGGEAISNGASVTDLKAVKEMVQQTMDEWGRIDILVNNAGILRDKSFHKVSIEDFNLVMDVHFQGSLNCTHTIFPIMREQEYGRIIFTSSASGVYGNFGQTNYGSAKMAMIGLMNTLKLEGQNKNIFTNSITPVAYTRMTEGLIPEDFGKNLKSEYITPAVIYLASDHAPNGVIIAAGAGVFSRINIQETMGVSLGTGEDMTPENIHANWDKISDIEGARTLQNGGEQTLKFFELISKE

SEQ ID NO: 82452 - protein, 235 aa, Unknown
  Bacterial polypetide isolated from the Sargasso Sea
MNQINLKGRTAIVTGGAQGFGLAIVKRFIASGANVIIWDNDEDCMSKIDLKNCLKFNIDITSFESINKGLDLSLKNSDKIDILVNNAGIAGPSFKTWEYPIQEWQKVIDIDLSGVFYCCKAIVPHLKKNNYGRIVNISSIAGKEGNPNAMPYSAAKAGVIALTKSLGKELAEHNISVNCVTPAAAKTRIFDQISQEHIDYMLSKIPRNRFVLLEELASLVSWMVSEENSFTTGAV

SEQ ID NO: 82453 - protein, 328 aa, Unknown
  Bacterial polypetide isolated from the Sargasso Sea
MKKKKIEHYSDKEALDFHNSNKSGKIEIIPSKPMTTKRDLALAYSPGVAAPVKAISENPDAAYDYTSKGNLVAVISNGSAVLGMGNLGALASKPVMEGKAVLFKRFADINSIDIEIDSSNTNEIINSIKNIAGSFGGINLEDIAAPDCFVIEEKLKKILDIPVFHDDQHGTAIITTAALINALDISKKSIKKIKVVVNGAGASAIACTNLLKKTGIPKKNITMLDSKGVIYRGRKNVNQWKSAHAIDTKKRTLSEAIDGADVFLGLSSKSILSKKMVKKMSKNPIIFACANPDPEITPEEVEEVRSDAIIATGRSDYPNQVNNLIGFP

SEQ ID NO: 82454 - protein, 390 aa, Unknown
  Bacterial polypetide isolated from the Sargasso Sea
MESSNTMTSRNFSIETIGIVGTGAMGRGIAQIAALAGLAVRLYDTNPAAIGAARDYLAETFAKLTAKGKLDQARSLAALANVSGAQVIGDLADCDLIVEAIVEKLDVKQALFRELETVVSGRCVLASNTSSLSITAIAAGCTNPSRVAGYHFFNPVPLMKVVEVIDGLRSDPAVGDALMDLARRMGHTPVRAKDMPGFIVNHAGRGMNTEGLRVAGEGVASFADIDRIMREQAGFRLGPFELLDLTALDVSHPVMESIYHQFYEEPRFTPSPITGTRLAGGLIGRKTGEGFYRYEDGKQQVPAEAPAPTELPYSVWVSKRYPQAHEAVVQLIAKAGVKLDEGATPAADSLIVVTPFGHDATTAAVEEALDATRVVAIDTLFPLAIAPQRA

SEQ ID NO: 82455 - protein, 227 aa, Unknown
  Bacterial polypetide isolated from the Sargasso Sea
MSDRLKNKVGLISGAAQGLGKEMAKAMISQGADIIITDINEGALEKTSKELSCKYFLLDVTKEDQWKDVIKKIKEDFGSLNILVNNAGIAGGGDVENTDLESWHQVHSVNLDSVFLGCKYSLPLMRDSGNGSIINISSMSGIVASHNTSAYNSSKAAVRHLSKSVALHCAKSTNLVRCNSIHPVFTRTAMVQSMIDSLPDRNIEEKLVKQIPIRKLAEPIDIAKCCS

SEQ ID NO: 82456 - protein, 205 aa, Unknown
  Bacterial polypetide isolated from the Sargasso Sea
MRLKKKVVKPFFIKQDVVSTEDWKNVIDVSISEFSKIDILVNNAGIALIGPFEEFSEDQWDQQINVNLKSVFLGCKAVIPEMKKNNSGSIINLSSIAGLVGLQGCAAYNASKGGVRLLTKSIAIEYGPNKIRCNSIHPGFMATNMNDPKKIEERGRDFEAIIETIPLKSMGTAEDIANCALYLASDESSYVTGSEYVVDGGWTTR

SEQ ID NO: 82457 - protein, 222 aa, Unknown
  Bacterial polypetide isolated from the Sargasso Sea
ICDADTNNLVQSLKENPGWNGIQCDVSNENQVDQLFEEMKDSFGDLEILVNNAGIAGPTAPVEEIDPDEWRRSVEVNINGAFYCTRLATPLLKNSQKASIINISSVAGRLGFARRLPYASTKWAMIGFTESLAKELGPSGIRVNALLPGIVEGPRIEGVFQARAESEGVPYEEVRDRVLNNVSMKRMVSAGDVAEMAVFLCSEAGKNISGQSISVCGNVENL

SEQ ID NO: 82458 - protein, 741 aa, Unknown
  Bacterial polypetide isolated from the Sargasso Sea
MTKKDREEHFSEKEALVFHTQGKPGKIEIKATKPLETQRDLSLAYSPGVAAPVNAIAEDISTVYDYTSKGNIVAVISNGTAILGLGNLGAHASKPVMEGKSVLFKRFSDIDSIDLEIDTEDAEKFINSVKYLGPSFGGINLEDIKAPECFIIEDSLREQMDIPIFHDDQHGTAIISAAALINAMDLTGKKINEAKIVVNGAGAAGIACLELLKAMGMPNENAILCDTKGVIHTERKENMNQWKSAHAVKTKCRTLEDALNGADIFFGLSIGNIISQKMVLSMAEKPIIFAMANPEPEILPEKIKECRKDAIIATGRSDYPNQVNNVLGFPYIFRGALDVRAKTINLEMKIAAAKAIADLAKEDVPDEVANAYPGKRPQYGPDYIIPSPFDPRLISKVPPAVARAAMDTGVARKAIVDIENYSNELSARLNPSAGLLQKVFQEVKENPKRVIFTEGEEEDMIRAAVIFLNNRMGTPILIGRDDVIKDKMQEMGLDFFDQMEIHSTRNKSEHDRYAEHIYHRLQRKGFLKKDCLDLLNRERNVFAACMVSLKEADAMVCGLTRSYAASLESIEYVLDPIPNKTILGLTVMLCNGRTIFVADSNVHDMPNASQLANITQESAEVVREIFGIEPRAALVSYSNFGKPFTERSVYMRDAKKILDERNVNFEYDGEMGANTALNENLMSLYPFCKLTGPANLLIMPAIHSASISTKMLQELGGGTLVGPYLVGFKESIQIAPLGANV

SEQ ID NO: 82459 - protein, 431 aa, Unknown
  Bacterial polypetide isolated from the Sargasso Sea
MDELTARVDESVQSRAKLAQVMVDKIFSFSELGQQEIETSAYVTGMLEENGFSIERGVAGIPTAWVARWGSGRPVISFGSDIDGIPKANQKPGVAYADPLISGAPGHGEGHNSGQAVNVVAALSLKDLMESEGIQGTLVLWPGVAEEQLASKAWYVRDGVLDDVDVTLFTHVSSNLGVSWGQAGGTGLVSVEFSFEGEAAHGAGAPWRGRSALDAVELMNVAWNFKREHLRPDQRSHYVITDGGDQPNVVPVSASVWYYFREMDYEDIQRNYDTAVRIAEGAAMMTDTEMSYRVRGAAWPRHFNRTVAETMYEHIEEVGLPEWTEDDHAFAEAVQQSVGGIPSGMPMSLGPIGVPGPRRSGGSDDIGDIAWTMPTVTMRFPSNVPGLPGHHWSSAMAMATPIAHKGAVAGARVMARTALQLFMMPELVDEA

SEQ ID NO: 82460 - protein, 181 aa, Unknown
  Bacterial polypetide isolated from the Sargasso Sea
MSLTNFSRSISGHIAVVTGAASGMGEATAKLFASEGALVAAIDVNEEGLNRVVDEISSEGKSAKGWILDLSDGGEIKRVFDEIAEHFGGIDILVNNAGISIPSPIDDDNYESNWSRSMDILITAQTKTIRASLPYIRKSDNPRIVNIASTEGFGATKFGSPYTAAKHAVIGLTRSLAVELG

SEQ ID NO: 82461 - protein, 265 aa, Unknown
  Bacterial polypetide isolated from the Sargasso Sea
MEINNLFNIKGKIAVVTGGSRGIGEMITSGFLANGVKVYISARKAPALIEKAKELTDKFGQECIAVPCDLSSIEGMEEFTDLISQKEEGVDFLVNNAGAAWGEPYETFSEKGWDKVMDLNVKSMFFLTQKMTNLLLERASLEDPSRVINIGSIDGLNVPALETFSYSASKAAVHHLTRVMAAKLVKENILVNAIAPGPYPSAMLGSAVNHDYSEIEKRNPRKRVGSAEDIAGLAIFLCSRAGAYTVGETITSDGGIVKTASHNLS

SEQ ID NO: 82462 - protein, 310 aa, Unknown
  Bacterial polypetide isolated from the Sargasso Sea
MSKLVEGKVALVTGAAGGIGREHALMLASHGAKVVVNDLGGDRHGVGEDLSAAQKVVEEIKSFGGEAVVNGGNVADFQAAKEMIDQAVDTFGDLNIVINNAGILRDRMLFSLSEDDWDAIMSVHLKGTFGPSHHAAVYWRNQAKAGEETYGRIINTSSPSGIYGNIGQSNYGTAKAGIAAFTVITAMELAKYNVTVNALVPAALSRMTEDLVGMDGLTDEQKEAMSPRWQAVTATWLCSEEASNVTGRLFDIRGNQLGIAEGWTLGPSGTQPDDPTDLGPLMEELMSEATLNANMGGKPQGGNGRPENEI

SEQ ID NO: 82463 - protein, 506 aa, Unknown
  Bacterial polypetide isolated from the Sargasso Sea
MTQHHTNALVKGLNQQSLAYMPSHVDTPSYDRRKVKAGIVHIGVGGFHRAHQAMYINELLKTPGSEQWGICGVGLLEANRVLRDVLKQQDYLYTLTVRHPNGTIDNTVIGSMIDFLFAPENKQAVINKLAHPDTKIVSLTITEGGYNFNPVTGEFDYANPDIINDINNPNDPITAFGYIAAALKLRKEQGLNAFTVQSCDNIQHNGNVTRKMLLAFAAEQDAALSEWIAANVMFPNAMVDRITPVSKQSDIEYVVDAYGVSDEWPITCESFTQWVIEDSFCDGRPNWDNAGAQFVKDVTPFETMKIRLLNAGHSVLGLLGSVHGYGTIDETVSDPLFAKYLRAFMDKEVTPNLEQLEGIDLEIYKDTLIERFANPNIKDSLSRICSESAAKLPKFLIATINENLAQGRDVSLATLVIAAWCFYSDKGEDEQGNTLEVIDAMQSELYKAAAKTTTDNLAFLSLTSLFGDLNTQSAFTSHYKNNVDALYAPASKIKAIMKNVLEPKGN

SEQ ID NO: 82464 - protein, 304 aa, Unknown
  Bacterial polypetide isolated from the Sargasso Sea
MITIIGAGKVGGDAALFSALRRLDDEILLLDIAEGLPQGEAMDLNHMLSEQGIDVNVKGSNNYEDMKGSKIVVVVAGAGRKPGMTRMDLLKINAGVVKDVVGNIKKFADDAMIIPVTNPLDPMAQIAYKTSGFDRSRVFGMGGMLDLSRFKQFIHEATGYSRESTKALVIGEHGENMLPLTRFATVSGIPLPTLLPKEKLDEIFTATKGVAAEVIKLKGATVHAPGNAISAMIESVVQDKKQVIPVSTNLDGEYGQKDVSIGVPAVVGKNGVEKILELELNDEEKEWFNKGVDSVKNALSGVEF

SEQ ID NO: 82465 - protein, 253 aa, Unknown
  Bacterial polypetide isolated from the Sargasso Sea
MNSHSDNILKNEITLVTGASRGIGAGIAKLFGESGSYIIGTATTQEGADAITQRVNNGVSKGEGVVLDVSNSEDVNRIIKEMKERDLLPSILINNAGISLESLLMRIKDDDWKKIIDTNLSSAFYLCKAAVSGMMKNRKGRIINIGSVVGSIGAIGNAHYSASKAALLGFTKSLALEVGSRGITVNNIAPGYITTDMTKDIKSELSEALMNKIPMNRFGSPEDVAKVALFLASESGSYITGQTIHVNGGMHME

SEQ ID NO: 82466 - protein, 246 aa, Unknown
  Bacterial polypetide isolated from the Sargasso Sea
MNKIDLKDKVAVVTGGAQGFGLAIVEKFLASDAKVIIWDKDKEMMSSLNLGDNVHTVEVDVTNFDSVTKATEQSLKIHNSIDILVNNAGIAGPSFKTWEYPIDEWQKVIDIDLSGVFYCCKSVVPHMIEKNYGKIVNIASIAGKEGNPNAMPYSAAKAGVIALTKSLGKELADKNIAINCVTPAAAKTRIFDQISQEHIDYMLSKIPRNRFVKVEELASLVAWMSSDENSYTTAGVFDLSGGRATY

SEQ ID NO: 82467 - protein, 265 aa, Unknown
  Bacterial polypetide isolated from the Sargasso Sea
MEITSLFNISGKVAVVTGGSRGIGEMITAGFLANGVKVYISARKAPALIEKARELSEKYNQECIPVPCDLSSMDGIDEFVNQITEKEDAIDFLVNNAGAAWGEPLESFSEKGWDKVMDLNVKSIFFLTQKFKNLLSKNASDDDPSRVINIGSIDGLNVPSMETYPYGASKAAVHHLTRVLAAKLVKENILVNAIAPGPYPSDMLGPAVGYDYSEIAKRNPRKRVGTPEDMAGLAIFLCSRAGAYTVGETITSDGGIVKTANHDLS

SEQ ID NO: 82468 - protein, 256 aa, Unknown
  Bacterial polypetide isolated from the Sargasso Sea
MELKDKVALVTGGASGLGQATVEAYVAKEAKAVILDINEDKAKEIINNLGEDNVMFISTDIMKEDPVIEAVNQIKEKFGGLHIAVNCAGTGYPGRILGKEAPHPLDAFQFIVNLNLVGTFNVMRIAAELMDKNEPDQKGEKGVIINTASIAGIEGQIGQSAYSASKAGVIGLTITAARDLARHAIRVCTIAPGIFDTPLMQLAPDKVREPLLESTQFPHRFGQPNEFADLAVHIVENTYLNGETIRLDSGMRMKPR

SEQ ID NO: 82469 - protein, 446 aa, Unknown
  Bacterial polypetide isolated from the Sargasso Sea
MTKKSKIDHYTDKEALEFHNKGKSGKIEIISSKSLTTKRDLSLAYSPGVAVPVLEISKNPDAAYEYTSKGNLVAVISNGSAILGLGNLGALASKPVMEGKAVLFKRFADIDAIDIEIDNKNSDEIIKCIKNIGNSFGGINLEDIAAPDCFVIEKKLRESLDIPIFHDDQHGTAIITSAALINALDLSNKKPSDVRIVINGAGASALACANLFKSIGIKTKNIIMLDRKGVIYKGRDNVDQFKSAYAVETKLRTLKDAIKGADVFLGLSAKNVLDKDMVKSMAKNPIIFACANPDPEIKPELVDEVRSDAIVATGRSDYPNQVNNLIGFPYIFRGALDVRAKEINEEMKIAAAKAIATLAREEVPDEVVNAYGGERPHYGKEYIIPSTFDPRLISRIPAAVAQAAMDSGVARKKIVDIESYKDQLTNRLDPSMSIMQGINAQVKKRP

SEQ ID NO: 82470 - protein, 315 aa, Unknown
  Bacterial polypetide isolated from the Sargasso Sea
MKIKAAVVRQKNGPFGLENVVLNEPAEDQILVRVVATGMCHTDLICRDQHYPVPLPMVFGHEGAGVVEKVGSSVKKVQPGDHVVLTFYTCGGCEACLSGDPTSCANSFVPNFMGRSVAGECTIHEHDGQEVGASFFGQSSFATYALSYERNTVKVTKDVPLELLGPLGCGIQTGAGSVLNALKPPAGSAIVIFGAGAVGLSAVMASAVAGCTKIIAVDVKENRLKLAREVGATHVIDATNTDPVEEIKKLCADGAPYVLETSGLPSVLSQAILSSSIGGEIGIVGAPPMGTTVPVDVNFLLFNRKLRGIIEGQAV

SEQ ID NO: 82471 - protein, 299 aa, Unknown
  Bacterial polypetide isolated from the Sargasso Sea
MTIRFDDKVAIVTGAGGGIGKQHALELAKRGAKVVVNDLGGSVDGSGASDAAEEVVELIKSDGGEAISNGASVTDINAVKNMVQQTMEEWGRIDILVNNAGILRDKSFHKVTLEDFELVMDVHFQGTLNCTHSVFPIMREQEYGRIIFTSSSSGVFGNFGQTNYGSAKMAMIGLMNTLKLEGQNKNIYTNSITPVAYTRMTEGLIPEDFGQNLQPEFITPAVIYLASEDAPNGAIMAAGAGVFSRIFIHETMGVSLGMGEDMTPENIQANWDKISDMKDARALQNGGEQTLKFFELINK

SEQ ID NO: 82472 - protein, 273 aa, Unknown
  Bacterial polypetide isolated from the Sargasso Sea
MKSILVTGSSSGIGAAICEHFSQIGWKVFGSVRNQNDGDKLTDICGENFTPLIFDVTNINAIKEAANLVESHLGKNGLNCLVNNAGINISGPMEYVESDEVRTVFEVNVMGPLNCSQSFLPMLKKSSSATIINISSMAGKIGLPMQGSYCGSKFALEGISESMRRELQIHNIKVVVIGPGAIESSIWDKFEKDEKEEQYKDTEYTSAIKRMDGTLKRARSIAIPAHRVAKKVEKIVYSKNPKPRYVVAGITDKMLNLIPRKILDKAFKRLLMK

SEQ ID NO: 82473 - protein, 299 aa, Unknown
  Bacterial polypetide isolated from the Sargasso Sea
MTIRFDDKVAIVTGAGGGIGKEHALELARRGAKVVVNDLGGTVDGSGASDAANEVVDLIKSEGGEAIANGASVTDLDAVKAMVNQAMDEWGRIDILVNNAGILRDKSFHKVTLEDFNLVMDVHFQGSLNCTHTVFPIMREQEYGRIVFTSSSSGVFGNFGQTNYGSAKMAMIGLMNTLKLEGQNKNVFTNSITPVAYTRMTEGLIPEDFGKNLQPEFVTPAVIYLASENAPNGVIMAAGAGVFSRIFIHETMGISLGMGEDMTPENIQASWDKISDMEDARALQNGGEQTLKFFELINK

SEQ ID NO: 82474 - protein, 561 aa, Unknown
  Bacterial polypetide isolated from the Sargasso Sea
MKKNKIEHYSDKEALEFHNSNKSGKIEINSSKPMTSKRDLALAYSPGVAAPVKEIYKNPEKAYDYTTKGNLVAVISNGSAILGLGNLGAIASKPVMEGKAVLFKRFADINAIDLEIDSKDPEEIVNSIKNFAISFGGINLEDIAAPECFIIEENLKKILDIPVFHDDQHGTAIITSAALINSIHITKKNISKVKVVVNGAGASAMACSDLFLKLGVKKNNLTMIDSKGVISFHRKGLNKWKLKYAKKTKDKTLSDALKNADIFLGLSSAGILKKEMIKQMAKNPIIFACANPDPEILPEEAYKIRKDAIIATGRSDYANQVNNLIGFPYIFRGALDVRAKTINEEMKISAAYAIAKLARERVPDEVAAAMGGDRPKYGKDYIIPSTFDPRLISVIPVAVAKAAIKSGVARKKIDNFNLYAEQLKHRLDPSVTILQGINSKVKKNQKTVVFADGEDENTLKAAIAFKSGGLGTPIIVAKENIVKQRLKEIGYGENLDIKIVNSTDKKLRAKYVKFLFKKMHREQGLLERDCDRMVRNDRVIWASCMVECGDADAMVTGNTRR

SEQ ID NO: 82475 - protein, 550 aa, Unknown
  Bacterial polypetide isolated from the Sargasso Sea
MTAKEVKFGDSARKRLAAGVNILANAVKTTLGPKGRNVVLDKSFGAPTVTKDGVSVAKEIELKDKFENMGAQMVKEVASQTSDVAGDGTTTATVVAQSILREGLKCVAAGMNPMDLKRGIDKAVTSAVENLQKMSKPCTDQGAIEQVGTISANSDTNIGSIIAEAMGKVGKEGVITVEEGQSLENELDVVEGMQFDRGYLSPYFATNQQNMSTELEDPFVLLYDKKISNIKDMLPILEGVAKAGKPLLIIAEDVEGEALATLVVNSIRGIVKVAAVKAPGFGDRRKAMLEDIAILTGGTVIAEEVGLSLEKADLSVLGSAKKVNVTKENTTIIDGGGKKDAIESRVNQIRAQIEEATSDYDKEKMQERVAKLAGGVAVIKVGAATEVEMKEKKARVEDALHATRAAVEEGVVPGGGVAMIRARASLDKLTGDNPDQDQGIQIARNAMQEPLKQIVSNAGLEGSVILAKVEEGKDSFGYNAASSEYGDMLKMGILDPTKVTRSALQNAASIAGLMITTECMVTELAKEDDNAPAAPAMPDMGGMGGMGMGM

SEQ ID NO: 82476 - protein, 214 aa, Unknown
  Bacterial polypetide isolated from the Sargasso Sea
MTDLKGKNIIVTGASGGIGYSIIEKLNKVGANILASGTKIEKLDELKNKFENIKTLRFDISQSDKIEAFIENATKELGGNLDCIINNAGITQDNLAIRMSLEEWQKVININLTSTFLMSKSAIKKMLKNKSGRIVNITSIVGHTGNLGQTNYAASKAGIIAMSKSLAIEYAKKNININCISPGFIKTSMTDKLDDKFKEAIVSKIPSARLGHHR

SEQ ID NO: 82477 - protein, 475 aa, Unknown
  Bacterial polypetide isolated from the Sargasso Sea
LDSKGVLYKGRDNLNQWKSEHAIETKDRTLDDAIKNADVFLGLSSKSILSKKMVKKMAKNPIIFACANPDPEITPEEVEEVRNDAIVATGRSDYPNQVNNLIGFPYIFRGALDVRAKTINEDMKIAAAKAIAELAREDVPDEVVAAMGGERPKYGREYIIPSTFDPRLICEIPTAVAKAAIKSGVARKKINDFEIYKEQLKQRLDPSVTIMQGINNQIKKNQKKIVFADGEDENTLKAAIAFKNSKFGIPILVGKKEKIKEQLKNIGYSENLDIEIVNSTDKQKREKYANYLFKKLQRKEGLLERDCDRMIRNDRVIWTSCMVSCGDADGAVTGNTRKYATSLEKINKVIDARPGEIMFGLNMIVNRGKTVFVGDTSVNEYPTSVQLAEIAISSARVVRLFGFDPKVAFVSHSTFGQPATSRTKHIRDAVEILQERKVDFQFDGDMQPDVALNEEYKELYSFSGIVGNANILIMP

SEQ ID NO: 82478 - protein, 256 aa, Unknown
  Bacterial polypetide isolated from the Sargasso Sea
MKLKDKVALVTGGASGLGQATVEAFVAKGAKVVILDINEDKANAIIKDLGDDNVLFISTDIMEEDPVVDAVNQIKDKFGALHIAVNCAGTGYPGRILGKEAPHPLDAFKFIINLNLVGTFNVMRIAAELMDKNDPGSKGEKGVIINTASIAGYEGQIGQSAYSASKAGVIGLTLTAARDLARHAVRVCTIAPGIFDTPLMQLAPDKVRDPLLESTQFPHRFGQPNEFADLAIHIVENAYLNGETIRLDSGMRMKPR

SEQ ID NO: 82479 - protein, 252 aa, Unknown
  Bacterial polypetide isolated from the Sargasso Sea
MGFNREIAIVTGAARGIGKATSLRFKKEGFTVIETDILPDSENKGVSEKPQMEPKGETMIHDVSDEASWSELVESVFKKYGRIDILVNNAGIGTLPDFEEEDESGWDEMLSVNAKSIWLGIKSVVSIMKSQQSGSIVNVSSIFGASGGFGKSSSYHASKGAVSALTRNAAIRYANDNIRINSVSPGFIKVLREEKTIEEAGDTMSQDIISRTPMGRWGDADEVAAAIYFLASSESSYITGAELFVDGGWMAT

SEQ ID NO: 82480 - protein, 244 aa, Unknown
  Bacterial polypetide isolated from the Sargasso Sea
MDKKIALITGASRGIGQNILKTLSKEYIVIGTGTSKDSVSKINQLILDLKADGKGLILNNDPNTLEDLFNEILSSYNKGPDILINNAGITSDTLFIKMSEDKWQSVIETNLNLTFKVTQTFIKQMIKSKYGKIVFITSVVGHTGNPGQTNYVASKSALIGFSKSLAIEVASRNINVNCISPGFISTDMTDNLNDNQKDAILTKVPMKKLGKPDDISNAVLFLVSDKSSYITGETIHVNGGLFMP

SEQ ID NO: 82481 - protein, 252 aa, Unknown
  Bacterial polypetide isolated from the Sargasso Sea
MSGKVTAITGGARGIGAQTARTLAAAGSAIAVLDVLTEPGEKLVAEINESGGRAAFWKMDVTQEENVQRVFGEIATRFGRLDALVNNAGIEGANLPTHEMTLQQWQKVIDVNVTGVFLCTKYAIPHMLTAGGGSIVNLSSMYGLVGGPDVPAYHASKGAVRLMAKTEAMLYAAQNIRANSVHPGFIRTPLLEEAFEKLGDPEQIFAHMKTLVPLAKIGDPQDIAAGILYLVSPAGRYVTGTELVIDGGYTAR

SEQ ID NO: 82482 - protein, 244 aa, Unknown
  Bacterial polypetide isolated from the Sargasso Sea
MTVDNKIVLITGANRGIGHSIMSAFINAGYIVVGTSRSNDGVKKINDTIGDPSKGCGIKMDVTSENDIQSANKLIRDKFGITTILINNAGVTKDNLLMRMSSEEWNDVIDTNLNSLYRVTKEFIREMMKQKTGRIINISSVVGMSGNAGQSNYSSSKSAIYGFTKSLAKEVASRNITVNAISPGFIETDMTDKLSDEQKQAIISAIPLSRMGSAKDIADITLFLASDSASYITGENINVNGGLY

SEQ ID NO: 82483 - protein, 252 aa, Unknown
  Bacterial polypetide isolated from the Sargasso Sea
MDLKDKVVVITGGAGGLGLAMAHNFAQAGAKLALIDVDQEKLERACADLGSATEVQGYALDITDEEDVVAGFAYILEDFGKINVLVNNAGILRDGMLVKAKDGKVTDRMSFDQFQSVINVNLTGTFLCGREAAAAMIESGQAGVIVNISSLAKAGNVGQSNYAASKAGVAAMSVGWAKELARYNIRSAAVAPGVIATEMTAAMKPEALERLEKLVPVGRLGQAEEIASTVRFIIENDYVNGRVFEVDGGIRL

SEQ ID NO: 82484 - protein, 299 aa, Unknown
  Bacterial polypetide isolated from the Sargasso Sea
MSIRFDDRVAIVTGAGGGIGKEHAIELARRGAKVVVNDLGGSVDGSGASDAANEVVDIIKSEGGEAIANGASVTDLDAVKEMTNQTMEKWGRIDILVNNAGILRDKSFHKVTLEDFNLVMDVHFQGSLNCTHTIFPIMREQEYGRIVFTSSSSGVFGNFGQTNYGSAKMAMVGLMNTLKIEGQSKNVFTNSITPVAYTRMTEGLIPEDFGKNLQPEFVTPAVIYLSSENAPNGAIMAAGAGVFSRIFIHETMGVSLGMGEDMTPENIEANWDKISDMTDARALQNGGEQTLKFFELINK

SEQ ID NO: 82485 - protein, 250 aa, Unknown
  Bacterial polypetide isolated from the Sargasso Sea
MANRLKGKVALITGGAAGFGKKTAETLKAEGAVVYISDINVEGGEKVAKDFNVNFLQQDVTNTDDWERVINEIKNKEGKLHILVNNAGIGYMGDVESTTNEAWDMVHKVDLDSVFYGCKYALPLMRDSGNGSIINISSISGIVAGHNFTAYNSAKAAVRHLSKSVALHCARTTDLVRCNSVHPVFARTEILEALLSDTSNDMLTKLERQIPVRKLAEVDDIANAILFLASDESKMITGTEIVIDGGLSAQ

SEQ ID NO: 82486 - protein, 346 aa, Unknown
  Bacterial polypetide isolated from the Sargasso Sea
MKALVYHGPGRKALEERPMPELQSPTDALVRVTRTTICGTDLHILKGDVPTCEPGRILGHEGVGIVEQVGAAVDALKPGDHVLISCISSCGRCEYCRRGLYSHCTTGGWILGNRIDGTQAEYVRIPHAQTSLYRIPPGADEEALVMLSDILPTGFECGVLNGKVQPGCSVAIVGAGPIGLAALLTAQFYSPARIIMIDPDNNRLDVAQRFGATDCIDGRAGDPVAEVMKLTDGVGVDCAIEAVGIPATFEMCTSLVAPGGVVANVGVHGVKADLHLEKLWDRNISITTRLVDTVSTPMLLKTVRAGRLDPKRLITHRFSLDDVERAYDTFGRAAQTHALKVIIEVG

SEQ ID NO: 82487 - protein, 368 aa, Unknown
  Bacterial polypetide isolated from the Sargasso Sea
MKTKAAIAWKAGAPLTIEEVDLEGPRAGEVLIEVKATGICHTDYYTLSGADPEGIFPAILGHEGAGVVVDVGPGVGTLRKGDHVIPLYTPECRECKFCLSRKTNLCQKIRATQGKGLMPDATSRFSLDGKPLFHYMGTSTFSNYIVVPEIAVAKVREDAPFDKICYIGCGVTTGVGAVVYSAKVEAGANVVVFGLGGIGLNVIQGAKMVGADKIIGVDINPKRVELAKKFGMTHFINPNEVENVVDHIVQLTDGGADYSLECVGNVKLMRQALECTHKGWGQSFIIGVAAAGEEISTRPFQLVTGREWKGSAFGGARGRTDVPKIVDWYMEGKINIDDLITHTLPLERINEGFDLMKAGESIRSVVLY

SEQ ID NO: 82488 - protein, 540 aa, Unknown
  Bacterial polypetide isolated from the Sargasso Sea
MTKKSKIDHYTDKEALEFHNKGKSGKIEIISSKSLTTKRDLSLAYSPGVAVPVMEISKNPDAAYEYTSKGNLVAVISNGSAILGLGNLGALASKPVMEGKAVLFKRFADIDAIDIEIDNKNSDEIIKCIQNIGNSFGGINLEDIAAPDCFIIERKLRETLDIPIFHDDQHGTAIITTAALINALDISKKKVSDVRIVVNGAGASAIACANLFKKIGIKKENIIMLDRKGVIYKGRDNIDQFKSAYAVDTKLRTLSEAIDGADIFLGLSAKNVLTKEMIKSMSKNPIIFACANPDPEIKPELVDEVRSDAIVATGRSDYPNQVNNLIGFPYIFRGALDVRAKEINDEMKIAAAKAIATLAREEVPDEVVNAYGGERPHYGKDYIIPSTFDPRLISRIPSAVAEAAIKSGVARKKIVDIEAYKDQLTNRLDPSMTIMQGINAQIKKRPKTVVFAEGEDQSMLKAAVAYKNSKLGIPILIGNEKRVKEQLKEIGLDENYKIKIVNSTDKDKREIYSKKLYSKLQRKGLLERDVDRLIRNDRII

SEQ ID NO: 82489 - protein, 246 aa, Unknown
  Bacterial polypetide isolated from the Sargasso Sea
MNRLQGKRALITGGSRGIGAAIAKRLAADGADVAITYEKSAERAQAVVAGIEALGRRAVAIQADSADPVAVRDAVDRAAEAFGGLDILVNNAGIFRAGALDDLTLDDIDATLNVNVRAVIVASQAAARHLGEGGRIVSTGSCLATRVPDAGMSLYAASKAALIGWTQGLARDLGSRGITVNIVHPGSTDTDMNPADGEHAGAQRSRMAIPQYGKAEDVAALVAFVVGPEGRSINGTGLTIDGGANA

SEQ ID NO: 82490 - protein, 165 aa, Unknown
  Bacterial polypetide isolated from the Sargasso Sea
MYLKKYNLKNKVALVTGAGKGLGKACAIALAEAGANLIIISRTKKDLDKVSKIIKKFKVKCKSYVCDVTNYNHIKSIINEQSRIDILINNAGNNIPEHFTKVKTRNMEYLVKVNTIATFNIAQLCALKMIKSKNRKKIGGAIINMSSQMGHVGGPIRSVYNMTKF

SEQ ID NO: 82491 - protein, 222 aa, Unknown
  Bacterial polypetide isolated from the Sargasso Sea
MSRNIALITGASRGLGKNAALALAKAGVDLIITYHSKADEAAAVVAEAQWLGRKAVAIQLDTGNVSSFTDFSAQLTAHLQQVWQRDQFNFLVNNAGFGAQAALADTTEQQFDALMNVHFKGVFFLTQQLLPQIADGGRILNFSSGLTRFALPGYGAYAAMKGAVEVFSRYLALESGARGIRVNTLAPGAIETDFGGGAVRDNATINQYIASQTALGRVGYQT

SEQ ID NO: 82492 - protein, 52 aa, Unknown
  Bacterial polypetide isolated from the Sargasso Sea
DKIQQGLKRAIPMKRLGVPEDYAGMVAFLASDDAGYITGQTISVSGGLTMHG

SEQ ID NO: 82493 - protein, 258 aa, Unknown
  Bacterial polypetide isolated from the Sargasso Sea
MKIVRAKFEGEIFYGELTEEGIIRYEGSPLVVWEPTEEKYNIDEIQLLAPVLPSKVTAVAKNYEKHAVELGVHNYTAPKNPVFFNKPSTSVIGTGESIIYPPIGQHVDHEAELAVVIGKLSKNLTKDNWMDSVLGFTIANDLSERVLQGQDGTFNGNFTRAKSFDTFCPLGPVIQTNFEQNPELGIKCFVNDELKQDGNTKDMIFSVGEILEFVSSIMTLLPGDVVLTGTPEGVSKVKPGDEIKIEIETIGTLINPVK

SEQ ID NO: 82494 - protein, 172 aa, Unknown
  Bacterial polypetide isolated from the Sargasso Sea
MEHPLHALVNNAGISPKGNKNKRLDTINTPLECWQQVFQVNFFAPILLAKNLKSSLQKEAGSIVNVTSIAGSRVHEFAGSAYATSKAALSALTREMAADFGPSGIRVNAIAPGEIKTDIITPESEELIVPKIPLGRFGTPEEVAQTIYFLCSDMSHYLNGSEIHINGGQHVR

SEQ ID NO: 82495 - protein, 762 aa, Unknown
  Bacterial polypetide isolated from the Sargasso Sea
MKKNKIEHYSDKEALEFHNSNKSGKIEINSSKPMTSKRDLALAYSPGVAAPVKEIFKNPELAYEYTTKGNLVAVISNGSAILGLGNLGAIASKPVMEGKAVLFKRFADIDAIDLEIDSKDPTEIINSIKNFAVSFGGINLEDIAAPECFIIEENLKKILDIPVFHDDQHGTAIITSAALINSIHITKKKISKIKVVVNGAGASAMACSDLFLKLGVKKQNLTMIDSKGVINLNRIGLNKWKQKYAKKTKDKNLNDALKNADVFLGLSSAGILKKEMIKKMAKNPIIFACANPDPEILPEEAYKIRKDAIIATGRSDYANQVNNLIGFPYIFRGALDVRAKTINEEMKISAANAIAKLARERVPDEVAAAMGGDRPKYGKDYIIPSTFDPRLISVIPVAVAKAAIKSGVARRKIENFSLYSEQLKQRLDPSVTILQGINSKIKKNQKTVVFADGEDENTLKAAIAFKNSGLGTPIIVAKENVVKERLKEIGYGENLDIRIVNSTNKEMRDKYVKLLFKKMHRDQGLLERDCDRMVRTDRVIWASCMVECGDADAMVTGNTRRYSQSLEKIKKVIPARLGEIMFGLNMVVSKGKTVFIGDTSVNEYPTSEELADIAISSARVVRLFGFDPKVAFLSHSTFGQPITSRTKHIRDAVEILKKRKVDFKFDGDMQPDVALSEEYSDLYPFSEIVGKANILIMPGQHSAAISNKIMKTLGGAKIVGPLLIGLAQPIEIAPLRSSTSEILDLASVAAYSAGVINYKKTK

SEQ ID NO: 82496 - protein, 239 aa, Unknown
  Bacterial polypetide isolated from the Sargasso Sea
MKNVLITGATGGIGSSILKLFYKNNYNLCVTGTNMDKLNEIAVNYKGKVKCISCNLNDALEIENLVQQSNEYYGSTDILINNAGITKDNLFLRMKDEEWNDVININLNSNFKLTKQILKGMIKSRWGRIINISSDAAKIGNAGQANYVASKSAIEGLTRTLANEVASRGITVNCVSPGFVDTDILETIDKKVLQNMVEKIPLGRMGRIDEIASAVYFLSSEESAYITGQVLHVNGGLTM

SEQ ID NO: 82497 - protein, 177 aa, Unknown
  Bacterial polypetide isolated from the Sargasso Sea
ETTINTYGKIDILVNNAGINPVFDRLENADEKLFNKILDINTKSPFKLSNIVFKYMKENKAGSIINISSLEGHKPDKGLGVYSISKAAISMLTKSQAKQWGKYGVRSNAICPGLIRTKLSSVLWQNEEMLEAWLGDLPIRRPGDPDEISGMALYLASEASSYTTGETFNIDGGYMIN

SEQ ID NO: 82498 - protein, 251 aa, Unknown
  Bacterial polypetide isolated from the Sargasso Sea
MSERLKDKVALITGGAQGLGKEMAKSMLAESAHVIIADINEAKLVEAAKELSCSHLLLDVTKEEQWQSVIKQITDDTGSLNILVNNAGIGGGGDVEMTDSETWDLVHRVNLDSVFLGCKYALPLMRESGNGSIINISSMSGIVASHNTAAYNSSKAAVRHLSKSVALHCAKSTNLVRCNSIHPVFTRTAMVQSMIDSAPERDIENKLIQQIPIRKLAEPIDIANAAVFLASDESSFITGTELLVDGGLSAT

SEQ ID NO: 82499 - protein, 251 aa, Unknown
  Bacterial polypetide isolated from the Sargasso Sea
MTERLKGKVALITGAAQGLGKEMANSMIEEGAVVFISDINESELKKTCNELSCQGINLDVTKSEDWISAIEFIKNEAGSLNILVNNAGIGNGGDIESTDIETWKLVHSVNLDSVFLGCKHAIELMRDSGDGSIINISSMSGIVASHNTSAYNSSKAAVRHLSKSIALHCAKTTNLVRCNSIHPVFTRTAMVQTMIDAAPERNIEQKLIQQIPIRKLAEPKDIANAAVFLASDESSFITGTELLIDGGLSAT

SEQ ID NO: 82500 - protein, 251 aa, Unknown
  Bacterial polypetide isolated from the Sargasso Sea
MTERLKGKVALITGAAQGLGKEMANSMIEEGAEVFISDINDSELKKTCNELSCQGINLDVTMSEDWISAIEFIKNEAGSLNILVNNAGIGNGGDIESTDIETWKLVHSVNLDSVFLGCKHAIELMRDSGDGSIINISSMSGIVASHNTSAYNSSKAAVRHLSKSIALHCAKTTNLVRCNSIHPVFTRTAMVQTMIDAAPERNIEQKLIQQIPIRKLAEPKDIANAAVFLASDESSFITGTELLIDGGLSAT

SEQ ID NO: 82501 - protein, 169 aa, Unknown
  Bacterial polypetide isolated from the Sargasso Sea
TPEALVNNAGILDLQTRVVGMNAERIQRIFAVKVTGSFLCAREAVKRRSTKFGGKCGSIVNLSSGAAKYGSPGEYVDYAASKAAIDTLTIGLAKEVAEEGIRVNAVRPGFIDTEIHQSGGEPDRMERVRPLVPMKRVGQAEEVADAIMWLLSDKASYTTGTILDVSGGR

SEQ ID NO: 82502 - protein, 41 aa, Unknown
  Bacterial polypetide isolated from the Sargasso Sea
MKDLFSIEGKVALVTGGSRGIGSMIAAGFLASGAKVYISSR

SEQ ID NO: 82503 - protein, 586 aa, Unknown
  Bacterial polypetide isolated from the Sargasso Sea
MLFHSEGKPGKIEIKATKPLETQRDLSLAYSPGVASPVNAIAENIDTIFDYTSKGNLIGVISNGTAILGLGNLGAHASKPVMEGKAVLFKRFADIDSIDLEIDTEDADEFINSVKYLGPTFGGINLEDIKAPECFIIEDTLRELMDIPIFHDDQHGTAIISAAALINALDLVGKDLRTAKIVVNGAGAAGIACLELLKAMGMPNENAILCDTKGVIHTEREGNLNQWKSAHANKTNLRTLEEALVESDIFFGLSKGGIVSQKMVESMNDKPIIFAMANPEPEILPEIVREVRPDAIIATGRSDYPNQVNNVLGFPYIFRGALDVRATTINLEMKIAAAKAIASLAKEDVPDEVANAYPGKRPQYGPDYIIPSTFDPRLISKVPPAVAKAAMDSGVARKAIVDMESYTNRLSARLNPSAGLLQSIFQDVKENPKRVIFAEGEEEDMIRAAAIFLNNGMGTPILIGREEIIKDKMNSIGLDFFDQMEIHNTRNKSSHDRYAEHIYQRLQRKGFLKKDCLDLLKKERNVFGACMVSLKDADAMICGLNRSYALSLESIEYVLDPIPNKTILGLTVMLCNGRTIFVADTN

SEQ ID NO: 82504 - protein, 458 aa, Unknown
  Bacterial polypetide isolated from the Sargasso Sea
KLRNDAIVATGRSDYPNQVNNLIGFPYIFRGALDVRSKTINEEMKVAAANAIAKLAREDVPDEVVAAMGGERPHYGKDYIIPSTFDPRLISVIPAAVAKAAIDSGVARKNIDDFDAYKDQLKQRLDPTVTIMQGINSFIKKNQKKIVFADGEDENTLKAAIAFKNSKLGIPILVGKESKIKEQIKNIGYSENFDIEIVNSKDEEKRKRYVKHLFEKLQREQGLLERDCDRMIRNDRVVWATSMVACGDADGAVTGNTRRFGASFEKIKQVVDVRKGEIMFGLNMIVHKGRTIFVGDTSVHEYPTSEQMAEMAISTARVVRLFGFDPKVAFVSHSTFGQPLTSRTKHIRNAVEILKERKVDFEFDGDMQPDVALNPEYKELYPFAKIVGKANILIMPGQHSAAISYKLMKTIGETKVIGPLLIGLGLPIEIAPLRSSTSEILNLASIAAYSSQVIDYKK

SEQ ID NO: 82505 - protein, 283 aa, Unknown
  Bacterial polypetide isolated from the Sargasso Sea
MVKTIAIIGAGGAMGKWFSEYFSKKGFEVTGFDNTNPVAKNIKKANSLISAILNVDYVLLSTPTKKTPEIIRLIAKEMKRESYLIDITSQKSKTATALGKIPAKVSPICIHPMFGPGAKNLKNHNIVLVPIKDGKKELNVAKTLFPDGNFVTIDSTEHDKKIAMILGLTHLINIAFANILAKDDKISLTEKMAGTTFKAQKILAESIMTESPELIETIISNPEIRKVAEEFWKDVGRLLASAQEGKGEEIIDYINTNKEKISQNVDLEKSYKKLTKMVNTIDK

SEQ ID NO: 82506 - protein, 254 aa, Unknown
  Bacterial polypetide isolated from the Sargasso Sea
MGRLTDKVAIVTGGASNPGLGHSTIHKFAEEGAKIVVTDIDVEGGEKTVSEVKEKGGKAIFIKQDVVSTEDWKNVVDASLSEFSKIDILVNNAGIALIGPFEEFSEDQWDQQINVNLKSVFLGCKAVIPEMKKNNSGSIINLSSIAGLVGLQGCAAYNASKGGVRLLTKSIAIEYGPNKIRCNSIHPGFMATNMNDPKKIAERGRDFEAIIETIPLKSMGTAEDIANCALYLASDESSYVTGSEYVVDGGWTTR

SEQ ID NO: 82507 - protein, 263 aa, Unknown
  Bacterial polypetide isolated from the Sargasso Sea
NDLGGSVDGSGASDAAEEVVELIKSDGGEAISNGASVTDINAVKNMVQQTMEEWGRIDILVNNAGILRDKSFHKVTLEDFELVMDVHFQGTLNCTHSVFPIMREQEYGRIIFTSSSSGVFGNFGQTNYGSAKMAMIGLMNTLKLEGQNKNIYTNSITPVAYTRMTEGLIPEDFGQNLQPEFITPAVIYLASEDAPNGAIMAAGAGVFSRIFIHETMGVSLGMGEDMTPENIQANWDKISDMKDARALQNGGEQTLKFFELINK

SEQ ID NO: 82508 - protein, 259 aa, Unknown
  Bacterial polypetide isolated from the Sargasso Sea
MTGRVEGKMSFVTGAAQGLGEAIAYMLAKEGSKVVLADINEEKLTGVEDRINSDFPGKAFSVKLDVTSEDQWKETLNEAEKLMGGINILVNNAGIGGGSTVEETDYEIFKQVMAVDTDSVFLGCKYAIPIMKNYSPGSIINTSSISGLIAGHNMAAYNTAKAGVWMLTKSVALHCARSAYNIRCNSIHPTFIDTPILDAMVERSSSEKEQVMMKLARQVPLGKVGEPDDVAYTVLFLASDESKFITGAEIKIDGGISAM

SEQ ID NO: 82509 - protein, 214 aa, Unknown
  Bacterial polypetide isolated from the Sargasso Sea
MESKKVIVTGGNRGIGKGIVLSLLEHSYHVLATSRDSKKFDISHPNLKLADLDVCDDESVLKFQEIVNKYDPDILINNAGVTKDSLFLRMTEDDWNEVIDTNLNSVFRITKLVVKAMLKKKWGRIINISSISGSMGNPGQTNYSASKAGVDAFTRSLAKELGSRNITVNSIAPGFIQTDMTESIINEDLVMKIPLKRVGNVDDVASMGKLLASE

SEQ ID NO: 82510 - protein, 299 aa, Unknown
  Bacterial polypetide isolated from the Sargasso Sea
MTIRFDDKVAIVTGAGGGIGKEHALELARRGAKVVVNDLGGTVDGSGASDAANEVVDLIKSEGGEAIANGASVTDLDAVKAMVNQAMDEWGRIDILVNNAGILRDKSFHKVTLEDFNLVMDVHFQGSLNCTHTVFPIMREQEYGRIIFTSSSSGVFGNFGQTNYGSAKMAMIGLMNTLKLEGQNKNVFTNSITPVAYTRMTEGLIPEDFGKNLQPEFVTPAVIYLASENAPNGVIMAAGAGVFSRIFIHETMGISLGMGEDMTPENIQASWDKISDMEDARALQNGGEQTLKFFELINK

SEQ ID NO: 82511 - protein, 386 aa, Unknown
  Bacterial polypetide isolated from the Sargasso Sea
IEEVRDDAIVATGRSDYPNQVNNLIGFPYIFRGALDVRAKTINEEMKIAAANAIATLAREDVPDEVVAAMGGERPKYGKNYIIPSTFDPRLISEIPLAVAKAAIKSGVARRKIDDFEIYRDQLKQRLDPSVTIMQGINSQIKKTQKKIVFADGEDENTLKAAIAFKNSKLGIPILVGKKEKIKEQLKNIGYSENLNIEITNSNDKEKREKYVNFLFEKLQREQGLLQRDCDRMVRNDRVIWASCMVSCGDADGAVTGNTRRFGTSFQKIIKVIDSRPGEIMFGLNMVVNKGKTVFIGDTTVHEYPTSEQLAQIAVSAARVVRLFGFDPKVAFVSHSTFGQPITSRTKHIRNAVEILKSRNVDFKFDGDIKPDVALDEAYKELFLFR

SEQ ID NO: 82512 - protein, 249 aa, Unknown
  Bacterial polypetide isolated from the Sargasso Sea
MTNFKNKVALVTGGSSGMGAATANQLANKGAKVFCAQRTKSLHEDIIIDLKDIDASKNIISELSKKTDKLDILINNAGVMKENTVEETSLDEWNEHLTINLTVPFLLIKHSMYLLKKSRGSIVNVGSIEGKGNNPGHSAYGASKAGLHGLTRAVAVDHGKDGVRCNAVAPGWIDTELNKEFIKNLGNENNFHERLKNIHPIGRTGNPEEVANLICWLSSDDASFVTGQVWAIDGGRMIKLSLPENKYND

SEQ ID NO: 82513 - protein, 138 aa, Unknown
  Bacterial polypetide isolated from the Sargasso Sea
MSNRFEGRVAIVTGAGNGLGRAHALGLAARGVKVMVNDLGGARDGRDASTSPAEAVVQEIRAAGGEAMANGANVARFEEVQAMIAAAQNAWGRVDILVNNAGILCDATFARLSLDDFWAVMDVHVRGTVNCTKAVWDL

SEQ ID NO: 82514 - protein, 287 aa, Unknown
  Bacterial polypetide isolated from the Sargasso Sea
VRSSTRRSAGRGNRRAPQPQAASREESAAPRTRTSAIDRAVQILDALQQANRPATAYEVARMVGAPLSTVYSIINDLVEKNLLARRMDGTIWLGSRLYGYGLTYASSLDYLAVAHEEMQRLSAEVEETVQVCGLEDGMMVVQQMAEGPGHFRVTSRVGSRVPLNWTASGRLLVGHLPDAERVAFFAQHAQSSPTGRAETRPQVLAQIAREALEARLSIQIGESDASVACLAAPVLDNTGACVFTISIVMPEAKAALGTERFAQAVQAVAARIEARLGWRHREQEPAA

SEQ ID NO: 82515 - protein, 255 aa, Unknown
  Bacterial polypetide isolated from the Sargasso Sea
MTQALKGKLALVTGASRGIGAAIAARLAQDGASVIVHYASSAARAEAVVKAIRDAGGEAEAVGANLSQPEGIKNLIDALNGAFGGRFEGRLDILVNNAGTVEYGPFLDSSDTSYDTHFNLNVRAPIELAKDAAARMVAAGWGRIINIGSAFGEAAPLPGVTLYIASKFAIRGFTRGLSRELGKYGVTVNAVQPGPIDTELAPQPGTEDHATMTKLASVGRFGKPAEIAAAVAYLASPEAGYTTGESLTVDGGWIA

SEQ ID NO: 82516 - protein, 115 aa, Unknown
  Bacterial polypetide isolated from the Sargasso Sea
MEITSLFNISGKVAVVTGGSRGIGEMITAGFLANGVKVYISARKAPALIEKARELSEKYNQECIPVPCDLSSMDGIDEFVNQITEKEDAIDFLVNNAGAAWGEPLESFSEKGWDK

SEQ ID NO: 82517 - protein, 302 aa, Unknown
  Bacterial polypetide isolated from the Sargasso Sea
MLSINKKITLLCCDNIRENGKMLQDCLKQYLSASKEYELLEWIEENVSFPSCVVDRITPRTPEFLKSDIMEKFNLKENCGVIAEPFIQWIVEDNFINERPKLEDVGVKFVKDVFPYEEAKIRILNGAHLALSYFGALKGYTTYDEAISDKNLEQFFFEIQQKEILPALAHKPFDLEEYMITIYERFKNKNIADKLERIAMDGVGKFPIFILPTIHNCFEKNIIPENCIDAIASWYVFMLKIKDKKLSFEYYEPSWEWIKYFLEENKIVEFTNCVELWGNTPKQFSSFSEILEKKINFLKDIY

SEQ ID NO: 82518 - protein, 259 aa, Unknown
  Bacterial polypetide isolated from the Sargasso Sea
MDLNLAGKKALITGASKGIGLAIAKRFAIEGCSVILVARREDDLKQAQRDILKTDQSVGVDYRAADLSKTSEVNALAKEQAEIDILVNNAGAIPAGNINRVDEVTWREAWDLKLFGYISFCREIYASMSARRDEPGQRVILNIIGAGGERPSSGYIAGAGANAGLMAITRAMGGVSRKHGIRVLGINPGQIVTERLETMQRVLAEEKFGDAERWKEVWDPNYPPGRVEHIADASAFLVSDLSSNTTGTIITIDGGHCAR

SEQ ID NO: 82519 - protein, 123 aa, Unknown
  Bacterial polypetide isolated from the Sargasso Sea
MLTNKTAIITGSNRGIGKAILEIFLKNNATVWACSRNYNENDYKDLINTYVNKINFISFDLENIEEVKKSANIIIKENDKIDILVNNAGIIHSSLFQMTNIDDMKNLFEINYFSQLAFTQIII

SEQ ID NO: 82520 - protein, 308 aa, Unknown
  Bacterial polypetide isolated from the Sargasso Sea
MGGEHEKAVIRFHDNRIKKDHWRGARQAAEDTGNARPAAMGRRLDWHEETRMTNALERFRLDGRRALITGSGRGIGLTLARGLAEAGAAIVINDRNEEKAATLVQHLREEGFTADYAVFDVAEHAQVRAAIDDFEARVGAIDILVNNAGIQRRAPLDAFEPDDWHALMRVNLDGVFNVAQAVARHMIARGRGKIINICSVQSELARPTIAPYAATKGAVRMLTKGMCADWARHGIQANGLAPGYFETELNRALVDDAAFSDWLCKRTPAGRWGRVDELCGAAIFLASAASDFVNGQTLFVDGGLTSAV

SEQ ID NO: 82521 - protein, 236 aa, Unknown
  Bacterial polypetide isolated from the Sargasso Sea
VALITGGRSGIGLACAQKLSQSGYEVITAQRTPADTFHSIEADFSDPDTPKRVIQQVIDRHGRLDALVNNAGIMLEDTVEGMSLADWNRTLNINLTAPFLLIKYALPHLQGEGAIVNIGSIEGLGSNPQHAAYCASKAGLHALTRAVAVDAGPQGIRCNAIAPGWIDTELNEEFIESMADPKTFRKQIGGIHPLRRTGKPEEVAALVAWLVSEEASFVTGQIYTVDGGRLAQLPLP

SEQ ID NO: 82522 - protein, 222 aa, Unknown
  Bacterial polypetide isolated from the Sargasso Sea
FAEEGAKLILADINKDLLDKVSKDLDQDFFYVDVASSSSMQSLSEYILNKYGRIDIMVNNAGITHLPKPLENVTEEEFDKVFRVNSKPVFFCGKFFVPHMKKEKKGSILNISSTAGLSPRPNLNWYNATKGWMITATKAMAVELAPYNVRVNSLAPVAGETPLLKSFLGEDTPERRNAFLSTIPIGRFSTPKDLGNAACFLCSDEASMITGSILEVDGGRCI

SEQ ID NO: 82523 - protein, 148 aa, Unknown
  Bacterial polypetide isolated from the Sargasso Sea
MSIRFDDRVAIVTGAGGGIGKEHALELARRGAKVVVNDLGGSVDGSGASDAANEVVDIIKSEGGEAIANGASVTDLDAVKEMTNQTMEKWGRIDILVNNAGILRDKSFHKVTLEDFNLVMDVHFQGSLNCTHTIFSYNERARVWPNCF

SEQ ID NO: 82524 - protein, 259 aa, Unknown
  Bacterial polypetide isolated from the Sargasso Sea
MTGRVDGKMSFVTGAAQGLGEAIAYMLAKEGSKVVLADINEEKLTGVEDRINSDFPGKAHSVKLDVTSEDQWKDTLNEAEKLMGGINILVNNAGIGGGSTVEETDYEIFKQVMAVDTDSVFLGCKYAIPIMKNYSPGSIINTSSISGLIAGHNMAAYNTAKAGVWMLTKSVALHCARSAYNIRCNSIHPTFIDTPILDAMVERSNSEKEQVMMKLARQVPLGKVGEPDDVAYTVLFLASDESKFITGAEIKIDGGISAM

SEQ ID NO: 82525 - protein, 408 aa, Unknown
  Bacterial polypetide isolated from the Sargasso Sea
LAKNPIIFACANPDPEITPEEINEVRDDAIIATGRSDYPNQVNNLIGFPYIFRGALDVRSKTINEEMKVAAAQAIAKLAREDVPDEVVAAMGGERPHYGKDYIIPSTFDPRLISVIPAAVAKASIKSGVARKKIEDFEIYKDQLKQRLDPTVTIMQGINSFIKKNQKRIVFADGEDENTLKAAIAFKNSKLGIPILVGKESKIKEQIKNIGYNENFDIKIVNSKDVEKRNRYVQHLFKKLQREQGLLERDCDRLVRNDRVIWAACMVACGDADGAVTGNTRRFGASLEKIKQVVNVRQGEIMFGLNMVVHKGKTIFIGDTSVHEYPSSEQMSEIAISTARVVRLFGFDPKVAFVSHSTFGQPVTSRTKHIRNAVEILKQKKVDFEFDGDMQPDVALNEEYKNLYPFSK

SEQ ID NO: 82526 - protein, 399 aa, Unknown
  Bacterial polypetide isolated from the Sargasso Sea
MTGTDLLNDRNLNKGTAFTEQERADFELDGLLPPQVQTFEAQLDRVYQGFLSACSDIEKYQNLRALQDRNETLFYALLARHVEEMTPIIYTPTVGKACQEFSHRYQKARGLYITPKNVDDMGSLARQLDAKSVRIIVVTDSQGILGIGDQGVGGMGIPIGKLSLYTLAAGIHPACCLPIALDVGTDNQALLDDPMYLGQPHKRIRGKEYDDFIDKFVAGVKRHFPNAVLQWEDFSKSNAFNNLSRYQQSLPSFNDDIQGTGAVVLAGIIGAVKVKGETLGQQNYLVYGAGAGGVGVADQICAGMIREGLDPQAARDRIYILDTQGLVCDNREGLDEYKRRYAKPGLLLAGWDTEVPGKANLTDVLRHVPITVLLGTSGSGGAFQEEHVQLMQKHCARPM

SEQ ID NO: 82527 - protein, 173 aa, Unknown
  Bacterial polypetide isolated from the Sargasso Sea
MKKSPLYTAYSGSALLETPLLNKGSAFTVEERQAFNLAGLLPPRYETIEEQVSRAYMQYKSFDTAINKHIYLRVIQDNNETLFYRLLQQHLEEMIPIIYTPTVGDACEQFSDIYRSARGLFISYNDRYQLDDVLRNATKRKVKVIVVTDGERVLGLGDQGIGGMGISIGKLSL

SEQ ID NO: 82528 - protein, 167 aa, Unknown
  Bacterial polypetide isolated from the Sargasso Sea
MILKNNVALVTGGASGLGRATVEHFVNNGAKVAILDLNKENALEIIENLGEDNVCFIETNVMEEESVQNAITAIKDKYKKLHFVINCAGTGYGARILGKDKPHPLDHFKFIIDLNLVGTFNVMRLAAELIDKNDPSIDGEKGVIINTASVAGYEGQIGQSAYSASKA

SEQ ID NO: 82529 - protein, 74 aa, Unknown
  Bacterial polypetide isolated from the Sargasso Sea
MSKISLIGAGQIGGTLAHLIGIKELANEVVLFDVASGIAKGKALDIAQSSSVDGFDVKFSGTDDYKDIKDSKVI

SEQ ID NO: 82530 - protein, 230 aa, Unknown
  Bacterial polypetide isolated from the Sargasso Sea
MRPAGRAQNESLYFNYPFFSAPQGKKRDHLKSNAQVAIVGAGPIGMTAALALAREGVKSVLFDNKSTFNDGSRAICVARSSFYIFEALGVSSAFLGKSLGWTTGHSFYRGQKILEFQMPDSSEEKFRPMYNIQQQYIEKFLWDAVSVNPLIETRWQSEIIGIKKKKNKCTLRIKDPEEIYDMSSNWVLACDGAHSSIRKFLGHRLKGENYEGRYVIVDIKMEHDYPTIDV

SEQ ID NO: 82531 - protein, 462 aa, Unknown
  Bacterial polypetide isolated from the Sargasso Sea
MAKNPIIFACANPDPEITPEEIEEVRDDAIIATGRSDYPNQVNNLIGFPYIFRGALDVRSKTINEEMKVAAANAIAKLAREDVPDEVVAAMGGDRPHYGKDYIIPSTFDPRLISIIPSAVAKAAIDTGVARKKIENFDVYQEQLKQRLDPTVTIMQGINSYIKKNQKKIVFADGEDENTLKAAIAFKNSRLGIPILIGKEEKVKEQIKKIGYNENFDIEIVNSKNTSKREKYVKYLFEKLQREQGLLEWDCDRLVRNDRVIWASCMVACGDADGAVTGNTRRFGASLEKIKQVVDARPGEIMFGLNLVVHKGKTIFVGDTSVHEYPSSEQMVEMAISAARVVRLFGFDPKVAFVSHSTFGQPSTSRTKHIKKAVEILREKNVNFEFDGDMQPDVALNEEYKNLYPFSKIVGNANILIMPGQHSAAISYKMMKTLGDTKVIGPLLIGLRLPIEIAPLRSSTSE

SEQ ID NO: 82532 - protein, 344 aa, Unknown
  Bacterial polypetide isolated from the Sargasso Sea
MRTRAAVAIEAGKPLEVMDVNLEGPKAGEVLVEIKATGICHTDEFTLSGSDPEGLFPAILGHEGAGVVVEVGPDVFDLKVGDHVIPLYTPECRQCEYCLHPKTNLCQAIRETQGRGLMPDGTTRFSMLDGTPILHYMGCSTFSNFTVLPEIALAKINSKAPFDKVCYIGCGVTTGIGAVINTAKVEIGSRTIVFGLGGIGLNVIQGLRLAGADQIVGVDLNPQKSKMAKKFGMTDYVNPNEVSGDLVQHLVNITKGGADYTFDATGNVEVMRAALESAHKGWGESIIIGVAPAGAEISTRPFQLVTGRVWKGTAFGGARGRTDVPKIVDWYMDGKIEIDPMITH

SEQ ID NO: 82533 - protein, 112 aa, Unknown
  Bacterial polypetide isolated from the Sargasso Sea
MKNLFSVEGKVAIVTGGSRGIGEMIAAGYLANGAKVYISSRKADACIATAARLVDEFGGECIPISADLSNLDGINNFVQEFSKHETSLDILVNNAGVAWGAPLEEFPELGWD

SEQ ID NO: 82534 - protein, 153 aa, Unknown
  Bacterial polypetide isolated from the Sargasso Sea
MKDLFSIEGKVALVTGGSRGIGSMIAAGFLASGAKVYISSRKAEVCDETAKKLSEEYGGECISIPADVSNVEGIEALADAIKTKEDKLDILINNAGVAWGEPIDTYPEIGWDKVMDTNVKGIFFLTQKLLPLLREAGKDDPARVINIGSIDGL

SEQ ID NO: 82535 - protein, 305 aa, Unknown
  Bacterial polypetide isolated from the Sargasso Sea
LLCGSDRNQFYNGSPQCIPGHEGAGVIVDKGKKAKFDIGMKGAVYLYDYCHKCRSCQLGLTNQCLHKNCDYGFNVDGAFCEYYLVNDYVFFPVDESVDVINATLLLDVMGTGGHATKRAQLIHKDIQSVLINGAGPIGLGLLAMSKLTFAKDLPVLINDVKSSRLPLAEKMGGLPIDLSKQSLEEGMEQHGIKNPDVAIDATGKAVARKNALQALAKRGVLVMVGNGEGLEFEQYPDMGGPERSILGSEYFSYNEMDANHELLKNNQEYLSQIITHKYNIEDVQKSYEHFFSPESDAGKIAVVHN

SEQ ID NO: 82536 - protein, 217 aa, Unknown
  Bacterial polypetide isolated from the Sargasso Sea
AKLNVEVSFYQIDVANENSWIEFSNFLKNKKILTDILVNNAGIWIGKDIDNVSLEEYQRLISINLTGVFLGIKYLVPFLTEAGKKTKFGSTIINLSSVAGLVGSQLDPLYSMTKGGITTFTKSMAIYFGKNKFPIRINQVHPGIIETDMGTQVYKARISQNPEMTTEESILAGINQTPIGRLGTADEVAKTILFLSSDNSSFMTGSSLVVDGGLTAQ

SEQ ID NO: 82537 - protein, 263 aa, Unknown
  Bacterial polypetide isolated from the Sargasso Sea
MDLGIKNKVALVTAASQGLGKASAIELANEGVKLAICSRDKEKINQTAGEIKNLSGAEVLAVKADLDNTDDIENLIKEIEKKFNKVDILVNNTGGPKAGFFDDLSDEDWLKTFESTFLSAVRVTRKVLPFMKKNKWGRIINISSVSAKQPIDNLMLSNGVRMSIHGWAKTLSNQVASDNILINNVCPGFTHTERVDGLIKAQLKNSNSSREDIIESIASDIPAKRVGQAEELAALVTFLSSEKASYITGQSIAVDGGISSLPI

SEQ ID NO: 82538 - protein, 165 aa, Unknown
  Bacterial polypetide isolated from the Sargasso Sea
MKTKAAVAFEAGKPLEIVELDLEGPKEGEVLIEIKASGICHTDAYTLSGADPEGIFPSILGHEGAGVVVEKGPNVKSLDVGDHVIPLYTPECRECEYCLNPKTNLCQSIRTTQGQGLMPDGTSRFSYNGKKIYHYMGTSTFSQFTVMPEIAAAKFQKGSFDRYVM

SEQ ID NO: 82539 - protein, 213 aa, Unknown
  Bacterial polypetide isolated from the Sargasso Sea
MKDKIDIDETSYDEQEALKFHSEGRPGKIEINATKPMSTQRDLALAYSPGVAAPVLAISDNPDSAYDYTTKGNLVAVISNGSAILGLGDLGPLASKPVMEGKAVLFKRFADVDSIDIEINEKDPDKISDIIASLEPSFGGINLEDISAPDCFIIESKLREKLNIPVFHDDQHGTAIISAAGIINALDLTGKNITDMKVVINGAGAAGIACLEL

SEQ ID NO: 82540 - protein, 95 aa, Unknown
  Bacterial polypetide isolated from the Sargasso Sea
MERLKNKVAIVSGGANGIGRAVCSRFVKEGARVIVADLKEDAGNELVSELGSAASFFKLDVRNNEEWKELAKHILKLHGSFDILVNNAGICQLPI

SEQ ID NO: 82541 - protein, 250 aa, Unknown
  Bacterial polypetide isolated from the Sargasso Sea
MLNLNGKTVLITGASRGIGEAAAKTFAQAGANVMLTARNADKLKNIKKKLGDRTEYFAGDISDPNIVSQLVDFCYSHFGALDILINNAGTIQPIGLIHEIKPEDWSSVIDTNLKSIFYTINAVLPEMVKNGEGTILNVSSGAAHNPLTAWSHYCASKAGAAMLTQCLHTEYFEHGIRAIGLSPGTVATQMQLEIKESGINQVSALDWSVHIPADWPAKALLWMCSSEADEFVGKEISLRDEVIRQKVNLI

SEQ ID NO: 82542 - protein, 255 aa, Unknown
  Bacterial polypetide isolated from the Sargasso Sea
MYLKKYNLKNKVALVTGAGKGLGKACAIALAEAGANLVIISRTQKDLNQVSKIIKKFKVKCKSYLCDVTDYGQIKSIIDKIPKIDVLINNAGTNFPEHFTKVKRSNMEYMVKINNVAAFNLAQLCTLKMLKTKNRKKIGGSIVNMSSQMGHVGGPIRSVYNMNKHGLEGLTKGMAIDLAKYNIRVNTVCPTFVVTPLTSKFLKNKKFKKETLNNIPLGRFAEMSEIASTVVFLASDAASMITGTSLLVDGGWTAK

SEQ ID NO: 82543 - protein, 246 aa, Unknown
  Bacterial polypetide isolated from the Sargasso Sea
MRLKNKVAIITGSASGFGKGIAKKFSDEGAKLILVDINLKLLKKVSKSLSQDHFVADVSKESNFRSLLKYVLKKYKTIDIIVNNAGITHKPKNMEAVTGKEFDKVFNVNAKSVYLSAKYFVPRMKKLRRGVILNVASTAGLSPRPKLNWYNASKGWMITATKAMAIELAPFNVRVNAIAPVAGVTPLLKSFMGGNTPQKKKAFLSTIPIGRFSTPQDMGNAACFLCSDEATMITGTILEVDGGRCI

SEQ ID NO: 82544 - protein, 273 aa, Unknown
  Bacterial polypetide isolated from the Sargasso Sea
MKSILVTGSSSGIGAAICEHFTQIGWKVFGSVRNQNDGDKLTDICGENFTPLIFDVTDIYAINEAAKLVEYHLGKNGLNCLVNNAGINISGPMEYVESNEVRKVFEVNVMGPLNCSQSFLPMLKKSTSATIINISSMAGKIGLPMQGSYCGSKFALEGISESMRRELQIHNIKVVVIGPGAIESSIWDKFEKDEKEEQYKDTEYKSAIKKMDGTLKRARSIAIPAYRVAKKVEKIVNSKNPKPRYVVSGITDKMLNLIPTKILDAAFKRLLTK

SEQ ID NO: 82545 - protein, 166 aa, Unknown
  Bacterial polypetide isolated from the Sargasso Sea
GSVPLEHFGKIDGLVNNAGILHPMGLEDDREELLDDMWEVNAKAPLRLTRLTFPHLKKCGRGRVIDVISMSGKRVKGNWIGYSMSKFAALAASRTARMQGWEDGIRVTAICPGFVQSDMTLENATDYPQEQMSRPQDLALIVSSLLQLDNESAIPEVMMNCVFEAM

SEQ ID NO: 82546 - protein, 145 aa, Unknown
  Bacterial polypetide isolated from the Sargasso Sea
MSNEKLKGKKAIVTGGSRGIGRGVALTLAAAGADVAFCHHKDNDKAKETSSEIEKLGRKSFAAECDVSSISSVKEFYANAVSQMGDIDILVNNAGHNITENFEEISEESFDRMLNVHVKGTFFMTQAVYKDMKKRGAGRIINITS

SEQ ID NO: 82547 - protein, 165 aa, Unknown
  Bacterial polypetide isolated from the Sargasso Sea
MSTKQPLYTSYAGPALLETPLLNKGSAFTKEERIAFNLIGLLPPRYETIEQQLARAYMQYSSFAEPINKHIYLRAIHDKNETLFYRLVKEHLEEMIPVIYTPTVGDACERFSAIYRSARGIFVSYSEREHMDDILRSVTKKKVKVIVVTDGERVLGLGDQGVGGM

SEQ ID NO: 82548 - protein, 316 aa, Unknown
  Bacterial polypetide isolated from the Sargasso Sea
TKPNPTMTNVEAGLAMLKANGCDCVISLGGGSPHDCAKGIALVAANGGSIKDYEGVDRSAKPQLPLIAINTTAGTASEMTRFCIITDEARHVKMAIVDKHVTPLMSVNDPELMLAKPAGLTAATGMDALTHAIEAYVSTIATPVTDASAIMAIQLIAKHLRTAVNHGDDLHAREQMAYAQFLAGMAFNNASLGYVHAMAHQLGGFYDLPHGVCNAVLLPHVQAYNAQVCAGRLKDVARHMGVDVSAMNDEQGAAAAIAAIQQLARDVKIPTGLEQLGVKADDFNLLAENALKDACGFTNPKQASHEEIVAIFRAAM

SEQ ID NO: 82549 - protein, 117 aa, Unknown
  Bacterial polypetide isolated from the Sargasso Sea
MNSFQLNGHHALVTGAGRGLGEACALALAEAGAVITLVARSNDQLESVAKQIRDSGGQASVHPADLTKMEEIRKLEELGPFTILVNNAGINRPQSFEVVKEKDFDDVLDLNVKSAFF

SEQ ID NO: 82550 - protein, 59 aa, Unknown
  Bacterial polypetide isolated from the Sargasso Sea
MKDLFSIEGKVALVTGGSRGIGEMIAAGFLANGAKVYISSRKAEVCDATAERLAKEYGE

SEQ ID NO: 82551 - protein, 661 aa, Unknown
  Bacterial polypetide isolated from the Sargasso Sea
MIINKIADELSVQPSQVTAAVKLLDEGSTVPFIARYRKEVTQGLDDTQLRTLEQRLTYLRELEERRDVILKSIEEQGKLTDELKSSITSADSKTTLEDLYLPYKPRRRTKGQIAIEAGLEPLADTLFSAPDTDAESAASEYVNADSGIADTKAALEGARYILMERFAEDATLLAKVRKYLTENAYVKSTVVSGKEQEAAKYKDYFEHSEKYKNVPSHRALAMFRGRNEGMLHIQLDADPQSEDNGPSHCEQIIASHYDIMHRGRGADDFLAQVVQWTWKIKIGLHMETELFSALRERAEEEAIEVFAKNLNDLLMAAPAGAKTTMGLDPGLRTGVKVAVVDSTGKVVATNTIFPHAPQNQWDKSIRTLTTLCKQYKVDLISIGNGTGSRETDKLVGEMLKNNSELTAQKIMVSEAGASVYSASELASKELPDLDVSIRGAVSIARRLQDPLAELVKIEPKAIGVGQYQHDVSQSQLGKSLDRVIEDCVNAVGVDLNTASPALLSYVSGLNKTLAHNIVNFRDTNGAFPDRKALLKVERLGPKAFEQAAGFLRIVNGTNPLDASAVHPEAYPVVDKIVDTTAVAVNDIIGNTELLKSLSPDTFTSDAFGLPTVKDILKELDKPGRDPRPEFKTAAFKEGVETINDLKPGMILEGVVSNVANF

SEQ ID NO: 82552 - protein, 273 aa, Unknown
  Bacterial polypetide isolated from the Sargasso Sea
MKSILVTGSSSGIGAAICEHFSQIGWKVFGSVRNQYDGDKLTDICGENFIPLIFDVTDINAIKEAANLVESHLGKNGLNCLVNNAGINISGPMEYVESDEVRRVFEVNVMGPLNCSQSFLPMLKKSTSATIINISSMAGKIGLPMQGSYCGSKFALEGISESMRRELQIHNIKVVVIGPGAIESSIWDKFEKDEKEEQYKDTEYTSAIKKMDVTLKRARSIAIPAHRVAKKVEKIVNSNNPKPRYVVAGITDKMLNLIPRKILDKAFKRLLTK

SEQ ID NO: 82553 - protein, 239 aa, Unknown
  Bacterial polypetide isolated from the Sargasso Sea
TGAAQGLGKEMAKVMIAQGANIVITDINESILEEAAEELSCEKIVLDVTKENQWKSVISQIDKQFGSLNILVNNAGIGGGGDVEQTDIDSWHQVHSVNLDSVFLGCKYALPLMRDSGNGSIINISSMSGIVASHNMSAYNSSKAAVRHLSKSVALHCAKSTNTVRCNSIHPVFTRTAMVQSMIDSAPDRNIEEKLVKQIPLRKLAEPIDIANAALFLASDESSFITGTELIVDGGLSAT

SEQ ID NO: 82554 - protein, 250 aa, Unknown
  Bacterial polypetide isolated from the Sargasso Sea
MANRLKGKVALITGGAAGFGKKTAETLKAEGAVVYISDINVEGGEKVAKDFDVNFLQQDVTNTDDWERVINEIKNKEGKLNVLVNNAGIGYMGDVESTTNEAWDMVHKVDLDSVFYGCKYALPLMRDSGNGSIINISSISGIVAGHNFTAYNSAKAAVRHLSKSVALHCARTTNLVRCNSVHPVFARTEILEALLSDTSNDMLSKLERQIPVRKLAEVDDIANAILFLASDESKMITGTEIVIDGGLSAQ

SEQ ID NO: 82555 - protein, 339 aa, Unknown
  Bacterial polypetide isolated from the Sargasso Sea
MPKKTEIDHYTDKEALDFHIKGKSGKIEINSSKPLTTKRDLSLAYSPGVAAPVKEIANNPDLAYDYTSKGNLVAVISNGSAILGLGNLGSLASKPVMEGKSVLFKRFADIDSIDIEINNSNPEEIINTIKNIGGTFGGINLEDIAAPDCFIIEQKLKELLDIPIFHDDQHGTAIITTAALINALDISKKKIDEVKVVINGAGASAQACANLFKSSGVKSKNITMCDSKGVIYKGRKNIDQFKSAFAIDTNLRTLEDAMKGADVFLGLSAKDVVSKGMVKSMAEKPIVFACANPDPEIKPELIQEARSDAIIATGRSDYPNQVNNLIGFPYIFRGALDVR

SEQ ID NO: 82556 - protein, 122 aa, Unknown
  Bacterial polypetide isolated from the Sargasso Sea
MGRLNDKVAIITGAGRGIGKEICLYLAKEGAKIVVNDLGGDRDGTGGGKIADEVVNEINDLGGEAVANYDSVGTVEGGNNIFSSAMDAFGQADILVNNAGILRDRTLYNMEESDWDLIMEVH

SEQ ID NO: 82557 - protein, 248 aa, Unknown
  Bacterial polypetide isolated from the Sargasso Sea
MTKAVLITGGSRGIGRATARLLGAQGWSVGVNYAQNLAAARETVADVERAGGQALAIAGDVASEADVIAMFDALQQKFGRLDALVNNAGIVAPSSQLADMDLARLKRMFDVNVLGAYLCAREAARRMSTARGGAGGVIVNISSAAARLGSPNEYIDYAGSKGAVDTLTIGLAKELGPQGVRVNAVRPGLIDTDIHASGGKPERAAQLGATTPLGRPGSADEVAESIVWLLSDAASYVTGALLDVTGGR

SEQ ID NO: 82558 - protein, 250 aa, Unknown
  Bacterial polypetide isolated from the Sargasso Sea
MRLEGKVALVTGAASGIGAATAELFVKEGARVVLADRNLDQARRVAAALGERALAVGADVVVSQQIRDAVGATISAFGGLDILVNNAGLGIRGTVVNTEEDDWDRIMEVNLKSVFLCSKYAIPEIARRGKGAIVNISSTAAVCGIPDRAAYVAAKGGVAALTRSMALDHAEQNIRINSIAPGVIWSSYYEEMLRSVPDPDGFVSGLKARAPVNRMGQPHEIATMALFLASDESSFATGAMFTVDGGYTAR

SEQ ID NO: 82559 - protein, 252 aa, Unknown
  Bacterial polypetide isolated from the Sargasso Sea
MELKDKVIIITGAGQGLGRQFALDCALNGMKVALADIDAEAMEKTRKECEAKGVQARGYELNVTIESEVEAVYSQVVRDFGTLDATVNNAGILRDSLLVKEKDGEIRKFPLSKWQEVIDTNLTGVFLCGREAAAQFVKLKKTGVIVNIASVARSGNFGQSNYSAAKAGVSAMTVLWGKELAQHGIRVAGVAPGFTATEMVVSLRDDVKEKFYKSIPLRRFAEPTEMSDGVLFILKNEYFTGRMLEIDGGVRM

SEQ ID NO: 82560 - protein, 251 aa, Unknown
  Bacterial polypetide isolated from the Sargasso Sea
MSERLKDKVALITGGAQGLGKEMARLMLAESANVIIADINESTLAETAEELSCSQILLDVTKEKQWQEVIKKLTNDFGALNILVNNAGIGGGGDVESTDLEAWNIVHQVNLDSVFLGCKYSLPLMRESGNGSIINISSMSGIVASHNTAAYNSSKAGVRHLSKSIALHCAKTTNLVRCNSIHPVFTRTSMVQSMIDAAPERDIENKLIQQIPIRKLAEPIDIANAAVFLASDEASFITGTELLVDGGLSAT

SEQ ID NO: 82561 - protein, 219 aa, Unknown
  Bacterial polypetide isolated from the Sargasso Sea
MGRLENKVIIVTGSATGLGLADARALIAEGARVIMTDIDVDKGTEEAKDLDATFFAQDVSKESSWLELMTVVQNKFGRLDGLVNNAGIAPIANIEEVTAESWRQVLGIHLDGTLWGCQGAIKLMKEGGGGSIVNMSSTAALIGIGSYLAYSAAKGGIRSMTKSIAIHCRQKKLNIRCNSVHPGSINTAMVQHALKELVGKDLLAEEDPEKTRIEMGIGE

SEQ ID NO: 82562 - protein, 423 aa, Unknown
  Bacterial polypetide isolated from the Sargasso Sea
GALEKEMVKKMSKNPIIFACANPDPEITPEEISKVRDDAIVATGRSDYPNQVNNLLGFPYIFRGALDVRSKTINKEMKIAAAKAIAKLAREDVPDEVVAAMGGDRPHYGKDYIIPSTFDPRLISVIPEAIAKAAMSTGVARKKIEDFELYKDQLKERLDPTVTIMQGINTYIKKNQKKIVFADGEDENTLRAAIAFKNSKLGIPILVGKENKIKEQIKNIGYNENFDIQITNSKDVKKRNRYVNHLFKKLQREQGLLERDCDRLVRNDRVVWATSMVSCGDADGAVTGNTRRFGASLEKIKQVVDVRDGEILFGLNMVVHKGKTIFVADTSVHEYPTSEEMVKIAISTARVVRLFGFEPKVAFVSHSTFGQPLTSRTKHIRKAVDILKEKKVDFEFDGDMQPDVALNSEYIERYPFSKIVEKQ

SEQ ID NO: 82563 - protein, 121 aa, Unknown
  Bacterial polypetide isolated from the Sargasso Sea
MVRNPKTVILTGASRGIGHSTVSFFSKKNWEVITCSREQPPEECRRDPNWSHHITADLEDGKSLDNFVTEAKGLLAEKPLHALVNNAGWSPKSPTQERLGCLNGDLEAWRRVFELNFFAPL

SEQ ID NO: 82564 - protein, 108 aa, Unknown
  Bacterial polypetide isolated from the Sargasso Sea
MANRLKGKVALITGGAAGFGKKTAETLKAEGAVVYISDINVEGGEKVAKDFNVNFLQQDVTNTDDWERVINEIKNKEGKLNVLVNNAGIGYMGDVEAQLMKLGIWSIK

SEQ ID NO: 82565 - protein, 136 aa, Unknown
  Bacterial polypetide isolated from the Sargasso Sea
MKKISVIGAGVIGSGWIIRFLAHDKKVTAYDKDLKLKKKIIAEIRRTWPYVKKLFNKKKLKLKNFRYVTSLKEALKDADFIQECAPENYKLKTKLMETIGNYSKPNAIISSSSSGLLPSKIYSKCKNPSRTIIAHP

SEQ ID NO: 82566 - protein, 259 aa, Unknown
  Bacterial polypetide isolated from the Sargasso Sea
MTAGQSADAVSKIAIVTGGSRGLGRNTVLHLAKRGVDSLFTYRANQAEAEKLVGLVAEEGQRAIALPLDTGKVTTFDSFVEQVRASLAQWGAERFDYLVNNAGISHHAPFDKTTEEELDALYNVHFKGVFFLTQKLLPLINDGGRIVNISSGLTRIAFPGSAPYASMKGAVEVLTRYLAKELGPRRIAVNTVAPGAIATDFSGGMVRDNPEINKLVADATALGRAGLPDDIGPMIAALLSEDNRWVNAQRIEVSGGMSI

SEQ ID NO: 82567 - protein, 387 aa, Unknown
  Bacterial polypetide isolated from the Sargasso Sea
MKKNKTEHYTIKEALDFHSQGKAGKIEITPSKPMTTKRDLALAYSPGVASPVLEISKDINLAYDYTSKGNLVAVISNGSAILGLGNLGAAASKPVMEGKAVLFKRFADIDSIDIEIDSNNNEEIINTIKNISSTFGGINLEDIAAPDCFIIEKKLKEIIDIPIFHDDQHGTAIITTAGLINALDITGKSIKDIRVVVNGAGASAIACSELFKNSGVKKENLIMCDRKGVIYKGRDKLDQWKTKHAVETKFRTLKDAIKGADVFLGLSAKDALTKDMVKSMAKNPIIFACANPDPEITPEKVEEVRSDAIIATGRSDYPNQVNNLIGFPYIFRGALDVRAKIINEEMKVAAAHAIANLAKQRVPDEVASAMGGIRPIYGKEYIIPSTL

SEQ ID NO: 82568 - protein, 163 aa, Unknown
  Bacterial polypetide isolated from the Sargasso Sea
MKIVRAKYQGEIFYGELHEGEVLRYEGSPLVIWEPTEEKYSLEEIQLLAPVLPSKVTAVAKNYEKHAVELGVHDYTAPSNPVFFNKPSTSVIGTGENIIYPKIAQHVDHEAELAVVIGKLSKNLTHDNWMEHVLGFTIANDLSERVLQGQDGTFNGNLQEQKV

SEQ ID NO: 82569 - protein, 188 aa, Unknown
  Bacterial polypetide isolated from the Sargasso Sea
EDWISAIEFIKNEAGSLNILVNNAGIGNGGDIESTDIETWKLVHSVNLDSVFLGCKHAIELMRDSGDGSIINISSMSGIVASHNTSAYNSSKAAVRHLSKSIALHCAKTTNLVRCNSIHPVFTRTAMVQTMIDAAPERNIEQKLIQQIPIRKLAEPKDIANAAVFLASDESSFITGTELLIDGGLSAT

SEQ ID NO: 82570 - protein, 189 aa, Unknown
  Bacterial polypetide isolated from the Sargasso Sea
VVSTEDWKNVVDASISEFSKIDILVNNAGIALIGPFEEFSEDQWDQQINVNLKSVFLGCKAVIPEMKKNNSGSIINLSSIAGLVGLQGCAAYNASKGGVRLLTKSIAIEYGPNKIRCNSIHPGFMATNMNDPKKIEERGRDFEAIIETIPLKSMGTAEDIANCALYLASDESSYVTGSEYVVDGGWTTR

SEQ ID NO: 82571 - protein, 263 aa, Unknown
  Bacterial polypetide isolated from the Sargasso Sea
MDLGIKNKVALVTAASQGLGKASALELANEGVKLAICSRDQDKINQTAEEIQNLTGGEVLAVKADLDSTDDIENLIKEIENKFNTVDILVNNTGGPKAGFFDDLSDEDWLKTFESTFLSAVRVTRKVLPFMKKNKWGRIINISSVSAKQPIDNLMLSNGVRMSIHGWAKTLSNQVASENILINNVCPGFTHTERVDGLIKAQVENSNSSREDIIESIANDIPAKRVGQANELAALVVFLSSEKASYITGQSIAVDGGISSLPI

SEQ ID NO: 82572 - protein, 245 aa, Unknown
  Bacterial polypetide isolated from the Sargasso Sea
MNDLKDRIIMITGASSGFGKETAKMCVALGAKVVLGARREDKLKELCDELGSDSSIYNVTDVTSKDQMQALADYGIKNFGRIDSLVNNAGIMPLSLLKKGRTDEWDQMIDVNIKGVLYGIDSVYSHMLERESGQIINVSSVAGKRVMPGSAVYSGTKYAVRAISEGLRIESSGKIQVTCIYPGAFKTELAFSIKDESMLEALMSRGIGEVAQPAERVAESIIYALQLDPGVSVNEIVIRPTAQDA

SEQ ID NO: 82573 - protein, 102 aa, Unknown
  Bacterial polypetide isolated from the Sargasso Sea
MKDIFSIKGKVALVTGGSRGIGSMIAAGFLSSGAKVYISSRKADACDETAKKLSEEYGGECISIPADVSNVEGIEALADAIKAKEDKLDILINNAGVAWGEQ

SEQ ID NO: 82574 - protein, 364 aa, Unknown
  Bacterial polypetide isolated from the Sargasso Sea
MKKDQQRRASLIYHAKPKAGKIEVVPTKQYRTQRDLSLAYSPGVAIPCQEIQDKIENVYKYTNKGNLVAVISNGTAVLGLGNIGPEASKPVMEGKALLFKIFADIDVFDIEIDASDPDEFIKAVKSISPTFGGINLEDIKAPEAFYIEQKLKEELSIPVMHDDQHGTAIISCAALLNALELANKKIDKIRVVVSGAGAAAISCTKLYKSFGVNEKNIVMIDSRGVINNKREDLTEEKKEFLTNRKINTLEEAMVNSDVFIGLSQGNILTQKMLLSMSKNPIVFAMANPDPEINYDLACKTRDDIIMATGRSDLPNQVNNVLGFPFIFRGALDVRAKKINESMKRAAVLALADLAKELVPEQVNL

SEQ ID NO: 82575 - protein, 405 aa, Unknown
  Bacterial polypetide isolated from the Sargasso Sea
DVFLGLSAKNILDKDMVKSMSKNPIIFACANPDPEIKPELVDEVRSDAIVATGRSDYPNQVNNLIGFPYIFRGALDVRAKEINEEMKIAAAKEIAALAREEVPDEVVNAYGGDRPHYGKEYIIPSTFDPRLISRIPAAVAKAAMSSGVARKQISDIEAYKDQLSNRLDPSMSIMQGINAQVKKRPKTVVFAEGEDQNMLKAAVAYKNSRLGTPVVIGNEKRVKEQLKEIGLDENYKIKIVNSTNKEKREIYTKKLYAKLQRKGLLERDVDRLIRNDRVIWGSSMVECGDADAMVTGNIRHYAASIESLKKVVEARPGEILFGLNLLITPKKTVFIADTQVNDFPSAEHLIKIATSSVRVARLFGFDPKVAFLSHSTFGKPSSRNTKHVREAIEILKKTNVDFDFD

SEQ ID NO: 82576 - protein, 341 aa, Unknown
  Bacterial polypetide isolated from the Sargasso Sea
ILLCLDRKGVIYKGRDNLNKWKSSHAIKTKDRTLKDAIKNADVFLGLSSAGSLKKEMVKLMAKNPIIFACANPDPEITPEEVESIREDAIMATGRSDYPNQVNNLIGFPYIFRGALDVRAKIINEEMKIAAANAIASLARERVPDEVVAAMGGERPTYGRDYIIPSTFDPRLISVIPVAVAKAAIKSGVARKKIENFDIYSEQLKQRLDPSVTIMQGINNQIKKTNKKVVFADGEDENNLKAAIAFKNSGLGTPIIVAKEEIIKKKLKEIGYSENFNIKIINSKNKILREKYVKFLFNKLQRKEGLLERDCDKMIRNDRVIWASCMVECGDADAMVTGNTS

SEQ ID NO: 82577 - protein, 169 aa, Unknown
  Bacterial polypetide isolated from the Sargasso Sea
LVNNAGIGGGDNVESTDIEMWHKVHDVNLNSVFLGCKYALPLMRESGDGSIINISSMSGIVASHNLAAYNSSKAAVRHLSKSVALHCAKTTNLVRCNSIHPVFARTDMVQTLIDSAPDRNIEEKLVKQIPLRKLAEPIDIANAAVFLASDESSFITGTELLIDGGLSAT

SEQ ID NO: 82578 - protein, 358 aa, Unknown
  Bacterial polypetide isolated from the Sargasso Sea
FLGLSSAGVLKKDMIKKMAKNPIIFACANPDPEIKPEEIEEVRSDAIIATGRSDYPNQVNNLIGFPYIFRGALDVRAKTINEEMKIAAVNAIASLAKKRVPDEVVAAMGGERPKYGKDYIIPSTFDPRLISVIPVAVAKAAIKTKVARKKIENFEIYTEQLKQRLDPSVTIMQGINSKIKRNQKRVVFTDGEDENTLKAAIAFKNAELGIPIIVAKEKIVKQRLKEIGYGESLNIQIINSTDKKKREKYVKFLFNKLHREEGLLERDCDRMIRNDRVIWGSCMLACGDADAMVTGNSRRYAQSLEKVNKVVAARPGEIMFGLNMVVNKGKTVFIGDTSVHEYPSSEQLAEIAISSARV

SEQ ID NO: 82579 - protein, 171 aa, Unknown
  Bacterial polypetide isolated from the Sargasso Sea
MNVLVNNAGIGFMADVEATTEEEWELVHKVDLDSVFLGCKYAIPLMRESGNGSIINISSISGIVAGHNFAAYNSAKAAVRHLTKSVALHCARTTDTVRCNSVHPVFAQTEMMKSFFDNPNDELVSKIERQIPLRKLVTVEDVANSILFLASDESKMITGSELVIDGGLSAQ

SEQ ID NO: 82580 - protein, 127 aa, Unknown
  Bacterial polypetide isolated from the Sargasso Sea
MEITSLFNISGKVAVVTGGSRGIGEMITAGFLANGVKVYISARKAPALIEKARELSEKYKQECIPVPCDLSSMDGIEEFVNQITEKEDAIDFLVNNAGAAWGEPLESFSEKGWDKVMDLNVKSIFFL

SEQ ID NO: 82581 - protein, 302 aa, Unknown
  Bacterial polypetide isolated from the Sargasso Sea
MGVLNGKVGVVTGAGRGIGREICLSFAQEGAKVVVNDLGGDRDGSGEGKIADEVVKEIQDLGGEAVANYDSVGTVEGGENLFKTTIDAFGEMDFLVNNAGILRDRTLYNMEESDWDAIMEVHLKGHYNCTRPFVRYIRDENRLNCRILNMSSVSGLYGNFGQTNYGAAKAGIAGFSRSLALEVAKYKCTVNTISPGAATRLTIDLIEAAGREYDENDWTQGPEQIAPVVTWLCSEEANDITSQIIHSQGGILGIMQQPAVIKSFTSDNLWTIDQLNQLMPELIEAKKHHDAEVEEKGKPSKT

SEQ ID NO: 82582 - protein, 265 aa, Unknown
  Bacterial polypetide isolated from the Sargasso Sea
MSELKGKTAFISGGSRGIGASIASLFLDEGANVLITDILEEEGVRAVENLSGKKGNISFISHDVTDEDSWKEAVSYCINEFGGLNILVNNAGIYSSSTVEETSIEEWKKMFTVNVEGVFLGTKSVLEEMKKSSLDNDSGSIINLSSIAGLVGSAGHGAYTASKGAVKLFTKSCAIEFADLDYNIRVNSIHPGVIETKMGAQVVSNVSENLELGNNEAKEMTALMHPVKRMGVPEEIAQLALFLASNRSSFITGAEMVIDGGFTAK

SEQ ID NO: 82583 - protein, 502 aa, Unknown
  Bacterial polypetide isolated from the Sargasso Sea
MEFNAEADDLLIGIVGGGAMGQGIVQVSLEGMMRVVLFDAKPDGSSEARDAVFSRLERNVEKGRLEKDALDKMKENLIIAKDFSGFSKCNVVVEAVFEDIDVKLDVFKEIETEVAPNCIIASNTSSLPIASLGRYCQHQNRFAGLHFFNPVPLMKLVEVIKGPSTEDWVIEGLTNLGKRMGRTPVVVRDAPGFLVNTGGRSFTTEALHILHEGVANPAQIDAVMRECAHFRMGPFELMDLTGVDINYPASLIMHEQNSYDPRIRTVPYHKSLFDAGRFGRKTGQGNYQYNSDGEIIDAPSPDYVVTGKEAEKVILLSEDDIFTDIFAGCNMTTIDDDVSPIVVSLLGMDCATFASVNHIDHRRLVAVDTTGDLSSRITLMTAPGSNLANLDAVAGLIRNNGRNVTAIKDSPGFIAQRIRAMIGNLGCEMANIHLASPEDIDLAMKLGLNYPMGPLEIIEDFGVKQTHEIMLTMQEITGDDRYRPSPWLRRRALLGLTAYTPA

SEQ ID NO: 82584 - protein, 252 aa, Unknown
  Bacterial polypetide isolated from the Sargasso Sea
MGRLEKKVIIVTGAATGLGLADARALIAEGARVIMTDIDVDKGTEEAKDLDATFFAQDVSKESSWLGLITFVQEKFGRLDGLVNNAGIAPIAHIEEVTAESWRQVLGIHLDGTLWGCQGAIKLMKEGGGGSIVNMSSTAALIGIGSYLAYSAAKGGIRSMTKSIAIHCRQKKLNIRCNSVHPGSINTAMVQHALQELVGKDLLAEEDPEKTRIEMGIGEPDDVAHMIVYLMSDESKHVNGAEMVVDNGDTVI

SEQ ID NO: 82585 - protein, 299 aa, Unknown
  Bacterial polypetide isolated from the Sargasso Sea
MTIRFDDKVAIVTGAGGGIGKQHALELAKRGAKVVVNDLGGSVDGSGESDAAEEVVELIKSDGGEAISNGASVTDINAVKNMVQQTMDEWGRIDILVNNAGILRDKSFHKVTLEDFELVMDVHFQGTLNCTHSVFPIMREQEYGRIIFTSSSSGVFGNFGQTNYGSAKMAMIGLMNTLKLEGQNKNIYTNSITPVAYTRMTEGLIPEDFGQNLQPEFITPAVIYLASEDAPNGAIMAAGAGVFSRIFIHETMGVSLGMGEDMTPENIQASWDKISDMKDARALQNGGEQTLKFFELINK

SEQ ID NO: 82586 - protein, 753 aa, Unknown
  Bacterial polypetide isolated from the Sargasso Sea
MDKNIKIKRQEALDYHKQDKPGKLEVQATKTLNSQRDLSLAYSPGVAIPCEEIHEKPTLAYEYTSKGNLVAVITNGTAVLGLGNIGALASKPVMEGKSVLFKKFADIDSIDLEVDSIDVDKFINCVQVLEPSFGGINLEDIRAPDCFLIEQKLREKMNIPVFHDDQHGTAIITAAGIINAFHLTNRDIKKVKIVCNGAGAASIACVELLKALGVPNQNIILIDRTGVIYKGRTENINQWKSAHAVETDSRTLEDALIDADAFIGLSIGNLLNASKIKYMKKQPIIFAMANPEPEIMPDEVRKVFPDAIIATGRSDLPNQVNNVLGFPYIFRGALDVRATTINEEMKKAAVYAIANLARENVPDEVSNAYGQDKITYGVDYIIPAPFDPRLIVEVSSAVAKAAIDSGVATNPIKNIALYKKQLARRLNPTASMLQRVSDKVSNLKKRIVFAEGEEERAIKSALIIQNSNLGKPILIGREKYINETAKKIGLDGIANLEIHNAALSEKNNVYSDFLFKKLQRKGYLYRDCQRMVNQDRNVFGSCMVAMGDADSLVSGLTRSFNDTLNHITRVISSKDNKNIIGMCMVVSRDKTVFIGDTNIIERPKPEELADIAEQMAFSVSQLGYKPRVAFTSFANFGSPSLPSTSSAREAVRVLENRSVNFEFDGEMSVEIALNFQLMKKNYPFCKLTDEANILVMPGLHSANISFKLLQNLGGGSVIGPILLGSEFPMQIVQMGASVNEITNAAIFSAYDAL

SEQ ID NO: 82587 - protein, 252 aa, Unknown
  Bacterial polypetide isolated from the Sargasso Sea
MSTDLNRLDNEITLITGASRGIGAGIAKLFAESGSYVIGTATTKEGAESISQRFNQDSTKGEGIVLDVSNSDDVNKMIKDLKERDLLPSILINNAGISLESLLMRIKEDDWKKIIDTNLSSAFYLCKAAVSGMMKNRKGRIINIGSVVGSIGAIGNAHYSASKAALLGFTKSLALEVGSRGITVNNIAPGYITTDMTKDIKSELSDALMEKIPMNRFGSPEDVAKVALFLASESGSYITGQTIHVNGGMHME

SEQ ID NO: 82588 - protein, 246 aa, Unknown
  Bacterial polypetide isolated from the Sargasso Sea
MRLNEKVSIITGAASGFGKGIAKKFSEEGAKLILADINKDELEKVSNDLNQDFFQVDVASSKSMQELSEYVIKKYETIDIMVNNAGITHLPKPMEDVTEEEFDKVFSVNSKSVFFCGKFFIPHMKKRKKGSILNIASTAGLSPRPNLNWYNATKGWMITATKTMAIELAPFNVRVNSLAPVAGETPLLKSFLGEDTPERRNAFLSTIPLGRFSTPQDLANAACFLCSEEANMITGSILEVDGGRCI

SEQ ID NO: 82589 - protein, 761 aa, Unknown
  Bacterial polypetide isolated from the Sargasso Sea
MKKNKIEHYSDKEALEFHNLNKSGKIEINSSKPMTSKRDLALAYSPGVAAPVKEIYKNPDRAYDYTTKGNLVAVISNGSAILGLGNLGAIACKPVMEGKAVLFKRFADIDAIDLEIDSKDPKEIVNSIKNFAVSFGGINLEDIAAPDCFEIEENLKEILDIPVFHDDQHGTAIITSAALINSIHITKKKISTIKVVVNGAGASAMACSDLFIKLGVKKNNLTMIDSKGVISYDRKGLNRWKLKYAKKTKNKNLNDALQNADVFLGLSSAGILKKEMIKKMAKNPIIFACANPDPEILPEEAYKIRKDAIIATGRSDYANQVNNLIGFPYIFRGALDVRAKTINEEMKIAAANAIAKLARERVPDEVAAAMGGDRPEYGKDYIIPSTFDPRLVSVIPVAVAKAAIKSGVARKKIENFSLYSEQLKQRLDPSVTILQGINSKIKNNQKTVVFADGEDENTLKAAIAFKNSGLGTPIIVAKEKIVKQRLKEIGYGKNLDIKIVNSTDKKMRDKYVKFLFQKMHRKQGLLERDCDRMIRNDRVIWSSCMVECGDADAMVTGNTRRYSQSLEKIKKVIPPREGEIMFGLNMVVSKGKTVFIGDTSVNEYPSSEELADIAVSAARVVRLFGFNPKVAFLSHSTFGQPITSRTKHIRDAVELLKKRKVDFKFDGDMQPDVALDEEYSDLYPFSEIVGNANILIMPGQHSAAISYKIMKTLGGAKVIGPLLIGLAQPIEIAPLRSSTSEILNLASVAAYSAGVIDYKKK

SEQ ID NO: 82590 - protein, 249 aa, Unknown
  Bacterial polypetide isolated from the Sargasso Sea
MIKFDLSNRVAVITGGAQGFGFAIAERFIQSGAKVVIWDIDEQEAKKAVEKINSENISYKIVNVCNFEEISKSLKDIETEHNKIDIFVNNAGITGMNKTVAEYPIEEWEKVIQLNLNAVFYCCKAVVPYLEKNNYGRIVNIASIAGKEGNPNAGAYSTSKAGVIGLTKSLGKELALKNIAVNCVTPAAAKTRIFDQMTEEHINYMLSKIPRNKFAKVNELASLVTYLASEENSFATAAVFDLSGGRATY

SEQ ID NO: 82591 - protein, 267 aa, Unknown
  Bacterial polypetide isolated from the Sargasso Sea
MKTKAAVAFESKKPLEVVDIDLEGPKEGEVLVEIKATGICHTDEFTLSGADPEGIFPAVLGHEGAGIVVDVGSNVKSVKEGDHVIPLYTPECQTCNFCLNPKTNLCQAIRVTQGRGLMPDGSSRFSYQGKQIFHYMGTSTFSNYTVLPEIALAKINKAAAFDTACYVGCGVTTGIGAVIFTAKAETGCKAVVFGLGGIGLNVIQGLRMIGAEQIVGVDLNNDKKTWGEKFGMTDFVNPTAIAGDLTEHIIQITEGGADYSFECVGNP

SEQ ID NO: 82592 - protein, 143 aa, Unknown
  Bacterial polypetide isolated from the Sargasso Sea
MNSKSVRKIFIVVLAIKPHNFTLEFEQEGEKVKTRKVAFVTGASRGIGRACAVALAQAGYDVAVSARTMIDGTAFLDDGVTPVSGGLDTTVDQIRAAGQEGHPIQMDLLDRDSVIHAADEAIEHFGRIDVLVNNAIYQGPGAM

SEQ ID NO: 82593 - protein, 249 aa, Unknown
  Bacterial polypetide isolated from the Sargasso Sea
MIKFDLSNRVAVITGGAQGFGFAIAERFIQSGAKVVIWDIDEQEAKKAVEKINSESISYKIVNVCNFEEISKSLKDIETEHNKIDIFVNNAGITGMNKTVAEYPIEEWEKVIQLNLNAVFYCCKAVVPYLEKNNYGRIVNIASIAGKEGNPNAGAYSTSKAGVIGLTKSLGKELALKNIAVNCVTPAAAKTRIFDQMTEEHINYMLSKIPRNKFAKVNELASLVTYLASEENSFATAAVFDLSGGRATY

SEQ ID NO: 82594 - protein, 382 aa, Unknown
  Bacterial polypetide isolated from the Sargasso Sea
MAAKFFIPSVNVLGKGAVDDAIGDIKTLGFKRALIVTDKPLVKIGLVGEVAEKLGQNGITSTVFDGVQPNPTVGNVEAGLALLKANQCDFVISLGGGSPHDCAKGIALVATNGGSIKDYEGLDQSTKPQLPLVAINTTAGTASEMTRFCIITDEARHIKMAIVDKHTTPLLSVNDPELMLKKPASLTAATGMDALTHAVEAYVSIAANPITDACAIKAIELIQGNLVNAVKQGQDIEAREQMAYAQFLAGMAFNNASLGYVHAMAHQLGGFYDLPHGVCNALLLPHVQEYNAKVVPDRLKDIAKAMGVDVTNMTDEQGAAAAIAAIKALSVAVNIPENLTLLGVKAEDIPTLAENALKDACGFTNPKQATHEEICQIFTNAL

SEQ ID NO: 82595 - protein, 48 aa, Unknown
  Bacterial polypetide isolated from the Sargasso Sea
MSLQGKVALVTGASRGIGQAIALELGRQGAIVIGTATSASGAERIAET

SEQ ID NO: 82596 - protein, 264 aa, Unknown
  Bacterial polypetide isolated from the Sargasso Sea
MREPDLMELKDKVALVTGGGSGIGAEIARQLAGAGAAVVISDINLDAAEAVKSGIVGQGYKAIAVEHDVTSATSAFELVAKAEADLGAIDILVNNAGVSGNSPFLEMTEEEWDRVVNINLKGHFLTTRAVLPGMVARSYGRVINMSSICGKQGYPNIAHYCSSKFAIIGFTQSLAKEFAASGITVNSICPGIIDTPINQHVVGRIASDAGVSRDSAWLDLVSNIPQGHPQTCLDVARMTLYLASDWAANMTGGSYHVDGGCVMT

SEQ ID NO: 82597 - protein, 300 aa, Unknown
  Bacterial polypetide isolated from the Sargasso Sea
MTIRFDNKVAIVTGAGGGIGKQHALELAKRGAKVVVNDLGGSVDGSGASDAAEEVVELIKAEGGEAISNGASVTDLDAVKGMVDQTMSEWGRVDILVNNAGILRDKSFHKVTLEDFNLVMDVHFQGSLNCTHTVFPIMREQEYGRIIFTSSSSGVFGNFGQTNYGSAKMAMVGLMNTLKIEGQSKNVFTNSITPVAYTRMTEGLIPEDFGKNLQPEYVTPAVIYLASESAPNGAIMAAGAGVFSRIFIHETMGVSLGMGEDMTPENIQANWDKISDMEDARALQNGGEQTLKFFELINQK

SEQ ID NO: 82598 - protein, 252 aa, Unknown; identical to SEQ ID NO: 82483
  Bacterial polypetide isolated from the Sargasso Sea

SEQ ID NO: 82599 - protein, 79 aa, Unknown
  Bacterial polypetide isolated from the Sargasso Sea
MFRAWSLTRSLRTAPFYGLVNNAGIVRAAMINKMPIDTWQEVIDVNLSGVFYCLQAVGRHMYQRHEDGDTSPASIVNIS

SEQ ID NO: 82600 - protein, 295 aa, Unknown
  Bacterial polypetide isolated from the Sargasso Sea
MALNWRLPVHVSRQYDIWLGRKYLGGRYMRVIVTGASPGIGGSTIRKLAQIANQKNEKLQIAACEIRLTDDLKSLADEVGRLGADIKVLIGDLSEAQCPAKLVDDALKAFGGLDAVVSNAGITSPAPLIDLSVSKWDKLLNVNTRATLLLAQAAYPALKESKGALVAVASMSGMGAHPGMGAYSPSKAALISLCQVLAQEWACDGINVNTVSPGMIRTPLTQKVYENNQIAKERAALVPWGRVGNPEDISNVISFLLSSEANYITGQNILVDGGFVDSLYRHIPGLPDSSEIDKT

SEQ ID NO: 82601 - protein, 309 aa, Unknown
  Bacterial polypetide isolated from the Sargasso Sea
MASARTPSWRRPGRKSVPCAWQMARMRFTWIPSPNLNCVSIAETAVTQSNKDSEMTNPLFDMTGKVAVITGSTKGIGRAIAEEMARCGARVVISSRKAEACEQVASEMRAQGFDAMAIACHVGKKEDLQNLVDKTNEAWGTIDVLVCNAATNPVYGPTAEMTDDAWDKIMDTNVKGTFWLTNMVLPQMAEKGSGSVVLLSSIAGIRGNTTIGTYGVSKAAEAALARNLAIEWGPKGIRVNSIAPGLIKTDFAKALWEDPVRVKRAEDKTPLRRIGDPIDIAGLAVFLATPASAYITGQVIVADGGETIC

SEQ ID NO: 82602 - protein, 309 aa, Unknown
  Bacterial polypetide isolated from the Sargasso Sea
MLRISPAERPARTSQETTMTDSRTSVLAGKCALVTGASRGIGRAIAQRLASEGATVVVTARSLMQSATTAGTLAETVALIEQAGGRAIALAADLSNAAERDALVGRAAQAAGGLDILVNNAGVADYACVDAMPMTMFDTTIEHYLRIPFALAQAAIPLMRARGAGWIVNVGSVTALPPLRPFDDFSRAGGATVYAAVKAALSRFTQGLAAELEADGIAVNLVAPSTAIRTPGAARYIPEGYPTEDVAYLAETALALCRLPARERTGLVTHSLHFPLAQQLAVRSLDGRTVLPPPVVPAYAHPHIDPTGL

SEQ ID NO: 82603 - protein, 266 aa, Unknown
  Bacterial polypetide isolated from the Sargasso Sea
MTQAHRGTALITGASSGIGAVYADRLARRGYDLILVARNRDRLAALADRITNETQRSVEIVDADLNNRAALAAVEAKLKQDASITLLVNNAGIGTHTPLLDSDVDAMTRMIDLNVTALTRLTYAAVPGFVARGNGAVINISSIVAISPETLNGVYGGSKAFVLAFSQSLHHELADKGVQVQAVLPGATATDFWQTGGLPLEHLPKEIVMSATDMVDAALVGFDRGELVTIPSLHAGDEWAAYEAARRTMAPHLSADTPAPRYSTAG

SEQ ID NO: 82604 - protein, 239 aa, Unknown
  Bacterial polypetide isolated from the Sargasso Sea
MSSRTYLVTGASRGIGLAISTLLARRGHRVIGLARHAQGIDFPGELRACDLADLEQTAAVLARISEQHDVDGIVNNAGIVLPQPLGQIDFQSLQTVFDLNVRAAVQVTQHFAEAMKARGHGRIVNICSRAIFGSLDRTAYSAAKSALVGCTHTWALELAEHGVTVNAVAPGPIETELFRQTRPVGSEAERKVLATIPARRLGTPDDVAAAIAFFLSDEAGFVTGQVLAVDGGGSLGGRS

SEQ ID NO: 82605 - protein, 237 aa, Unknown
  Bacterial polypetide isolated from the Sargasso Sea
MDIKNATVFITGANRGLGLAFAREARRRGAAKVYAGMRNTSGFDEPGVVPVRIDVTDPASIAEAAKLAADTTLLVNNAGIAALIDGPLAADMEAQSARMFDTNYYGVVRVTQAFEPILAARPHAAIINVLSDIVWLPRPYLAPYAASKAAAWSYTNQLRLSLHERGIQVLGLHVGFVDTDLTHGIDVPKASPEDVVRQTYDALALGKSEVMADKGTALLKSTLAAEIPGYITPPAGL

SEQ ID NO: 82606 - protein, 69 aa, Unknown
  Bacterial polypetide isolated from the Sargasso Sea
MSKISLIGAGQIGGTLAHLIGTKELSDEVVLFDVASGIAKGKALDIAQSSSVDGFNVKFSGTDNYKDIK

SEQ ID NO: 82607 - protein, 248 aa, Unknown
  Bacterial polypetide isolated from the Sargasso Sea
MNSFQLNDQHALVTGAGRGLGEACALALAEAGAEITLVARSSDQLESVAKQIRDSGGQASVHPADLTKMEEIRKLEDLGPFTILVNNAGINRPQSFEHVKENDFDDVLDLNVKSAFFVAQSVARGMIQAGRGGSIINMSSQMGHVGGRNRSVYCATKHAMEGFSKGMALDLAAHKIRVNTVCPTFIETALTKPFMENQEFMQDILNRIPLGHVGQPEDVAGAVLYLASDASRLVSGSSIKVDGGWTAV

SEQ ID NO: 82608 - protein, 266 aa, Unknown
  Bacterial polypetide isolated from the Sargasso Sea
MAVEHSSLKGKVGLITGSTSGIGLATAHVLAEQGCHLILHGLMPEAEGRRLAAEFAEQYHIHTYFSNADLRDPESIHAFMDAGVKALGSIDILVNNAGIQHTENVAHFPIDKWNDIIAINLSSAFHTIQQAVPAMAEKRWGRIINIASVHGLVASVNKAAYCAAKHGIVGLTKVVAIECAEQGITVNAICPGWVDTPLINKQIEAIASNKGLSYDEAKYQLVTAKQPLPEMLDPRQIGEFVLFLCSSAARGITGASLAMDGAWTAQ

SEQ ID NO: 82609 - protein, 67 aa, Unknown
  Bacterial polypetide isolated from the Sargasso Sea
MSKISLIGAGQIGGTLAHLIGTKELVDEVVLFDVASGIAKGKALDIAQSSSVDGFNVKFLGSDDYKD

SEQ ID NO: 82610 - protein, 929 aa, Unknown
  Bacterial polypetide isolated from the Sargasso Sea
DVDRRTRHAVFFDYNKDGLLDLYLLNHPPNTGNFSPFLGTDMKLPEYNLQLFENKEGYFEDVTAKAGLDRSGFPNAAVIGDFNKDGWPDIYVANDFEAPDFLYYNNQDGTFDYKTESSLRHTSFYSMGVDAADINNDSHLDLMVLDMTAEDNFRLKSNMSGMNPDSFWKVVNDGGHYQYMFNTLQLNNGNETFSDIAQFTQTAATDWSWASLVADFDNDGNKDIYITNGLLRDIRNTDADKKISDLVSKTFNKYIIENPDNSNVSIWDVIDLQELLNFLPSQKLKNYFYKNYGDLKFKNEIDQLGLGDPSFSHGASYADLDNDGDLDLIVSNVNEKAFIYRNNSDKNFVRLKLEDDSPTFGSKVSIYHDNNFQFFETTNVRGIYSTSENVVHFGINNSKTVDSILIEWPDQSTQKILKPKVNRLLKIKKKGAKADLELIKENSTKFQEDKSILKYVHQENYFNDYDKQVLLPHKLSQLGPALAKGDINGDGLEDLFIGGASGQEATVYIQNENSFDKVGNDIWTKHKALEDIDAVFFDSDNDGDLDLYVVSGGNEFMPNSSTYLDRLYINDGLGNFDFRRDLLPSNYKSGSVVKPHDFDNDGDLDLFIGSRMKPWNYPEPASSFMLINDNGNFINYDDKNQAFKDLGLVTDAEWFDFDNDGDSDIVVVGEWMPITVIVNQQGQFTKQELNTNLGCSSTGWWYSVEVGDLNNDNLPDLIVGNLGLNYKYKASVDEPFEVFYDDFDDNGKKDIVLAYYNYGIQFPLRGFSCSSQQVPDLQDKFKKYDIFASLDVQQVYGEENLENALRLSVNTFESATLINNKSFFDFRPLPNYAQFSSVNDIIIKDFDNDKVNDLLIVGNMYHAEIETARNDAGNGLLLKGNGDGSFNEIPTLKSGFFTPGDSKKAISLTLGNKEIILVANNDDRLQIFK

SEQ ID NO: 82611 - protein, 1185 aa, Unknown
  Bacterial polypetide isolated from the Sargasso Sea
MHLKRKLNLLFSAFSTVILVACGGGGGSSAPTPAPTPAPTPAPTPAPTPAPTPAPLEASLLSTTIAGSAYDIIQISNANSGSTPGGTADAGIKTVYVYTPDGSDNGVATYEGTVWPYVTYSQAAGTIVVPDSITATFSVNSENHVLINNQPVYQYAGDDAGSDVNGNGNGGVWYAIQADGTSLEPDSTPAPTPAPTPAPTPAPTPAPTPAPTPAPTPAPTPAPTPAPTPAPTPAPTPAPSGLAVGGDIGVSGPFALDSDVNSPDITNVENGFTNRAQFVEANATILGWMGNSDELEVFQVLAQSGGSVALELEIINHDGDSGDTTNNTDIDIYVVDTEEVTVSSGAGLGKTETAEIPAGNGTIYYLIIDHWRGYNTVPSSYVITQTPNFATSTEQKEATDRSNADFSLDKILVVKKSMPPEMVIDFNATENELLESMGNRSGGLVEITPEELSNMAGLPADESYSSRLKEDFPDAHKKGRWQKALSILQSRSPSLAIEPDWKIYTHADPFVADPSYNTYQWWNFDVTNLPEGLDIIGQEVKPVNVGVLDSGSPSLDDPSFERSTFLPDWGWDMEDNDTNPMDEEFLLSDFSHGIHVGSTIAMLNDGLDGNGMGARITPIRVCYQGGCGNTYDAYLFVNGDANQSNTYFKERVGDNLGIPVNQVTEKLHSINMSYGGGGSQTSQACVKLAELSETGILVVSSSGNSGIGSIGYPSSCPTVYSIGATNGTDRRSSYSSTNQYIDFAAPGGEYSDWNADGVDDLVYAYAYWENYVMNSNNGNYMIGAQGTSMASPHAAGILGLIKYYYEEVAKPFQTNTSLPTVLKYTQVDKMLRANLLTNDVNKEARDNDPTARPGWDEHLGYGIIDLEKSLKSINAFNSGYFTSFDNLPYYEGPSLVALDAASSYEGTFTITPNGAAGPGFNTVSYTYVDEFLDVTDNGSTFTVKKDPDYSWAGWVNTPITFSFPMEAGAGVPYDGYELLSVGVNVIFHVIGDAYDVNFPTLKARLLDDVGVLVAESTSSVTDGVGAFVFDELTAGTYRLSIGSDINGDNSWGGPGEMSGSSDLFQITDTNVTVDINLAPEKTGVANSAPVITSNPTTVAFVGSTYIYGVDASDADDDDLTYTLTVYDSSGDEVDSFLSFGAFPWPATTLSGTPTADDIGVYTVRIVVTDGTDAAVQEYSLEVKQS

SEQ ID NO: 82612 - protein, 57 aa, Unknown
  Bacterial polypetide isolated from the Sargasso Sea
MTKISLIGAGQIGGTLAHLIGTKELVDEVVLFDVASGIAKGKALDIAQSSSVDGFNV

SEQ ID NO: 82613 - protein, 303 aa, Unknown
  Bacterial polypetide isolated from the Sargasso Sea
MNHCIYDIEDEFSRSQNSFHEPTPGRLNSRKGKIMTTSTKGTALITGASAGIGAIYADRLAKRGYDLVLVARNQDRLNTLARRLMAETGRSVETVAADLNDKAALAKIEDILRENSNITMLVNNAGIGSVASILNGDVDTMESMINLNITALTRLTYAVAPVFAGKGTGTIINISSVVGIAVELLNGVYSASKSYVLSFGHTLQRDLADKGVRVQTVLPAATATEFWDVAGYAKQKEAASTMTADDLVDAALAGLDQGELVTIPTLHDGDGWTQWEAARRALTPQFANAKAAPRYIADAGTGA

SEQ ID NO: 82614 - protein, 369 aa, Unknown
  Bacterial polypetide isolated from the Sargasso Sea
LASKPVMEGKAVLFKRFADIDSIDIEVNSNDPDEIINTIKNISGTFGGINLEDIAAPNCFIIEKKLKEQLDIPIFHDDQHGTAIITTAALINALDISGKKIDKVKVVINGAGASAIACANLFKTLGVKPGNLIMCDRKGVIYKGRDKVDKFKSAFATDTKFRNLKDAMKNADIFLGLSAKDVVSVDMVKSMEKNPIIFACANPDPEIKPEIIHEIRSDAIVATGRSDYPNQVNNLIGFPYIFRGALDVRAKEINEEMKMAAAKAIALLAREEVPDEVVSAYGGERPKYGREYIIPSTFDPRLIRIIPAAVAKAAIKSGVARIKIKDFENYKEQLSYRLDPSLSIMQGINAYVRKKPKTVVFAEGEDKIC

SEQ ID NO: 82615 - protein, 268 aa, Unknown
  Bacterial polypetide isolated from the Sargasso Sea
GIAQTCSVRGYDVIMQDVSDEVVQKGLGSIQNSLGRLLGKEKISQADHDDALGRIQTATDISAMSGCDLVVEAASENMDIKMGIFPRLNEICPDHTILASNTSSLSLTRIAAGSGRPDRVVGMHFFNPVPLMALVEVIRALQTSDETYSAIDTLARDLGKTPVSVKDSPGFVVNRMLVPMINEAVFILYEGLAQAEDIDAAMKLGAAHPMGPLTLADMIGLDVCLWVMDVLHQEFGDSKFRPCPLLKQMVDAGYLGRKSGRGFYDYSK

SEQ ID NO: 82616 - protein, 513 aa, Unknown
  Bacterial polypetide isolated from the Sargasso Sea
MALAYSPGVAAPVKEIYKNPEKAYDYTTKGNLVAVISNGSAILGLGNLGAIASKPVMEGKAVLFKRFADIDAIDLEIDSKDPKEIVNSIKNFAVSFGGINLEDIAAPECFIIEENLKKILDIPVFHDDQHGTAIITSAALINSIHITKKNISKIKVVVNGAGASAMACSDLFMKLGVKKNNLTMIDSKGVINFDRKGLNKWKLKYAKKTKDKTLSDALKNADVFLGLSSAGILKKEMIKQMAKNPIIFACANPDPEILPEEAYKIRKDAIIATGRSDYANQVNNLIGFPYIFRGALDVRAKTINEEMKISAANAIAKLARERVPDEVAAAMGGDRPKYGKDYIIPSTFDPRLISVIPVAVAKAAIKSEVARKNIENFNQYSEQLKQRLDPSVTILQGINSKVKKNPKTVVFADGEDENTLKAAIAFKNGGLGTPIIVAKENVVKQRLKEIGYGENLDIKIVNSTDKKLRHKYVKFLFKKMHREQGLLERDCDRMIRNDRVIWASCMVECGDAD

SEQ ID NO: 82617 - protein, 373 aa, Unknown
  Bacterial polypetide isolated from the Sargasso Sea
MRFINHISLKFTLIVYLIYLMKKNKIEHYSDKEALEFHNSNKSGKIEINSSKPMTSKRDLALAYSPGVAAPVKEIFKNPERAYDYTTKGNLVAVISNGSAILGLGNLGAIASKPVMEGKAVLFKRFADIDAIDLEIDSKDPEEIVNSIKNFAVSFGGINLEDIAAPECFIIEENLKKILDIPVFHDDQHGTAIITSAALINSIHITKKIISKIKVVVNGAGASAMACTDLFIKLGVKKQNLTMIDSKGVISLDRKGLNKWKLRYAKKTKDTTLSDALKNADVFLGLSSAGILKKEMIKKMAKNPIIFACANPDPEILPEEAYKIRKDAIIATGRSDYANQVNNLIGFPYIFRGALDVRAKTINEEMKIAAANA

SEQ ID NO: 82618 - protein, 197 aa, Unknown
  Bacterial polypetide isolated from the Sargasso Sea
NIGENHFYYKVDLSNEDNLQKCLDNVSKEHKGISVIVNNAGITHDGLIMRMNYEQWSKVIQTNLSSNYQIIKTLLPNMLSNKYGKIIGISSIVGSTGNPGQANYVASKSGLSGLYKSIALEVARRNINVNLVSPGFISTSMTEKLNDNQKNDYLSKIPMMRFGNPKDVANLVFFLSTDDASYITGQNFHVNGGMLMV

SEQ ID NO: 82619 - protein, 252 aa, Unknown
  Bacterial polypetide isolated from the Sargasso Sea
MSLLKDKVAIVTGGNGGIGLGIAEGLADQGATIIIAARNEEKNKDAIKKIKLSSKDSETFKLDVNDQDSINNLMKFTTEKYGKIDILVNNAGISRRSDEPHLLSRNDWNDVIDTNLNSIHHMTSAVFPYLKKNKSGKIINIGSMMSIFGNANSAAYAASKGGVVQYTKSCAIAWAKYNIQINAILPGWIVTDMTNEFKRVNPTRYATIAGRTPAERWGLPEDMAGTAIFLSSKYSDFVNGVSIPVDGGYSVM

SEQ ID NO: 82620 - protein, 275 aa, Unknown
  Bacterial polypetide isolated from the Sargasso Sea
RARVIYVAVISNGSAILGMGNLGALASKPVMEGKAVLFKRFADIDSIDLEIDSSDPNEIINSIKNFSPSFGGINLEDIAAPDCFIIEEKLKEILDIPVFHDDQHGTAIITTAALINALDISKKSINKIKIVVNGAGASAMACANLFKKSGVPQKNITMVDRTGVIFRGRENLNQWKSSHAIETKNRTLNDAIKDADVFLGLSAKGALTKDMVKKMAKNPIIFACANPDPEITPEEIEEVRNDAIIATGRSDYPNQVNNLIGFPYIFRGALDVRSK

SEQ ID NO: 82621 - protein, 168 aa, Unknown
  Bacterial polypetide isolated from the Sargasso Sea
MRNSKPKIALITGGASGLGYSIAKRLKKSLYEIIIVDIDKKKIAESTSKIKNSKGYLCDISKESSVLNLINDISKDYKYFPSLLVNNAGIVRFSDFLEHPVDDFKKVIEVNLIGTFLMSQSFGKKMVKMGKGCIINITSLNAFSPSPDAGAYPSTKAAIATLTEQMAY

SEQ ID NO: 82622 - protein, 255 aa, Unknown
  Bacterial polypetide isolated from the Sargasso Sea
MEKTQLFDLDGKVALVTGASRGIGEAIAKLLAQQGAHVIISSRKIDDCQAVADAIVAAGGKASALACHIGDMDQIVATVAAIREQFGKLDILVNNAAANPYFGNVLDTDLGAFQKTVDVNIRGYFFMSVEAGKLMRENGGGNILNVASVNGVVPGQLQGIYSITKAAVINMTKVFAKECAQFGIRCNALLPGLTDTKFASALTTNDAILKPALQRIPLARAADPTEMAGTVLYLVSDASSYTTGAAINVDGGMLA

SEQ ID NO: 82623 - protein, 284 aa, Unknown
  Bacterial polypetide isolated from the Sargasso Sea
TFGGINLEDIKAPECFEIEQELIKRCKIPVFHDDQHGTAIVTAAGMLNALEIQGKSIESAKIVCMGAGAAAVACMELLIKCGAQRERIYMLDRKGVIHTRREDLTEHKKLFANNTDKRTLEDVMEGADIFVGVSGPDVLPPETLALMAENPIVFACSNPDPEIKPELAHEVRKDLIMATGRSDYPNQVNNVLCFPFIFRGALDVRATAINDEMKVAAVEALRAITKEPVPEEVLAASKSTSLTFGKEYIIPKPMDPRLCERIATAVSKAAIESGVARVPESPEE

SEQ ID NO: 82624 - protein, 137 aa, Unknown
  Bacterial polypetide isolated from the Sargasso Sea
MRLKGKVALVTGGNKGIGAAVVRRFASEGARVWSGDIVTDKTNNFSDDLADKTETIVHETLDVTSHDSWQLIINKIVHETGKIDILVNNAGIYDRRSIEETTEEQFDKMLAVNTKGPFLGIKLALEALKASGNASIV

SEQ ID NO: 82625 - protein, 295 aa, Unknown
  Bacterial polypetide isolated from the Sargasso Sea
SGDDPEGIFPSILGHEGAGIVVDVGPDVTSVKKGDQVIPLYTPECRQCKFCLSGKTNLCQAIRETQGKGLMPDGTSRFSLKNKPIYHYMGTSTFSNYTVLPEIALAKVRNDAPPEVICYIGCGVTTGIGAVINTAKVTPGSNVVVFGLGGIGLNVIQGARLVGANKIIGVDINEKKKSLAEKYGMTDFVNPNNYEDKLIQHLVEITDGGADYSFECIGNTETMRQSLECCHKGWGESTIIGVAGAGQEIATRPFQLVTGRVWRGSAFGGAKGRTDVPKIVDWYMEGKNEIDSMIT

SEQ ID NO: 82626 - protein, 315 aa, Unknown
  Bacterial polypetide isolated from the Sargasso Sea
AAYDYTSKGNLVAVISNGSAILGMGNLGALASKPVMEGKAVLFKRFADINSIDIEIDSSNTSEIIKSIKNISGSFGGINLEDIAAPDCFVIEEKLKEILDIPVFHDDQHGTAIITTAALINALDISKKSIKKIKVVVNGAGASALACTNLLKKTGIPKKNIIMLDSKGVLYRGRNNLNKWKSAHTIETKKRTLEQAIDGADVFLGLSSKSILSKKMVKKMAKNPIIFACANPDPEITPEEVEQVRNDAIVATGRSDYPNQVNNLIGFPYIFRGALDVRAKTINEEMKVAAANAIASLARERVPDEVVAAMGGDRP

SEQ ID NO: 82627 - protein, 301 aa, Unknown
  Bacterial polypetide isolated from the Sargasso Sea
NIDEIVNSIKNFSSSFGGINLEDIAAPDCFVIEERLKKLLKIPVFHDDQHGTAIITSAALINALDLAKKEIKKVKIVINGAGASAMACSNLFKKNGVPQKNITMLDRKGVIYKGRKGLNVWKSAHATHTKHRNLKDAIEGADVFLGLSSAGALKKEMIKVMAKNPIVFACANPDPEITPEEIEEVRDDAIVATGRSDYPNQVNNLLGFPYIFRGALDVRAKTINEEMKLAAVHAIASLARERVPDEVAAAMGGERPVYGKNYIIPSTFDPRLINVISIAVAKAAIKSGVARKKIENFDLYS

SEQ ID NO: 82628 - protein, 286 aa, Unknown
  Bacterial polypetide isolated from the Sargasso Sea
MKTKAAVAFEAGKPLEICEVDLEGPKSGEVLIELKATGICHTDAFTLSGEDPEGVFPSILGHEGAGVVVEVGADVSSLKPGDHVIPLYTAECRKCEYCLNPKTNLCQAVRETQGRGVMPDGTTRFSLDGKPLMHYMGCSTFSNYTVMPEISLAKVREDAPFEKICYIGCGVTTGIGAVVFQAKVEIGSTVAVFGLGGIGLNVIQGCKLAGASRIIGIDINSDRESLGKKFGMTDFINPNSVENVVDQIIQMTDGVDYSFECIGNVDVMRQALECCHKGWGESYIIG

SEQ ID NO: 82629 - protein, 311 aa, Unknown
  Bacterial polypetide isolated from the Sargasso Sea
MFINAVKRRWPDVMIQFEDFAQPNAMPLLNRYRNDVCCFNDDIQGTAAVTLGTILAACKTKQQKLRDMKVVFVGAGSAGCGIAEMLIQQMVFEGLTDEQARKQVFMIDRFGLVTEGMEGLRDFQQKLQQKNADLADWTFSGDYASLLDVMHCAQPDVLIGVSGQPGLFTEQVIRAMKQGCELPIIFPLSNPSRQVEARPEQVIEWTEGDVIIATGSPFKPVEYDGKIFPIAQCNNSYIFPGIGLGVVASKAKLISDEMLMAASNALASASPLVNTGQGSLLPPLAAIAEISREIAFEVGRVAMEQGLALEM

SEQ ID NO: 82630 - protein, 261 aa, Unknown
  Bacterial polypetide isolated from the Sargasso Sea
MYRKVFANKVFDRKVVLITGGCAGIGRALAMRLAQAGARLVILDLQQAALDSLVQHLADHHNAEALGLLCDVADAEAVQRAVALAVERFGGIDVLVNNAGITHRSTFAETSLEVFQRVMAVNYFGALYCTQAALPSLIARGGQIIVLSSLSGIAPLLYRSAYNASKHALHGLFETLRFELKGSGVNVMLVCPGFTATDLRKNALVGDGSVAAQPPLAMGKVASPQDVAEAIYHGALKRRRLLVLSNVDWRARVLARFFPRL

SEQ ID NO: 82631 - protein, 253 aa, Unknown
  Bacterial polypetide isolated from the Sargasso Sea
MIEDLYDVKDRVAVVTGSSRGIGKQCALAFAEAGAKLVLNYVSNKQAAEITAEEIEGLGSEAIVVQADVKDFEACQSLGEEAVKKYGKIDFLVNNAGINRDITFSRMSQEEWQEVIDTNLGALFNMSKACVPHMRDAGFGSIVSISSIIGETGNIGQSNYAATKSGMYGFTRSLARELAKDNIRVNTVSPGFVETDMLHTVPADLLAGIKTEIPLGRFGYPDEVALAVLYLCSTAGSWITGTNLSINGGHNML

SEQ ID NO: 82632 - protein, 314 aa, Unknown
  Bacterial polypetide isolated from the Sargasso Sea
AAPACFMIEQQLSEKLDIPVFHDDQHGTAIVATAGLLNALTITGRDIKNFKMVVNGAGAAGIACVELLKAMGMPSKNVIMCDRKGVISKSRNDLDQWKSAHAVDTPHKTLEDALKGADIAFGLSVKGAFTNDMMLSMNDKPIIFAMANPDPEITPDELRKIRPDAIIATGRSDYPNQVNNVLGFPYIFRGALDVRASAINIDMKIAATKALADLAKQDVPDEVANAYSGQHIKFGPEYIIPKPFDARLLTAIPPAVAKAAEESGVARKPIRDELGYRRRLAARLDKTATLIQSVADTVKASQKKIVFAEREQET

SEQ ID NO: 82633 - protein, 171 aa, Unknown
  Bacterial polypetide isolated from the Sargasso Sea
MKIEDLFKIKGKVALVTGGSRGIGEMIAAGFLANGVKVYISARKEDQLNQKAEELSEKFGGECIPIHNDLGTLDGVEELVAKYSSFEESLDFLVNNAGAAWGEPFESFSEGGWDKVMDLNVKSMFFLSRNLTNLLKKNASLDDPSRIINIGSIEGIQVPPLKLTHMQPPKQ

SEQ ID NO: 82634 - protein, 200 aa, Unknown
  Bacterial polypetide isolated from the Sargasso Sea
MKNLFDLTGKVALVTGASRGIGESIARLLAQYGAHVIVSSRKIDGCEAVASSIRDAGGKATALACHVGEMEQITEAFNVIKRDFGKLDILVNNAAANPYFGHILDTDLGAYNKTVDVNIRGYFFMSIEAGKMMKEQGGGVILNTASVNGVTPGDMQGIYSITKAAVISMTKSFAKECGSLNIRVNALLPGLTDTKFASAL

SEQ ID NO: 82635 - protein, 310 aa, Unknown
  Bacterial polypetide isolated from the Sargasso Sea
MIPDEIIKSIKNFSKSFGGINLEDIAAPDCFIIEKKLKEILDIPVFHDDQHGTAIITCAALINAIDIAKKDIKKIKVVVNGAGASAMACTNLFIKTGVTRKNITMLDRKGVIHKKRDGLNQWKSAFAIDTKDRTLKDAIKDADVFLGLSSAGVLKKDMVKLMSKNPIIFACANPDPEITPEEIEEVRKDAIVATGRSDYPNQVNNLIGFPYIFRGALDVRAKTINEEMKVAAVKAIASLARERVPDEVVAAMGGERPTYGREYIIPSTFDPRLISVIPVAVAKAAIKTGVARKKIDNFNIYSEQLKQRLD

SEQ ID NO: 82636 - protein, 353 aa, Unknown
  Bacterial polypetide isolated from the Sargasso Sea
FVIEEKLKKILDIPVFHDDQHGTAIITTAALINALDISKKSIKKIKVVVNGAGASAIACTNLLKNTGVLKKNIIMLDSKGVLYRGRKNLNRWKSAHAIETKKRTLDEAIDGADVFLGLSSKSILSKKMVKKMAKNPIIFACANPDPEITPEEVEEVRGDAIIATGRSDYPNQVNNLIGFPYIFRGALDVRAKTINEEMKVAAANAIASLARERVPDEVVAAMGGDRPTYGKEYIIPSTFDPRLISVIPLAVAKAAIKSGVARKKIKNFETYADQLKQRLDPSVTIMQGINSQIKKTQKRIVFTDGEDQNTLKAAIAFKKNSLGIPILVAKEKIVKKRLQEIGYSENFDIEITN

SEQ ID NO: 82637 - protein, 328 aa, Unknown
  Bacterial polypetide isolated from the Sargasso Sea
NLGALASKPVMEGKAVLFKRFADIDSIDLEIDSKDSGEIINSIKNFAPSFGGINLEDIAAPDCFIIEQKLKEILDIPVFHDDQHGTAIITTAALINALDISGKSIKEIKVVVNGAGASAQACTELFKNSGVASENVIMLDRKGVIYKGRTEGIDQWKSKYAVETKLRSLEDAMKSADVFLGLSAKGVLKKEMVKSMAKNPIIFACANPDPEILPEEINEVRNDAIIATGRSDYPNQVNNLIGFPYIFRGALDVRSKTINEEMKVAASQAIAKLAREDVPDEVVAAMGGERPHYGKDYIIPSTFDPRLISVIPAAVAKAAMESGVARKN

SEQ ID NO: 82638 - protein, 202 aa, Unknown
  Bacterial polypetide isolated from the Sargasso Sea
LDPAGVAPLLCAGITTYSPLRTWGAGPGKKVGIVGLGGLGHMGVKLARAMGAHVVLFTTSPSKIEDARRLGAHEVVISKNADEMGAHANSFDFILNTVAAQHDLNPFLNLLKRDGTMTLVGAPEHDHPSPQVFNLIFKRRRLAGSLIGGIAETQEMLDFCGEHGITSDIEVIPMQGINEAYERMLKSDVKYRFVVDLDSLRK

SEQ ID NO: 82639 - protein, 231 aa, Unknown
  Bacterial polypetide isolated from the Sargasso Sea
MKSRAAVAFASGEPLEIVEVDLEGPKAGEVLIEVKATGVCHTDSFTLSGDDPEGEFPVILGHEGAGIGREIGPGVTSVKVDDIVIPLYTPECRQCDFCLNPKTNLCQSIRETQGRGLMPDNSSRFSLDGKPILHYMGCSTFSNFTVLPEIALAKVRGDAPFDKICYIGCGVTTGVGAVAFEARVEPGSSVAVFGLGGIALNVIQGARMVGADRIIGIDINPARENSAEILD

SEQ ID NO: 82640 - protein, 190 aa, Unknown
  Bacterial polypetide isolated from the Sargasso Sea
VVACDLSKKNEIIKLIKKTDELLGHVDILINNAGITKDNIFLRMSENEWEDVLNVNLNSTFSILKLITKGMIKRRYGRIINISSVVGVTGGAGQVNYSASKAGLIGLTKSLSQEVATRNITVNCIAPGFIETPMTEKLDEKRKDAILNSIPMNRIGTPEDLSSAIIFLASQESTYITGQTIHINGGLYMN

SEQ ID NO: 82641 - protein, 261 aa, Unknown
  Bacterial polypetide isolated from the Sargasso Sea
MKAAVLREVNKPLEIEDVECNSPGPREVLIKTAAAGVCHSDLHFINGSYPHQLPVILGHESAGIVEAVGSAVNYVKPGDHVITCLSAFCGHCEPCLTGRMSLCQEPELQRGSEEPPRLAKGEERVEQFLNLSSFAEYMLVHEHAIAKIREDMPLDRAALIGCGVTTGVGAVIHTAKVEPGSTVAVIGCGGVGLSAINGAAIAGASQIIAIDMVESKLELARKFGATDVINAKNDDPVQAVRELTSGGVHYSFEAIGLAKTA

SEQ ID NO: 82642 - protein, 145 aa, Unknown
  Bacterial polypetide isolated from the Sargasso Sea
CEYCLNPKTNLCQAVRETQGQGMMPDGTSRFSLNGKPIMHYMGCSTFSKYSVIPEISLAKVREDAPFDKICYIGCGVTTGIGAVVFQAKVEKGSTVAVFGLGGIGLNVVQGSKMAGASRIIGIDINPERESLGKYFGMTDFINPK

SEQ ID NO: 82643 - protein, 243 aa, Unknown
  Bacterial polypetide isolated from the Sargasso Sea
DTNEIIKSIKNIAGSFGGINLEDIAAPDCFIIEEKLKEILDIPVFHDDQHGTAIITNAALINALDISKKSIKKIKVVVNGAGASAVACTNLLKNTGVPQKNIIMLDSKGVLYRGRDNLNQWKSSHAIETKKRTLDEAIDGADVFLGLSSKSILSKKMVKKMAKNPIIFACANPDPEITPEEVEEVRKDAIVATGRSDYPNQVNNLIGFPYIFRGALDVRAKTINEEMKVAAANAIAALAREDV

SEQ ID NO: 82644 - protein, 101 aa, Unknown
  Bacterial polypetide isolated from the Sargasso Sea
MKKKISLIGAGQIGGTLAHLISIKELADVVLFDVAEGVAKGKALDIAQSTAVDGFKCNLIGTNKYEDIKNSDVIIITAGVSRKPGMSRDDLLSTNLKIIKQ

SEQ ID NO: 82645 - protein, 331 aa, Unknown
  Bacterial polypetide isolated from the Sargasso Sea
MTTKRDLALAYSPGVAAPVKKISENPEAAYDYTSKGNLVAVISNGSAILGMGNLGALASKPVMEGKAVLFKRFADIDSIDLEIDCKNTDEIINSIKNFAPSFGGINLEDIAAPDCFIIEQKLKEILDIPVFHDDQHGTAIITTAALINALDICGKSIKKIKVVVNGAGASAQACTELFKNSGVKSENLIMLDRKGVIYEGRTEGIDQWKSRYAVKTKHRNLEDAIKGADVFLGLSAKGVLKKEMVKSMAKNPIIFACANPDPEITPEEINEIRNDAIIATGRSDYPNQVNNLIGFPYIFRGALDVRSKTINEEMKVAAANAIAKLTREDVP

SEQ ID NO: 82646 - protein, 116 aa, Unknown
  Bacterial polypetide isolated from the Sargasso Sea
MVFYHHFWGLVVGRIQDRVAIVTGGASGIGKAVSKRLAEEGAKVVVTDIQEEMGLITISEIKEAGGTAEFLRHDVTQEEDWQSVVAKTVEAYGGLHILVNNAGIAIGGSIVTLALE

SEQ ID NO: 82647 - protein, 218 aa, Unknown
  Bacterial polypetide isolated from the Sargasso Sea
NHFAKNNYIVIGTSRNNFEFQNKCDNLIPIKLDVTSRDDIKDCFNYLKTKELLPNILINNAGITSDKLMLTMKDEDWDNVIETNLTGTYNLTKIFIKNMIKNKFGRIINISSVAGLMGNPGQVNYSSSKAALNGFTKSLAKEVGSRNITINSIAPGFIDTDMTAYINEAEKNNIIKDIPLKRFGDVSDISELAIFLASEEASYITGQTISVDGGLLMY

SEQ ID NO: 82648 - protein, 96 aa, Unknown
  Bacterial polypetide isolated from the Sargasso Sea
MDLNNKVALVTGGASGLGQATVEAYVAKGAKAVILDINEDKALEIINNLGEDKVMFISTDIMKEDPVIEAVNEIKENFGELHIAVNCAGTGYPGRI

SEQ ID NO: 82649 - protein, 292 aa, Unknown
  Bacterial polypetide isolated from the Sargasso Sea
GINLEDIAAPNCFIIEEKLKKLLDIPVFHDDQHGTAIITSAALINAVDIAKKDLKKIKVVVNGAGASAMACASLFKKTGVLDKNIIMIDRKGVIYKGRKGLNKWKSTYAIETKNRTLNDAINGADVFLGLSSAGVLKKEMIKKMAKNPIIFACANPDPEITPEEVEKVRKDAIIATGRSDYPNQVNNLIGFPYIFRGALDVRAKTINEEMKIAAVNAIASLAKKRVPDEVVAAMGGERPKYGKDYIIPSTFDPRLISVIPVAVARAALKTKVARKKIDSFETYADQLKQRLD

SEQ ID NO: 82650 - protein, 113 aa, Unknown
  Bacterial polypetide isolated from the Sargasso Sea
MRKKISLIGAGNIGGTLAHLIALKELGDVILIDIVKGVPKGKALDLAQSSGIESFESNIIGSSNYKDIINSDVVIVTAGFPRRPGMSRDDLVEKNSKIIKEVGKAIKKFCPKA

SEQ ID NO: 82651 - protein, 293 aa, Unknown
  Bacterial polypetide isolated from the Sargasso Sea
ATLSALNGFRAASRAIDKYVFLRQLQHEDAGVFYRLLVNNAMEIMPYVYTPTVGEACQTYHTLPIAQQGVYITADDKGRVGEALRSRAPPSLANDLKVAVVTDGERILGLGDLGAGGMGIAEGKILLYSVCAGIRPNQCLPVCIDVGTDNKTLLEDPMYKGLRRERLRGREYDEVVEEFMSEMRSWQPRCLVQFEDFGNTNAFRILERYRHRQPCFNDDIQGTACIALAGVLSGLRATGADLTTQRILFYGAGEAGVGIGELIAMALEKRGMSHHDAINRCYFMDSKGLVASS

SEQ ID NO: 82652 - protein, 297 aa, Unknown
  Bacterial polypetide isolated from the Sargasso Sea
IINSIKNFAGSFGGINLEDIAAPDCFIIEKKLKKILNIPVFHDDQHGTAIITCAGLINAIDIAKKKIDKIKVVVNGAGASAMACADLFIKSGVLQKNLIMIDRKGVIYKGRKNLNEWKLKHAIKTKYRTLKDAINNADVFLGLSAAGVLKKDMIKKMSKNPIIFACANPDPEITPEEVEEVRSDAIIATGRSDYPNQVNNLIGFPYIFRGALDVRAKVINEEMKIAAVNAISSLARERVPDEVVAAMGGERPKYGKNYIIPSTFDPRLISVIPVAVAKAAVKSGVARKKIENFEVYA

SEQ ID NO: 82653 - protein, 148 aa, Unknown
  Bacterial polypetide isolated from the Sargasso Sea
MSERLKDCTAIITGGARGQGAAEARRFVEEGAFVVIADVLDSEGQALAKELGDSATFQHLDVTDEDNWDAVVGRLIDEGRTIDVLVNNAGILLFDRLTRSSREDFERVMEVNCTGVFLGMQAVAEEMKKQQSGSIVNISSVAGLQGVG

SEQ ID NO: 82654 - protein, 307 aa, Unknown
  Bacterial polypetide isolated from the Sargasso Sea
ITVDDLSLAYTPGVAEPCKEIAKDPNKAFNYTAKGNLVGVISNGTAVLGLGDIGPLAGKPVMEGKGVLFKRFADIDVFDIEIDEPTVDGMVKIIKALEPTFGGINLEDIKAPECFEVEQQLIEKMNIPVFHDDQHGTAIIASAGFLNAVEVQNKKMEDIKVVFNGAGAASVACANLFFEMGVKRENLIMCDSKGVIFKGRTERMNKYKEQFAVETDRRTLTEALEGADAFIGCSVAGAVTKDMVKSMAPKPIIFAMANPTPEIFPSEVLEVRDDAVMATGRSDFPNQVNNVLGFPFIFRGALDVHAK

SEQ ID NO: 82655 - protein, 78 aa, Unknown
  Bacterial polypetide isolated from the Sargasso Sea
MRKKITLIGAGQIGGTLAHLIALKDLADVVLFDVAAGIARGKALDIAQSSPVDGFNINLSGTDDYEDTKNSDVIIITA

SEQ ID NO: 82656 - protein, 242 aa, Unknown
  Bacterial polypetide isolated from the Sargasso Sea
MKDKVILVTGANRGIGLNIIQRLNNDGYTIIGTSRTDDGANIISQEINSNGGKGLKMDVTNQESINSAIKSIQDEYGALYGLVNNAGITNDNLLMRMTEEQWLSVIETNLTSIYRVTKSIVKDMMKAREGRIVNIGSIVGMMGNAGQSNYSASKSGLLGFTKSLARELSSRNINVNSISPGFIDTDMTKALSAEQIDNLSKNIPLGRIAESSEVSSVVSFLLSDDSSYITGENINVNGGLYM

SEQ ID NO: 82657 - protein, 271 aa, Unknown
  Bacterial polypetide isolated from the Sargasso Sea
EGKAVLFKRFADIDSIDLEIDSKDSEEIINSIKNFAPSFGGINLEDIAAPDCFIIEEKLKEILDIPVFHDDQHGTAIITTAALINALDISGKSIKEIKVVVNGAGASAQACTELFKNSGVPSENVIMLDRKGVIYKERTEGIDQWKSKYAVETKLRTLEDAIKGADVFLGLSAKGVLKKEMVKSMAKNPIIFACANPDPEILPEEINEVRNDAIIATGRSDYPNQVNNLIGFPYIFRGALDVRSKTINEEMKVAASQAIAKLAREDVPDEV

SEQ ID NO: 82658 - protein, 317 aa, Unknown
  Bacterial polypetide isolated from the Sargasso Sea
NGSAILGMGNLGALASKPVMEGKAVLFKRFADIDSIDLEIDCKDSEEIINSIKNFAPSFGGINLEDIAAPDCFIIEQKLKEILDIPVFHDDQHGTAIITTAALINALDICGKSIKKIKVVVNGAGASAQACTELFKNSGVKSENILMLDRKGVIYEGRTEGIDQWKSRYAVKTKHRTLEDAINGADVFLGLSTKGVLKKEMVKSMAKNPIIFACANPDPEITPEEISEVRSDAIIATGRSDYPNQVNNLIGFPYIFRGALDVRSKTINEEMKVAAANAIAQLAREDVPDEVVAAMGGERPHYGKDYIIPSTFDPRLI

SEQ ID NO: 82659 - protein, 272 aa, Unknown
  Bacterial polypetide isolated from the Sargasso Sea
MKTDNKVALVTGSGSGIGAATATLLSQNNMNVGINYSSNQEGANSTAQICESNGVETLVVQADVANQSECDSMVEQIIQKWGRLDYLVNNAGISVFAGGTDLDTLTDEDFLSLYQVNLVGAFHMVKAARMHMKADRHGAIVNVSSISSVTGSGSSIAYAASKGALNTMTKSLARMLAPEIRVNAVLPGVADTSWWTKGIGENNHQTLMDAFQEKVPLQEVCSAESVAETIVWLLQGAKHITGETLLIDSGTHLITFSPLHRIILKELAFNGT

SEQ ID NO: 82660 - protein, 276 aa, Unknown
  Bacterial polypetide isolated from the Sargasso Sea
FGGINLEDIAAPNCFIIEEELKKILDIPVFHDDQHGTAIITTAALINAVDIAKKNLNKIKIVINGAGAAAMACAKLFRSTGIPKNNIKMLDSKGVINKNRKDINSWKKEFAVETKDKSLDDAMKNADVFLGLSAAGVVKKSMVKKMAKKPIIFACANPDPEIKPEDIEDVRNDAIIATGRSDYPNQVNNLIGFPYIFRGALDVRAKTINEEMKVAAANAIASLAREFVPDEVAAAMGGERPNYGKEYIIPSTFDPRLISVIPVAVAKAAIKSGVAR

SEQ ID NO: 82661 - protein, 274 aa, Unknown
  Bacterial polypetide isolated from the Sargasso Sea
MAVNTKLRTLEQVIDGADVFLGLSGKNVLTKDMVKKMAKNPIIFACANPDPEIKPEDVKEVRDDAIIATGRSDYPNQVNNLIGFPYIFRGALDVRAKTINEKMKVAAAHAIAELAREDVPDEVVAAMGGDRPHYGKDYIIPSTFDPRLISVIPVAVAKAAIKSGVARKSIKDIETYKDQLKQRLDPSVTIMQGINSQIKKTQKRVVFAEGEDENTLKAAIAFKNGGLGIPILVAKKETLKERLKEIGLDENFNIEVTNSNDKEKRDKYVNFLFK

SEQ ID NO: 82662 - protein, 191 aa, Unknown
  Bacterial polypetide isolated from the Sargasso Sea
MAILQGRVALVTGAQQGIGRAIAEAVGREGASVVVQYLDDQDTAERIAETIRSSGSEAHVVQGDVGVRSDCAKAFAVGSALGGIDLLVNNAGIFPRGSFLELTDDDWNHVQNINVVGGFRCLQMMARELIENDKVGTAVNLSSVAFFRNSARGTHYAASKGAIIGFTRSVSTELAPHGIRVNAIAPGIVDT

SEQ ID NO: 82663 - protein, 320 aa, Unknown
  Bacterial polypetide isolated from the Sargasso Sea
FKPVMEGKAVLFKRFADIDSIDIEIDTNDTEEIIKSIKNISKSFGGINLEDIKAPECFIIERKLKEILDIPVFHDDQHGTAIITSAALINACDIAKKKLNEINVVINGAGASAMACAKLFINSGVDKNKIKMLDSKGVIYKGRDNLNEWKNEFSIKTDDRNLSDAIKNADVFLGLSQAGVLKKDMVKSMAKNPIIFACANPDPEITPEEIEEVRDDAIIATGRSDYPNQVNNLIGFPYIFRGALDVRSKTINEDMKVAAVHAIASLARERVPDEVVAAMGGERPVYGKDYIIPSTFDPRLISVIPLAVAKAAIKTKVARI

SEQ ID NO: 82664 - protein, 219 aa, Unknown
  Bacterial polypetide isolated from the Sargasso Sea
MNSMAAVLHQMNLERPYSKSAPLKIQKVNLDAPGFNEVLVKIKAAGLCHSDLSVIDGNRPRPLPMVLGHEAAGIVIGLGKGVQKLAVGDHVVFAFLPSCGNCSYCHSGKAALCEPGAEANGKGTLIGGHQRIHNQGEYYHHHLGVSGFAEFSVVSSHSLIKIDKDIPFEIASLFGCAVMTGVGAVVNTAQLKFGESLLVVGLGGVGLSAILEQLLLGLL

SEQ ID NO: 82665 - protein, 271 aa, Unknown
  Bacterial polypetide isolated from the Sargasso Sea
MVAVISNGSAILGLGNLGALASKPVMEGKAVLFKRFADIDSIDLEIDSNDPDEIISSIKNFSKSFGGINLEDIAAPNCFIIEEKLKQLLDIPVFHDDQHGTAIITCAALKNAIDIAKKDIKKIKIVVNGAGASAMACANLFKHTGVPQKNIIMLDRKGVIYRGRDNLSQWKSAHAIETKNRTLDDAIKNADVFLGLSSAGTLKKDMVKKMAKNPIIFACANPDPEITPEEVEEIRSDAIVATGRSDYPNQVNNLIGFPYIFRGALDVRAKT

SEQ ID NO: 82666 - protein, 307 aa, Unknown
  Bacterial polypetide isolated from the Sargasso Sea
SFVENIMKTKAAVAFEPGKPLEIELVDLEGPKEGEVLIKINSTGVCHTDAYTLSGKDPEGIFPSILGHEGAGVVVETGKNVNSIKKDDSVIPLYTPECRKCKFCLSGKTNLCQAIRETQGKGLMPDGTSRFSFNNKTIYHYMGTSTFSNYTVVPEIALAKVRKDAPPNKICYIGCGVTTGIGAVLNTAKMEEGSTAVIFGLGGIGLNVIQGCKIAKAKTILGIDINSNRETLGKKFGMTHFLNPKEVGEENLIEKIIEITEGGADYSFECIGSVKVMRQALECCHKGWGQSIIIGVAASGEEISTRP

SEQ ID NO: 82667 - protein, 249 aa, Unknown
  Bacterial polypetide isolated from the Sargasso Sea
MSKDLENKKTAVVTGAGRGIGKNIAEALARDGIEVYCVSKTESSCGAATEEIRANGGIAHALPIDVSSGDAIRSACEKLLEEKECIDILVNNAGITRDNLLFRMEEDDWNAVINTNLTSCFHWIKALGRPMTRKRWGRIINVSSVVGLTGNAGQANYSAAKAGMIGLTKSLAREFAARTVTVNAIAPGFIDTDMTSGLDDRVKEVALGTIPLKRFGKVEDIAEMTSFLCSEKASYVTGQVFTVDGGMVM

SEQ ID NO: 82668 - protein, 106 aa, Unknown
  Bacterial polypetide isolated from the Sargasso Sea
MELLDKKVIVTGGASGFGLGIVKKFLNNGAKVVIADQNKTLADEQAQKLGSNAFSIETDVSNEESIENLKKQTKLTIGDPDILVNNAGITHLPDFVENISLDEFEK

SEQ ID NO: 82669 - protein, 167 aa, Unknown
  Bacterial polypetide isolated from the Sargasso Sea
MKLLDGQRALITGAGSGIGKVMAQHFEKAGARIWICDADSNNLEQSLKENTYWNGTPCDVADENQVDQLFKEMSGSFGGLEILVNNAGIAGPTAPVEEIDPGEWRRSVGVNLNGAFYCTRLATPLLKNSTKASIINISSVAGRLGFARRLPYASTKWSMIGFTESLA

SEQ ID NO: 82670 - protein, 94 aa, Unknown
  Bacterial polypetide isolated from the Sargasso Sea
MNFKNKKILITGATGGIGNALVKKFTDLEGIVLATGTKIEKLDDIKKKFPKVLVKKFDISDHLKIEEFVENCSLELGGLDVLVNNAGINADNLS

SEQ ID NO: 82671 - protein, 239 aa, Unknown
  Bacterial polypetide isolated from the Sargasso Sea
MNEISLANRVIMITGASRGLGLVMARAFIERGAFVVATGSKNSLELAAVQTEFGDRAICVPSDVTKPDSAADLTAQTIKKWGKIDVLVNNAGLGMRAISEEFNTKPTKFWEADVDAWQNIVNTNINGPFYLSRSVIPHMLKNNYGKIINISTSYQTMVRRGYSPYGSSKAFLEAATCSWADELKETGITVNVLLPGGATDTDLLPPSKNKKGADGNLLEPSIMMEPAVWLASEFSDSVT

SEQ ID NO: 82672 - protein, 247 aa, Unknown
  Bacterial polypetide isolated from the Sargasso Sea
MHIDLTGKKALVTGASRGLGRAIALSLAKAGADVVITYEKSAEKAQAVADEITALGRHGEAIQANSADAQAIQNAVNRTVQSLGGLDILVNNAGIARGGPLESLSLEDIDALINVNIRGVVVAIQAALPHLPEGGRIINIGSCLANRVAQPGIAVYAMTKSALNSLTRGLARDLGPRGITVNLVHPGPTDSDMNPADGEQAESQRQLIATGHYGTPEDVAAAVTFLASPAAGQISGTGLDVDGGLNA

SEQ ID NO: 82673 - protein, 312 aa, Unknown
  Bacterial polypetide isolated from the Sargasso Sea
VAVISNGTAILGLGNLGPLASKPVMEGKALLFKRFAGLDAIDIEVKHRTTEEFINTVANIADTFGGINLEDIKAPECFEIEQELIKRCNIPVFHDDQHGTAIVTAAGMLNALEIQGKSIESAKIVCMGAGAAAVACMELLIKCGAQRERIYMLDRKGVIHTRREDLTEHKKLFANNTDKRTLEDVMEGADIFVGVSGPDVLPPETLALMAENPIVFACSNPDPEIKPELAHEVRKDLIMATGRSDYPNQVNNVLCFPFIFRGALDVRATAINDEMKVAAVEALRAITKEPVPEEVLAASKSASLTFGKEYII

SEQ ID NO: 82674 - protein, 310 aa, Unknown
  Bacterial polypetide isolated from the Sargasso Sea
VLFKRFADIDSIDLEIDSSDPNEIVNSIKNFAPSFGGINLEDIAAPDCFIIEEKLKEILDIPVFHDDQHGTAIITTAALINALDINKKDINNIKIVVNGAGASAMACTNLFKKSGVPQKNITMIDRKGVIFRGRDNLNQWKSGHAIDTDKRSLDDAIENADVFLGLSAKGALTKNMVKKMARNPIIFACANPDPEITPEEIEEVRDDAIIATGRSDYPNQVNNLIGFPYIFRGALDVRSKTINEEMKIAAAHAIANLAKEDVPDEVVAAMGGERPHYGKDYIIPSTFDPRLISVIPAAVARQQLILVLLE

SEQ ID NO: 82675 - protein, 280 aa, Unknown
  Bacterial polypetide isolated from the Sargasso Sea
MEGKAVLFKRFADIDAIDLEIDSSDTDEIIKSIVNFSKSFGGINLEDIAAPDCFVIEEKLKEILDIPVFHDDQHGTAIITTAALINALNISKKSIKKIKVVVNGAGASAIACTNLLKKTGVPSKNIIMLDSKGVLYRGRDNLNQWKSAHAIETKKRSLDEAIDGADVFLGLSSKSILSKKMVKKMAKNPIIFACANPDPEITPEEVEEVRKDAIVATGRSDYPNQVNNLIGFPYIFRGALDVRAKTINEEMKIAAANAIAALAREDVPDEVAAAMGGGER

SEQ ID NO: 82676 - protein, 193 aa, Unknown
  Bacterial polypetide isolated from the Sargasso Sea
MRNALITGATGGIGSSLIQKFHENGYTICATGTNNEKLIALQEKYQERLKIIRCDLSDSTQIRELVDKSNKFYGSTNILVNNAGITKDNLFIKMKDDQWDEVISINLNANFLLTKLIIKDMIKARWGRIINISSDAARIGNSGQANYVASKSAVEGMSKTIANEVATRGITVNCVAPGFINTKILDSVDEKRL

SEQ ID NO: 82677 - protein, 125 aa, Unknown
  Bacterial polypetide isolated from the Sargasso Sea
MTSGNQEKSTYSNKVALVTGGTRGIGQEISKKLQKDGFSVIANYASNDQKASEFSNETGIETIKWDVSDYEECSNQIKKIYDKHKTIDILINNAGITKDAPLHKMPLEQWNKVIEVNLNSIFNVT

SEQ ID NO: 82678 - protein, 145 aa, Unknown
  Bacterial polypetide isolated from the Sargasso Sea
MARVAFVTGGTRGIGKAIVQRLHEDGFKVAAGYSGNDEAAKAIADALDVMVVKGNVGSFDDCARAVKEVEDQLGPIDILVNNAGITRDGFFHKMSHDQWSDVIRVNMDSVFNMTRQVINGMRDRGHGRIVNISSINGQKGQIGQT

SEQ ID NO: 82679 - protein, 291 aa, Unknown
  Bacterial polypetide isolated from the Sargasso Sea
DIGPKAAMPVMEGKAMLFKQFADIDAWPICLDTTDTEEIISIVKALAPGFGGINLEDISAPRCFEIEERLRNELDIPVFHDDQHGTAVVTTAALINALKLVRKKPKDIKVVVSGAGAAGTACSKMIMHLGVKNLIGCDSKGAIHNQRTDINQSKRWFADNANPDQEQGSLKEVLKGADVFVGVSAPNILDAGDIRNMEKDAIVFAMANPDPEILPEDARPVAAVVATGRSDYPNQINNVLCFPGIFRGALDCRAKTITEEMKLAASHAIAETLDEQHLNPDYIIPTVLTKA

SEQ ID NO: 82680 - protein, 315 aa, Unknown
  Bacterial polypetide isolated from the Sargasso Sea
ADIDGIDIEVDTSDADEFVNCVKYLGKSWGGINLEDIAAPECFIIEQKLSEKLDIPVFHDDQHGTAIVATAGVLNALTITGRDIKNFKMVVNGAGAAGIACVELLKAMGMPSNNVIMCDRKGVISKDRTNLDQWKSAHAVETSHKTLKDALKGADIAFGLSAKGAFTNEMMLSMNDKPIVFAMANPDPEISPDELRKIRPDAIIATGRSDYPNQVNNVLGFPYIFRGALDVRASAINIDMKIAATKALADLAKQDVPDEVSNAYSGKHLQFGPEYIIPKPFDARLLTTIPPAVAKAAEESGVARKPIKDELGYRR

SEQ ID NO: 82681 - protein, 300 aa, Unknown
  Bacterial polypetide isolated from the Sargasso Sea
CFIIEEKLKKILDIPVFHDDQHGTAIITTAALINALDISGKSISEIKVVVNGAGASAQACTELFKNSGVPSENIVMVDRKGVIFKGRTDGIDQWKSRYAVDTKLRTLGDAMKNADVFLGLSAKGVLKKEMVKSMAKNPIIFACANPDPEITPEEINEVRNDAIVATGRSDYPNQVNNLIGFPYIFRGALDVRSRTINEEMKVAASQAIAKLAREDVPDEVVAAMGGERPHYGKDYIIPSTFDPRLISVIPAAVAKAAVDSGVARKKIDDFDIYKEQLKQRLDPTVTIMQGINSFIKKNQK

SEQ ID NO: 82682 - protein, 315 aa, Unknown
  Bacterial polypetide isolated from the Sargasso Sea
MGNLGALASKPVMEGKAVLFKRFADIDAIDLEIDSNNPNEIINSIKNFSGSFGGINLEDIAAPDCFIIEEKLKKILDIPVFHDDQHGTAIITCAALINAIDITKKNIKNIKVVVNGAGASAMACANLFKKTGVLQKNLTMIDRKGVIHTERKGLNKWKLNHAIKTKNRTLNDAIKNADVFLGLSSAGVLKKEMIKKMAKNPIIFACANPDPEITPEEVEEVRNDAIIATGRSDYPNQVNNLIGFPYIFRGALDVRAKTINEDMKIAAANAIASLAKKRVPDEVVAAMGGDRPKYGKDYIIPSTFDPRLIASYQLL

SEQ ID NO: 82683 - protein, 125 aa, Unknown
  Bacterial polypetide isolated from the Sargasso Sea
MGLEEKKLVIVTGAARGIGLATSKLFLQNNFKVAMVDKDEEELNKINIHNPNYKTFTFDISDVDKNSIMIEEIINWGKRIDVLVNNAGIADFGKIETVNYNSWRKIMETEFRWIFFNYSKLVLNI

SEQ ID NO: 82684 - protein, 191 aa, Unknown
  Bacterial polypetide isolated from the Sargasso Sea
MIDLKDKNIIVTGASGGIGNSIIEKLNQAGANILASGTRIEKLEELKNKYRNIKTLKFDISQSDKIEEFVENSAKELGGSLDCIVNNAGITQDNLAIRMSLEEWQKVIDINLTSTFLLSKSAIKKMLKNKSGKIVNITSVVGHTGNLGQANYTASKAGIIAMSKSLAIEYAKKNINVNCISPGFIKTAMTD

SEQ ID NO: 82685 - protein, 255 aa, Unknown
  Bacterial polypetide isolated from the Sargasso Sea
APSDSANEVVEQIESEGGDAIANGASVTDLDAVKRMVDETMEKWGRVDVLVNNAGILRDKSFHKISIEDFNLVMSVHFQGTLNCTHTVFPIMREQNYGRIIFTSSSSGVFGNFGQSNYGSAKMAMVGLMNTLKIEGQKYNIHTNSITPVAYTRMTDGLLPDEVGESLQPRYVTPAVIYLSGDEAPNGAIVSAGAGVYSRIFIHETDGVSLGMGEEMTPENIAASWDSISDMKGAKALQSGPEQSIKIFEKLNQKD

SEQ ID NO: 82686 - protein, 186 aa, Unknown
  Bacterial polypetide isolated from the Sargasso Sea
MRLEGKVALVTGASRGIGLGVVERFCEEGAIVYAGSSSNPTGIYPEGVTGLKLDVANEDDWAKAIERIITEQGRIDCLVNNAGIAVYDGVADGSTENWRKVLGVNQDGVFFGMRAVIPHMQGRKSGSIINISSIWGKGAVPGAHAYHASKGAVIMMTKNAAITHVGDGIRVNSVHPGFIDTPLTQA

SEQ ID NO: 82687 - protein, 134 aa, Unknown
  Bacterial polypetide isolated from the Sargasso Sea
MTKIAIVTGGTRGIGASISKKLKSSNFKVIANYASNDEAAKSFSKDNNIEVIKWDVSNFDECQKSVSRIYEENKNIDILVNNAGITRDAPLHKMSKDNWQKVIDVNLNSVFNMTSLVINKMRENSFGRLVHISS

SEQ ID NO: 82688 - protein, 73 aa, Unknown
  Bacterial polypetide isolated from the Sargasso Sea
MYLKKINLKNKVALVTGAGKGIGRACSIALAEAGATIIGLSRTTSDLYKLQKDIKKVKGKLIKITCDIMDYED

SEQ ID NO: 82689 - protein, 89 aa, Unknown
  Bacterial polypetide isolated from the Sargasso Sea
MKTALVTGASRGIGKAIAKKLKADNYEVLGTATSVSGVDTLTSDGIEGYLLDLNSKDSIDSFWSQLESDNKTISVLVNNAGITRDNIIL

SEQ ID NO: 82690 - protein, 240 aa, Unknown
  Bacterial polypetide isolated from the Sargasso Sea
MTKIAIVTGGTRGIGASISKKLKSSNFKVIANYTSNDNAAESFSKENNIEVVKWDVSNYDECQNSVKKIYEDNKNVDILVNNAGITRDAPLHKMSKDNWQKVIDVNLNSIFNMTSLVINQMRENNFGRIIHISSVNGQKGQFGQTNYAATKSALIGFSKSLALESASKGITSNVICPGYINTEMVAAIREDILKSIIETIPNKRLGEADEVAEMVDFLVSDKASYINGSTFSINGGLWMD

SEQ ID NO: 82691 - protein, 219 aa, Unknown
  Bacterial polypetide isolated from the Sargasso Sea
PNEIISSIKNFSPSFGGINLEDIAAPDCFIIEEKLKEILDIPVFHDDQHGTAIITTAALINALDINKKSIEKVKIVVNGAGASAMACTNLFKKSGVPQKNITMIDRKGVIFRGRDNLNQWKSSHAIETKDRTLDDAIKNADVFLGLSAKGALTKDMVKKMAKNPIIFACANPDPEITPEEIEEVRDDAIIATGRSDYPNQVNNLIGFPYIFRGALDVRS

SEQ ID NO: 82692 - protein, 301 aa, Unknown
  Bacterial polypetide isolated from the Sargasso Sea
AAPDCFIIEQKLKEILDIPVFHDDQHGTAIITTAALINALDISGKSIKKIRVVVNGAGASAQACTELFKNSGVPSENVIMLDRKGVIYKGRTEGIDQWKSKYAVETKLRTLDDAIKGADVFLGLSAKGVLKKDMVKNMAKNPIIFACANPDPEILPEEINEVRDDAIVATGRSDYPNQVNNLIGFPYIFRGALDVRSKTINEEMKVAASKAIAKLAREDVPDEVVAAMGGERPHYGKDYIIPSTFDPRLISVIPAAVAKAAMESGVARKNIEDFEIYKDQLKQRLDPTVTIMQGINSFIKK

SEQ ID NO: 82693 - protein, 301 aa, Unknown
  Bacterial polypetide isolated from the Sargasso Sea
NEIINSVKNFAPSFGGINLEDIAAPDCFIIEEKLKEILDIPVFHDDQHGTAIITTAALINALDITKKKIDEVKIVVNGAGASAMACANLFKKSGVPKKNITMVDRTGVIYSGRENLNQWKSAHAIETKHRNLIDAINNADVFLGLSAKGALTKDMVKKMAKNPIIFACANPDPEIKPEEVAEVRSDAIIATGRSDYPNQVNNLIGFPYIFRGALDVRSKTINEEMKIAAAHAIANLAKEEVPDEVVAAMGGERPHYGKDYIIPSTFDPRLISVIPAAVAKAAIEYGVARIDIKDFDNYKDQ

SEQ ID NO: 82694 - protein, 246 aa, Unknown
  Bacterial polypetide isolated from the Sargasso Sea
MNFNFKDKNVLITGAAGGIGSEIVKSMYSLEANIIISGSNEKKLANFSNQFSSPLLYFPADLSKYNDIEQLAENTLDKFNDKLDILINNAGITKDNLTLRMKDSDWSDVINLNLNSTFYLTKFFLKYMIKNRYGRIINISSVVGSSGNLGQANYSASKAGMEGMSKSIALEVASRNVTINCVAPGFIETEMTKDILAKNEESLKKSIPMGRVGFPSEVASLVSFLASDLAGYITGQTIHINGGLYI

SEQ ID NO: 82695 - protein, 294 aa, Unknown
  Bacterial polypetide isolated from the Sargasso Sea
VLFKKFAGIDVFDIEIDAPSIDGMVSTISALEPTFGGINLEDIKAPECFEVERILREKMQIPVFHDDQHGTAIIVAAAILNGLELAGKSLENVKIVASGAGAAALACLNLLVSLGAKRENIWVFDIDGLVHPGRETNMDQWKAIYAQESDAHALADHIAGADVFLGLSVAGALKPSLLKQMAPRPMIMALANPVPEIMPDLARAERDDAMICTGRSDFPNQVNNVLCFPYIFRGALDCGARTINEEMKMAAVRAIAGLAKEEVWEASRTAANGEPLIFGPDYLIPSPFDPRLIL

SEQ ID NO: 82696 - protein, 135 aa, Unknown
  Bacterial polypetide isolated from the Sargasso Sea
MSADARVAIVTGASRGIGAAIAQRLARDGLRVVVNYAGRAADAQAVVQGIAEAGGHAVAVQADVADSQAVQRLFDSAEQAFGRIDVLVNNAGVMPSTTPHLVDTDDATFDRLMAINLKGSFHTLREAARRLQPGG

SEQ ID NO: 82697 - protein, 96 aa, Unknown
  Bacterial polypetide isolated from the Sargasso Sea
MDDRKILVLTGASRGIGHATVKRFSKAGWRVITCSRHGFPENCPWEAGPEDHLQVDLATPADVETRAEELKSRLIGVPLHALVNNAGISPKSAEGQ

SEQ ID NO: 82698 - protein, 191 aa, Unknown
  Bacterial polypetide isolated from the Sargasso Sea
MYLKKYNLKNKVALVTGAGKGLGKACAIALAEAGANLIIISRTNKDLQQVSKTIKKFKVKCKSYVCDITNYNEIKKIINKQSRIDVLVNNAGTNIPEYFTKVKTKNMEYMVKINNIAAFNLAQLCAIKMINAKNRKKIGGSIVNMSSQMGHVSGPKRTVYSMNKFGVEGLTKEMALELAKYNIRVNAISPT

SEQ ID NO: 82699 - protein, 117 aa, Unknown
  Bacterial polypetide isolated from the Sargasso Sea
NPIVFAMSNPDPEISPEEASPFAAVMATGRSDYPNQINNVLCFPGIFRGALDCRSNTINEEMKLAAAHAIAGAVDDAHLNADYIIPSVFDTTVVKKISESVQAAAYKTGVASRKQSK

SEQ ID NO: 82700 - protein, 245 aa, Unknown
  Bacterial polypetide isolated from the Sargasso Sea
MFSLKGKNVLLTGSSGGIGQEIARAFHKQGANIILSGTNEDKLNDLSTELGERANYIIANLEKREDIDHLSSKAEEKLGHLDILVNNAGITSDNLFIRMKDEEWDKVLDVNLRANVRLTKNIIRGMLKRRFGRIIFISSIIGYTGNIGQSNYACSKSALSGFSKSISLEVANRGITCNLIAPGFIKTPMTDKLNENQQKIILDKIPISRFGRPEDISAACIYLASDEASYLTGTTIHVNGGMGMF

SEQ ID NO: 82701 - protein, 131 aa, Unknown
  Bacterial polypetide isolated from the Sargasso Sea
MFNLNGKNALITGASGGIGRAIAETLHASGARLTISGTRMEPLEELAKSLGDRVHIMGCDLSNGVEVENLSKGAQKKMGSVDILVNNAGITRDNLFLRMTDEDWASVLEVNLTSTMKLCRGVLRGMMKSRW

SEQ ID NO: 82702 - protein, 243 aa, Unknown
  Bacterial polypetide isolated from the Sargasso Sea
NLKDKNIIVTGASGGIGSSIVEHLYEAGANILATGTRIDKLDQLKSKFSKIKILPFDISNHDKIEGFINDADELLGDNLNCLVNNAGITKDNLAIRMNLMEWNKVIDLNLTSTFLMSKFAIKKMLKNKSGKIINITSVVGHTGNIGQVNYTASKAGIVAMSKSLSIEYAKKNINVNCISPGFIDTAMTEKIDEKFKESIVSKIPSGKLGKAEDIANAVIFLASSKSDYINGETIHVNGGLYLG

SEQ ID NO: 82703 - protein, 291 aa, Unknown
  Bacterial polypetide isolated from the Sargasso Sea
KFIDTVSALEPTFGGINLEDIKAPECFIIEKALREKMKIPVFHDDQHGTAICVAAALINGLRIIDKDISKANLVCSGAGAAALACLDLLVEMGMKPDNIIVCDRLGVIHKGRKSDLDEYKLKYAIETNARDLNDAIEGADIFLGVSTEGVLSKDMVKKMSSRPLILALANPNPEILPEDVTDVRPDALIATGRSDYPNQVNNVLCFPFMFRGALDVGATEINEAMKIAAVYAIADLAKAEVSDVVAKAYSGQQLEFGPNYLIPKPFDPRLIIKVSSAVAKAAIETGVQPDL

SEQ ID NO: 82704 - protein, 226 aa, Unknown
  Bacterial polypetide isolated from the Sargasso Sea
MINLIDKLMLVTGSGTGVGSGIASTLAKCGADVVVHYNNSEREAHKTKEIIDSLGRKCTLIKSDLKAVDECRRTVDEAAEFLGGLDGLVNNAGITIPKDIKEIDENHFNDIFSLNFRSYFFCAQQAIKHLVKRGKSLSENNKNYKWSGGSIVNISSVHGKLGHPGHSVYASTKGAINSFTKQLSVELISEHIRVNAIAPGTIEVPSYFEKDPSYNRELGNSLVPLG

SEQ ID NO: 82705 - protein, 207 aa, Unknown
  Bacterial polypetide isolated from the Sargasso Sea
SEVDQIIKKYGKIDVLVNNAGINITGPTETMKMDDVKRVFDTNFFSQLNLIQTVLPHMRSKKKGLIINITSIAGYLGLPFWSAYCASKASFRVIAESLNIELKKYNVNIVNIAPGDYKTEILNNRRDSNNPSSSPYFQEYEKIIKSVNEKMNHGRDPIEVANLVLKIIKEKKPKINYLVGGFLEKKITLKSLLPDKLFQKIIMKLYS

SEQ ID NO: 82706 - protein, 87 aa, Unknown
  Bacterial polypetide isolated from the Sargasso Sea
MSKVALVTGGTRGIGAAISIALKNDGCKVAATYGSNSDAANAFASANGIEVFQWNVADAAACEAGVKQVVEKLGSVDILVNNAGITK

SEQ ID NO: 82707 - protein, 264 aa, Unknown
  Bacterial polypetide isolated from the Sargasso Sea
SFGGINLEDIAAPECFIIEKKLKEILDIPVFHDDQHGTAIITTAALINAVDITKRDIKKIKVVINGAGASAMACANLFKNQGVSQKNITMLDSKGVIYKGRKNLNEWKSLHAIETKSRSLEEAIKGADVFLGLSKAGTLKKEMVKKMSKNPIVFACANPDPEITPEEIEQVRSDAIIATGRSDYPNQVNNLIGFPYIFRGALDVRAKTINEEMKIAASNAIATLARERVPDEVVAAMGGERPKYGKDYIIPSTFDPRLISVIPV

SEQ ID NO: 82708 - protein, 138 aa, Unknown
  Bacterial polypetide isolated from the Sargasso Sea
MNLKNKKVLITGATGGIGNSLVEKFNSLGSTIIATGTNEDKLSSLKKEFSDIHIEKFKLDEHKKIEEFINKMDQKVDGLDILVNNAGITLDNLSIRLTEENWKKVLDINLTSTFLMCKYAIKKMLRKKKGKIINITSI

SEQ ID NO: 82709 - protein, 160 aa, Unknown
  Bacterial polypetide isolated from the Sargasso Sea
MLSHSDGLFREIGQSIASDYPEIEFETYIIDDFLCRMISDPHALDVVVMPNLYGDIMSDGAAGLIGGLGLAPSGCYGDDYAYFESAHGTAPDIAGQNIINPTATILSACMMLEYLSFGEAAIKLKSSLSQIYAEGNLLTKDQGGSATTTQFCDAIKGLVE

SEQ ID NO: 82710 - protein, 300 aa, Unknown
  Bacterial polypetide isolated from the Sargasso Sea
IDIEVNSNNANSIIETIKNISGTFGGINLEDIAAPDCFIIEQKLKEVLDIPVFHDDQHGTAIITTAALINALDVSKKKINEVKIVVNGAGASAQACTNLFKSSGVNSENIIMCDSKGVIYKGRKNIDQFKSAFAINTKLRTLEEAIKNADVFLGLSTKDVVTKDMIKSMAKNPIIFACANPDPEIKPEIINEVRSDAIVATGRSDYPNQVNNLIGFPYIFRGALDVRAKEINEEMKVAAAKAIALLAREDVPDEVVSAYGGDRPKYGKNYIIPSTFDPRLISVIPSAVAQAAMKSGVARK

SEQ ID NO: 82711 - protein, 164 aa, Unknown
  Bacterial polypetide isolated from the Sargasso Sea
MDLNNKVALVTGGASGLGQATVENFVVAGAKVVILDINEDNANKIIENLGADKVSFISTNIMEEDPVVSAINKIKDEYGALHIAVNCAGTGYPGRILGKEAPHPLDAFQFIINLNLVGTFNVMRIAAELMDKNEADEGGEKGVIINTASVAGYEGQIGQSAYSA

SEQ ID NO: 82712 - protein, 259 aa, Unknown
  Bacterial polypetide isolated from the Sargasso Sea
LGNIGPLASKPVMEGKAVLFKKFAGINVFDIEVDEIDPDKLVDIIVALEPTFGAINLEDIKAPECFVVERKCRERMGIPVFHDDQHGTAIVAVAAILNGLRLVSKDCADIKLVSTGGGSAGIACLNLLLSLGVKRENVWLVDHLGVIYEGRHEEMNPEKSAYAQKTDARSLDDVIDDADVFLGLSAGNILKSEMVKRMGPKPLILALANPVPEINPDDARAVNPDAVIATGRSDYPNQVNNVLCFPFIFRGALDVRATT

SEQ ID NO: 82713 - protein, 74 aa, Unknown
  Bacterial polypetide isolated from the Sargasso Sea
MRKKITLIGAGQIGGTLAHLIALKGLADVVLFDVAVGIAKGKALDIAQSSPVNGFNVNLSGTDNYDDTKNSDVI

SEQ ID NO: 82714 - protein, 311 aa, Unknown
  Bacterial polypetide isolated from the Sargasso Sea
ISENPEAAYDYTSKGNLVAVISNGSAILGMGNLGALASKPVMEGKAVLFKRFADIDSIDLEIDSKDSEEIINSIKNFAPSFGGINLEDIAAPDCFIIEQKLKEILDIPVFHDDQHGTAIITTAALINALDISGKSIKEIKVVVNGAGASAQACTELFKNSGVASENVIMLDRKGVIYKGRTEGIDQWKSKYAVETKLRSLEDAMKGADVFLGLSAKGVLKKEMVKSMAKNPIIFACANPDPEILPEEINEVRNDAIIATGRSDYPNQVNNLIGFPYIFRGALDVRSKTINEEMKKGASQAIAKLAREDVQR

SEQ ID NO: 82715 - protein, 244 aa, Unknown
  Bacterial polypetide isolated from the Sargasso Sea
MLDDKIALITGGCRGIGKAVALEFAKAGATVILNDVSSQDSAQEVLKEIEDLGGKSEFLQFNVTESGIVEEKIKYILEKYSRIDILVNNAGITRDSLFMRMKEEQWDEVFNVNMKGVFHCTKNVVRSMIKNKYGKIINVASVAGEMGNPGQANYASTKSGIMGFTKSLAKELGSKNINVNAVSPGFIMTHLTDVLPEETKEKYKELIPLARFGEPEDVAKAILFLASDDSSYITGEILRINGGL

SEQ ID NO: 82716 - protein, 224 aa, Unknown
  Bacterial polypetide isolated from the Sargasso Sea
MDLLEVNAGIVSVVTKNILKHSDNPIIVVVTNPLDQMTTLTAEVSNLSKNRVIGQAGVLDSSRFAYFISEKVGVDISSVEALTLGSHGETMVPVPSLCKVDGKPLEELLSSEEINDLVQKTSDGGAEIVSLLKTGSAYFAPASSAAIMVKAMLSDSNEIFPVCAWLNGEYGINDVYLGVPARLGAEGVTEIVEYDLTNIEKDALLEASRAVKEKVAELDSIKNQ

SEQ ID NO: 82717 - protein, 123 aa, Unknown
  Bacterial polypetide isolated from the Sargasso Sea
MYLKKVNLKKKVALVTGAGKGIGKACAIALAEAGADLIIISRTQKDLDAVSKIIKRFKSKCSSYVCDVTNYNQIKNIINKQKKIDILVNNAGTNIPEHFTKVQKKNMEYLVKLNTISTFHWLN

SEQ ID NO: 82718 - protein, 122 aa, Unknown
  Bacterial polypetide isolated from the Sargasso Sea
MRLLNKVVIVTGAAGGIGEAQCRLFATERAKIVVSDTNEEKGSKLAHDISLAGGSAFFVNLDVSSESDWTSLVEISIDRFKTIDVLVNNAGIYRTESIQEENPDDWDRLMSVNLKGAFLGTK

SEQ ID NO: 82719 - protein, 295 aa, Unknown
  Bacterial polypetide isolated from the Sargasso Sea
LKETLDIPVFHDDQHGTAIITLAALLNALDISGKKIEEVKIVVNGAGASAIACTDLFKLSGVKNSNVIMCDSKGVIYKGRKNLDKFKSLHAIDTKFRTLSEAMKNADVFLGLSAKDVVTQDMIKSMNKNPIIFACANPDPEIKPELIDEVRDDAIIATGRSDYPNQVNNLIGFPYIFRGALDVRAKVINEEMKIAAAKAIAFLAKGDVPDEVVAAYGGDRPKYGKNYIIPSTFDPRLISVIPAAVAEAAIKTGVARKKISNLDEYKDQLVNRLDPSMSLMQGINSKVKRNPKTVV

SEQ ID NO: 82720 - protein, 163 aa, Unknown
  Bacterial polypetide isolated from the Sargasso Sea
ILINNAGITRDALLMRMNEDQWDQVININLKAAFIGMKAAIRPMMKNKFGRIINITSIVGITGNPGQANYSASKAGLIGMTQSIAKEVGTRGITVNCIAPGWIDTEMTIDLPENGKEELLNRIPIGKIGKPEDIAYATLFLASDEANYITGQTITVDGGRVIN

SEQ ID NO: 82721 - protein, 283 aa, Unknown
  Bacterial polypetide isolated from the Sargasso Sea
IDASDPNEIINSIKNFAPSFGGINLEDIAAPDCFIIEDKLKEILDIPVFHDDQHGTAIITTAALINALDITKKKISKIKVVVNGAGASAMACANLFKKSGVLQENLTMVDRKGVIYEGRENLNQWKSAFAIETSARTLSDAIDNSDVFLGLSVKGALTKDMVKKMAKNPIVFACANPDPEITPEEIEEVRNDAIIATGRSDYPNQVNNLIGFPYIFRGALDVRSKTINEEMKVAAAHAIANLAKEDVPDEVVAAMGGERPHYGKDYIIPSTFDPRLISVIPAA

SEQ ID NO: 82722 - protein, 236 aa, Unknown
  Bacterial polypetide isolated from the Sargasso Sea
MIDKKKVVITGASRGIGASIASAFQMRGNYVIGTSTSHVNAKASCNEWIIADFSIREQIEYCVKQIHEISPDILVNNAGINKIASFNEISPDDFLLIQQVNLFAPFRLSQAAIPSMLEQNWGRIINISSIWGKISKEYRASYSASKFALDGVTLALAAEYSKNGILVNSVAPGFTDTELTRNVLGENGIKKLAAGIPIGRIAKPEEIANLVVWLSSEENSYISGQNIAIDGGFTRV

SEQ ID NO: 82723 - protein, 248 aa, Unknown
  Bacterial polypetide isolated from the Sargasso Sea
MFSLQNKIAIVTGASQGIGKTTAELFSRSGAHVVCIARNEKKIKDLVYEITKNGHSASYNSCDINDGDLFQNTIKSIINNCGKIDILVNNAGITRDSILLRMKDHQWDDVLNTNLKGAFFATKSVLRSMMKNKYGRIINITSIVGLQGNSGQSNYSASKAGLIGFSQSVAKEVASRGITINCIAPGWIETEMTNDLPQDIRAEIIKNIPIGKTGTTEDIAYTALFLASKESKYITGQTITVDGGRVIN

SEQ ID NO: 82724 - protein, 195 aa, Unknown
  Bacterial polypetide isolated from the Sargasso Sea
MNDLKDKNIIVTGASGGIGNSIVKKLYDSGANVLASGTKIEKLEELKKEFKKINILKFDISQSEKIEEFIENATKELGGSLDCIVNNAGITQDNLAIRMSLDEWRKVIDVNLTSTFLISKFAIKKMLKNKSGKIVNITSVVGHTGNLGQANYTASKAGIVAMSKSLAIEYAKKNININCISPGFIKTTMTDKIDE

SEQ ID NO: 82725 - protein, 224 aa, Unknown
  Bacterial polypetide isolated from the Sargasso Sea
MVTGSTSGIGAAIARVLSRAGYAVVLHSRNSADTGRAMVAEMKQAIYLQADLAVEADRVRLVNEAIAAWGQLDVLVNNAGISRVIAHGDLAAASSTVWHELNEVNVVAPFHLVALAESALRDAARYRRAGCVVNISSHAGTRPKGASIPYAVSKAALNHMTRLLALSLGPDIRVNAVAPGLVDTPLTAEWTEAQELWRTRAPMRRAASPNDIAKAVVMLVESDY

SEQ ID NO: 82726 - protein, 132 aa, Unknown
  Bacterial polypetide isolated from the Sargasso Sea
MKTALVTGASRGIGRAIALEFKEKGYSVIGTATSESGAAELNDIGIQGYVLDLNSHESIDSFWQKLEDNNQNISLLVNNAGITRDNIVLRMSDEEWSDIMNVHLYGTFQLCKRSLKMMLKSKWGRIINISSA

SEQ ID NO: 82727 - protein, 295 aa, Unknown
  Bacterial polypetide isolated from the Sargasso Sea
KKISENPEAAYDYTSKGNLVAVISNGSAILGMGNLGALASKPVMEGKAVLFKRFADIDSIDLEIDCKDSDEIINSIKNFSPSFGGINLEDIAAPDCFIIEQRLKEILDIPVFHDDQHGTAIITTAALINALDICGKSIKKIKVIVNGAGASAQACTELFKNSGVKSENIIMLDRKGVIYEGRTEGIDQWKSRYAVKTKHRTLEDAVKGADVFLGLSTKGVLKKQMVKSMAKNPIIFACANPDPEITPEEIREVRNDAIVATGRSDYPNQVNNLIGFPYIFRGALDVRSKTINEEM

SEQ ID NO: 82728 - protein, 238 aa, Unknown
  Bacterial polypetide isolated from the Sargasso Sea
MVDDSEQKIILLTGASRGIGHATVRKFSEEKWRVITCSRQAFDTKCPWPGGAANHVQVDLSNPNNTLEAINEVKKRLNGKLHALVNNAGISPKGENGERLDTLGTDLSTWGKVFHVNFFASVILARGLREELFRAQGAIVNVTSIAGSRVHPFAGAAYATSKAALGALTREMSKDFGPLGVRVNAIAPGEVKTAILSEGTDKIVADIPMKRLGLPEEVADTIFYLCSKEASYVSGAEM

SEQ ID NO: 82729 - protein, 212 aa, Unknown
  Bacterial polypetide isolated from the Sargasso Sea
MKRSVIVTGGNRGIGRSITESFVKAGYTVVVGARTEQAIQSIDSKHIIFRSMDVRDEMAHRTLAETAIDATGRLDAWVNNAGISAWKPIEKIDEAFFDELMGINLKGAFWGCKAAARYMNDAGGSIVNISSIAGKRGSANNAMYCATKFGMNGLTQSLAKELGPLGIRVNALCPVLIKTNGLMEALAQPHAPANGDPEEFLAGFLRANSATG

SEQ ID NO: 82730 - protein, 279 aa, Unknown
  Bacterial polypetide isolated from the Sargasso Sea
MSEVIKDADIFLGLSGPGIVKPAMIRSMSENPLVFALSNPVPEILPEEVKATRSDAIIATGRSDYPNQVNNVLCFPFIFRGALDVCATKINHEMKIALVHALADLAKEETPDTVVAAYGGEELKFGKEYLIPKPFDPRLIIKLAPATAQAAMDSGVATRPINDMDAYRQHLSHYIFETVILMRPIFEKAKADPKKIIYAEGEETKILHAVQSVLDEGIAKPILIGNKDIIESRINQMGLRLRINKDIRIINPHEYIAKNNFTTDNISELNTFVATKMIN

SEQ ID NO: 82731 - protein, 136 aa, Unknown
  Bacterial polypetide isolated from the Sargasso Sea
LGVSAPNIISQKEIKSMAKDPIVFAMSNPDPEISPEEASPYAGVMATGRSDYPNQINNVLCFPGIFRGALDCRSNTINEEMKLAAANAIANVVDDTHLNADYIIPSVFDTTISKKISESVQAAAYKTGVAQRRQSK

SEQ ID NO: 82732 - protein, 213 aa, Unknown
  Bacterial polypetide isolated from the Sargasso Sea
MSNSPIVIPADLSAPGSGTKLAEQILEHVAGVDVLVNNAGIPMRRMPENLTEEEIDLVFAINVRSLLTLSIALAPSMKARGGGSIINVSSVAGIRGPGARVAYAGTKGAVDAMTRALASDWGPDGIRVNSIAPGLIATAIWEESRNTVPGLIEDMEGQIALKRWGFGDDIADVVAFFASDSSRYVTGETLVVDGGLARVTASAQPQVLPELLE

SEQ ID NO: 82733 - protein, 311 aa, Unknown
  Bacterial polypetide isolated from the Sargasso Sea
ENPEAAYDYTSKGNLVAVISNGSAILGMGNLGALASKPVMEGKAVLFKRFADIDSIDLEIDCKDSDEIINSIKNFAPSFGGINLEDIAAPDCFIIEQKLKEILDIPVFHDDQHGTAIITTAALINALDICGKSIKKIKVVVNGAGASAQACTELFINSGVKSENIIMLDRKGVIYEDRDEGIDQWKSRYAVKTKLRTLAEAVKGADVFLGLSAKGVLKKEMVKSMAKNPIIFACANPDPEITPEEINEVRDDAIIATGRSDYPNQVNNLIGFPYIFRGALDVRSKTINEEMKVAAANAIAKLAREDVPDEV

SEQ ID NO: 82734 - protein, 195 aa, Unknown
  Bacterial polypetide isolated from the Sargasso Sea
MNLKNKKILITGATGGIGQSLVKKFTDFGAEVLATGTNQEKLNDIKKNFINCHIKSFKLDEHQNIEKFIDSCNETLKGLDVLVNNAGITLDNLSLRLTEENWKKVIDINLTSTFLMCKYAIKKMLKNKKGKIINITSIVGHTGNFGQVNYAASKAGIIGFSKSLALEYAKKNININCVSPGFIQTEMTNKIKEDL

SEQ ID NO: 82735 - protein, 132 aa, Unknown
  Bacterial polypetide isolated from the Sargasso Sea
MVPLIGSTSVGGVPVSSLIKPDRLEEIVQRTRDGGAEIVSLLKTGSAYYAPSAASAQMVESILLDKKEILPCAAFLEGEYGINNLYAGVPIKLGASGVEEIIQVDLTEEESIALKNSADSVQELIEIMEKNA

SEQ ID NO: 82736 - protein, 192 aa, Unknown
  Bacterial polypetide isolated from the Sargasso Sea
MRLEGRTAIITGAGSGFGASIAQKFSTEGAQVIVVDIDEDGAKEIALQVGGVPFVSDVSSSDSVDSLVKFVAKSFDKIDILVNNAGITHLPNPMETISEKEFDKILSVNAKSVFLTARRIVPFFKRQKSGVILNIASTAGISPRPNLTWYNASKGWMITATKSMAVELAPHGIRVNAINPVAGETPLLKSFL

SEQ ID NO: 82737 - protein, 214 aa, Unknown
  Bacterial polypetide isolated from the Sargasso Sea
MKDKLILVTGSGTGVGSGIASTLAKCGADVVVHYNNSEKEAEKTKEIIHSLGRKCKMIKSNLKVVDECKRTVDEAAKFLGGLDALVNNAGITIPKDFKDIDENHFNGIFSLNFRSYFFCAQQAVKHLVKRGEKLTGNYKNYNWPGGSIINISSVHGKLGHPGHSVYASTKGAINSFTKQLSVELIPKHIRVNAIAPGTIEVPSYFEKDPLYNRE

SEQ ID NO: 82738 - protein, 125 aa, Unknown
  Bacterial polypetide isolated from the Sargasso Sea
MFDLSGNIALITGASGGIGAAIARTLHRRGATVVLHGTRAERLAELAGELGERTHVVTANLSSREEAVGLIDAAAEAAGAPVTILVNNAGITRDNLTMRMKDEEWDEVLNVNMTAAMMIARAACA

SEQ ID NO: 82739 - protein, 250 aa, Unknown
  Bacterial polypetide isolated from the Sargasso Sea
DDQHGTAIVTAAGLLNALEVQGKQIGDSRIVCMGAGAAATACMELLIKCGAKPHNIFMLDRQGVIHSGRTDLNQYKQRFANDTPLRTLMEVIDGADVFVGVSGPDVLPAEAVALMAPNPVIFACSNPDPEIKPALAHAVRKDLIMGTGRSDYPNQINNVLCFPFIFRGALDARASRINDAMKIAAVEAIRGLAKEPVPAEVLTAAGVSELAFGKDYVIPKPMDARLLPRVARAVALAAVESGVARIALPA

SEQ ID NO: 82740 - protein, 98 aa, Unknown
  Bacterial polypetide isolated from the Sargasso Sea
MTKKISLIGAGQIGGTLAHLIAIKELGDIVLFDVAEGLAKGKALDIAQSSGVSGFNVNITGTKDYKDTKDSDVIIITAGVPRRPGMSRDDLLGTNLKI

SEQ ID NO: 82741 - protein, 310 aa, Unknown
  Bacterial polypetide isolated from the Sargasso Sea
VAVISNGSAILGMGNLGALASKPVMEGKAVLFKRFADIDAIDLEIDNSNTDEIIKSIVNFSKSFGGINLEDIAAPDCFIIEEKLKEILDIPVFHDDQHGTAIITTAALINALDISKKSMKKIKVVVNGAGASAIACTNLLKKSGIPSKNIIMLDSKGVLYRGRDNLNQWKSSHAIETKKRNLDQAIDGADVFLGLSSKSILSKKMVKKMAKNPIIFACANPDPEITPEEVEEVRNDAIIATGRSDYPNQVNNLIGFPYIFRGALDVRAKTINEEMKIAAANAIAALAREDVPDEVAAAMGGGERPKYGKE

SEQ ID NO: 82742 - protein, 185 aa, Unknown
  Bacterial polypetide isolated from the Sargasso Sea
MNDLKNKNIIVTGATGGIGSSIVKRLNDCEVNILASGTKSEKLDELKSQFKNIKILKFDISQMDKIEEFIENAVSHFDGNLDCIVNNAGITIDNLAIRMDFNDWKKVIDINLNSTFLLSKFAIKKMLKNKSGKIINITSIVGHTGNLGQANYCASKAGIVAMSKSLAIEYAKKNININCISPRFY

SEQ ID NO: 82743 - protein, 290 aa, Unknown
  Bacterial polypetide isolated from the Sargasso Sea
IPVFHDDQHGTAIITTAALINALDICGKSIKKIKVVVNGAGASAQACTELFKNSGVKSENIIMLDRKGVIYEGRTEGIDQWKSRYVVKTKHRTLADAIKDADVFLGLSAKGVLKKDMVKSMAKNPIIFACANPDPEITPEEINEVRNDAIIATGRSDYPNQVNNLIGFPYIFRGALDVRSKTINEEMKVAAANAIAKLAREDVPDEVVAAMGGERPHYGKDYIIPSTFDPRLISVIPAAVAKAAINSGAARKNIDDFEVYKDQLKQRLDPTVTIMQGINSFIKKNQKRIV

SEQ ID NO: 82744 - protein, 83 aa, Unknown
  Bacterial polypetide isolated from the Sargasso Sea
MTKKISLIGAGQIGGTLAHLIAIKELGDIVLFDVAEGLAKGKALDIAQSSGVTGFYVNISGTNDYEDTKNSDVIIITAGGSRK

SEQ ID NO: 82745 - protein, 290 aa, Unknown
  Bacterial polypetide isolated from the Sargasso Sea
ISLAPLLDMRKGFDQWVCERPARLLPGARQYLKDDRAKDIDMLVIRENSEGEYVSQGGRLRPGSPDEVATQMEVFTRRATERIIRYGFEQARKRAGERIQQGRTRSFRTLDGKTCESQVCLITKRNALRYWGDMYTEVFEEISREFPDVATHHELVDAACMKFVSSPWAFDVVVASNLQGDILTDLAAVISGGMGVAPSCNLNPTDPDMPSMFEPTHGSAPDIAGQGIADPTAMLFTTARMLDWLGRKDPLLAQAGQELFDAVAADLAEKGSEQRSTREIGDAICKRLGA

SEQ ID NO: 82746 - protein, 207 aa, Unknown
  Bacterial polypetide isolated from the Sargasso Sea
MSGFKLENAVGIEADVTSPDQIAAAFDAFGHVPDLLVNNAGIVRFGSMEEQSVQDYIDVVNVNLLGSCFCARAVAPAMIDRGSGHIINFTSINGVHPAPGIGLYGPTKAAMANMTQAMAIEWGPKGIRVNAIAPGMIDAGMSKPIFENPKVRATRGGGVPLRCLGEAADIAEAVLFLDSDGAKYISGHELVVDGGVSISVMAHLPRE

SEQ ID NO: 82747 - protein, 206 aa, Unknown
  Bacterial polypetide isolated from the Sargasso Sea
MSKTVLITGASSGLGKATSEYLSKKGYNVYGTSRYPSKYPTPKAYSLIKLDVNDPLSIRKAVNSILKKEKIIDVLVNNAGIGITGPGEETDIEEMKKNFDTNFFGQIRVMQNLLPSMRKNRKGLIINISSIAGYMGLPFRGCYSASKGALHLFSESIRMEVKNFGINILTLAPGDFSTNIVSRRYHSPILDGPYKDLYKKSLNEMN

SEQ ID NO: 82748 - protein, 307 aa, Unknown
  Bacterial polypetide isolated from the Sargasso Sea
AVAFEAGKPLEICDVELEGPKEGEVLVELKATGVCHTDAFTLSGDDPEGVFPSILGHEGAGIVVEVGPGVSTLKPDDHVIPLYTAECRECEYCLNPKTNLCQAVRETQGQGLMPDGTSRFSLNGKPIMHYMGCSTFSKYSVMPEISLAKVREDAPFDKICYIGCGVTTGIGAVVFQAKVEKGSTVAVFGLGGIGLNVVQGSKMAGASRVIGIDINPERESLGKNFGMTDFINPTEIDNVVDQVIQMTGGVDYSFECIGNVEVMRQALECCHKGWGESYIIGVAGAGQEISTRPFQLVTGRTGEELLW

SEQ ID NO: 82749 - protein, 177 aa, Unknown
  Bacterial polypetide isolated from the Sargasso Sea
MTTRKVTVVGAGNVGATTVQRIAEKQLADVVMIDIVEGLPQGKALDMMQAAAVEGYDSKIIGTNDYQDTKDSDVIVITAGIARKPGMSRDDLLKTNANIVGSVVEQCVAQSPNAIIIVVSNPLDVMTQLAWQKSGLDSKRVFGMAGVLDSSRYACFIAEALNCSIKDVRATVLGGHG

SEQ ID NO: 82750 - protein, 221 aa, Unknown
  Bacterial polypetide isolated from the Sargasso Sea
ELIEINAGIVKSVSENLLKYSPQAIIIVVSNPMDTMTYLVNKSFDIPKNRVIGMGGILDSSRFKTYISLETNFSQHDIDAMVIGGHGDTTMIPLTSISKCKNKLLSEIVSKDKLEKISSDTMVGGATLTKLLGTSAWYAPGASVSYLVNAIINDTQEMLPCSVYLEGEYNSSDLCIGVPVIIGKKGFERVVNVDINKNEMEMFENSVKAVKQTNLALDGLI

SEQ ID NO: 82751 - protein, 224 aa, Unknown
  Bacterial polypetide isolated from the Sargasso Sea
MSNEDFKQAALDYHRMSPPGKIRVAATKPMLTQRDLSLAYSPGVAHACEAIMADPQQASELTARGNLVAVISNGTAVLGLGNIGPLAGKPVMEGKGVLFQKFAGIDVFDIEIDENDPDKLVDIIASLEPTFGGINLEDIKAPECFIVERKLRERMNIPVFHDDQHGTAIIVGAAVLNAMVVTGKKIEDVKLATTGMGAAGISCVNMLVSLGLKKENILAFDRDG

SEQ ID NO: 82752 - protein, 209 aa, Unknown
  Bacterial polypetide isolated from the Sargasso Sea
MDSKMSDKAIKDLNNSNLSSNIIDVSNYKEVENCTKEILKKSNIDILVNNAGITGPTATLWEYDIEMWKKVVDINLMGTFNCCRAIVPNMIKNNYGRIVNVASVAGKDGNANASAYSVGKAGAIGLTKSLGKELADKNIAVNAVTPAGAKTGILDQMTKEHVQRMLSKVPRGRFLEVEEFTSLVCWLSSEENTFSTAAVFDISGGRSTY

SEQ ID NO: 82753 - protein, 192 aa, Unknown
  Bacterial polypetide isolated from the Sargasso Sea
KNFYYCLDLINKTHYEKELDKIINNHKIDILINNAGITKDNLFLRMTEEQWEDVIKINLNSNYYLIKKILPTMIKNRSGSIIGISSVVALTGNPGQANYTASKSAMISMYKSLAQEVAQRNININIIAPGFIESPMTQKLNESQVKNILDKIPMKRLGKPEDIANIALFLSSEKASYITGQTFHINGGMLMV

SEQ ID NO: 82754 - protein, 257 aa, Unknown
  Bacterial polypetide isolated from the Sargasso Sea
FGGINLEDIAAPDCFIIEQKLKEILDIPVFHDDQHGTAIITTAALINALDISGKSIKEIKVVVNGAGASAQACTELFKNSGVPSENVIMLDRKGVIYKGRTEGIDQWKSKYAVETKLRTLEDAMKSADVFLGLSAKGVLKKEMVKSMAKNPIIFACANPDPEILPEEINEVRNDAIIATGRSDYPNQVNNLIGFPYIFRGALDVRSKTINEEMKVAASQAIAKLAREDVPDEVVAAMGGERPHYGKDYIIPSTFDSR

SEQ ID NO: 82755 - protein, 240 aa, Unknown
  Bacterial polypetide isolated from the Sargasso Sea
MSKVALVTGGTRGIGAAISLALKKEGCNVAATYSSNSDAANKFSSENGIEVFQWNVADAAACEAGVKQVADKLGTVDILVNNAGISIASMAHKMSVEQWDDVIRTDLDSVFYMTRCVLEGMREKSFGRIISISSINGQKGEMGLINYSAAKAGLLGFTKALAQETARKNITVNAIAPGYIDTEILADVSEEIMEGIVGKIPVGRLGTVDEVSRIVTFLASDEAGFITGSTISANGGQYFA

SEQ ID NO: 82756 - protein, 265 aa, Unknown
  Bacterial polypetide isolated from the Sargasso Sea
CFVIEKKLKKILNIPVFHDDQHGTAIITSAALINAVDISKKNIKKIKVVVNGAGASAMACANLFIKLGVQKNNLVMLDSKGVIHKERKNLNEWKINYAINTKDRTLNDVIKDADVFLGLSSAGVLKKDMIKKMAKKPIIFACANPDPEIVPEEVEKVRSDAIIATGRSDYPNQVNNLIGFPYIFRGALDVRAKTINEEMKMAAAYSIAQLAKERVPDEVAAAMGGDRPIYGKEYIIPSTFDPRLISVIPVAVAKAAIKSKVARKK

SEQ ID NO: 82757 - protein, 66 aa, Unknown
  Bacterial polypetide isolated from the Sargasso Sea
MNKKIALIGAGQIGGTLAHLIGLKELANEVILFDVAKGIAKGKALDIEQSSSVDGFNVKISGSDNY

SEQ ID NO: 82758 - protein, 232 aa, Unknown
  Bacterial polypetide isolated from the Sargasso Sea
MSWTNLENKVVVVTGGAAGIGLAVVKGFVEVGAKVMIADFAEEVGVKAVEESNQAGSGEAAFAKCDVTSKEDVDGLVKATIDRWGSIDVLVNNAGINIPRLLVDPAGKEEMTEDVWDKVFAVNVKGQFLCAQAACRQMLASGNGGVLINMSSESGLEGSEGQSVYAATKAANQNLTRSWAKELGNKGIRVVGVAPGIMETTSMRSDAYEQSLAYTRGLTVEELRSKDGSSIP

SEQ ID NO: 82759 - protein, 303 aa, Unknown
  Bacterial polypetide isolated from the Sargasso Sea
AVLFKRFADIDSIDLEIYSNDPDEIINSIKNFSKSFGGINLEDIAAPECFIIEKKLKEILDIPVFHDDQHGTAIITTAALINAIDITKRDIKKTKVVINGAGASAMACANLFKNQGVSQKNITMLDSKGVIYKGRKNLSEWKSLHAIETKSRSLEEAIEDADVFLGLSKAGTLKKEMVKKMSKNPIVFACANPDPEITPEEIEQVRSDAIIATGRSDYPNQVNNLIGFPYIFRGALDVRAKTINEEMKIAASNAIATLARERVPDEVVAAMGGERPKYGKDYIIPSTFDPRLISVIPVAVAKA

SEQ ID NO: 82760 - protein, 191 aa, Unknown
  Bacterial polypetide isolated from the Sargasso Sea
MNKFDFRNKTAVITGGAQGFGFDIAKKFLNFGAKVIIWDVNKKELKKAAQKINHSKLSFDIVDVSDFKKVKKATDKITKLSKIDILVNNAGITGPTAKLWKYSSNDWNKVLDINLNGTFNCCKAIVPFMIKSNYGRIVNIASVSGKDGNANASAYSSAKAAVIALTKALGKELADKNISINAVTPSTARTK

SEQ ID NO: 82761 - protein, 275 aa, Unknown
  Bacterial polypetide isolated from the Sargasso Sea
MKFDVSNYDEVEAAVAQIEKELGPVEILVNNAGITRDGTMHRMSYEQWKEVIDTNLSGVFNCSRRVIEGMRERSFGRIVNIGSINGQAGQYGQVNYAATKSGIHGLHQGARPGRRSQEHHGECHCTRLCRHRHGARGAAGRAPENHRTHPRGTPRQGRRYRARGHFPDGRQCGVHHRVDPVDQRWPAHVLGRRQWWWDCDVRTPDFECTGHGMSAREYPDRPIAGVGVVVLKNDQVLMIRRGREPRLGQWSIPGGEQKIGETWRETAAREVREET

SEQ ID NO: 82762 - protein, 140 aa, Unknown
  Bacterial polypetide isolated from the Sargasso Sea
MSGNHKDQVVVVTGAGKGIGRAIAERFATEGARVVVNDIEEDRVNEVVASIKDINGNAIGAVADVSDSSQVKKIFDSTLDAFGTVDVLVNNAGIVSPMLHFFDADETWWRRIIDVNLTGHFLCSQQAARIMAKNQNGVII

SEQ ID NO: 82763 - protein, 228 aa, Unknown
  Bacterial polypetide isolated from the Sargasso Sea
MFNFEGKTVLITGASYGLGEQFAYSFAEAGADLILTARTEDLLQNVAETCREKGSKVTAVTGDVSIEEDVKNVVSTGIEEHGRIDVLVNNAGIADMRGVAPEHFDSETFNQIVSVDLVGAFYYARECGRHMLENGSGSIVNIGSILGSGGSENGVIAYSAAKGGLRNMTLQLGSEWADRGVRVNAVSPGFIVTEMTRVALEAMGIDKWIASRTPMRRVGESQEVTNAV

SEQ ID NO: 82764 - protein, 94 aa, Unknown
  Bacterial polypetide isolated from the Sargasso Sea
MSQNKIKNLVLTGASRGIGHATVKRFSSAGWRVITCSREKVPEKCPWSEGLHDHVQIDLESVENIVEGSTKIVEKLNGNPLHALVNNAGISPKG

SEQ ID NO: 82765 - protein, 197 aa, Unknown
  Bacterial polypetide isolated from the Sargasso Sea
MKSRAAVAFEAGKPLEIAEVDVSGPAAGEVMVEIKATGVCHTDAFTLSGDDPEGAFPAILGHEGAGVVVEVGDGVKDLKVGDHVIPLYTPECRTCNFCLNPKTNLCQAIRETQGEGLMPDRTSRFSIDGEPILHYMGCSTFSNYTVLPEIAVAKVREDAPFDKICYVGCGVTTGIGAVAFTMKVEPGATVAVFGLGG

SEQ ID NO: 82766 - protein, 154 aa, Unknown
  Bacterial polypetide isolated from the Sargasso Sea
AEELDVSVNSIDAYVLGGHGDSMVPLLKATTVGGVPVEELIEKNRLEEIVQRTRDGGAEIVAHLKTGSAYYAPSAAVAQMVDAIIFDTKEVFPCAAMLDGEYGISGVYAGVPVKLGSSGIEEIVNLNLSQSEKDGLTASSRAVEELIEVMKGQS

SEQ ID NO: 82767 - protein, 256 aa, Unknown
  Bacterial polypetide isolated from the Sargasso Sea
MSTEIITSRAAVAWHPAKPLSIETIDVMPPQAGEVRVRLHATGVCHTDAYTLSGKDPEGLFPCILGHEGAGIIESIGEGVTDLEVGDHVIPLYTAECGDCKFCLSGKTNLCQKIRTTQGQGLMPDGSSRFSKDGKPLFHYMGCSTFSQYTVLPAISLAKINKKAPLEEVCLLGCGITTGIGSVLNVAKVEAGATVAIFGLGGVGLSAIIGAKMANAGRIIAIDINEKKFSLAKKLGADECINPKKYDKSITEVIIE

SEQ ID NO: 82768 - protein, 324 aa, Unknown
  Bacterial polypetide isolated from the Sargasso Sea
YEYTTKGNLVAVLSNGSAILGLGNLGAIASKPVMEGKAVLFKRFADIDSIDLEIDTEDTKEIINSIKHIANSFGGINLEDIAAPNCFIIEEELKKILDIPVFHDDQHGTAIITTAALINAVDIAKKNLKKIKIVINGAGAAAMACAKLFRSTGIPKNNIKMLDRKGVINKKRKDINSWKKEFAVETKDKSLDDAMKDADVFLGLSAADALKKNMVKKMAKNPIIFACANPDPEIKPEDVEEVRDDAIIATGRSDYPNQVNNLIGFPYIFRGALDVRAKTINEEMKVAAANAIASLAREFVPDEVAAAMGGERPNYEKNTLSHLL

SEQ ID NO: 82769 - protein, 247 aa, Unknown
  Bacterial polypetide isolated from the Sargasso Sea
MFKRFADIDAIDLEIDSNDPNEIINNIKNFSGSFGGINLEDIAAPNCFIIEKKLKELLDIPVFHDDQHGTAIITSAALINAVDIAKKDIKKIKVVVNGAGASAMACASLFKKNGVLNNNITMVDRKGVIYKGRKGLNKWKSNHAVETKNRTLSDAIKDADVFLGLSSAGVLKKDMIKKMAKNPIIFACANPDPEITPEEIEEVRSDAIIATGRSDYPNQVNNLIGFPYIFRGALDVRAKTINEEMKI

SEQ ID NO: 82770 - protein, 284 aa, Unknown
  Bacterial polypetide isolated from the Sargasso Sea
MQIRFDNKVVIVTGAGSGLGRSYAIALASRGAKVLINDLGSSLDGSGRSVNIASNVAKEIVESGGEAIADNSDVTDKKSVDNMIKKVLSAWGRVDVLVNNAGILRDKSFSKITIEDFKAVVDVHLNGSMICSKAVWDYMKKQKSGNIIMTTSSSGLYGNFGQSNYGSAKMGVIGLMNVLAIEGEKYGIVVNAISPTASTRMTKNILESKILNLLDVESVTAALIYLVSEFSKTRTILAAGAGGYAVSRILETEGIYLAPDDQSPENIHKNFSKIIDSHNAQYLS

SEQ ID NO: 82771 - protein, 106 aa, Unknown
  Bacterial polypetide isolated from the Sargasso Sea
MQSYSLNNKIAIVTGASRGIGSAIAKSLAKNGVKVALNARNSEALKRLKNEITSANGIAEIMVGDVSCIDSFTKVVNDTIKKFGNIDILVNNAGITKDNIIMRMKE

SEQ ID NO: 82772 - protein, 105 aa, Unknown
  Bacterial polypetide isolated from the Sargasso Sea
MSEESRKIALVTGASRGIGAAIASALADAGLVVVGTATSERGAGKIDEALSSRGGHGRVLNVTDVTSVDALLAGLRTDLGDPLVLVNNAGITQDNIIMRMKDDEW

SEQ ID NO: 82773 - protein, 163 aa, Unknown
  Bacterial polypetide isolated from the Sargasso Sea
MFNLNGKNALITGASGGIGKAIAETLHASGARLTISGTRMEPLEELAKSLGDRVHIMGCDLSNGVEVENLSKGAQEKMGSVDILVNNAGITRDNLFLRMTDEDWASVLEVNLTSTMKLCRGVLRGMMKSRWGRIVNIGSVVGSTGNPGQGNYAASKAALVGMS

SEQ ID NO: 82774 - protein, 200 aa, Unknown
  Bacterial polypetide isolated from the Sargasso Sea
MNDLKDKNIIVTGASGGIGNSIVKKLNESGANILASGTRIEKLEQLKREFKNINTLKFDISQSEKIEEFIENATQELGGSLDCIVNNAGITQDNLAIRMSLDEWKKVIDINLTSTFLMSKFAIKKMLKNKSGKIVNITSVVGHIGNLGQANYTASKAGIVAMSKSLAIEYAKKNINVNCISPGFIKTAMTDKIDEKLKRP

SEQ ID NO: 82775 - protein, 311 aa, Unknown
  Bacterial polypetide isolated from the Sargasso Sea
GEINLEDIAAPDCFIIEDKLKKILNIPVFHDDQHGTAIITCAALINAVDIAKKKIDKIKVVINGAGASAMACANLFKKSGVLKKNLIMIDRKGVIHKERKDLSKWKSDHAINTKNRTLNDAINNADVFLGLSSGGVLKKEMVKKMSKNPIIFACANPDPEITPEEIEETRNDAIIATGRSDYPNQVNNLIGFPYIFRGALDVRAKVINEEMKIAAVNAIASLAKKRVPDEVVAAMGGDRPTFGKDYIIPSTFDPRLISVIPVAVAKAAVKSGVARKKIDNFEIYSEQLKQRLDPSVTIMQGINSQIKKNQK

SEQ ID NO: 82776 - protein, 158 aa, Unknown
  Bacterial polypetide isolated from the Sargasso Sea
MRLKGKVALVTGGNKGIGAAVVRRFASEGARVWSGDIVTDKTNNFSDDLADKTETIVHETLDVTSHDSWQLIINKIVQETGKIDILVNNAGIYDRRSIEATTEEQFDKMLAVNTKGPFLGIKLALEALKASGNASIVNLSSTAGLRGSFAVHYGASKG

SEQ ID NO: 82777 - protein, 286 aa, Unknown
  Bacterial polypetide isolated from the Sargasso Sea
STGVCHTDEFTLSGADPEGIFPAILGHEGAGVVVDCGPGVQTLKKGDHVIPLYIPECRQCKSCLSGKTNLCTSIRDTQGQGVMPDGSSRFSVGGDKIFHYMGTSTFANHTVVPEIALAKVREDAPFDKICYIGCGVTTGIGAVINTAGVEPGSNVVVFGLGGIGLNVIQGARLAGANKIVGVDINDSKKEMAERFGMTHFVNPNEVEGDLVPYLVDLTDGGADYSFECIGNVNTMRQALECAHRGWGESIIIGVAGAGQEISTRPFQLVTGRVWKGTAFGGAKSRR

SEQ ID NO: 82778 - protein, 275 aa, Unknown
  Bacterial polypetide isolated from the Sargasso Sea
MGSAILGLGNLGAIASKPVMEGKAVLFKRFADIDSIDLEIDSSDPNEIIKSIKNFSKSFGGINLEDIAAPDCFIIEKKLKEILDIPVFHDDQHGTAIITCAALINAIDIAKKDIKKIKVVVNGAGASAMACTNLFIKYGVSKKNITMIDRKGVIHKKRDGLNEWKSAFAIDTKDRTLKDAIKNADVFLGLSSAGVLKKDMVKSMSKNPVIFACANPDPEITPEEVEEVRKDAIIATGRSDYPNQVNNLIGFPYIFRGALDVRAKTINEEMKVAAV

SEQ ID NO: 82779 - protein, 304 aa, Unknown
  Bacterial polypetide isolated from the Sargasso Sea
CSAPGVLTAEMVKTMGPKPIILALANPEPEIRPELAKAIRPDCIIATGRSDYPNQVNNVLCFPYIFRGALDCGATKITEAMKLACVRQIADLAKADISEEVASAYAGKELTFGPDYLIPTPFDSRLILKIAPAVAKAAAESGVATRPIEDMEAYKETLSRFVYQTGMLMRPVIMAAKALPDAQKRVAYADGEDERALRAAQMAIDDKIAQPILIGRPAVIAARIEKAGLRMQLGKDVEVCNPEDDPRFRQYWEHYHSLMKRNGATPEVAKAAVRRSNTIIASLMVTLGDADAMICGLVGTYETH

SEQ ID NO: 82780 - protein, 28 aa, Unknown
  Bacterial polypetide isolated from the Sargasso Sea
MARNKIALIGAGNIGGTLAHLAGLKELG

SEQ ID NO: 82781 - protein, 287 aa, Unknown
  Bacterial polypetide isolated from the Sargasso Sea
DISVKSIKEIKVVVNGAGASAQACTELFKNSGVPSENIIMIDRKGVIYEGRTEGIDQWKSKYAVKTKLRTLEEAIKGADVFLGLSAKGVLKKEMVKSMAKNPIIFACANPDPEILPEEINEVRHDAIIATGRSDYPNQVNNLIGFPYIFRGALDVRSKTINEEMKVAASQAIAKLAREDVPDEVVAAMGGERPHYGKDYIIPSTFDPRLISVIPAAVAKAAMKSGVARKNIEDFEIYKEQLKQRLDPTVTIMQGINSFIKNNQKRIVFADGEDENTKKAAIAFKNSK

SEQ ID NO: 82782 - protein, 205 aa, Unknown
  Bacterial polypetide isolated from the Sargasso Sea
DWNGTPCDVSEENQVDQLFKEMSYSFGGLEILVNNAGIAGPTAPVEEIDPGEWRRSVGVNLNGAFYCTRLATPLLKNSPKASIIYISSVAGRLGFARRLPYASTKWAMIGFTESLAKELGPSGIRVNALLPGIVEGPRIEGVFQARAESEGVPYEEVRDRVLNNVSMKRMVSAGDVAEMAVFLSSEAGKNISGQSISVCGNVENL

SEQ ID NO: 82783 - protein, 241 aa, Unknown
  Bacterial polypetide isolated from the Sargasso Sea
MDLELTDKYVIVTGASRGIGRAISEKFYEEGTHLLLIARDEEPLSDLKESLDRQGTSSVHTLSCDVASASAPDTIDRKLQEVFPHVDVLVNNAGATIRGGDTESNWRQSFELNVMAPLRIMETLRESLLKSEHASVINISSIFGREHGGSPQYQSSKAAQIALSNSYARNWASDGIRINNIAPGSIAFEGGSWGNRLVEDPEGMAEFIRNEIPGGRFGKPEEVADAVVWLASKRAIVGLMI

SEQ ID NO: 82784 - protein, 222 aa, Unknown
  Bacterial polypetide isolated from the Sargasso Sea
MKDLFSIEGKVALVTGGSRGIGEMIAAGFLANGAKVYISSRKAEVCDATAERLANEYGGECISIPADLSNLEGIGALAKELSAKENSLDILVNNAGASWGEPIEEYSELGWDKVMDTNVKGIFFLTQQLLPLLRESGKSDNPSRVINIGSIDGIKTGTFDAFSYGPSKAAVHHLTRVLAARLIKDQIIVNAIAPGPFPTWMLSTGVGGGGDTDIDWSAVGQS

SEQ ID NO: 82785 - protein, 271 aa, Unknown
  Bacterial polypetide isolated from the Sargasso Sea
NLGALASKPVMEGKAVLFKRFADIDSIDLEIESKDSEEIVNSIKNFAPSFGGINLEDIAAPDCFIIEQKLKEILDIPVFHDDQHGTAIITTAALINALDISGKSIKEIKVVVNGAGASAQACTELFKNSGVPSKNIIMLDRKGVIYEGRTEGIDQWKSKYAVETKLRTLEEAMKNADVFLGLSAKGVLKKEMVKSMAKNPIIFACANPDPEILPEEINEVRDDAIIATGRSDYPNQVNNLIGFPYIFRGALDVRSKTINEEMKVAASQAIA

SEQ ID NO: 82786 - protein, 183 aa, Unknown
  Bacterial polypetide isolated from the Sargasso Sea
MLTPVNKNGAIHGLVNNAGIVRAAMINKMPIETWQEVIDVNLSGVFYCLQAVGRHMYQRYEDGDTSPASIVNISSDAGRRGTIGQINYGAAKSGVMGITMSAAREWAASQVRVNSVCFGVVETEMTETIRSDKFRDRIMAQVPMGRFSKPEEVCQPVCFLLSQAASYITGQHLSVNGGYTIGV

SEQ ID NO: 82787 - protein, 202 aa, Unknown
  Bacterial polypetide isolated from the Sargasso Sea
MYLKNYNLKNKFSLVTGAGKGLGKACAIALAEAGSNLIILSRTKKDLELVSKKIRKYRVKCKSYLCDVTNYDQIKKIINEQKRIDVLVNNAGINIPENFIKVKTKDMEYMVKINTVAAFNVAQLSALKMIQLKNRKKIGASIINISSQMGHVGGPIRSVYNMNKWGLEGLTKGMAVDLAKFNIRVNTVAPTFVVTPMTKKFL

SEQ ID NO: 82788 - protein, 185 aa, Unknown
  Bacterial polypetide isolated from the Sargasso Sea
MKVAVVTGAARGIGLAISKKFLEEGFRVAILDIDQKTLSQTIKQFFDTNNVLGLECNVSEPDQVDQSVNRVVEQFGRIDVLVNNAGIAEFKPMLETTYEEWSRILAVNLNGPFICSQACAPIMLKNEGGSIVNIASISGLRASTLRIAYGTSKAALMHLTKQQAAELGNKGIRVNAIAPGPVDTA

SEQ ID NO: 82789 - protein, 108 aa, Unknown
  Bacterial polypetide isolated from the Sargasso Sea
MKNKVILVTGANRGIGLNIIQRLNNDGYTVIGTSRTDDGANIISQETKSNGGKGLKMDVTNQESIDSAIKNIQDEYGPLYGLVNNAGITNDNLLMRMTVEQWLSVIET

SEQ ID NO: 82790 - protein, 252 aa, Unknown
  Bacterial polypetide isolated from the Sargasso Sea
MKTRAAVAVGAGKPLEIMEVDLDGPRAGEVLVEIMATGICHTDAFTLSGADPEGMFPAILGHEGAGVVREVGPGVTSLEPGDHVIPLYTPECRECEYCLNPKTNLCQSIRTTQGQGVMPDGTSRFSLNGKPILHYMGTSTFANFTVLPEISLAKVNKAAPFDKICYIGCGVTTGIGAVINTAKVEPGCNAVVFGLGGIGLNVIRDPAAQNRPSFILWVLLQAGYIPPVGPIRPPMRRARPNACRRPARQRDG

SEQ ID NO: 82791 - protein, 298 aa, Unknown
  Bacterial polypetide isolated from the Sargasso Sea
SCLFPGVAAPVKAIAENPVRAYDYTTKGNLVAVISNGSAILGLGNLGAIASKPVMEGKAVLFKRFADIDSIDIEIDTNDTEEIIKSIKNISKSFGGINLEDIKAPECFIIEKKLKEILDIPVFHDDQHGTAIITSAALINACDIAKKKLNEINVVINGAGASAMACAKLFINSGVDKNKIKMLDSKGVIYKGRDNLNEWKNEFSIKTNDRDLKDAIKNADVFLGLSQAGVLKKDMVKSMAKNPIIFACANPDPEITPEEIEEVRDDAIIATGRSDYPNQVNNLIGFPYIFRGALDVRS

SEQ ID NO: 82792 - protein, 215 aa, Unknown
  Bacterial polypetide isolated from the Sargasso Sea
MLKQINLKNKVALVTGAGKGIGKACAIALAQAGAKVIIVSRTKSDLDKVSKIIKKTKGSSQSFVCDVTHISKFNTIVNGLKRLDILVNNAGSNRPEHFTKVKKENMDYLVNLNLKACFNIAQICTKKMLIAKNRKKIGGSIINMSSQMGKVGGPIRSVYNMTKFGLEGLTRGMAIDLAKDNIRVNTVCPTFVLTPMVKSFFKNTKFKKEMIRNIP

SEQ ID NO: 82793 - protein, 290 aa, Unknown
  Bacterial polypetide isolated from the Sargasso Sea
AFGARPGDLAVVGDIVSHTIAAIETAERHGGWCALPEADIFAVEYWELEQAKLAKSASSPVFQGRCALVTGGASGIGYACALALSEQGAQVTVLDKDPSVLKVFDGTNIHGRVCDVKDADAVRDAVAESVATFGGLDILVNNAGIFCASDEVADMPEAEWQRSLDINLTGAMHVARESIPYLRLGWEPSLIMVGSKNVPAPGPAAGAYSVAKAGLTQLARVLALELAGDGIRVNTLHPNAVFDTAIWTDEVLEGRAAHYGMSVEDYRRNNLLHREVTSADVAALVCAMAG

SEQ ID NO: 82794 - protein, 189 aa, Unknown
  Bacterial polypetide isolated from the Sargasso Sea
MNKVALVTGGSRGIGRAICLGLAKKGYNIVIAAKSIRDNDKLPGTIFSVAEEVEKLGVKALPVRTDMRYSEEIKNLVNSVDKNFSRLDVLINNAGALWWKNIDETPIEKYDLINNINSRGSFILSKLCLPLMKQNDGGHIIMQSPPLCDTQNEYKKYLNGKTAYMISKWGMTMTALGLAEETKKNNISV

SEQ ID NO: 82795 - protein, 165 aa, Unknown
  Bacterial polypetide isolated from the Sargasso Sea
MPPFNLDGKTAIVTGSASGIGLAIATVFAEAGAAVQLLDLSRDALDAAAKGINDRKPAKPCTAHVCDVSDLTAVDRVFNSIASSSGRIDILVNNAGISAVGDVLKCTDADLDRVWAVNVKGVFHCLQAGVRHMLADGKGGAIVNLASIASILGLADRFAYSATKG

SEQ ID NO: 82796 - protein, 256 aa, Unknown
  Bacterial polypetide isolated from the Sargasso Sea
MDLNGKVALVTGGASGLGQATVENFVAAGAKVVILDINEDNANKIIENLGADKVSFISTNIMEEDPVVSAINKIKDLHGALHIAVNCAGTGYPGRILGKEAPHPLDAFQFIINLNLVGTFNVMRIAAELMDKNEADEGGEKGVIINTASVAGYEGQIGQSAYSASKAGVIGLTITAARDLARHSIRVCTIAPGIFDTPLMQLAPDKVRDPLLESTQFPHRFGQPSEFGQLAAHIVENSYLNGETIRLDSGMRMKPR

SEQ ID NO: 82797 - protein, 280 aa, Unknown
  Bacterial polypetide isolated from the Sargasso Sea
MVAVISNGSAILGMGNLGALASKPVMEGKAVLFKRFADIDSIDLEIDCNDTNEIINSIKNFAPSFGGINLEDIAAPDCFVIEKKLKEILDIPVFHDDQHGTAIITTAALINALDISGKSIKEIKVVVNGAGASAMACANLFKNSGVPQKNLTMIDRKGVIYKGRENLNQWKSIYAVETADRTLDEAINKADVFLGLSAKGALTKKMVKKMAKNPIIFACANPDPEITPEEVEEVRDDAIIATGRSDYPNQVNNLIGFPYIFRGALDVRSKTINEEMKVAA

SEQ ID NO: 82798 - protein, 166 aa, Unknown
  Bacterial polypetide isolated from the Sargasso Sea
MTATHPIAVAAPSATVAGAASPARGHPMRRKTLLLTGASRGIGHATVRRFNAEGWRVITCSRQPFPKECPWGGGEENHVQLDLSDPSDTINAVGIIQERLEDGKLDALVNNAGISPKGPEGERLSTLNTDLMDWAKVFHVNFFASVVLARGLREELAAAKGAVVNV

SEQ ID NO: 82799 - protein, 189 aa, Unknown
  Bacterial polypetide isolated from the Sargasso Sea
MIEDLYNVKDKVAVVTGSSRGIGKQCALAFAEAGAKLVLNYVSNKEAAEITAEEIADLGSEAIVVQADVKDFEACQTLGEEAIKAYGQVDFLVNNAGINRDITFSRMSQDEWKEVIDTNLGALFNMSKAVVPHMRDAGSGVIVSISSIIGETGNIGQSNYAATKSGMYGFTRSLARELAKDNIRVNAVS

SEQ ID NO: 82800 - protein, 274 aa, Unknown
  Bacterial polypetide isolated from the Sargasso Sea
DIEVDSSDPNEIIKSIKSIASSFGGINLEDIAAPDCFIIEEKLKQILDIPVFHDDQHGTAIITTAALINALDISKKSINKIKVVVNGAGASAIACTNLLINTGVPKKNITMLDSKGVLYRGRDNLNQWKSTHAIETKKRTLMQAIDGADVFLGLSSKSILSKSMVKKMAKNPIIFACANPDPEITPEEVEEVRKDAIIATGRSDYPNQVNNLIGFPYIFRGALDVRAKTINEEMKVAAANAIASLARERVPDEVVAAMGGERTVYGKEYIIPST

SEQ ID NO: 82801 - protein, 186 aa, Unknown
  Bacterial polypetide isolated from the Sargasso Sea
MKRLENKIALITGAAQGIGLAIAKLFVLEGAKVLITDINEKEAAVQSNKINDEFPGHAASIKHNVTSVEDWKNAIDSVEKNFGAVNILVNNAGIMAVGTIEEESYDQWKHVHKVDLDSVFLGCKYGIPAIKKQKNGSIVNISSISGIIAGHNLASYNSAKAAVRHLTKSVAIHCAREKNGIRCNSI

SEQ ID NO: 82802 - protein, 314 aa, Unknown
  Bacterial polypetide isolated from the Sargasso Sea
ASKPVMEGKAVLFKRFADIDSIDLEIDSKNSDEIINSIKNFSPSFGGINLEDIAAPDCFVIEEKLKEILDIPVFHDDQHGTAIITTAALINALDINKKSIKKIKIVVNGAGASAMACANLFKKSGAPQKNIKMIDRSGVIYKGRKKLNQWKSSHAIETSDRTLEDAIKNADVFLGLSAKGALTKNMVKKMAKNPIIFACANPDPEITPEEVEEVRKDAIIATGRSDYPNQVNNLIGFPYIFRGALDVRSKTINEEMKVAAANAIAKLAREDVPDEVVAAMGGERPHYGKDYIIPSTFDPRLISRIPIAVAKAAI

SEQ ID NO: 82803 - protein, 86 aa, Unknown
  Bacterial polypetide isolated from the Sargasso Sea
MDINNKVALVTGGASGLGQATVEKLVSKGAKVAILDINEQKANEIIEKLGAENIIFLSTNIMEEEPVISSINKIHEKFGALHIAVN

SEQ ID NO: 82804 - protein, 276 aa, Unknown
  Bacterial polypetide isolated from the Sargasso Sea
VISNGSAILGLGNLGSLASKPVMEGKAVLFKRFADIDSIDIEIDSQNTDEIISTIKNIAGTFGGINLEDIAAPDCFIIEQKLKEILDIPVFHDDQHGTAIITTAALINALDISKKKINEVKIVVNGAGASAIACTNLFKKIGVKNENVIMCDRKGVIYKGRDQVDQFKSAHAVETKLRTLEQAMKNADVFLGLSAKDVVNREMIKSMAKNPIVFACANPDPEIKPEIINEVRDDVIIATGRSDYPNQVNNLIGFPYIFRGALDVRAKIINDEMKVA

SEQ ID NO: 82805 - protein, 193 aa, Unknown
  Bacterial polypetide isolated from the Sargasso Sea
MNKVILVTGASRGIGAECAKLLAKAGAKVIVNYYKCEKEAIEVVQFIQKNGGDATMINANLRKKSEILNLFSTIKEKFGRIDVLVNNAGIMETNLLTMINDEEFDQMVDLNIKGALYCMQRATRMMSRQESGKIINISSITGRFGAPAHTAYSATKAALIAMTLSAAKELGTFGITVNCIAPGIIETDLIKNL

SEQ ID NO: 82806 - protein, 332 aa, Unknown
  Bacterial polypetide isolated from the Sargasso Sea
VELFKSMGVPHENIILVDRSGVIYQGREASMNQWKSTHAVKTDARTLEDALVGADVFLGLSVAGAVTPKMVETMAERPIIFAMANPVPEIMPEDVKKVRPDAIIATGRSDYPNQVNNVLGFPYIFRGALDVRASKINEEMKIAAAEAIAMLAREDVPDAVAEAYGGQVLQYGEDYIIPAPFDPRLISAVSSAVAAAAMESGVARKPIEDLERYRRDLSARLDPTASTLQVIFDRISANRKRVVFAEGEEEKVIRAAMAFRNAGYGEPILVGREHRIRETIEKLGLEGAEDIPVTNAKVSGHNEQYIDFLYNKLQREGALRRDCQRMVNLTGT

SEQ ID NO: 82807 - protein, 214 aa, Unknown
  Bacterial polypetide isolated from the Sargasso Sea
MEQSLKENPDWNGTPCDVSDENQVNQLFKEMTDSFGGLEILVNNAGIAGPTAPVEEIGPDEWRRSVGVNLNGAFYCTRLATPLLKNSPKASIINISSVAGRLGFARRLPYASTKWAMIGFTESLAKELGPSEIRVNALLPGIVEGPRIEGVFQARAKSEGVPYEEVRNRVLNNVSMKRMVSAGDVAEMAVFLCSEAGKNISGQSISVCGNVENL

SEQ ID NO: 82808 - protein, 314 aa, Unknown
  Bacterial polypetide isolated from the Sargasso Sea
GKIEIRASKNMIPLRDLALAYSPGVAVPVKKISENSEAAYDYTSKGNLVAVISNGSAILGLGNLGALASKPVMEGKAVLFKRFADIDSIDLEIDSNDTDEIITSIKNFAPSFGGINLEDIAAPDCFVIEEKLKEILDIPVFHDDQHGTAIITTAALINALDINKKSIEKVKIVVNGAGASAMACANLFKKNGVAQNNITMVDRTGVIFRGRDNLNQWKSAHAIETKNRTLNDAIKDADVFLGLSAKGALTKEMVKKMAKNPIIFACANPDPEITPEEIEQVRDDAIIATGRSDYPNQVNNLIGFPYIFRGALDV

SEQ ID NO: 82809 - protein, 177 aa, Unknown
  Bacterial polypetide isolated from the Sargasso Sea
MDLNLADKVVIVTGASRGLGEAIVKDLVDEGASVIAAARSESALKAISEYSPEKIAVCVADMENRNDVQGLVNFALDTFGSLSAVVNNAGIAPAGKFVDIDIEIMEKTFAVNVFAPAILAREAARYFIESGIEGSIVNIASTSGLKGKALLVGYSASKGAMMRLTEALAAEWARFGI

SEQ ID NO: 82810 - protein, 192 aa, Unknown
  Bacterial polypetide isolated from the Sargasso Sea
MKRLENKIALITGAAQGIGLAIAKLFVLEGAKVLITDINEKEAAIQSNKINDEFPGHAVSIKHDVTSVEDWKNAIDSVEKNFGAVNILVNNAGIMAVGTIEEESYDQWKHVHKVDLDSVFLGCKYAIPAIKKQKNGSIVNISSISGIIAGHNLASYNSAKAAVRHLTKSVAIHCAREKNGIRCNSIHPVFVD

SEQ ID NO: 82811 - protein, 270 aa, Unknown
  Bacterial polypetide isolated from the Sargasso Sea
MLTAIKNLGDVVLVDIAKGVAKGKALDISHSLPVLQCNRKITGTTSLKQIKDSEVIVVTAGVPRKAGMSRDDLVEINLKVMKDVGRAIKKYSPKSFVIVVTNPLDVMTWALQKITGIPHSHVVGMAGVLDTSRFKFHLAEALGFSVQDVSSSVLGGHGDDMVALLRHTTISGIPLEDMIKMKKISRQKVNEIVKRIRTCGGEIITYMGTSAYYSPAASAVEMVECYLRDQKKIIPCSAYLRGQYGVKGIYVGVPVVLGTNGAEKIVEINL

SEQ ID NO: 82812 - protein, 266 aa, Unknown
  Bacterial polypetide isolated from the Sargasso Sea
MIERCDIPVFHDDQHGTAIVTAAGLLNALEVQGKQIGDSRIVCMGAGAAATACMELLIKCGAKPHNIFMLDRQGVIHSGRTDLNQYKQRFANDTPLRTLMEVIDGADVFVGVSGPDVLPAEAVALMAPNPVIFACSNPDPEIKPALAHAVRKDLIMGTGRSDYPNQINNVLCFPFIFRGALDARASRINDAMKIAAVEAIRGLAKEPVPAEVLTAAGVSELAFGKDYVIPKPMDARLLPRVARAVALAAVESGVARIALPADYMLG

SEQ ID NO: 82813 - protein, 292 aa, Unknown
  Bacterial polypetide isolated from the Sargasso Sea
MEEKLKKVLDIPVFHDDQHGTAIITTAALINALDICKKSIKEVKVVVNGAGASAMACANLFKKSGVPQKNITMIDRKGVIYNGRDNLNEWKKLHAVKTNNRTLNDAIKGADVFLGLSAKGVLTKDMVKKMAKNPIIFACANPDPEITPEDVEEVRDDAIVATGRSDYPNQVNNLIGFPYIFRGALDVRAKTINEEMKVAAAHAIADLAREDVPDEVVAAMGGERPHYGKNYIIPSTFDPRLISVIPSAVAEAAIKSGVARKKIEDFRDYKEQLKQRLDPSVTIMQGINNQIK

SEQ ID NO: 82814 - protein, 511 aa, Unknown
  Bacterial polypetide isolated from the Sargasso Sea
MGTSLPYAERKRQGLMGRMPHKEESLAQQRRRIYRLVSAMQSPFDQHLLLRQLQEDNPVLFYELVRHHLPELLPIIYTPVVGEACQRHSDLYLRSHGLYLSWHDRDELDHIFAAVEQEVDVIVISDGERVLGLGDLGIGGMGICIGKLALYSAAGGINPARTLPLCVDVGTNNPELLEDDSYLGWQAPRVDGEPYYQFMDKVVAAIRKRWPQVVLQFEDFAGKHAANLLARYRDELCMFNDDIQGTAAVASACVLAGLQQAGSALAETPVLIVGAGSAGCGIAAMLAQLAGGTERVQLFDQDGLVCQDRAGLTPAQQPFARPAAEACHSLAALIERLRPGVLIGVSGQGGLFDEEVLTAMGEVCERPVILPLSNPTRSAEATPAQVWQATGGRALLATGSPFPPVTVDGAPRVVSQCNNVYVFPGIGLGACAVKARRISDGMLRAAVQAVGAYPLAEGRLLPPIEQVGEVARAVARAVALCARAEGLADFAGDPAPLIDQTWWRPHYWSAS

SEQ ID NO: 82815 - protein, 624 aa, Unknown
  Bacterial polypetide isolated from the Sargasso Sea
MEGKAVLFKRFADIDSIDLEIDSNNPDEIINSIKNFSKSFGGINLEDIAAPDCFVIEEKLKKILDIPVFHDDQHGTAIITCAALINAIHITKKNIKKIKIIVNGAGASAMACSKLFATIGVPKKNIIMLDSKGVIFKGRKNLNKWKSEHAKETKSKTLDEAIVGADVFLGLSKAKVLKKEMVKKMSKKPIIFACANPDPEITPEEVEEVRSDCIVATGRSDYPNQVNNLIGFPYIFRGALDVRAKTINEEMKIAAANAIAELARERVPDEVVAAMGGDRPKYGKDYIIPSTFDPRLISVIPVAVAKAAIKSGVARKNIDNFDVYSEQLKQRLDPSVTIMQGINSQIKKNQRKVVFADGEDENTLKAAIAFKNSGLGIPIIVAKEKVVKQRLKEIGYSENFNIEIVNSTIKEKREKYVKYIFKKLHRDQGLLERDCDRMVRNDRVIWGACMVSCGDADAMVTGNTRRYTQSLQKIKKVVDPRPGEIMFGLNMVVNKGRTVFIADTTVHEYPSSLQLAEIAISSARVVRLFGFDPKIAFLSHSTFGQPITSRTKHIRDAVKILKEKNVNFKFDGDMQPDVALDEKYKELYPFSEIVGNANVLIMPGQHSAAITYKTMKTLGGSKVI

SEQ ID NO: 82816 - protein, 282 aa, Unknown
  Bacterial polypetide isolated from the Sargasso Sea
ECFEIEKALIEQCDIPVFHDDQHGTAIVTAAGMINALEIAGKTLGEAKIVCLGAGAAAISCMKLIISMGAKLENIYMVDSKGVIQSERTDLNQYKAMFAHPSSKRTLADALDGADVFVGLSGPNLLSAEGLKSMAPNPIVFACSNPDPEISPELAHATRSDVIMATGRSDYPNQVNNVLGFPFIFRGALDVRAKRINEEMKVAAANALRELAKLPVPQDVCDAYGGAKLEFGREYIIPKPMDKRLITLISDAVAKAAIETGVATLPYPKNYPLQSVDDVFNG

SEQ ID NO: 82817 - protein, 431 aa, Unknown
  Bacterial polypetide isolated from the Sargasso Sea
MTKKSKIDHYTDKEALDFHIGNKSGKIEVNSSKPLISKRDLSLAYSPGVAAPVKEISKDSSKAYDYTSKGNLVAVISNGSAILGLGNLGSLASKPVMEGKAVLFKRFADIDSIDIEIDSHDADEIISTIKNIAGTFGGINLEDIAAPDCFIIEQKLKEILDIPVFHDDQHGTAIITTAALINALDISKKKINEVKIVVNGAGASAIACANLFKKIGVKNENVIMCDRKGVIYKGRTQVDQFKSAHAIETNHRTLEQAMKNADVFLGLSAKDVVNREMIKSMAKNPIIFACANPDPEIKPEIINEVRDDAIIATGRSDYPNQVNNLIGFPYIFRGALDVRAKIINDEMKVAAANAIALLAREDVPDEVVAAYGGERPKYGREYIIPSTFDPRLVRRIPSAVAEAAIKSGVARKKIESLEDYKDQLTARLDPS

SEQ ID NO: 82818 - protein, 341 aa, Unknown
  Bacterial polypetide isolated from the Sargasso Sea
MKTRAAVALEAGKPLEVMEVNLEGPKEGEVLIEIKATGICHTDEFTLSGADPEGLFPAILGHEGAGVVVEIGSGVKDLKVGDHVIPLYTPECRQCEYCLNPKTNLCQAIRETQGQGLMPDGTSRFSMLDGTPILHYMGCSTFSNYTVLPEIALAKINPDAPFEKVCYIGCGVTTGLGAVMNTAKVEIGSRAIVFGLGGIGLNVIQGLKLAGADQIVGVDLNPGKQSMAEKFGMTDFVNPSDVNDDLVAHLVNVTNGGADYTFDATGNVNVMRTALESAHKGWGESIIIGVAPAGAEISTRPFQLVTGRVWKGTAFGGARGRTDVPKIVDWYMEGKIQIDPM

SEQ ID NO: 82819 - protein, 279 aa, Unknown
  Bacterial polypetide isolated from the Sargasso Sea
MLGAIFATDKQKVILITGTAHGIGKSTAQYLIDKGHIVYGGDILIEENLYLNDIGGVALEMDVTKQDHVDNAINKIIAEQGRIDVLVNNAGIAVGSAIEDVSMEDALYQFEVNLFGIGRTVKAALPHMRAQGSGTIINISSVLGKVYNPLYGWYVSSKHALEGWSDVLRIEVEQFGIDVVIIEPGMIKTNIGNYSAQYFEKYSKNSAYANFYGSPDDKEENSFDNYSDPIVIAKVINKAIDAKNPKTRYSAGAYSWILLTMRSILPDKWFDKLIVKVTS

SEQ ID NO: 82820 - protein, 258 aa, Unknown
  Bacterial polypetide isolated from the Sargasso Sea
MTGRLENKVAIITGAAMGLGAADAELFASEGAKVVLTDIAEKEGQELADKLNGTFFHHDVTDEDRWIEIINETEKKYGRIDVLVNNAGIVKPGDPENQTTEEYKFTMSVHMDSTFFGCKYVIPVMAKNGGGSIVNMCSIASVQGESYVAAYCAAKGAIEAYSRAVAVHCGLAKNGVRCNTIHPSGIATPMVASVPALMAEKFGNTGVQDAPVESNKVGEPMDIAHAALYLASDESKFVNGAQLRVDNAMSVVSGNMPE

SEQ ID NO: 82821 - protein, 232 aa, Unknown
  Bacterial polypetide isolated from the Sargasso Sea
MKLLDGQRALITGAGSGIGKVMAQHFEKAGARIWICDADTNNLEQSLKENPHWNGTPCDVSDENQVGKLFKEMSDFFGGLEILVNNAGIAGPTAPVEEIDPGEWRRSVGVNLNGAFYCTRLATPLLKNSPKASIINISSVAGRLGFARRLPYASTKWAMIGFTESLAKELGPSGIRVNALLPGIVEGPRIEGVFQARAESEGVPYEEVRDRVLNNVSLKRMVSAGDVAEMAV

SEQ ID NO: 82822 - protein, 259 aa, Unknown
  Bacterial polypetide isolated from the Sargasso Sea
MGRLADKVAMVTGAGRGIGAAIARAFVREGAAVALVDLDFPQAQRTAAGIAQEIAGARVLPLHADVARQESVRAALAQTEAAFGPLDVLVNNAGINVFADPLTMTDDDWRRCFAVDLDGVWHGCRAALEGMVERGRGSIVNIASTHAFRIIPGCFPYPVAKHGVLGLTRALGIEYAARNVRVNAIAPGYIETQLTRDWWDAQPDPAAARAETLALQPMKRIGRPEEVAMTAVFLASDEAPFINAACITVDGGRAALYHD

SEQ ID NO: 82823 - protein, 780 aa, Unknown
  Bacterial polypetide isolated from the Sargasso Sea
MPSKSYSNPPAKRHMSTQASSKAKLREAALDYHEFPTPGKIAIAPTKQMINQRDLALAYSPGVAYACEEIVENPLNAARFTARSNLVGVVTNGTAVLGLGNIGPLASKPVMEGKAVLFKKFAGIDVFDIELNESDPHKLVDVIAALEPTFGGINLEDIKAPDCFIVEREARKRMKIPVFHDDQHGTAIVVAAAVTNGLKVVNKDIKKVKLVASGAGAAALACLDLLVDIGLPLENITVTDLAGVVYKGRTELMDPDKERFARETEARTLAEVIDGADIFLGLSAAGVLKQEMVKGMAERPLILALANPTPEILPEAALEVRPDAILATGRTDYPNQVNNVLCFPFIFRGALDVGATTITREMEIAAVNAIAELAQHEQSDIVATAYGIQDLSFGPEYLIPKPFDPRLIVKIAPAVAQAAMDGGVATRPIEDMEAYRVHLQQFVYHSGTTMKPIFQIARAAPEEKKRVVFAEGEEERVLRAVQIIVDEKLAKPILIGRPSVIEHRIHRYGLRLTPGTDFTVVNTEHDERYRDFWQTYYKMMARKGISEQLARVEMRRRTTLIGSMLVKKGEADGMICGTISTTHRHLHFIDQVIGKRPGCSVYAAMNGLVLPGRQIFLVDTHVNVDPTPEELAEITIMAAEEVRRFGIEPKVALLSHSNFGTSNAPSAKKMRDTLAILQERAPELKVDGEMHGDVALDAALRKEILPESTLEGEANLLILPNIDAANIAYNLLKTAAGNNIAIGPILLGAAQPVHVLTESATVRRIVNMAALLVADVNATR

SEQ ID NO: 82824 - protein, 635 aa, Unknown
  Bacterial polypetide isolated from the Sargasso Sea
NLHFWWELTFEDIKAPECFIIEKALRKRMKIPVFHDDQHGTAICVAAALINGLRIIDKEISKANLVCSGAGAAALACLDLLVEMGMKPDNIVVCDRKGVVHKGREKELDEYKLKYAIDTNARDLNDAIDGADIFLGVSSAGVLTKEMVKKMSKKPLILALANPNPEILPEDVMNVRPDALIATGRSDYPNQVNNVLCFPFMFRGALDVGATEINEAMKIAAVYAIADLAKAEISDVVAKAYSGQQLEFGPDYLIPKPFDPRLIIKVSSAVAKAAIETGVATRPIDDLKVYEDKLAQYVYRTGFVMKPVFEQARTKPMKIAYSDAEEENVLRAVKIAIDEGIASPILIGRKYVIKMRMEKAGLHFDLEKDVEIIDPEDDTRYKEYWMTYHNLMSRKGVSPNAAKTIVRTRNTVIGALAVKRGDADALVCGYVGRYGRHLQYCIDILGLEKNVTAPCAVQLLVTPKKTIFITDTEVNLNPSSDQISEIVSLSSKVVERFGIKPNVALVTHSNFGTHSDSIVLKMQQAFSKIKKENPLIQVDGEMNADLALSESSREYIFPDCILKGEANLLVMANQDSASVSFALAKSLTDGLSVGPILAGLSDVAHIVNPSITVRGLVNITALASVQASSKTSNNN

SEQ ID NO: 82825 - protein, 221 aa, Unknown
  Bacterial polypetide isolated from the Sargasso Sea
MFSFARAAATSADLKSFATIDAVRHDVGDDDVGFDLSYCGICHTDLHFINNDLGATTYPLVPGHELAGVVNEVGKNVTKFKVGDKVGVGCMVDSCLNCKSCLADEEQYCDNGMTMTYGSRTAHGRAGPNGRQTIGGYSTKMVVNERFAVKIPDNAPLDKTAPLLCAGITLYDPMKAFGVQPRTRVGVAGVGGLGMMGIKIASALGAEVTAISRSNAKESKG

SEQ ID NO: 82826 - protein, 264 aa, Unknown
  Bacterial polypetide isolated from the Sargasso Sea
MKDLFSIEGKVALVTGGSRGIGEMIAAGFLANGAKVYISSRKAEVCDATAERLANEYGGECISIPADLSNLEGIGALAKELSAKENSLDILVNNAGASWGEPIEEYSELGWDKVMDTNVKGIFFLTQQLLPLLRESGKSDNPSRVINIGSIDGIKTGTFDAFSYGPSKAAVHHLTRVLAARLIKDQIIVNAIAPGPFPTWMLSTGVGGGGDTDIDWSAVGQSNPSGRVGDAEDIAGLAIFLSSRAGAYTVGQTIACDGGAVASS

SEQ ID NO: 82827 - protein, 414 aa, Unknown
  Bacterial polypetide isolated from the Sargasso Sea
MSDIRQQALDYHEFPVPGKTAVCLTKPAETSHDLALAYSPGVAEPVREIAANPDNAYRYTNKGNTVAVITNGTAILGLGNLGPLASKPVMEGKALLFKHFANIDSTDIEVTHNTPEEFINTVAAIAGTFGGINLEDIKAPECFVIERELIERCNVPVFHDDQHGTAIVTAAGMINALEIQGKLISDATFVCMGAGAAAIACMTMLVKCGANRANIYMLDTKGVIHAGRTDLNEYKALFANDTDKRTLQDVIKGADVFLGLSGPNVIGAEEVAMMADKPVIFACSNPDPEIKPELAHATRSDLIMGTGRSDYPNQVNNVLCFPFIFRGALDVRASCINDEMKVAAVHAIAALAKEEVPASVLKAYPKVSSLSFGPEYVLPKPMDPRLLPRVARAVAQAAIDSGVAAITTLPQYAD

SEQ ID NO: 82828 - protein, 445 aa, Unknown
  Bacterial polypetide isolated from the Sargasso Sea
MKKNKIEHYSDKEALEFHNSNKSGKIEIISSKPMTTKRDLALAYSPGVAAPVKAISQNPDLAYDYTTKGNLVAVISNGSAILGLGNLGAIASKPVMEGKAVLFKRFADIDSIDLEIDSSDPEEIVNSIKNFSKSFGGINLEDIAAPDCFIIEKKLKKLLDIPVFHDDQHGTAIITCAALINALDITKKDIKKTKIVINGAGASAMACADLFIIKGVPKKNITMLDRKGVIYKGRENLNEWKSKHAIETKSRTLDEAIKGADVFLGLSKAGTLKKDMVKKMSKNPIIFACANPDPEITPEEIEEVRTDAIIATGRSDYPNQVNNLIGFPYIFRGALDVRAKTINEEMKLAASNAIAALARERVPDEVVAAMGGERPKYGKDYIIPSTFDPRLISVIPVAVAKAAIKSGVSRKRIENFEIYSEQLKQRLDPSVTIMQGINSQIKKTQ

SEQ ID NO: 82829 - protein, 238 aa, Unknown
  Bacterial polypetide isolated from the Sargasso Sea
MKAVFVTGVSRGIGLEIAKVFSEDGYYIYGSSRSNFDLNKALNTDNAKHFALDVNDRNSINDIFSEIAKSEFILECLINNAGITADNIFLRMKEEEWDAVIETNLTGIFNITKPAVKIMVKNKFGRIINISSVSGLMGNPGQVNYSASKAGIIGFSKSLAKELASRNITVNTLCPGFIESDMTDAMNESQIQSALEMIPTKRFGTSSEVANTALFLASKNADYITGQTLSVDGGLFMH

SEQ ID NO: 82830 - protein, 363 aa, Unknown
  Bacterial polypetide isolated from the Sargasso Sea
MTKKSKIDHYTDKEALDFHIGNKSGKIEVNSSKPLISKRDLSLAYSPGVAAPVKEISKDASKAYDYTSKGNLVAVISNGSAILGLGNLGSLASKPVMEGKAVLFKRFADIDSIDIEIDNKNSEEIISTIKNIAGTFGGINLEDIAAPDCFIIEQKLKEILDIPVFHDDQHGTAIITAAALINALDISHKKIDKVKIVVNGAGASAIACTNLFKKLGVKNENVIMCDRKGVIYKGRDQVDQFKSAHAAETKLRTLQQAMEGADVFLGLSAKDVVNRDMIKSMTKNPIIFACANPDPEIKPEIINEVRDDAIIATGRSDYPNQVNNLIGFPYIFRGALDVRAKIINDEMKVAAANAIALLAREDV

SEQ ID NO: 82831 - protein, 317 aa, Unknown
  Bacterial polypetide isolated from the Sargasso Sea
MKTKAAVALEAGKPLEVMEVNLEGPKEGEVLIEIKATGICHTDEFTLSGADPEGLFPAILGHEGAGVVVELGVGVKDLKVGDHVIPLYTPECRQCEYCLNPKTNLCQAIRETQGQGLMPDGTSRFSMLDGTPILHYMGCSTFSNYTVLPEIALAKINPNAPFEKVCYIGCGVTTGLGAVMNTAKVEIGSRAIVFGLGGIGLNVIQGLKLAGADQIVGVDLNSSKQSMAEQFGMTDFVNPSDIKDDLVAHLVNVTHGGADYTFDATGNVNVMRTALESAHKGWGESIIIGVAPAGAEISTRPFQLVTGRVWKGTAFGG

SEQ ID NO: 82832 - protein, 253 aa, Unknown
  Bacterial polypetide isolated from the Sargasso Sea
MNTTPIALITGASRGLGKNAALTLAAQGVDIILTYQSNAAAAAEVVAEIEWHGRKAVALPLDVGDSQSFNDFSLRVKAALEQTWQRDSFDYLVNNAGIGIHVPMAETSVEQFDTLMNIHVKGPFFLTQALLPLLADNGSIINVSTGLTRFAVPGFGAYATMKGAVETMTKYWAKELGPRGIRVNVLAPGAIETDFGGGAVRDNPQMNEFLAQQTALGRVGLPEDIGGAISVLLSPAAAWINAQRIEASGGMFL

SEQ ID NO: 82833 - protein, 396 aa, Unknown
  Bacterial polypetide isolated from the Sargasso Sea
MKKNKIEHYSDKEALDFHNTNKSGKIEIISSKPMTSKRDLALAYSPGVAAPVKAISKNPDLAYDYTTKGNLVAVISNGSAILGLGNLGAIASKPVMEGKAVLFKRFADIDSIDIEIDSSDTKEIINSVKNISKSFGGINLEDIKAPECFIIENELKKLLDIPVFHDDQHGTAIITSAALINACDIAKKNIKDVKVVINGAGASAMACANLFINTGVKDKNITMLDSKGVIHSERDDLNEWKKKFAIKTKNRTLNDVINGADVFLGLSQAGVLKKEMVKKMSKNPIVFACANPDPEIIPEDVEDVRDDAIIATGRSDYPNQVNNLIGFPYIFRGALDVRAKTINEEMKVAAVKAIATLARERVPDEVVAAMGGDRPHYGKDYIIPSTFDPRLISVIP

SEQ ID NO: 82834 - protein, 418 aa, Unknown
  Bacterial polypetide isolated from the Sargasso Sea
MSDQRHDLRQQALDYHAQPVPGKIAIALTKPAETARDLALAYSPGVAEPVREIAANPADAYRYTGKGNLVAVISNGTAILGLGNLGPLASKPVMEGKALLFKRFAGIDAIDIEVKHETSAQFIDTVAAIADTFGGINLEDIKAPECFEIEQALIERCDIPVFHDDQHGTAIVTAAGLLNALEVQGKQIGDSRIVCMGAGAAATACMELLIKCGAKPHNIFMLDRQGVIHSARTDLNQYKQRFANDTPLRTLMEVIDGADVFVGVSGPDVLPAEAVALMAPNPVIFACSNPDPEIKPALAHAVRGDLIMGTGRSDYPNQINNVLCFPFIFRGALDARASRINDAMKIAAVEAIRGLAKEPVPAEVLTAAGVSELAFGKDYVIPKPMDARLLPRVARAVALAAVESGVARIALPADYMLG

SEQ ID NO: 82835 - protein, 573 aa, Unknown
  Bacterial polypetide isolated from the Sargasso Sea
MKKTKIDHYTDKEALDFHFTNKSGKIEIISSKPMTTKRDLALAYSPGVAAPVREISKNPNAAYDYTTKGNLVAVISNGSAVLGMGNLGSLASKPVMEGKAVLFKRFADINSIDIEIDSSDPNEIIRSIKSIAGSFGGINLEDIAAPDCFVIEEKLKKILDIPVFHDDQHGTAIITTAALINALDISKKSLKKIKVVVNGAGASAIACTNLLKKTGVPQKNIIMLDSKGVLHKGRDNLNQWKSTHAIETKNRTLDDAIKDADVFLGLSSKSILSKKMVKKMSKNPIIFACANPDPEITPEEVEEVRDDAIVATGRSDYPNQVNNLIGFPYIFRGALDVRAKTINEEMKIAAANAIAALAREDVPDEVVAAMGGERPKYGKEYIIPSTFDPRLIVEIPVAVAKAAIKTGVARKNIKDFEIYKEQLKQRLDPSVTIMQGINNQIKKNPKKIIFADGEDENTLKAAIAFKNSKLGIPVLVGKKEKIKEQLKNIGYSENLDIEIVNSTNKEKRAKYANYLFKRLQRKEGLLERDCDRMIRNDRVTWASCMVACGDADGAVTGNTRKYATSLEKINKVI

SEQ ID NO: 82836 - protein, 637 aa, Unknown
  Bacterial polypetide isolated from the Sargasso Sea
INSIKNFAPSFGGINLEDIAAPDCFVIEEKLKEILDIPVFHDDQHGTAIITTAALINALDITKKKIDEVKIVVNGAGASAMACANLFKKSGVPQKNITMVDRTGVIYNGRDNLNQWKSAHAIETKHRTLKDAIDNADVFLGLSAKGALTKDMVKTMAKNPIIFACANPDPEIKPEEVAEVRNDAIMATGRSDYPNQVNNLIGFPYIFRGALDVRSKTINEEMKIAAAHAIANLAKEEVPDEVVAAMGGERPHYGKDYIIPSTFDPRLISVIPAAVAKAAIDSGVARINIKNFDDYKDQLRQRLDPTVTIMQGINNYIRKKPKKVVFADGEDENMLKAAIAFKNSNLGIPILVGKEDLIINQLKKIGYSENFDIEIINSKDDKKREKYTKYLFEKLQRNKGMLERDCDRLVRNDRVIWASCMVACKDADAMVTGNTRRYSSSLEKITQVVDPRAGEIMFGLNLIVNRGKTIFICDTSVIEYPNANQLAEMAKSAARVVRLFGFDPKVAFLSHSTFGEPATDRTKRLSDAVEILKKDKVDFKFDGEMQPDVALEELYKELYPFSEIVGNSNVLIMPSQHSAAISYKMIKSMSRAKVIGPLLIGLGLPIEIAPLRTSTSEIINLASIAAYSSDVIDYKKY

SEQ ID NO: 82837 - protein, 475 aa, Unknown
  Bacterial polypetide isolated from the Sargasso Sea
SRVMEGKAVLFKKFAGVDVFDIEIDEKDPAKLVEVIAALEPTFGAVNLEDIKAPDCFYVERELRKRMKIPVFHDDQHGTAITVAAAIVNALKVAGKKIEDVKLVTSGAGAAALACLNLLLKVGVQRKNVFVTDLAGVVYEGRDELMDDDKRQFMQKTDARKLAEVMVGADVFLGLSAGNVLKPEMVSTMAERPVIFALANPNPEITPELAHSVRNDIIMATGRSDYPNQVNNVLCFPYIFRGALDCGATTITDEMEIAAVHAIAELAQAEQSEVVAAAYVGEKLTFGPEYLIPKPFDPRLMMKIAPAVAQAAMDSGVAQRPIADMDAYRDRLQTFVYASGTTMKPIFDAARNAAKKRVAYAEGEEERVLRAAQIVVDEKVARPTLIGRPAIIAQRIEKFGLRLKEGVDYDVVNTDFDHRYRDFWQTYHRMTERKGITQQVAKIEMRRRLTLIGSMMLHKGEVDGLICGTWGTTAN

SEQ ID NO: 82838 - protein, 391 aa, Unknown
  Bacterial polypetide isolated from the Sargasso Sea
MKKNKIEHYSDKEALEFHNWNKSGKIEIISSKPMTTKRDLALAYSPGVAAPVKAISQNPDLAYDYTTKGNLVAVISNGSAILGLGNLGAIASKPVMEGKAVLFKRFADIDSIDLEIDSNNPEEIIQSIKNFSKSFGGINLEDIAAPDCFIIEKKLKEILDIPVFHDDQHGTAIITCAALINAVHITKREMKKIKIVVNGAGASAMACVNLFKTKGVPQKNITMLDRKGVIYKGRENLNEWKSEHAIETKVRTLDDAIKGADVFLGLSKAGVLKKNMVKKMAKNPIIFACANPDPEITPEEIEEVRNDAIIATGRSDYPNQVNNLIGFPYIFRGALDVRAKTINEEMKLAASNAIATLARERVPDEVVAAMGGDRPKYGKDYIIPSTFDPRL

SEQ ID NO: 82839 - protein, 243 aa, Unknown
  Bacterial polypetide isolated from the Sargasso Sea
MLNFSTKTAIVTGGSRGIGKEISLILAKNNFNVVAVATSEKSLDSIRDIENIHPFCSDISDEKSIEKLYEFVISKFGYADVLINNAGIHMDNILLRMKPEEWNQVMNVNLNGPFHLTKTVLKDMVKNKNGRIINISSISGTDGNKGQGNYAASKGGLLALTKSLAKEVGRRNITVNCIAPGLIETDMISHLSDTIKQGYLDRIPLKKLGKPKDIGQMILFLCSEEASYITGQTFYIDGGMSLN

SEQ ID NO: 82840 - protein, 326 aa, Unknown
  Bacterial polypetide isolated from the Sargasso Sea
LEYARNHARKKVTCMVKDNIMKMTDGLFYKVFQEIGAEYPDILQDRYIIDIGSARLATRPELFDVIVTSNLYGDIISDIAAELSGSIGLAGSANIGEHVAMFEAIHGSAPDIAGQNIANPSGLLLAAVMMLVHIGQADIAQKIHNAWLKTIEDGIHTKDLKSEYTKVLVTTDQFAEAVIARLGTEPQRFSAVSYQNSTQQQKAVTVAYQPQAAAEKILVGVDVFLHQHQHSADELAQHLKQLETTELELQMITNRGVKVWPDGFPETFCTDHWRCRFMLSPGLTQLAYSDIIRLLSQISGDKLDVIKTENLCSFNGEPGFTLGQGQ

SEQ ID NO: 82841 - protein, 212 aa, Unknown
  Bacterial polypetide isolated from the Sargasso Sea
MFPVEKILAGTSFFFAHEYYEKKDLSDIIQAIRPTALIGISGQANAFSKNVLELMKGINDYPLVFALSNPTSSSECTAENAYKWTRGKCLFASGSPFDSVEIEGKTFIPGQGNNAYIFPGVGLGIILSKAEVISDDLFLAAAETLSILVSDKELSSGQLYPCIKDIKKVSKEIAITVAKKAFSEGLTNMAIPQNIERSLDRIIYNPVYPDYI

SEQ ID NO: 82842 - protein, 245 aa, Unknown
  Bacterial polypetide isolated from the Sargasso Sea
MKDKIAMVTGASRGIGAAIAKRLASEGAKVAINYNSSKEQALQVLSAVQEVSEGMLVQGDVSVQADAEKVLSQVIENWGKIDILVNNAGINRDKLLMRMDASDWDDVMNVNLRGTFLCTKLVLPYLIKQRRGNIVNVSSVVGLSGNPGQVNYAASKAGLVGFTKALAREVASRNITVNALAPGFITSGGMVDELSSDAKETILKKIPMGRFGTVDEVAECCLFLCSDQSSYITGQVITMDGGMIA

SEQ ID NO: 82843 - protein, 368 aa, Unknown
  Bacterial polypetide isolated from the Sargasso Sea
MKTKAAIAVKAGEDLVIEELDLDGPGDNEVLVEIKATGVCHTDAFTLSGDDPEGIFPSVLGHEGAGIVMEVGKNVTSVKPGDHVIPLYTPECRDCNFCLNPKTNLCQSIRETQGQGLMPDGTSRFSLNGDPIYHYMGCSTFSNYSVMPEIAVAKVRQDAPFDKICYIGCGVTTGIGAVVYDAKVEPGSNVVVFGLGGIGLNVIQGAKMVGANKIVGIDINESKVPLATKFGMTDFINPTKIDDVVEAIIDLTGGGADYSFECIGNVETMRQALECCHKGWGESVIIGVAGAGQEISTRPFQLVTGRVWRGSAFGGARGRTDVPKIVDWYMDGKINIDDMITHTMPLEEINEAFHLMHKGESIRSVVLY

SEQ ID NO: 82844 - protein, 210 aa, Unknown
  Bacterial polypetide isolated from the Sargasso Sea
MFKDKIVFITGGSRGIGKAVALEFAKHDATVIFNYTNSDDSANETIRLMKEINSQGTFEAVKFDISITSDSDEKIGAILDKYGRIDILVNNAGITRDSLFMRMKESQWDEVFNVNAKGVFNCTKNVVRSMVKNQYGKIISITSVVGEMGNPGQANYSSTKSAIFGFTKSLAKELGSKNINVNAISPGFIETDITEGLPDAIKQKYMEMIP

SEQ ID NO: 82845 - protein, 245 aa, Unknown
  Bacterial polypetide isolated from the Sargasso Sea
MFNLKNKTALVTGASGGIGEAIAKALYKQGAKVCITGTNESKLNNINLKSSMSYSQIICNLNKREELKNLVSNVEKEIGNIDILVNNAGITKDQLTMRMSEESWDDVLETNLYASFYLSKSVIRNMMKKKFGRIIQISSVVGFTGNPGQANYVASKAGLIGMTKSLALEVASRNITVNCIAPGFIKTSMTDALTEEQKSKLLEKIPSQKFGLPEDVAAAAVFLASDEASYINGTTIHLNGGLAMI

SEQ ID NO: 82846 - protein, 219 aa, Unknown
  Bacterial polypetide isolated from the Sargasso Sea
MKDLFSIEGKVALVTGGSRGIGEMIAAGFLANGAKVYISSRKAEVCDATAKRLQKEYGGECISVPGDLSNLDGINALRDMLPADETLDILVNNAGASWGEPIDEYSEKGWDKVMDTNVKGVFFLTQQLLPKLRESGSAEDPSRVINIGSIDGIKTGTFNAFSYGPSKAALHHLTRVLAASLVKENIIVNAIAPGPFPTWMLSTGVGGGGDLDINWSEVG

SEQ ID NO: 82847 - protein, 472 aa, Unknown
  Bacterial polypetide isolated from the Sargasso Sea
NPETAFDYTSKGNLVAVISNGSAILGMGNLGALASKPVMEGKAVLFKRFADIDSIDLEIDSQDHNEIINSVKNFAPSFGGINLEDIAAPDCFIIEEKLKEILDIPVFHDDQHGTAIITTAALINALDITKKKIDKVKIVVNGAGASAMACANLFKKSGVPQENITMVDRTGVIYSGRENLNQWKSAHAIETKHRTLSDAINNADVFLGLSAKGALTKDMVKKMAKNPIIFACANPDPEIKPEEVAEVRSDAIMATGRSDYPNQVNNLIGFPYIFRGALDVRSKTINEEMKIAAAHAIANLAKEEVPDEVVAAMGGERPHYGKDYIIPSTFDPRLISVIPAAVAKAAIDSGVARINIKDFDTYKEQLRQRMDPTVTIMQGINNYIKKKPKKVIFADGEDENMLKAAIAFKNSNLGIPILVGKEDLIKNQLKKIGYGENFDLEITNSKDAKKREKYVKYLFGNFKEIRHAGARL

SEQ ID NO: 82848 - protein, 256 aa, Unknown
  Bacterial polypetide isolated from the Sargasso Sea
MDLNNKVALVTGGASGLGQATVEAYVAKGAKVVILDINEDKALEIINNLGEDKVMFISTDIMKEDPVVEAINKIKDNFGGLHIAVNCAGTGYPGRILGKEAPHPLDAFQFIVNLNLVGTFNVMRIAAELMDKNEPDEKGEKGVIINTASIAGIEGQIGQSAYSASKAGVIGLTITAARDLARHAIRVCTIAPGIFDTPLMQLAPDKVRDPLLESTQFPHRFGQPNEFADLAVHIVENSYLNGETIRLDSGMRMKPR

SEQ ID NO: 82849 - protein, 350 aa, Unknown
  Bacterial polypetide isolated from the Sargasso Sea
MSTTYAYAATDSRSPLAPFEFQRRALRDLDVQIDVLYCGVCHSDLHQARNEWRNTIYPVVPGHEIVGRVTATGPEVTRFKVGELVGVGCLVDSCRTCPSCADGLEQYCENGFVGTYNGQDRVTGDITFGGYSTQLVVDEAFVLRVPETLDPAGAAPLLCAGITTYSPLRQWNVGPGKKVGIVGLGGLGHMGVKLARAMGAHVVLFTTSPSKIEDGKRVGAHEVVISKDEAQMNAHLNSFDFILNTVAAQHDLNPFLHLLKRDGTMTLVGAPEHDHPSPQVFNLIFKRRRLAGSLIGGIAETQEMLDFCAEHGITSDIETIPMQQINAAYERMLKSDVKYRFVIDMASLKQ

SEQ ID NO: 82850 - protein, 285 aa, Unknown
  Bacterial polypetide isolated from the Sargasso Sea
MTTAQTPPPQKQDHQPGTERDMHPEPRDLAADYVGSGKLAGKVALVTGGDSGIGRAVAIGFAKEGADVAIVYLNESDDAAHTKQLIEQAGRRCEAIRCDVGDRRQAHDAVARTVERLGRLDVLVNNAGEQHPRPGIEDVTEEQLERTFRTNVYGMFFCTQAALPHMKHGGRIVNTASVTAYHGNPKLPDYSATKGAIVAFTRSLSAELAERDIRVNAVAPGPIWTPLIPSTFTAEQVAKFGANVPLKRPGQPDELIGCYVLLASEGASYMTGQTLHPNGGSIVGG

SEQ ID NO: 82851 - protein, 281 aa, Unknown
  Bacterial polypetide isolated from the Sargasso Sea
MNIQWRNQVVLLTGATGGIGQAIAKALDEKGAHIILTGRSKAKLEQLQQNLTLHHTAIVADITSDEGRDRVVSACQRLPISILVNNAGITYMGEFEGTPIESIVSTNMLAPMLLTQRLLPLLERRPSAHVVNVGSAFGSIGFAAHGTYCATKFALKGWTEAMHREFSDSKIKFHYLAPRATRTDINDDRANALNEALGNQTDEPDAVAQAFIKQLENNLPRVALGHAERFFAKLNALVPSVVDNALAKKLPTIKRYAFQKTQSQDKQTSAQNDTRLGNKLV

SEQ ID NO: 82852 - protein, 368 aa, Unknown
  Bacterial polypetide isolated from the Sargasso Sea
MKTKAALAIKAGEDLVIEELDLDGPGDNEVLVEIKATGVCHTDAFTLSGDDPEGIFPSVLGHEGAGIIMEVGKNVTSVKPGDHVIPLYTPECRECNFCLNPKTNLCQSIRETQGQGVMPDGTSRFSLNGEPIYHYMGCSTFSNYSVMPEIAVAKVREDAPFDKICYIGCGVTTGIGAVVYDAKVEPGSTVAVFGLGGIGLNVIQGARMVGADKIIGIDINEDKVALAEKFGMTDFVNPKKSENVVENIIDITDGGVDYSFECIGNVETMRQALESCHKGWGESVIIGVAGAGQEISTRPFQLVTGRVWRGSAFGGARGRTDVPTIVDWYMDGKIDIDNLITHTMPLEEINEAFHLMHEGESIRSVVIY

SEQ ID NO: 82853 - protein, 464 aa, Unknown
  Bacterial polypetide isolated from the Sargasso Sea
MTESPSARTPVLLHIGAGSFHRAHQAWYLHRVNAAVPADERWSLTVGNIRDDMHATMDALAAQHGAYTLETVTPQGERAYETIRAITRVLPWSIDLAALIDAGADPACRIVSFTVTEGGYYLDEHNRLDLANADLAADLQGARTTLYGALAALLAERVTRGAGPLTLQSCDNLRNNGARFRAGMREFLERRGLLELLAWFDANVATPSAMVDRITPRPTADVRERVLAATGFDDACPVMGESFIQWVIEDRFAAGRPKWELAGAELVDDVHPYEEAKIRILNATHSCIAWAGTLAGHTYIHEGTHDAAIRRFAHDYVTQDVIPCLTPSPLDLARYRDVVLERFGNPYVLDTNQRVAADGFSKIPGFIAPTLAESFARGAAPVATAVLPALFLRFLERWARGALPYVYQDGVMDESAARAIVQADDPVVALCASRALWGSLAGNAALFEALRAGLARVDAWLAAR

SEQ ID NO: 82854 - protein, 253 aa, Unknown
  Bacterial polypetide isolated from the Sargasso Sea
MTALSDRKAVLITGASRGIGRATAVLAAERGWDVGINYARDAAAAELTAQAVRDAGGRACVVAGDVANEADVVAMFDSVTAAFGRIDALVNNAGIVAQSMPLADMPADRLQRMFDTNVLGTYLCAREAARRLSTDRGGRGGAIVNVSSIASRLGSPNEYVDYAGSKGAVDSLTIGLAKELGPHGVRVNAVRPGLIETEIHASGGQPGRAARLGATTPLGRAGEAQEIAEAIVWLLSDAASYTTGALLDVGGGR

SEQ ID NO: 82855 - protein, 172 aa, Unknown
  Bacterial polypetide isolated from the Sargasso Sea
LVNNAGIVRFGAMELQSAQDYIDVVNVNLLGSCFCAREIAPAMIERGSGHIINFTSINGIHPAPGVGLYGPTKAAMANMTQAMAIEWGPKGIRVNAIAPGMIDAGMSKPIFENPKVRAVRGGGVPLRALGEAADIAEAVLFLDSEGAKYISGHELVVDGGVSTSVMAHLPRE

SEQ ID NO: 82856 - protein, 330 aa, Unknown
  Bacterial polypetide isolated from the Sargasso Sea
MVGASKISDQDALDFHAQGKPGKLEMAPTKSLTTQRDLSLAYSPGVAVPCLEIEKDPSTAYDYTSKGNMVAVISNGTAVLGLGNIGALAAKPVMEGKAVLFKKFADIDGIDLEVDTEDVEEFFNSVRVLGKSFGGINLEDIKAPECFIIEQKLKESLDIPVFHDDQHGTAIISLAGLLNALHLTNRDIRKTRVVVNGAGAAAIAGVELFKALGMPHKNVIMCDSNGVVYKGRKNGMNQWKSAHAVETKYRTLEEAAENSDVLMGLSIKGAFSEKIISSMANDPIIFAMANPDPEITPEEVKKIRADAIMATGRSDYPNQVNNVLGFPIYF

SEQ ID NO: 82857 - protein, 379 aa, Unknown
  Bacterial polypetide isolated from the Sargasso Sea
MKKTKIDHYTDKEALDFHKDKKPGKIEIISSKNMTTKRDLALAYSPGVAAPVKKISENPEAAYDYTSKGNLVAVISNGSAILGMGNLGALASKPVMEGKAVLFKRFADIDSIDLEIDSKNSNEIINSIKNFAPSFGGINLEDIAAPDCFIIEQKLKEILDIPVFHDDQHGTAIITTAALINALDICGKSIKKIKVVVNGAGASAQACTELFINSGVKSENITMLDRKGVIYEGRSEGIDQWKSRYAIKTKHRSLEDAVKGADVFLGLSTKGVLKKEMVKSMAKNPILFACANPDPEITPEEIKEVRDDAIVATGRSDYPNQVNNLIGFPYIFRGALDVRSKTINEEMKVAAANAIAKLAREDVPDEVVAAMGGERPHYG

SEQ ID NO: 82858 - protein, 114 aa, Unknown
  Bacterial polypetide isolated from the Sargasso Sea
IFKVLGTATSDQGVDTLNSNGIEGYLLDLNSKDSIDSFWSQLESDNKTISVLVNNAGITRDNIVLRMSDEEWSDIMNVHLYGTFQLSKRALKMMLKNKLGTHNKCFVCFRLNRQ

SEQ ID NO: 82859 - protein, 262 aa, Unknown
  Bacterial polypetide isolated from the Sargasso Sea
ISAPRCFEIEQRLREELDIPVFHDDQHGTAVVTTAALINALKVVGKNVGEIKVIVSGAGAAGIACTKMIMHLGVKNLIVCDSKGAIHSKRTNLNPSKNWLAENSNPEKESGSLKEVVAGADVFLGVSAPNIIEQQDLKNMAKDPIVFAMSNPDPEISPEEASSFAAVMATGRSDYPNQINNVLCFPGIFRGALDCRSRTINEEMKLAAAQAIAGAVDDAHLNADYIIPSVFDTTVAQKISESVKAAAYKSGVALRRQNKKLY

SEQ ID NO: 82860 - protein, 248 aa, Unknown
  Bacterial polypetide isolated from the Sargasso Sea
MNKYDLTGKVAIVTGGAQGFGLAITKKFLDSGAEVIIWDLDKTAAQKAMNENKDKKLSYKILDITNFEEIQKNVKEISEKKKIDILVNNAGITGKNASVWEYPVEEWKKVLDTNLQGTFYCCKAVVPIMIKNNYGRIVNVASISGKEGNANASAYSSAKAGVIGLTKALGKELANKNIAVNAVTPTTANTRILKQMTDKHVKFMLSKVPRNRYLELNELASMVAWLSSDENSFSTGAVFDISGGRATY

SEQ ID NO: 82861 - protein, 354 aa, Unknown
  Bacterial polypetide isolated from the Sargasso Sea
MIETKAAVATKAGQPLSIETVKVDGPRAGEVLVEIKATGVCHTDAFTLSGDDPEGLFPAILGHEGAGVVVEVGEGVTSLSPGDHVIPLYTPECRTCDYCTSGKTNLCQAIRETQGRGLMPDESSRFSLGSDKLFHYMGTSTFSNYTVVPEIALAKIREDAPFDKVCYIGCGVTTGIGAVINTAKVEPGANVVVFGLGGIGLNVIQGARLVGADKIVGVDLNPDREALGRKFGMTHFVNPAEVEGDLVPHLVELTDGGADYSFECIGNVEVMRQALECCHKGWGTSIIIGVAPAGAEISTRPFQLVTGRNWRGTAFGGAKGRTDVPKIVDWYMDGKINIDDLITHTMPLEEINSA

SEQ ID NO: 82862 - protein, 211 aa, Unknown
  Bacterial polypetide isolated from the Sargasso Sea
MNTIKNARVAIVTGASRGIGAAVAQRLANDGFAVAVNYASSSSEADALVAQLTAAGTRAIAVKADVANADDVRRMFETTEQQLGKVDVLVNNAGILKTGPLADTSDALYDQTFDINVRGTFNTLREAAARMNDGGRIVNFSSTTLALNMPGYAIYNGTKAAVEAFTHVFAKELRGRNITVNAVAPGPVATALFLDGKTEEQIQTFAKMPPL

SEQ ID NO: 82863 - protein, 219 aa, Unknown
  Bacterial polypetide isolated from the Sargasso Sea
MIEETMEKWGRIDILVNNAGILRDKSFHKISIEEFDQVMDVHFQGSFYASHGVYPIMREQNFGRIIFTTSSGGLCGNFGQANYGAAKMGMIGLMNCLKIEGQKYNVFSSAVAPVALSRMTESLFPEGIGERFMPEYVTPAVIYLASDESENGAIIGAGAGVFTRFRILETMGLALGTGEGMTPENIAAGWDSVSDMDDARELFSGPEQTIKILEQADKS

SEQ ID NO: 82864 - protein, 428 aa, Unknown
  Bacterial polypetide isolated from the Sargasso Sea
MSETKRKEALDYHSSFPKGKIETKITKPSETEEQLSLAYSPWVAEPCKEIHKDVQNVYEYTNKGNLVAVVSNGTAVLGLGDLGPEASKPVMEGKAVLFKRFAQVDAFDIEIKTTDIEEIIRTVELLEPTFGGINLEDIKAPECFRIEDELKEKMNIPVFHDDQHGTAIISGAGLVNAVELTDRKMSEIKININGAGASAISCARLFVTLGANPSNILMCDSKGVIYKGREGLNKQKEEFAVETECRTLADTFKGSDVFIGLSIGNVVSKEMILEMNDNPIVFAMANPDPEISPEDAHAARNDIIMATGRTDYPNQVNNVLGFPFIFRGALDVAATDINEEMKVAASIALAKLAKLGAGSEIAKKHNRDTLVYGKDYIVPSPFDPRILVWESYAVAKAAIETGVARKKINLDEYKARLEEMAGVEPQTF

SEQ ID NO: 82865 - protein, 195 aa, Unknown
  Bacterial polypetide isolated from the Sargasso Sea
MNFEGKKILVTGATGGIGGAIIKKFLSLNASVLGTGTNLEKLNLLKNEFPSLLTEQFDISKHEKIEEFVEKVFSSLGGLDILVNNAGITKDNLSLRMKSDEWQKVIDINLTSTFYLCKSVIKKMLKNKFGRVVNITSIVGHTGNVGQGNYSASKAGVVAMSKSLAIEYAKKNITINCVSPGFIKTNMTDNISEKL

SEQ ID NO: 82866 - protein, 281 aa, Unknown
  Bacterial polypetide isolated from the Sargasso Sea
MNIQWCNQVVLLTGATGGIGQAIAKALDEKGAHIILTGRSKAKLEQLQQNLTLHHTAIVADITSDEGRDRVVSACQRLPLSILVNNAGITYMGEFEGTPIESIVSTNMLAPMLLTQRLLPLLERRPSAHVVNVGSAFGSIGFAAHGTYCATKFALKGWTEAMHREFSDSKIKFHYLAPRATRTDINDERANALNEALGNQTDEPDAVAQAFIKQLENNLPRVALGCAERFFAKLNALVPSVVDNALAKKLPTIKRYAFQKTQSQDKQTSAQNDTRLGNKLV

SEQ ID NO: 82867 - protein, 104 aa, Unknown
  Bacterial polypetide isolated from the Sargasso Sea
MESKSVLITGGSRGIGKQLVSAFLDEGHKVIATCRDKSKPQFQKHKNLTVENLDISSTESVNSLKKLVEDMNISILVNNAGITKDNLFLRLSDEDWEEVITRTL

SEQ ID NO: 82868 - protein, 358 aa, Unknown
  Bacterial polypetide isolated from the Sargasso Sea
AVLFKRFADIDAIDLEIDSNNPDEIINNIKNFSSSFGGINLEDIAAPNCFIIEEKLKKLLDIPVFHDDQHGTAIITSAALINAVDIAKKDIKKIKVVVNGAGASAMACASLFKKTGVLYKNIIMIDRKGVIYKGRKGLNKWKSAYAIETKNRTLNDAIKGADVFLGLSSAGVLKKEMIKKMAKNPIIFACANPDPEITPEEVEKVRKDAIIATGRSDYPNQVNNLIGFPYIFRGALDVRAKTINEEMKIAAVNAIASLAKKRVPDEVVAAMGGERPKYGKDYIIPSTFDPRLISVIPVAVARAALKTKVARKEIDNFETYTDQLKQRLDPSVTIMQGINSKIKKNQKRVVFTDGEDEN

SEQ ID NO: 82869 - protein, 354 aa, Unknown
  Bacterial polypetide isolated from the Sargasso Sea
MAKNSKDILRKAALDYHALPKPGKLEIRATKPMANGRDLARAYSPGVAEASIAIDNNPDDAGKYTSRANLVAVVTNGSAVLGLGNIGALASKPVMEGKAVLFKKFADIDCFDLEVNENDPKRLADIICALEPTFGAVNLEDIKAPDCFEVERICRSRMKIPVFHDDQHGTAIVVCAAAKNALLITKKHFKDVKIVSTGGGAAGIACLNMLVKLGVKKKNIWLCDKHGLVYAGRKIDMNSEKSAFAQNTNFRSLEQVIENADMFLGLSGPNVLKPALIKKMNAKPIIFALANPSPEIMPDIARKAAPDAIIATGRSDFFNQVNNVLCFPFIFRGALDVEAMEINDEMQLACIDAI

SEQ ID NO: 82870 - protein, 229 aa, Unknown
  Bacterial polypetide isolated from the Sargasso Sea
MLQRYHCKHLPHRSVDVITENVRGKTIIVTGPTAGIGIATARSLANRGARIILACRTPSKGEDLVRQWTKEAEALRTEAPECRVMKLDLDSLASVRAFAKEFRDTETRLDVLVNNAGIFDMSGAYVCTKDGHEQHLQANFLAPALLTMSLLDLLKESAEETGDARVIFVSSKLHELCGGLDLDDMSFECRAYGSQAAYASSKLAEVLFVKELDGILRASNCGTRALVLH

SEQ ID NO: 82871 - protein, 240 aa, Unknown
  Bacterial polypetide isolated from the Sargasso Sea
MSKVALVTGGTRGIGAAISLALKKEGCNVAATYSSNSDAANKFSSENGIEVFQWNVADAAACEAGVKQVADKLGTVDILVNNAGISKASMAHKMSVEQWDDVIRTDLDSVFYMTRCVLEGMREKSFGRIISISSINGQKGEMGLINYSAAKAGLLGFTKALAQETARKNITVNAIAPGYIDTEILADASEDFMKSLIGKIPVGRLGTVDEVSRIVTFLASDEAGFITGSTISANGGQYFT

SEQ ID NO: 82872 - protein, 125 aa, Unknown
  Bacterial polypetide isolated from the Sargasso Sea
MDLNNKVALVTGGASGLGQATVEAYVAKGAKAVILDINEDKAQEIINNLGEEKVMFISTDIMKEDPVVEAINKIKDNFGGLHIAVNCAGTGYPGRILGKEAPHPLDAFQFIVNLNLVGTFNVMRI

SEQ ID NO: 82873 - protein, 245 aa, Unknown
  Bacterial polypetide isolated from the Sargasso Sea
MFSLKDKKALITGASGGIGKELARVLVEYDAEVCISGRNIEELNELKESLGDKCHIIPCDLSDKNEISELVSKSEEVLGQIDILVNNAGITKDNIFLRMSEQEWEDVLNINLNSTFNILKLITKGMVKRKYGRIINISSVVGATGGAGQVNYAASKAGLIGLTKSLSQELATRNITVNCIAPGFIETPMTEKLDDNRKDIIISSIPANRIGTPKDLSSAVIFLASQESSYITGQTIHINGGLYMN

SEQ ID NO: 82874 - protein, 108 aa, Unknown
  Bacterial polypetide isolated from the Sargasso Sea
MLNFSTKTAIVTGGSRGIGKEISLILAQNNFNVVAVATSEKSLDSVRDIKNIHPFCCDISDEKSIEKLYEFVISKFGYADVLVNNAGIHMDNILLRMKSEEWNQVMNV

SEQ ID NO: 82875 - protein, 264 aa, Unknown
  Bacterial polypetide isolated from the Sargasso Sea
MNTETSRRTPSSLTHPRVALVTGGGAGIGAAISQQLAEAGHIVFIGDINAHTANDLAGSLCAAGHEAYAVQLDVSASASIDAAFSTIENQFGRCDILVNNAGIAKTFPFLDYPVEHWRKVFDVNVTGPMLCGQHAARLMRKNGWGRIVNIASVSGLRASSGRTAYGTSKAAVVGLTRQMAIELAEYGITTNGVAPGPIDTPMTLDLHSQVARDNYTRAVPAKRYGIPAEIAAVVQFLCSEQASYVNGQTVPVDGGFMAAGVLEI

SEQ ID NO: 82876 - protein, 75 aa, Unknown
  Bacterial polypetide isolated from the Sargasso Sea
MTKKISLIGAGQIGGTLAHLIALKELADVVLFDVAEGLAKGKALDIAQSSGVSGFNIDLKGTNNYEDTKNSDVII

SEQ ID NO: 82877 - protein, 485 aa, Unknown
  Bacterial polypetide isolated from the Sargasso Sea
NLGAIASKPVMEGKAVLFKRFADIDSIDLEIDTEDTKEIINSIKHIAKSFGGINLEDIAAPNCFIIEEELKKILDIPVFHDDQHGTAIITTAALINAVDIAKKNLKKIKIVINGAGAAAMACAKLFRSTGIPKNNIKMLDTKGVINKNRKDINSWKKEFAVETKDKSLDDAMKNADVFLGLSAAGVVKKSMVKKMAKNPIIFACANPDPEIKPEDIEEVRNDAIIATGRSDYPNQVNNLIGFPYIFRGALDVRAKTINEEMKVAAANAIASLAREFVPDEVAAAMGGERPNYGKEYIIPSTFDPRLISVIPVAVAKAAIKSGVARKKIENFDQYSEQLKQRLDPSVTIMQGINNQIKKTNKKVVFADGEDENTLKAAIAFKNSGLGTPILVAKEKVVKEKLREIGYGENFDIQIVNSTLSDKRKKYVNYLFKKLQRTEGLLERDCDKMVRNDRVIWGSCMVACGDADAMVTGNSRRYGQSLDKVK

SEQ ID NO: 82878 - protein, 691 aa, Unknown
  Bacterial polypetide isolated from the Sargasso Sea
KSGKIEIISSKPMTTKRDLALAYSPGVAVPVKEISKDPALAYEYTTKGNLVAVISNGSAILGMGNLGALASKPVMEGKAVLFKRFADIDAIDLEIDSNNPKEIINSIKNFSGSFGGINLEDIAAPDCFIIEEKLKKILDIPVFHDDQHGTAIITCAALINAVDITKKDIKKLKVVVNGAGASAMACANLFKKKGVLQKNLTMIDRKGVIHKGRRGLNKWKSSHAIKTKNRTLNDAIKDADVFLGLSSAGVLKKEMVKKMAKNPIIFACANPDPEITPEEVEEVRSDAIIATGRSDYPNQVNNLIGFPYIFRGALDVRAKTINEDMKIAAANAIASLAKKRVPDEVVAAMGGDRPIYGRDYIIPSTFDPRLISVIPVAVAKAAIKSKVARKKIKNFDIYSEKLKQRLDPSVTIMQGINSKIKKNQKKVVFTDGEDENTLKAAIAFKNAGLGVPIIIAKEKVVKQKLIEIGYIENLDIQIINSSDKKKTDKYSNFIFKKLHGDKGNLEPDVNELYLRDCNRMVKNDKVIWGSCMVSTGDADAMVTGNTRRYSQSLEKINKVVDARPGEIMFGLNMVINKGKTVFIADTSVNEYPSSEQLADIAISSARVVKLFGFDPKVAFLSHSTFGQPLTSRTKHIRDAVDILKKKKVDFKFDGDMQPDVALDEEYSDLYPSSKIVGKANILIMPGQHSAA

SEQ ID NO: 82879 - protein, 454 aa, Unknown
  Bacterial polypetide isolated from the Sargasso Sea
MKKTKIDHYTDKEALDFHKDKKPGKIEIISSKNMTTKRDLALAYSPGVAAPVKKISENPEAAYDYTSKGNLVAVISNGSAILGMGNLGALASKPVMEGKAVLFKRFADIDSIDLEIDCRDSDEIINSIKNFAPSFGGINLEDIAAPDCFIIEQKLKEILDIPVFHDDQHGTAIITTAALINALDICGKSIKKIKVVVNGAGASAQACTELFINSGVKSENIIMLDRKGVIYEGRTEGIDQWKSRYKVKTKHRTLADAIKGADVFLGLSAKGVLKKDMVKSMAKNPIIFACANPDPEITPEEINEVRNDAIVATGRSDYPNQVNNLIGFPYIFRGALDVRSKTINEEMKVAAANAIAMLAREDVPDEVVAAMGGERPHYGKDYIIPSTFDPRLISVIPAAVAKAAIGSGVARKNIDDFDIYKDDLKQRLDPNSNHHARYKFIYQEKSKKNCFCRW

SEQ ID NO: 82880 - protein, 256 aa, Unknown
  Bacterial polypetide isolated from the Sargasso Sea
MDLNNKVALVTGGASGLGQATVENFVAAGAKVVILDINEDNANKIIENLGADKVSFISTNIMEEDPVVSAINKIKDEHGALHIAVNCAGTGYPGRILGKEAPHPLDAFQFIINLNLVGTFNVMRIAAELMDKNEADEGGEKGVIINTASVAGYEGQIGQSAYSASKAGVIGLTITAARDLARHSIRVCTIAPGIFDTPLMQLAPDKIRDPLLESTQFPHRFGQPSEFGQLAAHIVENSYLNGETIRLDSGMRMKPR

SEQ ID NO: 82881 - protein, 241 aa, Unknown
  Bacterial polypetide isolated from the Sargasso Sea
MKTVLITGGSRGIGKAIAIELGKSFNVAVGYSSSKEDGEEVVEEIMKSNGTATAVEINVTSTESVENAFVAIEKEYGGIDVLVNNAGIAKDNILPRLKEDEWDEVINTNLTGSFRTSQRAIKHMMKSKWGRIIYISSIVGLAGNQGQTNYAASKAGLVGLSKSIAKEMGSRNITSNVIAPGYIDTDMTSFLTDEQKDNILDKLSIKRIGKPEDIANIVSFLASDESEYITGQVISVDGGIT

SEQ ID NO: 82882 - protein, 256 aa, Unknown
  Bacterial polypetide isolated from the Sargasso Sea
MTGRLENKVAIITGAAMGLGAADATLFAKEGAKVILTDVAADKGQELADKIGATFMQQDVTDEERWKEIISDTVNLHGKLDVLVNNAGIVEVGDPENQTTEEYRKTMAVHMDSTFFGCKYSIPVMAESGGGSIVNMCSIASVQGESYVAAYCAAKGAIEAYTRAVAVHCGLKKNGVRCNSIHPSGIITPMVESVPEKMEAKFGGAPNQDAPASKQGEPNDIAYAALYLASDESKFMNGAQLRVDNAMSVASGSMPE

SEQ ID NO: 82883 - protein, 405 aa, Unknown
  Bacterial polypetide isolated from the Sargasso Sea
RRTCGKRPCGKRPATPARRAIFQRDAPAIHRLTGVFTMKTKAAIAWKAGAPLTIEEVDLEGPRAGEVLIEVKATGICHTDYYTLSGADPEGIFPAILGHEGAGVIVDVGPGVGTLKKGDHVIPLYTPECRQCKFCLSRKTNLCQAIRSTQGKGLMPDATSRFSLDGKPLLHYMGTSTFSNYIVVPEIAVAKVREDAPFDKICYIGCGVTTGVGAVVYSAKVEAGANVVVFGLGGIGLNVIQGAKMVGADKIIGVDLNPGRVELAKKFGMTHFINPNEVENVVDHIVQLTDGGADYSFECIGNTKVMRQALECTHKGWGQSFIIGVAAAGEEISTRPFQLVTGREWKGSAFGGARGRTDVPKIVDWYMEGKINIDDLITHRLPLERINEGFDLMKKGESIRSVVLY

SEQ ID NO: 82884 - protein, 246 aa, Unknown
  Bacterial polypetide isolated from the Sargasso Sea
LLDKKVIVTGGASGFGLGIVKKFLNNGAKVVIADQNKTLADEQVQKLGSNVFSIETDVSNEESIENLKKQTKLTIGDPDILVNNAGITHLPDFVENISLEEFEKVLNVNVKSVFLITKAFVPKMKEDKSGVILNIASTAGISPRPKLTWYNATKGWMITATKSLAVELAQYNIRVNALNPVAGETPLLKKFMGEDTPEIRAKFLSTIPLGRFSTPEDMGNAAVFLCSEKANMITGVALEVDGGRCI

SEQ ID NO: 82885 - protein, 238 aa, Unknown
  Bacterial polypetide isolated from the Sargasso Sea
MTKKNIFISGASRGIGKSMAQHFAKNNFNVVGTSRNNFKFDNDLENLFPIKLDVTSRNDVKDCFDELKSKNLLPDILINNAGITADQLFLRMSDDDWDNVINTNLTGTFNLTKIFLKNMIKNKFGRIINISSISGLMGNPGQVNYSSSKAALNGFTKSLAKEVGSRNITVNCVAPGFIDTDMTSYIGDNERNEILKQIPLNKFGLPEDISKLVMFLMSDEASYITGQTISIDGGLLMN

SEQ ID NO: 82886 - protein, 390 aa, Unknown
  Bacterial polypetide isolated from the Sargasso Sea
MKKTKIDHYTDKEALDFHKDKKPGKIEIISSKNMTTKRDLALAYSPGVAAPVKKISEDPEAAYDYTSKGNLVAVISNGSAILGLGNLGALASKPVMEGKAVLFKRFADIDSIDLEIDCKDANEIINSVKNFAPSFGGINLEDIAAPDCFIIEQKLKEILDIPVFHDDQHGTAIITTAALLNALDISGKSIKDIKVVVNGAGASAQACTELFINSGVKSENVIMLDRKGVIYKGRAEGIDQWKSRFAINTDLRTLSDAIKGADVFLGLSSKGVLKKDMVKSMSKNPIIFACANPDPEITPEEINQVRNDAIIATGRSDYPNQVNNLIGFPYIFRGALDVRSKTINEEMKVAAAKAIAKLAREDVPDEVVAAMGGERPHYGKDYIIPSTFDP

SEQ ID NO: 82887 - protein, 68 aa, Unknown
  Bacterial polypetide isolated from the Sargasso Sea
MDLNNKVALVTGGASGLGQATVEAYVAKGAKAVILDINEDKALEIINNLGEDKVMFISTDIMKRGSSS

SEQ ID NO: 82888 - protein, 155 aa, Unknown
  Bacterial polypetide isolated from the Sargasso Sea
MNLDNKVALVTGGASGLGQATVEKFVEKGAKTVILDINEENANKIIENLGDENVMFVSTNIMEEEPVVNAVNQIKDKFGGLHIAVNCAGTGYPGRILGKEAPHPLDAFQFIINLNLVGTFNVMRIAAELMDKNEPDEKGEKGVIINTASVAGYEG

SEQ ID NO: 82889 - protein, 762 aa, Unknown
  Bacterial polypetide isolated from the Sargasso Sea
MKKNKIEHYSDKEALDFHNTNKSGKIEIISSKPMTSKRDLALAYSPGVAAPVKAISKNPDLAYDYTTKGNLVAVISNGSAILGLGNLGAIASKPVMEGKAVLFKRFADIDSIDIEIDSSDTKEIINSVKNISKSFGGINLEDIKAPECFIIENELKRLLDIPVFHDDQHGTAIITSAALINACDIAKKNIKDVKVVINGAGASAMACANLFINTGVKDKNITMLDSKGVIHSERDDLNEWKKKFAIKTKNRTLNDAINGADVFLGLSQAGVLKKEMVKKMSKNPIVFACANPDPEIIPEDVEDVRDDAIIATGRSDYPNQVNNLIGFPYIFRGALDVRAKTINEEMKVAAVKAIATLARERVPDEVVAAMGGDRPHYGRDYIIPSTFDPRLISVIPVAVAKAAIKTGVARKNIEDFDIYAEQLKNRLDPSVAVIQGINSQIKKNQKRVVFADGEDENNLKAAIAFKNNGLGEPILIAKEDIVKKKLYEIGYEEKLDIKIINSTDKELRERYVKFLFEKLQRKEGLLERDCDKLIRNDRVIWGACMVSCGDADAMVTGNTRRYSSSLEKITKVVDPRPGEIMFGLNMIINRGKTIFVCDTSVIEYPDANQLAEMAISTARVVRLFGFDPKVAFLSHSTFGQPVTDRTKRISDAVQILKERKVDFKFDGEMQPDVALEETYKELYPFSEIVGNANVLIMPSQHSAAISFKTMKSMSRAKVIGPLLIGLGQAIEIAPLRSSTSEILNLASVAAYSAGVIDYNKKN

SEQ ID NO: 82890 - protein, 120 aa, Unknown
  Bacterial polypetide isolated from the Sargasso Sea
MIKNKNGRIINISSVAGLMGNPGQVNYSSSKSALNGFTKSLAKEIGSRNITVNSIAPGFIDTDMTSFLDDDAKNGIIKDIPLKRFGEASDVAELTLFLASKEASYITGQTISIDGGLLMY

SEQ ID NO: 82891 - protein, 275 aa, Unknown
  Bacterial polypetide isolated from the Sargasso Sea
MINLIDKLMLVTGSGTGVGSGIASTLAKCGAHVVVHYNNSEKEAQKTKEIIDSLGRNCTLIKSDLKVVDECRRTVDEAAEFLGGLDGLVNNAGITIPKDIKEIDENHFNDIFSLNFRSYFFCAQQALKHLIKRGKNLSENNKNYKWSGGSIVNISSVHGKLGHPGHSVYASTKGAINSFTKQLSVELISEHIRVNAIAPGTIEVPSYFEKDPSYNRELGNSLVPWGRVGLPEEVGYLAAYLVSDFSEFMTGEIIHMKGGLTSTMNLNTKKQNLQL

SEQ ID NO: 82892 - protein, 209 aa, Unknown
  Bacterial polypetide isolated from the Sargasso Sea
ANAVVEEIKAEGGEAISNGSSVADKEGVSKMVAETMDTWGRIDVLVNNAGILRDKSFHKITIEEFNQVMDVHFQGSFYASHAVYPIMREQNFGRIIFTTSSGGLCGNFGQANYGAAKMGMIGLMNCLKIEGQKYNVFSSAVAPVALSRMTDSLFPEGIGERFMPEYVTPAVIYLASEESQNGAIIGAGAGVFTRFRILETMGLALGTGG

SEQ ID NO: 82893 - protein, 304 aa, Unknown
  Bacterial polypetide isolated from the Sargasso Sea
MITIIGAGKVGGDAALFSALRRLDDEILLLDIAEGLPQGEAMDLNHMLSEQGIDVNVKGSNNYEDMRGSKIVVVVAGAGRKPGMTRMDLLKINAGVVKDVVGNIKKFADDAMIIPVTNPLDPMAQIAYKTSGFDRSRVFGMGGMLDLSRFKQFIHEATGYSRESTKALVIGEHGENMLPLTRFATVSGIPLPTILAKEKLDEIFTATKGVAAEVIKLKGATVHAPGNAISAMIESVVQDKKQVIPVSTNLDGEYGQKDVSIGVPAVIGKNGVEKIVELELNDEEKEWFNKGVDSVKNALSGVEF

SEQ ID NO: 82894 - protein, 265 aa, Unknown
  Bacterial polypetide isolated from the Sargasso Sea
MKSANSQSGRLSGKTALITGASRGIGYEIARAFAREGADLIISATSLGSLQILKEELESSGASVICCPADLSDASQTETLFSRAVEERPELDVLVNNAGIHLGKAFTEYSMEEFDRLMKVNVYSIFQLTQSAITHMRALGRGKVINISSTAGKWESLNQVAYNTSKHAVVGMAKCIALENASHNINVNTICPGIVETDIIRNAQKSLESTGVTADQFRTMIEEQIPNGRMLQPDEVAHIAIYLASRESDGMTGQTITISGGMRMA

SEQ ID NO: 82895 - protein, 758 aa, Unknown
  Bacterial polypetide isolated from the Sargasso Sea
MNDKNKNSSESYDDKEALRFHAEGKPGKIAISATKPMETQSDLSLAYSPGVAAPVIAISEKPETVYDYTSKGNLVAVISNGSAILGLGNLGSLAAKPVMEGKAVLFKRFADVDAIDIEIDSEDAEVFSSTVEKIGRTFGGINLEDISAPDCFIIESELREKLDIPVFHDDQHGTAIISTAGIINALDLTNKKIENVKVVVNGAGAAGIACLELLKSMGLPHENAILCDSKGPIYIGRDENINQWKAAHAVDTDARSLADAIKGSDIFLGLSVKDALTKEMLETMNKDPIVFAMANPDPEIDPKLAKEVRPDCIIATGRSDYPNQVNNVLGFPYIFRGALDVRAKTINDEMKIACAEALAKLAREDVPDEVAAAYSGIRPRYGPDYIIPAPFDPRLIRDIPPAVAKAALESGVARMPIVDEDAYKNRLSARLDPAAAVMQPIYQKAKRLMKKVVFAEGEEEKVIRAALNFRELGLGIPVLVGRKENIEKSLSEIGQQLHSGIEIVNAEISDKSDEYTNYLYSRLQRRGVLARDCLRMVNNDRNIFSACMVSMGDADAMVTGVTRNYSLALEDIRKVIDPAENKRMVGISVIISENKTVLVGDTNVHDMPSAEEIADITQAGADLARKLGLDPHAALLAYSSFGYPEGERSTFMREAVDILDKRNVDFDYDGEMAADVALNPEAMKLYPFCRLTEPANVLIMPAIHSASISTKLLQELGGATLVGPLLVGLSKPVQIAPTGCTVSELVNLATIAACDLGN

SEQ ID NO: 82896 - protein, 248 aa, Unknown
  Bacterial polypetide isolated from the Sargasso Sea
MKKVVIVTGGSRGIGAATAKLAAAQGYAVCVNYLHNQQAADAVVAEIQALGGIAIAMQADLAVEAEIVALFQRVDQELGPVNALVNNAGILETQSGLLDMDQARLQRVFTANVVGPMLCAREAVKRMSVKLGGKGGAIVNVSSVASRLGAPGEYIDYAASKGALDSFTLGLSKEVADQGIRVNSVRPGFIYTDIHASGGEPGRVDRIKDAIPMKRGGQPEEVAQAILWLLSEQASYATGTFIDLAGGR

SEQ ID NO: 82897 - protein, 232 aa, Unknown
  Bacterial polypetide isolated from the Sargasso Sea
AREGAAVVLAELDIETARQTAEQIKSQTGARALAVHTDVTQSASVQHAVSEAEQAFGALDVLVNNAGINVFCDPLTMTDDDWRRCFAVDLDGVWNGCRAVLPGMVERGAGSIVNIASTHAFKIIPGCFPYPVAKHGVIGLTRALGIEYAPRNVRVNAIAPGYIETQLTHDWWNEQADPAAAKQATLDLQPMKRIGRPEEVAMTAVFLASDEAPFINATCITVDGGRSALYHD

SEQ ID NO: 82898 - protein, 245 aa, Unknown
  Bacterial polypetide isolated from the Sargasso Sea
MTKRLSKKVALVTGGASGFGKATAELFKREGAEVYISDINEQNGKKVSKELGVVFISHDVTKTEDWISVIDEIKEQSSGLNVLVNNAGIGFMADVEATTEEEWELVHKVDLDSVFLGCKYAIPLMRESGNGSIINISSISGIVAGHNFAAYNSAKAAVRHLTKSVALHCARSTDLVRCNSVHPVFAQTEMMKAFFENPNEELVSKIERQIPVRKLVTVEDVANSILFLASDESKMITGSELVIDG

SEQ ID NO: 82899 - protein, 245 aa, Unknown
  Bacterial polypetide isolated from the Sargasso Sea
MFDLDGKKALITGASGGIGKEIAKVLIKHNAQVCISGRNLDELNALKELLGEKCHVVACDLSKKDEIIKLIKKTDEFLGHIDILINNAGITKDNIFLRMSENEWEDVLNVNLNSTFSILKLITKGMIKRRYGRIINISSVVGVTGGAGQVNYSASKAGLIGLTKSLSQEVATRNITVNCIAPGFIETPMTEKLDDKRKDTILNSIPMNRIGRPEDLSSAIIFLASQESSYITGQTIHINGGLYMN

SEQ ID NO: 82900 - protein, 654 aa, Unknown
  Bacterial polypetide isolated from the Sargasso Sea
MKKTKIDHYTDKEALDFHKDKKPGKIEIISSKNMTTKRDLALAYSPGVAAPVKKISENPEAAYDYTSKGNLVAVISNGSAILGMGNLGALASKPVMEGKAVLFKRFADIDSIDLEIDCKDSEEIINSIKNFAPSFGGINLEDIAAPDCFIIEQKLKEILDIPVFHDDQHGTAIITTAALINALDICGKSIKKIKVVVNGAGASAQACTELFKNSGVKSENIIMLDRKGVIYEGRTEGIDQWKSRYAVKTKHRTLEDAVKGADVFLGLSAKGVLKKEMVKSMAKNPIIFACANPDPEITPEEINEVRNDAIVATGRSDYPNQVNNLIGFPYIFRGALDVRSKTINEEMKVAAANAIAKLAREDVPDEVVAAMGGERPHYGKDYIIPSTFDPRLISVIPAAVAKAAIDSGVARKNIDDFDVYKDQLKQRLDPTVTIMQGINSFIKKNQKRIVFADGEDENTLKAAIAFKNSKLGIPILVGKESKIKEQIKNIGYSENFDIEIVNSKDEEKRKRYVKHLFEKLQREQGLLERDCDRMIRNDRVVWATSMVACGDADGAVTGNTRRFGASLEKIKQVVDVRKGEIMFGLNMIVHKGRTIFVGDTSVHEYPTSEQMAEIAISTARVVRLFGFDPKVAFVSHSTFGQPLTSRTKHIRNRG

SEQ ID NO: 82901 - protein, 140 aa, Unknown
  Bacterial polypetide isolated from the Sargasso Sea
MKVAVVTGAARGIGLAISKKFLEEGYRVAILDIDQKTLSQTMKQDFDTYNVLGLECNVSEPDQVDQSVNRVVEQFGGIDVLVNNAGIAEFKPMLETSYEEWSRILAVNLNGPFICTQACAPFMLKNEGGSIVNIASISGL

SEQ ID NO: 82902 - protein, 396 aa, Unknown
  Bacterial polypetide isolated from the Sargasso Sea
VAGGGFDPQHVLPVVLDVGTNNPDLLNDPYYLGSQHARLEGQEYDDFIEEFIRGVRNRWPNALIQFEDFQTKHANTILERYRRDALCFNDDIQGTAAVVLAGVYGAMKCLGGHRKDITKQRFVVAGAGSAGCGIATFLHQAMVAQGLSPDEAYARFFIVDKDGLITNERALDGPGSEPLRGFVRNRTDLPDGSSLVDVIRAAKPTTLLGVSTVKGLFTEEVLREMGKINERPIIMPLSNPTSRAECTAEEAARATGGRAIFSAGSPFEDVEIDGRAMKANQGNNFYVFPGLGLGAVLSKSRVISDGMLQAAALAIPNMLTSAQYESGTIFPSIDRIRDISAYVAVKVIEAAAREGRVPDEIRRLVATGEDAISEYVYSTMYLPTYRPTVFSCSSRK

SEQ ID NO: 82903 - protein, 104 aa, Unknown
  Bacterial polypetide isolated from the Sargasso Sea
MELELAGKKVIVTGASRGIGLAIASEFAKEGASVSICARGRDSLDTAREIVAAHGGNVHAEVCDVSDKKNLIDYIENAVRHFGGLNVLVNNPSGFGRSDNEDGW

SEQ ID NO: 82904 - protein, 1031 aa, Unknown
  Bacterial polypetide isolated from the Sargasso Sea
MGGGVSTGDINNDGLVDIYFTGNMVDNKLYLNKGNMVFEDITDSSGTKGDLRWYTGSTMVDINNDGLLDIYCSVGGKFSPKNNELYINNGDNTFTESSKEYGIDDIGSSVQATFFDYDKDGDLDLYVANYPPTPFDAPNTYYYYKMQNVKDQESDNLYRNDNGSFTKVTDQAGLRSFGLTLSATIGDINNDSYPDIFVSNDFSSPDYMYINNQDGTFSDIIKESTSQTSFYGMGADIADFNNDFNLDYIQVDMDARDNRRSKANMASMNIDLFWSTVNYGFHYQYMHNTLQLNRGVFNGKNPFFSNVSRLSGISSTDWSWGPLFADFDNDGWKDIFISNGTRREINHRDYFNELKLRPMAKDSLLYYSQNIPSEAISNFIFQNNKDLSFSDVTEEWGLDYKNFSNGTAYADLDNDGDLEIIVNNIDQEAQIFNNNSSYNYIKIKLKGSDLNPFGIGARVFVKSSDLNQMQEMTLSRGFQSSVSPEFHFGLSDNTSIDLISIEWPNGNYYELANPEINQLITLDINDSYSNEKTNSKNDKLLFVSEEIVEYKHIENDYNDYEKEVLLPHQNSRLGPGIATGDINGDGLDDLVIGGAKDQSTSFYFQLNNGKFRNKTYSFLKQDSVYEDMDILLFDADNDGDNDCYIVSGGNEFEIDSPNLLDRLYINDGKGNFTKSNNSIPLNYSSGMRVSANDFDKDGDIDLFVGGRVVPGSYPLPAESKLLINESNANQVKFVNADSSIFPFSDIGLVSSSVWTDYNNDNWDDLIVVGEWMPIKFYKNIEGKFVEDTSLIDSESTNGWWYDVISEDFDKDGDMDLVVGNLGNNYKYQASEEETFDIYYNDFDQNQSGDIVLSYYNDGDKYPLRGRQCSSEQIPAIKMKFQDYDAFSIATLEDVYTEPALENSLHYYAKTFSSVYLENTGEKFVMNNLPKYSQLSAINKILAKDLDNDGYKDIIVSGNMYNSEVETPRNDASVGLLMNYTKENGFQAIPSKESGLFVKGDVKDMEFIKIGDIDYIVSAKNDDYLEFTRINK

SEQ ID NO: 82905 - protein, 248 aa, Unknown
  Bacterial polypetide isolated from the Sargasso Sea
MELLNKKVIVTGGASGFGLGIVKKFLNNGAKVVIADQNKTLADEQAQKLGSNAFSIETDVSNEESIENLKKQTKLTIGYPDILVNNAGITHFPDFVENISLDEFEKVLNVNVKSVFLITKAFIPKMKEAKSGIILNIASTAGISPRPKLTWYNATKGWMITATKSLAVELAPYNIRVNAINPVAGETPLLKKFMGEDTPEIRAKFLSTIPLGRFSTPEDMGNAAVFLCSEKANMITGVALEVDGGRCI

SEQ ID NO: 82906 - protein, 236 aa, Unknown
  Bacterial polypetide isolated from the Sargasso Sea
MKVALVTGASRGIGQAISLQLKDDGYRVLGTATTSSGIKSLKDKGIEGLELDLNSPNSKETFWQEIESREVNISILINNAGITRDNIVLRMSDNEWQDIMNVNLNGTFYLTKKILKMMLKLKWGRVINITSTSASIGNKGQSNYSAAKAGVEAFTKSLAREVGKRNITINSIAPGFISTDMTEQNDAVNSQDLINEIPLGRFGKPEEVAHLASFLCSEEASYITGQILHINGGLYM

SEQ ID NO: 82907 - protein, 92 aa, Unknown
  Bacterial polypetide isolated from the Sargasso Sea
MNLKNKKVLITGATGGIGNSLLQKFSELGASILATGTNEEKLANIKKNYPKIEVESFKLQEHDKIEKFIENVEKKLDGLDILVNNAGITLDN

SEQ ID NO: 82908 - protein, 756 aa, Unknown
  Bacterial polypetide isolated from the Sargasso Sea
MDEQLKQAALAYHLNPKPGKISVTPTKPLSNQLDLSLAYSPGVAAACEAIHADPLDAQKYTSRGNLVGVITNGTAVLGLGNIGPLAAKPVMEGKGCLFKKFAGIDVFDIELSESDPDKLVEAIAMLEPTLGGINLEDIKAPECFYIEQKLRERMKIPVFHDDQHGTAIIASAAILNGLKVVGKKLSEVKLVCSGAGAAAIACLDLLVNLGLTKSNILVADSKGVIYEGRGNLDPSKQRYAATTDARTLADAIVGADVFLGCSSAGVLKQDMVKTMGDKPLILALANPEPEIRPEDAKAVRPDAIVATGRSDYPNQVNNVLCFPFIFRGALDVGATTITEEMKLACVRAIAELAQETDQSEEVAKAYEGHSLEFGPDYLIPKPFDPRLIIKIAPAVAQAAMDSGVATRPIQDMDAYREQLGATVYRTGMVMRPVFATAKQKQARIVFAEGEDERVLRAAQFVLQEKIAKPILVGRPSVIDMRLAKIGSKLKAGTDFEIVDPEDDARYHRYWQAYQEIGARDGVTPEVAKAAMRKFNTLIGAMLVHLGDADGMICGMIDTFHSHLKFIEQVLGRAKGAEHFAAMNLLMLPGRNLFVCDTYVNELPSAEQLADMTIQAAAEIERFGIAPKAALLSNSNFGSAPSASSRRMGEARKLIVERAPNLEVDGEMHGDAALSELIRKQAFPGTTLSGEANLLIMPNVEAANIAYNLLKMVGGEGVTVGPFLLGAAKPAHILTPAATVRRIINMTAVAAANVNTK

SEQ ID NO: 82909 - protein, 317 aa, Unknown
  Bacterial polypetide isolated from the Sargasso Sea
GIFPSILGHEGAGIVVEVGEGVTSLKKDDHVIPLYTPECRKCKFCLSGKTNLCQAIRETQGKGLMPDGTSRFSYKGKTLYHYMGTSTFANYTVVPEIALAKIREDAPASKACYIGCGVTTGIGAVINTAKVEEGATTVVFGLGGIGLNVIQGCKLAKASVIVGVDLNPERKQIAEKFGMTHFVNPKDYPDNKLQEKIIELTNGGADYSFECIGNVNVMRQALECCHKGWGESIIIGVAGSGQEIATRPFQLVTGRVWKGTAFGGAKGRTDVPKIVDWYMDKKINIDDLITHEFAIEDINKAFDLMHEGKSIRSVINF

SEQ ID NO: 82910 - protein, 248 aa, Unknown
  Bacterial polypetide isolated from the Sargasso Sea
MFDLSNRIAIVTGASQGIGNTIAKVLAHSGAHVICIARTEEKLKDITNQIKDSGGSADYISCDISDGSHFTNSIKTVIKNHEKLDILINNAGITRDALLMRMNEKQWDQVINTNLKAAFIGMKAAIRPMMKNKFGRIINITSIVGITGNPGQANYSASKAGLIGMTQSIAKEVGTRGITVNCIAPGWIDTEMTIDLPENGKEELLNRIPIGKIGKPEDIAYAALFLASNEANYITGQTITVDGGRVIN

SEQ ID NO: 82911 - protein, 285 aa, Unknown
  Bacterial polypetide isolated from the Sargasso Sea
MTVTLVTGANSGLGRATALLLAQKGHKVYAGMRNVEKGAKLLELAESYDLSAIEIDVADNDSVLSCAEQIKANGDTVDVLVNNAGIALNSVTEDIDIDKAKEVMEVNVWGPVRCVKAFVPGMREQGSGHIFQVSSIAGLIGHIGQTVYVGSKFALEGMSEALAQELISFGIRVHIVEPGVTRTAILPKNEGNPVPTAYQDHYDRMFQFYTAGIEAAVQAESFAETIYGALTSDEYQLRYVCGWGGKEIGDRHKTMSDEEFVEMGSLVSSAEEYGLAFFDLFGLRI

SEQ ID NO: 82912 - protein, 184 aa, Unknown
  Bacterial polypetide isolated from the Sargasso Sea
MSKISIIGAAGTVGSSFGYHLAVQAIADEIVYVDIPSKHSFTVGQAEDTNHALAYHSDTNVSCGDYSDTENSDIIVITAGKPRQPGQTRIDLAADNIAILDSIINSLLEYNDDFISIITTNPVDLLNRHVFESGDRPRESVLGFGGILDSARFRYTLSKKLSLPVTDIDATILGEHGDSQVPIF

SEQ ID NO: 82913 - protein, 251 aa, Unknown
  Bacterial polypetide isolated from the Sargasso Sea
MAHPIALITGASRGLGKQAALALAARGVDLIITYRSQADEAAAVVAEATALGVKAHALPLDVADSSSFAAFSHQVREQLSAWQRQQIDFLVNNAGIGIHATIEQTTEQQFDTLFNIHLKGVFFLTQQLLPLIRDGGRILNLSSGLTRFALPGYAAYAAMKGGVEVLTRYLAKELGPRGIAVNVVAPGAIETDFGGGVVRDNQVVNDFIASQTALGRVGQPEDIGGVIAALLSPDSRWINAQRIEASGGMFL

SEQ ID NO: 82914 - protein, 170 aa, Unknown
  Bacterial polypetide isolated from the Sargasso Sea
KIDILVNNAGISRRSDEPHLLSKNDWDDVIDTNLNSIHHMTSAVFPHLKKNKSGKIINIGSMMSIFGNANSAAYAASKGGVVQYTKSCAIAWAKYNIQINTILPGWIVTDMTNEFKKVNPKRYATIAGRTPAERWGLPEDMAGTAIFLSSKFSDFVNGVSIPVDGGYSVM

SEQ ID NO: 82915 - protein, 733 aa, Unknown
  Bacterial polypetide isolated from the Sargasso Sea
PGKIAISATKPMETQSDLSLAYSPGVAAPVIAISEKPETVYDYTSKGNLVAVISNGSAILGLGNLGSLAAKPVMEGKAVLFKRFADVDAIDIEIDSEDAEIFSTTVEKIGRTFGGINLEDISAPDCFIIESELREKLDIPVFHDDQHGTAIISTAGIINALDLTNKKIEDVKVVVNGAGAAGIACLELLKSMGLPHENAILCDSKGPIYIGRDENINQWKAAHAIDTDARSLADAMRGSDIFLGLSVKDALTQEMLKTMNKDPIIFAMANPDPEIDPKLAREVRPDCIIATGRSDYPNQVNNVLGFPYIFRGALDVRAKTINDEMKIACAEALAKLAREDVPDEVAAAYSGIRPRYGPDYIIPAPFDPRLIRDIPPAVAKAAQESGVARMPIVDEDAYKNRLSARLDPAAEVMQPIYQKAKRLMKRVVFAEGEEEKVIRAALNFRELGLGIPVLVGRKEKIEKSLSEIGQQLHSGIEIVNAEISEKSDEYANYLYSRLQRRGVLTRDCLRMVNNDRNIFSACMVSLGYADAMVTGVTRNYSLALEDIRKVIDPAENKRMVGISVIISKEKTVLVGDTNVHDMPSAEEIADITQAGADLARKLGLDPHAALLAYSSFGYPEGERSTFMREAVDILDKRNVDFEYDGEMAADVALNPEAMKLYPFCRLTEPANVLIMPAIHSASISTKLLQELGGATLVGPLLVGLSKPVQIAPTGCTVSELVNLATIAACDMGN

SEQ ID NO: 82916 - protein, 458 aa, Unknown
  Bacterial polypetide isolated from the Sargasso Sea
KEKRFWFKRFADINSIDIEIDSTDPVKIIKSIKNIAGSFGGINLEDIAAPDCFVIEEKLKNLLNIPVFHDDQHGTAIITTAALINALDISKKSIKKIKVVVNGAGASAIACTNLLKKTGVPKRNITMLDSKGIIYQGRKKLNKWKSAHAIKTKKRTLDEAIDGADVFLGLSSKSILSKSMVKKMSKNPIIFACANPDPEITPEEVEMVRKDAIIATGRSDYPNQVNNLIGFPYIFRGALDVRAKTINEEMKVAAANAIANLARDRVPDEVVAAMGGDRPTYGKDYIIPSTFDPRLISVIPIAVAKAAIKSGVARKVIKNFNIYADQLKQRLDPSVTIMQGINTQIKKSQKRIVFADGDDENTLKAAIAFKKSGLGIPILVAKEKIVKAKLREIGYSENFDIQIVNSKSKDKREKYLKYIFKKLHGDKGELDPDIYEIYLKDCDKIIRNDRVAWASCMV

SEQ ID NO: 82917 - protein, 304 aa, Unknown
  Bacterial polypetide isolated from the Sargasso Sea
MITIIGAGKVGGDAALFTALRRLDDEVLLLDIAEGLPQGEAMDLNHMLSEQGIDVNVKGSNNYEDMKGSKIVVVVAGAGRKPGMTRMDLLKINAGVVKDVVGNIKKFADDAMIIPVTNPLDPMAQIAYKTSGFERSRVFGMGGMLDLSRFKQFIHEATGYSRESTKALVIGEHGENMLPLTRFATVSGIPLPTILTKEKLDEIFTATKNVAAEVIKLKGATVHAPGNAISAMIESVVQDKKQVIPVSTNLDGEYGQKDVSIGVPAVIGKNGVEKIVELELNDEEKEWFNKGIDSVKSALSGVEF

SEQ ID NO: 82918 - protein, 102 aa, Unknown
  Bacterial polypetide isolated from the Sargasso Sea
MDLNNKVALVTGGASGLGQATVENFVAAGAKAVILDINEDNANKIIENLGADKVSFISTNIMEEDPVISAINKIKDEHGALHIAVNCAGTGYPGRILGKEAP

SEQ ID NO: 82919 - protein, 363 aa, Unknown
  Bacterial polypetide isolated from the Sargasso Sea
MKTGELIVSSFNREECKLGIVHLGVGNFHRAHQALYINDYLNKSGDLNWGICGIIYEKKRERILIFLKKREGKYILKTISTIGEEEFLEINSIKKLIDWSVQKEEAENILCEPNIEIITMTVTESGYYISENNELNVNLKIVEDNINKKENTIIFSYLLSGLKKRMNTINKEITLLCCDNIRENGIMLKKALKAFVESSNELDLLQWIEKKVSFPSCVVDRITPRAPKYLKKEIKNKFSIDEDCSVMAEPFIQWVIEDNFIGVRPKLEDVGVKFVKNVFPYEEAKIRILNGGHVALSYIGALKGHTTYDQAINDKQLQQYFFELEIKEIVPALGKDIPFELEEYMMIIFDRFKNKYIGDKLER

SEQ ID NO: 82920 - protein, 418 aa, Unknown
  Bacterial polypetide isolated from the Sargasso Sea
MEPLPMSDFREQALKYHAEPKPGKISIEISKPAETVRDLALAYSPGVAEPVREIANNIDDVYKYTGKGNLVAVISNGTAILGLGNLGPMASKPVMEGKALLFKRFAGLDSIDIEVTHRTTEEFIDTVANIADTFGGINLEDIKSPECFEIEKELIRRCNIPVFHDDQHGTAIVTAAGLLNALEIQGKDIRKVVIVCLGAGAAAIACMELLIKCGAKREHIYMLDTKGVIHTRRNDLNKYKELFANNTDKRTLEDAMEGADVFVGVSGPDALPAEALKLMADKPVIFACSNPDPEIKPELAHAQRSDLIMATGRSDYPNQVNNVLCFPFIFRGALDVRAKVINDEMKLAAVHAIRAIAKEPVSQAILTAAQVDKLEFGADYIIPKPMDPRLLSRVARAVAEAAVASGVARLPMPENYMQ

SEQ ID NO: 82921 - protein, 264 aa, Unknown
  Bacterial polypetide isolated from the Sargasso Sea
MGKVILITGTSSGFGRTIAEKLHSEGYTVIGTSRNAEKINSDYLTIKLDINDYEASKSEVDQIIKKYGKIDVLVNNAGINITGPTETMKMVDIKRVFDTNFFSQLNLIQTVLPHMRSKKMGLIINITSIAGYLGLPFWSAYCASKASFRVIAESLNIELKKYNVNVVNIAPGDYKTEILNNRRDSNNPSSSPYFQEYEKIIKSVNEKMNHGRDPIEVANLVLKIIKEKKPKINYLVGGFLEKKITLKSLLPDKLFQKIIIKLYS

SEQ ID NO: 82922 - protein, 368 aa, Unknown
  Bacterial polypetide isolated from the Sargasso Sea
MKTKAAIAVKAGEDLVIDELDLDGPGDNEVLVEIKATGVCHTDAFTLSGDDPEGIFPSVLGHEGAGIVMEVGKNVTSVKPGDHVIPLYTPECRECNFCLNPKTNLCQSIRETQGQGLMPDGTSRFSLNGDPIYHYMGCSTFSNYSVMPEIAVAKVREDAPFDKICYIGCGVTTGIGAVVYDAKVEPGSNVVVFGLGGIGLNVIQGAKMVGANKIVGIDINESKVPLATKFGMTDFINPTKTEDVVEAIIDVTNGGADYSFECIGNIDTMRQALECCHKGWGESVIIGVAGAGQEISTRPFQLVTGRVWRGSAFGGARGRTDVPRIVDWYMDGKINIDDMITHTMPLEEINEAFHLMHKGESIRSVVLY

SEQ ID NO: 82923 - protein, 369 aa, Unknown
  Bacterial polypetide isolated from the Sargasso Sea
MKTRAAVAFEAKKPLELLEIDLEGPQEGEVLVEIKATGICHTDAYTLSGKDPEGLFPSIMGHEGAGIVQEVGKNVKGLKQGDHVIPLYTPECRECDYCLNPKTNLCQSIRTTQGQGLMPNGTSRFSYKGKTIYHYMGTSTFSNFTVLPEIALAKINPSAPFDKVCYVGCGVTTGIGAVINTAKAEAGCRAVVFGLGGIGLNVIQGLKLIGAEMIVGVDLNSDKEIWGKKYGMTHFINPKNVEGNLTDHIVEVTGGGADYSFECIGNVEVMRTALECAHKGWGESIIIGVAGSGEEISTRPFQLVTGRTWKGTAFGGARGRTDVPKIVDWYMDGKIEIDSMITHALKFEDINKGFDLLHQGKSIRSVVIF

SEQ ID NO: 82924 - protein, 270 aa, Unknown
  Bacterial polypetide isolated from the Sargasso Sea
MKDKLILVTGSGTGVGSGIASTLAKCGADVVVHYNNSEKEADKTKEIIDSLGRKCKLIKSNLKVVDECRRTVDEAVTFLGGLDALVNNAGITIPKDFTDIDESHLNDIFSLNFRSYFFCAQQAVKHLVKRGEKLSGNYKKYNWPGGSIINISSVHGKLGHPGHSVYASTKGAINSFTKQLSVELISKHIRVNAIAPGTIEVPSYFEKDPSYNREFGDSLVPWGRVGLPEEVGYLAAYLVSDLSEFLTGEIIHMDGGLTSTMNLNTNNKKA

SEQ ID NO: 82925 - protein, 466 aa, Unknown
  Bacterial polypetide isolated from the Sargasso Sea
MTVSYSPHNPSNSVIVRLRLFNEVGVLNRVTQKISDLGGNIGAIDIVRPEPDALIRDITIFTHNPEHGEKLVEGLREIEDVEFINFSDRTFLAHLQGKIEINNRLPLSTRDDLSIAYTPGVARVCTEIHKNPENAYKLTIKGNTVAVVTDGTAVLGLGDIGPKAAMPVMEGKAMLFKQFADIDAWPICLDTTDTEEIISIVKALAPGFGGINLEDISAPRCFEIEERLRNELDIPVFHDDQHGTAVVTTAALINALKLVRKKPKDIKVVVSGAGAAGTACSKMIMHLGVKNLIGCDSKGAIHNQRTDINQSKRWFADNANPDQEQGSLKEVLKGADVFVGVSAPNILDAGDIRNMEKDAIVFAMANPDPEILPEDARPVAAVVATGRSDYPNQINNVLCFPGIFRGALDCRAKTITEEMKLAASHAIAETLDEQHLNPDYIIPTVFDKSVTPKIAAAIAECHANET

SEQ ID NO: 82926 - protein, 348 aa, Unknown
  Bacterial polypetide isolated from the Sargasso Sea
KPVMEGKAVLFKRFADIDSIDIEIDSSDTKEIINSIKSISKSFGGINLEDIKAPECFIIENELKKLLDIPVFHDDQHGTAIITSAALINACDIAKKNIKDIKVVINGAGASAMACANLFINTGVNEKNITMLDSKGVIHSERDNLNEWKKKFAIKTKNRKLNDAIEDADVFLGLSQAGVLKKEMIKKMSKNPIIFACANPDPEIIPEDVEEVREDAIIATGRSDYPNQVNNLIGFPYIFRGALDVRAKTINEAMKVAAVKAIASLARERVPDEVVAAMGGDRPHYGKEYIIPSTFDPRLISVIPVAVAKAAIKTGVARKNIEDFDIYAEQLKNRLDPSVAVIQGINSK

SEQ ID NO: 82927 - protein, 707 aa, Unknown
  Bacterial polypetide isolated from the Sargasso Sea
MKKTKIDHYTDKEALDFHREKKPGKIEIISSKNMITKRDLALAYSPGVAAPVKEISENPEAAYDYTSKGNLVAVISNGSAILGMGNLGALASKPVMEGKAVLFKRFADIDSIDLEIDSKDSEEIINSIKNFAPSFGGINLEDIAAPDCFIIEQKLKEILDIPVFHDDQHGTAIITTAALINALDISGKSIKEIKVVVNGAGASAQACTELFKNSGVPSENVIMLDRKGVIYKGRTEGIDQWKSKYAVETKLRTLEDAMKGADVFLGLSAKGVLKKEMVKSMAKNPIIFACANPDPEILPEDINEVRNDAIIATGRSDYPNQVNNLIGFPYIFRGALDVRSKTINEEMKVAASQAIAKLAREDVPDEVVAAMGGERPHYGKDYIIPSTFDPRLISVIPAAVAKAAMKSGVARKNIEDFEIYKEQLKQRLDPTVTIMQGINSFIKNNQKRIVFADGEDENTLKAAIAFKNSKLGIPILVGKESKIKEQIKNIGYSENFDIEIINSKDEEKRNKYVKHLFKKLQREQGLLERDCDRLVRNDRVIWATSMVACGDADGAVTGNTRRFGASLEKIKQVVDVRKGEIMFGLNMVVHKGKTIFIGDTSVHEYPTSEQMAEIALSTARVVRLFGFDPKVAFVSHSTFGQPLTSRTKHIRDAVEILKEKKVDFEFDGDMQPDVALNSEYEELYPFAKIVGKANILIMPGQHSAAIS

SEQ ID NO: 82928 - protein, 247 aa, Unknown
  Bacterial polypetide isolated from the Sargasso Sea
MNIDQDKSTVLITGSNRGIGLALAENYAEQGWNVIATCRKPEKATDLMSLREKFSNVNIEELDVTSEEQINALAKKYNGIPIDVLVNNAGILGEVKDQVFGALNEQTFELVFAVNTLAPLKISEAFIENVAISQQKKIVSMTSGLASMQITANQSYFYFYRMSKAALNMGIVAMNASLKKRGIISALIAPGQVETKMLEESGYRGPNKITPDESAKSLIKIIDSISQEVLTKNGNKAINVDQRVLPW

SEQ ID NO: 82929 - protein, 413 aa, Unknown
  Bacterial polypetide isolated from the Sargasso Sea
MADFREQALRYHAEPKPGKISIEISKPAETVTDLALAYSPGVAEPVREIAADVDNVYKYTGKGNLVAVISNGTAILGLCNLGPMASKPVMEGKALLFKRFANLDSIDIEVSHRSTEDFINTVANIADTFGGINLEDIKAPECYEIEKELIKRCNIPVFHDDQHGTAIVTAAGMLNALEIQGKDIKNAIIVCMGAGAAAIACMELLIKCGAQREHIYMLDTKGVIHTRRNDLNEYKKLFANNTDKRTLEDALTGADVFVGVSGPDVLPAEALSLMADKPVIFACSNPDPEIKPELAHATRNDIIMATGRSDYPNQVNNVLCFPFIFRGALDVRASVINDEMKLAAVHAIRAIAKEPVPQEVLTAAKVSDLQFGKQYIIPKPMDPRLLPRVARAVAEAAVASGVARISLPENCYR

SEQ ID NO: 82930 - protein, 255 aa, Unknown
  Bacterial polypetide isolated from the Sargasso Sea
MKVAVVTGAARGIGLAISKKFLEEGYRIAILDIDQKTLSQTMKQDFDTKNVLGLECDVSEPDQVDQSVNRVLEQFGRIDVLVNNAGIAEFKPMLETTYEEWSRILAVNLNGPFICSQACAPFMLKNEGGSIVNITSISGLRASTLRIAYGTSKAALMHLTKQQAAELGNKGVRVNAIAPGPVDTAMAKKVHTADIRSDYHDVIPLNRYGLEEEIADAVWFLCSDSASYINGQIIAADGGFDATGIGLTSLRQSKN

SEQ ID NO: 82931 - protein, 414 aa, Unknown
  Bacterial polypetide isolated from the Sargasso Sea
MSDIRQQALDYHEFPVPGKTAVCLTKPAETSHDLALAYSPGVAEPVREIAANPENAYRYTNKGNTVAVISNGTAILGLGNLGPLASKPVMEGKALLFKHFANIDSTDIEVTHNTAEEFINTVAAIAGTFGGINLEDIKAPECFVIERELIERCNVPVFHDDQHGTAIVTAAGMINALEIQGKLISDATFVCMGAGAAAIACMTMLVKCGANRANIYMLDTKGVIHAGRTDLNEYKALFANETDKRTLQDVIKGADVFLGLSGPNVIGAEEVAMMADKPVIFACSNPDPEIKPELAHATRSDLIMGTGRSDYPNQVNNVLCFPFIFRGALDVRASCINDEMKIAAVHAIAGLAKEEVPASVLKAYPKVSSLSFGPEYVLPKPMDPRLLPRVARAVAQAAIDSGVAAITTLPQYAD

SEQ ID NO: 82932 - protein, 244 aa, Unknown
  Bacterial polypetide isolated from the Sargasso Sea
MNSMDGKVIMITGASSGIGEATARRLVQQGARLVLGARRTDRLKHLAEQLGGDASVLWAATDVTQAAELQQLAEKGRERFGRIDVLVNNAGIMPVSMIAQGCVDDWNRMIDVNIKGVLYGIHAVLGGMLEQGSGHVINISSVAGLTVGPGGAVYSATKFAVRAISEGLRQECAGKVRVTSICPGLVASELTDSITVPAFRERAQKLFEGAMSPDVIADAIVYAIAQPEHVAVNEIVVRPLSQSF

SEQ ID NO: 82933 - protein, 484 aa, Unknown
  Bacterial polypetide isolated from the Sargasso Sea
QDHGAEADHPGAANPEPEIRPEIAKAARPDCIIATGRSDYPNQVNNVLCFPYIFRGALDCGATKITEEMKLACVKAIAELAEAETNDAVAQAYAGQDLTFGPDYIIPKPFDSRLIEKIAPAVAKAAEESGVATRPIKDLDAYRAQLSDFVYHTGLTMRPVFSAAKANPKRVVYAEGEEERVLRAVQTVVDEGLAKPILIGRPHVIEMRIQKAGLRLKPGVHFELVDPEDDRRYHQYHTAYHELMGRNGVTPDMAKSALRRSNTLIGALLVRLGDADALLCGTVGRFDAHLEHVRDVIGLAPNAKVFAAMNGLMLEKHTLFITDTFVNEMPSAEELADITKLAAEEVRRFGQEPKVAMLSHSMFGSSKNASARRMRAAYDLLKVEAPDLQVEGEIQGDAALSEDIRHHFLPKSAFSGSANLLVMPSLDAANIAFNLLKITGGQGVTVGPILLGAAKPVHILNPSATSRRIVNMTALAVADVSATR

SEQ ID NO: 82934 - protein, 165 aa, Unknown
  Bacterial polypetide isolated from the Sargasso Sea
IHILVNNAGITKDNLLIRMKDDEWGDVLDTNLKGTFKICKSTIKIMMKQRYGRIINISSVVAISGNPGQTNYAASKAGMIGFTKSLAKEVASRNITVNCIAPGFIATDMTDHLSDDVQSSLMSGIPLQRLGKLREISNSVVFLSSEGGSYITGETININGGMLMN

SEQ ID NO: 82935 - protein, 250 aa, Unknown
  Bacterial polypetide isolated from the Sargasso Sea
MTKRLSEKVALVTGGASGFGKATAELFKKEGAEVYISDINEENGKKVSSELGVTFVSHDVTKTEEWIRVIDEIKAQSSGLNVLVNNAGIGFMADVEATTEEEWELVHKVDLDSVFLGCKYAIPLMRESGNGSIINISSISGIVAGHNFAAYNSAKAAVRHLTKSVALHCARTTDIVRCNSVHPVFAQTEMMKSFFDNPNEELVSKIERQIPLRKLVTVEDVANSILFLASDESKMITGSELVIDGGLSAQ

SEQ ID NO: 82936 - protein, 238 aa, Unknown
  Bacterial polypetide isolated from the Sargasso Sea
MTKRNIFISGASRGIGKSMAIHFANNNFNVVGTSRNNFNFDDESENLFPIKLDVTSRDDVKKCYEELESKNLLPNILINNAGITADQLFLRMSDDDWDNVINTNLNGTFNLTKVFLKHMIKNRFGRIINISSISGLMGNPGQVNYSSSKAALNGFTRSLAKEVGSRNITVNCIAPGFIDTDMTSYLNENEKTEILKKIPLKKFGRPEDISKLAMFLISDEASYITGQTISIDGGLLMY

SEQ ID NO: 82937 - protein, 256 aa, Unknown
  Bacterial polypetide isolated from the Sargasso Sea
MDLNNKVALVTGGASGLGQATVENFVAAGAKVVILDINEDNANKIIKNLGADKVSFISTNIMEEDPVVSAINKIKDEHGALHVAVNCAGTGYPGRILGKEAPHPLDAFQFIINLNLVGTFNVMRIAAELMDKNEAEEGGEKGVIINTASVAGYEGQIGQSAYSASKAGVIGLTITAARDLARHSIRVCTIAPGIFDTPLMQLAPDKVRDPLLESTQFPHRFGQPSEFGQLAAHIVENSYLNGETIRLDSGMRMKPR

SEQ ID NO: 82938 - protein, 93 aa, Unknown
  Bacterial polypetide isolated from the Sargasso Sea
MINLKNKNIIITGATGGIGNSIVDTLTSLNSKLVVTGTNEKKLEQLKNKNANLIIIKQDISIHDELEAFVEKCNNELGGKIDVLVNNAGITKR

SEQ ID NO: 82939 - protein, 262 aa, Unknown
  Bacterial polypetide isolated from the Sargasso Sea
MKLIEDLFDLRGKVAAITGGARGIGAETARTLAAAGASVAILDVLSQPAEALVEEIRAQGGQAAFWSLDVTHEADVARVFGEIVARFGRLDVLVNNAGIEGHNVPTHELTLAQWQRVQDVNVNGVFLCTRAAIPHIDAAGGGSIVNLSSMYGIVGGPDVPAYHASKAAVRMMAKVDAMLYAAKNIRANSVHPGYIRTPMLEEAFRQMGQDPDRAFEYMQTNVPMAKIGSPRDIAAGILYLVSPAGRYVTGAELVIDGGFTAR

SEQ ID NO: 82940 - protein, 303 aa, Unknown
  Bacterial polypetide isolated from the Sargasso Sea
MAAMSCAPTRASTTRSRRSTARPRSMRSRPAARRAPHERRPSFNVNGIRPTMNRVANKVALVTGAASGVGRADALLLAAEGARVVLTDIDEDAGRALAREIGDAALFVRHDIADEAGWQHAIASTLERFGRLDVLVNNAAICPVGSIEDTSLDTWRRVMRTNADGYFLGCKYAIGAMKGNDTPGSIVMMSSVAALGGLPMMCAYTGSKGAVTALARSVAVHCKRSGYRIRCNSIHPDGIWTPMTQALMPDLDPAALGIGSDPMARMCDPQDVANLVLFLASDESRFVNGAELRIDNAQLVSSL

SEQ ID NO: 82941 - protein, 264 aa, Unknown
  Bacterial polypetide isolated from the Sargasso Sea
MHIDLKGKTAVVTASTAGIGLAIAEGLARAGARVVVNGRSDASVQSALAHLRAAIPSADFDGVAADLSDAAGVARVTQHTPDADILVNNAGIYGLKAFFEIDDAEWEHYFQMNVMSGVRLARHYLKGMIERNAGRIVFISSESGLNIPVDMIHYGFTKTAQLSIARGLAKLAAGTHVTVNSVLPGPTMSDGVRALLKETADETGRSVEDVAVDFVRNHRSSSIIQRPATPEEVANMVVYVCSPLASATTGAALRVDGGVVDTIA

SEQ ID NO: 82942 - protein, 236 aa, Unknown
  Bacterial polypetide isolated from the Sargasso Sea
MSIKGAVVFVTGASRGLGLAFVREAVARGAAKVYAGVRNPDSFSEPGVTPVKLDVTDSRSVAEAAKIAADTTVLVNNAGIAEVTSAPFSEDVAEQARRFFETNYYGVMRVTAAFQPSLPKDGTGAIINVLSDATWRVVPFLAPYAASKAAAWSYTNNIRAVVAEERIQVLGLHVGVMDTDLTRGFDVPKSAPADVARQTFDALEAGESEILADEQTRALKRTLSSKHSAYIDPTVA

SEQ ID NO: 82943 - protein, 253 aa, Unknown
  Bacterial polypetide isolated from the Sargasso Sea
MNTTPIALITGASRGLGKNAALTIAAQGVDIILTYQSNAAAAAEVVAEIEWHGRKAVALPLDVGNSQSFSDFSQRVKTALEQTWQRDSFNYLVNNAGIGIHVPMAETSVEQFDTLMNIHVKGPFFLTQVLLPLLADNGSIINVSTGLTRFAVPGFGAYATMKGAVETMTKYWAKELGPRGIRVNVLAPGAIETDFGGGAARDNPQMNEFLAQQTALGRVGLPEDIGGAISVLLSPAAAWINAQRIEASGGMFL

SEQ ID NO: 82944 - protein, 97 aa, Unknown
  Bacterial polypetide isolated from the Sargasso Sea
MKKKISLIGAGQIGGTLAHLIGIKEIVSEVVLFDVAPGVAKGKALDIAQSSSVDGFDVKFKGTDKYEDIKDSDVIIITAGVPRKPKMSRDDLLGINL

SEQ ID NO: 82945 - protein, 224 aa, Unknown
  Bacterial polypetide isolated from the Sargasso Sea
DWKSIAEHFLINNYIVIGTSRSDSNIDKDYKNYHHFSIDITSRIDIQNLHQSLENDDLLPDILINNAGITDDKLFLKMSDENWDNVINTNLTGTFNLTKVFIKNMIKKRYGRIINISSVSGLMGNPGQVNYSSSKSALNGFTKSLAKELGSRNITVNSVAPGFISTDMTTFLDNNKKDEIIRDIPLKRFGKSEDVSQLVFFLASDNSSYITGQTISVDGGLLMH

SEQ ID NO: 82946 - protein, 111 aa, Unknown
  Bacterial polypetide isolated from the Sargasso Sea
MELNKKNIIVTGGASGFGLGIVQKFINNGAKVIIADRNADLAEQEADKLGQSAYSINTDVSNLKSIENLKNEAKKIFGHPDIIVNNAGITHMPDFIENISYEEFERFSMLM

SEQ ID NO: 82947 - protein, 172 aa, Unknown
  Bacterial polypetide isolated from the Sargasso Sea
MRLKDKVALITGGASGFGKETARLFKEHGATVFISDINFERGKTVAKELDIDFFEHDVTDSKRWEEVINEIEAKAGNLNILVNNAGIGFISDVESTTEEDWELVHKVDLDSVFLGCKYALPLMRKSGNGSIINISSISGIVAGHNFAAYNSAKAGVRHLSKSVALHCARTTD

SEQ ID NO: 82948 - protein, 522 aa, Unknown
  Bacterial polypetide isolated from the Sargasso Sea
IKSISKSFGGINLEDIKAPECFIIENELKKLSDIPVFHDDQHGTAIITSAALINACDIAKKNIKDIKVVINGAGASAMACANLFINTGVNEKNITMLDSKGVIHLERDNLNEWKKKFAIKTKNRTLDDAIDKADVFLGLSQAGVLKKEMIKKMSKNPIIFACANPDPEIIPEDVEEVREDAIIATGRSDYPNQVNNLIGFPYIFRGALDVRAKTINEEMKVAAVKAIATLARERVPDEVVAAMGGDRPHYGKEYIIPSTFDPRLISVIPVAVAKAAIKTGVARKNIEDFDIYADQLKNRLDPSVAVIQGINSQIKKNQKKVVFADGEDENNLKAAIAFKNNGLGEPILIAKEDIVKKKLYEIGYGEKLDIRIVNSTNKELRERYVKFLFEKLQRKEGLLERDCDKLVRNDRVIWGACMVSCGDADAMVTGNTRRYSSSLEKITKVVDPRPGEIMFGLNMIINRGKTIFVCDTSVIEYPDANQLAEMAISTARVVRLFGFDPKVAFLSHSTFGQPGYRIEQKE

SEQ ID NO: 82949 - protein, 583 aa, Unknown
  Bacterial polypetide isolated from the Sargasso Sea
KLKEILDIPVFHDDQHGTAIITTAALLNALDISGKLIKDIKVVVNGAGASAQACTELFINSGVKSENIIMLDRKGVIYKGRAEGIDQWKSRFAINTDLRTLSDAIKGADVFLGLSSKGVLKKEMVKSMSKNPIIFACANPDPEITPEEINEVRNDAIVATGRSDYPNQVNNLIGFPYIFRGALDVRSKTINEEMKVAAAEAIAKLAREDVPDEVVAAMGGERPHYGKDYIIPSTFDPRLISVIPAAVARAAIESGVARKKIDDFENYKERLKQRLDPTVTIMQGINSFIKKNQKRIVFADGEDENTLKAAIAFKNSKLGIPILVGKESKIKEQIKNIGYSENFDIEITNSKDEEKRKKYVNHLFKKLQREQGLLERDCDRMVRNDRVVWATSMVACGDADGAVTGNTRRFGASLEKIKQVVDVRKGEIMFGLNMVVNKGKTIFIADTSVHEYPTSEEMAEIAISAARVVRLFGIDPKIAFVSHSTFGQPLTSRTKHIRTAVDILKDKQVNFEFDGDMQPDVALNPDYEELYPFAKIVGKANILIMPGQHSAAISYKLMKTLGDTKVIGPLLIGLGLPIGNCSA

SEQ ID NO: 82950 - protein, 719 aa, Unknown
  Bacterial polypetide isolated from the Sargasso Sea
GVAAACMAIYDEPLDAQKYTSRGNLVGVITNGTAVLGLGNIGPLAAKPVMEGKGCLFKKFAGIDVFDIELAESDPDKLVEAIAMLEPTLGGINLEDIKAPECFYIEKKLRERMKIPVFHDDQHGTAIIASAAILNGLKVVGKKLDEVKLVCSGAGAAAIACLDLLVNLGLSKKNVLVTDSKGVIYEGRGNLDPSKERYAANTEARTLADAIRGADVFLGCSSAGVLKPEMVAEMGTQPLILALANPEPEIRPEEAKKVRPDCIIATGRSDYPNQVNNVLCFPFIFRGALDVGATTITEEMKLACVRAIAELAEETDQGDEVAKAYEGHSLEFGPEYLIPKPFDPRLIIKIAPAVAQAAMDSGVATRPIKDMDAYREELGTTVYRTGMVMRPVFAAAKSEPARIVFAEGEDERVLRAAQFVLLEKIAKPILVGRPSVIEMRLKKMGSKLKCGEDFVVVDPEDDPRYQQCWQAYHELGAREGVTPDVAKAAMRKFNTLIGAILVRLGEADGMICGMIGQYHTHLKFIEQVLGKADNVQNFAAMNLLMLPGRNLFICDTYVNETPTAEQLADMTMLASREIEKFGITPKVALLSNSNFGSAPSASSQRMAAARKLIAERAPSLEIDGEMHGDAALSEMVRKAAFPGTTLSGEANLLIMPNVEAANIAYNLLKMVGGEGVTVGPFLLGAEKPVHILTPAATVRRIINMTAVASANARKRVSAQ

SEQ ID NO: 82951 - protein, 234 aa, Unknown
  Bacterial polypetide isolated from the Sargasso Sea
TAGIARKPGMSRDDLLITNMNIVGSVTESIMKYSKNPIIIVVSNPLDAMVQHSFSKSGLSKERVIGMAGILDTGRFRTFLAEELDVSVNSIDAYVLGGHGDSMVPLLKATTVGGVPVKELIEKNRLEEIVQRTRDGGAEIVAHLKTGSAYYAPSAAVAQMVDAIIFDTKEVFPCAAMLDGEYDIKGVYAGVPVKLGSSGIEEIVKLNLSQSEKDGLTASSKAVEELIDVMKGQS

SEQ ID NO: 82952 - protein, 298 aa, Unknown
  Bacterial polypetide isolated from the Sargasso Sea
AKGNLVAVISNGTAVLGLGNIGPSASKPVMEGKAVLFKKFANIDCFDIEVKEDNPQKLAEIVASLEPTFGAINLEDIKAPDCFEVERLCKEKMKIPVFHDDQHGTAIVVGAAAVNAIELSQRKIESTKIVAVGAGASGIACLEMLVKLGVKRENIWLCDSKGLITKNRSEINEEKKRFAQDSQFSKLDDVIENCDLFLGLSGPGVLTSEMVLKMSEQPIIFALANPDPEINPADALKVAPNALIATGRSDYPNQVNNVLCFPFIFRGALDVGATQINDEMKLACIYAHCKSGETDFNS

SEQ ID NO: 82953 - protein, 152 aa, Unknown
  Bacterial polypetide isolated from the Sargasso Sea
MSSLPKISVIGAGNVGSSAAYRALELNLADVVLLDIVDGLPQGKALDMTQMMSVNGSSSRIIGTTDYSDTKDSDIVIVTSGLARKPGMSRDDLINTNTKIIKDVTEKVVQHSPNSIIIVVTNPLDAMTYVSYKVNGFPKERVIGMARCIRCC

SEQ ID NO: 82954 - protein, 126 aa, Unknown
  Bacterial polypetide isolated from the Sargasso Sea
MYLKKINLKNKVALVTGAGKGIGRACSIALAEAGATIIGVSRTASDLNKLQKDIKKVKGKLTKITCDIMDYEDLSSKLKKVKKVDILVNNAGTNIPEPFEKIKQTSMNYLVDLNMKAAFNVAQLVV

SEQ ID NO: 82955 - protein, 294 aa, Unknown
  Bacterial polypetide isolated from the Sargasso Sea
AKKNDLEKYIYMIALQDRNETLFYYTLISEIKNMMPIIYTPTVGRACQKFDHIFRRPRGLYISFKDLGKVETILKNWPFNQVEVIVVTDGERILGLGDLGANGMGIPIGKLSLYTACAGIDPSKCLPITLDVGTNNDNLLKNPFYLGLQKRRIAGRIYDDFLDEFMASVSKIFPNAVIQFEDFANSNAARLLKKYRGSYCMFNDDIQGTAAVTLSGLISSMKLTSQKLEDQKLLFYGSGTAGIGIGNLFSQALVDIGIPESDARKKCWFVDSKGLVVKSRDDLSLGKLLFAQDS

SEQ ID NO: 82956 - protein, 242 aa, Unknown
  Bacterial polypetide isolated from the Sargasso Sea
MKTQAAVAFEAGKPLEICEVDLDGPKSGEVLVEIKATGICHTDAFTLSGDDPEGVFPSILGHEGAGIVVEVGPNVSSVKPGDHVIPLYTAECRECEYCLHPKTNLCQAVRETQGQGVMPDGTSRFSLNGKPLMHYMGCSTFSNYTVMPEISLAKVREDAPFDKICYIGCGVTTGIGAVIFQAKVEIGSTVAIFGLGGIGLNVIQGSRLAGASRIIGIDINSERESLGKKFGMTRFQLTLIKG

SEQ ID NO: 82957 - protein, 158 aa, Unknown
  Bacterial polypetide isolated from the Sargasso Sea
MRKKITLVGAGNIGGTLAHLIALKQLGDITLIDIAKGVPQGKALDLSQSSAVELFDIKIDGSNNYSSLKNSDVVIITAGLPRMPGMSRDDLIETNTKIISTIGQAINKYCRKAFIICITNPLDAMVSILQSSSKVSKNMCVGMAGILDSSRLKFFLSK

SEQ ID NO: 82958 - protein, 238 aa, Unknown
  Bacterial polypetide isolated from the Sargasso Sea
KPRGPGMERADLLEMNGAIFVEQGKALNEVAKPTCKVCVVGNPCNTNALICMENAPNLDRKNFHALTRLDENRAKCQLALKAGVFYDTVSNVTIWGNHSTTQVPDFVNAKIGGKPAAEVIADQAWLEEEFTPAIQTRGGLLIKKWGRSSAASTAVSIADAIKALVTPTREGDWFSSAVCTDGNPYGIAEGIIFSMPCRSAGDGSYEIVEGLEIDEWLQARIDASEEELTKEADCVSHL

SEQ ID NO: 82959 - protein, 211 aa, Unknown
  Bacterial polypetide isolated from the Sargasso Sea
MNLENKKIIITGATGGIGNSLVEKFYGHKSKIIATGTNEEKLKNLKTKFSKIEVKKFKLEQHEKIDEFVENVNNELGGIDVLVNNAGITLDNLSIRLTEENWKKVLDINLTSTFLMCKSTIKRMLKNKYGKIINITSIVGHTGNLGQANYSASKAGIVAFSKSLAIEYARKNININCVSPGFIKTEMTDKINEEFKKSLIDKIPSGNLGTG

SEQ ID NO: 82960 - protein, 169 aa, Unknown
  Bacterial polypetide isolated from the Sargasso Sea
EVKNSISVLVNNAGITRDNIVLRMSEEEWQDIMNVNLNGTFYLSKKVLKMMLKLKWGRIINITSTSASIGNRGQSNYSAAKAGVEAFTKSLAREVGKRNITINSIAPGFINTDMTQQSDGVNTDELIKEIPLGRFGKPGEVAHLASFLCSEEASYITGQTIHINGGLYM

SEQ ID NO: 82961 - protein, 334 aa, Unknown
  Bacterial polypetide isolated from the Sargasso Sea
ETIEQQLPRAYMQYSSFAEPINKHIYLRAIHDKNETLFYRLVKEHLEEMIPVIYTPTVGDACERFSAIYRSARGIFVSYSEREHMDDILRSVTKKKVKVIVVTDGERVLGLGDQGVGGMGISIGKLSLYTACGGISPAYTLPVMLDVGTNNEKLLNDPVYMGSKHKRITGEEYDAFIDQFMKAVKRRWPEALVQFEDFAQPNAMPILKRYREEYCCFNDDIQGTAAVTVGSLLAACRSKGVKLSSQKVVFVGAGSAGCGIAEQIISQMKTEGLDDATARKQVYMVDRFGLLTEGMADLRDFQEALMQKKSDLADWAYSGEYASLLDVMNCAKPG

SEQ ID NO: 82962 - protein, 191 aa, Unknown
  Bacterial polypetide isolated from the Sargasso Sea
MFTIKPVVALVTGGSRGIGQAIANGLAKQGVIVAATATSEEGAAAISKSFKDQGYNGKGFAFNVNDEEALPLLLDSIKEQMGSAPSILVNNAGITRDNIILRMKPEQWEDVITTNLNGVYRITKACLKPMVKARWGRIINITSVSGLIGNFGQANYSAAKAGVAAFSKSLAREVASFGITVNCVSPGLLKL

SEQ ID NO: 82963 - protein, 127 aa, Unknown
  Bacterial polypetide isolated from the Sargasso Sea
MYLKKINLKNKVALVTGAGKGIGRACSIALAEAGATIIGVSRTASDLNKLQKDIKKVKGKLTKITCDIMDYEDLSSKLKKIKKVDILVNNAGTNIPEPFEKIKQTSMNYLVDLNMKAAFNVAQLVVL

SEQ ID NO: 82964 - protein, 282 aa, Unknown
  Bacterial polypetide isolated from the Sargasso Sea
INLEDIKAPDVFEVERICKEKMKIPVFHDDQHGTAIVVGAAAVNAIELSHRKIESTKIVAVGAGASGIACLEMLVKLGAKKENIWLCDSKGLITKNRSEINEEKKRFAQDSQFSKLEDVIENSDLFLGLSGPGVLTSKMVLKMNEQPIIFALANPDPEINPADALKVAPNALIATGRSDYPNQVNNVLCFPFIFRGALDVGATQINDEMKLACIHAIANLARQTSTAETVEAYQGEILKFGKEYLIPKPFDPRLLPNVAAAVAEAAINSGVASRPLKDVEAL

SEQ ID NO: 82965 - protein, 186 aa, Unknown
  Bacterial polypetide isolated from the Sargasso Sea
MINFKGKKILITGATGGIGNALVKKFLSLDGTVLATGTNTERLDILKKEFPNINVLKFDISDHSKIEDFIENVTSQLVGLDVLVNNAGITMDNLSLRMKDEEWKKVIDVNLSSTFYLCKHAIKKMLKNKYGRIVNITSIVGHTGNLGQANYSASKAGMVAMSKSLAIEYAKKNITINCVSPGFIQS

SEQ ID NO: 82966 - protein, 162 aa, Unknown
  Bacterial polypetide isolated from the Sargasso Sea
ATGVCHTDAFTLSGDDPEGAFPAILGHEGAGIVVEVGKGVKSLKPGDHVIPLYTAECGKCEFCLHPKTNLCQAVRETQGKGIMPDGTSRFSLDGKPILHYMGCSTFSNYSVLPEISLAKVRKDAPFDKICYIGCGVTTGIGAVAFTMGVEAGSTVAIFGLGG

SEQ ID NO: 82967 - protein, 305 aa, Unknown
  Bacterial polypetide isolated from the Sargasso Sea
QVSRCYQQYRSFDDAINKHIYLRAIQDNNETLFYRLVQQHLEEMLPIIYTPTVGDACEQFSDIYRSARGLFISYQDRYNLDDVLRNATKAKVKVIVVTDGERVLGLGDQGIGGMGISIGKLSLYTACGGISPAYTLPVMLDVGTNNKKLLEDPMYMGLRQPRVAQDEYNEFIELFIAAVQRRWPEAIIQFEDFAQPNAMPILQRYREQVRCFNDDIQGTAAVTVGTLLAACRSKGVPLHQQKVVFVGAGSAGCGIAEAIISQMVAEGIAEPQARSQIYMVDRFGLLTEGMPDLRDFQQALQQSTA

SEQ ID NO: 82968 - protein, 160 aa, Unknown
  Bacterial polypetide isolated from the Sargasso Sea
MNKKISLVGSGNIGGTLAHLIALKELADINLIDVVKGVPQGKALDLAQSSSIELFDVKIEGSNSYSSLKNSDVVIITAGIPRLPGMSRDDLLQTNTKIISDIGKAIKKYCPKAFLICITNPLDAMVSILQSSSKVKHNMCVGMAGILDSSRMKYFLSKEN

SEQ ID NO: 82969 - protein, 202 aa, Unknown
  Bacterial polypetide isolated from the Sargasso Sea
MLLKNHLGEKCYVVACDLSKKDEISELVKKTDELLGHIDILVNNAGITKDNIFLRMSENEWEDVLNVNLNSTFSILKLITKGMVKRKYGRIINISSVVGVTGGAGQVNYSASKAGLIGLTKSLSQEIATRNITVNCIAPGFIETPMTEKLDDKRKDTILNSIPMNRIGTPKDLSSAIIFLASQESSYITGQTLHINGGLYMN

SEQ ID NO: 82970 - protein, 758 aa, Unknown
  Bacterial polypetide isolated from the Sargasso Sea
MSKIKNETVRKAALDFHEFPKPGKLEIRATKPLANQSDLAKAYSPGVAEACLEIKKDFKKSGNYTSKSNLVAVISNGTAVLGLGNIGALAAKPVMEGKAVLFKKFAGIDCFDIEINENNPDKLAEIIVSLEPTFGAINLEDIKAPDCFVIEKICKDKMSIPVFHDDQHGTAIVVGAALVNSLKLVDKKISEIKVVCTGGGAAGIACLEMLVSLGCKKKNIWLCDRSGLVTEDRKDKNIYKAAFAQKAESSSLETVIEGADFFLGLSGPNTLSKSMLKKMNESPIIFALANPIPEIMPEIVYEVFPNAIVATGRSDYPNQVNNVLCFPFIFRGALDIAATEINEKMKIACVEAIAKLAREHSSAEAAAAYQGEDMKFGPNYVIPKPFDPRLLPFVASAVAKAAIETGVATKKIGSILEYTKKLEHSAYKSSLLMRPVFEAARSASRKIVFSDGEDERVLRASFSMIEETGDRPILIGRPEVVISRIEKYGLPLRINKDFELVNPESDPRFREYWETYHKIMERRGVTPALAKAIMRTNSTAIAAIMVYRKEADSMICGTFGQYLWHLKYIKEILENGGLNAIGALSLMILENGPLLIADTQVNAIPSPDQISQTVIATARHARRFGIEPKIALCSHSQFGNLDSDSGRNMRDALRILDESKCDFLYDGEMHSDAALDPELRSRIMPNSRLDGAANALVFANTDAASGVRNILKMCANGLEVGPILMGMGNKAHIVTSSITARGLLNIAALAGTPVQTYS

SEQ ID NO: 82971 - protein, 684 aa, Unknown
  Bacterial polypetide isolated from the Sargasso Sea
MSDKLDKEALDYHRYPVPGKLQVTATKPLANQYDLSLAYSPGVAAASRSIAADESEAAALTARGNLVAVISNGTAVLGLGNIGALASKPVMEGKAGLFKKFAGIDVFDIEIDEDDPEQLIKIIKSLEPTFGGINLEDIKAPECFVVESQLKRDMNIPVMHDDQHGTAIIVAAAVLNGLKIANKDIKKVKLVCSGAGAAALACLDLLVKLGLNKNNIFVSDVAGVIYEGREEETNQYNRIYAQKTKLRKLKEIISDADIFLGLSAPGVLSGEMVSDMAEQPLIFALANPDPEIAPEEAKKARPDAIIATGRSDYPNQVNNVLCFPFLFRGALDAGATGINDAMKMACVTALANLAQIETDETVVKAYDLQELNFGPEYLIPKPFDPRLLVELAPAVAQAAMDSGVALRPIKDFEIYKQKLSDFVFRSGTAMKPVFALAKSNPKRVVYAEGESRRVLRAIQNSIDEGIVRPVLIGRRNVVELRIEQLGLRLSLDKDFELVDPEGDERYREYWELYHSITSRNGVSKNEARYLVRTNTTVIASLMLLRKEADAMICGVTGRYREHLPHLLDIIGLRKGVARAAALSMLILPKGTFFICDTHVNPGPSAEQIAGYTVLAAESVRFFGIEPKIAVLSHSNFGSSSHQNAVKMRDAVKLINKMAPDLEVEGEMHADAALDPELRDALVPD

SEQ ID NO: 82972 - protein, 246 aa, Unknown
  Bacterial polypetide isolated from the Sargasso Sea
MSQRIAYVTGGMGGIGTSICQRLSKDGFKVVAGCGPNSPRRVKWLEEQKALGYDFIASEGNVGDWDSTKEAFDKVKAEVGEIDVLVNNAGITRDVVFRKMTHEDWTAVIDTNLTSLFNVTKQVIDGMVERGWGRIINISSVNGQKGQFGQTNYSTAKAGIHGFTMSLAQEVATKGVTVNTVSPGYIGTDMVKAIRPDVLEKIVATIPVRRLGGPEEIGSIVAWLASNDSGFATGADFSLNGGLHMG

SEQ ID NO: 82973 - protein, 238 aa, Unknown
  Bacterial polypetide isolated from the Sargasso Sea
MSNGNVFISGASRGIGNSIAYHFAENDYVVVGTSRNEFEFDKKIKNLIPVKLDVTSREDIQNCFNDLKTKNLLPDILINNAGITSDQIFLRMKDEEWDNVIDTNLNGVFNLSKIFVKNMIKNKKGRIINISSISGLMGNPGQVNYSSSKSALNGFTKSLAKELGSRNITVNCVAPGYIDTDMTSFLDEDSKKQIEKSIPLGRLGSGEDISKLVAFLASDEASYITGQTISIDGGLLMY

SEQ ID NO: 82974 - protein, 246 aa, Unknown
  Bacterial polypetide isolated from the Sargasso Sea
MKKVALITGARGGIGSAITTALLAQGYRIIATHSSPNGAAAHDWYGEQGFRPDQVRLLALDVADTAMCRDTLGRLLQDEGRVDVLVNNAGITRDGAFKRMTPEQWFEVIHTNLCSLYNVTQPLFDAMCEQRDARIINISSVNGQKGQFGQVNYSAAKAGMLGFTKALAAEGARFGVTVNAIAPGYTATPMVEAIRTDILDSIKADIPMRRLAKPEEIAAAVVFLASEAGAYITGETLAINGGLYMK

SEQ ID NO: 82975 - protein, 562 aa, Unknown
  Bacterial polypetide isolated from the Sargasso Sea
MDDNKRPLYLPFAGPAILEAPLINKGSAFSEEERIFFNLEGLVPYAIETIEEQASRAYDQFRSFNNDLDKHIYLRNIQDTNETLFYRLVQNHISEMMPIIYTPTVGLACERFSKNYRRNRGLFISYPNKDRIDDILNNSTRQKVKIIVVTDGERILGLGDQGIGGMGIPIGKLSLYTSCGGISPAYTLPITLDVGTDNPQLLEDPMYMGWRHPRIGGEEYAEFIEAFMQAVHVRWPDTLIQFEDFAQKNAMPILERYKDRYCCFNDDIQGTAAVTVGSLLAACKAAGTELNKQRIAFLGAGSAGCGIAEAIVAQMVSEGISDEQARSQVCMVDRWGLLLDNMPNLLPFQQKLAQKCAEISNWNNFSDNISLLDVVNNAKPTVLIGVSGAPGLFTEEIVRAMHSHCERPIIFPLSNPTSRVEATPKDILHWTSGQALVATGSPFEPVVVDGETYEIAQCNNSFIFPGIGLGVLASGARHVSDAMLMASSRALAECSPLAINGSGPLLPKLEDIHSVSKHIAFAVGKVAIEQGLSLPASDELLMQSIEDNFWKPEYRRYKRTSF

SEQ ID NO: 82976 - protein, 247 aa, Unknown
  Bacterial polypetide isolated from the Sargasso Sea
MFDLAGKIALITGASRGIGKSISMILAQNGAHVICISRNINDVQSVVDDITNKKFNASAASCDISSTDNVTSLVKNIIDEHGKIDILVNNAGITRDNLLMRMSEDDWDKVLNVNLKAVFTSIKVASRSMIKQRSGRIINISSVVGLTGNSGQVNYAASKAGLIGMTKSIAKEFASRGITANCIAPGYIETEMTSNLTDDVKSSIKEQIPLGRIGCVEDIAHAVAYLASDEASYITGQTLTVDGGMVM

SEQ ID NO: 82977 - protein, 766 aa, Unknown
  Bacterial polypetide isolated from the Sargasso Sea
MKQTETQQQAAFDYHEFPTPGKISVVASKPLVTQRDLALAYTPGVAGVCEAIAADPLQAHRFTSRGNLVGVITNGTAVLGLGNIGPLASKPVMEGKAVLFKKFAGIDVFDIEINETDPDKLVDIIAGLEPTFGGINLEDIKAPECFTVEQKLRDRMKIPVFHDDQHGTAITVSAAFINGLKVVGKSIKEVKVVTSGAGAAALACLDLLVDLGLPVENVWVTDIEGVVYRGRTTLMDPAKSRFAQETDARKLADVIGGADVFLGLSVGGILTAEMLKQMAARPLILALANPTPEIFPELAHATRDDVVIATGRSDYPNQVNNVLCFPYIFRGALDVGATTITREMEIAAVHAIAGLAEEEQNEVVAAAYGAYDVSFGAQYLIPKPFDPRLIVRIAPAVAKAAMEGGVAKRPLTDLDAYVEQLQQFVYHSGAFMKPLFATARRLVRDGGKARIVFTEGEDERVLRAVQVIVDEKLARPILVGRPEVLLARIERFGLRIRLGQDVEVTNPEYDERFPQYWTKYWELRCRDGISKEMARVEMRRRLTLIGAMMVRLGDADGMICGTVGEYHNHLRFVDEVIGKKPGASTYAAMNVLLLDQRTVALVDTHVNDNPDAEQIAEFTIAAARQMEWLNLTPKVALLSRSNFGSGSAASGVKMRRALEIVREQAPDIEADGEMHGDCALDEGLRAKLLPMSPLKGAANLLVCPNVDAGNIAYNLLKTEAGSNVAVGPFLLGVNAPVNILTSSATVRRIVNMAALTVIEANRGVAG

SEQ ID NO: 82978 - protein, 113 aa, Unknown
  Bacterial polypetide isolated from the Sargasso Sea
MYLKKINLKNKVALVTGAGKGIGRACSIALAEAGATIIGVSRTASDLDKLQKDIKKVKGKLTKITCDIMDYEDLSSKLKKIKKVDILVNNAGTNIPEPFEKIKQTSMNYLVDL

SEQ ID NO: 82979 - protein, 247 aa, Unknown
  Bacterial polypetide isolated from the Sargasso Sea
TYEESKNSDIVVITAGIARKPGMSRDDLLITNMNIVGSVTENIMKFSKNPIIIVVSNPLDAMVQHSFSKSGLSKERVIGMAGILDTGRFRTFIAEELDVSVNSIDAYVLGGHGDSMVPLLKATTVGGVPVEELIEKNRLEEIVQRTRDGGAEIVAHLKTGSAYYAPSAAVAQMVDAIIFDTKEVFPCAAMLDGEYDIKGVYAGVPVKLGSSGIEEIVNLNLSQSEKDGLTASSKAVEELIDVMKGQS

SEQ ID NO: 82980 - protein, 166 aa, Unknown
  Bacterial polypetide isolated from the Sargasso Sea
GIDILVNNAGITKDSLLLRMKEEDWDMVMNINLKGAFHCMKTVIKPMMKNRKGRIINITSIVGITGNSGQSNYAASKAGLIGFTKSLAKEVASRGITVNCIAPGWIQTEMTNDLNENIKTEILGKIPIGRLGVAEDIAYAALYLASNEASYITGQTITVDGGRIIN

SEQ ID NO: 82981 - protein, 238 aa, Unknown
  Bacterial polypetide isolated from the Sargasso Sea
MSRENIFVSGASRGIGKEIAINFAKKGFNVVGTSRGDFDFNLDLDNLKPIKLDITNRDDVHDCFDWLKSKNLLPDILVNNAGITSDQLFIRMKDEEWDNVIETNLTGTFNLSKVFIKNMIKNKFGRIINITSISGLMGNPGQVNYSSSKAALTGFTKSLAKEVGSRNITVNSVAPGYIETDMTSFLEDETRMNIIKNIPLGRIGKVDDVSELVMFLASDEASYITGQTISVDGGLLMY

SEQ ID NO: 82982 - protein, 562 aa, Unknown
  Bacterial polypetide isolated from the Sargasso Sea
MDDNKRPLYLPFAGPAILEAPLINKGSAFSEEERIFFNLEGLVPYAIETIEEQASRAYDQFRSFNNDLDKHIYLRNIQDTNETLFYRLVQNHISEMMPIIYTPTVGLACERFSKNYRRNRGLFISYPNKDRIDDILNNSTRQKVKIIVVTDGERILGLGDQGIGGMGIPIGKLSLYTSCGGISPAYTLPITLDVGTDNPQLLEDPMYMGWRHPRIGGEEYAEFIEAFMQAVHVRWPDTLIQFEDFAQKNAMPILERYKDRYCCFNDDIQGTAAVTVGSLLAACKAAGTELNKQRVAFLGAGSAGCGIAEAIVAQMVSEGISDEQARSQVCMVDRWGLLLDNMPNLLPFQQKLAQKCADISNWNNFSDNISLLDVVNNAKPTVLIGVSGAPGLFTEEIVRAMHSHCERPIIFPLSNPTSRVEATPKDILHWTSGQALVATGSPFEPVVVDGETYEIAQCNNSFIFPGIGLGVLASGARHVSDAMLMASSRALAECSPLAINGSGPLLPKLEDIHSVSKHIAFAVGKVAIEQGLSLPASDELLMQSIEDNFWKPEYRRYKRTSF

SEQ ID NO: 82983 - protein, 95 aa, Unknown
  Bacterial polypetide isolated from the Sargasso Sea
MLKQIVLKNKVALVTGAGKGIGRACAIALAQAGAKVILISRTPNDLKEVTSKIRKTKGTSLSFICDVTDDVKFKMILKKIPKLEILVNNAGSNRP

SEQ ID NO: 82984 - protein, 252 aa, Unknown
  Bacterial polypetide isolated from the Sargasso Sea
MYLKKINLKNKVALVTGAGKGIGRACSIALAEAGATIIGVSRTTSDLDKLQKDIKKVKGKLIKITCDIMDYDDLSSKLKKIKKVDILVNNAGTNIPEPFEKIKQRSMNYLVDLNMKAAFNVAQLVVLKMLKNKKKGGSIINMSSQLGHVGMSGRNIYNMTKFGIEGLTKGMGVELATKNIRVNTVAPTFVETPMVKKFFKNKKFKQLALSNIPMGKVATESDVATAVCFLASDAASMITGTSIVIDGGWTAK

SEQ ID NO: 82985 - protein, 347 aa, Unknown
  Bacterial polypetide isolated from the Sargasso Sea
MIKTRAAVAFEAGKPLEIHEVDLEGPRAGEVLVEMKATGVCHTDAFTLSGDDPEGAFPAILGHEGAGIVVEVGKGVKSLKPGDHVIPLYTAECGECEFCLHPKTNLCQAVRETQGKGIMPDGTSRFSLGGKPILHYMGCSTFSNYSVLPEISLAKVRKDAPFDKICYIGCGVTTGIGAVAFTMGVEAGSTVAIFGLGGIGLNVIQGAKMVGASRIIGIDLNDSRADIGTKFGMTDFINPNNIENVVDHIIEITGGGVDYSFECIGNVDVMRQALECCHKGWGESCIIGVAGAGKEISTRPFQLVTGRSWRGTAFGGARGRTDVPRIVDWYMDGKINIDDLITHKNAS

SEQ ID NO: 82986 - protein, 233 aa, Unknown
  Bacterial polypetide isolated from the Sargasso Sea
METKKVLVTGGNRGIGKGIVEGFLDNGNEVLATCRDVSKFPFENDKLTVAELDISDVDSVENFKKTVDDFGPEILVNNAGITKDNIFLRMSDDEWLDVINTNLTGTFRITKLVAKGMLKQKWGRIVNISSISGMMGNPGQANYSASKSGIDGFTRSLAKELGSRNITVNSIAPGFISTDMTEDLSNEDLIKNIPLGRMGNVEDVASLVMFLSSEDANYITGQTLVVDGGLFMK

SEQ ID NO: 82987 - protein, 243 aa, Unknown
  Bacterial polypetide isolated from the Sargasso Sea
MLNFSTKTAIVTGGSRGIGKEISLILAQNNFNVVAVATSEKSLDSIRDIENIHPFCSDISNEKSIEKLYEFVISKFGHADVLVNNAGIHMDNILLRMKSEEWNQVMNVNLNGPFHLTKTVLKDMVKNKNGRIINISSISGTDGNKGQGNYAASKGGLLALTKSLAKEVGRRNITVNCIAPGLIETDMISHLSDTVKQGYLERIPLKKLGKPKDIGNMILFLCSDEASYITGQTFYIDGGMSLN

SEQ ID NO: 82988 - protein, 233 aa, Unknown
  Bacterial polypetide isolated from the Sargasso Sea
METKKVLVTGGNRGIGKGIVEGFLDNGNEVLATCRDVSKFPFENDKLTVAELDISDAGSVENFKKTVDDFGPEILVNNAGITKDNIFLRMSDDEWLDVINTNLTGTFRVTKLVAKGMLKQKWGRIVNISSISGMMGNPGQANYSASKSGIDGFTRSLAKELGSRNITVNSIAPGFISTDMTEDLSNEDLVKNIPLGRMGNVEDVASLVMFLSSEDANYITGQTLVVDGGLFMK

SEQ ID NO: 82989 - protein, 245 aa, Unknown
  Bacterial polypetide isolated from the Sargasso Sea
MFDLEGKKALITGASGGIGKEIAKVLIEHNAEVCISGRNHEELNALKKSLGMKCHVVTCDLSKKAEIIELIKKADEFMGYIDILVNNAGITKDNIFLRMSENEWEDVLNVNLNSTFNILKLITKGMVKRKYGRIINISSVVGVTGGAGQVNYSASKAGLIGLTKSLSQEIATRNITVNCIAPGFIETPMTEKLDDKRKDAILNSIPMNRIGKPKDLSSAIVFLASKESSYITGQTLHINGGLYMN

SEQ ID NO: 82990 - protein, 564 aa, Unknown
  Bacterial polypetide isolated from the Sargasso Sea
MFEDNNQKRPLYIPYAGPALLETPLLNKGSAFTSEERSNFNLEGLLPQNIETIEEQAERAYRQFMAFGNDMDKHIYLRNIQDTNETLFYRLLTNHLTEMLPVIYTPTVGKACEEFSNIYRRARGLFISYPDKDRIDDMLQNATKQNVKVIVVTDGERILGLGDQGIGGMGIPIGKLSLYTACGGISPAYCLPVVLDVGTNNQQLLNDPFYMGWRNPRISGEEYAEFVDAFIQAVKRRWPDILLQFEDFAQNNAMPLLNRYKNELCCFNDDIQGTAAVTLGSLIAACKASGAKLSEKRVAFLGAGSAGCGIAEQIVAQMKAEGLTDAQARSRVFMVDRFGLITDKIPNQLDFQRRLSQPVERIADWPVGDNISLLEVMEHGRPDILIGVSGQPGLFTEEVVKTMHKHCARPIIFPLSNPTSRVEATPADLIRWTDGQALVATGSPFAPVEYKGKRYVIAQCNNSFIFPGIGLGVIAAGATRVTDAMLMSASRALAECSPLVKGEEGSLLPDLADIHQVSRYIAKMVAKTAMLQGKAVQTPDEVIDQSIEANFWRPEYRRYRRTSF

SEQ ID NO: 82991 - protein, 101 aa, Unknown
  Bacterial polypetide isolated from the Sargasso Sea
MYLKKINLKNKVALVTGAGKGIGRACSIALAEAGATIIGISRTASDLDKLQKDIKKVKGKLTKITCDIMDYEDLSSKLKKIKKVDILVNNAGTNIPEPFEK

SEQ ID NO: 82992 - protein, 233 aa, Unknown
  Bacterial polypetide isolated from the Sargasso Sea
MENKKVLVTGGNRGIGKGIVEGFLNNGNEVLASCRDASKFPLENDRLTVAELDIADTKSIDNFKNTVESFGPEILVNNAGITKDNIFLRMSDDEWLDVINTNLTGTFRVTKLVAKGMLKQKWGRIINISSISGMMGNPGQANYSASKSGIDGFTRSLAKELGSRNITVNSVAPGFIATDMTDSLTDEELTKKIPLGRIGKVEDVVSLVLFLSSEDSNYITGQTLVVDGGLFMK

SEQ ID NO: 82993 - protein, 87 aa, Unknown
  Bacterial polypetide isolated from the Sargasso Sea
MKTRAAVAWEAGKPLEVMEIDLEGPREGEVLIRNVATGVCHTDAFTLSGEDPEGIFPSVLGHEGGAVVEEIGPGVSSVSVADQVIPR

SEQ ID NO: 82994 - protein, 188 aa, Unknown
  Bacterial polypetide isolated from the Sargasso Sea
MTINFNDKVAIVTGAGGGLGRCHALEFAKRGAKVVVNDLGGSVDGTGGSSEAADKVVDEIKAMGGEAISNGSSVTDKAGVKKLVDDTMAAFGRVDILVNNAGVLRDKSFAKVTLDDFEFVVNVHMMGSVYCTKAVWPIMTEQNYGRIIMTSSSSGVFGNFGQSNYGAAKMGVVGLMNTLKIEGMKYNI

SEQ ID NO: 82995 - protein, 228 aa, Unknown
  Bacterial polypetide isolated from the Sargasso Sea
SEYTVLPEIAVAKISSQAPLEKVCLLGCGITTGIGAVLNTAKVEKGSVVAIFGLGGVGLGAIQGAVMAGAERIVAIDVNPDKEEFARSLGATDFVNPKDHDASIQEVVVELTDGGVDYSFECVGNVELMRSALECCHKGWGESVIIGVAGAGQEINTRPFQLVTGRVWRGSAFGGVKGRSQLPGYVDQYLSGELKVDEFITYTMPLEEINNAFDLMHEGKSIRSVIHF

SEQ ID NO: 82996 - protein, 150 aa, Unknown
  Bacterial polypetide isolated from the Sargasso Sea
MTINFNDKVAIVTGAGGGLGRCHALEFAKRGAKVVVNDLGGSVDGTGGSSEAADKVVDEIKAMGGEAISNGSSVTDKAGVKKLVDDTMAAFGRVDILVNNAGVLRDKSFAKVTLDDFEFVVNVHMMGSVYCTKAVWPIMTEQNYGRIIMT

SEQ ID NO: 82997 - protein, 229 aa, Unknown
  Bacterial polypetide isolated from the Sargasso Sea
FANHTVVPEIALAKIREDAPFDKVCYIGCGVTTGLGAVMNTAKVQPGDNVVVFGLGGIGLNVLQGARIAGADMIVGVDLNPSKKELAEKFGMTHFVNPSEVGADLVPYLVDLTKGGADFSFECIGNVNVMRQALECCHKGWGTSIIIGVAGSGQEIATRPFQLVTGRNWRGTAFGGAKGRTDVPRIVDWYMDGKINIDDLITHTMPLEKINEGFDLMRKGTSIRSVVKF

SEQ ID NO: 82998 - protein, 149 aa, Unknown
  Bacterial polypetide isolated from the Sargasso Sea
MIKTRAAVAWGPGQPLKIEEVDLMPPQKGEVLVRIVATGVCHTDAYTLSGQDSEGKFPCILGHEGGGVVEAIGEGVTSVAVGDHVIPLYTPECGKCKFCLSGKTNLCQAIRATQGQGLMPDGTTRFSKDGQPIYHYMGTSTFSEYTVLP

SEQ ID NO: 82999 - protein, 247 aa, Unknown
  Bacterial polypetide isolated from the Sargasso Sea
MKQAIVTGAGGGLGFSICKSLSENNFSVAAVDLNLTDAEKTSEKLNNTKPYAADVRDEESIISLYEKIDNTPDLIVNNAGIARFGKLFDQKLSDFQDVVQTNLIGSFIVATEGAKRMVKEDKKGSIINITSVHSVNPGPGVGAYPTTKSGLYSLTKLMALEWGEYGIRVNAIAPGFIDSGMSKPFFENPKVRKSRGKAVPLQRLGSADDIANTVLFLASEEASYINANEIVVDGGVIHSVLMHLPRD

SEQ ID NO: 83000 - protein, 158 aa, Unknown
  Bacterial polypetide isolated from the Sargasso Sea
AGIIAIDINEDKFDIAKKLGATDVVNPKKFDKPIQEVIVEMTDGGVDFSFECIGNVHVMRSALECCHKGWGESVIIGVAGAGQEISTRPFQLVTGRVWRGTAFGGVKGRSELPDYVNRYLNGEFELDTFITHTMPLEDINKAFDLMHEGKSIRTVIHF

SEQ ID NO: 83001 - protein, 142 aa, Unknown
  Bacterial polypetide isolated from the Sargasso Sea
MTISFEDKVAIVTGAGGGLGRCHALQFAERGAKVIVNDLGGSVDGSGGSSEAADKVVKEIKAMGGDAISNGSSVTDKAGVKKLVDDAMAAYGRIDILVNNAGVLRDKSFAKVTLDDFEFVVDVHMMGSVYCTKAVWPIMVNR

SEQ ID NO: 83002 - protein, 300 aa, Unknown
  Bacterial polypetide isolated from the Sargasso Sea
MTISFNDKVAIVTGAGGGLGRCHALEFAKRGAKVVVNDLGGSVDGTGGSSEAADKVVDEIKAMGGEAISNGSSVTDKAGVKKLVDDTMAAFGRVDILVNNAGVLRDKSFAKVTLDDFEFVVNVHMMGSVYCTKAVWPIMTEQNYGRIIMTSSSSGVFGNFGQSNYGAAKMGVVGLMNTLKIEGMKYNIKVNSLIPVAATRMTENLGMPDAVFDSLKPETVSPAVMFMASDDAPNGAMISAGAGVFASAEIVHSQGVALKGDELNADMLAEKWAEASNMDGGKALKTGAEHTAHIFKKLAE

SEQ ID NO: 83003 - protein, 247 aa, Unknown
  Bacterial polypetide isolated from the Sargasso Sea
MKQAIVTGAGGGLGFSICKSLSENNFSVAAVDLNLTDSEKTSDKLNNTKPYAADVRDEESINSLYEKIDNTPDLIVNNAGIARFGKLFDQKLSDFQDVVQTNLIGSFIVATEGAKRMVKEDKKGSIINITSINSSNPGPGVGAYSASKLGLYSLTKLMALEWGEYGIRVNAIAPGFTDAGMSKPIYKNPNIRNSRGKAVPLQRLGSAEDIANTVLFLASEEASYINANEIVVDGGVIHSVLMHLPRE

SEQ ID NO: 83004 - protein, 519 aa, Unknown
  Bacterial polypetide isolated from the Sargasso Sea
EKSAEDYFLAGKSLPWWAIGASLIAANISAEQFIGMSGSGFALGLAIASYEWMAAITLLIVGKYFLPIFIEKGLYTIPEFIEKRFSTELKTILAIFWIALFVFVNLTTVLYLGGLALDTVMGSGDGSILINAIIGLALFAAAYSLWGGLAAVAWTDVVQVVVLIFGGLMMTYFALVNLGDGGSAIDGLKYVYETVPERFSMILSKGEIITPNGNDAWFDLPGLAVLIGGMWVANLYYWGFNQYIIQRTLAAKSLEEGQKGIAFAAFLKLLIPIFVVLPGIIVYVMNLDASGALAVSSLDQGFIGENGAIINDNAAPWLIKEIIPVGLKGLILAALAAAIVSSLASMVNSTSTIFTMDIYKSIINKNADDRSLVKVGRIAGLVSLIVAILIAPQLKSLGQVFQYIQEYTGVVSPGILAVFLMGLFYKKASNNGAIWGVISSIPIAMYFKVGPNGWSSLSIFNHDIPFMNQMLITCLATMFIIFIVSKIEGNQDDPKGIVITKKLFSTSPAFNISAFVVCI

SEQ ID NO: 83005 - protein, 309 aa, Unknown
  Bacterial polypetide isolated from the Sargasso Sea
MSIDFKDKVAIVTGAGGGLGREYALELAKRGAKVVVNDLGGSRDGTGTSDAAAKVVEEIEKAGGEAIANGASVTEYDQMEKMIADAKQKWGGVHVLINNAGVLRDKSFAKMEPADFDFVVKVHLLGSANATKAAWETMREQAYGRVLMTASSTGLFGNFGQANYGAAKLGLAGLTKTLYLEGAKYNIKVNTLSPVAGTRMTEDLFPEQAFELFDPVNVVPAALFLVSEDAPTNAIVGAGAGGFHSAWTVMNDAVWLPEDQRTVEGFAENWDKISDFSNLKAPQSGSEQSGAILTAMQKVTGTGPSSARG

SEQ ID NO: 83006 - protein, 348 aa, Unknown
  Bacterial polypetide isolated from the Sargasso Sea
MKAVVFESFGGKLNIQDVKKPMPKSHGVVIRVKATGVCRSDWHGWMGHDDGINLPHVPGHEFAGVVESVGSDVKRFKAGDKVTVPFISACGRCSECSSGNHQVCGNQTQPGFTHWGSFAEYVEIDFGDVNLVHLPEEIDYVTAASLGCRFATSFRAVVDQGKVSAGQWVAVHGCGGVGLSAVMIASSIGANVIAVDISDDALALAQKLGADVVINAKNEKDVSATIKRLSLGGAHVSIDALGNPITCVNSVNSLRKRGKHVQVGLLLAEQSTPPIPMDTVVAHELEVIGSHGMQAYRYEAMFGMIATKKLNPQALIGKIISLQEAPKALTEMDKYSQSGVTVISFDEK

SEQ ID NO: 83007 - protein, 211 aa, Unknown
  Bacterial polypetide isolated from the Sargasso Sea
MSELRFDERVALVTGAGGGLGREHALLLASRGAAVMVNDLGSPTMGGQDHDATPAENVVAEIRALGGIASSNSDSVATRDGAESMVSATIEEFGGLDIVINNAGIIRNRTFLNIGEYEFEPVLDVHVKGCFYVTRPAYEHMKSVGYGRIINTSSGSGLFGSFGQSAYSAAKAAIYGFTRTLAIEGARYGIHVNAIAPGALTRMTGDVLGDD

SEQ ID NO: 83008 - protein, 300 aa, Unknown
  Bacterial polypetide isolated from the Sargasso Sea
MTINFNDKVAIVTGAGGGLGRCHALQLAERGANIVVNDLGGSVDGTGGSSEAAEKVVDEIKSAGGNAIANGSSVTDKAGVKKLVDDTMTAFGRIDILVNNAGVLRDKSFAKVTLDDFEFVVDVHMMGSVYCTKAVWPIMVEQNYGRIIMTSSSSGIFGNFGQSNYGAAKMGVVGLMNTLKIEGMKYNIKVNSLVPVAATRMTENLGMPDAVFDSLRPESVSPAVIFMASEDAPNGAMISAGAGVFASAEIVHSEGVALKGDDLNADVLAEKWSEASDLSNGKALKSGAEHTAHIFKKLSG

SEQ ID NO: 83009 - protein, 211 aa, Unknown
  Bacterial polypetide isolated from the Sargasso Sea
MRAAVLTRRSWIEILEQKIPPTNGDEVRVRIKAGGICGSDIHYFQHYKMGDFPVKEPFILGHEAAGVVETVGENVEDLQSGDLVVVNPSHPCKNCSYCFSGRELLCANMSFLGSSRKFPHIQGMFSQSFTTKRSQCFKLPPNLSPHHAAFAEPLSVAMHAVQNVGVLIGANVLISGAGPIGCLILMVAKLGGANTVTITDIKKEPLRVAEN

SEQ ID NO: 83010 - protein, 170 aa, Unknown
  Bacterial polypetide isolated from the Sargasso Sea
MEVKILMKTRAAVAWEAGKPLEIMEINLDGPHDGEVLIRNVATGVCHTDAYTLSGSDPEGIFPSILGHEGGSVVEEIGSGVSSVSVGDHVIPLYTPECKKCKFCTSGKTNLCQSIRATQGQGLMPDGTSRFSSEGKTVFHYMGTSTFSEYTVIPEIALAKINSEAPLEKV

SEQ ID NO: 83011 - protein, 196 aa, Unknown
  Bacterial polypetide isolated from the Sargasso Sea
MSITFNDRVAIVTGAGGGLGKCHALDLARRGAKVVVNDLGGNVDGSDDGSSSAAEMVVEEIKAAGGEAIANGASVTDAEQVKAMVDEVMDTYGRIDILVNNAGILRDKSFSKVEDQDFRMVLEVHLMGSVNCTKAVWEIMKEQNYGRIVMTSSSSGLYGNFGQTNYGSAKMGVVGLMNTLKLEGAKYNVKCNTLAP

SEQ ID NO: 83012 - protein, 203 aa, Unknown
  Bacterial polypetide isolated from the Sargasso Sea
MAITFKDRVAIVTGAGGGLGRCHALDLAKRGAKVVVNDLGGNVDGSDDGSLSAAQQVVEEIKAGGGEAMANGASVTDRDQVDAMVKEVMDTYGRIDILVNNAGILRDKSFTKVEEEDFRMVLEVHLMGSVNCTKAVWEIMREQNYGRIVMTSSSSGLYGNFGQTNYGSAKMGVVGLMNTLKLEGAKYNIKCNTLAPLAGTRMT

SEQ ID NO: 83013 - protein, 295 aa, Unknown
  Bacterial polypetide isolated from the Sargasso Sea
SIRFDEKVVIVTGAGGGLGREHALELARRGAKVVVNDLGGSVDGNGASDSANEVVDQIKSEGGDAIANGASVTDLDAVKGMVDETTKKWGRVDILVNNAGILRDKSFHKISIEDFNLVMSVHFQGTLNCTHSVFPIMREQNYGRIIFTSSSSGVFGNFGQSNYGSAKMAMVGLMNTLKIEGQKYNIHTNSITPVAYTRMTDGLLPEEVGESLLPEYVTPAVIYLSSDEAPNGAIVSAGAGVYSRIFIHETDGVSLGMSEEMTPENIAASWDSISDMKGAKALQSGPEQSIKILKN

SEQ ID NO: 83014 - protein, 179 aa, Unknown
  Bacterial polypetide isolated from the Sargasso Sea
MIKTRAAVAWGPGQPLKIEEVDLMPPQKGEVLVRIVATGVCHTDAYTLSGQDSEGKFPCILGHEGGGVVEAVGEGVTSVAVGDHVIPLYTPECGKCKFCLSGKTNLCQAIRATQGQGLMPDGTTRFSKDGQPIYHYMGTSTFSEYTVLPEISLAKINKAAPLEKVCLLGCGVTTGMGAV

SEQ ID NO: 83015 - protein, 231 aa, Unknown
  Bacterial polypetide isolated from the Sargasso Sea
MSNEKPQFIKSKAAVAWGPGQPLKIEEVDVMLPKAGEVLVRIVATGVCHTDAFTLSGDDPEGVFPAILGHEGGGIVEQVGEGVTSVQVGDHVIPLYTPECGECKFCLSGKTNLCQKIRATQGKGLMPDGTTRFYKDGQPIFHYMGCSTFSEYTVLPEISLAKVNKTAPLAEICLLGCGVTTGMGAVMNTAKVEEGATVAIFGLGGIGLSAIIGATMAKASRIIAIDINESK

SEQ ID NO: 83016 - protein, 210 aa, Unknown
  Bacterial polypetide isolated from the Sargasso Sea
MKALVYDGPKDICYREVPDPNQRQDHVLIMIKAVGICGSDMHAYLGHDERRPAPLILGHEAAGIICEGARDGERVTINPLVSCGKCSACGTGRENICPNRQIISMPPREGAFAQYVTIPERNLVNVPTEYSLDKAALVEPLAVGWHTAKLAANAIDANMEKKALVIGGGAIGLATALALKAMGTTELTISEFNPLRRQYLLEHIDAKVVE

SEQ ID NO: 83017 - protein, 198 aa, Unknown
  Bacterial polypetide isolated from the Sargasso Sea
MTINFENQVAIVTGAGGGLGRQHALELGRRGARVVVNDLGGDVDGSGGSVSAAELVSQEIIDNGGQAIANGASVSDIDSVQNMIDQTMATWGRIDILVNNAGILRDKTFSKLEVSNWHAVLDVHLNGSMNCSKLVWPIMTQQNYGRIVMTTSTSGLFGNFGQSNYGAAKLGLVGFMNTLRFEGAKYNIHTNSIAPIAA

SEQ ID NO: 83018 - protein, 248 aa, Unknown
  Bacterial polypetide isolated from the Sargasso Sea
MSIRFDGKVAIVTGAGGGLGRCHALDLASRGAKVVVNDLGGSVDGTGGSLSAAEKVVEEIKEAGGEAISNGASVTDMSQVEEMVKQTMETWGRIDILVNNAGILRDKSFSKVTDEDFRLVLEVHLMGTVNCTKAVWDIMKEQSYGRILVTSSSSGVYGNFGQTNYGAAKMGVLGLINTLKLEGAKYNIKCNGLTPVAGTRMTEDLMPPEVLEKLQPDCVSPASNFHGFRRCSYWSCYGCWGWGFCKNN

SEQ ID NO: 83019 - protein, 227 aa, Unknown
  Bacterial polypetide isolated from the Sargasso Sea
MPDGTSRFSINGKPILHYMGTSTFSNHTVVPEIALAKVNKSAPFDKICYIGCGVTTGIGAVINTAKAEAGCKAVVFGLGGIGLNVIQGLRMIGANMIVGVDTNNKKESWGKKFGMTHFVNPNDVGNDLVNHLVEITEGGADYSFECIGNVEVMRQALECAHKGWGESIIIGVAGAGKEISTRPFQLVTGRSWRGTAFGGARGRTDVPKIVDWYLQGKIDIDPMITHT

SEQ ID NO: 83020 - protein, 195 aa, Unknown
  Bacterial polypetide isolated from the Sargasso Sea
MSLALKDGQTHIKSKAAVAWAAGEPLKMEEIDVELPKKGEVLVRIVASGVCHTDAFTLSGDDPEGVFPSVLGHEGGGIVEMVGEGVTSVEVGDHVIPLYTAECGECKFCTSGKTNLCQAVRETQGKGLMPDGTSRFSKDGEPIYHYMGCSTFSEYTVLPEISLAKVNKSAPLEEVCLLGCGVTTGMGAVLNTAKE

SEQ ID NO: 83021 - protein, 287 aa, Unknown
  Bacterial polypetide isolated from the Sargasso Sea
MLYPLYTPECGICKFCTSGKTNLCQAIRSTQGQGLMPDGSSRFSSGGKPVYHYMGTSTFSEYTVLPEISVAKINAKAPLEKVCLLGCGITTGIGAVINTAKVEAGSTVAIFGLGGVGLGAIQGAVMASAERIIAIDVNQDKESFARSLGATDFVNPKDHNVSIQEVIVELTEGGVDYSFECVGNVELMRSALECCHKGWGESVIIGVAGAGQEISTRPFQLVTGRVWRGSAFGGVKGRSQLPSYVEQYMNGELKVDEFITFTMPLEEINRAFELMHEGKSIRSVIHF

SEQ ID NO: 83022 - protein, 139 aa, Unknown
  Bacterial polypetide isolated from the Sargasso Sea
MSITFNDRVAIVTGAGGGLGKCHALDLARRGAKVVVNDLGGNVDGTDDGSSSAAEMVVEEIKAAGGEAIANGASVTDAEQVKAMIDQVMDTYGRIDILVNNAGILRDKSFSKVEDQDFRMVLEVHLMGSVNCTKAVWEI

SEQ ID NO: 83023 - protein, 289 aa, Unknown
  Bacterial polypetide isolated from the Sargasso Sea
TLSGEDPEGIFPSVLGHEGGAVVEEIGPRVSSVSVGDKVIPLYTPECGKCKFCMSGKTNLCQAIRVTQGQGLMPDGTSRFSSGRKQVFHYMGTSTFSEYTVLPEIAVAKINSQAPLEKVCLLGCGITTGIGAVLNTAKVEKGSVVAIFGLGGVGLGAIQGAVMAGAGRIFAIDVNPGKEEFARSLGATDFVNPKDHATSIQEVIVELTDGGVDYSFECVGNVELMRSALESCHKGWGESVIIGVAGAGQEISTRPFQLVTGRVWRGSAFGGVKGRSQLPGYVDQYLSGE

SEQ ID NO: 83024 - protein, 178 aa, Unknown
  Bacterial polypetide isolated from the Sargasso Sea
MPISFKDKVAIVTGAGGGLGRCHALQFAERGAKVIVNDLGGAVDGSGGSSEAADKVVDEIKAMGGDAISNGSSVTDKAGVKKLVDDAMAAYGRIDVLVNNAGVLRDKSFAKVTLDDFEFVVDVHMMGSVYCTKAVWPIMVEQKYGRIVMTSSSSGIFGNFGQSNYGSAKMGVGGIMNT

SEQ ID NO: 83025 - protein, 229 aa, Unknown
  Bacterial polypetide isolated from the Sargasso Sea
MKTRAAIAWEANRPLEIEEVDLEGPKDGEVLVRIVTTSLCHTDVFTLSGEDPEGLFPCILGHEGCGIVEDIGKGVTSVKPGDHVIPLYVPEDPECPYIKSGKTNLCQTIRETQGAGVMPDGTSRFSYKGQQILHYMGTSTFSEYTVLPEISVAKISKEAPLSKASVMGCAVPTGIGAVRNTAKVEAGATVAVFGLGAVGMAVIQGAVLKGASRIIGIDVNPNKFFLPNH

SEQ ID NO: 83026 - protein, 95 aa, Unknown
  Bacterial polypetide isolated from the Sargasso Sea
QGQGLMPDGTSRFSSGGKQVFHYMGTSTFSEYTVLPEIAVAKISPKAPLEKVCLLGCGITTGIGAVLNTAKVEKGSVVAIFGLGGVGLGAIQGAV

SEQ ID NO: 83027 - protein, 276 aa, Unknown
  Bacterial polypetide isolated from the Sargasso Sea
ILGHEAAGIVEEIGVGVSSVSKGDFVLMTPIGPCGICEMCNLERYTLCERGQTFVFGTLPDGSTPFIKDESPVYQGLGVGGFAEYTVLEERNVVRIEKGISLETVCLIGCGVQTGVGSVLNTAKVIPGSTVLVMGLGGVGLSVVQGARIAKAEKIIASDPVEERRSAALKLGATNVVDPSDNNLVNAVMELTMGKGVDYAFDAVGNSELITLGLTVSKAGGSTVIVGAPPPDEELKFPSSLHLMMSEKRLLGSLLGSCNAQVDIPRLIDYWQSGQL

SEQ ID NO: 83028 - protein, 254 aa, Unknown
  Bacterial polypetide isolated from the Sargasso Sea
MTIRYDDKVALVTGAGGGLGRSHAIELAKRGAKVVVNDLGGSVSGEGANSQASLDVVAEIEALGGEAMAHGANVADLEQVLDMVAQTMGRWGRLDILVNNAGILRDKSFSKGSVEDFRLVTDVHLMGSVHCTKACWDIMKDQEYGRIVMTSSSSGLYGNFGQTNYGASKMGMIGMMNTLAQEGAKYNVKINALAPTAGTRMTEGLIEEKAFALLTPETVTPAVLYLVSEDAPTRTILAAGAGSFAVAKIVETEG

SEQ ID NO: 83029 - protein, 194 aa, Unknown
  Bacterial polypetide isolated from the Sargasso Sea
MKSRAAVALEAGKPLELVEIDVEGPKAGEVLVKMAATSVCHTDAYTLSGADPEGNFPAVLGHEGAGVVQEVGEGVTSLKPGDHVIPLYTAECGKCKFCLSGKTNLCGSVRATQGKGVMPDGTSRFSLDGKMLHHYMGTSTFSEYTVLPEVSLAVVSKEAPMDKICLLGCGVTTGIGAVLNTAKVEPGATVAVFG

SEQ ID NO: 83030 - protein, 98 aa, Unknown
  Bacterial polypetide isolated from the Sargasso Sea
CNFRKHRATQGQGLMPDGTSRFSSGGKQVFHYMGTSTFSEYTVLPEIAVAKISPKAPLEKVCLLGCGITTGIGAVLNTAKVEKGSVVAIFGLGGVGLG

SEQ ID NO: 83031 - protein, 99 aa, Unknown
  Bacterial polypetide isolated from the Sargasso Sea
MRQQYSKPRQCVGSKTIPKVKACGVCHTDLHVIKHEVPFPQPAVLGHEVDRLSASRANLFDLDLKEEMKRFLSIYRRHLVVFLPQPGKQKNCVCACVKI

SEQ ID NO: 83032 - protein, 302 aa, Unknown
  Bacterial polypetide isolated from the Sargasso Sea
MGIDFQGRVAIVTGAGGGLGRQHALALAQRGAKVLVNDLGGAVDGSGGTVTAAQAVVDEIRAAGGEALANGASVTDFAAVEAMVQQAIDAWGRVDILVNNAGILRDKSFAKMDMADFRLVVDVHLMGAANCCKAVWPHMVAQQYGRIVMTTSSTGLYGNFGQANYGAAKLAQVGLMQTLAIEGAKYNIHVNALAPTAATRMTEGLMPQEVLDALKPEAVVPAMLVLAHESAPSRTILCAGAGTFEAAHITLTQGIHLGIGADVPEQLAARLAEVTERAGEQVPQSGAAQGTNEVGKALAARA

SEQ ID NO: 83033 - protein, 203 aa, Unknown
  Bacterial polypetide isolated from the Sargasso Sea
MSITFNDRVAIVTGAGGGLGKCHALDLARRGAKVVVNDLGGNVDGSDDGSSTAAEMVVEEIKAAGGEAIANGASVTDADQVKAMVDQTMDAYGRIDILVNNAGILRDKSFSKVEDQDFRMVLEVHLMGSVNCTKAVWEIMKEQNYGRIVMTSSSSGLYGNFGQTNYGSAKMGVVGLMNTLKLEGAKYNVKCNTFGAISGNKND

SEQ ID NO: 83034 - protein, 345 aa, Unknown
  Bacterial polypetide isolated from the Sargasso Sea
MRAAVLTGKSSIEILEQKTPGIGEDDVRVRIKAGGICGSDLHYFYHYRMGDFPVREPFILGHEAAGVIEAVGTNVKRLQNGDLVVINPSHPCRHCSYCFTGRQLLCADMRFLGSSRKFPHIQGMFSQTFTTNQSQCYKLPSNFDVHHAAFAEPLSVAMHAVQNAGALIGANVLISGSGPIGCLILMAARLAGANTITITDIKKEPLRVAEDIGASRALDISQSVKQIPLTDDPRGSFDVAFEASGNQAAVLLAIKNLKPGGTFVQVGTFKNTDISIPSDLIMTKELTLKSSFRFDKEFSWATEYLATQRVNVQPLLSHIFPMEDANEAFQIAQDRNNAMKVHLSF

SEQ ID NO: 83035 - protein, 307 aa, Unknown
  Bacterial polypetide isolated from the Sargasso Sea
MKTRAAIAWEPNRPLEIEEIDLDGPKAGEVLVRIVTTSLCHTDVFTLSGEDPEGLFPCILGHEGCGVVEEVGQGVTSVKPGDHVIPLYVPEDPNCPYIKSGKTNLCQTIRATQGAGVMPDGSSRFSYKGKEILHYMGTSTFSEYTVLPEISVAKISKEAPLSKASVMGCAVPTGIGAVRNTAKVEAGATVAVFGLGAVGMAVIQGAVLKGASRIIGIDVNINKFEIAKALGATECINPKDHSSPIHEVLIEMTNGGLDYTFEAVGNVELMRSALESCHKGWGECTVIGVAGAGQEISTRPFQWSRAV

SEQ ID NO: 83036 - protein, 301 aa, Unknown
  Bacterial polypetide isolated from the Sargasso Sea
MSIRFDERVVIVTGAGGGLGREHALEFARRGAKVVVNDLGGSVDGNGASDSANEVVEQIKSEGGDAIANGASVTDLEAVKGMVDEAMKKWGRVDVLVNNAGILRDKSFHKISIEDFNLVMSVHFQGTLNCTHTVFPIMREQNYGRIIFTSSSSGVFGNFGQSNYGSAKMAMVGLMNTLKIEGQKYNIHTNSITPVAYTRMTDGLLPEEVGESLQPEYVTPAVIYLSGDEAPNGAIVSAGAGVYSRIFIHETDGVSLGMGEEMTPENIAASWDSISDMKGAKALQSGPEQSIKIFEKLNQKD

SEQ ID NO: 83037 - protein, 304 aa, Unknown
  Bacterial polypetide isolated from the Sargasso Sea
MSITFNDRVAIVTGAGGGLGRCHALDLAKRGAKVVVNDLGGNVDGSDDGSVSAAEAVVEEIKAAGGEAMANGASVTDKDQVNAMVEEVMSKYGQIDILVNNAGILRDKSFSKVEDEDFRMVLEVHLMGSVNCTKAVWEIMKEQNYGRIVMTSSSSGLYGNFGQTNYGAAKMGVVGLMNTLKLEGAKYNVKCNTLAPLAGTRMTESLMPGEVIEQIKPDYVTPAVTYMVSEDAPTGVIIAAGAGVFTRVMVHETKGVYLGTGEDMTAENIEANWDQISDMTDATLCYQGGDQSMKVFSLIQESEK

SEQ ID NO: 83038 - protein, 301 aa, Unknown
  Bacterial polypetide isolated from the Sargasso Sea
MSIRFDEKVVIVTGAGGGLGREHAIEFARRGAKVVVNDLGGSVDGNGASNSANEVVEQIKSEGGDAIANGASVTDLDAVKAMVDETMKKWGRVDVLVNNAGILRDKSFHKISIEDFNLVMSVHFQGTLNCTHTVFPIMREQNYGRIIFTSSSSGVFGNFGQSNYGSAKMAMVGLMNTLKIEGQKYNIHTNSITPVAYTRMTDGLLPEEVGENLQPEYVTPAVIYLSGDEAPNGAIVSAGAGVYSRIFIHETDGVSLGMGEEMTPENIAASWDSISDMKDAKALQSGPEQSIKIFEKLNQKD

SEQ ID NO: 83039 - protein, 304 aa, Unknown
  Bacterial polypetide isolated from the Sargasso Sea
MSITFNDQVAIVTGAGGGLGRCHALDLAKRGAKVVVNDLGGNVDGSDDGSLSAAEMVVEEIKAAGGEAMANGASVTDADQVKAMVDEVMEKYGRIDILVNNAGILRDKSFSKVEDQDFRMVVEVHLMGSVNCTKAVWEIMKEQNYGRIVMTSSSSGLYGNFGQTNYGSAKMGVVGLMNTLKLEGAKYNVKCNTLAPLAGTRMTESLMPGEVIEQIKPEYVTPAVTYMVSEDAPTGVIIAAGAGVFTRVMIHETKGVYLGTGDDMTAENIEANWEQISDMTDATLCYQGGDQSMKAFTLIQESKK

SEQ ID NO: 83040 - protein, 134 aa, Unknown
  Bacterial polypetide isolated from the Sargasso Sea
MKTTAAVLYEVNQPLVVEQLDIDEPKNGEVRVKIASAGVCHSDYHCMKGEWTVPLPMVLGHEAAGIVESIGPGVTNVVPGDHVILNFRPNCGWCKFCTVGRPVLCNGADTDRWMMFDGTARLHKNGSDVFHFAR

SEQ ID NO: 83041 - protein, 284 aa, Unknown
  Bacterial polypetide isolated from the Sargasso Sea
MKALVYDGPKAISYREVPDPNQRQDHFLIMIKAVGICGSDMHAYLGHDERRPAPLILGHEAAGIICEGARDGERVTINPLVSCGKCSACGSGRENICPDRQIISMPPREGAFAQYVTIPERNLVNVPTKYSLDKAALVEPLAVGWHTAKLATNAIDANMEKKALVIGGGAIGLATALALKAMGISELTISECNPLRRQYLLEHIDAKVVEKTESSFSIVIDAVGFGSTRAVASQLVSPGGVIAHVGLGDNTNGLDVRRITLQEITFIGTYTYTAQDFKDTAEAL

SEQ ID NO: 83042 - protein, 292 aa, Unknown
  Bacterial polypetide isolated from the Sargasso Sea
MGICNGRTVIITGAGGGLGREYALAFAAEGAAVVVNDIRHDAAQAVVDEIAQRGGRALANADDITRVDTAQRIVDAAHAAFGDIHVLVNNAGICRDKMFTSMTETDWDDVMRVHLRGHFCLSNVLARVWRDAAKAGHAVDARIVNTSSGAGLQGSIGQSNYGAAKAGIAALTLMQAAELQRYGVRVNALAPAARTSMTEGVFADMMKKPEDGGFDYFDPANVAPLVVWLGSALSADVTGQVFEVAGGMIAVAEGWRTGPSVDRGARWAAAEVGPAVAQLLAAARPAQRVYGS

SEQ ID NO: 83043 - protein, 259 aa, Unknown
  Bacterial polypetide isolated from the Sargasso Sea
PTQGKGLMPDGTTRFSKDGQPIYHYMGTSTFSEYTVLPEISIAKVDPAAPLEEVCLLGCGVTTGIGAVMNTAKVKEGESVAIFGLGGIGLSAIIGARLAKAGRIIAIDINESKFELARKLGATDCINPNTFDKPIQEVIVEMTDGGVDFSFECIGNVKVMRAALECCHKGWGESVIIGVAGAGQEISTRPFQLVTGRVWRGSAFGGVRGRSELPSYVQRYMQGEFKLDDFITHTMPLEQINEAFDLMHEGKSIRTVIHY

SEQ ID NO: 83044 - protein, 167 aa, Unknown
  Bacterial polypetide isolated from the Sargasso Sea
MTQTMKAAVVHAFGEPLRLEEVKVPMPGPGQILVKIAASGVCHTDLHAAEGDWPVKPALPFIPGHEGVGHVAAVGAGVKRVKEGDRVGVPWLYTACGCCEHCLTGWETLCEGQQNTGYSVNGAYAEYVLADPNYVGILPKNVEFDEIAPILCAGVTVYKGLKVTEAR

SEQ ID NO: 83045 - protein, 251 aa, Unknown
  Bacterial polypetide isolated from the Sargasso Sea
MQVKILMKTRAAVAWEAGKPLEIMEINLEGPHDGEVLIRNVATGVCHTDAYTLSGSDPEGIFPSILGHEGGSVVEEIGSGVSSVSVGDHVIPLYTPECKKCKFCTSGKTNLCQSIRATQGQGLMPDGTSRFSSEGKTVFHYMGTSTFSEYTVIPEIALAKINSEAPLEKVCLLGCGITTGIGAVINTAKVEAGSVVAIFGLGGVGLGAIQGAVMAGASRIVAIDVNEEKEEFARSLGATDFINPKDHDSLI

SEQ ID NO: 83046 - protein, 263 aa, Unknown
  Bacterial polypetide isolated from the Sargasso Sea
MTSFKDSLQEGQTHIKSKAAVAWGPGEPLKMEEVDVELPKKGEVLVRIVATGVCHTDAFTLSGDDPEGVFPSILGHEGGGIVEMVGEGVTSVEVGDHVIPLYTAECGECKFCKSGKTNLCQAVRETQGKGLMPDGTSRFSKNGEPIYHYMGCSTFSEYTVLPEISLAKVNKNAPLDEVCLLGCGVTTGMGAVLKTAKVQEGDTVAIFGLGGIGLSAIIGARMAGAGRIIGIDINESKFDLAKQLGATDLVNPKNFDKPIQGSD

SEQ ID NO: 83047 - protein, 291 aa, Unknown
  Bacterial polypetide isolated from the Sargasso Sea
MRAALHTEIGKPLSVVNDVEFISPKKGQVLIRTEYCGICHSDVSVMDSLDLTPMILGHEAAGVVEEIGDGVRSVAKGDFVLMTPIGPCGNCEMCTLERHTLCERGQTFVFGTLPDGSTPFTKDKSPVYQGLGVGGFAEYTVLEERNIVRIEKGIPLETVCLIGCGVQTGVGSVLNTAKVTPGSSVLVMGLGGVGLSVVQGARIAKAERIIASDPVQERRAAALKLGATEIIDPIDNDLINAVMELTLGKGVDYAFDAVGNSELITLGLTVSKPGGSTVIVGAPPPDEELKF

SEQ ID NO: 83048 - protein, 176 aa, Unknown
  Bacterial polypetide isolated from the Sargasso Sea
MKTPAAVAFEAGKPLEICDVDLEGPKEGEVLVELKATGVCHTDAFTLSGDDPEGVFPSILGHEGAGTVVEVGPGVTSLKPDDHVIPLYTAECGECEYCLHPKTNLCQAVRETQGQGLMPDGTSRFSINGKPIMHYMGCSTFSKYSVIPEISLAKVREDAPFDKICYIGCGVTTGIG

SEQ ID NO: 83049 - protein, 281 aa, Unknown
  Bacterial polypetide isolated from the Sargasso Sea
VTGAGGGLGKSHALEFARRGAKVVVNDLGGSVDGSGGASDAANAVVEEIKAEGGEAIANGASVADQSGVQNMIDEVMSKWGRIDVLVNNAGILRDKSFHKINLEEFNAVMDVHFQGSVYTSHAVYPIMREQNFGRIIFTTSSGGLSGNFGQANYGAAKMAMIGLMNCLKIEGQKYNVHSSAVAPVALSRMTENLFPEGIGERFLPEYVTPAVIYLASDDAPNGAIIGAGAGVFTQFRIFETMGLALGTGDDMTPENIAAGWSSVEDMDDARELFSGPEQTI

SEQ ID NO: 83050 - protein, 280 aa, Unknown
  Bacterial polypetide isolated from the Sargasso Sea
MIKSRAAVAFEAKKPLEIVEVDVAMPKAGEVLLRVVASGVCHTDAYTLSGADPEGIFPSILGHEGGAVVEAIGEGVTSVAVGDHVIPLYTPECGKCKFCLSGKTNLCQAIRATQGKGLMPDGTTRFSYKGQPIFHYMGTSTFSEYTVLPEISVAKIPKEAPLEKVCLLGCGVTTGIGAVINTAKVKPGDTVAVFGLGGIGLSAIIGAVKAKAGRIIAIDINPAKFEIAKQLGATDCINPKDYDRPIQDVIVDLTDGGVDFSFECIGNVQLMRAALECCHK

SEQ ID NO: 83051 - protein, 369 aa, Unknown
  Bacterial polypetide isolated from the Sargasso Sea
MKTRAAVAWEAGKPLEVMEIDLEGPKEGEVLIRNVATGVCHTDAFTLSGEDPEGIFPSILGHEGGAVVEEIGPGVSSVSVGDQVIPLYTPECGKCKFCTSGKTNLCQAIRATQGQGLMPDGTSRFSSGGKQVFHYMGTSTFSEYTVLPEIAVAKISSQAPLEKVCLLGCGITTGIGAVQNTAKVEKGSVVAIFGLGGVGLGAIQGAVMAGAERIVAIDVNPDKEEFARSLGATDFVNPKDHDASIQEVVVELTDGGVDYSFECVGNVELMRSALECCHKGWGESVIIGVAGAGQEITTRPFQLVTGRVWRGSAFGGVKGRSQLPGYVDQYLSGELKVDEFITYTMPLEEINNAFDLMHEGKSIRSVIHF

SEQ ID NO: 83052 - protein, 375 aa, Unknown
  Bacterial polypetide isolated from the Sargasso Sea
MAQVQSIKCKAAIAWGPGQPLSIEEVEVMPPQAGEVRVRIVATGVCHTDAFTLSGEDPEGVFPCILGHEGGGIVESVGEGVTSVKVGDHVIPLYTPECGECKFCKSGKTNLCQKIRATQGKGLMPDGTTRFSKDGQPIYHYMGTSTFSEYTVLPEISIAKVDPAAPLEEVCLLGCGVTTGIGAVMNTAKVKEGESVAIFGLGGIGLSAVIGARLAKAGRIIAIDINESKFELARKLGATDCINPNDYDKPIQEVIVELTDGGVDFSFECIGNVKVMRAALECCHKGWGESVIIGVAGAGQEISTRPFQLVTGRVWRGSAFGGVRGRSELPSYVQRYMQGEFKLDDFITHTMGLEQINEAFDLMHEGKSIRSVIHY

SEQ ID NO: 83053 - protein, 379 aa, Unknown
  Bacterial polypetide isolated from the Sargasso Sea
MSNEKPQFIKSKAAVAWGPGQPLKIEEVDVMLPKAGEVLVRIVATGVCHTDAFTLSGDDPEGVFPAILGHEGGGIVEQVGEGVTSVQVGDHVIPLYTPECGECKFCLSGKTNLCQKIRATQGKGLMPDGTTRFYKDGQPIFHYMGCSTFSEYTVLPEISLAKVNKTAPLEEICLLGCGVTTGMGAVMNTAKVEEGATVAIFGLGGIGLSAVIGATMAKASRIIAIDINESKFELARKLGATDCINPKNFDKPIQEVIVEMTDGGVDYSFECIGNVNVMRSALECCHKGWGESVIIGVAGAGQEISTRPFQLVTGRVWRGSAFGGVKGRSQLPKIVEQYLAGEFKLDDFITHTMGLEQVNEAFDLMHEGKSIRSVIHFDK

SEQ ID NO: 83054 - protein, 372 aa, Unknown
  Bacterial polypetide isolated from the Sargasso Sea
MKMIKTRAAVAWGPGQPLKIEEVDLMPPQKGEVLVRIVATGVCHTDAYTLSGQDSEGKFPCILGHEGGGVVEAIGEGVTSVAVGDHVIPLYTPECGKCKFCLSGKTNLCQAIRATQGQGLMPDGTTRFSKDGQPIYHYMGTSTFSEYTVLPEISLAKINKAAPLEKVCLLGCGVTTGMGAVMNTAKVKEGDTVAVFGLGGIGLSAIIGAVMAKASRIIAIDINESKFDIARQLGATDVINPKNFDKPIQDVIVEMTDGGVDFSFECIGNVNVMRSALECCHKGWGESVIIGVAPAGAEISTRPFQLVTGRVWRGTAFGGVKGRSELPDYVERYLKGEFELDTFITHTMPLEQINEAFDLMHEGKSIRTVIHF

SEQ ID NO: 83055 - protein, 379 aa, Unknown
  Bacterial polypetide isolated from the Sargasso Sea
MSNEKPQFIKSKAAVAWGPGQPLKIEEVDVMLPKAGEVLVRIVATGVCHTDAFTLSGDDPEGVFPAILGHEGGGIVEQVGEGVTSVQVGDHVIPLYTPECGECKFCLSGKTNLCQKIRATQGKGLMPDGTTRFYKDGQPIFHYMGCSTFSEYTVLPEISLAKVNKTAPLAEICLLGCGVTTGMGAVMNTAKVEEGATVAIFGLGGIGLSAIIGATMAKASRIIAIDINESKFELARKLGATDCINPKHFDKPIQEVIVEMTDGGVDYSFECIGNVNVMRSALECCHKGWGESVIIGVAGAGQEISTRPFQLVTGRVWRGSAFGGVKGRSQLPKIVEQYLAGEFKLDDFITHTMGLEQVNEAFDLMHEGKSIRSVIHFDK

SEQ ID NO: 83056 - protein, 309 aa, Unknown
  Bacterial polypetide isolated from the Sargasso Sea
EGGGIVKMVGEGVTSVEVGDHVIPLYTAECGECKFCKSGKTNLCQAVRETQGKGLMPDGTSRFSKDGEPIYHYMGCSTFSEYTVLPEISLAKVNKTAPLEEVCLLGCGVTTGMGAVLKTAKVQEGDTVAIFGLGGIGLSAIIGARMAGAGRIIGIDINESKFDLAKQLGATDVVNPQNFDKPIQEVIVEMTDGGVDYSFECIGNVNVMRSALECCHKGWGESVIIGVAGAGQEISTRPFQLVTGRVWRGSAFGGVKGRSELPGIVEQYLNGDFGLQEFITHTMGLGDINNAFDLMHKGESIRSVVHMDK

SEQ ID NO: 83057 - protein, 371 aa, Unknown
  Bacterial polypetide isolated from the Sargasso Sea
MKSRAAVAFKAGEPLQIVEIDVAPPKKGEVLIKITDTGVCHTDAFTLSGDDPEGLFPVVLGHEGAGIVVEVGEGVTSVKPGDHVIPLYTAECGECLFCKSGKTNLCVSVRATQGKGVMPDGTTRFSYNGQPIYHYMGCSTFSEYTVVAEVSLAKVNPNANPEQVCLLGCGVTTGLGAVKNTAKVQEGDTVAVFGLGGIGLAVIQGAKLAKAGRIIAIDTNPSKFDLARTFGATDCVNPKDFDKPIQQVIVEMTTWGVDHSFECIGNVNVMRAALECAHRGWGQSVIIGVAGAGQEISTRPFQLVTGRKWLGTAFGGVKGRSELPGMVEDAMAGKIQLAPFVTHTMGLKDINEAFDLMHEGKSIRSVVKYAA

SEQ ID NO: 83058 - protein, 322 aa, Unknown
  Bacterial polypetide isolated from the Sargasso Sea
MAHQVKGVVADNKGEPVSIKTIEVPNPGPGEVLIDVKACGVCHTDLHYREGAINDDFPFLLGHEAAGFVEEVGEGVDDLNLGDFVILNWRAVCGHCRSCRRGRPWNCFATHNATQKMKLDGKELSPALGIGAFAEKTLVAAGQATKVNPEAKPEVAGLIGCGVMAGLGAAMNTGQVSRGDSVAVFGCGGVGDAAIEGSRLAGAHTIIAVDIDPTKLEWAKKFGATHVIDSSKVDPVDAIREITDGNGVDVAIEAIGLPLTYEQAFYSRDLAGTVVLVGVPNPEMKIELPMIEIFGRGGTLKSSWYGDCLPSRDFPMLIDLYL

SEQ ID NO: 83059 - protein, 342 aa, Unknown
  Bacterial polypetide isolated from the Sargasso Sea
MTQTMKAAVVHAFGEPLRIEEVPVPTPGPGQILVNIKASGVCHTDLHAADGDWPVKPTLPFIPGHEGVGIVAAVGAGVTHVREGDRVGVPWLYTACGHCEYCHTGWETLCHGQQNTGYSVNGSYAEYVLADPDYVGHLPAQVAFDEIAPILCAGVTVYKGIRVTDTRPGQWLAISGIGGLGHVAVQYARAMGLHVAAIDISPDKLALARQLGAELTIDASTDDPAKVIQKEIGGAHGVLVTAVSRSAFAQALGMVRRGGTVALNGLPPGDFPLPIFSTVLNGITVRGSIVGTRRDLQESLDFAADGLVRAHIHRDRLGNINDVFAKLREGKVDGRIVLTDMH

SEQ ID NO: 83060 - protein, 343 aa, Unknown
  Bacterial polypetide isolated from the Sargasso Sea
DGEVLIRNVATGVCHTDAYTLSGSDPEGIFPSILGHEGGSVVEEIGSGVSSVSVGDHVIPLYTPECKKCKFCTSGKTNLCQSIRATQGQGLMPDGTSRFSSEGKTVFHYMGTSTFSEYTVIPEIALAKINSEAPLEKVCLLGCGITTGIGAVINTAKVEAGSVVAIFGLGGVGLGAIQGAVMAGASRIVAIDVNKEKEEFARSLGATDFINPKDHDSLIQEVVVDLTDGGVDYSFECVGNVDLMRSALECCHKGWGESVIIGVAGSGQEISTRPFQLVTGRVWKGSAFGGVKGRSQLPGYVEKYLRGELKVDEFITYTMPLEDINQAFDLMHEGKSIRTVIHF

SEQ ID NO: 83061 - protein, 105 aa, Unknown
  Bacterial polypetide isolated from the Sargasso Sea
IGNTGNPGQANYAASKGGMIAMYKSLALEVAMRNINVNIISPGFISTPMTDKLNQDQQNKIMEKIPSKKFGVPSDIANIVSFLISDDSNYINGQTFHVNGGMLML

SEQ ID NO: 83062 - protein, 157 aa, Unknown
  Bacterial polypetide isolated from the Sargasso Sea
MNGKIALVTGGSRGIGKAIAHRLARKGCDTLLVAASETNLKAAAEEVRAAGRRVKTCATDLRDRAGCEKAAQALDQSFGCLDILINCAGATKGGLFLEQSDDVWQDGFALKFFGAVRMSRLLWPKLKERQGTVVNIIGGFSRTPDPDFMIGGAVNAA

SEQ ID NO: 83063 - protein, 208 aa, Unknown
  Bacterial polypetide isolated from the Sargasso Sea
GTNEEKLTKIKDEFKDIQIEKFNLAEHSKIESFIDLANDKLGGLDILINNAGINSDSLTIRLTEENWKKVLDINLTSTFFMCKFAIKKMIKNKSGKIINITSIVGHTGNFGQTNYSASKAGIVAFSKSLALEHAKKNININCVSPGFIKTEMTDKIPEEYKTKLISRIPAGDLGTGEDVSNCVAFLASDMANYINGETIHVNGGMYMA

SEQ ID NO: 83064 - protein, 209 aa, Unknown
  Bacterial polypetide isolated from the Sargasso Sea
MKDLANKNIIITGSSKGIGKNLAINFFNNNSNIFLISRNIKKLNEIKKDLNSKNSHNQIIKCFEGDIASKSQISEIFKEIHSNHNSIDVLINNAGITKDNLIIRMKDEEWDDVINTNLTGTFNCCKIVSKYMVKQRSGKIINISSIIAQIGNPGQSNYSASKAGIIGLTKSLAKELAPKNINVNAINPGYITSDMTDILSENKKNDFLT

SEQ ID NO: 83065 - protein, 86 aa, Unknown
  Bacterial polypetide isolated from the Sargasso Sea
WVFQESLAKELGSRNITSNVVAPGFIETDMTTFLSDDEKIEVSKNIPMKRFGTVEEVAKCILFLASDKANYITGQIISVDGGLFMY

SEQ ID NO: 83066 - protein, 63 aa, Unknown
  Bacterial polypetide isolated from the Sargasso Sea
GFIKTAMTEKLDDKYKDAIISKIPSARLGEPDDIANAVLFLCSNQSSYINGETLHVNGGMYMA

SEQ ID NO: 83067 - protein, 261 aa, Unknown
  Bacterial polypetide isolated from the Sargasso Sea
GRANTLIDWRESLVVASKRDSSDPELTFDDPIWCVDQSAYYVLHAAGVVQDSLLPNQTVRTILETIAAKRIRRASQIKRVNGILKCSSIASMTGNPGQANYAAANAMLDAESRNRRRVGAPETSVQWGGWADIGMAARDVLIVRRLERIGAGALDPRTGVEIIRAAFILPIRRDLAVSPFNWQRISKALPAFEVFKDVVRAHSRNQHQTASASTPKLSKSSSQRTVQEVQSTVLSIIHQLIGRDIPVNAPLMEAGLDSHAA

SEQ ID NO: 83068 - protein, 245 aa, Unknown
  Bacterial polypetide isolated from the Sargasso Sea
MISLKNKKAVITGATGGIGYSILEKFHSAGATVLGSGTNEEKLSKLKSDFNGMILKKFDISKHDEIEKFVETVCNELKGCPDILINNAGVTKDNLSLRMSQAEWQQVIDINLTSTFLLCKFFLKKMIKNKSGKIINITSVVGHTGNVGQANYAASKSGIIGMSKSLALEYAKKNININCISPGFIKTNMTEKIDPKFKELILAKIPSNRLGEPSDVANVAAFLSSEMSNYITGETIHVNGGMYLG

SEQ ID NO: 83069 - protein, 156 aa, Unknown
  Bacterial polypetide isolated from the Sargasso Sea
INMDNLSLRMKDEEWKKVIDVNLGSTFLLCKHSIKKMLKNKYGRIVNITSIVGHTGNIGQSNYAASKAGIIGMTKSLAIEYAKKNITLNCVSPGFIQTTMTEKIVENIKAALISKIPMSKLGTGEDVANTVAFLSSDAASYITGETIHVNGGMYMA

SEQ ID NO: 83070 - protein, 298 aa, Unknown
  Bacterial polypetide isolated from the Sargasso Sea
LLTTQSLFQRGDTPAVASPSWQTVATLLEGGGCASPLLSGTRLALGFAQQLAGRVELPRVLVLTCGALALGNAISDATHGGAWGFARVLRLEHASLRTLSTDVSHSVRLVAARRTLTPTTETEGAWAGNVHMVSRLRACTAANGVATALARGPYAITGGLGGLGLRAAAMLVETGATCVVISSRRGSGGVGEAMDGAAERSATMHVVACDVSEAADAFVLLALAAPMGLLHAAGVLRDTMLRSMAAGGVDAVCAPKALSASHVQAIVTRTPLEAMGLFSSVASTFGNVGQANYAAANA

SEQ ID NO: 83071 - protein, 158 aa, Unknown
  Bacterial polypetide isolated from the Sargasso Sea
AGINLDSLTIRLTEENWKKVLDINLTSTFLMCKYAIKKMIKNKSGKIINITSIVGHTGNFGQTNYSASKAGIVAFSKSLALEYAKKNININCVSPGFIKTEMTDKIPEEYKTKLISRIPAGDLGTGDDVSNCVAFLASDMANYINGETIHVNGGMYMA

SEQ ID NO: 83072 - protein, 171 aa, Unknown
  Bacterial polypetide isolated from the Sargasso Sea
MSNLQKKVLITGATRGIGKSMAETLFSQNYKIIGTATSDEGVEILNSKGFLGIKLDLNNADSLNHISEKLKEEHKDISILINNAGITKDNIVLRMSDDEWGDVINIHLNGMFKLCKTVLKGMIKSRWGRVINITSASASLGNRGQSNYAAAKAGVEAFSKSLSKEVGPRGI

SEQ ID NO: 83073 - protein, 112 aa, Unknown
  Bacterial polypetide isolated from the Sargasso Sea
SIINISSVVGVKGNAGQSNYSASKAGIIGFSKSIALELGSRNIRSNVIAPGFIETDMTDSLSEDVINSWKESIPLKRGGNPSDVANACVFFASDLSSYITGQTLHVDGGMLT

SEQ ID NO: 83074 - protein, 205 aa, Unknown
  Bacterial polypetide isolated from the Sargasso Sea
TEKLDLLKKDFPNINIIKFDISNHSKIEEFVDNTSNQLSGLDILINNAGTNMDNLSLRMKEEEWKKVIDINLTSTFLLSKYAIKKMLKNKFGRIVNITSVVGHTGNLGQSNYAATKAGIIGMTKSLAIEYAKKNITLNCVSPGFIQSRMTDNISESVKAVLTSRIPMARLGNGEDVANSVAFLSSDQASYITGETIHVNGGMYMA

SEQ ID NO: 83075 - protein, 84 aa, Unknown
  Bacterial polypetide isolated from the Sargasso Sea
IGFTKSLSREVGTRGITVNAVAPGFINTAMTQALNESQQQAILSQIPLGRMGEADDIANAVVFLASEEASYITGTVLHVNGGMY

SEQ ID NO: 83076 - protein, 123 aa, Unknown
  Bacterial polypetide isolated from the Sargasso Sea
IKKMIKLKKGKIINITSVVGHLGNIGQANYAASKGGIISMSKSLALEYGKKNITVNCVSPGFIISDMTDKISDEHTELLKSRISLNKFGKPEDVANTIAFLSSELSDYITGETIHVNGGMYFS

SEQ ID NO: 83077 - protein, 96 aa, Unknown
  Bacterial polypetide isolated from the Sargasso Sea
VNYSASKAGMGGFTRALAKEVAARNITVNCIAPGFIETDMTNHFQDEELENILNQIPANKMGNPQQIADLALFLASSKGDYITGQTISVDGGLYMS

SEQ ID NO: 83078 - protein, 254 aa, Unknown
  Bacterial polypetide isolated from the Sargasso Sea
MSKDFNKNKVAVLTGAAKKIGRSTAIKLAEQGFNILIHTGGKSIEEAKDTIKLLEKFKIKSNYVTGDLANLETINIIKDAALKLGTPSVLVNNAGLRIHEHFEKIDYKDWKKVMTVNVDASFLCAQALINYMVKQKWGRVINIGGLSAHIGAKERAHVVTSKAALVGLTKAISMEFIEKGVTCNCVVPGFIEDFDSKETKLSGHWLRHPQTPSLVQNRFGNPDEVAEVIANLCKKEADYINGQTLHVNGGSYTP

SEQ ID NO: 83079 - protein, 255 aa, Unknown
  Bacterial polypetide isolated from the Sargasso Sea
VGRGVSHLMAEEGASVVIFDLGVNVDGSGADQSIAEQVANEIKDGGGNAVACTESVATMQGGENIIQTAIDNFGKLDIVVTCAGILRDRMIFNMSEQEWDDVIAVHLKGTFTIVKHASIIFRQQRSGRIITFSSTSGLYGNSGQANYGAAKDGIAGLTRVAARDLGRYGVTVNSIAPSAATRMTTSVPQESRDLRNSRGIAAGAGLLGEADDVAPFVTWLASDESAHVNGHIFHVTEGLVTLLNEPEPVRTIQKD

SEQ ID NO: 83080 - protein, 109 aa, Unknown
  Bacterial polypetide isolated from the Sargasso Sea
ITSVVGHTGNVGQANYAASKAGLIGMSKSLAQEYGKKNITVNCISPGFIKSEMTDKISENFKKSLQEKISLERFGMPDDVANSVIFLSSNLSDYITGETIHVNGGMYFS

SEQ ID NO: 83081 - protein, 145 aa, Unknown
  Bacterial polypetide isolated from the Sargasso Sea
KKEWDKVIDINLTSTFLLSKYVIKKMLKKKYGKIINITSVVGHTGNLGQANYAASKGGITSMSKSLSLEYAKKNITINCISPGFIDTAMTEKINEEFKNQLKSKIPLDRFGTPQDIANCAAFLCSDLSNYITGETIHVNGGMYFS

SEQ ID NO: 83082 - protein, 103 aa, Unknown
  Bacterial polypetide isolated from the Sargasso Sea
HTGNVGQANYAASKSGIIGMSKSLALEYAKKNININCISPGFIKTNMTEKIDPKFKELILAKIPSNKLGEPADVANVAAFLSSDMSNYITGETIHVNGGMYLG

SEQ ID NO: 83083 - protein, 104 aa, Unknown
  Bacterial polypetide isolated from the Sargasso Sea
PDAGMAPYSAAKLGVVGYTHSIALDLAQFGITANVIAPGLIWHDRLKDNPAYTDEERTKFRSRVPMKREGVPTEIADTVAFLLSDGAGYITGQTLHVNGGLYMT

SEQ ID NO: 83084 - protein, 128 aa, Unknown
  Bacterial polypetide isolated from the Sargasso Sea
FNITRAVLKTMMKQRSGKIISISSVVGFSGNPGQVNYSSTKAALVGFTKSLAREVGSRGITVNAVAPGFIDTAMTQALNETQQEEILRQIPLKRMGMPEDIAHAVDFLASEKADYITGAVLHVNGGMY

SEQ ID NO: 83085 - protein, 166 aa, Unknown
  Bacterial polypetide isolated from the Sargasso Sea
NLDCIINNAGIAQDNLAIRMSLEEWQKVINVNLTSTFLMSKFAIKKMLKNKAGKIVNITSVVGHTGNLGQVNYTASKAGIIAMSKSLAIEYAKKNINVNCISPGFIKTAMTDKIEDKFKEAIISKIPSSRLGEPDDIANAVLFLSSNQSNYINGETLHVNGGMYMA

SEQ ID NO: 83086 - protein, 90 aa, Unknown
  Bacterial polypetide isolated from the Sargasso Sea
KAGIIGMSKSLAIEYAKKNITINCVSPGFITSDMTMNIAEKMKEYLTSRIPMGKLGTGEDVSGCVAFLSSDSASYITGETIHVNGGMYMS

SEQ ID NO: 83087 - protein, 266 aa, Unknown
  Bacterial polypetide isolated from the Sargasso Sea
VSRLRACTAASSATIALAAGTYAITGGLGGLGLRAASLLVEGGAVGVVLSSRSGRMGGRALEVATSAVKRVAACDIGDGADGLALLAFAPPTGVLHAAGVLHDKMLRSMATDDVCAVFEPKALGASHVHAMVACTALEALGLFSSVASTFGSVGQANYAAANAYLDTLAPSRRWRGALGSSLQIAAVSGAGMGAATFDKEQLNAMGAISLDELASCLSIALAPARGATERTLAPLARALLTSTVMPVLSELICHEVERSHAVPSAA

SEQ ID NO: 83088 - protein, 95 aa, Unknown
  Bacterial polypetide isolated from the Sargasso Sea
NYTASKAGIVAMSKSLAIEYAKKNININCISPGFIKTAMTDKLDEKFQEAILSKIPSARLGEPNDIANAVLFLCSNQSSYINGETLHVNGGMYMA

SEQ ID NO: 83089 - protein, 239 aa, Unknown
  Bacterial polypetide isolated from the Sargasso Sea
NKKVLITGATGGIGGSLAKKFLSLNSEVLGTGTNQSKLEKLKSDLKDIKIKKFDISSHSQIEKFIDEVYQELGGLDVLINNAGVNRDNLSLRMKDEEWQKVIDINLTSTFLLSKYALKKMMKNNNGRVINITSIVGHTGNFGQSNYAASKAGIIGMSKSLSVEYAKKNITINCVSPGFIVSDMTNSIPEKIKSILLSKIPMGKMGSGEDVSNCVAFLSSDEASYITGETIHVNGGMYMA

SEQ ID NO: 83090 - protein, 90 aa, Unknown
  Bacterial polypetide isolated from the Sargasso Sea
KAGIIGMSKSLAIEYAKKNITINCVSPGFIQSKMTDNIVESIKAVLTSRIPMSRLGTGEDVSNTVAFLSSDAASYITGETVHVNGGMYMG

SEQ ID NO: 83091 - protein, 112 aa, Unknown
  Bacterial polypetide isolated from the Sargasso Sea
IVNITSVVGHTGNQGQTNYAASKAGIIGMSKGLALEYAKKNITVNCVSPGFIVSDMTMNIAEKVKLYLTSRIPMGKLGTGEDVSNCVAFLSSEHSSYITGETIHVNGGMYMS

SEQ ID NO: 83092 - protein, 247 aa, Unknown
  Bacterial polypetide isolated from the Sargasso Sea
MYSLEGQIAIITGGARGIGKGICEVFCKAGATVALWDVLDEGTQTADQIEKDGGSIFFQKVDITNKSSVEEAVSKIISAHGKIDILINNAGVIRDRSFMKMSEEEWNTVININLTGMFIVTKAVFPIMKEAGYGRIISASSINAFQGAFGQANYSATKAGISGFTRALCKEGGKYGITVNAVAPGFIKSLMSDSMPEEIIKAGIAQIPVGRIGTPEDMGYTYLFLASKEAGFISGITLHANGGAMPM

SEQ ID NO: 83093 - protein, 309 aa, Unknown
  Bacterial polypetide isolated from the Sargasso Sea
AWSLHATAAASGAGAFVLFSSVAALLGGAAQANYAATNACLDALASCRRAVGAVGTSVQWGAWAEVGMAARGAASARMAAMEAASGFGRIGLAHGLAALGTGVGHAAPSVIGMVPVTWSRFLGGDREAPAFLSAFAPVVVEAALAAGEVTAYACGVSLEAVLAIVGRTAGGTVDADAPLMEAGVDSLGAVELRNQLQRAAGEGIALPSTLVFDYPTARQLAVLLQPEQEASVVAASLSSARAAAGEGVAVEGVSALLPAGASSAPMTSRMVACSCDAIVEVPVSRWEVPALPEPIASRARHTGFVVGAQ

SEQ ID NO: 83094 - protein, 100 aa, Unknown
  Bacterial polypetide isolated from the Sargasso Sea
GNRGQSNYSAAKAGVEAFTKSLAREVGKRNITINSIAPGFIETDMTQQSDGVNADELIKDIPLGRFGKPDEIAHLVSFLCSDEASYITGQIVHINGGLYM

SEQ ID NO: 83095 - protein, 57 aa, Unknown
  Bacterial polypetide isolated from the Sargasso Sea
MTENIPEKVKLILTSRIPMGKLGTTEDVSNCVAFLSSEDSSYITGETLHVNGGMYMA

SEQ ID NO: 83096 - protein, 211 aa, Unknown
  Bacterial polypetide isolated from the Sargasso Sea
MINFKNKKIVITGATGGIGRDIVKKFVSLEASVFATGTNTEKLNLLKKDFPKINIIKFDISEHSKIEEFIENVSNQLTGLDILINNAGINKDNLSLRMKDEEWKKVIDINLGSTFLLCKYAIKKMLKNKYGRIVNITSVVGHTGNIGQANYAASKAGIIGMTKSLAIEYAKKNITLNCVSPGFIQSKMTDNIIESVRAVLTSKIPMSRWKR

SEQ ID NO: 83097 - protein, 88 aa, Unknown
  Bacterial polypetide isolated from the Sargasso Sea
GIIAMSKSMAIEYAKKNININCISPGFIKTAMTDKLDNKFKEAIISKIPSARLGEPDDVANAVLFLCSNQSDYINGETLHVNGGMYMA

SEQ ID NO: 83098 - protein, 80 aa, Unknown
  Bacterial polypetide isolated from the Sargasso Sea
MAIEYAKKNININCISPGFIKTAMTDKLDDKFKEAIISKIPSARLGDPNDIANAVVFLCSNQSSYINGETLHVNGGMYMA

SEQ ID NO: 83099 - protein, 117 aa, Unknown
  Bacterial polypetide isolated from the Sargasso Sea
NKKGKIINITSVVGHTGNLGQTNYTAAKAGIVAMSKSLALEYAKKNINVNCISPGFIKTAMTDKIDEKFKEVIISKIPSARLGEPEDVANAVIFLASPQSDYINGETLHVNGGMYMA

SEQ ID NO: 83100 - protein, 196 aa, Unknown
  Bacterial polypetide isolated from the Sargasso Sea
RFSNVNAIKFDISDHFKIEEFIENVSTQITGLDILINNAGTNKDNLSLRMKEEEWKKVIDINLTSTFLLCKYAIKKMLKNKYGRIVNISSVVGHTGNLGQSNYAASKAGIIGMTKSLAIEYAKKNITLNCVSPGFIQSRMTDNIIESVKAVLTSRIPMARLGNGEDVANSVAFLSSDQASYITGETIHVNGGMYMA

SEQ ID NO: 83101 - protein, 65 aa, Unknown
  Bacterial polypetide isolated from the Sargasso Sea
SPGFIKTAMTDKIDEKFKDILLSKIPSAKLGEPEDIAKAVLFLASNLSEYIHGETLHVNGGMYMA

SEQ ID NO: 83102 - protein, 202 aa, Unknown
  Bacterial polypetide isolated from the Sargasso Sea
MINFKNKNILVTGASGGIGKEIVKKFNDLDGNVLATGTNVERLDLLKKEFPKIKVIKFDISEHARIEEFIESVNTQLSGLDILINNAGINMDNLSLRMKNEEWDKVINVNLGSTFLLCKYALKKMLKNKYGRIVNITSIVGHTGNLGQANYAASKSGIIGMTKSLAIEYAKKNITINCVSPGFIQSRMTDKINESVKSVLTS

SEQ ID NO: 83103 - protein, 117 aa, Unknown
  Bacterial polypetide isolated from the Sargasso Sea
NKEGKIINITSVVGHTGNLGQANYAASKAGLIGMSKSMALEYGKKNIKINCISPGFIKSEMTDKISENFKKILQDKISLERFGDPNDVANAVLFLSSGLSDYITGETIHVNGGMYFS

SEQ ID NO: 83104 - protein, 46 aa, Unknown
  Bacterial polypetide isolated from the Sargasso Sea
NLISRIPMEKLGTGEDVSGCVAFLSSDLASYITGETIHVNGGMYMS

SEQ ID NO: 83105 - protein, 119 aa, Unknown
  Bacterial polypetide isolated from the Sargasso Sea
LKNKFGRVVNITSIVGHTGNLGQANYSASKAGIIGMSKSLATEYAKKNITVNCVSPGFIVSDMTMGIAEKVKLFLTSRIPMGKLGTGEDVSNCVAFLSSDSASYVTGETIHVNGGMYMS

SEQ ID NO: 83106 - protein, 277 aa, Unknown
  Bacterial polypetide isolated from the Sargasso Sea
VVRLVARSTDCDGIHVVTGGTGALGLLTGRWLAQRGARSLVLASRSGALQKDTGVKWQAVEASGVTPSLERCDTGEAVHVLRLVARASSLSGVWHAAGVLADAVLPNQDAAGFARVFAPKAYGVWSLHTAGATSAMDAVALFSSVAALFGGAGQANYAAANACLDALATSCRTHGVAAASVQWGAWAEVGMAARGAASERMAAIEAASGFSRIALAQGLGALGTAVQHGSSAVLGMVPVTWSRFLGAGEVPAFLSTFSCKAKSAGMMGTGSASAAWG

SEQ ID NO: 83107 - protein, 249 aa, Unknown
  Bacterial polypetide isolated from the Sargasso Sea
QEILMTSTLEGIRVLITGAGGGMGRSHAVLMAERGADIVVHDIKDDGAEETADMVRAEGREAKIVIADIRDIPAFTSAIQSAGPVDILVNNAGVGGARRSIEEINEPVFNQMFEVHVRGTFFATQTVLPMMKERKNGKIINISSIYAMGGSQLASHYAAAKSAISGFTKSWARELAPWRIKVNAVAPGFIVTDMTEASNPPDKIAEREKLMPLGEFCKPIDISYAVAWLASKEANLVSGQVISPNSGEV

SEQ ID NO: 83108 - protein, 107 aa, Unknown
  Bacterial polypetide isolated from the Sargasso Sea
ISCWSTGNLGQVNYTASKAGIIAMSKSLAIEYAKKNININCISPGFIKTAMTNKLDDKFKEAIISKIPSARLGEPDDIANAVLFLCSNQSNYINGETLHVNGGMYMA

SEQ ID NO: 83109 - protein, 114 aa, Unknown
  Bacterial polypetide isolated from the Sargasso Sea
GRVVFISSVVAHTGNPGQVNYTASKAAISGMVKSLALELSTRNITVNSVAPGFIKSNMTDKLNDDQKNTILERIPMKKLGDSSDIAKAVGFLCSENANYITGQTLHVNGGLALI

SEQ ID NO: 83110 - protein, 262 aa, Unknown
  Bacterial polypetide isolated from the Sargasso Sea
MGGIWHTAGVLADGLFTRQDASNLRRAYGPKAVGAWNLHLAHTSAQLRACIYFSSIAGLVGAAGQANYAAANACLDALSMSLSARGSNASSVDWGPWAEVGMASGSTVNSRMSAVGLGLIDPWQGLAALQAATSTYRPAVVAFWLVRWETMLGSGNGAPTLLLRLAARTIQSPARAVPVTLTALVRRNDTIEIDTVLDLTRRTAGNAVDADAPLMEAGLDSLGAVELRNQLQQMVGEAVLLQSTLIFDYPTTRSLTALLASL

SEQ ID NO: 83111 - protein, 206 aa, Unknown
  Bacterial polypetide isolated from the Sargasso Sea
KIEKLDIIKKNNPNIKVKKFDLSEHSNIENFINSAVSELGGLDILINNAGINVDTLSLRMKDEEWKKVIDINLTSTFLLSKYAIKSMLKNKYGRIINITSIVGHTGNLGQVNYSASKAGIIGMSKSLAIEYAKKNITVNCVSPGFIISDMTTNLPEKVKLFLTSRIPMGKLGTGEDVSNCVAFLSSESASYVTGETIHVNGGMYMS

SEQ ID NO: 83112 - protein, 89 aa, Unknown
  Bacterial polypetide isolated from the Sargasso Sea
SAITGFTKSIAMELAKAQVTCNCVAPGFIQTEMTDSLNESVQSAILDKIPLKRFGTADEVGSAVGFLASEQASYITGSTLHVNGGMHTS

SEQ ID NO: 83113 - protein, 167 aa, Unknown
  Bacterial polypetide isolated from the Sargasso Sea
MINFKNKKILITGATGGIGNELIKKFVSLDGSIVGTGTKAEKLDELKNKYPSVKVKKFDISEHSRIEEFIEDAVLELGGLDILINNAGTNVDNLSLRMQEKEWKKVIDVNLTSTFLLSKYSIKKMLKNKFGRVVNITSVVGHTGNLGQANYAASKAGIIGMSKKFSQ

SEQ ID NO: 83114 - protein, 193 aa, Unknown
  Bacterial polypetide isolated from the Sargasso Sea
MGVLDGKVVLVTGAANGIGKETALLASKEGAKLVINDLGGSVAGGDEGDKNPIEIVAEEIKKDGGEVVTNSDSVTSKKGAEFMIQQALDTYGNLHSIVNPAGILRDKMFHKMDDQDWGAVIDVHLNGSYNICRSAINYFRDKEEGNFVLFTSTTGLIGNIGQANYAAAKLGIAGLSRIIAMENEIKNVRSKYY

SEQ ID NO: 83115 - protein, 76 aa, Unknown
  Bacterial polypetide isolated from the Sargasso Sea
MLIVTTNLFDLNGKIALVTGASRGIGEEIAKLLAEQGAHVIVSSRKLEDCESVAREIGEAGGSAEAYPCHVGRVED

SEQ ID NO: 83116 - protein, 84 aa, Unknown
  Bacterial polypetide isolated from the Sargasso Sea
MSKSLAIEYAKKNINVNCISPGFIKTAMTDKIDEKFKEVIISKIPSARLGEPEDVANAVIFLASPHSDYINGETLHVNGGMYMA

SEQ ID NO: 83117 - protein, 305 aa, Unknown
  Bacterial polypetide isolated from the Sargasso Sea
MATPLLQDKVVIVTGAGRGIGRGIALMAAANGAKVVVNDLGGSEDGSGADSSPADEVVDQIKASGGEAIASYASVTEWDAAHEIVEAAVNYFGRIDCVVNNAGNLRDAIFHKMTEEDFDSVLNVHLKGTFNVSRAAATHFRAQTSGCFVNMTSTSGLIGNFGQANYAAAKLGIVGLSKSMALDMGRFRVRSNCIAPFAWSRLIGTIPTNTDEEKARVAKIQQMTPEKIAPLAIALCSDAAREVSGQIFGVRNNEIFLFSQNRPFRFAHTQEGWTAEAVLDRVIPAFQSDFFPLERSGDIFSWDPI

SEQ ID NO: 83118 - protein, 118 aa, Unknown
  Bacterial polypetide isolated from the Sargasso Sea
KLNFGRIVNITSVVGHSGNVGQANYSASKAGIIGMSKSLAIEYAKKNITVNCVSPGFIVSNMTMGIAEKVKMDLTSRIPMGKLGTGEDVSNCVAFLASETASYVTGETIHVNGGMYMS

SEQ ID NO: 83119 - protein, 137 aa, Unknown
  Bacterial polypetide isolated from the Sargasso Sea
VIDVNLNGVFHITRSVLKTMMKQRSGKIISISSVVGFSGNPGQVNYSSTKAALVGFTKSLAREVGSRGITVNAVAPGFIDTAMTQALNETQQEEILRQIPLKRMGMPEDIAHAVDFLSSEKADYITGTVLHVNGGMY

SEQ ID NO: 83120 - protein, 235 aa, Unknown
  Bacterial polypetide isolated from the Sargasso Sea
MGVLEGKVVLVTGAANGIGKETALLASKEGARLVINDLGGSVAGGDEGDKNPIELVAEEIKKNGGEVVTNSDSVTSKKGTEFMIQQALDTYGSLHSIVNPAGILRDKMFHKMDDQDWDAVIDVHLNGSYNICRAAINYFRDKEEGNFVLFTSTTGLIGNIGQANYAAAKLGIAGLSRIIAMENEIKNVRSNIIAPFAWTRMIATIPIKDEASKERVERMKNAMRADQVAQTVVAL

SEQ ID NO: 83121 - protein, 236 aa, Unknown
  Bacterial polypetide isolated from the Sargasso Sea
MFKDRKLLVTGGTGSIGNSICKYFNSNGCKEIYSTTTNLNKVKSDQDYIQFKELDLNKIEKLNLDELFDFEVDFLVLNAGLNKDNIFLRMSSDDWNSVINVNLNSSFHLLKHFTKKMVKKRFGRVVFISSVVAHTGNPGQVNYTASKAAISGMVKSLALELSTRNITVNSVAPGFIQSNMTDKLNVEQKNSILERIPMKKLGDSSDIAKAVGFLCSENANYITGQTLHVNGGLALI

SEQ ID NO: 83122 - protein, 152 aa, Unknown
  Bacterial polypetide isolated from the Sargasso Sea
MLVSRKDNLTIRMDKKEWDNVININLTSTFLLSKYVIKKMLKNKFGKIINITSVVGHTGNVGQANYAASKGGVSSMSKSLSLEYAKKNITINCIAPGFIDTAMTEKINDDFKNQLKSKIPLDRFGSPQDIANCVAFLSSDLSNYITGETIHI

SEQ ID NO: 83123 - protein, 244 aa, Unknown
  Bacterial polypetide isolated from the Sargasso Sea
MINFNNKKVLITGATGGIGGALVKKFLSLGATVLGTGTKPEKLDLLKKSNSNMKIKKFNILEHSSIEEFIDNVTSELGGLDILINNAGVNVDNLSLRMKEEEWKKVIDINLTSTFLLSKYAIKKMLKNKFGRVINITSIVGHTGNIGQVNYSASKAGIIGLSKSLAIEYAKKNITINCVSPGFIVSDMTTNIAEKMKEVLISRIPMGKLGTGEDVSNCVAFLSSDLASYVTGETIHVNGGMYMS

SEQ ID NO: 83124 - protein, 253 aa, Unknown
  Bacterial polypetide isolated from the Sargasso Sea
MNESLKDKVAIVTGSGRGVGKGVAQLMAQEGAKVVVVDPGVNVDGSGEDQSIAETVVAEIKAAGGSAVACTESVVTMDGGEKIVQTAIDEFGKLDIVVTCAGILRDRMIFNMTEQEWDDVIAVHLKGTFTVVKHASILFRQQRSGRIITFSSQSGLVGNSGQANYGAAKSGIAGFTKVVAKDMGRYGVTANSIAPRATTRMIGAIPDSANEIRARGGVAGLANPDELNNLDPDDIAPFVAYLASDYAHNINGQ

SEQ ID NO: 83125 - protein, 166 aa, Unknown
  Bacterial polypetide isolated from the Sargasso Sea
MINFKNKKILVTGATGGIGREIVKKFISLEGNVLATGTNLERLDLLKKDFPNINVLKFDISDHSKIDEFIDNASTQLSGLDILINNAGVNMDNLSLRMKYEEWKKVIDINLNSTFLLSKFAIKKMLKNKYGRIVNITSVVGHTGNLGQANYAASKSGIIGMTKSLA

SEQ ID NO: 83126 - protein, 306 aa, Unknown
  Bacterial polypetide isolated from the Sargasso Sea
MTDLLKDKVAIVTGSGRGVGKGVAQLMAQEGAKVVVVDPGVNVDGSGEDQSIAETVVAEIKAAGGSAVACTESVATMDGGEKIVQTAINEFGKLDIVVTCAGILRDRMIFNMSEQEWDDVIAVHLKGTFTIVKHASILFRQQRSGNIITFSSTSGLYGNSGQANYGAAKDGIAGLTRVVARDMGRYGVRANAISPSANTRMSGTVPDQARELRAASGITMGSAPALRGEAEDVAPFVTWLASDQSKHVNGRVFHVTGGLVSLLNEPEPVKTISTEDRWTVEEIARVFPSTIGMELYNPAPAPAPSV

SEQ ID NO: 83127 - protein, 254 aa, Unknown
  Bacterial polypetide isolated from the Sargasso Sea
MATNLFDLTGKIALVTGASRGIGEEIAKLLAQQGAHVIVSSRKLDDCQAVADEIVAAGGRAEALACHVGRLEDIAATFEHIRGKHGRLDILVNNAAANPYFGHILDTDLAAYEKTVEVNIRGYFFMSVEAGKLMKANGGGAIVNTASVNALQPGDRQGIYSITKAAVVNMTKAFAKECGPLGIRVNALLPGLTKTKFAGALFADKAIYETWMGKIPLRRHAEPREMAGTVLYLVSDAASYTNGECIVVDGGLTI

SEQ ID NO: 83128 - protein, 142 aa, Unknown
  Bacterial polypetide isolated from the Sargasso Sea
ISGCSKLHLTSGYRLTKRAIKPMMKQRKGRIIFISSVVGTTGQAGQANYAASKAGLVGLARSIAKEFASRNITANVIAPGPVKTDMIDELTEQQRENILAAVPLGRFAEPEEVAAMAAFLASDQAGFITGAIIPVDGGIGMS

SEQ ID NO: 83129 - protein, 226 aa, Unknown
  Bacterial polypetide isolated from the Sargasso Sea
CQSFAENGCNVAFTYNNSKESAENLENELNSLGIKSKAYKSDASNHDDALKLIDDVLSDFEKIDILVNNAGIKKDNLLMRMEKDDFDAVINTNLSSVFNLTKASIKTFLKQRSGSIINISSVVGVKGNAGQSNYSASKAGIIGFSKSVALELGSRNIRSNVIAPGFIETDMTDSLPEDVIKSWKESIPLKRGGNPSDVGNACVFLASDLSSYITGQVLHVDGGMLT

SEQ ID NO: 83130 - protein, 216 aa, Unknown
  Bacterial polypetide isolated from the Sargasso Sea
GANILASGTRTEKLEELKSKYGNIKILKFDISQSDKIEEFVENATKELGGTLDCIVNNAGITQDNLAIRMSLDEWKKVIDVNLTSTFLMSKSAIKKMLKNKSGKIVNITSVVGHTGNLGQTNYTASKAGIIAMSKSLAIEYAKKNININCISPGFIKTAMTDKLDDKFKEAIISKIPSARLGEPDDIANAVLFLCSNQSSYINGETLHVNGGMYMA

SEQ ID NO: 83131 - protein, 245 aa, Unknown
  Bacterial polypetide isolated from the Sargasso Sea
MSDLKENNIILTGATGGIGNSIIKKLYDAGANILATGTKNEKLEELKKKFQNIQILKFDISKIDNLENFIEDATKQLGGKLDCMINNAGITQDNLAIRMSIDEWKKVIDVNLTSTFLLSKFAIKKMLKNKKGKIINITSVVGHTGNLGQANYTASKAGIVAMSKSLAIEYAKKNININCISPGFIKTAMTDKIDEKFQEVIISKIPSARLGEPEDVANAVIFLASSQSDYINGETLHVNGGMYMA

SEQ ID NO: 83132 - protein, 216 aa, Unknown
  Bacterial polypetide isolated from the Sargasso Sea
GSTVIATGTNEKKLKLIQEKYKNLNVMKFDLSDHKNIDKFVEDCSSILSNKIDVLINNAGITHDNLSIKMREDEWKRVIDINLTSTFLISKNVIRKMIRSKTGKIINITSVVGHSGNIGQANYAASKAGIIAMSKSLALEYGKKNITINSVSPGFILSEMTNKISEDHTELLKSRISLNKFGKPEDVANTVIFLSSNLADYITGETIHVNGGMYFS

SEQ ID NO: 83133 - protein, 245 aa, Unknown
  Bacterial polypetide isolated from the Sargasso Sea
MIDLKNLNIILTGATGVIGNSILDKLVSAGANVLATGTNEQKLKEIQDKFKDLKVTRFDMSEHEKIDQFIEDCSKNFSNKIDVLINNAGITKDNLSLRMKEEEWKKVIDINLTSTFLITKSVIKKMLKSKNGKIINVTSVVGHTGNIGQANYAASKAGIVAMSKSLALEYGKKNITVNCVSPGFIVSEMTATISEEHTDLMKSRISLNKFGNPEDVANSIAFLSSNLSDYITGETIHVNGRMYFS

SEQ ID NO: 83134 - protein, 236 aa, Unknown
  Bacterial polypetide isolated from the Sargasso Sea
ILTGATGVIGDSILEKLTSLGSNVLATGTNDEKLKKIQEKYDNIKVLKFDISNHSKIDQFVDECNKMLSNKIDVLINNAGITQDNLSIRMKEEEWKRVIDLNLTSTFLISKNVLKKMLKLKKGKIINITSVVGHTGNIGQANYAASKAGIIAMSKSLALEYGKKNITVNSVSPGFIKSDMTDKITEDHTELLKSKISLNKFGEPKDVANTIVFLSSSLSDYITGETIHVNGGMYFS

SEQ ID NO: 83135 - protein, 184 aa, Unknown
  Bacterial polypetide isolated from the Sargasso Sea
KHEDIEKFIDKSSNELDGNVDILINNAGINQDNLSIRMDIEEWKKVIDINLTSTFLLSKFAIKKMLKNKYGKIVNITSVIGHTGNVGQSNYAASKAAIISMSKSLALEYAKKNITVNCISPGYITTNMTDQINEKWKEIIKSKIPMDKFGLPKDVANTVIFLSSESASYITGQTIHVNGGMYMG

SEQ ID NO: 83136 - protein, 241 aa, Unknown
  Bacterial polypetide isolated from the Sargasso Sea
MGLSGKIALITGGAQGIGRFISEELAGQGVHVILGDINHEGAEKTAAEIKSSGGKASAVRIDVSSATDVKGVFDSILKEYKPVDIVVNNAGITRDGLLVRMKEVDWDLVLNINLKGSFLCSQQAAKQMMKQKSGCIVNIASIVGIMGNFGQSNYSASKAGLIGFTKTLAREVAPRGVRANAVAPGFIDTEMTRVLEDSVRIKLIEQIPLARLGQPEDIARCVSFLVSENASYITGQVINVN

SEQ ID NO: 83137 - protein, 244 aa, Unknown
  Bacterial polypetide isolated from the Sargasso Sea
MNSQYVFVSGASRGIGQSILKLFSSKGFPVIGTATSEEGVNFIDGILSESSGGGFGIQLDLSDKQSIENLFDIVKEKDINPEIIVNNAGMTRDNIFLRMKDTEWDEVIQVHLSSVFSLLKFFSKKMVKNKSGRIINISSTSAAIGNKGQANYAAAKSGLEAFSRSLARELAPRNITVNCVAPGFIETDMIKGMDEDTLKFMSDQIPLGRLGSPEDVADLIYFLSSEEANYITGQTIHINGGLYM

SEQ ID NO: 83138 - protein, 236 aa, Unknown
  Bacterial polypetide isolated from the Sargasso Sea
MIDLKNTNIILTGATGIIGNAILDKLILGGSNILASGTNEEKLKKIKAKYKNVNILRFDISDHKKIDGFIEDCNSILSNKIDILINNAGITQDNLSIRMKEEEWKKVIDINLSSTFLITKNVIKKMLKSKKGKIINITSVVGHSGNIGQANYAASKAGIIAMSKSLALEYGKKNITVNCVSPGFIMSEMTDKISDEHRDLLKSRISLNKFGYPEDVANTIAFLSSNMSDYITGETI

SEQ ID NO: 83139 - protein, 166 aa, Unknown
  Bacterial polypetide isolated from the Sargasso Sea
LEIRKRGIFVLFTSTTGLIGNIGQANYAAAKLGIAGLSRIIAMENEIKNVRSNIIAPFAWTRMIATIPIKDEASKERVERMKNAMRADQVAQTVVALCSPDCKLTGQILSVRGNEVVLFNQPRPIKSLVDKEGWTPKKLLDSAFPAFEAVGQDLGATVTVFPYEPF

SEQ ID NO: 83140 - protein, 168 aa, Unknown
  Bacterial polypetide isolated from the Sargasso Sea
GGNLDGIVNNAGVTQDNLAIRMSLEEWQKVININLTGSFLMCKSAIKKMIKNKSGKIINITSVVGHTGNLGQANYTASKAGIIAMSKSLAIEYSKKNININCISPGFIKTEMTDKLDDKFKETIISKIPSARLGEPDDIANAVLFLCSNQSSYINGETLHVNGGMYMA

SEQ ID NO: 83141 - protein, 117 aa, Unknown
  Bacterial polypetide isolated from the Sargasso Sea
MSNKDSLTGKIALITGASRGIGKEIALELSRLGAEVFINYSSSDEKAEEVVNLIKNSGGKAHKLKFDVSKEDSVSSAFEEIIKISGTIDILINNAGITRDGLLMRMKSEQWDDVLNT

SEQ ID NO: 83142 - protein, 208 aa, Unknown
  Bacterial polypetide isolated from the Sargasso Sea
GTKTEKLDLLKKEFPDINTLKFDISDHSKIEEFIENAASKLDGIDVIINNAGINLDNLSLRMKEDEWKKVIDINLSSTFLLCKFGIKKMLKNKYGRIVNVTSIVGHTGNLGQANYAASKAGIIGMSKSLAIEYAKKNITINCVSPGFIETKMTDNIAENIRAVLTSKIPMAKLGKGEDVSNTVAFLCSEAASYITGETIHVNGGMYMA

SEQ ID NO: 83143 - protein, 244 aa, Unknown
  Bacterial polypetide isolated from the Sargasso Sea
MIDFKNKKIIITGASGGIGRSLVEKFVNLNGKVLATGTKIEKLENLKNDFSNISTLKFDISEHSKIEEFIEKAYDQLGGLDILINNAGINIDNLSLRMKYEDWKRVIDINLGSTFLLTKSAIKKMLKSKYGRIVNITSIVGHTGNLGQANYSASKAGIIGMTKSLAVEYAKKNITLNCVSPGFIKTQMTDNISENMKEFLSSRIPMSKLGNGEDVANSVAFLSSDAASYITGETIHVNGGMYMA

SEQ ID NO: 83144 - protein, 248 aa, Unknown
  Bacterial polypetide isolated from the Sargasso Sea
MSKTAFSGKRAVITGAAQGIGRAIAERLRDGGAQVCLWDVDTDLGSRMAEQMGRSVVARAVDVADYKAVADAARATFEQFGGIDILVNNAGISGPNVPTWEYPVEDWKQVLDIDLNGVFYCCRSVVPIMLSGKYGRIVNIASVAGKEGNPNAPAYSAAKAGVIGLTKSLGKELADTNVLVNCVTPAVAKTRIFDQMTEEHISYMLSKIPMGRFVDVAEIAALVAWLSSDECSFSTGAVFDITGGRSTY

SEQ ID NO: 83145 - protein, 238 aa, Unknown
  Bacterial polypetide isolated from the Sargasso Sea
KKILITGATGGIGRSILEKFLSLDATILATGTNTEKLNNLKKDFPKIHISQFDISNHLEIEKFIDNSFLTLGGIDILINNAGITQDNLSLRMKDVEWQKVIDINLTSTFYLCKNAIKKMLKNKFGRIVNITSIVGHTGNIGQANYSASKAGIVAMSKTLAAEYAKKNITINCVSPGFIKTNMTENISEDMKISLLSRIPMNRLGTADDVSNTVAFLSSELSSYITGETIHVNGGMYMA

SEQ ID NO: 83146 - protein, 116 aa, Unknown
  Bacterial polypetide isolated from the Sargasso Sea
RFGRIINITSIVGLTGNAGQANYAASKAGLIGMTKSIAKEVASRGITANCIAPGWIETSMTDELSDDVKNKFLSQIPSGKIGHPKDIANTVIFLASDEAGYITGQTITVDGGRIIN

SEQ ID NO: 83147 - protein, 136 aa, Unknown
  Bacterial polypetide isolated from the Sargasso Sea
INLNSTFFMSKFAIKKMMKNKKGKIINITSVVGHTGNLGQANYTASKAGIIAMSKSLAIEYAKKNININCISPGFIKTAMTDKIDEKYKNTIISKIPSGRLGEPEDIANAVLFLSSSLSDYINGETLHVNGGMYMA

SEQ ID NO: 83148 - protein, 137 aa, Unknown
  Bacterial polypetide isolated from the Sargasso Sea
DVLNTNLKGVFLCTKYASKFMMKKRSGSIVNISSVVGIIGNPGQANYSAAKAGVIGFTKTCAKEFASRSINVNAIAPGFIETEMTEKLNTEEILKVIPLGKLGSCTQIANLVSFLVSSDAGSYITGQTISIDGGMSI

SEQ ID NO: 83149 - protein, 125 aa, Unknown
  Bacterial polypetide isolated from the Sargasso Sea
YAIKKMLKNKYGRIINITSIVGHTGNLGQANYAASKAGIIAMSKSLAIEYAKKNITINCVSPGFIQTSMTDNIVESIKAVLTSKIPMSRLGSGEDVANSVAFLSSDSASYITGETIHVNGGMYMS

SEQ ID NO: 83150 - protein, 232 aa, Unknown
  Bacterial polypetide isolated from the Sargasso Sea
MFSLKNQIVIITGGARGIGEGVCEVFCKAGATVALWDVLDEGEETAKKISLKGNSIFFQKVDVTSSESVNNAVEQIISKHGKIDVLINNAGVIRDRSFLKMSPEEWNTVININLNSLYVTSKAVLPHMRQAGYGRIISASSINGFQGSFGQANYAATKAGVSGFTRALCKEVGRFGVTVNAVAPGFIKSLMSDSMPEDIIKAGVAQIPVGRIGTPEDMGHAYLFLASKEASL

SEQ ID NO: 83151 - protein, 135 aa, Unknown
  Bacterial polypetide isolated from the Sargasso Sea
MSNTDSLSGKVALITGASRGIGKEIALELSRLGAEVFINYSSSDEKAEEVVNSIKNSGGKAHKLKFDVSKEDSVSLAFEEIIKTNGTIDILINNAGITRDGLLMRMKSDQWDDVLNTNLKGVFLCTKYASKFMMK

SEQ ID NO: 83152 - protein, 113 aa, Unknown
  Bacterial polypetide isolated from the Sargasso Sea
RVINISSVAGLMGNSGQVNYSSSKSAMVGFSRSLAKELGSWNITSNVVAPGFIETDMTTFLNDDEKVEVCKNIPMKRFGTVQDVAKCIVFLASDKANYITGQTISVDGGLFMY

SEQ ID NO: 83153 - protein, 200 aa, Unknown
  Bacterial polypetide isolated from the Sargasso Sea
MLKKENPSIKVKKFDIADHSNIQEFVENVSLELGGIDILINNAGINMDNLSLRMKDDEWKKVIDINLTSTFLLAKHSIKIMLKNKFGRVVNITSIVGHSGNLGQANYSASKAGIIGMSKSLAIEYAKKNITVNCVSPGFIVSNMTMNIAEKVKLFLTSRIPMGKLGTGEDVSNCVAFLSSESASYITGETVHVNGGMYMS

SEQ ID NO: 83154 - protein, 131 aa, Unknown
  Bacterial polypetide isolated from the Sargasso Sea
TFLISKYAIKKMLKNKYGRIVNITSIVGHTGNTGQANYAASKSGIIGMTKSLAIEYAKKNITLNCVSPGFIQSNMTDKIVESIKAVLTSKIPMSKLGTGEDVANTVAFLSSDAASYITGETIHVNGGMYMA

SEQ ID NO: 83155 - protein, 239 aa, Unknown
  Bacterial polypetide isolated from the Sargasso Sea
KKAVITGATGGIGHSILEKFYSEGATVLGSGTNEEKLNKLKNDFNGIILKKFDISKHDQIEKFVETVCDELKGSPDILINNAGITKDNLSLRMSQTEWQQVIDVNLTSTFLLCKFFLKKMIKSKSGKIINITSVVGHTGNVGQANYAASKSGIIGMSKSLALEYAKKNININCISPGFIKTNMTEKIDPKFKELILAKIPSYRLGEPSDVANVAAFLSSEMSNYITGETIHVNGGMYLG

SEQ ID NO: 83156 - protein, 145 aa, Unknown
  Bacterial polypetide isolated from the Sargasso Sea
NEEWKRVIDVNLSSTFYLSKCAIKKMLKNKYGRIVNITSVVGHTGNVGQANYSAAKAGIIGMSKSLAIEYAKKNITINCVSPGFIQSRMTDNIVESVKNILQSKIPMSRLGKGEDVANSVAFLASESASYITGETIHVNGGMYMA

SEQ ID NO: 83157 - protein, 161 aa, Unknown
  Bacterial polypetide isolated from the Sargasso Sea
TEEKHGAPQIVVISSGIRADSIVGMMKTEDWKNVIDTNLTGTFNICKLAVQCMMRQKYGRIITLTSPIGKFGFAGQANYAASKAGQVALVKSLSKEVASRKITVNCVSPGFIDTDFIADLTDDQKEAYKKQVPLKRFGTAQDVASPVLFLSAKESSYITGS

SEQ ID NO: 83158 - protein, 244 aa, Unknown
  Bacterial polypetide isolated from the Sargasso Sea
MIDFKNKNILITGATGGIGNELVKKFVSLGGNVLASGTKAEKLDELKKKYSNIKVKKFDIIEHERIEEFIDNAHLELDGLDILINNAGKNMDNLSLRMKDDEWKKVIDINLTSTFLLSKHAIKKMLKNKFGRIVNITSIVGHTGNLGQSNYSASKSGIIGMSKSLAIEYAKKNITINCVSPGFIASNMTMNIAEKVKLYLTSRIPMARLGSGEDVANCVAFLSSNQASYITGETLHVNGGMYMS

SEQ ID NO: 83159 - protein, 238 aa, Unknown
  Bacterial polypetide isolated from the Sargasso Sea
YIIVTGATGGIGNSIIKKLYDVGANILATGTKDEKLQELKKKFQNIQTLKFDISQTENLENFIENATKKLGGKLDCMINNAGITQDNLAIRMSIEEWKRVIDINLTSTFLISKFAIKKMLKNKKGKIINITSVVGHTGNLGQTNYTASKAGIIAMSKSLAIEYAKKNININCISPGFITTAMTDKIDEKFKEVIISKIPSARLGEPEDVANAVIFLASSYSDYINGETLHVNGGMYMA

SEQ ID NO: 83160 - protein, 147 aa, Unknown
  Bacterial polypetide isolated from the Sargasso Sea
MNLKEWQNVIDINLTSTFLMSKSAIKKMLKNKSGKIVNITSVVGHTGNLGQANYTASKAGIIAMSKSLAIEYAKKNININCISPGFIKTAMTDKLDDKFKEAIISKIPSARLGEPDDIANAVLFLCSSQSSYINGETLHVNGGMYMA

SEQ ID NO: 83161 - protein, 201 aa, Unknown
  Bacterial polypetide isolated from the Sargasso Sea
ENLKKDFPNISTLKFDISEHSKVDEFIEKANDQLGGLDILINNAGINNDNLSLKMKFDEWKKVIDINLSSTFLLTKSAIKKMLKNKYGRVINVTSIVGHTGNLGQANYAASKAGIIGMTKSLAIEYAKKNITLNCVSPGFIKSQMTDNISENMKEFLSSRIPMSKLGTGEDVANSIAFLSSDAASYITGETIHVNGGMYMA

SEQ ID NO: 83162 - protein, 222 aa, Unknown
  Bacterial polypetide isolated from the Sargasso Sea
KKLYDAGANILATGTKNEKLNELKKKLENIKVLKFDISQTDNLENFIDDATKQLGGKLDCLVNNAGVTQDNLAIRMNIDEWKKVIDINLTSTFLISKFAIKKMLKNKKGKIINITSVVGHTGNLGQTNYTASKAGIVAMSKSLAIEYAKKNININCISPGFIKTAMTDKIDEKFKEVIISKIPSARLGEPEDVANAVIFLASSHSDYINGETLHVNGGMYMA

SEQ ID NO: 83163 - protein, 111 aa, Unknown
  Bacterial polypetide isolated from the Sargasso Sea
MNLSGKIALVTGASRGIGESLAIGLADHGTDVIICDLESESKGLANTHKQIEKTGKKCWSYFLDVTKKSQIQNMVSDILNDIGSIDILVNNAGILTPTSLEDIDEETWDSH

SEQ ID NO: 83164 - protein, 167 aa, Unknown
  Bacterial polypetide isolated from the Sargasso Sea
GEVDVLINNAGVTRDNLFMRMSEEEWNEVLNINLNAAMALTRLCIKPMIKKRWGRVVNITSVVGVTGNPGQANYAASKAGLIGMSKAIAQEVASRGITINCVAPGFILSSMTENLKEEQKQRIVNNIPMKKMGSGQDVASAVKFLVSEDSSYITGQTLHVNGGLTMV

SEQ ID NO: 83165 - protein, 169 aa, Unknown
  Bacterial polypetide isolated from the Sargasso Sea
MIDLKGLNIIVTGATGVIGNSILEKLIQAGSNILATGSNDEKLNKIQDRYKNIHTLKFDISDHKKIEEFVENCNSIMSNKIDVLINNAGITIDNLSIRMKEDEWKRVIDINLTSTFLITKNVIKKMLKFKNGKIINITSVVGHSGNIGQANYAASKAGIIAMSKSLALE

SEQ ID NO: 83166 - protein, 214 aa, Unknown
  Bacterial polypetide isolated from the Sargasso Sea
GNVLATGTNTDKLDDLKKNFPNIKVKKFDISEHSRIEEFIENVSLELGGLDILINNAGVNSDNLSLRMKDEEWKKVIDINLTSTFLLSKNSIKKMLKTKYGRIVNITSIVGHTGNLGQANYSAAKSGLIGMSKSLAIEYAKKNITINCVSPGFIVSNMTSSIAEKVKLFLTSRIPMGKLGTGEDVSNCVAFLSSDQASYITGETIHVNGGMYMS

SEQ ID NO: 83167 - protein, 163 aa, Unknown
  Bacterial polypetide isolated from the Sargasso Sea
MEELPRIVLITGASRGIGRAIALRLAEQGHKIAINYNSHKEDAEEVLKEINKRGSSGMIVKANVSKLEEVQEMIKQVENSLGPVEILYNNAGIISDSLLMRMKPEDFDKVIDTNLKGTFYCTKLCINNMIKNRWGRVINISSVVGIRGNIGQSNYSASKAGIH

SEQ ID NO: 83168 - protein, 192 aa, Unknown
  Bacterial polypetide isolated from the Sargasso Sea
NLLKFDMSNHQNIEKFVEDCSNIFKDKIDILINNAGITQDNLSIRMKEEEWSKVIDINLTSTFLITKNVIKKMLKSKNGKIINITSVVGHTGNIGQANYAASKAGLIAMSKSLALEYGKKNIKVNCVSPGFIISEMTNKISDQHTELLKSRISLNKFGNPEDVANTVVFLSSDLSDYITGETIHVNGGMYFS

SEQ ID NO: 83169 - protein, 237 aa, Unknown
  Bacterial polypetide isolated from the Sargasso Sea
VLITGASGGIGQEVARHMSKQGADIILTGTNEEKLKKISSDLGQKSKYIVADLSNDQHIDNLSQNAENYNGKIDILVNNAGITSDNLFLRMKDEEWDKVLNINLNSNVKLTKKIIRGMIKRRFGRIIFITSIIGFSGNAGQSNYASSKAALSGFSKSIALEVANRGITSNLIAPGYIQTPMTEKLNEDQKKNILEKIPVSRLGEPQDIASACVYLASDEASFVTGSTLHVNGGMGMF

SEQ ID NO: 83170 - protein, 245 aa, Unknown
  Bacterial polypetide isolated from the Sargasso Sea
MNDLKENNIIVTGATGGIGNSIIKKLYDAGANILATGTKDEKLQELKKKFQNIQTLKFDISQTDNLENFIEDATKKLGGKLDCMINNAGITKDNLAIRMSIEEWKKVIDVNLTSTFLISKFAIKKMLKNKKGKIINITSVVGHTGNLGQTNYTASKAGIVAMSKSLAIEYAKKNINVNCISPGFIKTAMTDQIDEKFKEVIISKIPSARLGEPEDVANAVIFLASSHSDYINGETLHVNGGMYMA

SEQ ID NO: 83171 - protein, 133 aa, Unknown
  Bacterial polypetide isolated from the Sargasso Sea
TSTFLMSKFAIKKMLKNKSGKIVNITSVVGHTGNLGQANYTASKAGIVAMTKSLAIEYAKKNINVNCISPGFIKTAMTDKIDEKFKETIISKIPSARLGEPDDIANAVVFLCSNQSSYINGETLHVNGGMYMA

SEQ ID NO: 83172 - protein, 190 aa, Unknown
  Bacterial polypetide isolated from the Sargasso Sea
LLNSTISEHNKIEEFIDNAISQLNGLDILINNAGITIDNLSLRMKPEEWQKVIDINLTSTFYLSKHAIKKMLKNKYGRIVNVTSIVGHTGNLGQANYSASKAGIVAMSKSLATEYAKKNITINCVSPGFIQTKMTDSIVESIKAVLTSKIPMSRLGTGEDVANTVAFLSSEQASYITGETVHVNGGMYMA

SEQ ID NO: 83173 - protein, 158 aa, Unknown
  Bacterial polypetide isolated from the Sargasso Sea
NNAGITQDNLMMRMKAEQWSKVIDVNLNGVFHITRAVLKTMMKQRSGKIISISSVVGFSGNPGQVNYSSTKAALVGFTKSLAREVGSRGITVNAVAPGFIDTAMTQALNETQQEEILRQIPLKRMGVPEDIAHAVEFLASEKADYITGTVLHVNGGMY

SEQ ID NO: 83174 - protein, 146 aa, Unknown
  Bacterial polypetide isolated from the Sargasso Sea
MRMKSEQWDDVLNTNLKGVFLCTKYASKFMMKKRSGSIVNISSVVGLIGNPGQANYSAAKAGVIGFTKTCAKEFASRGINVNAIAPGFIETEMTEKLNTEDILKVIPLGKLGSCSQIANLVSFLVSSNAGSYITGQTISIDGGMSI

SEQ ID NO: 83175 - protein, 138 aa, Unknown
  Bacterial polypetide isolated from the Sargasso Sea
YYDVHLYGTFQLSKRALKMMLKNKWGRIINISSASASIGNRGQSNYAAAKAGVEAFTKSLAKEVGKRDITINAVAPGFISTDMTENNKGVNADYLVKEIPLGRFGKPEEVASLISFICSDGASYITGQTIHINGGLYM

SEQ ID NO: 83176 - protein, 245 aa, Unknown
  Bacterial polypetide isolated from the Sargasso Sea
MINLKNLNIILTGATGVIGNSILDRLILAGANVLATGTNEQKLKIIQEKYKDLNVVKFNISDHGKIEQFVEDCGKIFSNKIDVLINNAGITQDNLSLRMKENEWKEVIDINLTSTFLITKSILKKMLKLKNGKIINVTSVVGHTGNIGQANYAASKAGIIAMSKSLALEYGKKNITVNCVSPGFIVSDMTAKISEEHTDLMKSRISLNKFGNPEDVANSIVFLCSNLSDYITGETIHVNGGMYFS

SEQ ID NO: 83177 - protein, 159 aa, Unknown
  Bacterial polypetide isolated from the Sargasso Sea
MANLNLKNKSALVTGASGAIGESIAKKLYSLGANVIVTGTNKKKVMDLEKKLGSKSLGVVADLCNDDDINNLYSSSIKKFKSLDILVNNAGTNQDALSIRMTNKQWDEVINVNLSATFKLSQLAIKSMIKKKWGRIIGISSIIGIGGNIGQANYAASKA

SEQ ID NO: 83178 - protein, 192 aa, Unknown
  Bacterial polypetide isolated from the Sargasso Sea
NTKNFDISKLNNIENFVNEVSDILSGGPDILINNAGITKDNLSLRMNMQEWQNVIDLNLTSTFLLCKYTLKKMMKNKYGKIVNITSVVGHTGNVGQANYAASKSGIIGFSKSLALEYAKKNININCVSPGFIETNMTSKIDEKFKEQIISKIPSNKLGKPEDVANVVGFLSSYLSDYITGETIHVNGGMYLG

SEQ ID NO: 83179 - protein, 134 aa, Unknown
  Bacterial polypetide isolated from the Sargasso Sea
LTSTFLLSKFAIKKMLKNKYGKIVNITSVIGHTGNVGQSNYAASKAAIISMSKSLALEYAKKNITVNCISPGYITTNMTDQINEKWKEIIKSKIPMDKFGLPKDVANTVIFLSSESASYITGQTIHVNGGMYMG

SEQ ID NO: 83180 - protein, 236 aa, Unknown
  Bacterial polypetide isolated from the Sargasso Sea
IVTGASGGIGNSIIEKLNQSGANILASGTRIEKLEELKAKYKNIKILKFDISQSDKIEEFVENATKQLGGSLDCIINNAGITQDNLAIRMSLDEWKKVIDVNLTSTFLMSKSAIKKMLKNKSGKIVNITSVVGHTGNLGQTNYTASKAGIIAMSKSLAMEYAKKNININCISPGFIETAMTDKLDNKYKEAIISKIPSARLGKPDDIANAVLFLCSGHSSYINGETLHVNGGMYMA

SEQ ID NO: 83181 - protein, 209 aa, Unknown
  Bacterial polypetide isolated from the Sargasso Sea
STNAGGVQLIDQALGPSGKGIEMRIDNDESVAQAFSKMEELEESPCILINNAGITADNLMMRMSSEEWSSVIDTNVNGLYRVTKPLVRQMMKNRWGRIVNISSVVARMGSPGQTNYVASKSAIEGFTKSLALELASRNITVNALAPGFIETDMTSVLDDDQKERIMEKIPLGRMGQAKEVAAAVAFLISDDAAYITGQTLQINGGLYNS

SEQ ID NO: 83182 - protein, 166 aa, Unknown
  Bacterial polypetide isolated from the Sargasso Sea
MIDLKNLNIIVTGATGVIGNSILDKLVLAGSKVLATGTNEEKLKMLQEKYKSLTTLKFDISKHDKIGEFVENCNKILSNKIDILINNAGITQDNLAIRMSEEEWKKVIDINLTSTFLITKNVIKKMIKFKNGKIINITSVVGHSGNIGQANYAASKAGLIAMSKSL

SEQ ID NO: 83183 - protein, 166 aa, Unknown
  Bacterial polypetide isolated from the Sargasso Sea
GLDILINNAGINSDNLSLRMKDDEWKKVIDINLTSTFLLSKNSIKKMLKTKYGRIVNITSIVGHTGNLGQANYSAAKSGLIGMSKSLAIEYAKKNITINCVSPGFIVSNMTSSIAEKVKLFLTSRIPMGKLGTGEDVSNCVAFLSSEQASYITGETIHVNGGMYMS

SEQ ID NO: 83184 - protein, 245 aa, Unknown
  Bacterial polypetide isolated from the Sargasso Sea
MINLKNLNIILTGATGIIGNSILEKLILAGSNVLASGTNEQKLKLIQDKYKDLNVLKFDISNHKNIDQFVENCSKIFSNKIDVLINNAGITQDNLSIRMKEEEWKKVIDINLTSTFLITKNVIKKMLKSKSGKIINVTSVVGHTGNIGQANYAASKSGIIAMSKSLAIEYGKKNITVNCVSPGFIVSEMTAKISEEHTNLMKSRISLNKFGSPEDVANSIAFLSSNLSDYITGETIHVNGGMYFS

SEQ ID NO: 83185 - protein, 68 aa, Unknown
  Bacterial polypetide isolated from the Sargasso Sea
NCVSPGYITTNMTNQISEKWKEIIKSKIPMDKFGLPKDVANTVIFLSSDDASYITGQTIHVNGGMYMS

SEQ ID NO: 83186 - protein, 222 aa, Unknown
  Bacterial polypetide isolated from the Sargasso Sea
SKSGAHVICIARTENKIIDLVEQIRKDNGSADYISCDVSDSDAFSNSINTVIKDHGKIDILINNAGITRDALLMRMTEEQWEKVINTNLKGAFYGMKSVIRSMMKNKFGRIINITSIVGITGNAGQANYAASKAGLIGMTQSIAKEVGSRGITVNCIAPGWIDTEMTDELPENSKSTLLDRIPLGKIGKPEDIAYTALFLASKEANYITGQTITVDGGRIIN

SEQ ID NO: 83187 - protein, 164 aa, Unknown
  Bacterial polypetide isolated from the Sargasso Sea
ERETGAYVHMTSTSGLIGNFGQANYAAAKLGIAALSKSIALDLGRYNVRSNCIAPFAWTRMIGTIPITDEAQKQRIERLKAMTPAKIAPMAVYLCSDVAKEVSGQIFAVRNNEIFLMGQNRPLRSIHRGEGWSPETIAEHAIPAFKPNFYSLDRSQDIWPWDPV

SEQ ID NO: 83188 - protein, 159 aa, Unknown
  Bacterial polypetide isolated from the Sargasso Sea
MAGITMDNLSLRMKDEEWRKVIDINLTSTFYLCKHAIKKMLRNKYGRIVNITSIVGHTGNLGQANYSASKAGMVAMSKSLAIEYAKKNITVNCVSPGFIQSKMTDKIVESIKAVLTSKIPMSKLGTGEDVSNTVAFLSSDAASYITGETIHVNGGMYMA

SEQ ID NO: 83189 - protein, 206 aa, Unknown
  Bacterial polypetide isolated from the Sargasso Sea
MIDLKNLNIILTGATGVIGNSILDKLVSGGSNILASGTNEQKLQKIKEKYKNVNILKFDISDQSKIDKFVNDCGEIFSDKIDILINNAGITQDNLSIRMKEEEWKNVIDINLTSTFLITKNIIKKMLKSKKGKIINVTSVVGHTGNIGQANYAASKAGIVAMSKSLALEYGKKNITVNCVSPGFIISDMTAKISEEHTEVLKSRIS

SEQ ID NO: 83190 - protein, 121 aa, Unknown
  Bacterial polypetide isolated from the Sargasso Sea
KMLKNKYGRIVNITSVVGHTGNLGQSNYAASKAGIIGMSKSLAIEYAKKNITINCVSPGFIQSKMTDSIVESIKAVLTSKIPMSKLGSGEDVANTVAFLASDKASYITGETIHVNGGMYMA

SEQ ID NO: 83191 - protein, 176 aa, Unknown
  Bacterial polypetide isolated from the Sargasso Sea
MIDLKDLNVILTGATGGIGNSILEKLVAGGANVVASGTNENKLNLIKEKYQKVNIQKFDISNHEQIENYIDKCNEILDNRIDVLINNAGITRDNLTIRMKDEEWKKVIDVNLTSTFLLSKNTIKKMLKNKKGKIINITSVVGHSGNIGQANYAASKSGIVGMSKSLALEYGKKNIK

SEQ ID NO: 83192 - protein, 219 aa, Unknown
  Bacterial polypetide isolated from the Sargasso Sea
MCEFKNKVALITGASGAIGKDIASTLNKSGASIILCGTKIDVLENIARDLSGKVEIITENINNFENFEKSLLEKKLNVDILVNNAGITKDNLLMRMKAEDIDSVININLISLIKISKCVLKNMMKQKFGRIISISSVVGFTGNPGQVNYCASKSGIIGFTKSLAYEVSSRGITVNAIAPGYITSAMTDKISDLKRDAIISNIPVGRIGIPSDISNAVLF

SEQ ID NO: 83193 - protein, 216 aa, Unknown
  Bacterial polypetide isolated from the Sargasso Sea
WRHVALSGTRAESLNALLSELGKNAHVAPADLSDAQSVEGLIGLAEEVIGGVDILVNNAGLTRDMLSMRLTDDDWQSVMDVNLTATFRLSRAVIRGMIRRRWGRIINIASVVGVTGNAGQANYAASKAGMIGMSKSIAQEVASRGITVNCVAPGMIVTAMTDVLSDNQKARILDVVPAGRLGEAEDIAAGVLYLASKEASYVTGQTIHINGGMTMI

SEQ ID NO: 83194 - protein, 125 aa, Unknown
  Bacterial polypetide isolated from the Sargasso Sea
MSQICLVTGASRGIGNAIAIELATKGYTVIGTGTSIASAEKVTNDLRTAGAEGRGAALDVNDPEQVESVIKDITDEFGPISVLVNNAGVTEDNLLMRMKPSQWQRTLNTNLASVFSLTKLCLKGM

SEQ ID NO: 83195 - protein, 156 aa, Unknown
  Bacterial polypetide isolated from the Sargasso Sea
VIRDRSFLKMSPDEWNTVININLNALYITSKAVLPHMREAGYGRIISASSINGFQGAFGQANYAATKAGVSGFTRALCKEVGRFGVTVNAVAPGFIKSLMSDSMPEEVIKAGIAQIPVGRIGTPEDMGYCYLFLASKEAGFISGITLHANGGAMPM

SEQ ID NO: 83196 - protein, 147 aa, Unknown
  Bacterial polypetide isolated from the Sargasso Sea
ETLGQANYAAAKLGIAALSKSIALDLGRYNVRSNCIAPFAWTRMIGTIPITDEAQKQRIERLKAMTPAKIAPMAVYLCSDVANEVSGQIFAVRNNEIFLMGQNRPLRSIHRGEGWSPETIAEHAIPAFKPNFYSLDRSQDIWPWDPV

SEQ ID NO: 83197 - protein, 243 aa, Unknown
  Bacterial polypetide isolated from the Sargasso Sea
MNLQNKKVLITGATGGIGNCLVKKFHDHGSLIMATGTKEEKLENLKKNFSKIEVEKFKLDEHSKIEEFIEKVYKKLNGMDIVINNAGITLDNLSIRLSEENWKKVLDVNLTSTFLMCKHSIKKMLKQKYGKIINITSIVGHTGNLGQANYSASKAGIVAFSKSLAIEYAKKNININCISPGFIQTEMTDNINEEMKKSLISKIPSGSLGSGDDVANCAVFLASDMANYINGETIHVNGGMYMS

SEQ ID NO: 83198 - protein, 162 aa, Unknown
  Bacterial polypetide isolated from the Sargasso Sea
MNDIYKNKVVLVTGASRGIGEAIANKFALLGAHVIGTGTTTKSAQRITDKFVDKNLSGTGLVLNIFEKKSVETFAKIIQEMDAPSILINNAGVTRDNLLMRMKDDEWDDVINANLTGMFRITRLCLRPMMKAKYGKIINITSVVGLTGNPGQTNYAATKAGM

SEQ ID NO: 83199 - protein, 245 aa, Unknown
  Bacterial polypetide isolated from the Sargasso Sea
MINLKNLNIILTGATGVIGNSILDKLVMSGSNVIATGTNEEKLKKIKEKYKNINIIKFDISNHDEIDSFVDNCSKVFSNKIDILINNAGITKDNLSIRMNEEEWKKVININLSSTFFITKNVIKKMLKFKNGKIINITSVVGHSGNIGQANYAASKAGIVAMSKSLALEYGKKNIKVNCVSPGFIISEMTDKISEEHTDLLKSRISLNKFGKPEDVANTIAFLSSNLSDYITGETIHVNGGMYFS

SEQ ID NO: 83200 - protein, 109 aa, Unknown
  Bacterial polypetide isolated from the Sargasso Sea
HNICCCHTGNLGQANYTASKAGIIAMSKSLAIEYAKKNININCISPGFIKTAMTDKLDDKYKDEIISKIPSSRLGEPDDIANAVLFLCSNQSSYINGETLHVNGGMYMA

SEQ ID NO: 83201 - protein, 192 aa, Unknown
  Bacterial polypetide isolated from the Sargasso Sea
KTLKFDISQTDMIETFIDNASKELNGNIDCLINNAGITQDNLAIRMNLDEWNKVIDINLTSTFLMCKFAIKKMLKNKKGKIINITSVVGHTGNLGQSNYTASKAGIIGMSKSLAIEYAKKNININCISPGFIKTAMTEKIDERYKESIISKIPSARLGEPDDIANAVLFLASDQSDYINGETLHVNGGMYMA

SEQ ID NO: 83202 - protein, 192 aa, Unknown
  Bacterial polypetide isolated from the Sargasso Sea
MIPLKLDVTSRDDIAECFEMLKSKDLLPKILINNAGIASDQIFLRMKNEDWDNVINTNLNGVFNLSKIFVKNMIKHKEGRIINISSISGLMGNPGQVNYSSSKAALNGFTKSLAKELGTRNITVNCIAPGFIETDMTSYIDQNEKNKLLNSIPLKRLGKAEDVAKLVSFLASNKASYITGQTISIDGGLLMN

SEQ ID NO: 83203 - protein, 103 aa, Unknown
  Bacterial polypetide isolated from the Sargasso Sea
MADKKRHALVTGASRGIGEAIAIDLAKEGHLISVNFNSHQNDADEVVKKIKDLGSDAHVVKGNVSDKESVNSMIEKSIDKFGPVEILVNNAGIISDSLLMRMK

SEQ ID NO: 83204 - protein, 160 aa, Unknown
  Bacterial polypetide isolated from the Sargasso Sea
NNAGITIDNLAIRMSLDEWRKVIDINLTSTFLLSKFSIKKMLKNKSGKIINITSVVGHTGNLGQTNYTASKAGIIAMSKSLALEYAKKNININCISPGFIKTAMTDKIDEKFKEAIISKIPSGRLGEPDDIANAVIFLASDHSNYINGETLHVNGGMYMA

SEQ ID NO: 83205 - protein, 142 aa, Unknown
  Bacterial polypetide isolated from the Sargasso Sea
WDDVIETNLNGLFRVTKAFIKPMVKNKFGRVINISSVAGLMGNSGQVNYSSSKSAMVGFSRSLAKELGSRNITSNVVAPGFIETDMTTFLNDDEKAEVSKNIPMKRFGTVQDVAKCIVFLASDEANYITGQTISVDGGLFMY

SEQ ID NO: 83206 - protein, 108 aa, Unknown
  Bacterial polypetide isolated from the Sargasso Sea
TSVVGHTGNLGQANYAASKAGIIGFSKTLSIEYAKKNININCVSPGFIKTEMTDKIDEEFKKILVSKIPAGSLGSGEDVSNCVAFLASDMAKYINGETIHVNGGMYMS

SEQ ID NO: 83207 - protein, 181 aa, Unknown
  Bacterial polypetide isolated from the Sargasso Sea
MNSQYVFVSGASRGIGQSILKLFSSKGFPVIGTATSEEGVKIIDGILSESSGGGFGIELDLSDKQSIENLFDTLKEKDINPEIVVNNAGITRDNIFLRMKDTEWDEVIQVHLSSVFSLLKFFSKKMVKNKCGRIINISSTSAAIGNKGQANYAAAKSGLEAFSRSLARELAPRNITVNCVA

SEQ ID NO: 83208 - protein, 101 aa, Unknown
  Bacterial polypetide isolated from the Sargasso Sea
MGNAGQSNYAAAKAGMEGFTRALAREVGSRAITVNAVAPGFIDTDMTRALNDSQRSVMLEQIPLARLGQAEEIAAAVAFLASESAGYITGATLPVNGGMYM

SEQ ID NO: 83209 - protein, 103 aa, Unknown
  Bacterial polypetide isolated from the Sargasso Sea
VGFSGNAGQVNYSSTKSGLIGFTKSLSREVGTRGITVNAVAPGFINTAMTQALNESQQQAILSQIPLGRMGEADDIANAVAFLASEEASYITGTVLHVNGGMY

SEQ ID NO: 83210 - protein, 152 aa, Unknown
  Bacterial polypetide isolated from the Sargasso Sea
TRDGLLMRMKSEQWDDVLNTNLKGVFLCTKYASKFMMKKRSGSIVNISSVVGIIGNPGQANYSAAKAGVIGFTKTCAKEFASRGINVNAIAPGFIETEMTEKLNTEEILKVIPLGKLGSCTQIANLVSFLVSSNAGNYITGQTISIDGGMSI

SEQ ID NO: 83211 - protein, 149 aa, Unknown
  Bacterial polypetide isolated from the Sargasso Sea
MSNTDSLSGKIALITGASRGIGKEIALELSRLGAEVFINYSSSDEKAEEVVNSIKHSGGKAHKLKFDVSKEDSVSSAFEEIIKINGTIDILINNAGITKDGLLMRMKSEQWDDVLNTNLKGVFLCTKYASKFMMKKRSGSIVNISSGVG

SEQ ID NO: 83212 - protein, 248 aa, Unknown
  Bacterial polypetide isolated from the Sargasso Sea
MKLLESKVAIITGGSRGIGKSICETFAQNGCNVAFTYNSSKESAENLSKELNKLGVKAKAYKSDASNFDDATKLVENVLSDFEKIDILVNNAGIKKDNLLMRMEKSDFDAVINTNLSSVFNLTKASIKTFLKQRNGSIINISSVVGVKGNAGQSNYSASKAGIIGFSKSIALELGSRNIRSNVIAPGFIETDMTDSLPEDVINSWKESIPLKRGGSPSDVGNACVFLASGLSSYITGQVLHVDGGMLT

SEQ ID NO: 83213 - protein, 228 aa, Unknown
  Bacterial polypetide isolated from the Sargasso Sea
MKTVFVTGASRGIGKSIALELGKDYQVIVGFSNSKDKADEVVEEIKKLGGQSLAVQLNIADRNSVDEAFNIIEKKYKHVDILINNAGITKDNILPRMKDDEWSDVIQTNLTGNFYTSQRAIKKMIKNKWGRLIFISSVVGISGNQGQANYAASKAGLIGLSKSISKEVGSRNITSNVIAPGYIETDMTSFIDDENKENIIEQLSIKRMGMPEDIANMVSFLCKDESEY

SEQ ID NO: 83214 - protein, 223 aa, Unknown
  Bacterial polypetide isolated from the Sargasso Sea
LNKLVSSGSNVIASGTNEIKLKKIQEKYRNVNTLKFDISDHAGIETFVDNCNKILSNKIDILINNAGITNDNLSIRMKEEEWKKVIDINLSSTFFMTKSVIKKMLKLKNGKIINITSVVGHTGNIGQANYAASKAGLIAMSKSLALEYGKKNIKVNCVSPGFIASEMTDKISDEHTELLKSRISLNKFGNPEDVANTIAFLSSDLSDYITGETIHVNGGMYFS

SEQ ID NO: 83215 - protein, 244 aa, Unknown
  Bacterial polypetide isolated from the Sargasso Sea
MINFKNKKILVTGASGGIGREIVKKFISLEGTVVATGTNLERLDLLKKDFPNVNVIKFDISEHSKIEEFIDNVFSQLSGLDILINNAGTNMDNLSLRMKDEEWQKVIDINLTSTFLLSKYAIKKMLKNKYGRIVNISSVVGHTGNLGQANYSASKAGIIGMTKSLAIEYAKKNITLNCVSPGFIQSKMTDNINESVKATLTSRIPMSRLGNAEDVANSVAFLSSDQASYITGETIHVNGGMYMA

SEQ ID NO: 83216 - protein, 149 aa, Unknown
  Bacterial polypetide isolated from the Sargasso Sea
MSNTDSLSGKVALITGASRGIGKEIALELSRLGAEVFINYSSSDEKAEEVVNSIKNSGGKAHKLKFDVSKEDSVSLAFEEIIKINGTIDILINNAGITRDGLLMRMKSEQWDDVLNTNLKGVFLCTKYASKFMMKKRSGNIVNISSVVG

SEQ ID NO: 83217 - protein, 245 aa, Unknown
  Bacterial polypetide isolated from the Sargasso Sea
MIDLKNLNIVLTGATGVIGNSILDKLFTAGANILATGTNEQKLKIIKEKYKNLNVLKFDISDHKNIDRFVEDCTKILSNKVDILINNAGITQDNLSIRMKEEEWKKVIDINLTSTFLITKNIIKKMLKLKKGKIINVTSVVGHTGNIGQANYAASKAGIIAMSKSLALEYGKKNITVNSVSPGFIISDMTAKISEEHTELMKSRISLNKFGRPEDVANSIAFLSSNLSDYITGETIHVNGGMYFS

SEQ ID NO: 83218 - protein, 171 aa, Unknown
  Bacterial polypetide isolated from the Sargasso Sea
IKDHGKIDILINNAGITRDALLMRMTEDQWEKVINTNLKGAFYGMKSVIRTMMKNKFGRIINITSIVGITGNAGQANYAASKAGLIGMTQSIAKEVGSRGITVNCIAPGWIDTEMTDELPENSKSALLDRIPLGKIGKPEDIAYTALFLASNEANYITGQTITVDGGRIIN

SEQ ID NO: 83219 - protein, 245 aa, Unknown
  Bacterial polypetide isolated from the Sargasso Sea
MINLKNLNIILTGATGVIGHSILDKLVSAGSNIIATGTNEEKLKKIQDKYKNVNILKFDISDHSRIEDFVENCDKVLSNKIDILINNAGITEDNLSIRMKEEEWKRVIDINLSSTFFMTKHVIKKMLKSKNGKIINVTSVVGHTGNIGQANYAASKAGIVAMSKSLAIEYGKKNIKVNCVSPGFILSEMTNKISDEHTEILKSRISLNKFGNPEDVANTIAFLSSDLSDYITGETIHVNGGMYFS

SEQ ID NO: 83220 - protein, 244 aa, Unknown
  Bacterial polypetide isolated from the Sargasso Sea
MIDFKNKKIIITGASGGIGRSLVEKFVNLNGNVLATGTRIEKLENLKNDFPSINILKFDISEQSKIEEFIENANDKLSGLDVLINNAGINFDNLSLRMKYDEWKKVIDINLGSTFFLTKYAIKKMLKNKYGRVVNITSIVGHTGNIGQANYSASKAGIVGMTKSLAIEYAKKNITLNCVSPGFIKSQMTDNISDNMKDFLSSRIPMSKLGTGEDVANSVAFLSSDAASYITGETIHVNGGMYMA

SEQ ID NO: 83221 - protein, 235 aa, Unknown
  Bacterial polypetide isolated from the Sargasso Sea
MTGATGVIGNSILDKLVSAGANILATGTNEQKLKIIKDKYKALNAVRFDISDHGKIDQFIEDCSKNFSNKIDVLINNAGITQDNLSLRMKEDEWKRVIDINLTSTFLISKSVIKKMLKSKNGKIINVTSVVGHTGNIGQANYAASKAGIVAMSKSLALEYGKKNITVNCVSPGFIVSDMTAKISEEHTDLMKSRISLNKFGNPEDVANSIAFLSSNLSDYITGETIHVNGGMYFS

SEQ ID NO: 83222 - protein, 216 aa, Unknown
  Bacterial polypetide isolated from the Sargasso Sea
KRFADQGHRVAITARDPGDVDSRILAIPCDQTDADAVDRAYQAIESELGNVEVLVANAGITKDQLLLRMSDDDFSTVIDTNLKGSYRVAQRATRTMLRARWGRLIFVSSVVGLLGSAGQANYAASKAGLVGLARSMARELGSRNITANIVSPGPVATEMLDALTEDQRSAITEQVPLKRVAEPQEIAETILFLASEGAGYITGAVIPIDGGLGMGH

SEQ ID NO: 83223 - protein, 248 aa, Unknown
  Bacterial polypetide isolated from the Sargasso Sea
MKLLESKVAIITGGSRGIGKSICETFAQNGCDVAFTYNNSKDYAEALAKELNSTGVKAKSYKSDASNFDDATKLVEDVLNDFGKIDILVNNAGIKKDSLLMRMEKSDFDSVINTNLSSVFNLTKASIKTFLKQRNGSIVNISSVVGVKGNAGQSNYSASKAGIIGFSKSIALELGSRNIRSNVIAPGFIETDMTDSLSEDVINSWKESIPLKRGGNPSDVGNACVFLASDLSSYITGQVLHVDGGMLT

SEQ ID NO: 83224 - protein, 157 aa, Unknown
  Bacterial polypetide isolated from the Sargasso Sea
MSNTDSLSGKVALVTGASRGIGKEIALELSRFGAEVFINYSSSDEKAEEVVNSIKNSGGKAHKLKFDVSKEDSVSSACEEIIKINGSIDILINNAGITRDGLLMRMKSEQWDDVLNTNLKGVFLCTKYASKFMMKKRSGSIVNISSVVGIIGNPVKQ

SEQ ID NO: 83225 - protein, 245 aa, Unknown
  Bacterial polypetide isolated from the Sargasso Sea
MIDLKNLNIVLTGATGVIGNSILDKLISAGSTVLATGTNDEKLKLIQEKYKNLNVLKFDISDHKNIDKFVEDCSSILSNKIDVLINNAGITHDNLSIKMKEEEWKRVIDINLTSTFLISKNVIRKMIKSKTGKIINITSVVGHSGNIGQANYAASKAGIIAMSKSLALEYGKKNITINSVSPGFILSEMTNKISEDHTELLKSRISLNKFGKPEDVANTVIFLSSNLADYITGETIHVNGGMYFS

SEQ ID NO: 83226 - protein, 238 aa, Unknown
  Bacterial polypetide isolated from the Sargasso Sea
MRSLVTGGSGALGQAICAALAQAGHEVWVHANRHLAQAEAVAQQIVAAGGSAHAIAFDVTDADATLAALKPFIDDAPVQILVNNAGIHDDAPMAGMSRQQWHSVLDVTLNGFFNVTQPLLLPMIRTRRGRIVNIASVAGVTGNRGQVNYAAAKAGLIGATKSLSLELASRGITVNAVAPGIIESPMAEHAFPAERIKQLVPAQRAGRPDEVAAMVAYLVSDAAAYVTGQVLSVNGGLA

SEQ ID NO: 83227 - protein, 247 aa, Unknown
  Bacterial polypetide isolated from the Sargasso Sea
MEELSRVVLITGASRGIGRAIALRLAEQGHRIAVNYNSHKEDAEKVLEEINKLGSSGIIVKANVSVLDEVQEMIKTVENSLGNIEILYNNAGIISDSLLMRMKPEDFDKVIDTNLKGTFYCTKLCINNMIKNRWGRVINISSVVGIRGNIGQSNYSASKAGIHSFTKSVAKEVATRNITVNVIAPGYVSTATTNVLSEKVKKEVMSWIPMQRFGEPEEIAPIAAFLSREEARYITGEIIRVDGGMAI

SEQ ID NO: 83228 - protein, 245 aa, Unknown
  Bacterial polypetide isolated from the Sargasso Sea
MSDLKGKNIIVTGASGGIGNSIIEKLNHAGANILASGTKIEKLDVLKSKFENIKILKFDISQSDKIEEFIENATKELGGNLDCIINNAGVTQDNLAIRMSLEEWKKVIDINLTSTFLMSKSAIKKMLKNKSGRIVNITSVVGHTGNIGQANYTASKAGIVAMSKSLAIEYAKKNININCISPGFIKTAMSDKLEDKFKEAIISKIPSARLGDPDDVANAVLFLCSNQSNYINGETLHVNGGMYMA

SEQ ID NO: 83229 - protein, 263 aa, Unknown
  Bacterial polypetide isolated from the Sargasso Sea
MNNLFSIEGKIALVTGGSRGIGEMIAAGFLANGAKVYISSRKAEVCDETANRLQEQYGGECISLPADLSNLNGIESLVNSLPDGEKLDILVNNAGASWGEPIDEYSEKGWDKVMDTNVKGVFFLTQKLLPLLRSSATAEDPSRVINIGSIDGIKTGLFDAFSYGPSKAALHHLTRVLAASLVKENIIVNAIAPGPFPTWMLSTGVGGGGDLDINWDEVGNSNPRGRVGTPEDIAGLAIFLCSRAGAYTVGETITCDGGAVASS

SEQ ID NO: 83230 - protein, 304 aa, Unknown
  Bacterial polypetide isolated from the Sargasso Sea
MGVLDGKVVLVTGAANGIGKETALLASKEGARLVINDLGGSVAGGDEGDKNPIELVAEEIKKNGGEVVTNSDSVTSKKGTEFMIQQALDTYGNLHSIVNPAGILRDKMFHKMDDQDWDAVIDVHLNGSYNICRAAINYFRDKEEGNFVLFTSTTGLIGNIGQANYAAAKLGIAGLSRIIAMENEIKNVRSNIIAPFAWTRMIATIPIKDEASKERVERMKNAMRADQVAQTVVALCSPDCKLTGQILSVRGNEVVLFNQPRPIKSLVDKEGWTPKKLLDSAFPAFESVGQDLGATVTVFPYEPF

SEQ ID NO: 83231 - protein, 244 aa, Unknown
  Bacterial polypetide isolated from the Sargasso Sea
MINLKNKKVLITGATGGIGKALVSKFSSLDSNILATGTKSEKLDLLKKEFPNINILKFDISEHPKIEEFIENVFSQLTGLDVLINNAGVNLDNLSLRMTNEQWKKVIDINLGSTFLLTKYAIKKMLKNKYGRIVNITSIVGHTGNLGQANYAASKAGIIGMSKSLAIEYAKKNITINCVSPGFIQTKMTDNILENIKAVLTSKIPMSRLGSGEDVANTVAFLSSDAASYITGETIHVNGGMYMS

SEQ ID NO: 83232 - protein, 245 aa, Unknown
  Bacterial polypetide isolated from the Sargasso Sea
MMNLENKKIIITGATGGIGNSIVNRLSDAGAKILATGTRIEKLEELKSKFKNTDILKFDISKEDEIEKFIENATKQLGGGLDCLINNAGITQDNLAIRMNIDEWKKVIDINLTSTFLLSKFAVKKMLKNKYGKIINITSVVGHTGNLGQANYTASKAGIIAMSKSLAIEYAKKNININCISPGFIKTEMTDKIEEKFKEAIISKIPSSRLGEPEDVANAVLFLASDQSNYINGETIHVNGGMYMA

SEQ ID NO: 83233 - protein, 304 aa, Unknown
  Bacterial polypetide isolated from the Sargasso Sea
MGVLEGKVVLITGAANGIGKETALLASKEGAKLVINDLGGSVSGGDEGDKNPIELVAEEIKKNGGEVVTNSDSVTSKKGTEFMIQQALDTYGELHSIVNPAGILRDKMFHKMDDQDWDAVIDVHLNGSYNICRSAINFFRDQEEGNFVLFTSTTGLIGNIGQANYAAAKLGIAGLSRIIAMENEIKNVRSNIIAPFAWTRMIATIPIKDEASKERVERMKNAMRADQVAQTVVALCSPDCKLTGQILSVRGNEVVLFNQPRPIKSLVDKEGWTPEKLLDSAFPAFEAVGQDLGATVSVFPYEPF

SEQ ID NO: 83234 - protein, 255 aa, Unknown
  Bacterial polypetide isolated from the Sargasso Sea
MTHSLKGKTALVTGASRGIGRAIAERLAKDGATVALTYNASQSGVDAAIAAIEKAGGTAFAIHADLVDPAAVPALFERLDDELTRRNGTKALDILVNNAGNSGWVGFKDATPESWDTLMAVYARAPFFIIQAALDRLADGARIINISSAAATKPVTAAPVYSMAKAAINTLTHTLAIELGPRGITANAVAPGFTRTDANAAVRENPELVKAAEAQIALGRFGEPSEIAAVVAFLASDDGYWVTGQTIEASGGYKL

SEQ ID NO: 83235 - protein, 245 aa, Unknown
  Bacterial polypetide isolated from the Sargasso Sea
MSDLKGKNIIVTGASGGIGNSIIKKLNQAGANILASGTKIEKLDVLKSKFENIKILKFDISQSDKIEEFIENATKELGGNLDCIINNAGVTQDNLAIRMSLEEWKKVIDINLTSTFLISKSAIKKMLKNKSGRIVNITSVVGHTGNLGQANYTASKAGIIAMSKSLAIEYAKKNININCISPGFIKTAMTDKLDEKFKEAIISKIPSARLGEPDDVANAVLFLCSNQSNYINGETLHVNGGMYMA

SEQ ID NO: 83236 - protein, 155 aa, Unknown
  Bacterial polypetide isolated from the Sargasso Sea
ITRDNIILRMSDEEWSDIMNVHLYGTFQFSKRALKMMLKNKWGRIINISSASASIGNRGQSNYAAAKAGVEAFTKSLAKEVGKRDITINAVAPGFISTDMTENNKGVNADYLVKEIPLGRFGKPEEVASLISFMCSDGASYITGQTIHINGGLYM

SEQ ID NO: 83237 - protein, 199 aa, Unknown
  Bacterial polypetide isolated from the Sargasso Sea
MFDLHDKIAIVTGASQGIGKTIALELSKSGAFVYCISRNKEAIDSVVDSIIKNGGQSSSYACDISNSDNFKDIIEKIVKKHNKIDILVNNAGVTNDALLMRMSNEQWDQVIDTNLKGAFTCIKSVVKYMMKNKYGRIINITSIVGLTGNAGQANYAASKAGLIGMTKSIAKEVASRGITANCIAPGWIKTSMTDILTEE

SEQ ID NO: 83238 - protein, 152 aa, Unknown
  Bacterial polypetide isolated from the Sargasso Sea
MKTALVTGGSRGIGSAIALGLGKNFHVVVGYANSEDKANDVVQEIVAAGGSANTVQIDISNAESVDTAFSTVEKEYNSVDVLINNAGITQDNILPRMKEAEWLEVIQTNLTGSFYTSQRAIKLMMKNKWGRILFISSVVGLSGNQGQANYAA

SEQ ID NO: 83239 - protein, 245 aa, Unknown
  Bacterial polypetide isolated from the Sargasso Sea
MTDLNGKNIIVTGASGGIGNSIIEKLNQAGANILASGTRIEKLDELKNKFENIKILKFDISQSDNIGEFVENASNELGGNLDCIVNNAGVTQDNLAIRMSLDEWRKVININLTSTFLMSKFAIKKMLKNKSGKVVNITSVVGHTGNLGQANYTASKAGIVAMSKSLAIEYAKKNINVNCISPGFIKSAMTDKLDDKYKEAIISKIPSARLGDPDDIANAVLFLCSNQSNYINGETLHVNGGMYMA

SEQ ID NO: 83240 - protein, 134 aa, Unknown
  Bacterial polypetide isolated from the Sargasso Sea
LTSVFNITKLFIKSMVKDRYGKIINISSVAGLMGNPGQVNYSASKAGLGGFTRALAKEVAARNITVNCIAPGFIETDMTNHFQDEELENILNQIPANKMGNPHQIADLALFLASSKGDYITGQTISVDGGLYMS

SEQ ID NO: 83241 - protein, 257 aa, Unknown
  Bacterial polypetide isolated from the Sargasso Sea
MWNHEKRAEMRLKGKIALVTGGNKGIGAAVVRRFASEGAKVWSGDISPDLRREFSDDLSGHEKNISFEALDVTSQKSWERLVNKIVNETGKIDILVNNAGIYQRKSIEETTEEEWDKMLTVNTKGPFLGIKVALEALKASGNASIVNLSSTAGLRGSFAIHYGASKGALRLMTKSIANRFAKDGIRCNSVHPGPIDTEMGHAAVPHDQLEERLYQRIPMGRFGTAEEVANVILFLASEESSFVTGSEVVVDGGATSK

SEQ ID NO: 83242 - protein, 134 aa, Unknown
  Bacterial polypetide isolated from the Sargasso Sea
LKSVFRLSRAVLRPMMKAKGGRIINITSVVGSAGNPGQVNYAAAKAGVAGMTRALAREIGSRGITVNCVAPGFIDTDMTKTLPEDQQTALKTQIPLGRLGSPDDIAHAVAFLASPQAGYITGTTLHVNGGMYMS

SEQ ID NO: 83243 - protein, 180 aa, Unknown
  Bacterial polypetide isolated from the Sargasso Sea
DDATKLVEDVLDDFGKIDILVNNAGIKKDNLLMRMEKSDFDSVININLSSVFNLTKASIRTFLKQRNGSIINISSVVGVKGNAGQSNYSASKAGIIGFSKSIALELGSRNIRSNVIAPGFIETDMTNSLSEDVINSWKESIPLKRGGSPSDVGNACVFLASDLSSYITGQVLHVDGGMLT

SEQ ID NO: 83244 - protein, 225 aa, Unknown
  Bacterial polypetide isolated from the Sargasso Sea
MLSSASLDGQTALVTGGGRGIGKAIALALAEAGAEVVVNYANSAGAADEVVASITAAGGKAYALKANVSIEAEVDGLIKAVLERSGRLDVLVNNAGITRDGLLMRMKTSDWQAVIDLNLSGVFLCSRAVARPMLKQKSGRIINITSVVGLMGNAGQANYAAAKAGVIGLTKSTAKELASRGITVNAVAPGFIATDMTKDLDADAILKDIPLGQFGTQEQVAGAVR

SEQ ID NO: 83245 - protein, 244 aa, Unknown
  Bacterial polypetide isolated from the Sargasso Sea
MINFKNKKILITGATGGIGKALVEKFVSLEGNVLATGTKTEKLEMLKKDFPNISILKFDISDHSKVEEFIENVSSQLSGLDILVNNAGINKDNLSLRMKEEEWKKVIDVNLGSTFLLCKHAIKKMLKSKYGRIVNITSVVGHTGNLGQANYAASKAGIIGMSKSLAIEYAKKNITINCVSPGFIQSKMTENIVESIKAVLTSRIPMAKLGTGEDVSNTVAFLSSDAASYITGETIHVNGGMYMG

SEQ ID NO: 83246 - protein, 236 aa, Unknown
  Bacterial polypetide isolated from the Sargasso Sea
MVTGASRGIGAAIAGQLAEDGFFVVGTATSQMGAEAIIEHLAGRGAGIRLDVADPDSVASAVGQVNEMGSVPLVLVNNAGITKDNLLMRMSDAEWSEVIDTNLSGSFRVTKPLLRGMLKARWGRVINVGSVVGRLGNPGQGNYVASKAGLEGFTRSLAMEVASRGITVNAVAPGFIETDMTEALSDEQSAAMLERIPLGRMGSTKEIAATVSFLCSQQAGYITGQTLQVNGGLFFG

SEQ ID NO: 83247 - protein, 201 aa, Unknown
  Bacterial polypetide isolated from the Sargasso Sea
MGELIGDDSAISAQLDLMSKESIKNLFADLKSEDLLPSVLVNNAGITKDQLFLRMKDEDWDDVIETNLNGLFRVTKAFIKPMVKNKFGRVINISSVAGLMGNSGQVNYSSSKSAMVGFSRSLAKELGSRNITSNVVAPGFIETDMTTFLNDDEKAEVSKNIPMKRFGTVQDVAKCIVFLASDEANYITGQTISVDGGLFMY

SEQ ID NO: 83248 - protein, 179 aa, Unknown
  Bacterial polypetide isolated from the Sargasso Sea
IEDFINNVHEKLEGIDILINNAGITLDNLSIRLTEEDWKKVLDINLTSTFLMCKSVIKKMLKKKYGKIINITSIVGHTGNLGQANYAASKAGIIAFSKSLAIEYAKKNINVNCVSPGFIKTEMTDKINEDFKKNLISKIPSGNLGTGEDVSNCVAFLASDMATYINGETIHVNGGMYMS

SEQ ID NO: 83249 - protein, 225 aa, Unknown
  Bacterial polypetide isolated from the Sargasso Sea
MVFNLKGKSALVTGASGGIGSAVTRALHNQGAELIINGTRSSELEKLAAELGDRVHVLQSDLADANSIGHLAEEAEKISDNGIDILVNNAGITRDNLLVRLSDQDLMDVINLNLIAGFQLTRKIIRGMMRRKWGRVIGISSVVGITGNAGQTNYAAAKAGMIGFSKALALEVASRGITVNNIAPGFIKTPMTKDLSEEQVTRLQASVPIGRLGEAEDVAAAVVYL

SEQ ID NO: 83250 - protein, 208 aa, Unknown
  Bacterial polypetide isolated from the Sargasso Sea
MNHISKNELKEIKENGTKCFSYQLDVTDFNAVDSIVKKIIDETGGIQILVNNAGITQDNLFMRMKPEQWLQVIDVNLNGVFHVTKAVIRTMIKQHSGRIINISSVVGFSGNPGQVNYSSTKSGLIGFTKSLSREVGTRGITVNAVAPGFINTAMTQALNESQQQSILSQIPMGRMGEAVDIANAVAFLASKEASYITGTVLHVNGGMY

SEQ ID NO: 83251 - protein, 224 aa, Unknown
  Bacterial polypetide isolated from the Sargasso Sea
DLAYSGLKVIGTATTSEGASRISSYLNEMEVPGMGMRVDVADDSSVESLFSDIHESFGSPMILVNNAGITRDNLLMRMKVDEWQSVVDTNLNSMFRVTKLCLKGMTKARWGRIINISSVVGASGNAGQTNYAASKAGIEGFTRSLAKEIGSRGVTVNSVAPGFIDTDMTSSLAETQVDSLLAQIPLRRLGTPEEIASVVRFLVSEKANYITGETIHVNGGMFMG

SEQ ID NO: 83252 - protein, 222 aa, Unknown
  Bacterial polypetide isolated from the Sargasso Sea
VEKFDNFGSNIIATGTNEEKLANLKKKFPNIHTEKFKLDEHKKIEQFIDVIEKKLGGLDVLINNAGITLDNLSIRLSEENWKKVLDINLTSTFLMCKASIKKMLKNKYGKIINVTSIVGHTGNLGQANYAASKAGIVAFSKSLAIEYAKKNININCVSPGFIKTEMTDNINEEFKKTLISKIPSGKLGTGEDVSNCVAFLASDLSNYINGETIHVNGGMYMA

SEQ ID NO: 83253 - protein, 238 aa, Unknown
  Bacterial polypetide isolated from the Sargasso Sea
KKILITGATGGIGYALVKKFVSLQGTIVATGTKTEKLDSLKKEFPNISVIKFDISDHSKIEEFIESASSQLTGLDVLVNNAGINMDNLSLRMKDEEWKKVIDVNLGSTFFLCKHAIKKMLKNKYGRIVNITSIVGHTGNLGQSNYAASKAGIIGMSKSLAIEYAKKNITINCVSPGFIQSKMTDNIIESIKSVLTSRIPMSKLGTGEDVANTVAFLSSDAASYITGETVHVNGGMYMG

SEQ ID NO: 83254 - protein, 198 aa, Unknown
  Bacterial polypetide isolated from the Sargasso Sea
MFKLNKKVALVTGASRGIGKEIAKLVSQAGAHVVCLARSEKKIKELCDFINNNHNGSASYYCCDINDSEKFSEIIKSTVKKFGSLDILINNAGITRDSLLLRLSEENWDIVLDTNLKATFHSIKASLRPMFKNKFGRIINITSIVGLTGNQGQANYAASKSGLIGMSKSIAKEVASRGITVNCIAPGWIETEMTNEIP

SEQ ID NO: 83255 - protein, 236 aa, Unknown
  Bacterial polypetide isolated from the Sargasso Sea
MITGAGRGIGKTIAEKLAKFGSNIALADMNPVSDDVLKEIEENGTKCLAYKLDVTDFDAVDSVVKKIIDETGGIHILVNNAGITKDNLFMRMKPEQWLQVIDVNLNGVFHVTKSVIRTMVKQHSGRIINISSVVGFSGNPGQVNYSSTKSGLIGFTKSLSREVGTRGITVNAVAPGFINTAMTQALNESQQQAILSQIPLGRMGEADDIANAVAFLASEEASYITGTVLHVNGGMY

SEQ ID NO: 83256 - protein, 228 aa, Unknown
  Bacterial polypetide isolated from the Sargasso Sea
MFDLHNQIALVTGASGGIGAQIATALHAQGATVVLHGTRASKLEALKAALGERTVTVTANLANRDAVAGLVDSASEAGGGPINILVNNAGITRDGLLMRMKNDDWDDVLEVNLTASMILCRAAMRVMMKARSGRIISISSVVGVTGNPGQTNYAASKAGIIGFSKSLAAEVASRGITVNVVAPGFIATPMTDVLDEAQKAALLTRVPAGRLGTAAEIAASVLFLQVTR

SEQ ID NO: 83257 - protein, 193 aa, Unknown
  Bacterial polypetide isolated from the Sargasso Sea
INCQHLIVDVNDRDSIASVMKDIPGENNTLDCLVNNAGITADQLFIRMKDSEWDDVINTNLTGIFNITKPVSKMMLKQKSGSIINISSVSGLMGNAGQVNYSSSKSALLGFTKSLAKELAPRGINVNCICPGFIESDMTNELTSDQRDQALSQIPLGNFGSDTDIAKLTLFLSSDNAKYITGQSISVDGGMYM

SEQ ID NO: 83258 - protein, 244 aa, Unknown
  Bacterial polypetide isolated from the Sargasso Sea
MNDLKEKNIIVTGASGGIGNSIIEKFYECGANILASGTKVEKLELLKKKFNNIKILKFDISQSEKIEEFIESASNELGGLDCIVNNAGITQDNLAIRMSLEEWKNVININLTSTFLLSKFAIKKMLKNKKGKIVNITSIVGHTGNLGQVNYSASKAGIVAMSKSLAIEYSKKNINVNCISPGFIKTAMTDKIDEKFKEVIISKIPSGRLGTPEDIANAVLFLASTKSDYINGETLHVNGGMYMA

SEQ ID NO: 83259 - protein, 181 aa, Unknown
  Bacterial polypetide isolated from the Sargasso Sea
QEDQVEQLMAAVLERSGSLDVLVNNAGITRDGLLMRMKTEDWQAVLELNLSGVFLCTRAITRTMLKQKRGRIINITSVVGLMGNAGQANYAAAKAGVIGFTRSTARELASRGITVNAVAPGFIATDMTKDLKADELLNAIPLGRYGQPEEVAGAVRFLAADPAAAYITGQVLQVDGGMVMA

SEQ ID NO: 83260 - protein, 198 aa, Unknown
  Bacterial polypetide isolated from the Sargasso Sea
KQEFPNINILKFDISDHSKIEEFIENTSSQLAGLDVLINNAGINMDNISLRMKNEEWEKVIDVNLGSTFYLCKYAIKKMLKNKYGRIVNITSIVGHTGNLGQANYSASKAAIIGMSKSLAIEYAKKNITINCVSPGFIQSNMTDKIVESIKAVLTSKIPMSKLGTGEDVSNTVAFLSSDAASYITGQTLHVNGGMYMG

SEQ ID NO: 83261 - protein, 175 aa, Unknown
  Bacterial polypetide isolated from the Sargasso Sea
SSAFEEIIKINGSVDILINNAGITRDGLLMRMKSEQWDDVLNTNLKGVFLCTKYASKFMMKKRSGSIVNISSVVGIIGNPGQANYSAAKAGVIGFTKTCAKEFASRGINVNAIAPGFIETEMTEKLNTEEILKVIPLGKLGSCTQIANLVSFLVSSDAGSYITGQTISIDGGMSI

SEQ ID NO: 83262 - protein, 216 aa, Unknown
  Bacterial polypetide isolated from the Sargasso Sea
MGSTIIATGTNQLKLDELKQKYSNIHIENFKLDKHDQIENFIEKVDTKLNNLEILVNNAGINIDNLSIRLSEENWKKVLDINLTSTFLMCKYAIKKMLKKKYGKIINITSIVGHTGNLGQANYSASKAGIVAFSKSLAIEYAKKNININCVSPGFIKTEMTDKINEEFKNNLISKIPSGMLGTGEDVSNCVAFLASDMSKYVNGETIHVNGGMYMS

SEQ ID NO: 83263 - protein, 201 aa, Unknown
  Bacterial polypetide isolated from the Sargasso Sea
MGELIGDDSAISAQLDLMSKESIKNLFADLKSEDLLPSVLVNNAGITKDQLFLRMKDEDWDDVIETNLNGLFRVTKAFIKPMVKNKFGRVINISSVAGLMGNSGQVNYSSSKSAMVGFSRSLAKELGSRNITSNVIAPGFIETDMTTFLNDDEKVEVSKNIPMKRFGTVQDVAKCIVFLASDEANYITGQTISVDGGLFMY

SEQ ID NO: 83264 - protein, 115 aa, Unknown
  Bacterial polypetide isolated from the Sargasso Sea
MSDIYKDKTVLVTGASRGIGKAIAYKFAKQGAYVIATATTEKSANQISADFVKNNFLGTGLVLNIADKLSVDKFENNIKNLNSPNILVNNAGITKDNLLMRMKDDEWEDVINTNY

SEQ ID NO: 83265 - protein, 220 aa, Unknown
  Bacterial polypetide isolated from the Sargasso Sea
KFESFGSNIVATGTNEEKLNILKSKFNNIHTEKFRLDEHSKIEDFIDRVDKKLEGIDILINNAGITLDNLSIRLSEENWKKVLDINLSSTFLMCKFAIKKMLKMKHGKIINITSIVGHTGNLGQANYAASKAGIIAFSKSLAIEYAKKNININCVSPGFIKTDMTDKINEEFKKNLINKIPSGKLGTGEDVSNCVAFLASDSADYINGETIHVNGGMYMA

SEQ ID NO: 83266 - protein, 186 aa, Unknown
  Bacterial polypetide isolated from the Sargasso Sea
MSDKKVALVTGASRGIGRAIAEQLIANGFFVVGTATTDKGAAAIGDALGENGAGKRLDVADKTSVDATLKSINEEFGAPLVLVNNAGITRDNIMLRMKEDEWDDVINTNLNSLYRVSKACLKGMTKARWGRIINISSVVGTMGNAGQANYAAAKGGVEGFSRALARELGSRNITVNSVAPGLYQTD

SEQ ID NO: 83267 - protein, 167 aa, Unknown
  Bacterial polypetide isolated from the Sargasso Sea
DGLDILVNNAGINLDNLSIRLNDENWQKVIDINLTSTFLMCKHSIKKMLKKKYGKIVNITSIVGHTGNLGQANYSASKAGIVAFSKSMAIEYAKKNININCVSPGFIKTEMTDKISDDFKKTLLSKIPSGTLGTGEDVSNCVAFLASDMANYINGETLHVNGGMYMA

SEQ ID NO: 83268 - protein, 167 aa, Unknown
  Bacterial polypetide isolated from the Sargasso Sea
MSPSASLAGQTALVTGGGRGIGRAIALALGEVGAEVVVNYSNSAAAADEVVAAITAAGGQAYALQANVSVEAEVDGLIKQVLERSGRLDVLVNNAGITRDGLLMRMKTDDWQAVIDLNLSGVFLCTRAVARPMLKQKSGRIINITSVVGLMGNAGQANYAAAKAGVI

SEQ ID NO: 83269 - protein, 267 aa, Unknown
  Bacterial polypetide isolated from the Sargasso Sea
MSSVAARALASRTAVAKFAPRAISARRAARAVRGAVAVPRAEASGPVCVVTGASRGIGAAIALALGSAGARVVVNYAASEGPANEVCEKIKAAGGDAIAVKANVAEPGEVDALFKATMDKFGEVNVLVNNAGITRDTLMMRMKLKQWQEVIDLNLTGVFLCSQAATKLMGKKKPVSGRIINITSVVGVTGNAGQANYAAAKAGVIGLTKTIAREYAGRNIQCNAIAPGFIASDMTAVLGEELEKKILTTIPAGRYGQPEEIAGLVKF

SEQ ID NO: 83270 - protein, 233 aa, Unknown
  Bacterial polypetide isolated from the Sargasso Sea
MGATGGIGNSLVEKFYNYGSSIVATGTNEEKLNNLKKKYPNILIEKFKLEEHDKIENFIETITKKLDGLDVLVNNAGITSDNLSIRLTEEHWKKVLDINLTSTFLMCKYVIKKMLKNKYGKIINITSIVGHTGNLGQANYAASKAGIIGFSKSLAIEYAKKNININCVSPGFIKTEMTDKINEEFKKILISKIPSGDLGTGEDISNCVAFLASDMSRYINGETIHVNGGMYMS

SEQ ID NO: 83271 - protein, 218 aa, Unknown
  Bacterial polypetide isolated from the Sargasso Sea
LEQKVFINYSSSDEKAEEVVNSIKNSGGKAHKLKFDVSREDSVSSAFEEIIKINGSIDILINNAGITRDGLLMRMKSEQWDDVLNTNLKGVFLCTKYASKFMMKKRSGSIVNISSVVGIIGNPGQANYSAAKAGVIGFTKTCAKEFASRGINVNAIAPGFIETEMTEKLNTEEILKVIPLGKLGSCTQIANLVSFLVSSDAGRYITGQTISIDGGMSI

SEQ ID NO: 83272 - protein, 207 aa, Unknown
  Bacterial polypetide isolated from the Sargasso Sea
MNFNGKTSLITGAGRGIGKTIAIKLAEFGSDIAIADMNPVSNDLIREIEKNGTKCLPYQLDVTDFEAVESVVKKIIEETGGIHILVNNAGITQDNLFMRMKPEQWTKVIDVNLNGVFHVTKSVIRTMVKQHSGRIVNISSVVGFSGNPGQVNYSSTKSGLIGFTKSLSREVGTRGITINAVAPGFINTAMTQSLNENQQQAILSQIP

SEQ ID NO: 83273 - protein, 189 aa, Unknown
  Bacterial polypetide isolated from the Sargasso Sea
EKFKLDEHDKIEKFIENVNSRLDGLDVLVNNAGIALDNLSLRLTEENWKKVLDINLTSSFLMCKCAIKKMLKNKSGKIINITSIVGHTGNIGQANYAASKAGIIAFSKSLALEYAKKNINVNCVSPGFIKTDMTDKINEDFKKTLISKIPSGDLGSGEDVSNCVAFLASDMARYINGETIHVNGGMYMA

SEQ ID NO: 83274 - protein, 177 aa, Unknown
  Bacterial polypetide isolated from the Sargasso Sea
MGLLDNKVIIITGASRGIGKAIAQECVQQGAKVAFTYLSSEEKAKALESELSNSGGTAKGFKSDASVFDEAQSLVDAVVEEFGTVDVLVNNAGITRDTLLMRMSEQQWDEVMNTNLKSAFNLTKAVQRTMLKARSGSIINMSSVVGVKGNAGQANYAASKAGLIGFTKSVAQELGSR

SEQ ID NO: 83275 - protein, 252 aa, Unknown
  Bacterial polypetide isolated from the Sargasso Sea
MKLDGKVALVTGAGTGVGAATARLLASKGCRLAINYRKSEAGAKEVVASIIESGGEAFACQADVAEDAEARALVESIREKYGCLDLLVNNAGITEFIPFDDLDAVTDEAWHRLMQVNLVGAFHCARAAVALMQKTEPADGAEIVNVGSIAGLKATGSCIPYAASKAALHNLTLALARTLAPLIRVNAVAPGFITGRWLQDGLGEGYEATKAAFEKAMPLEAVCDPEDVAEAIVSLVEGSDLVTGQILACDGG

SEQ ID NO: 83276 - protein, 249 aa, Unknown
  Bacterial polypetide isolated from the Sargasso Sea
MSNTDSLSGKVALITGASRGIGKEIALELSRLGAEVFINYSSSDEKAEEVVNSIKNSGGKAHKLKFDVSKEDSVSSAFEEIIKINGTIDILINNAGITRDGLLMRMKSEQWDDVLNTNLKGVFLCTKYASKFMMKKRTGCIVNISSVVGLIGNPGQANYSAAKAGVIGFTKTCAKEFASRGINVNAIAPGFIETEMTEKLNTEDILKVIPLGKLGSCSQIANLVSFLVSSNAGSYITGQTISIDGGMSI

SEQ ID NO: 83277 - protein, 186 aa, Unknown
  Bacterial polypetide isolated from the Sargasso Sea
KLDVTDFDAVDLVVKKIFDETGGIQILVNNAGITQDNLFMRMKPEQWLQVIDVNLNGVFNVTKSVIRTMVKQHSGRIINISSVVGFSGNPGQVNYSSTKSGLIGFTKSLSREVGTRGITVNAVAPGFINTEMTQALNESQQQAILSQIPLGRMGEADDIANAVAFLASEEASYITGTVLHVNGGMY

SEQ ID NO: 83278 - protein, 237 aa, Unknown
  Bacterial polypetide isolated from the Sargasso Sea
MVTGASRGIGAAIALELAVRGYQVVGTATTDEGAARIGQALSAYPGCRGANLNVNDVAAVEALMDAIVKQQGGLHVLVNNAGITRDTLAMRMKDDDWDAVLDTNLKAVFRTSRAAIRPMMKQRFGRIISITSVVGASGNPGQANYAAAKAGVAGMTRALARELGSRNITVNCVAPGFIETDMTSVLPEEQQKALNAQIPLGHMGKPADIAHAVAYLASREAGYVTGQELHVNGGMYM

SEQ ID NO: 83279 - protein, 152 aa, Unknown
  Bacterial polypetide isolated from the Sargasso Sea
NLSLRMTDEQWKKVVDINLGSTFLLTKHAIKKMLKNKYGRIVNITSIVGHTGNLGQANYAASKAGIVGMSKSLAIEYAKKNITINCVSPGFIQTKMTDNILESIKAVLTSKIPMSRLGSGEDVANTVAFLASDAASYITGETIHVNGGMYMS

SEQ ID NO: 83280 - protein, 244 aa, Unknown
  Bacterial polypetide isolated from the Sargasso Sea
MINFKDKKILITGATGGIGNSLVKKFLSLEGTVLATGTNSEKLDALKKEFPNISVLKFDISEHSKIEEFIENANSQLVGLDILVNNAGITMDNLSLRMKDEEWRKVIDINLTSTFYLCKHAIKKMLRNKYGRIVNITSIVGHTGNLGQANYSASKAGMVAMSKSLAIEYAKKNITVNCVSPGFIQSKMTDKIVESIKAVLTSKIPMSKLGTGEDVSNTVAFLSSDAASYITGETIHVNGGMYMA

SEQ ID NO: 83281 - protein, 194 aa, Unknown
  Bacterial polypetide isolated from the Sargasso Sea
RTATVTANLANRDAVAGLVDSASEVVGGPIDILVNNAGITRDGLLMRMKNDDWNDVLEVNLTANMILCRAAMRAMIKARSGRIISISSVVGVTGNPGQTNYAASKAGMIGFSKSLAAEVAGRGITVNVVAPGFIETPMTDVLDEGQKAALLTRVPVGRLGTTAEIAASVVFLASDEAAYITGTTMHVNGGMAML

SEQ ID NO: 83282 - protein, 238 aa, Unknown
  Bacterial polypetide isolated from the Sargasso Sea
MNSQYVFVSGASRGIGQSILKLFSSKGFPVIGTATSQEGVNFIDGILSKSSGGGFGIQLDLSDKQSIENLFDTLKEKDINPEIIVNNAGITRDNIFLRMKDTEWDEVIQVHLSSVFSLLKFFSKKMVKNKSGRIINISSTSASIGNKGQANYAAAKSGLEAFSRSLARELAPRNITVNCVAPGFIETDMIKGMDEDTLKFMSDQIPLGRLGYPEDVADLIYFLSSEEANYITGQTIHI

SEQ ID NO: 83283 - protein, 249 aa, Unknown
  Bacterial polypetide isolated from the Sargasso Sea
MSDSQNDEKTIALVTGASRGIGAAVARVLVEQNMTVVGTSTSEAGAAGISEALSGLGGTGKVLNVTDPKSVDALISGIREDLGDPLVLINNAGITQDNILMRMKEDEWQQVIDTNLTALYRLSKACLRGMTKARWGRIINITSVVGSMGNAGQSNYAATKAGAEGMARSLARELGSRSVTVNCIAPGFIDTDMTRVLADEQRDVLQNQIPLGRLGSADDVAAAVAFLASDAAQYITGETLHVNGGLYMG

SEQ ID NO: 83284 - protein, 145 aa, Unknown
  Bacterial polypetide isolated from the Sargasso Sea
MEESRVAVVTGAGRGIGRAIAESLAGQGMKVFCVSKTESSCGAAAEAICESGAKAVALPVDVSSGDEIRKACEGILEEHECVDVLVNNAGITRDNLLFRMEEADWNDVLNTNLTSCFHWIKMLGRPMTRKRWGRIVNVSSVVALR

SEQ ID NO: 83285 - protein, 202 aa, Unknown
  Bacterial polypetide isolated from the Sargasso Sea
MKLLENKVALITGGGRGIGRSICESFAENGCNVAFTYNSSKEAAENLVEELKKYDVKVKSYKSDASDHDKSVELIENVISDFDRIDVLVNNAGITKDNLLMRMSPSDFKDVVNVNLGSVFNLTKSSIRIFLKQKEGSIINISSIVGVKGNAGQSNYAASKAGIIGFSKSIALELGSRNIRCNVVAPGFIETDMTDSLSDNVL

SEQ ID NO: 83286 - protein, 184 aa, Unknown
  Bacterial polypetide isolated from the Sargasso Sea
DVTDPEAIDKMVSEVVGSQGRIDILVNNAGITQDNLMMRMKAEQWSKVIDVNLNGVFHITRAVLKTMMKQRSGKIISISSVVGFSGNPGQVNYSSTKAALVGFTKSLAREVGSRGITVNAVAPGFIDTAMTQALNETQQEEILRQIPLKRMGMPEDIAHAVDFLASEKADYITGTVLHVNGGMY

SEQ ID NO: 83287 - protein, 250 aa, Unknown
  Bacterial polypetide isolated from the Sargasso Sea
MLSSASLDGQTALVTGGGRGIGKAIALALAEAGAEVVVNYANSAGAADEVVASINAAGGKAYALKANVSIEEEVDGLIKAVLERSGRLDVLVNNAGITRDGLLMRMKTSDWQAVIDLNLSGVFLCSRAVARPMLKQKSGRIINITSVVGLMGNAGQANYAAAKAGVIGLTKSTAKELASRGITVNAVAPGFIATDMTKDLDADAILKDIPLGQFGTQEQVAGAVRFLAADPAAAYITGQVLQVDGGMVMA

SEQ ID NO: 83288 - protein, 240 aa, Unknown
  Bacterial polypetide isolated from the Sargasso Sea
MTKVALVTGGTRGIGAAISIALKNSGCKVAATYGSNSEAAEKFSSENGVEVFKWNVADPAACEDGVKQVVEKLGAVDILVNNAGITKAAMTHKMTIEQWDDVIRVDLDSVFYMTRCVLDGMREKGFGRIISISSINGQKGQMGVVNYSAAKAGVIGFTKALAQETARKNITVNAVAPGYISTELLADTPEKVMEGILAQIPIGRLGTVDEVSRIVTFLASDDAGFITGSTISANGGQYFS

SEQ ID NO: 83289 - protein, 203 aa, Unknown
  Bacterial polypetide isolated from the Sargasso Sea
MSKIVLVTGASRGIGLEAAKHFSKEGYKVIGTSRGDFNLGELIGDESAISVQLDLMSKESIKDLFADLKSDDLLPSVLVNNAGITKDQLFLRMKDEDWDDVIETNLNGLFRVTKAFIKPMVKNKFGRVINISSVAGLMGNSGQVNYSSSKSAMIGFSRSLAKELGSRNITSNVVAPGFIETDMTTFLNDNEKVEVSKNIPMKR

SEQ ID NO: 83290 - protein, 243 aa, Unknown
  Bacterial polypetide isolated from the Sargasso Sea
MNLKNKKILITGATGGIGNTLVKKFLELGAEVLATGTNEEKLKKLKNTYPNVKCLRFKLNDHDKIEEFVNDCFNELGGLDVLINNAGITLDNISVRLNQDDWKKVIDINLTSTFLMCKFSIKKMLKNKYGKIINITSVVGHTGNLGQANYAASKAGIIGFSKSLAIEYAKKKININCVSPGFIRTEMTDKISEDFKKILINKIPSGYLGSGEDVSNCVAFLASDLSDYITGETIHVNGGMYMA

SEQ ID NO: 83291 - protein, 244 aa, Unknown
  Bacterial polypetide isolated from the Sargasso Sea
MKDLEKKNIIITGASGGIGNSIVEKLNECGANILASGTKIEKLEELKNKFNNVKILKFDISQSEKIEEFIENASNELGGLDCIVNNAGITQDNLAIRMSLEEWKNVININLTSTFFMSKYAIKKMLKNKKGKIINITSVVGHTGNLGQANYTASKAGIVAMSKSLAIEYAKKNINVNCISPGFIKTAMTDKIDEKFKEVIISKIPSGRLGTPEDIANAVLFLASTKSNYINGETLHVNGGMYMA

SEQ ID NO: 83292 - protein, 242 aa, Unknown
  Bacterial polypetide isolated from the Sargasso Sea
MKTVFVTGASRGIGKSIALELGKNNQVVVGFSNSQDKADEVVEEIKKLGGESLAVQLNIQDRDSVDKAFNLIEEAYKHVDILVNNAGITKDNILPRMKDDEWNDVIQTNLTGNFYTSQRAIKKMIKNKWGRLIFISSVVGISGNQGQANYAASKAGLIGLSKSISKEVGSRNITSNVIAPGYIETDMTSFIDDENKENIIEQLSIKRMGMPEDIANMVSFLCKDESEYITGQVIPIDGGLTT

SEQ ID NO: 83293 - protein, 244 aa, Unknown
  Bacterial polypetide isolated from the Sargasso Sea
MGQEKKLALITGAGRGIGKVIALQLAKSGADIALTDLNPELEDLKSELNKLGSKCLDFQVDVTDPEAIDKMVSEVVGSQGRIDILVNNAGITQDNLMMRMKAEQWSKVIDVNLNGVFHITRAVLKTMMKQRSGKIISISSVVGFSGNPGQVNYSSTKAALVGFTKSLAREVGSRGITVNAVAPGFIDTAMTQALNETQQEEILRQIPLKRMGVPEDIAHAVDFLASEKADYITGTVLHVNGGMY

SEQ ID NO: 83294 - protein, 236 aa, Unknown
  Bacterial polypetide isolated from the Sargasso Sea
MSLAGKVALVTGASRGIGRAIAETLVEAGAIVVGTATSEKGAAAIQEYLGDKGFGLVLNVTDSQSVTDLFDSIKEKAGDVDILVNNAGITRDNLLMRMKDDEWNDIIDTNLTSLFRLSKPVMRTMMKKRFGRIINIGSVVGTMGNAGQVNYSAAKAGLIGFTKSLAREVASRQITVNAIAPGFIQTDMTDELTEDQQKAIMSQVPMERLGQAQEIANAVLFLASDSAAYITGETLH

SEQ ID NO: 83295 - protein, 244 aa, Unknown
  Bacterial polypetide isolated from the Sargasso Sea
MINFKGKKILITGATGGIGYALVKKFLSLDGTVLATGTNSEKLDSLKKEFPNLNVLKFDISDHSKVEEFIENVASQMVGLDVLVNNAGITMDNLSLRMKDEEWKKVIDINLSSTFYLCKYAIKKMLKNKYGRIVNITSIVGHTGNLGQTNYSASKAGIVAMSKSLAIEYAKKNITINCVSPGFIQSKMTDKIVENIKAVLTSRIPMSKLGTGEDVSNTVAFLSSDAASYITGETIHVNGGMYMA

SEQ ID NO: 83296 - protein, 248 aa, Unknown
  Bacterial polypetide isolated from the Sargasso Sea
MFNLVNKVAIVTGASRGIGKAIAEAVAQAGAHVVCVSRSENELIKISSNLNENGMSSSYFVCDVSDLEVFNKLAKDTISKYKRIDILVNNAGITKDGLIMRMTESDWNTVIDINLKGVFNGVKSVSRQMMKQKYGRIINISSIVGLIGNPGQANYAASKSGVIGLGKAVSKELAPRNITVNTIAPGYIDTEMVEKIDEKAKHKLLNQIPLGRIGSPEDIATTVVYLASDEAGYVSGQTIAVDGGMTTT

SEQ ID NO: 83297 - protein, 249 aa, Unknown
  Bacterial polypetide isolated from the Sargasso Sea
MSNTDSLSGKVALITGASRGIGKEIALELSRLGAEVFINYSSSDEKAEEVVNSIKNSGGKAHKLKFDVSREDSVSSAFEEIIKINGSIDILINNAGITRDGLLMRMKSEQWDDVLNTNLKGVFLCTKYASKFMMKKRSGSIVNISSVVGIIGNPGQANYSAAKAGVIGFTKTCAKEFASRGINVNAIAPGFIETEMTEKLNTEEILKVIPLGKLGSCTQIANLVSFLVSSDAGSYITGQTISIDGGMSI

SEQ ID NO: 83298 - protein, 248 aa, Unknown
  Bacterial polypetide isolated from the Sargasso Sea
MKLLENKVALITGGGRGIGRSICESFAENGCNVAFTYNSSKEAAENLVEELKKYDVKVKSYKSDASDHDKSVELIDNVISDFERIDVLVNNAGITKDNLLMRMSPSDFKDVVNVNLGSVFNLTKSSIRIFLKQKEGSIINISSIVGVKGNAGQSNYAASKAGIIGFSKSIALELGSRNIRCNVVAPGFIETDMTDSLSDDVLEKWKESIPLKRSGKPNDVGNACVFLASDLSSYITGQVLQVDGGLLT

SEQ ID NO: 83299 - protein, 247 aa, Unknown
  Bacterial polypetide isolated from the Sargasso Sea
MTKRIAVVTGGMGGLGEAVSIRLNDAGHRVVVTYSPNNTGADRWLTEMHAAGRAFHAYPVDVADHDSCQQCIEKIVRDVGPVDILVNNAGITRDMTLRKLDKVNWDAVIRTNLDSVFNMTKPVCEGMVERGWGRIVNISSVNGSKGSVGQTNYAAAKAGMHGFTKSLALEIARKGVTVNTVSPGYLATKMVTAIPQDILDSKILPQIPAGRLGKPEEVAALVAYLCSEEAGFVTGSNIAINGGQHMH

SEQ ID NO: 83300 - protein, 242 aa, Unknown
  Bacterial polypetide isolated from the Sargasso Sea
MKTVFVTGASRGIGKSIALELGKDYQVIVGFGNSKDKAEEVVEEIKKLGGESLAVQLNIADRNSVDEAFNLIEKTYKNVDILVNNAGITKDNILPRMKDYEWNDVIQTNLTGNFYTSQRAIKKMIKNKWGRLIFISSVVGISGNQGQANYAASKAGLIGLSKSISKEVGSRNITSNVVAPGYIETDMTSFINDENKENIIEQLSIKRMGMPEDIANMVSFLCKDESEYITGQVIPIDGGLTT

SEQ ID NO: 83301 - protein, 244 aa, Unknown
  Bacterial polypetide isolated from the Sargasso Sea
HNKIAIVTGASQGIGKTIALELSKSGAFVYCISRNKKAIESVVDSIINNGGQSSSFACDISDSDKFKDIVEKIIKKHNKVDILVNNAGITNDALLMRMSNEQWDQVIDTNLKGAFICIKSVVKYMMKNKYGRIINITSIVGLTGNAGQANYAASKSGLIGMTKSIAKEVASRGITANCIAPGWIKTSMTDILTEEVKNQFLSQIPVGRIGSANDIANTVIFLASDEAGYITGQTITVDGGRIIN

SEQ ID NO: 83302 - protein, 239 aa, Unknown
  Bacterial polypetide isolated from the Sargasso Sea
MSKIVLVTGASRGIGLEAAKHFSKKGYKVIGTSRGDFNLGELIGNESAISVQLDLTSKESIKNLFANLKSEDLLPSVLVNNAGITKDQLFLRMKDEDWDDVIETNLNGLFRVTKAFIKPMVKNKFGRVINISSVAGLMGNSGQVNYSSSKSAMVGFSRSLAKELGSRNITSNVVAPGFIETDMTTFLDDDEKVEVSKNIPMKRFGTVQDVAKCIVFLASDEANYITGQTISVDGGLFMY

SEQ ID NO: 83303 - protein, 240 aa, Unknown
  Bacterial polypetide isolated from the Sargasso Sea
MTKVALVTGGTRGIGAAISIALKNSGCKVAATYGSNSEAADKFSSENGVEVFKWNVADPAACEDGVKQVVEKLGAVDILVNNAGITKAAMTHKMTIEQWDDVIRVDLDSVFYMTRCVLDGMREKGFGRIISISSINGQKGQMGVVNYSAAKAGVIGFTKALAQETARKNITVNAVAPGYISTELLADTPEKVMEGILAQIPIGRLGTVDEVSRIVTFLASDDAGFITGSTISANGGQYFS

SEQ ID NO: 83304 - protein, 236 aa, Unknown
  Bacterial polypetide isolated from the Sargasso Sea
MKTALVTGASRGIGRAIALEFKEKGYSVIGTATSENGASELNDIGIQGFVLDLNSHESIGSFWQKLEDNNQNISLLVNNAGITRDNIVLRMSDEEWSDIMNVHLYGTFQLCKRSLKMMLKSKWGRIINISSASASIGNRGQSNYAAAKAGVEAFTKSLAKEVGKRDITINAVAPGFISTDMTEKNDGVNEDYLIKEIPLGRFGEPAEVANLVTFLCSEEASYITGQTIHINGGLYM

SEQ ID NO: 83305 - protein, 140 aa, Unknown
  Bacterial polypetide isolated from the Sargasso Sea
MSKIVLVTGASRGIGLEVAKHFSKEGYKVIGTSRGDFNLGELIGDDSAISVQLDLMSKQSIKNLFADLKSQDLLPSVLVNNAGITKDQLFMRMKDEEWDDVIETNLNGLFRVTKAFIKSMVKNKFGRVINISSVAGLMGN

SEQ ID NO: 83306 - protein, 242 aa, Unknown
  Bacterial polypetide isolated from the Sargasso Sea
MKTVFVTGASRGIGKSIALELGKNYHVIVGFSNSKDKADEVVEEIKKLGGESLAVQLNIADRNSVDEAFNLIEETYKHVDILVNNAGITKDNILPRMKDDEWNDVIQTNLTGNFYTSQRAIKKMIKNKWGRLIFISSVVGISGNQGQANYAASKAGLIGLSKSISKEVGSRNITSNVIAPGYIDTDMTSFINDENKENIIEQLSIKRMGMPEDIANMVSFLCKDESEYITGQVIPIDGGLTT

SEQ ID NO: 83307 - protein, 245 aa, Unknown
  Bacterial polypetide isolated from the Sargasso Sea
MFDLKGKKALVTGASGGIGGEIAKTLNEAGAEVAISGTRLESLQVLSDLLDGNTQIFPCNLSDPIAIEDLLRDASEKMGGIDILVNNAGITRDNLFMRMSDEEWQTVLDINLTATMKLCKGVVRGMMKNRWGRIVNISSVVGSTGNPGQANYAASKAGMVGMSKSLAFEVASRGITVNIIAPGFIETPMTDKLNEDQKTNIMTQIPAGRMGTAAEIASAALYLASPEASYLTGATLHINGGMAMI

SEQ ID NO: 83308 - protein, 223 aa, Unknown
  Bacterial polypetide isolated from the Sargasso Sea
LELSNLGAEVIINYSSSDEKAEEVVNLIKESGGKVHKLKFDVSKEESVSRAFEEIIKINGAIDILVNNAGITRDGLLMRMKSEQWDDVLNTNLKGVFLCTKYASKFMIKKRSGKIINISSIVGIIGNPGQANYSAAKAGVIGFTKTCAKEFASRGINVNAIAPGFIETEMTEKLNNEEIIKAIPLGKLGSCSQIANLVSFLVSSNAGSYITGQTISIDGGMSI

SEQ ID NO: 83309 - protein, 157 aa, Unknown
  Bacterial polypetide isolated from the Sargasso Sea
GITRDNLLMRMKDDEWNEIIDTNLTSLYRLSKPVLRAMMKKRNGRIISIGSVVGTMGNAGQVNYAAAKAGLVGFTKSLAREVASRGITVNAVAPGFIETDMTKALNEEQRAGIMSQVPAARLGDPKEIAAAVVFLASDDAAYITGETLHVNGGMYMV

SEQ ID NO: 83310 - protein, 156 aa, Unknown
  Bacterial polypetide isolated from the Sargasso Sea
MKTVFVTGASRGIGKSIALELGKNYQVVVGFSNSQDKADEVVEEIKKLGGESLSVQLNIEDRNSVDKAFNLIEEAYKHVDILVNNAGITKDNILPRMKDDEWNDVIQTNLTGNFYTSQRAIKKMIKNKWGRLIFISSVVGISGNQGQANYAASKAG

SEQ ID NO: 83311 - protein, 237 aa, Unknown
  Bacterial polypetide isolated from the Sargasso Sea
MKEIIFVSGASRGIGNSIAKYFAEKGHIVLGTSRSKFKFDTQSDKLIPIQLDITSREDVKNCFKYLKEQNLLPSVLVNNAGITSDQLFLRMKDSEWDDVLSTNLTGVFNLTKVFIKQMIKNKNGRIINISSVSGLMGNPGQVNYSSSKAALNGFTKSLAKEVGSRNITVNNVAPGFIETDMTSFIDADKKDEIINTIPLGRFGNADDVSELVYFLSSNEAAYITGQTISVDGGLLMY

SEQ ID NO: 83312 - protein, 239 aa, Unknown
  Bacterial polypetide isolated from the Sargasso Sea
MSKIVLVTGASRGIGLEAAKHFSKEGYKVIGTSRGDFNLGELIGDERAISAQLDLMSKESIKNLFAELKSEDLLPSVLVNNAGITKDQLFLRMKDEDWDDVIETNLNGLFRVTKAFIKPMVKNKFGRVINISSVAGLMGNSGQVNYSSSKSAMVGFSRSLAKELGSRNITSNVVAPGFIETDMTTFLNDDEKVEVSKNIPMKRFGTVQDVAKCIVFLASDEANYITGQVISIDGGLFMY

SEQ ID NO: 83313 - protein, 239 aa, Unknown
  Bacterial polypetide isolated from the Sargasso Sea
MSKIVLVTGASRGIGLEAAKHFSKEGYKVIGTSRGDFNLGELIGDDSAISTQLDLMSKESIKNLFADLKSEDLLPSVLVNNAGITKDQLFLRMKDEDWDDVIETNLNGLFRVTKAFIKPMVKNKFGRVINISSVAGLMGNSGQINYSSSKSAMVGFSRSLAKELGSRNITSNVVAPGFIETDMTTFLNDNEKIEVSKNIPMKRFGTVEDVAKCIVFLASDEANYITGQTISVDGGLFMY

SEQ ID NO: 83314 - protein, 248 aa, Unknown
  Bacterial polypetide isolated from the Sargasso Sea
MSNLFSLEGKVVLITGASRGIGKAIATMLVAQGAKVAGTATSESGAANISDYLGDNGKGYALNVTDPASIEATLAAIKADLGDIDVLVNNAGITRDNLLMRMKEAEWDDIIDTNLSSIFRLSKAVLRPMMKKKNGRIINIGSVVGTMGNAGQANYAAAKAGVIGFSKSLAREVASRGITVNVIAPGFIQTDMTNELTDDQKAATLANVPAGRLGQPDEIAAAVCYLASDAAAYVSGETLHVNGAMYMV

SEQ ID NO: 83315 - protein, 201 aa, Unknown
  Bacterial polypetide isolated from the Sargasso Sea
MINLKNKKIVITGATGGIGNSLVDKFDKLGANILATGTNDEKLNNLKKNYDKIEIEKFKLDEHQNIEQFIDKIDKKLGGLDVLVNNAGITLDNLSIRLTEENWKRVIDINLTSTFLMCKYSIKKMLKKRYGKIVNITSIVGHTGNLGQANYAASKAGIIAFSKSLAIEYAKKNININCVSPGFIKTEMTDKINEDLKRINR

SEQ ID NO: 83316 - protein, 250 aa, Unknown
  Bacterial polypetide isolated from the Sargasso Sea
MSNRESLSGKVALITGASRGIGKEIALELSNSGADVIINYSSSDEKAEEVVNLIKKNSSGKVHKLKFDVSNEESVSKAFEEIIKINGTIDILVNNAGITRDGLLMRMKSDQWDDVLNTNLKGVFLCTKYASKFMLKKRSGKIINISSIVGIIGNPGQANYSAAKAGVIGFTKTCAKEFASRGINVNAIAPGFIETEMTENLNNEEILKAIPLGKLGSCSQIAKLVSFLVSSDAGNYITGQTISIDGGMSI

SEQ ID NO: 83317 - protein, 248 aa, Unknown
  Bacterial polypetide isolated from the Sargasso Sea
MSSTLELKGLVAIVTGGSRGIGRGIAEALADGGAIVAVVDLEALGAATSAAELPGEGHEGFACDVANADQVNSCLAEIEQQLGPVSILVNNAGITRDNLLMRMKDEEFDQVLAVNLKGTFNFTRAAARGMMKRRSGAILNIASVVGLTGNAGQVNYAASKAGVVGLTKSVAKEFASRGVRCNAIAPGFIRTQMTDELSEAQREPLMKQIPLGTLGEVEQIADVARFLVGPAASYITGQTLAVDGGMVM

SEQ ID NO: 83318 - protein, 249 aa, Unknown
  Bacterial polypetide isolated from the Sargasso Sea
MDKTLDKQVAIVTGASRGIGRSIALELARLGATVIGTATSESGAAAITAAFAEAGVTGRGAVLNVNDAAAAEALIDATVKEFGALNVLVNNAGITQDQLAMRMKDEDWDAVIDTNLKSVFRLSRAVLRPMMKARGGRIINITSVVGSAGNPGQVNYAAAKAGVAGMTRALAREIGSRGITVNCVAPGFIDTDMTKTLPEEQQAALKTQIPLGRLGSPEDIAHAVAFLASPQAGYITGTTLHVNGGMYMS

SEQ ID NO: 83319 - protein, 159 aa, Unknown
  Bacterial polypetide isolated from the Sargasso Sea
NNAGITRDNIILRMSDEEWSNIMNVHLYGTFQLSKRALKMMLKNKWGRIINISSASASMGNRGQSNYAAAKAGVEAFTKSLAKEVGKRDITINAVAPGFISTDMTENNKGVNADYLVKEIPLGRFGKPEEVASLISFMCSDGASYITGQTIHINGGLYM

SEQ ID NO: 83320 - protein, 168 aa, Unknown
  Bacterial polypetide isolated from the Sargasso Sea
IKINGSIDILINNAGITRDGLLMRMKSEQWDDVLNTNLKGVFLCTKYASKFMMKKRSGSIVNISSVVGIIGNPGQANYSAAKAGVIGFTKTCAKEFASRGINVNAIAPGFIETEMTEKLNTEEILKVIPLGKLGSCTQIANLVSFLVSSDAGRYITGQTISIDGGMSI

SEQ ID NO: 83321 - protein, 295 aa, Unknown
  Bacterial polypetide isolated from the Sargasso Sea
LLASVGCRWPVVVAERNYPPSNPQSLIWSLLRRLLYPSAALHVVQTQRIADWLHQLGLSSTSVVLPNPVVWPLPVQDPILQPDHFMSSDVRVVLAMGTKPFQKGFDRLLQAFQELAPRYPDLVLALVGVHPDHPDLAAPLQRTGSLRPRIVLPGRVGNPADWYQRADLFVLSSRYEGSPNVLLEAMAAGCPCLAVDCPTGPHEVIRHGANGWLLPERTDGFDLAMGIETCLNQPAECRRLGQAAREIRDQFSPAKVQAMFQRSLEPLLKPRVLVLVPTRRSPTETFVRANLARMP

SEQ ID NO: 83322 - protein, 143 aa, Unknown
  Bacterial polypetide isolated from the Sargasso Sea
HRLELAKKVCSAELLNPTNSSISEKMKDMGLKEGFDVGLEMSGSEFALRDMVDNMIMGGKVALLGIPSKEIKIDLNKIIFKALNLKAIYGREIYETWYKGLALIDSGLKIEEIITHRFKFEDYKKAFDLLNEGKAGKVILSWD

SEQ ID NO: 83323 - protein, 106 aa, Unknown
  Bacterial polypetide isolated from the Sargasso Sea
VGLEMSGSEIALKDMIQNMMMGGNIALLGLPSTPINLDISEIIFKALNIKAIYGREIFETWYKGLALLQSGLDIKNVITHEFHYSDYEKAFDLLNQGKAGKVILKW

SEQ ID NO: 83324 - protein, 162 aa, Unknown
  Bacterial polypetide isolated from the Sargasso Sea
DSLDNLRRNDLLIKINSDFKNKLDLKKDEYRLGGVLILFNNLLQSLFKSQILTLGFVMLGIFIMFIILFKNLKLALIGVVPNFIAAFFILGLIGLLGIPLDMMTITIAAITIGIAVDNSIHYIYRFKEEYEKLRNYNKTLKLCHSTVGKDILNTSITIVFGF

SEQ ID NO: 83325 - protein, 83 aa, Unknown
  Bacterial polypetide isolated from the Sargasso Sea
MKALVKHSPKEGIWMEDVTIPKCGVNDVKIKITHTAICGTDMHIYNWDEWAQKNLNLPLTVGHEFCGVIDEIGTAVTQYKAGD

SEQ ID NO: 83326 - protein, 62 aa, Unknown
  Bacterial polypetide isolated from the Sargasso Sea
MRTLAKLKPEEGIWMDEKPVPEPGYNDVIVKIRKTAICGTDVAIYNWNRWAQGVIPVSSLHI

SEQ ID NO: 83327 - protein, 296 aa, Unknown
  Bacterial polypetide isolated from the Sargasso Sea
LPNIIETVESFLATAGIGAIWSSCSPDFGTNGLIERFGQIKPKILIISDRYYYNGKEINIIERLPFILKKIKSIKNVIIIKYPGKNYLNYNKVKGINYFKWNDLLKIKYKKIIFKKYDFEQELAILYSSGTTGKPKCICHRAGGILLQHLKEHQLHCNIKPRDNVFYFTTCGWMMWNWLVSALSSYSSIVLFDGFPMFKRNDLLIKIAEKEKITLFGVSAKYIDSLRKLNFKAKLKYKLKSLKTICSTGSPLSVDNFNYIYKNIKKNVHLSSISGGTEIVSCFVLGNIYSPSFFQD

SEQ ID NO: 83328 - protein, 285 aa, Unknown
  Bacterial polypetide isolated from the Sargasso Sea
EHQLHCEIVPGDNVFYFTTCGWMMWNWLVSSLASKASIVLFDGFPMYRKNDLLIKIANKENITLFGISAKYIDVLRKLNLSFLSKYKLKKLKTICSTGSPLSEDGFKYIYKKIKTNVHLASISGGTDIVSCFVLGNIYSPVISGQIQNSGLGMNTDIFNEKGRSIRNKKGELVCKSPFPSMPKKFWNDKNNLKYKNAYFKRFKGVWHHGDYAERKSSNGYVIYGRSDATLNPGGVRLGTSEIYSVVEKFKEIKESIVVGQSWDNDIRIVLFVVLGNPNKFNQNLL

SEQ ID NO: 83329 - protein, 285 aa, Unknown
  Bacterial polypetide isolated from the Sargasso Sea
ESFIATSSIGAIWSSCSPDFGTYGVIERFAQIKPKILIISDRYYYNGKEINVIERLSIILKKIKSIKTVIIVNYPGKNYLNHKKKKGITYLYWKDLKKINYKEIQFKKYDFDNELAILYSSGTTGKPKCICHRTGGVLLQHLKEHQLHCNIKPKDNIFYFTTCGWMMWNWLITSLASRASIVLFDGFPMYKKNDLLIKIIEREKITLFGVSAKYIDTLKKLNIKANLKYKLKTLKTICSTGSPLSKDGFKYIYKNIKKNVHLSSISGGTDIVSCFVLRNIYSPVI

SEQ ID NO: 83330 - protein, 51 aa, Unknown
  Bacterial polypetide isolated from the Sargasso Sea
MKALIKKYPKKGIWMENVPQPKCRDNEVKIKITHTAICGTDLHIYNWDSWA

SEQ ID NO: 83331 - protein, 318 aa, Unknown
  Bacterial polypetide isolated from the Sargasso Sea
LLIFLVTFQFQTKILYFGTTIIIIFLSILGISKLEVENSFINYFDKNTEIYKGMKLIDEKLGGTTPLEVILKFPKQNETDQKSEDEEDDWGDEDENDEKYWFTKDKIDKIKKVHSYLDSLEPIGKVLSFSSIIDVATQLNNNKELGSLEMGVLYTKIPDNIKKEIVDPYISIKDSEARISLRIKDSLDNLRRNDLLIKINSDLENILNLKKDEFKLGGVLILFNNLLQSLFKSQILTLGFVMLGIFIMFIILFKNLKLALIGVVPNFIAAFFILGLIGLLGIPLDMMTITIAAITIGIAVDNSIHYIYRFKEEYAKLR

SEQ ID NO: 83332 - protein, 691 aa, Unknown
  Bacterial polypetide isolated from the Sargasso Sea
HNVITLLDIPLLSSSDEPLIERLQTYSTLTSPNIDKERGFNEILNSPVFRNFVISEDGKTSGIIVYLKSKDKVTEFKSKIEEELYKDNLKKQNHQNILEIRQIIKNFDSTSKIHLGGIPMIADDMMTFIKNDIIVFGLGVFVFIVATLWYVFRKLIWVIVPISSCFFSVLIMTGLLGLLGWKVTVISSNFIALMLILTMAMNIHISTRYLQLSKQFPKLNKFKIISLTTSKMFWPILYTALTTIFAFLSLVFSEIKPIIDFGFMMTFGLIISFLITFSLLPTLINLLNFNKVSLKEEKGTKITNFFSNISISRQNTIFGSTLIIICLSILGISKLEVENSFINYFDKKTEIYKGMKLIDEKLGGTTPLEVILKFPKKDEIEQKSDDEEDDWGDEDENDEKYWFTKDKINKIKKVHNYLDSLEPVGKVLSFSSIIDVATQLNNNKELGSLEMGVLYTKIPDNIKKEIVDPYISIKDSEARISLRIKDSLDDLRRNDLLIKIHSDLENKLNLKKDEYKLGGVLILFNNLLQSLFKSQILTLGFVMLGILIMFIILFQNLKLALIGVVPNFIAAFFILGLIGLLGIPLDMMTITIAAITIGIAVDNSIHYIYRFKEEYAKLKSYDKTLKLCHSTVGKAILNTSITIVFGFSILVMSNFIPTIYFGVFTGIAMLLAMVSVLTLLPSLLLKIKPFN

SEQ ID NO: 83333 - protein, 289 aa, Unknown
  Bacterial polypetide isolated from the Sargasso Sea
FTKDKIDKIKKVHNYLDSLEPIGKVLSFSSIIDVATQLNNNKELGSLEMGVLYTKIPDNIKKEIVDPYISIKDSEARISLRIKDSLDNLRRNDLLIKINSDLENKLNLKKDEYKLGGVLILFNNLLQSLFKSQILTLGFVMLGIFIMFIILFKNLKLALIGVVPNFIAAFFILGLIGLLGIPLDMMTITIAAITIGIAVDNSIHYIYRFKEEYAKLKNYNKTLKLCHSTVGKAILNTSITIVFGFSILVMSNFIPTIYFGVFTGIAMLLAMISVLTLLPSLLLKIKPFN

SEQ ID NO: 83334 - protein, 67 aa, Unknown
  Bacterial polypetide isolated from the Sargasso Sea
IVFKSITIKGIYGREIFETWYKMIVMLERGLDISKVITKKVAADEYQNAFDLMSSGQAGKIVMDWTV

SEQ ID NO: 83335 - protein, 60 aa, Unknown
  Bacterial polypetide isolated from the Sargasso Sea
MKALAKLKAEPGIWQTEVEMPKVGPNDVLIKIKKTAICGTDVHIYKWDEWAQKLFLMAWW

SEQ ID NO: 83336 - protein, 60 aa, Unknown
  Bacterial polypetide isolated from the Sargasso Sea
MNIKGIYGREMYETWYKMDQLLKSGLDISKLLTHELPSDEYEKAFEIMESGQCGKIILEW

SEQ ID NO: 83337 - protein, 74 aa, Unknown
  Bacterial polypetide isolated from the Sargasso Sea
MKALSKLKAEEGIWMTDVPEPEVGHNDLLIKIRKTAICGTDVHIYNWDEWSQKTIPVPMVVGHEYVGEVVASAR

SEQ ID NO: 83338 - protein, 190 aa, Unknown
  Bacterial polypetide isolated from the Sargasso Sea
MKSLVKQQPTRGIWMLDTDKPVMGHNDLLIKIRKTAICGTDMHIYQWDDWAQKTIPVPMVVGHEYVGEVVDMGQEVQGFKVGDRVSGEGHITCGHCRNCRAGRRHLCRNTEGVGVNRAGAFAEYLVIPAFNAFKIPDNISDDLASIFDPFGNAVHTALSFDLVGEDVLITGAGPIGIMAAAVARHVGARH

SEQ ID NO: 83339 - protein, 260 aa, Unknown
  Bacterial polypetide isolated from the Sargasso Sea
GDRVSAESHITGLNSRNAKAGKLHLDPDTVNIGVDRDGAFAEFITVPAKNVIKLPDSISDEIGAILDPFGNAVHATLSFDLVGEDVLVTGAGPIGIMSAAIAKHVGARNVLLTDINDNRLKLAKEVCNVETLNPLKEDLKAKMTEMALKEGFDVGLEMSGSERAIDQMMEAMIMGGNISLLGLPSDKIKFDLSKAIFKALNLKAIYGREIFETWYKGMALIDSGLNIENIITHKFHYSDFSEAFDLLNSGKAGKVILDWN

SEQ ID NO: 83340 - protein, 223 aa, Unknown
  Bacterial polypetide isolated from the Sargasso Sea
FAEYISIPAVNAFVVPDSISDDIASIFDPFGNATHTTLSFDLVGEDVLITGAGPIGIMAVAIARHVGARHVVISDINDYRLDLAKKMGATRAVNVGNASIENVMMELDMQEGFDVGMELSGNPNALENMIENMNHGGKVALLGFQPRDAQIDWNHVILKGLTLKGIYGREMFETWYKMGSMLQSDLNLSPVITHHYPINQFESGFQVMNSGQSGKVILDWNGC

SEQ ID NO: 83341 - protein, 291 aa, Unknown
  Bacterial polypetide isolated from the Sargasso Sea
MKALSKQYNKPGIWMVDVPEPECGPNDVKIKINKTAICGTDIHIFQWDEWAQSTIPVPMVTGHEFAGHVVEMGSEVRGFEVGQRVSGEGHLVCGVCRNCRAGKRHLCPNTQGVGVNRAGCFAEYLVMPASNVFALPDQISDEMGAILDPMGNAVHTALSFDLVGEDVLITGAGPIGAMAVAVAKHAGARHVVITDVNDYRLELANHMGATHAVNVAKQDLAEVIGALGMKEGFDVGLEMSGNGQAFNQMLSSLSNGAKVALLGIPPRDTTINWHDVIFKGLTIKGIYGREM

SEQ ID NO: 83342 - protein, 198 aa, Unknown
  Bacterial polypetide isolated from the Sargasso Sea
MKALVKREACPGLWLEDVPVPDVGINDVLIRVDRTGICGTDLHIYNWDAWAQKTIPVPMTVGHEFVGEIIAVGSNVYDFFPGEIVSGEGHVVCGRCRNCLAGRRHLCKDTQGVGVNRPGAFAEYIVLPMTNVWHHASDIDRDIASIFDPLGNAVHTALSFDVLGEDVLITGAGPIGLMGVAVARHAGARYVVITDVNP

SEQ ID NO: 83343 - protein, 230 aa, Unknown
  Bacterial polypetide isolated from the Sargasso Sea
NLGVDREGAFAEYLMMPASNVVALPESVSNEVGSILDPFGNAVHATLSFDLVGEDVLITGAGPIGIMSAAIAEHVGARNVLISDINDERLKLAQKVSNAQTFNPTKENLKEKMKSMGLKEGFDIGLEMSGSEAALDQMVDAMIMGGKVALLGIPPEKINFDLSKVIFKALTLKAIYGREVFETWYKGLALLDSGLDIKNIITHTFHYTEFEEAFNLLNSGKAGKVVLNWQ

SEQ ID NO: 83344 - protein, 88 aa, Unknown
  Bacterial polypetide isolated from the Sargasso Sea
MKALSKLKAEKGIWLVDAPKPEMGHNDLLIKIKKTAICGTDMHIYNWDEWSQKTIPVPMVVGHEYVGEVVDIGQEVRGFNIGDRVSGE

SEQ ID NO: 83345 - protein, 235 aa, Unknown
  Bacterial polypetide isolated from the Sargasso Sea
CRNTTGVGVNREGAFAEYLVIPAFNAFKIPDNISDELASIFDPFGNAVHTALSFDLVGEDVLITGAGPIGIMAAAVAKHVGARHVVITDVNEYRLELARKMGATRAVNVANEKLEDVMTDLGMTEGFDIGLEMSGVPSAFNSMLNNMNHGGKIAMLGIPPSDMAVDWNQVIFKGLVIKGIYGREMFETWYKMASLIQSGLNLSPIITHQYSVDDFQAGFDMMISGQSGKVILNWD

SEQ ID NO: 83346 - protein, 221 aa, Unknown
  Bacterial polypetide isolated from the Sargasso Sea
MKALVKEKSEVGLKLQEVDKPKVKSDEVLIKVKATAICGTDLHIWNWDTWASKTIKPPMTVGHEFMGEVIEIGDNVKGLELGDRVSAESHIVGSISRNARAGKLHLDPDTVNLGVDRDGAFAEFVSIPFRNVVKLPDSVDDEMGAILDPFGNAIHATLSFDLVGEDVLITGAGPIGIMSAAIALHVGARKVLITDINDDRLSLAKTVSAVETLNPSKENIK

SEQ ID NO: 83347 - protein, 158 aa, Unknown
  Bacterial polypetide isolated from the Sargasso Sea
CKLWEQRNIVITDENDFRLNLAKKFGASKAINVKTQNITDHFKDLKIINGFDVGLEMSGNPNALNDMLTHMHHGGKVSLLGLLPKTTNINWDDVIFKGLILKGIYGREMYETWYKMTQMLKSGLDVSQVITHRISVDNFEEGFRAMESGQCGKVIMRW

SEQ ID NO: 83348 - protein, 179 aa, Unknown
  Bacterial polypetide isolated from the Sargasso Sea
MVGEDVLITGAGPIGIMAVAICNFVGARNVVITDINDYRLSLAKELGATKIINTSKNSIEEFYTQLNMTNGFDVGLEMSGNPDAFNSMLEHMYHGGEIALLGLLPKSTSINWDNIIFKGLKVKGIYGREMFETWYKMTQMLKSGLDISKVLTHRFSIDNFEEAFDIIKSGNCGKVVLEW

SEQ ID NO: 83349 - protein, 206 aa, Unknown
  Bacterial polypetide isolated from the Sargasso Sea
ESISDEIGAILDPLGNAVHTALSFDLIGEDVLITGAGPIGIMAAAVTRFAGARNIVITDINQERLDLANNVVDAVTVNVMSQSLTDTMSKLNLKQGFDVGLEMSGSSAAFNQMVSALVTGGKIAMLGIPPSKTEVDWSQIVFKSIIIKGIYGREIFETWYKMIVMLERGLDVSKVITKEIPANKYKEGFNTMLAGGSGKIIMDWAH

SEQ ID NO: 83350 - protein, 155 aa, Unknown
  Bacterial polypetide isolated from the Sargasso Sea
GARHVVVTDVNPYRLELALKMGATRAVDVSKQNLKDVMQELGMTEGFDVGLEMSGVPAAFNSMLDTMNHGGKIAMLGIPPSTMAIDWNKVIFKGLVIKGIYGREMFETWYKMASLIQSGLDLSPIITHEMPMENYKEGFEIMCSGQSGKVILNWS

SEQ ID NO: 83351 - protein, 75 aa, Unknown
  Bacterial polypetide isolated from the Sargasso Sea
QDVAIDWNQVIFKGLVIKGIYGREMFETWYKMASLLQSGLDLSPIITHTFSVDDFQKGFDTMGSGHSGKVILDWQ

SEQ ID NO: 83352 - protein, 268 aa, Unknown
  Bacterial polypetide isolated from the Sargasso Sea
MRALAKIHSKPGIWVVERDKPHCGDHEVIIKVKKTAICGTDIHIYQWDQWAQNNIPIGTITGHEFVGIIHEKGSHVSDHFRIGQRVSAEGHLTCGKCRNCLAGIRHLCPNTTGIGVQHNGAFAEYISVPESNLYPIPDDISDDIAAIFDPLGNAVHTALTYDSVGEDILITGSGPIGIMAAMICQHIGARHVVITDVNEYRLQLAQKCGIRHAININNEKLKDVQKSLGMTEGFDVSLEMSGTRSGLNDIFEQTRLGGSIALLGIFKR

SEQ ID NO: 83353 - protein, 241 aa, Unknown
  Bacterial polypetide isolated from the Sargasso Sea
RNCMAGRRHLCNDTAGIGVTRPGAFAEYIALPQTNVWEHKPDIDLEVASIFDPFGNATHSALSFPVLGEDVLVTGAGPIGIMSAAIARHAGARHVVVTDVNEYRLKLAKKMGVTRAVNVRQESLSEVQRDLGMDEGFDVGLEMSGNPDAFNDMLSNMCHGGKIAMLGIPEKEMAIDWNKVVFNMLTIKGIYGREMYETWYKMTVMLEAGLDIAPVITHRFKFSDFEKGFETALSGQSGKVI

SEQ ID NO: 83354 - protein, 265 aa, Unknown
  Bacterial polypetide isolated from the Sargasso Sea
VRGFAKGDRVSGEGHLVCGFCRNCRAGRVHLCRNTIGVGVNREGSFAEYLSIPAFNVFKIPDNIPDNIAAIFDPFGNAVHTALSFDLVGEDVLITGAGPIGIMAVAVARHVGARHIVITDVNPYRLELARKMGATRAVDVSKEDLKDVMKELGMTEGFDVGLEMSGVPSAFRGMLDTINHGGKIAMLGIPPSDMAVDWNKVIFKGLVIKGIYGREMFETWYKMASLIQSGLDLSPIVTHEMPMENYKEGFEIMCSGQSGKVILNW

SEQ ID NO: 83355 - protein, 341 aa, Unknown
  Bacterial polypetide isolated from the Sargasso Sea
MKALAKLKAEPGIWQTEVEMPKVGPNDVLIKIKKTAICGTDVHIYKWDEWAQNTIPHGMVVGHEYVGEVVDMGSEVRGFAKGDRVSGEGHLVCGFCRNCRAGRVHLCRNTIGVGVNREGSFAEYLSIPAFNVFKIPDNIPDNIAAIFDPFGNAVHTALSFDLVGEDVLITGAGPIGIMAVAVARHVGARHIVITDVNPYRLELARKMGATRAVDVSKENLKDVMQELGMTEGFDVGLEMSGVPSAFRSMLDTINHGGKIAMLGIPPSDMAVDWNKVIFKGLVIKGIYGREMFETWYKMASLIQSGLDLTPIVTHEMPMENYKEGFEIMCSGQSGKVILNWS

SEQ ID NO: 83356 - protein, 294 aa, Unknown
  Bacterial polypetide isolated from the Sargasso Sea
MKALVKAESAVGLKLQDINVPELHSDDILIKVKKTAICGTDLHIWNWDKWASNTIKPPMTIGHEFMGEVHELGSNVKNFKIGDRVSAESHITGLNSRNAKAGKLHLDPDTVNIGVDRDGAFAEFIAVPGKNVIKLPDNISDEIGAILDPFGNAVHATLSFDLVGEDVLVTGAGPIGIMSAAIAKHVGARNILLTDINNNRLELAKEVCDIEILNPLNENLKEKMNEMGLKEGFDVGLEMSGSEQAIDQMMDAMIMGGNISLLGLPSDKIQFDLSKAIFKALNHKAIYGREILKL

SEQ ID NO: 83357 - protein, 218 aa, Unknown
  Bacterial polypetide isolated from the Sargasso Sea
MKALVKHSAKVGIWMEDVPEPECGTNEVKIKITHTGICGSDLHIYKWDEWAQRTLELPLVIGHEFCGIIEEIGPEVKHYKVGDRVSGEGHITCGSCRNCRAGKRHLCHKTFGVGIQTAGCFAEFLVLPESNVWSIDEEVSSKIAAFFDPFGNAVHTALSYDILGEDVLITGAGPIGIMCASICEFVGARNVVITDINEYRLDLAKKLGATKTIKSQRK

SEQ ID NO: 83358 - protein, 340 aa, Unknown
  Bacterial polypetide isolated from the Sargasso Sea
MKALVKHSPKMGIWMEDVDNPICGTNDVKIKITHTAICGTDIHIYDWDEWAEKNLELPLIVGHEFCGIIEEIGNGVTHYEVGERVSGEGHLTCGYCRNCRAGKRHLCHKTKGVGIHRSGAFAEYLVIPESNVWPIHKDIPSEIAAFFDPFGNAVHTALTYDLIGEDVLISGAGPIGIMAAAICKFSGSRNIVITDINDYRLNLALKLGATKAINPIKENIKDVFKELNIKHGFDIGLEMSGKPEAFNQMINHMYNGGSIALLGLLPESTTINWNDVIFKGLNIKGIYGRKMYDTWYKMTQMIRSGLSISEVLTHRFKVDDYQDAFKKLKSGNCGKVILEW

SEQ ID NO: 83359 - protein, 340 aa, Unknown
  Bacterial polypetide isolated from the Sargasso Sea
MKALVKKNPEKGIWIEDVPEPQCSTNDVKIKITHTAICGTDLHIFNWDNWAKRTLELPLIIGHEFCGIVEEVGPGVTHYKPGQRVSGEGHITCGHCRNCRAGKRHLCDQTIGIGIHRDGAFAEFLVIPESNVFPIHDEIPSEIASFFDPFGNAVHTSLSYEMVGEDVLITGAGPIGVMAVAICNFVGARNVVVTDINDYRLELAKAMGANKVINIAKNSIKEFYPELNMINGFDVGLEMSGNPDAFNSMLDHMYHGGKIALLGLLPKSTNINWDNIIFKGLKVKGIYGREMYETWYKMTQMLKSGLDISKVLTHRIAIDDYEQAFKIIESGDCGKVVLEW

SEQ ID NO: 83360 - protein, 341 aa, Unknown
  Bacterial polypetide isolated from the Sargasso Sea
MKSLVKAKAEKGIWLQDTPEPEVGHNDLLIKIRKTAICGTDMHIYNWDDWSQKTIPVPMVVGHEYVGEVVGMGQEVKGFKVGDRVSGEGHITCGHCRNCRAGRVHLCRNTEGVGVNRPGAFAEYLVIPAFNAFKIPDNISDDLASIFDPFGNAVHTALSFDLVGEDVLITGAGPIGIMAAAVAKHVGARHVVVTDINPYRLELAKKMGATRAVDVSKEDLKDVMNELGMTEGFDVGLEMSGVPVAFRDMLNKMNHGGKIAMLGIPPQDVAIDWNQVIFKGLVIKGIYGREMFETWYKMASLLQSGLDLSPIITHTFSIDDFQKGFDTMGSGHSGKVILDWQ

SEQ ID NO: 83361 - protein, 252 aa, Unknown
  Bacterial polypetide isolated from the Sargasso Sea
HITCGHCRNCRAGRTHLCRNTSGVGVNREGSFAEYLVIPAFNAFKIPDDISDDLASIFDPFGNAVHTALSFDLVGEDVLITGAGPIGIMAAAVCRHVGARHVVITDVNEYRLELARKMGATRAVNVAQENLKDVMKELGMTEGFDVGLEMSGVPSAFHAMLDTMNHGGKIAMLGIPGGEMAIDWSKVIFKGLVIKGIYGREMFETWYKMASLIQSGLDISPIITHHYKIDDFQKGFDAMGSGQSGKVILSWD

SEQ ID NO: 83362 - protein, 340 aa, Unknown
  Bacterial polypetide isolated from the Sargasso Sea
MKALVKHSPKVGIWMEDVPEPECGTNEVKIKITHTGICGSDLHIYKWDEWAQRTLNLPLVIGHEFCGIIEEIGPGVTHYKVGDRVSAEGHITCGSCRNCRAGKRHLCYKTLGIGIQRAGSFAEFLVIPESNVWLIDKKINPKIAAFFDPFGNAVHTALSYDIVGEDVLITGAGPIGIMCASICKFVGAKNVVITDVNEYRLGLAKKLGATKAINVSKEKIEDCFDELDIMNGFDIGLEVSGNPQAFKNLLSVMYNGGSVALLGLLPDSTQINWDDIIFKGLNVKGIYGREMYETWYKMNQLLKSGLDISTILTHEFPVDQYEKAFEIMETGQCGKVILEW

SEQ ID NO: 83363 - protein, 342 aa, Unknown
  Bacterial polypetide isolated from the Sargasso Sea
MKALSKLHKEVGIWMTDVPAPELGHNDLLIKIRKTAICGTDIHIYNWDEWSQKTIPVPMVVGHEYVGEVVAIGQEVRGFAVGDRVSGEGHITCGHCRNCRAGRTHLCRNTIGVGVNRPGAFAEYLVIPAFNAFKLPDNVPDELAAIFDPFGNAVHTALSFDLVGEDVLITGAGPIGIMAAAVCRHVGARHVVITDVNEYRLELARKMGATRAVNVAKEQLSDVMSELGMTEGFDVGLEMSGVPSAFQDMIDKMNHGGKIAMLGIPPATMAIDWGKVIFKGLFIKGIYGREMFETWYKMASLIQSGLDLSPIITHRFHIDDFQQGFDAMRSGQSGKVILSWDK

SEQ ID NO: 83364 - protein, 277 aa, Unknown
  Bacterial polypetide isolated from the Sargasso Sea
MILWSCEEIGPGVTHYKTGQRVSGEGHITCGNCRNCRAGKRHLCQKSIGIGIQRSGAFAEYVVIPESNVWPLHDDIPSEIAAFFDPFGNAVHTSLSYGMVGEDVLITGAGPIGLMSIAICNFVGARNVVITDKNKYRLELAKKMGASKAIDITKYSISEFYPQLKMTSGFDIGLEMSGNPKAFSSMLEHMYHGANIALLGLLPDSTKINWDNIIFKGLNVKGIYGREMYETWYKMTQMLRGGLDISQVLTHRIPIDQFQDAFRIMESGNCGKVVLEW

SEQ ID NO: 83365 - protein, 341 aa, Unknown
  Bacterial polypetide isolated from the Sargasso Sea
MKALVKKYSKPGLILEEMPIPELGTNDILIKVLKTSICGTDIHIYQWDKWAQNNINTPLIIGHEFMGRVEDIGDGVTHYKKGDIVSGEGHITCGNCRNCRAGMRHLCHRTIGIGIDRSGAFAEYLSLPESNIWPVHKDINIDIASCFDPLGNAVHSALSYSMVAEDVLITGAGPIGCMATAICKMLGARNVVISDSNKFRLKIAEKMGADRTINITNENIEDCFQELKISNGFDIGLEMSGSPDALQEMIKTMYHGGKIALLGILPNDTLVKWDEIIFKGLKIKGIYGREMFESWYKMNQLIRSGLDISPIITHKFKPDDFQLAFETAESGQCGKVIIEWD

SEQ ID NO: 83366 - protein, 341 aa, Unknown
  Bacterial polypetide isolated from the Sargasso Sea
MKALSKLKAEKGIWLVDAPKPEMGHNDLLIKIKKTAICGTDMHIYNWDEWSQKTIPVPMVVGHEYVGEVVDIGQEVRGFKIGDRVSGEGHITCGHCRNCRAGRTHLCRNTSGVGVNREGSFAEYLVIPAFNAFKIPDDISDDLASIFDPFGNAVHTALSFDLVGEDVLITGAGPIGIMAAAVCRHVGARHVVITDVNEYRLELARKMGATRAVNVAQESLKDVMKELGMTEGFDVGLEMSGVPSAFHAMLDTMNHGGKIAMLGIPGGEMAIDWSKVIFKGLVIKGIYGREMFETWYKMASLIQSGLDISPIITHHYKIDDFQKGFDAMGSGQSGKVILSWD

SEQ ID NO: 83367 - protein, 341 aa, Unknown
  Bacterial polypetide isolated from the Sargasso Sea
MKALVKEKSEVGLKLQEVKTPKIKSDEVLIKVKTTAICGTDLHIWNWDNWASKTIKPPMTVGHEFMGKIIEIGSAVEGLTIGDRVSAESHMVGQVSRNARAGKLHLDPDTVNLGVDRDGAFAEFVSIPSRNVVQLPDSVDNEMGAILDPFGNAIHATLSFDLVGEDVLITGAGPIGIMSAAIALHVGARKVLITDINDDRLSLAKTVCNVETLNPSKENIEDKMKDMGLKEGFDIGLEMSGSEAALDQMIDSMLMGGNIALLGLPSDPINLDLSKIIFKALNLKAIYGREMFETWYKGLALIDSGLDVKNVITHSFHYTDFEKAFQLLNEGKAGKVVLNWD

SEQ ID NO: 83368 - protein, 341 aa, Unknown
  Bacterial polypetide isolated from the Sargasso Sea
MKALVKEKSEVGLKLQEVEKPKIKSDDVLIKVKATAICGTDLHIWNWDAWASKTIKPPMTVGHEFMGEVIEIGDDVKDLALGDRVSAESHIVGCTSRNARAGKLHLDPDTVNLGVNRDGAFAEFVSVPSRNVVKLPDSVDDEMGAILDPFGNAIHATLSFNLVGEDVLITGAGPIGIMSAAIALHVGARKVLITDINDDRLSLAKTVCDVETLNPSKEKIEDKMKSMGLKEGFDVGLEMSGSEVALDQMIDSMLMGGNIALLGLPSDKINLDLSKLIFKALNLKSIYGREMFETWYKGLALIDSGLDVKNVITHSFHYTEFEKAFELLNKGKAGKVVLNWD

SEQ ID NO: 83369 - protein, 339 aa, Unknown
  Bacterial polypetide isolated from the Sargasso Sea
MAKLERGPGLTLTRVKRPEVGHNDVLIKIRRTAICGTDIHIWKWDDWAQKTIPVPMHVGHEYVGEIVEMGQEVRGFAIGDRVSGEGHITCGFCRNCRAGRRHLCRNTVGVGVNREGAFAEYLAIPAFNAFKIPPEISDDLASIFDPFGNATHTALSFNLVGEDVLITGAGPIGIMAVAIAKHVGARNVVITDINDYRLELARKMGATRAVNVARESLRDVMSDLHMTEGFDVGLEMSGVPSAFTSMLEAMNHGGKVALLGIPPAQTAIDWNQVIFKGLEIKGIYGREMFETWYKMVAMLQSGLDLSPIITHRFAADDYEKGFAAMLSGESGKVILDWTA

SEQ ID NO: 83370 - protein, 288 aa, Unknown
  Bacterial polypetide isolated from the Sargasso Sea
KNLELPLIVGHEFCGIIEEIGNGVTHYEVGERVSGEGHLTCGYCRNCRAGKRHLCHKTKGIGIHRSGAFAEYLVIPESNVWPIHKDIPSEIAAFFDPLGNAVHTALTYDLIGEDVLISGAGPIGIMAAAICKFSGSRNIVITDINDYRLNLALKLGATKAINPTKENIKDVFKELNINHGFDIGLEMSGKPEAFNQMINHMYNGGNIALLGLLPESTTINWNDVIFKGLNIKGIYGRRMYDTWYKMTQMIRSGLSISEVLTHRFKVDDYQDAFKILKSGNCGKVILEW

SEQ ID NO: 83371 - protein, 323 aa, Unknown
  Bacterial polypetide isolated from the Sargasso Sea
MRISIFGLGYVGAVCAGCLSARGHDVIGVDISANKIDLINNGKSPIVEPGLEELLQQGLRQGRLRGTTDVAAAVLESDVSFICVGTPSKKNGDLELNYIEGVCREIGMAMRDKNERHTVVVRSTVLPGTAKNVVLPILEDCSGKKAGVDFGLAVNPEFLRESTAIKDYDFPPMTVIGELDKASGDLLASIYEELDAPIIRKDIEVAEMIKYTCNVWHAAKVTFANEIGNIAKAVGVDGREVMDVVCQDHKLNLSKYYMKPGFAFGGSCLPKDVRALNYRAGSLDVEAPLIGSLMRSNAAQVQKAFDIIASHDSRKVALLGLSF

SEQ ID NO: 83372 - protein, 245 aa, Unknown
  Bacterial polypetide isolated from the Sargasso Sea
MNSIKLEKNISLSNFTTWGIGGPAEWIAQPKNIEELKYVINWTNKKKIPCSVIGAGSNLLINDKGIKGLSLCMRNFKGIEIDKNNGIIEVLSGEMLPTLARKAAASGLHGFEWAVGIPGTIGGAVVMNAGAQEHCISSYLESITTLSLTGEYKRIKGKDLNFGYRHSLLQNEKLIVVSARLKLASGHAKEIRQVTNENLNHRLKTQPYQAQTCGSVFRNPEPLKAAKLIEELGLKGFRFGGAEIS

SEQ ID NO: 83373 - protein, 286 aa, Unknown
  Bacterial polypetide isolated from the Sargasso Sea
IRGQYRFDAALKTWFDVGGNAEMLFKPEDVDDLAYFLANCPADVGINILGAGSNVIIADKGVEGVVIRPGRGFTDISYKDGILKAGSAVLCSNLMQFCQNNGLAGIEFLSGVPGSIGGAVAMNAGCYGNEVSKVLQSVKAVDYRGNVVVFDVAELGMSYRKNNLSDKYIFVEASFRVETSDIVTVKNEVAKLCKQRQESQPIRSKTGGSTFKNPVNEGGEQKKAWQLIDEAGLRGKVIGGAKISQKHCNFMINEGDAKAQDLVDLGNLVRKTVKNKFDCDLEWEIR

SEQ ID NO: 83374 - protein, 112 aa, Unknown
  Bacterial polypetide isolated from the Sargasso Sea
MTPNVGSFFKNPVVRTEVAERLKAEFPEMPTYADGAQIKLAAGWMIDHLGLRGRQVGGFSVHNRQALVLTNDGTGNADDLRELVALVRSSVKATFGLSLAVEPTQLGHFNRA

SEQ ID NO: 83375 - protein, 276 aa, Unknown
  Bacterial polypetide isolated from the Sargasso Sea
MSKKIIELADKLKSKIYSDYNAGKHTWFRTGGNAKIFAIVEDNLDLEIILNEINNENFYIIGSGSNLLIRDNGYNGTLIKLGKGFNTININDNKLEVGASILDINLSNFALRQNIEGFEFYSGIPGSIGGAVKMNAGCYGSETVDVLNSIEICDNFGQRKTITKDKLNLKYRSSKINNTDIVTKAIFNFNYGNQNLIKDKINEIKNKRLDSQPIKYKTSGSTFKNPKNLHAAKLIDEAGCKGTSYGDAYVSDKHANFLINRGSASATDIENLGKSI

SEQ ID NO: 83376 - protein, 265 aa, Unknown
  Bacterial polypetide isolated from the Sargasso Sea
LDGLVIKNNLLGISFQDNFVNCASGENWDNLVKRCLEQKLYGFENLSGIPGSVGAGPIQNIGAYGVEISSFIEYVEVFNLITGNFEVFDVNDCKFAYRNSIFKELPNHLITNIRFSLSTNFQPNLSYESIPQDSEISSAEELRNLILSIRNDRLVNPNQDPNVGSFFKNPIVSKSKLKELKNSFPEIKFYDVEHDLYKISAAWLIENIGMKGKQDKSCGVSKKHSLVLVNFSDKSESIINLSNKIKSMIKSRFDLELETEPTFVH

SEQ ID NO: 83377 - protein, 171 aa, Unknown
  Bacterial polypetide isolated from the Sargasso Sea
MKIEENHSIKDINSLRINQLAKYFCSIETVEQFLEAIEFSKLKNLPILFIGEGSNIVFTKDYDGLVIKNNIFGKIEHDERIVEISSGENWHKFVDWSLSNERYGLENLALIPGTVGASPIQNIGAYGKEVSAFIKEVKSINTLTAEERIFSKEECNFGYRSSVFQNKKEYF

SEQ ID NO: 83378 - protein, 193 aa, Unknown
  Bacterial polypetide isolated from the Sargasso Sea
MSKKIIELGDKLKSKFYSDYNAGKHTWFRTGGNAKIFAIVEDNLELEIILNEINNENFYIIGSGSNLLIRDNGYNGTLIKLGKGFNTININDNKLEVGASILDINLSNYALRQNIKGFEFYSGIPGSIGGAVKMNAGCYGSETVDVLNSIEICDNFGQRKTITKDKLNLKYRSSKINNTDIVTKAIFNFNYGD

SEQ ID NO: 83379 - protein, 102 aa, Unknown
  Bacterial polypetide isolated from the Sargasso Sea
QKVKQTLLECQRFRMEKQPYNQPSCGSVFKNPPQDYAARLIELSRLKGKVRGRAQVSPKHANFIVNLGDAASDDILGLMDEIREQVYRDHKIDLIPEVQILQ

SEQ ID NO: 83380 - protein, 152 aa, Unknown
  Bacterial polypetide isolated from the Sargasso Sea
MIVNKNASLKKLNTFNVDASCDVLVESSNTNDILEVLNNKELNNNLFILGGGSNILFTKHYQGTIINLKEESIKILDEGPDKVQVEVSAGTNWHRFVKWAVDKDFGGIENLSLIPGNVGASPIQNIGAYGVELEDVFDSCSGIMIDSLDKVT

SEQ ID NO: 83381 - protein, 151 aa, Unknown
  Bacterial polypetide isolated from the Sargasso Sea
SVEVMDRNGEIHQLDPKEFSISYRSVGFPFPLWFLSCVMSFPEEGFTTIEELKSMRDSRLERQPLTENTCGSVFKNPDGNYAGDLIERSGLKGFRIGGCAVSEKHANFIVNDKEATASDIETLIKHIQKTVKDHYGIDLETEVRIIGEYHE

SEQ ID NO: 83382 - protein, 97 aa, Unknown
  Bacterial polypetide isolated from the Sargasso Sea
MKAMRDQRIKTQPLTEDTCGSVFKNPKSDHAGDLIERAGLKGYKIGGCSISTKHANFIVNEGEATSADIEELIKHVQNIVKAKFDVDLETEVRIIGE

SEQ ID NO: 83383 - protein, 83 aa, Unknown
  Bacterial polypetide isolated from the Sargasso Sea
TCGSVFKNPDGIHAGDLIERSGLKGFRIGGCAVSEKHANFIVNDKKATARDIEILIKHIQKTVKDHYGIDLETEVRIIGEYCE

SEQ ID NO: 83384 - protein, 238 aa, Unknown
  Bacterial polypetide isolated from the Sargasso Sea
AGSNVLFKDEKYDGVVIKLGKNFSNITILNENKIIAGGAVTQKKLSNFAMENEISGLEFLSCIPGTVGGGIRMNSGCFEREFKDILLSIQVLDFNGIIRTLPADKIVFKYRNIEIPKDTIFLSATFKGIKKNKIEIKNYMKELIRKKEIAQPTKVKTGGSTFINPKGHTDKKVWRLIKESIPIDTSFGDAIVSDKHANFFINKKNAKFNDMKSLIDFVKKKVKIKTGIDLTLEIVIVE

SEQ ID NO: 83385 - protein, 139 aa, Unknown
  Bacterial polypetide isolated from the Sargasso Sea
MGLKAQSLLGCTVRSVDELKAVMACPEFLDQQPVVIGSGSNVIAMPLVEKFIIKMRIKGIHRVKENKEFVWIRVGAGENWDSLVRSLLEKNIFGLENLALIPGRVGAAPIQNIGAYGREVSEFIDEVEVFDRTGEELIL

SEQ ID NO: 83386 - protein, 198 aa, Unknown
  Bacterial polypetide isolated from the Sargasso Sea
ILDINLSNYALRQNIEGFEFYSGIPGSIGGAVKMNAGCYGSETVDVINSIEICDNFGQRKTITKDKLNLKYRSSKINNTDIVTKAIFNFNYGDQNLIKHKINEIKNKRLESQPIKTKTSGSTFKNPENLHAAKLIEEAGCKGNNYGDAYVSDKHANFLINRGSASATDIENLGKSIIEKVYAKFNVKLEWEVKIIGDQ

SEQ ID NO: 83387 - protein, 302 aa, Unknown
  Bacterial polypetide isolated from the Sargasso Sea
YIEVPSDNDLIYIDKSIECIHILGECTNTIINSESKKTFVKYINNELNILKKTQDYTFIKVGASVNWHKFVLECEKLNLHGLENLAFIPGSVGAAPIQNIGAYGVEVSEFISEITCYDIEHQKNLVLKKNQCRFAYRQSVFQRKKFIIKDITFRLKNYFHPNLSYNSLRNYIDKKFNKNINPINLIKIIGNIRSSRLPNLNKIPNCGSFFKHPIIKKDNKFKKYLVCFENSKMKISATKLIETIENEINFYGGLKFYDTNKLVLTNTENCSFKDLISTIESINTLISNKFDICLDVEPEIIT

SEQ ID NO: 83388 - protein, 271 aa, Unknown
  Bacterial polypetide isolated from the Sargasso Sea
TPSEFEIQTDTFFFGRSGQFISGSNNNIVISSSNFFLGDDNGAFISGSNGNLNISSSTFFLGGGSTFVSGSNDKLEISSSNFHLDDDGSVTLQGQITATLGGIIGGFSIGSASLFTGTEATPNFFISGSATGTGFEKANLFISSSGFQVSGDGEMSASAGHIGGFNIVRDGLGSANDAFQVTGSTGQITGSNVLFSGGKVGGFNIVSDGFSSINNVFQVTGSTGQITGSNVLFDGGVIGGFDITSTAIETTDFSSGEKGIRISTDQNGLIE

SEQ ID NO: 83389 - protein, 202 aa, Unknown
  Bacterial polypetide isolated from the Sargasso Sea
MSKKIIELAHKLKSKIYSDYNAGKHTWFRTGGNAKIFAIVEDNLELEIILNEINNENFYIIGSGSNLLIRDNGYSGTLIKLGKGFNTININENKLEVGASILDINLSNYALRQNIEGFEFYSGIPGSIGGAVKMNAGCYGSETVDVINSIEICDSFGQRKIITKDKLNLKYRSSKINNTDIVTKAIFNFNYGDKNLIIDKIN

SEQ ID NO: 83390 - protein, 78 aa, Unknown
  Bacterial polypetide isolated from the Sargasso Sea
AGWLIDQCQLKGMRIGGAAVHQQQALVLINADNATSQDVVQLAHHVRQKVGEKFNVWLEPEVRFIGPQGEMNAVEIIA

SEQ ID NO: 83391 - protein, 133 aa, Unknown
  Bacterial polypetide isolated from the Sargasso Sea
ARVVAALVMRIRQSKLPDPLILPNAGSFFKNPVVPVDQAQRLAERFPSMPQYVQAGGGVKLAAAWLIDQAGWKGFRDGAAGVHSEQALVLVNHGGATGAQILALAARIRADVLTRYGVELEQEPPVVGAAALP

SEQ ID NO: 83392 - protein, 266 aa, Unknown
  Bacterial polypetide isolated from the Sargasso Sea
STDLVEFLDGCPENIPISVIGVGSNLLVRDGGIRGVVIRLGRSFAKINIEDECRITAGAGALGPKLARLAAKAGIGGLEFLSGVPGTVGGAIKMNAGAYGSEVVDVLGTASVISRGGHLEQLSARDLMLQYRSSFLPNDSIVLDASFHGQKDVVGDILSRIEEINKSRNISQPIRDRTGGSTFANPSERSAWELIEAAGCRGLRIGRAMVSPRHCNFLINTGGATSSDIERLGEELRRRVREQSGIQLRWEIQRIGTAEKPAEELG

SEQ ID NO: 83393 - protein, 238 aa, Unknown
  Bacterial polypetide isolated from the Sargasso Sea
IISKDEVIVGGGVNWDYFVNWSLENNFYGLENLTLIPGSVGAAPIQNIGAYGVEISKFIKKVRFYDFIDKKIKEFTQNDCNFSYRKSIFQDMDILILSVCFKFVPGDLVTSYDSINDYLNTNNIKASDLTPIKLSNIIKKIRLDRLPDYTKIPNVGSFFKNPILNKADLNLEKLDIKKLITWDLGNGMIKIGAARLIELVKDKIPKDINVDLYKNHALVLINKNNATQDDVIQYSSFI

SEQ ID NO: 83394 - protein, 275 aa, Unknown
  Bacterial polypetide isolated from the Sargasso Sea
MTKYEIKIKNSLNLPCHTNTLYEIESTEDLLEVDYNKYDELLIIGECTNLVLPTKLNKKVIKSKNTNINKISSTLYRVGSAVNWNDFVLSVIENNRFGIENLIGIPGSVGAAPVQNIGAYGVQVSDFIKSINVYDFKDKTFKKLLKDQCDFGYRSSIFQTKPYFIIDIDFEFNHIEKLNMDYEGIRNLIIAQDKDITSITSKELGAIICELRDSKLPNPKVVPNAGSFFKNPIINEKNISYKNFKKEDLIIWDHDKPNVKVGAGRLIELIKNTLN

SEQ ID NO: 83395 - protein, 183 aa, Unknown
  Bacterial polypetide isolated from the Sargasso Sea
MKILENHIIINSLKIKSVSSYYIEIDNLTCFNKLHDFINIKDLPVIILGEGTNIVPPNLFNGIAVKPSFTQIDFKDNFVEVGASVNWNFFVNHMINKNINGFENLSLIPGSVGAAPIQNIGAYGQEVSNLIEEVHCYDYKKNIFIKLTNEQCNFSYRDSLLKNTNLIIYKVVFRINNSNKLNL

SEQ ID NO: 83396 - protein, 208 aa, Unknown
  Bacterial polypetide isolated from the Sargasso Sea
MTIEENKSLKNMNTFGLDAKAKYFCAVHSFDEIRDIFQSQVFNNEKHLILGGGSNILLKDDYDGLVIKNNIIGKEVINQNEDYVTLKVYSGEVWHDLVLHCVQNGWGGIENLSLIPGSVGAAPMQNIGAYGVELKDVFVELEAIHIPSCKIESFDNSACEFAYRQSIFKNKLKGQYFIYSITLKLSKKPKINISYGAIKGTLNDMNIN

SEQ ID NO: 83397 - protein, 107 aa, Unknown
  Bacterial polypetide isolated from the Sargasso Sea
EEITRITSGNLSHRTSTQPYTQPSCGSVFRNPEPLKAGRLIEGLGLKGSRVGGAEVSTLHANFIVNTGAATAADIDSLIQRVQQQVEAAHSLLLHPEVKRLGFTEAA

SEQ ID NO: 83398 - protein, 194 aa, Unknown
  Bacterial polypetide isolated from the Sargasso Sea
ELCWFERGQCDFAYRDSRFKREAGRYVILRVRLRLWRQARLAVDYAPLAEAWRATGLQAADARVVAALVMRIRQSKLPDPLILPNAGSFFKNPVVPVDQAQRLAERFPSMPQYVQAGGGVKLAAAWLIDQAGWKGFRDGAAGVHSEQALVLVNHGGATGAQILALAARIRADVLTRYGVELEQEPPVVGAAALP

SEQ ID NO: 83399 - protein, 189 aa, Unknown
  Bacterial polypetide isolated from the Sargasso Sea
CVSQGWSGMEFMIGIPGTIGGAVATNAGAHGGETSEFVQSIRWMDLDGIVHQDQRNAFQFSYRFSELDAKQGRVVISASFELAEEDPQKVKQTLLECQRFRMEKQPYNQPSCGSVFKNPPHDYAARLIELSRLKGKVRGRAQVSPKHANFIVNLGDAASDDIFGLMDEVRERVYRDHKIDLIPEVQILQ

SEQ ID NO: 83400 - protein, 155 aa, Unknown
  Bacterial polypetide isolated from the Sargasso Sea
MKINENVILTNHNTFGINVKAKYFTEISSEFELREIIKSEKFKKVKLLILGGGSNILFTKDFNGLIILNKIKGKKIIFQDENYVDLMIGAGENWHELVMYCVNNNWGGIENLSLIPGNVGTAPIQNIGAYGVELKETFLELEAFEISSQKTVKFT

SEQ ID NO: 83401 - protein, 302 aa, Unknown
  Bacterial polypetide isolated from the Sargasso Sea
MDIKNFENKLKNFNGKIYFNYSLKKLNWFNIGGDAKIYFKPDTLQNLVEFLKLYKKDEKLFVLGAGSNVLFKDDLFEGAVIKLSKNFSRISLLNENTIIAGSGALDKTLSQFALENSLSGFEFLSCIPGSIGGGIRMNSGCFDREFKDILISVQAVNRSGEILTIPAKEIVFEYRSCDLGKDLIFLSATFKGNKKKKDEIEKEVINLKTKKEKAQPTKIKTGGSTFKNPIKQTNKKVWEIIKESVPSDIQFGDAIISEKHANFFINKNNASYKDMKKLIEFVKEKVNNETGIKLDLEIILVE

SEQ ID NO: 83402 - protein, 318 aa, Unknown
  Bacterial polypetide isolated from the Sargasso Sea
MHLKSEAKYFFDFDSIDDLKKITDFAKKENKNIQIIGSGTNAIFPEYFSDVVIRSTNNDFTLDDTGDRVSLSVGAAVVWDDLIDFCINKGLFGLGNLAGIPGTVGAAPVQNIGAYGEEISNFIDHVECFDLDTNNQVRLSKSECKFGYRKSIFQESDNLIIVSVGLSLLKKFEPKLHYQDLKDHSFKDEDELVETVRNIRNKKIPDPKDFPNLGSFFKNPTITKKEYEKNSKLHELKSYDSDNGDIKLSAGEMLDKLGLKGLQLKNIGLSNKHALILINCAYPNGICTADDVKHVENYLLNKVSDSYGITLEREPIYL

SEQ ID NO: 83403 - protein, 330 aa, Unknown
  Bacterial polypetide isolated from the Sargasso Sea
MKLSNKIKKSFSLKENNLLKIDSTAKFFIEIFDLEDLKNIQNFTSTKKINFCILGEGSNVVLPNLLNKFVIKISFNEISIEDNLITVGAGKNWDDFVLWSLENGYCGLENLSGIPGSIGAAPIQNIGAYGNEVSDFIDEVICFDMESNSIVSFTNNDCKFSYRKSIFQDKDSLIVVKVKFKLTKDFQPNLEYEDLNFLKAEEITPFIIRKHILKIRKAKISDPQEHPNVGSFFKNPIISLDELEKIKQILPSIKFYSYIDNKVKISAAFLIESLNLKGFALNNARVSEKHSLVLENKSEKSEDILDLASYIQASVLENYNINLEIEPQIF

SEQ ID NO: 83404 - protein, 121 aa, Unknown
  Bacterial polypetide isolated from the Sargasso Sea
MKLGISKQKIVSERIKNMLRERANQQPLGKLSCGSVFRNPPNQYAAKLIDLCGLKGKRVGGAIISDKHSNFIINTGNATSSDIEKLIEFVQATVYEKHSIKLVPEVRIIGKNFTEVNDAIA

SEQ ID NO: 83405 - protein, 236 aa, Unknown
  Bacterial polypetide isolated from the Sargasso Sea
MNILSNHNISNSLKINSKCRFFIEINEVTQFENLYKFINEQKLPVLVIGEGTNIVPKDYFEGVVIKPTFNKVQYNTNDSTVSVGSSVNWHSFVKEMIKNKIYGFENLSLIPGSVGASPIQNIGAYGQEVSNLIARVDCFDYVKNKFLSLSNSDCNFSYRKSSLKDKPYIIFNIDFITNGFKSLNLEYESIQNYIKDNNINLSSISLNRASEIIVDIRNSILPDPIQVPNVGSFFKI

SEQ ID NO: 83406 - protein, 141 aa, Unknown
  Bacterial polypetide isolated from the Sargasso Sea
MGLKAQSLLGCTVRTVDDLKTVMSSPEFLNQQPVVMGSGSNVIAMPVVEKLVIKMCIKGIQRVKENKEFVWIRVGAGENWDSLVRALLEKNIFGLENLALIPGLVGAAPIQNIGAYGREVSEFVDEVETLDRSGEELIFKR

SEQ ID NO: 83407 - protein, 332 aa, Unknown
  Bacterial polypetide isolated from the Sargasso Sea
MKIEENYSIKEYNSLRTNQFSKYFCSIDAVEQLYEAIEFSKTKGIPCLFIGEGSNIVFTDDFEGLLIKNNIFGKTEHDNKTVEIFSGENWHKFVKWSLSKERYGLENLALIPGTVGASPIQNIGAYGKEVSSFIKEVKSINILTAQEKIFSKDDCKFGYRSSLFQNNKEFFITSVVFETNPDPHIDISYDSLQTFFKASPKKITNLTPQEVFEGVSSLRRRVLPDHKKEFNAGSFFKNLILEKSDFRNLNKIINVPYHETNLKYKVPSGFLIEKAGWKGKRLKNVKVSQKHALVLIANGNQDGKEIIKFAQSIIDDVYEKFKVKLEIEPTLI

SEQ ID NO: 83408 - protein, 307 aa, Unknown
  Bacterial polypetide isolated from the Sargasso Sea
MNLIKKNLKHQNSLRLSSEAELFFEYENLDELKKLNSHCKKNNLRICALGEGTNTIFPRNFKDVVAKSKNKKFKVDKNTVKIGAGVNWNEAVFKTIKNGCFGLENLAGIPGSVGAAPIQNIGAYGSEISEFVKKLECFDIKKNKVVNFLKKDCKFGYRKSVFQLNKDLIINEVTLILNQKFSPNSSYFSPGIFSVKEDSNDIKYAMNWANKIVELRESKIPNTSDYPNVGSFFKNPLVSEKFFQNNKKLEKLKTFKREGDQIKLSAAEMIDKSDLKGMRLNNLGISSKHSLVFVNFGITTSREVKRT

SEQ ID NO: 83409 - protein, 212 aa, Unknown
  Bacterial polypetide isolated from the Sargasso Sea
NTITINDNKLEVGASILDINLSNYALRQNIEGFEFYSGIPGSIGGAVKMNAGCYGSETVDVINSIEVCDNFGQRKIITKDKLNLKYRSSKINNTDIVTKAIFNFNYGDKNLIKDKINEIKNKRLESQPIKNKTSGSTFKNPENLHAAKLIEEAGCKGTNYGDAFVSDKHANFLINKGSASATDIENLGKSIVEKVYAKFNVKLEWEVKIIGE

SEQ ID NO: 83410 - protein, 332 aa, Unknown
  Bacterial polypetide isolated from the Sargasso Sea
MNFIEDYPFSKLSSLRTTETASFFCELSDINQIDEIISFSNEKNLPILILGEGTNIVPTKTFQGLVVFNKLLGIKEIDKMSIEVASGENWHDFVEWTIRHKMFGLENLALIPGTVGAGPIQNIGAYGSEISSFIKKITCFDLKTGSIKVLYANECGFGYRTSIFKDCSDYIILSVTFQFKTDPKINYSYGSLEDEINNNNINKDNLTHGDIFDLVSKIRKKVLPDYKEFPNVGSFFKNVVLTKEEFCKLDITEEIPVYLEGDDIKISAAFLIEKFGWKGFREGNVGISDQHALVLVTYEETPGDEILKFANKIINQIFSMTGIKLEIEPTLI

SEQ ID NO: 83411 - protein, 254 aa, Unknown
  Bacterial polypetide isolated from the Sargasso Sea
TLYRVGSAANWNDFVLSVIEDNRFGIENLIGIPGSVGAAPVQNIGAYGVQVSDFIKSINVYDFEDKAFKKLLKDQCDFGYRSSIFQTKPYFIIDIDFEFNHIEKLNMDYEGIRQLITAQDKDITSITSKELGVIICELRDSKLPNPKVVPNAGSFFKNPIINEKNISYNNFKKEDLIIWDHDKANVKVGAGRLIELIKSTLNQESIDNLHSSHALIITNKNNISYDDIINISLDIQSKVYKEFNIHLEIEPTII

SEQ ID NO: 83412 - protein, 224 aa, Unknown
  Bacterial polypetide isolated from the Sargasso Sea
SICKDDLGISINAGAAALDSNVSKMTSSNGLEGLEFLSGVPGTIGGALRMNAGAFGREMSDVVISATAISSDGTKKYLTNSEMGFSYRKCSIPEDWIFIETSLRVINGDPILIKKRMTEIANYRDQSQPIRTRTGGSTFKNPAGAKAWKLIEEAGCRGLQVGDAEISKKHCNFIINKKNATASDIENLGEEVRSRVEKNSGIKLEWEIKRIGSRTRSFGEVNIK

SEQ ID NO: 83413 - protein, 252 aa, Unknown
  Bacterial polypetide isolated from the Sargasso Sea
YRVGSAVNWNDFVLSVIEDNRFGIENLIGIPGSVGAAPVQNIGAYGVQVSDFIKSINVYDFKDKTFKKLLKDQCDFGYRSSIFQTKPYFIIDIDFEFNHIEKLNMDYEGIRHLITAQDKDITSITSKELGAIICELRDSKLPNPKVVPNAGSFFKNPIINEKNISYKNFKKEDLIIWDYDKPNVKVGAGRLIELIKSTLNQEAIDNLHSSHALIITNKNNITYDDIIKISQDIQSKVYKEFNILLEIEPTII

SEQ ID NO: 83414 - protein, 273 aa, Unknown
  Bacterial polypetide isolated from the Sargasso Sea
KTFQGLVVFNKLLGIKEIDNMTIEVASGENWHEFVEWTIRHKMFGLENLALIPGTVGAGPIQNIGAYGSEISSFIKKLTCFDLKTGSIKVLYANECGFGYRTSIFKDSSDYIILSVTFQFKTDPKINYSYSSLEDEINKNNINKDNLTHRDIFDLVSKIRKKVLPDYKEFPNVGSFFKNVVLTKEEFNKLDLTEEIPVYLEGDDIKISAAFLIEKFGWKGFREGSVGISDQHALVLITYEETPGDEILKFSNKIINQIFSITGIKLEIEPTLI

SEQ ID NO: 83415 - protein, 332 aa, Unknown
  Bacterial polypetide isolated from the Sargasso Sea
MKFKRNFPLAEICTLNIKEIASYYCEISDFKDTQEIRSFISRKNIPFLLLGEGTNIVPTDTFDGLVIQNQIKGIELLDSFTIKVSSGENWHDFVEWTVKNKKYGLENLALIPGTVGAGPIQNIGAYGSEIGTYIKEVTFYDFHKDKVGTFSQKDCNFNYRSSVFKEKPELFILSVTFELNNEPKLNLSYDSLKEQISKDGLNEKNLKPVDIFNTVKKIRTRVLPNHLKQPNVGSFFKNVYLKKEELKKLKLPSDIQTFEQDDIVKISSAHLIEKFGWKGFRRGSLGISEQHSLVLITYEETSGEEIVTLSNEIIKDIYSKTGLQLEVEPTFV

SEQ ID NO: 83416 - protein, 63 aa, Unknown
  Bacterial polypetide isolated from the Sargasso Sea
SGLKGLEIGGCSISEKHANFIVNDKGATARDIETLINHIQNTVKDRFGIDLDTEVRIIGEHDE

SEQ ID NO: 83417 - protein, 331 aa, Unknown
  Bacterial polypetide isolated from the Sargasso Sea
MSPEAKILTNDNGLHLKSEAKYFFDFNSIDDLKKITDFAKKENKSIQIIGSGTNAIFPEYFSDVVIRSTNNDFTLDDAGDRVSLSVGAAVVWDDLIDFCVNKGLFGLGNLAGIPGTVGAAPVQNIGAYGEEISNFIDHVECFDLDTNNQVRLSKSECKFGYRKSIFQESDNLIIVSVGLSLLKKFEPKLHYQDLKDHSFTDEGELVETVRNIRNKKIPDPKDFPNLGSFFKNPTITKEEYEKNSKLHELKSYDSDNGDIKLSAGEMLDKLGLKGLQLKNIGLSNKHALILINCAYPNGVCTANDVKHAENYLLNKVSDSYGITLEREPIYL

SEQ ID NO: 83418 - protein, 123 aa, Unknown
  Bacterial polypetide isolated from the Sargasso Sea
LVVLSARFRLDPGHDPDEITRITSGNLSHRTSTQPYTQPSCGSVFRNPEPLKAGRLIEGLGLKGSRIGGAEVSTLHANFIVNTGAATAADIDQLIQRVLQQVEAAHAVRLHPEVKRLGFTEAA

SEQ ID NO: 83419 - protein, 264 aa, Unknown
  Bacterial polypetide isolated from the Sargasso Sea
NKFVIKISFNEISIEDNLITVGAGKNWDDFVLWSLENGYCGLENLSGIPGSIGAAPIQNIGAYGSEVSDFIDEVICFDMDSNSLVSFTNNDCKFSYRQSIFQDKDSLIVIKVKFKLTKDFQPNLEYEDLNFLKAEEITPFIIRKHILKIRKAKISDPKEHPNVGSFFKNPIISLDELEKIKQILPKIKFYSYIDNKVKISAAFLIESLSLKGFVLNNARVSEKHSLVLENKSEKSEDILDLASHIQASVLENYNINLELEPQIF

SEQ ID NO: 83420 - protein, 293 aa, Unknown
  Bacterial polypetide isolated from the Sargasso Sea
MKLCSRVRWNESLKRFNTWRIGGPSRGLVDVETEEDLARLLPFLKKNDIPWFLIGKGSNLLIHDRIWEGVILHLTGDFKSWQPQEHPQTVCAGAALADVTFAQRCVSQGWSGMEFMIGIPGTIGGAVATNAGAHGGETSEFVRSIRWMDLDGIVHQDQRDAFQFAYRYSELDAKQGRVMISASFELAEEDPQQVKQTLLECQRFRMEKQPYNQPSCGSVFKNPPQDYAARLIELSRLKGKVRGRAQVSPKHANFIVNLGDAASDDIFGLMDEIQEQVYSDHKINLIPEVQILQ

SEQ ID NO: 83421 - protein, 261 aa, Unknown
  Bacterial polypetide isolated from the Sargasso Sea
MKLRSRVRWNESLKRFNTWRIGGPSRGLVDVETEEDLARLLPFLKKNDIPWFLIGKGSNLLIHDRIWEGVILHLTGDFKSWQPQEHPQTVFAGAALADVTFAQRCVSQGWSGMEFMIGIPGTIGGALATNAGAHGGETSEFVRSIRWMDLKGIVHQDQRDAFQFAYRFSELDAKQSRVVISASFELAEEEPQQVKQTLLECQRFRMEKQPYNQPSCGSVFKNPPQDYAARLIELSRLKGKVRGRAQVSPKHANFIVNLGDA

SEQ ID NO: 83422 - protein, 327 aa, Unknown
  Bacterial polypetide isolated from the Sargasso Sea
MTKYETKIKNSLNLPCHTNTLYEIESTEDLLKVDYNKYDELLIIGECTNLVLPTKLNKKVIKSKNTNINKISSTLYRVGSAVNWNDFVLSVIEDNRFGIENLIGIPGSVGAAPVQNIGAYGVQISDFIKSINVYDFKDKTFKKLLKDQCNFGYRSSIFQTKPYFIIDIDFEFNHIEKLNMDYEGIRHLITAQDKDITSITSKELGAIICELRDSKLPNPKVVPNAGSFFKNPIINEKNISYKNFKKEDLIIWDHDKPNVKVGAGRLIELIKSTLNQEAIDNLHSSHALIITNKNNITYDDIIKISQDIQSKVYKEFNILLEIEPTII

SEQ ID NO: 83423 - protein, 295 aa, Unknown
  Bacterial polypetide isolated from the Sargasso Sea
RISRLKSLPILFIGEGSNIVFTKDYDGLVIKNNIFGKIEHDERIVEISSGENWHNFVDWSLSNEKYGLENLALIPGTVGASPIQNIGAYGKEVSEFIKEVKSINTLTAEERVFSKEECKFGYRSSVFQNKKDYFITSVVFETNQDPCIDIAYDSLHKFFKASSKELKTLTPKDVFDGVSSLRRIILPDHNKEFNVGSFFKNLILEEADFRNLNEIIDVPYYKDNYKYKVPSGYLIEVAGWKGKGLKNVKVSEQHALVLTTNGNLDGNEIVRFADSIIDDIYNKFKVKLEIEPTLI

SEQ ID NO: 83424 - protein, 269 aa, Unknown
  Bacterial polypetide isolated from the Sargasso Sea
KVGGPADVFFIPDNRQDLSQFLSENKGKSVTWLGNGTNVLVRDGGIRGVVISTIKSINKITMAAENSCRAEVGASCMDLALFAEKNEIGPAAFFSGIPGSIGGALTMNAGSFGHETWEFVESVEVIDEAGIIHHLEPREFKFSYRSVEFPFPLWFVSCLMKFPESETTTKSELKAMRDQRIKTQPLSEDTCGSVFKNPKPDHAGDLIERAGLKGYKIGGCSISTKHANFIVNEGAATSADIEKLIRHVQNVVKTKFDVNLETEVRIIGE

SEQ ID NO: 83425 - protein, 251 aa, Unknown
  Bacterial polypetide isolated from the Sargasso Sea
LEVLNNKELNNNLFILGGGSNILFTKHYKGTIINLKEESIKILDEGPDKVQVEVSAGMNWHRFVEWAVDKNFGGIENLSLIPGNVGASPIQNIGAYGVELEDVFDSCSGIMIDSLDKVNLSKLDCEFTYRSSIFKKKLKNKFIITSVRFNLTKSNHLYNIDYPDLNNLLESGLDLKKISNEVIKIRNSKLPDPQQYGNCGSFFKNPIVGYSKFQKLKEKFTEIPFFKTDSNYFKVPAAWLIDKCGFKKIND

SEQ ID NO: 83426 - protein, 179 aa, Unknown
  Bacterial polypetide isolated from the Sargasso Sea
FSGIPGSIGGALTMNAGCFGNETWEFVKSVEVMDRNGEIHQLYPEEFSISYRSVGFPFPLWFLSCVMSFPEEGFTTIEELKSMRDSRLERQPLTENTCGSVFKNPDGNHAGDLIERSGLKGFRIGGCAVSEKHANFIVNDKEATASDIEILIKHIQKTVKDHYGIDLETEVRIIGEYHE

SEQ ID NO: 83427 - protein, 306 aa, Unknown
  Bacterial polypetide isolated from the Sargasso Sea
MAAPAAHFVQAETDAQLREALLLAEREGWQVTLLGGGSNMILAGPVSGLVVRVASRGRRVLSRGSEQVLIEAEAGESWHQLVCWALDLGLSGIENLALIPGTVGAAPVQNIGAYGVELCDCLDSVQVLDRQTGELCWFDRGQCDFAYRDSRFKREAGRYVILRVRLRLWRQPRLAVDYAPLAEAWRATGLQAADARVVAALVMRIRQSKLPDPLTLPNAGSFFKNPVVPVDQAQRLAERFPSMPQYVQAGGGVKLAAAWLIDQAGWKGFRDGAAGVHSEQALVLVNHGGATGAQILALAARIRADV

SEQ ID NO: 83428 - protein, 130 aa, Unknown
  Bacterial polypetide isolated from the Sargasso Sea
MKIQENISIKDLNSLRVNQLTRYFCSIETIEECKEAIEFSISKKIPCLFIGEGSNIVFTKDYDGLLIKNNILGKKEYDSRTIEIFSGENWHNFVDWTISNNRYGLENLALIPGTVGAAPIQNIGAYGKEV

SEQ ID NO: 83429 - protein, 250 aa, Unknown
  Bacterial polypetide isolated from the Sargasso Sea
VEVSAGMNWHRFVEWAVDKNFGGIENLSLIPGNVGASPIQNIGAYGVELEDVFDSCSGIMIDSLDKVNLSKLDCEFTYRSSIFKKKLKNKFIITSVRFNLTKSNHLYNIDYPDLNNLLESGLDLKKISNEVIKIRNSKLPDPQQYGNCGSFFKNPIVGYSKFQKLKEKFTEIPFFKTDSNYFKVPAAWLIDKCGFKKINDENVGVYKNQPLVVINLGNASGNEIINFAKRIKDSVFNEFDIELQEEVIVM

SEQ ID NO: 83430 - protein, 239 aa, Unknown
  Bacterial polypetide isolated from the Sargasso Sea
MLQQLSAKSYSTFALATQLAELVELDSLAELMAYQPAVTPLLLGEGSNSIFLSNQTQTVLRYLAKSRTVLAENEHQVQLHIEAGDNWHQLVSWTVAQGWWGLENLSLIPGSVGAAPVQNIGAYGAELADCCDYVDFFHWQSRDVQRLSKSDCGFGYRDSIFKTVLAGLGVIVAVGLTLKKHSQPKLGYKGLEHLNQHSSVTEVAQAVIAVRQSKLPDPAILPNCGSFFKNPVVSQSVLK

SEQ ID NO: 83431 - protein, 269 aa, Unknown
  Bacterial polypetide isolated from the Sargasso Sea
GGPAEIFFTPENRNELSKCLESTDKDITWIGNGTNVLVRDGGVRGIVISTKKSFNEIKLLDESSCMVEVGASCFELAMYATKNNFGPAAFFSGIPGSIGGALTMNAGCFGNETWEFVKSVEVIDRNGEIHHLDPKEFSISYRSVGFPFPLWFISCVMSFPEGGLTTIEELKSMRDSRLKRQPLTENTCGSVFKNPDGNHAGDLIERSGLKGFRIGGCAVSEKHANFIVNDKEATARDIETLIKHIQKTVKDHYGIDLKTEVRIIGEYRE

SEQ ID NO: 83432 - protein, 146 aa, Unknown
  Bacterial polypetide isolated from the Sargasso Sea
MNTLGLPARAQRLARPTTLDALSQVLAERNPAEPLFVIGEGSNLVICSDLPGLTLSLAIDGMSLVKQDNTHVWVAAGAGVHWDDLVAWTVEQGWQGLENLSLIPGTVGAAPFQNIGAYGVELSQLLEQVTVMDVVTAQVTHFAGNE

SEQ ID NO: 83433 - protein, 198 aa, Unknown
  Bacterial polypetide isolated from the Sargasso Sea
KKLVCLTNAQCEFGYRDSVFKHGLKNKAVITRVLLALPKQWQPVLSYGPLKQLTNVTPRAVFEHVIQTRNSKLPDPYTLPNAGSFFKNPIITNQQLTTLLKQFPDAPYYAYGQSEHKVAAGWLIDNANLKGYRVAGIEVHRQQALVLVNHGNSEGEDLIAMITHIQHVVYSRYNILLEHEVRLINTTDECYIQGDVTQ

SEQ ID NO: 83434 - protein, 266 aa, Unknown
  Bacterial polypetide isolated from the Sargasso Sea
MKIQENFSIKDFNSLRVNQLTRYFCSIETVEECKEAIEFSTSKKVPCLFIGEGSNIVFTKDYDGLLIKNNILGKKEHDSQTIEIFSGENWHNFVDWTVSNRRYGLENLALIPGTVGAAPIQNIGAYGKEVSSFINEIKTINTITAEEKIYAKEDCKFSYRSSVFQNQNNLFIASVIFETSLDADVDISYDSLKDYIKTSAKEVKTLTPKDVFNYVSALRRNVLPDHNKEFNVGSFFKNLTLREEEFNNLSSIIKVPFYKSNSLYKV

SEQ ID NO: 83435 - protein, 273 aa, Unknown
  Bacterial polypetide isolated from the Sargasso Sea
TVRTIDELKTVMASPEFLNQQPFVMGSGSNVIAMPVVEKLVIKMCIKGIQRVKENKEFVWIRVGAGENWDSLVWALLEKNIFGLENLALIPGLVGAAPIQNIGAYGTEVSEFVDEVETFDRSGEKLILKGSDCEFGYRTSIFKRKNDFIISSVTFKLLKKPNTKTDYPDLKNFLSYLDLTEPSPEEIADAITQIRTEKLPNPATHPNLGSFFKNPVVAKDLAESLAGRIDSLKVFEVPGGFKLSAAQLIDLDGWKSKPGENVSCWVKQPVGSR

SEQ ID NO: 83436 - protein, 186 aa, Unknown
  Bacterial polypetide isolated from the Sargasso Sea
NFGPAAFFSGIPGSIGGALTMNAGCFGNETWEFVKSVEVMDRNGEIHQLDPEEFSISYRSVGFPFPLWFLSCVMSFPEEGFTTIEELKSMRDSRLERQPLTENTCGSVFKNPDGNYAGDLIERSGLKGFRIGGCAVSEKHANFIVNDKEATASDIETLIKHIQKTVKDHYGINLETEVRIIGEYHE

SEQ ID NO: 83437 - protein, 184 aa, Unknown
  Bacterial polypetide isolated from the Sargasso Sea
AVGIPGTVGGAAVMNAGAQGGCTAESLESVQVIPMAGGESFELTRDQLAFDYRHSRLQYEPLLVLSARFRLEPGHDPQELRRITSDNLSKRTSTQPYTQPSCGSVFRNPEPLKAGRLIEDLGLKGTRIGGAEVSTVHANFIVNTGAATAMDIDRLISFVQARVHERHALSLHPEVKRLGFATAA

SEQ ID NO: 83438 - protein, 263 aa, Unknown
  Bacterial polypetide isolated from the Sargasso Sea
FATALVLWQTATWLYGPRAGRWASLLWISLPAVGLGSFLISTDTPLLLFISLALLAIAGSSCNKIPPAHAMIYAGFALGLGMLTKYAALYGLFGLLLIWAIGRHQPEPIIRGKDLLLAIVAFLIAASPNLVWNIAHDFSTMRHLGDNANLAKQTNNLTESLFFLISQAGVAGPLVFVMMFGILGAARQERHAGWLIWMAVPVLVLMSLQAYLSEANANWAMTAYPALCVWLSGWIAGCKTEDNNGNKKPSKARRWFGYVALGV

SEQ ID NO: 83439 - protein, 257 aa, Unknown
  Bacterial polypetide isolated from the Sargasso Sea
FNSISVGSSINWHELVKKMVELDIYGFENLSLIPGTVGAAPIQNIGAYGQEISNLINEVHCYDYIEGRFVKLSNSDCKFSYRNSSLQYRNLLIYKVVFKTDAPHVLNLNYKSIQDYIDDNKLDKSNIDLNTISKIICKIRNKNLPDPKEIPNVGSFFKNPIINIEDINLNAFSVNDLIIWKINDKTIKVGAARLIDLIKNKINEDKNISIYKNHSLVLTTNAKSNQEEVLRFANQIQILVFDTFNIHLEIEPTVITN

SEQ ID NO: 83440 - protein, 168 aa, Unknown
  Bacterial polypetide isolated from the Sargasso Sea
FAYRQSHFKAEPGRHVILSVTLALPCAWHPKRDYAGLDLLPEQASAQEMLDHVVALRASKLPDWRILGNAGSFFHNPVVSAEKAAEIAGAPRYPQPDGTVKLSAGWLIEQCGLKGFRLGPAGTYARHALVLVNHGGATSTDIAALANHIRGKVRERFGVELVQEPIAL

SEQ ID NO: 83441 - protein, 336 aa, Unknown
  Bacterial polypetide isolated from the Sargasso Sea
MYKVLSNFSIKDYNTFNIDVKSNKFISINTEDQLINYLTQNKGQEDIFFLGGGSNVLFSKDYNGTIVHLSLKGKEIIEESDDNIIVEVCSGENWHEFVMWAIENNYGGIENLSLIPGNVGAAPIQNIGAYGVELKDVFDSCRVLSRESNEIEHFNKDKCEFNYRSSIFKFNEKNKYVILSIRLKLSKEPHSFNLTYDSLKERFNSKEISLSSISEEIIKIRESKLPNPKKIGNCGSFFKNPIIKSQKLEDLLEKYPKLPHHEIENGFYKIPAAWLIEKIGFKDKSLGDVGVYIHQPLVIVNNGNASGSDILKFANSIKDSVREVFNIELEEEVNII

SEQ ID NO: 83442 - protein, 340 aa, Unknown
  Bacterial polypetide isolated from the Sargasso Sea
MQENILKMLLKENHKISNSLKIDSTARFYIEVIKQDELIDLYKFINKNEIKYLVLGEGTNLVPPDFFDGIVIKPNFNDVLYDSNNQIINVGASVNWHKLVNICIEKNIYGFENLSLIPGTVGAAPIQNIGAYGQEVSNLIDKINCFDIEKGEFKTLNNSSCKFKYRNSIFKNNSLLIISVDFKTDCKKEFNIEYNSIINHMDKIGFKKTNLSLETLSNLICDIRNKTLPDPNIIPNAGSFFKNAEVKISEIDDSEFSLDELIIWDIGNNKVKVGSARLIELVKDRIPKSKNVEIYKNHALVLVTNAYATQAEILDYANAIIKIVKKVFNIELQIEPTLVE

SEQ ID NO: 83443 - protein, 334 aa, Unknown
  Bacterial polypetide isolated from the Sargasso Sea
MNIFENHKIKNSLQIKSSCRFYVEINNKNEFNDLHVFISNKKLPVFILGEGTNIVPPEYYDGIIIKPLFNNIKYLNETNIVSVGASINWHFLVKEMVSKNIYGFENLSLIPGTVGAAPIQNIGAYGQEVSNLINKVDCFNYETGKFVTLTKEQCNFSYRDSSLKKGNLIIFNIDFKTDSINTLNLDYKSIQSYLYQNKIDSNSLNLDSVSDIVCKIRNSILPNPDEVPNAGSFFKNPIMDKNKINTDHFSLDRLIIWDIDSVYVKVGAARLIQLIKNDLINDNNIKIYDKHALVLITNSETSQTNILEYANQIKSKVFEVFNIPLEIEPTIIPN

SEQ ID NO: 83444 - protein, 302 aa, Unknown
  Bacterial polypetide isolated from the Sargasso Sea
MNLKDLEEFSKKITGKLLFDYNLNKSNWFNIGGKTKIYFKPESLTDLVDFLKLFNKRGRIFVLGAGSNVLFEDSCFDGVVIKLGKNFSKLSILNDEIVIAGSGAQDKKLSEFACENSLSGFEFLSCIPGTVGGGIRMNSGCFESEFKDIILSVQTIDTLGNVITIPRNQIKFDYRKCNLNNNLIFLSASFKGYKNDKKLISQKMISLKFKKEQAQPTKIKTGGSTFKNPVDQTNKKVWELIKSSVPLDTRFGDATISEKHCNFFINKNKATCRDMKKLINFVKEKVFASTGVRLSLEIILVE

SEQ ID NO: 83445 - protein, 334 aa, Unknown
  Bacterial polypetide isolated from the Sargasso Sea
MIVNKNASLKKLNTFNVDASCDLLVESSNTNDLLEVLNNKELNNNLFILGGGSNILFTKHYQGTIINLKEESIKILEEGADKVLVEVSAGMNWHRFVEWAVDKNFGGIENLSLIPGNVGASPIQNIGAYGVELEDVFDSCSGIMIDSLDKVNLSKLDCEFTYRSSIFKKKLKNKFIITSVRFNLTKSNHLYNIDYPDLNNLSESGLDLKKISNEVIKIRNTKLPDPKQYGNCGSFFKNPIISYSKFQKLKEKFAEIPFFKTDSNYFKVPAAWLIDKCGFKKINDENVGVYKNQPLVVINLGNASGNEIINFAKRIKDSVFNEFDIELEEEVIIM

SEQ ID NO: 83446 - protein, 248 aa, Unknown
  Bacterial polypetide isolated from the Sargasso Sea
SVNWHSFVKEMIENKIYGFENLSLIPGSVGASPIQNIGAYGQEVSNLIAKVDCFDYVKNKFLSLSNSDCNFSYRKSSLKDKPYIIFNIDFITNGFKSLNLEYDSIQNYINNNNINLSSISLNRASEIIVDIRNSILPDPSQVPNVGSFFKNPTINKNEINTSKFNLEDLIIWHYDSDTVKVGAARLIQLVKNDLKNFNNVSIYSNHALVLITNGKATQKEILSFANNIKNVINKTFNISLDIEPTVIN

SEQ ID NO: 83447 - protein, 209 aa, Unknown
  Bacterial polypetide isolated from the Sargasso Sea
MSFPYSLKPFNTFGVEQSCLSLIEVHSKAELQSACLSLYQSKRPMLVLGGGSNIVFTDDFNGTVVRVLSKGISCSEDDTHFYLAVEAGENWHELVKFSLNQNMPGLENLALIPGTVGAAPIQNIGAYGVELCDICDWVEYLDLASGNLLRLTVDECEFAYRESIFKGSLRDKAVITAVGLRLPKAWQPKLAYGPLQSFTAETVTPRGDF

SEQ ID NO: 83448 - protein, 321 aa, Unknown
  Bacterial polypetide isolated from the Sargasso Sea
MKINSKCRFFIEIDKVTQFENLHKFINEQNLPVLVIGEGTNIVPKDYFEGIVIKPTFNKVQYNTNESTVSVGSSVNWHSFVKEMIENKIYGFENLSLIPGSVGASPIQNIGAYGQEVSNLIAKVDCFDYVKNKFLSLSNSDCNFSYRKSSLKDKPYIIFNIDFITNGFKSLNLEYDSIQNYINNNNINLSSISLNRASEIIVDIRNSILPDPSQVPNVGSFFKNPTINKNEINTSKFNLEDLIIWHYDSDTVKVGAARLIQLVKNDLKNFNNVSIYSNHALVLITNGKATQKEILSFANNIKNVINKTFNISLDIETTVIN

SEQ ID NO: 83449 - protein, 143 aa, Unknown
  Bacterial polypetide isolated from the Sargasso Sea
DLDYDYRHSRLQSEPLVVLSARFQLQSGGDPSELSARTSANLHKRTSTQPYQLPSCGSVFRNPEPQKAGRLIEALGLKGHRIGGAEVSTLHANFIVNTGNAQAADMDALIRHVQAVVQQAHGLQLHPEVMRLGCFANSQAAAA

SEQ ID NO: 83450 - protein, 288 aa, Unknown
  Bacterial polypetide isolated from the Sargasso Sea
MRNNIVLNEPLSRHTSWKVGGPADIFFTPNDRNDLSDFLKSNDCIITWLGNGTNILVRDAGVRGAVISTRKSLNKIELIDQSNYLVEVGVSCFELAMYATKNNFGPAAFFSGIPGSIGGALTMNAGCFGNETWEFVKSVEVMDRNGEIHQLYPEEFSISYRSVGFPFPLWFLSCVMSFPEEGFTTIEELKSMRDSRLERQPLTENTCGSVFKNPDGNHAGDLIERSGLKGFRIGGCAVSEKHANFIVNDKEATASDIEILIKHIQKTVKDHYGIDLETEVRIIGEYHE

SEQ ID NO: 83451 - protein, 288 aa, Unknown
  Bacterial polypetide isolated from the Sargasso Sea
MRNNIVLNEPLSRHTSWKVGGPADIFFTPNDRKDLSDFLKSNDCIITWLGNGTNILVRDAGVRGAVISTRKSLNKIELIDQSNYLVEVGVSCFELAMYATKNNFGPAAFFSGIPGSIGGALTMNAGCFGNETWEFVKSVEVMDRNGEIHQLDPEEFSISYRSVGFPFPLWFLSCVMSFPEEGFTTIEELKSMRDSRLERQPLTENTCGSVFKNPDGNYAGDLIERSGLKGFRIGGCAVSEKHANFIVNDKEATASDIETLIKHIQKTVKDHYGIDLETEVRIIGEYHE

SEQ ID NO: 83452 - protein, 333 aa, Unknown
  Bacterial polypetide isolated from the Sargasso Sea
MNILSDHNIANSLRINSKCRYFIEINEISEFKKLYDFINEQKKPIFILGEGTNIVPNDYYDGIVIKPRFNHIKYDKSKCIVSVGSSVNWHNFVEEMVENNIYGFENLSLIPGSVGASPIQNIGAYGQDVSELISKIDCYDYKKNKLISLSNSDCNFSYRNSSLRDKPYIIYNIDFHTNRPKLLNLKYESLQNYIKKNNLNASKLSLRDTSKIIINIRNSILPDPNSIPNAGSFFKNPTIREENINTNQFSLDELIIWNRNSNNVKVGAARLIQLIKDDLNNHNNVSIYSEHALILISNGKASQKDILNFANNIREVVMKTFNISLDIEPTVIN

SEQ ID NO: 83453 - protein, 299 aa, Unknown
  Bacterial polypetide isolated from the Sargasso Sea
RNGWPLTLMGGGSNLILAGAVSGLVVRMVSRGRRVLSRDAEQVVIEAEAGENWHQLVCWSLDLGLSGLENLALIPGTVGAAPVQNIGAYGVELCDCFDSLQALDRETGELCWFDREQCSFAYRDSRFKRETGRYVILRVRLRLWRRARLRVGYAPLAAAWAATGLGEPDARVVAALVVRIRQSKLPDPQILPNAGSFFKNPVVSVGQARQLLERYPSMPQFTQADGTVKLAAAWLIDQAGWKGFRDGAAGVHNEQALVLVNHGGATGAQILELAARIRADVLARYGVELEQEPPVIGLP

SEQ ID NO: 83454 - protein, 152 aa, Unknown
  Bacterial polypetide isolated from the Sargasso Sea
MAHWPRSVSSPRPQAIFDTVCATRMAKLPDPAVLGNAGSFFKNPVVTAAQADRLKQQYPHMPCYPTADGQAKLAAGWLIDQCGLKGFAIGRAAVHQEQALVLVNLGGASAMELIALAAHVRDSVEQKFGVLLEHEVRFMGRSGETWLDEVLS

SEQ ID NO: 83455 - protein, 58 aa, Unknown
  Bacterial polypetide isolated from the Sargasso Sea
ATRMAKLPDPAVLGNAGSFFKNPVVTAAQADQLKQQYPHMPCYPTADGQAKLAAGWLI

SEQ ID NO: 83456 - protein, 322 aa, Unknown
  Bacterial polypetide isolated from the Sargasso Sea
MNFQSNFQLKEYNTFGISATAKEFVAVSNVAELANVLQLHQDIFVLGGGSNMLLTQNIEKLVVHINFKGIEVVKEDDNHVWVKAQAGENWHNFVLWCIEHNFGGIENLSLIPGNVGTTPIQNIGAYGVEIKDTFDNCTAMKISTQELKSFDKTACHFGYRESVFKNDLKNQYIITDVTFKLTKKNHKINTSYGAIDTELEKDNITNPTLKQISNAVIAIRQSKLPNPKELGNSGSFFKNPIISKADYNKIKQNHPEMPHYVVSETEVKVPAGWLIEQAGFKGKRFGDAGIHKNQALVLVNYGNATGQEILAVSKNIQQTIFE

SEQ ID NO: 83457 - protein, 341 aa, Unknown
  Bacterial polypetide isolated from the Sargasso Sea
MSFPYSLKPFNTFGVEQSCLSLIEVHSKAELQSACLSLYQSKRPMLVLGGGSNIVFTDDFNGTVVRVLSKGISCSEDDTHFYLAVEAGENWHELVQFSLNQNMPGLENLALIPGTVGAAPIQNIGAYGVELCDICDWVEYLELESGNLRRLTVDECDFAYRESIFKSSLRDKAVITAVGLRLPKAWQPKLAYGPLQSFTAETVTPREIFDRVCEVRSEKLPNPEVLGNAGSFFKNPIVSAATYMQLAARFPSIVGYAQPNGEVKLAAGWLIEHAGLKGFALGNAGVHAKQALVLVNLGHATGQDICRLALHVIARVNEVFGVKLEAEPRIMGLTGETSLDV

SEQ ID NO: 83458 - protein, 360 aa, Unknown
  Bacterial polypetide isolated from the Sargasso Sea
MPSLQSYSTFGLSASCNSIESFVDVPSFLSLYNSIKQSADSAVYILGGGSNSIFTKDFDGTVLVNEIKGISHFDTESHHYLRVGAGENWHEFVTLCMEEKWYGFENLALIPGSVGACPIQNIGAYGREVNALIDKVECVLLETGEQVLLNKEDCQFGYRDSVFKHALANKVLITHVNFKLPKDYELETSYGELAALSEPTPEKVYSKVIEIRKSKLPDPNVLGNAGSFFKNPVVPTSVFHSIQKDYDVVPHFVITNKVTPPIETSDLGVTLKQQENTKQNEELIKIPAAWLIDQAGFKGKTLNKVRCHPTQPLVLTNLGGATGEDLITMAKNIIASVHDKFGVTLEPEVRLLGSKGLISL

SEQ ID NO: 83459 - protein, 341 aa, Unknown
  Bacterial polypetide isolated from the Sargasso Sea
MSFPYSLKPFNTFGVEQSCLSLIEVHSKAELQSACLSLYQSKRPMLVLGGGSNIVFTDDFNGTVVRVLSKGISCSEDDTHFYLAVEAGENWHELVKFSLNQNMPGLENLALIPGTVGAAPIQNIGAYGVELCDICDWVEYLDLASGNLLRLTVDECEFAYRESIFKGSLRDKAVITAVGLRLPKAWQPKLAYGPLQSFTAETVTPREIFDRVCEVRNEKLPNLEVLGNAGSFFKNPIVSAATYMQLAARFPSIVGYAQPNGEVKLAAGWLIEHAGLKGFVLGNAGVHAKQALVLVNLGHATGQDICRLALHVIARVNEVFGVKLEAEPRIMGLTGETSLDV

SEQ ID NO: 83460 - protein, 338 aa, Unknown
  Bacterial polypetide isolated from the Sargasso Sea
MLPDHPLAAHNTFGIAATARFAARITHASQFEALYRDPRVANLPQLVLGGGSNVVFTRDFDGVVLLDEIAGRRVVREDDDAWYVEAGGGENWHAFVAWTLEHGMAGLENLALIPGTVGAAPIQNIGAYGLEMKAYFDSLVAVELATGRSERFDAARCAFGYRDSFFKREGRGRFAIVSVTFRLPKQWAPRLGYVDVTRELDARGMAPDAATACDVFDAVVAIRRAKLPDPLVLGNAGSFFKNPVIDAAQFDALRARAPEVVSYPQPDGQVKLAAGWLIDRCGWKGRALGAAAVHDRQALVLVNRGGATGADVLALAQAIQADVRAQFGIELEAEPVCL

SEQ ID NO: 83461 - protein, 220 aa, Unknown
  Bacterial polypetide isolated from the Sargasso Sea
QNIGAYGVELCDICDWVEYLDLESGNLLSLTADECEFAYRESIFKGGLRDKAVITAVGLRLPKAWQPKLAYGPLQSFTAETVTPREIFDRVCEVRSEKLPNPEVLGNAGSFFKNPIVSAATYMQLAARFPSIVGYAQPNGEVKLAAGWLIEHAGLKGFALGNAGVHAKQALVLVNLGHATGQDICRLALHVIARVNEVFGVKLEAEPRIMGLTGETSLDV

SEQ ID NO: 83462 - protein, 307 aa, Unknown
  Bacterial polypetide isolated from the Sargasso Sea
MQSDVSLKAFNSFGVDVHARRFAEARDDDDVREALNLANQQGLPLLVIGGGSNLLLTRDVEALVLRMASRGIRILEDDGEQVLVEAEAGEPWHPFVQWSLTQGLNGLENLSLIPGTVGAAPMQNIGAYGVEIKDLFAGLTALDRHTGELRDFALEECAFAYRDSLFKREAGCWLILRVRFRLSRLASLRLDYGPVRQRLAEMGIEAPTASDVSRAICAIRSEKLPDPAELGNAGSFFKNPVVPFELAERIRAEHADLVSYPAGAGLAKLAAGWLIERAGWKGAREGDAGVHRLQALVLVNYGNATGA

SEQ ID NO: 83463 - protein, 187 aa, Unknown
  Bacterial polypetide isolated from the Sargasso Sea
SSAIATASSSTPVRTATSSPPSGCASPRPGSSVAGYGPLAALGEQPTAQAIFDTVCATRMAKLPDPAVLGNAGSFFKNPVVTAAQADQLKQQYPHMPCYPTADGQAKLAAGWLIDHCGLKGFAIGRAAVHQEQALVLVNLGGASAMELIALAAHVRDSVEQKFGVLLEHEVRFMGRSGETWLDEVLS

SEQ ID NO: 83464 - protein, 334 aa, Unknown
  Bacterial polypetide isolated from the Sargasso Sea
MKKISLRPYNSFGVDAYAKDFVSIESEKEIVEFLEKNKSKNLLILGGGTNILFKKDLDYPVLKIDIKGIEIINEDDNEVLISVGAGENWNELVWWCIENDFGGIENLVSIPGNVGSAPIQNIGAYGKEIREVMENCRGVFIDNCSLKIFKNEECNFSYRSSIFKEDLKNKFIITNVTLRLTKKNHKINSEYYSLKNDLEENGIKNPTIKRIAQSVSNIRKEKLPDYEKIGNAGSFFKNPIIDKSKLKKIKSLYPDIISYNIGKSNYKIPAGWLIEKCGFKDIKQKKVSVYEKQALVIINLGDAKGIDIYAFSQKIKETVREKFDILLEEEVSII

SEQ ID NO: 83465 - protein, 346 aa, Unknown
  Bacterial polypetide isolated from the Sargasso Sea
MSLSDSAAFVAGYPLKAHNTFGFDVRAHFACRIEHEAQLMAAVRDPRGAGLPRLVLGGGSNVVLTDDFAGLVLLVALRGRRVVREDDDAWYVEAAAGEPWHEFVAWTLSQGLPGLENLALIPGTVGAAPIQNIGAYGLEMCERFASLRAVELETGAVVELDAAACRFGYRDSFFKREGRDRFVITSVTFRLPKVWQPRAGYADIARELAAGGHAAAAPSAQAIFDAVVAVRRAKLPDPLQLGNAGSFFKNPVVEAAQFEALKLKEPEIVSYLQSDGRVKLAAGWLIDRCGWKGRAMGAAAVHQRQALVLVNLGGASGAEVLALAKAVQRDVLARFGVELEAEPVCL

SEQ ID NO: 83466 - protein, 219 aa, Unknown
  Bacterial polypetide isolated from the Sargasso Sea
AILPETTPILLIHNGMGTIEELHTFKQPLLMGTTTHAARRDGNVIIHVAQGTTRIGPAREQDGDFSYLAETLQEVLPDVAWHNTIRAELWRKLAVNCVINPLTALWDCPNGELRHHPEKIALICEEVAAVIEREGHHTSADDLRYYVEQVIDSTAENISSMLQDIRAMRHTEIDYITGYLLKRARAHGIAVPENARLFEMVKRKESEYERSSTGMSRPW

SEQ ID NO: 83467 - protein, 124 aa, Unknown
  Bacterial polypetide isolated from the Sargasso Sea
VFQVDSNGLSLCQEEVFGPVVSIQVFEDDGEALSLANDSRFGLVGYCWTNSLARAQAFQQLVDAGTLWINTPLARDLRAPFGGFKESGVGRDGPRQAADFFTEEKATITAVGAPPIRKLGTAAD

SEQ ID NO: 83468 - protein, 381 aa, Unknown
  Bacterial polypetide isolated from the Sargasso Sea
MKTLHFGAGNIGRGFIGKLLADASHQVTFADVNETLIDQLNHRQEYKVHVVGADQKLDVVRNVAAVSSAGHEVIARIITADLVTTAVGPNILDKIASTLAKGLQARFDAGNLTPLNVIACENMVRGTSHLKQEVLKYLPVAYHATLDACIGFVDSAVDRIVPPAAANDDPLEVTVESFSEWIVDQTQFKGELPQVAGMEPTDNLMAFVERKLFTLNTGHIVTAYLGKLRGYRTIREAIEDPLIRSKVRRAMEESGAVLVQRYGFDPRLHAAYIEKILARFANPYLVDEIDRVGRQPLRKLAAGDRLVKPLLGTLEYGLPSDHLQEGIAAALHYRNADDPQAVELQQLLAELGPAQALARITGLAADSDIVSAIVTRYGNLK

SEQ ID NO: 83469 - protein, 134 aa, Unknown
  Bacterial polypetide isolated from the Sargasso Sea
GMADGHIFKAYQPGGPSSGILPASLNDVPLDFDTLQPHGSFIGSAAVVVLSDKDRVRDAALNMLRFFEDESCGQCTPCRTGCSKAVQLMQQEVWDQTLLNDLCDVMHDASICGLGQAAPNPIRLTIKHFSHEIS

SEQ ID NO: 83470 - protein, 198 aa, Unknown
  Bacterial polypetide isolated from the Sargasso Sea
MLIGGGGHCRSCIDVIEAQNEYEIAGIIVSNTSGLELVQGYPVLGVNEDLENIIPQTPNSLITVGQIKTPDIRIHLYKELKKLKAKLPTIIAPTAYCSKYALVGSGTILMHGALVNASAKIGENCIINSQALIEHDVHIESHCHISTGVRINGGVHIGMGSFIGSGAIIREGVHIGSRVVIGAGQVILRNVSEGKVVK

SEQ ID NO: 83471 - protein, 68 aa, Unknown
  Bacterial polypetide isolated from the Sargasso Sea
MTIREGFTFDDVLLVPKFSDITSRSQTDLSTNLSRNIKLNIPLVSANMDTVTESNMATTMARQGGIGI

SEQ ID NO: 83472 - protein, 266 aa, Unknown
  Bacterial polypetide isolated from the Sargasso Sea
MEKVLTEALTFDDVLVLPMHSDVLPKEVSLKSKFTKNISLNLPFCSAAMDTVTESKMAIALASLGGIGIIHKNNTPEEQAIQVRQVKKFESGIVRDPISIRSNNTIGELKQLTSELKISGMPVVDDDELKGIVTGRDFRYARDMEQTVSEIMTPREKLITVKEGETQDVVKSLMYKHRIEKILVLDDKDKLVGLMTMKDIEKSIDYPLASRDSEGRLIVGAAIGVGKDLMDRAKALVGAGVDVFVLDSAHGDSKRVIDAIKQVKKK

SEQ ID NO: 83473 - protein, 259 aa, Unknown
  Bacterial polypetide isolated from the Sargasso Sea
LTTKFTLKNFKQVFNENEFLDLLLTTFYFTFFGTVGAIIFGIFAAQLVNQKFYGRTFMRSILLFPYVGPVVALAYTWTLLLDPNSGTLNALLVNFGIIDKPINLLGQKYMTLNLLGFDIKLRLALTTVIMFEIWRYFPLAFLFILARLQAVPKDLYEAAEVDGARPLRKFINITLPQITAILSILFMIRFIWNFNKFEDIFLLTGGASGTRTLPINVYQQGFAVSNIGMGSAVSIVIVMLLIIFMIIYFKLIGKRANEI

SEQ ID NO: 83474 - protein, 28 aa, Unknown
  Bacterial polypetide isolated from the Sargasso Sea
VKVTGAGLKESHVHDVQITRESPNYRVI

SEQ ID NO: 83475 - protein, 202 aa, Unknown
  Bacterial polypetide isolated from the Sargasso Sea
MRGILLFPYVGPVVALAYTWTLLLDPNSGTLNALLVNFNIIEQPINLLGQKYITMSILGFEFKLRLALTTVIFFEIWRYFPLAFLFILARLQAIPQSLYEAADVDGASPIQKFIHITLPQITAIISILFMIRFIWNFNKFEDIFLLTGGASGTRTLPINVYQQGFAVSDIGMGSAVSIVIVMLLLSFMVIYFRLIGKRANEV

SEQ ID NO: 83476 - protein, 129 aa, Unknown
  Bacterial polypetide isolated from the Sargasso Sea
MINSKFVGEGLTYEDVLLVPAYSKILPSDVSLETRFSRNISLNVPIVSAAMDTVTESKMAIAIASEGGIGVIHKNMSIEDQANEVRLVKRAESGMIIDPVTLDTDSLVIDAKNNMKKYKIGGIPIVSKT

SEQ ID NO: 83477 - protein, 119 aa, Unknown
  Bacterial polypetide isolated from the Sargasso Sea
FLFILARLQAIPQSLYEAAEVDGASPIQKFIHITLPQITAIISILFMIRFIWNFNKFEDIFLLTGGASGTRTLPINVYQQGFAISDIGMGSAVSIVIVMLLISFMVIYFRLIGKRANEV

SEQ ID NO: 83478 - protein, 46 aa, Unknown
  Bacterial polypetide isolated from the Sargasso Sea
MEPIKEALTFDDVLLIPRFSSIIPANTNLNTNLSKNINLKIPFISS

SEQ ID NO: 83479 - protein, 150 aa, Unknown
  Bacterial polypetide isolated from the Sargasso Sea
MVPIKEALTFDDVTLVPKYSEILPTEVDTSIKLTSYLKLKIPLLSSAMDTVTESRMAIALARAGGLGVIHRNLDIKTQIQEIRKVKNKKLLVGAAVGAGPQEFKRAEMILKENINIIVVDTAHGHTKKVSEMIKFIKKKKSKKTALCAGN

SEQ ID NO: 83480 - protein, 83 aa, Unknown
  Bacterial polypetide isolated from the Sargasso Sea
EDIESEKLVPEGIEGRVPYKGLVANVINQLEGGLRQCMGYIGCKNIKDMQKNSEFIEITNAGMTESHVHDVMITKEAPNYQRS

SEQ ID NO: 83481 - protein, 33 aa, Unknown
  Bacterial polypetide isolated from the Sargasso Sea
TKAEFVRISGAGMKESHVHDVTITKEAPNYRMG

SEQ ID NO: 83482 - protein, 115 aa, Unknown
  Bacterial polypetide isolated from the Sargasso Sea
KKFKIKNKFYKKYRGMGSIGAMSAGSSNRYFQKNHKDKSKFVPEGVDGRVEYKGNVSKIIYQLKGGLKSSMGYIGAEKISEIKRNAKFIKITKAGFYESMVHSVEMIEPTLNYKL

SEQ ID NO: 83483 - protein, 228 aa, Unknown
  Bacterial polypetide isolated from the Sargasso Sea
FGTVGAIVFGMLRAQLVNQKFYGRTFMRSILLFPYVGPVVALAYTWTLLLDPNSGTLNALLVNFGVLDKPINLLGQKYIELNLMGFDIKLRLALTTVIMFEIWRYFPLAFLFILARLQAVPKDLYEAAEVDGAGPLRKFVNITLPQITAILSILFMIRFIWNFNKFEDIFLLTGGASGTRTLPINVYQQGFAVSNIGMGSAVSIVIVVLLIIFMIVYFKLIGKRANEI

SEQ ID NO: 83484 - protein, 242 aa, Unknown
  Bacterial polypetide isolated from the Sargasso Sea
MVVDDEDRLSGLFTLSDVETITQEANAQVKPARDREFQLLCGAAVSVPRTDAGELDRDKLTGHVGALVDRGLDTVAISTAHGHTAGVGEAVRQIRDAFPTLPIIAGNVTSAAGVEYLADCGANTIKIGQGPGSICTTRIVAGVGIPQLTALYTASQGAAAKGVTIVADGGITKSGDIVKALTLAHGVICGGLLAGCQESPGDIVEISGKRYKQYRGMGSLAAMKAGSAARYGHTTKINRGKV

SEQ ID NO: 83485 - protein, 103 aa, Unknown
  Bacterial polypetide isolated from the Sargasso Sea
MGSLGAMAQREGSSDRYFQDINSGTEKLVPEGVEGRIPCKGPLSGILHQMMGGLRAAMGYTGCATIEEMRSAPSFVKISGAGVKESHVHDVAITKEAPNYRVK

SEQ ID NO: 83486 - protein, 181 aa, Unknown
  Bacterial polypetide isolated from the Sargasso Sea
MVPIKEALTFDDVTLAPKYSEILPSDADTSVSLTKHLQLKIPLLSSAMDTVTESRMAIAIAKAGGIGVIHRNLDIQKQLSEIRKVKNQKLIVGAAVGAAPNEFIRVKEIIKEGVNLIVVDTAHGHTKKVAQIIKYIKKIKSNKIALCAGNIATPEAAKFLIKLGVDIIKIGIGPGSICTTR

SEQ ID NO: 83487 - protein, 118 aa, Unknown
  Bacterial polypetide isolated from the Sargasso Sea
RPPGEYFFVDGVRVKKYRGMGSLDAMKQGSDTRYLSESGHLKVAQGVSGTVKDKGSVCKMVPYLIHGVKQGFQDMGAKSMAHATELRNGGEMRMETRTGAAQKEGGVHDMHSYKKVLW

SEQ ID NO: 83488 - protein, 261 aa, Unknown
  Bacterial polypetide isolated from the Sargasso Sea
ILLTTKFTLKNFKQVFNENEFLNLLLTTFYFTFFGTVGAIIFGVFAAQLVNQKFYGRTFMRSILLFPYVGPVVALAYTWTLLLDPNSGTLNALLVNFGILDKPINLLGQKYMTLNLLGFDIKLRLALTTVIMFEIWRYFPLAFLFILARLQAVPKDLYEAAEVDGAGPLKKFINITLPQITAILSILFMIRFIWNFNKFEDIYLLTGGASGTRTLPINVYQQGFAVSNIGMGSAVSIVIVMLLIIFMIIYFKLIGKRANEI

SEQ ID NO: 83489 - protein, 125 aa, Unknown
  Bacterial polypetide isolated from the Sargasso Sea
MWAQALKNLKEPEVILKEDIDMIVVDTAHGHTKKVSEIIKFIKKIKNKKTALCAGNIASPEAAKFLLKLGVDIIKVGIGPGSICTTRLVAGIGVPQLSAILNVRNGIKNKNIKIISDGGIIIFWR

SEQ ID NO: 83490 - protein, 142 aa, Unknown
  Bacterial polypetide isolated from the Sargasso Sea
ELKLRLALTTVIFFEVWRYFPLAFLFILARLQAIPKDLYEAADVDGAGPFRKFFYITLPQITAILSILFMIRFIWNFNKFEDIFLLTGGASGTLTLPISVYQQGFSVSNIGMGSAVSIVIVLLLITFMIIYFKLIGKKANEI

SEQ ID NO: 83491 - protein, 137 aa, Unknown
  Bacterial polypetide isolated from the Sargasso Sea
KAFAAGADAVMIGSLFAGTDEAPGKIIKKGGKLFKSFRGMGSVGAMNKGSADRYFQSKQKDSSKYVPEGVEGLARYKGKVDSIIFKLVGGLRSSMGYLGSKQIKYLRNKPQFVKITKAGFYESMVHNVDIVKRDAKY

SEQ ID NO: 83492 - protein, 95 aa, Unknown
  Bacterial polypetide isolated from the Sargasso Sea
KEKIDLIVVDTAHGHTKKVAEIIKKIKKLKSKQTTLCAGNIATTEAAKFLCKLGVDVIKVGIGPGSICTTRLVAGIGVPQLSAIIAVKKGISKKN

SEQ ID NO: 83493 - protein, 185 aa, Unknown
  Bacterial polypetide isolated from the Sargasso Sea
MVPIKEALTFDDVTLAPKYSEILPTEVDTTVKLTNNLKLKIPLLSSAMDTVTESRMAVAIAKAGGIGVIHRNLNIKKQITEIKKVKKHKLIVGAAVGAGSHEFKRAKEIIKEGVDLIVVDTAHGHTKKVSEIIKYIKKIKNKNIALCAGNIATPEAAKFLIKLGVDIIKIGIGPGSICTTRLVAG

SEQ ID NO: 83494 - protein, 102 aa, Unknown
  Bacterial polypetide isolated from the Sargasso Sea
LGAMKEGSKDRYFQTGVQEVQKLVPEGIEGRVPYKGPLAESIFQFTGGLRAGMGYTGCASIDELQNKASYVRISNAGLRESHVHDVYITEEAPNYPSFKPDA

SEQ ID NO: 83495 - protein, 240 aa, Unknown
  Bacterial polypetide isolated from the Sargasso Sea
ADSLFVDIAHGHSLVMQQGIERLRAEFPEVPLICGNVATGAGARFMYELGADAVKVGVGPGRGCRTRLETAAGVPQLQAIREAWCEVGGEISIMADGGVRFDKDIFLALACGADTVMLGSALSGTDEAPGRVIEDPATHTKKKIYRGMTSPEAVMESLYDSEDSDAVDAALATPPEGQEIQVPYRGSVVDILHCIRGHLRSAVSYAGCDSLEKAREAILPDPLEYLIALSEASRKESYER

SEQ ID NO: 83496 - protein, 80 aa, Unknown
  Bacterial polypetide isolated from the Sargasso Sea
MAAKVKSSTDIREALTFDDVLLVPAESSVQPHEVSTTTRLTSKISLNVPIMSAAMDTVSEANMAIAMAQSGGLGVLHRNP

SEQ ID NO: 83497 - protein, 80 aa, Unknown
  Bacterial polypetide isolated from the Sargasso Sea
NVDKLVPEGIEGRVPYKGSALPIVHQLTGGVRSSMGYCGCASIAEWHEKSQFVEITAAGMNESHVHDVQITKEAPNYHRD

SEQ ID NO: 83498 - protein, 198 aa, Unknown
  Bacterial polypetide isolated from the Sargasso Sea
MEKVLTEALTFDDVLVLPMHSDVLPKEVSLKSKFTKNISLNLPFCSAAMDTVTESKMAIALASLGGIGIIHKNNTPEEQAVQVRQVKKFESGIVRDPISIRSNNTIGELKQLTSELKISGMPVVDDDELKGIVTGRDFRYAKDMEQTVSEIMTPREKLITVKEGETQDVVKSLMYKHRIEKILVLDDKDKLVGLMTMK

SEQ ID NO: 83499 - protein, 75 aa, Unknown
  Bacterial polypetide isolated from the Sargasso Sea
MGIIKDSLTFDDVTLIPSFSSILPSEAITTTDLGQKLRLKIPLMSSAMDTVTEAKMAITLSKAGGLGVIHRNLSI

SEQ ID NO: 83500 - protein, 252 aa, Unknown
  Bacterial polypetide isolated from the Sargasso Sea
KALINEGVDLIVVDTAHGHTKKVAEIIRFIKRIKNKKVALCGGNIATPEAAKFLIKLGVDIIKIGIGPGSICTTRLVAGIGVPQLSAILSVRNGIKNKNIKIISDGGIKYSGDLAKAFAAGADAVMIGSLFAGTDETPGKLIKKNGKLFKSFRGMGSVGAMNKGSADRYFQNKQKDASKYVPEGVEGFAKYKGDVGSIIYKLIGGLKSSMGYLGSKDILKLRNKPNFVKITKAGFYESMVHNVDVIKNDNKY

SEQ ID NO: 83501 - protein, 165 aa, Unknown
  Bacterial polypetide isolated from the Sargasso Sea
MAQIETALSYDDVLLLPAESAVLPAEVDLSTRLTTEITLNAPIVSAAMDTVTEAEMAIAMAQSGGIGVIHRNMPIEEQAVEVDKVKRFESGLVLEPVTVDPEMTVGELRSLKDQYGFSGFPVIAGDGSIVGMVTNRDIRFVEDPGTEVSKVMTTDLVTVPEHVTG

SEQ ID NO: 83502 - protein, 261 aa, Unknown
  Bacterial polypetide isolated from the Sargasso Sea
VGAGPEEFKRAKAILNENIDLIVVDTAHGHTKKVSEIIRYIKKIKNKKTTLCAGNIATPEAAKFLANLGVDVIKVGIGPGSICTTRLVAGIGVPQLSAILSVCKGLKKNNIKIISDGGIKYSGDLAKALAAGADAIMIGSLFAGTKEAPGKLIKKNGKLFKSFRGMGSVGAMNKGSADRYFQKKQKDLSKYVPEGVEGFVKYKGNIDKTIFKLVGGLKSSMGYLGSKKISGLKINPNFVKITKAGFYESMVHNVDQIKKEK

SEQ ID NO: 83503 - protein, 36 aa, Unknown
  Bacterial polypetide isolated from the Sargasso Sea
RDEEDCRFVKITGAGLKESHVHDVQITRESPNYRII

SEQ ID NO: 83504 - protein, 165 aa, Unknown
  Bacterial polypetide isolated from the Sargasso Sea
FKIIEQPINLLGQKYITMSILGFEFKLRLALTTVIFFEIWRYFPLAFLFILARLQAIPQSLYEAAEVDGASPIQKFIHITLPQITAIISILFMIRFIWNFNKFEDIFLLTGGASGTRTLPINVYQQGFAVSDIGMGSAVSIVIVMLLLSFMVIYFRLIGKKANEV

SEQ ID NO: 83505 - protein, 122 aa, Unknown
  Bacterial polypetide isolated from the Sargasso Sea
PLAFLFILARLQAIPQSLYEAADVDGASPIQKFIHITLPQITAIISILFMIRFIWNFNKFEDIFLLTGGASGTRTLPINVYQQGFAVSDIGMGSAVSIVIVMLLLTFMVIYFRLIGKRGNEV

SEQ ID NO: 83506 - protein, 280 aa, Unknown
  Bacterial polypetide isolated from the Sargasso Sea
INKNTIKSQKPKLSGDADNILLTSKFTLKNFKQVFSENEFLDLLLTTFYFTFFGTIGAIIFGMFAAQLVNQKFYGRTFMRSILLFPYVGPVVALAYTWTLLLDPNSGTLNALLVNFGIIDKPINLLGQKYITLNLLGFDIKLRLALTTVIMFEIWRYFPLAFLFILARLQAVPKDLYEAAEVDGAGPLRKFINITLPQITAILSILFMIRFIWNFNKFEDIFLLTGGASGTRTLPINVYQQGFAVSNIGMGSAVSIVIVMLLIIFMIIYFKLIGKRANEI

SEQ ID NO: 83507 - protein, 106 aa, Unknown
  Bacterial polypetide isolated from the Sargasso Sea
YRGMGSLGAMAQQHGSKDRYFQSDVEEAEKLVPEGIEGRVPYKGKLSKIIEQLVGGLRQSMGYTGCKDIQELQTKTEFVRITDSGKREGHVHDVSITKEAPNYSVD

SEQ ID NO: 83508 - protein, 64 aa, Unknown
  Bacterial polypetide isolated from the Sargasso Sea
MQSLSEKLVLTSAYTFDDVLLVPAASDVIPAEINLSTHLTSNITLNLPLCSSAMDTVTEANMAI

SEQ ID NO: 83509 - protein, 232 aa, Unknown
  Bacterial polypetide isolated from the Sargasso Sea
KKVGEIIKYIKKSKNNKIALCAGNIATPEAAKFLIKLGVDIIKVGIGPGSICTTRLVAGIGVPQLSAILAVRNGIKNKKVKIISDGGIKYSGDLAKAFAAGADAVMIGSLFAGTNETPGKLIKKNGKLFKSFRGMGSVGAMNQGSADRYFQKKQKDISKYVPEGVEGFVKYKGDVGSIIYKLVGGLKSSMGYLGSKNIIGLRNKPHFVKITKAGFYESMVHNVDVIKSDSKY

SEQ ID NO: 83510 - protein, 162 aa, Unknown
  Bacterial polypetide isolated from the Sargasso Sea
STRITTGHGVPTFQSILDCSQSDRDALIIADGGIKNSGDLVKAYGAGADFVMLGSLLAGTDEAPGDITTNVSGEKYKYFRGMASRKAQVEWRGWSSTPEGVSTMIPYKGPVGDILADLRGGIASGISYSGAFGLKDLRGNVEFIKQTAAGMSESRAHILGGG

SEQ ID NO: 83511 - protein, 81 aa, Unknown
  Bacterial polypetide isolated from the Sargasso Sea
MIAEGGIRDTGEIPKAIAAGAESVMLGGMIAGTQESPGETIIFEGRKFKSYRGMGSVEAMKKGSKERYFQDVEDDIKKLVP

SEQ ID NO: 83512 - protein, 145 aa, Unknown
  Bacterial polypetide isolated from the Sargasso Sea
MIKSKFVGEGLTYEDVLLVPAFSEILPSDVSLQTKFSKNINLNVPIVSAAMDTVTESKMAIAIASEGGIGVIHKNMSVEEQANEVRLVKRAESGMIIDPVTLNSNSLVIDAKNSMKKYKIGGIPIVSKTGKLIGIVTNRDLRLKK

SEQ ID NO: 83513 - protein, 277 aa, Unknown
  Bacterial polypetide isolated from the Sargasso Sea
DISPINLDPRCNFQSKKVICNFGNWDAKYRENFEITIKNINGEIIDKKTIKSQKPILSGKADNPLLSTSFTLENFKKVFYENNFVELLLTTFYFTFFGTVGAIIFGILAAQLVNQNIQGRTYMRGILLFPYVGPVVALAYTWTLLLDPNSGTLNALLVNFNILESPVNLLGQKYITISILGLEFKLRLALTTVIFFEIWRYFPLAFLFILARLQAIPKSLYEAAEVDGASPVQKFIHITLPQITAIISILFMIRFIWNFNKFEDIFLLTGGASGTRT

SEQ ID NO: 83514 - protein, 235 aa, Unknown
  Bacterial polypetide isolated from the Sargasso Sea
TTFYFTFFGTVGAIIFGMFAAQLVNQKFYGRTFMRSILLFPYVGPVVALAYTWTLMLDPNSGTLNALLVNFGIIDKPINLLGQKYLILSLFGFEIKLRLALTTVIMFEIWRYFPLAFLFILARLQAVPKDLYEAAEVDGAGPFRKFINITLPQITAILSILFMIRFIWNFNKFEDIFLLTGGASGTRTLPINVYQQGFAVSNIGMGSAVSIVIVMLLIIFMIIYFKLIGKRANEV

SEQ ID NO: 83515 - protein, 212 aa, Unknown
  Bacterial polypetide isolated from the Sargasso Sea
MTTDFTLKNFKNVFINNNFFELLTTTFYFTFFGTLGAIILGIFAAQLVNQKFYGRTFMRSILLFPYVGPVVALAYTWTLLLDPNSGTINSLLVNYGVIEKPINLLGQKYLIINILGFELKLRLALTTVIFFEIWRYFPLAFLFILARLQAIPKDLYEAADVDGAGPFRKFFYITLPQITAILSILFMIRFIWNFNKFEDIFLLTGGASGTLT

SEQ ID NO: 83516 - protein, 292 aa, Unknown
  Bacterial polypetide isolated from the Sargasso Sea
KYLPSDADTSVSLTKHLKLKIPLLSSAMDTVTESRMAIAIAKAGGIGVIHRNLDIKTQLSEIKRVKKQKLIVGAAVGAAPNEFIRAKEIIKEGVDLIVVDTAHGHTKKVAEIIKYIKKIKTNKIALCAGNIATPEAAKFLIKLGVDIIKIGIGPGSICTTRLVAGIGVPQLSAILAVRSGLKNKNIKIISDGGIKYSGDLAKAFAAGADAVMIGSLFAGTNETPGKLIKKNGQLFKSFRGMGSVGAMNKGSADRYFQKKQKDSSKYVPEGVEGFVKYKGDVGSIIYKLIGGL

SEQ ID NO: 83517 - protein, 79 aa, Unknown
  Bacterial polypetide isolated from the Sargasso Sea
QTKLVPEGIEGRVPYKGLVINVIDQLIGGLRQSMGYIGCKNIAAMQKDSQFVEITNAGMAESHVHDVMITKEAPNYQRS

SEQ ID NO: 83518 - protein, 120 aa, Unknown
  Bacterial polypetide isolated from the Sargasso Sea
MVTIKESLTFDDVLLLPQYSDVLPSETDVSLKLTTKINLGVPFLSSAMDTVTESTMAIAIAKAGGIGIIHRNLNIKEQTKEIIKVKKKKLFVGAAVGTNKEDVDRTKSLIANGCDLIVID

SEQ ID NO: 83519 - protein, 62 aa, Unknown
  Bacterial polypetide isolated from the Sargasso Sea
MSKSKFVGEGLTYDDVLLVPAYSEILPSEVSLKTKFSRNININIPIVSAAMDTVTESKMAIA

SEQ ID NO: 83520 - protein, 72 aa, Unknown
  Bacterial polypetide isolated from the Sargasso Sea
MEIRDALTFDDILLVPAESAVLPYEAETRTRLTRSISLGIPLISAAMDTVTESNMAIAMAQAGGIGVLTRTG

SEQ ID NO: 83521 - protein, 120 aa, Unknown
  Bacterial polypetide isolated from the Sargasso Sea
AFLFILARLQAVPKDLYEAAEVDGAGPLRKFINITLPQITAILSILFMIRFIWNFNKFEDIFLLTGGASGTRTLPINVYQQGFAVSNIGMGSAVSIVIVMLLIIFMIIYFKLIGKRANEI

SEQ ID NO: 83522 - protein, 143 aa, Unknown
  Bacterial polypetide isolated from the Sargasso Sea
MVKKPAIIMREYNTMTNITKKSLVAAGILTALVAGNVATAAVVPAGVQLAEKQTLVRNNGSEVQSLDPHKIEGVPESNINRDLFEGLLISDLDGKPSPGVAEKWENKDFKVWTFHLRKDAKWSDGTPVTAQDFVYSWQRWLIQ

SEQ ID NO: 83523 - protein, 224 aa, Unknown
  Bacterial polypetide isolated from the Sargasso Sea
FGTVGAIIFGMFAAQLVNQKFYGRTFMRSILLFPYVGPVVALAYTWTLMLDPNSGTLNALLVNFGIIDKPINLLGQKYLILGLFGFEIKLRLALTTVIMFEIWRYFPLAFLFILARLQAVPKDLYEAAEVDGAGPFRKFINITLPQITAILSILFMIRFIWNFNKFEDIFLLTGGASGTRTLPINVYQQGFAVSNIGMGSAVSIVIVMLLIIFMIIYFKLIERE

SEQ ID NO: 83524 - protein, 224 aa, Unknown
  Bacterial polypetide isolated from the Sargasso Sea
YLISKEYADIRRKEINSDNSASTVLPGDIENGDTIYLTTADSEGNMVSLIQSNYRGMGSGMVPNNLGFMLQDRGELFSLDENHFNVYAPKKRPFHTIIPAFITKDGNPLISFGLMGGAMQPQGHAQIVINIIDFDMNLQEAGDAPRIRHQSNQQPTGGEMTDGGEVALEKGFNYKQIRELMKKGHKVIYDLGSFGGYQAIMIDYINKVYYGASESRKDGSAIGY

SEQ ID NO: 83525 - protein, 190 aa, Unknown
  Bacterial polypetide isolated from the Sargasso Sea
VVALAYTWTLLLDPNSGTLNALLVNFGVLDKPINLLGQKYIELNLMGFDIKLRLALTTVIMFEIWRYFPLAFLFILARLQAVPKDLYEAAEVDGAGPLRKFVNITLPQITAILSILFMIRFIWNFNKFEDIFLLTGGASGTRTLPINVYQQGFAVSNIGMGSAVSIVIVVLLIIFMIVYFKLIGKRANEI

SEQ ID NO: 83526 - protein, 89 aa, Unknown
  Bacterial polypetide isolated from the Sargasso Sea
MGTINESLTFDDVLLLPRYSNILPSETDITLNLSKKISLKVPFLSSAMDTVTESKMAIAMADAGGIGIIHRNLNIKNQTKEIIKVKKKK

SEQ ID NO: 83527 - protein, 175 aa, Unknown
  Bacterial polypetide isolated from the Sargasso Sea
MGPIKESLTFDDVMLMPRYSDVLPSEVSTTTKLQKNLKLKIPLMSSAMDTVTESKMAIEIGKLGGIGIIHRNLSIKKQIQEIKKVKSKKILVGAAVGASEQEMIRAKTILKENLDIIVVDTAHGHSKKVADIVKMIKKIKPKKTSLCAGNIASPEAAIFLSKIGVDIIKSWNWSW

SEQ ID NO: 83528 - protein, 137 aa, Unknown
  Bacterial polypetide isolated from the Sargasso Sea
GWSHTVMLGSVFAGTEEAPGEIELFQGRSFKTYRGMGSLGAMSKRADAERYMQGEDTDAEKLVPEGIEGRVPFRGWLKDVVYQLEGGLRQGMGYTGSKDIKDLQKRVQFQKITRSGMTEGHVHDVSITKEAPNYRVD

SEQ ID NO: 83529 - protein, 156 aa, Unknown
  Bacterial polypetide isolated from the Sargasso Sea
MKLDEALTFDDVLIRPGYSSVLPRDVSTKTYFSREIKINIPLVSAAMDTVTEAKMAIAIAQGGGIGVIHKNNSIDQQISEVVKVKKYESGMVVDPITIRDNSSLKNLISLKEKFNISGFPVVNRNNKVVGIITNRDVRFAQNMSQPISELMTKTNL

SEQ ID NO: 83530 - protein, 250 aa, Unknown
  Bacterial polypetide isolated from the Sargasso Sea
IINEGIDLIVVDTAHGHTKKVGEIIKYIKKNKNNKTALCAGNIATPDAAKFLIKLGVDIIKVGIGPGSICTTRLVAGIGVPQLSAILSVRNGIKNKKVKIISDGGIKYSGDLAKAFAAGADVVMIGSLFAGTNETPGKLIKKNGKLFKSFRGMGSVGAMNKGSADRYFQKKQKDMSKYVPEGVEGFVKYKGDVESIIYKLVGGLKSSMGYLGSKNIIGLRNKPHFVKITKAGFYESMVHNVDLIKSDSKY

SEQ ID NO: 83531 - protein, 124 aa, Unknown
  Bacterial polypetide isolated from the Sargasso Sea
MGSIKESLTFDDVLLLPQYSDVLPNETDISLNLTKRIILKVPFLSSAMDTVTESRMAIAIAKEGGIGVIHRNLDIKRQSKQVAIVKNKKLYVGAAVGTNKEDLDRSKSLIANGCDMIVLDTAHG

SEQ ID NO: 83532 - protein, 134 aa, Unknown
  Bacterial polypetide isolated from the Sargasso Sea
GANCAMVGSMLAGTDEAPGELILYQGRSFKTYRGMGSLGAMARGSADRYFQQEVQNDKLVPEGVEGQVPYKGSVFNVLHQLVGGLKAAMGYTGNDTIAKMRTSCEFIKISGAGFDESHIHNVEITRESPNYRGR

SEQ ID NO: 83533 - protein, 275 aa, Unknown
  Bacterial polypetide isolated from the Sargasso Sea
LKQVELVKKKHLKVAAAIGVGINEVERAEGLLEKNIDLIVIDTAHGHTKKVKDTLKKITKLRKKTSICVGNVATPEAAKFLISNGADIIKIGIGPGSICTTRMVAGIGVPQLSAILDIKKKIKTTKISFISDGGIKFSGDLAKAFSAGADAIMIGSLFAGTNQAPGKIIKKNGKLYKKFRGMGSIGAMSQGSADRYNQQNISKKTKFVAEGVEGFIKYKGDVNKIIYQLIGGLKSSMGYLGCSNVKSLRIKPKFITITKAGFYESMVHNIDLVKG

SEQ ID NO: 83534 - protein, 220 aa, Unknown
  Bacterial polypetide isolated from the Sargasso Sea
MSTSFTLENFKKVFYENNFVELLLTTFYFTFFGTVGAIIFGILAAQLVNQNIQGRTYMRGILLFPYVGPVVALAYTWTLLLDPNSGTLNALLVNFNIIEKPINLLGQKYITMSILGFEFKLRLALTTVIFFEIWRYFPLAFLFILARLQAIPQSLYEAADVDGASPIQKFIHITLPQITAIISILFMIRFIWNFNKFEDIFLLTGGASGTRTLPINVYQH

SEQ ID NO: 83535 - protein, 87 aa, Unknown
  Bacterial polypetide isolated from the Sargasso Sea
MVTIKESLTFDDVLLLPQYSDVLPSETDVSLKLTTKLNLGVPFLSSAMDTVTESTMAIAIAKAGGIGIIHRNLNIKEQTKEIIKVKK

SEQ ID NO: 83536 - protein, 104 aa, Unknown
  Bacterial polypetide isolated from the Sargasso Sea
YEAAEVDGAGPLKKFIHITLPQITAIISILFMIRFIWNFNKFEDIFLLTGGASGTRTLPINVYQQGFAISDIGMGSAVSIVIVLLLIIFMFIYFKLIGKKANEI

SEQ ID NO: 83537 - protein, 50 aa, Unknown
  Bacterial polypetide isolated from the Sargasso Sea
KASMGYTGSKDIVEFKKNVKFIEITGAGLKESHVHDVDITRESPNYPTNI

SEQ ID NO: 83538 - protein, 129 aa, Unknown
  Bacterial polypetide isolated from the Sargasso Sea
FEIWRYFPLAFLFILARLQAIPKDLYEAADVDGAGPFRKFFYITLPQITAILSILFMIRFIWNFNKFEDIFLLTGGASGTLTLPISVYQQGFAVSNIGMGSAVSIVIVLLLITFMIIYFKLIGKKANEI

SEQ ID NO: 83539 - protein, 236 aa, Unknown
  Bacterial polypetide isolated from the Sargasso Sea
MTTFYFTFFGTLGAILLGIFAAQLVNQKFYGRSFMRSILLFPYVGPVVALAYTWTLLLDPNSGTLNSLLVSFGIIEKPINLLGQKYLIINILGFELKLRLALTTVIFFEIWRYFPLAFLFILARLQAIPKDLYEAADVDGAGPFRKFISITLPQITAIISILFMIRFIWNFNKFEDIFLLTGGASGTLTLPISVYQQGFAISNIGMGSAISIVIVLLLIIFMLIYFRLIGKRASEI

SEQ ID NO: 83540 - protein, 93 aa, Unknown
  Bacterial polypetide isolated from the Sargasso Sea
DGSKDRYFQDDNDEKDKLVPEGIEGRVPYKGPLSSILYQLVGGLRSSMGYIGCKNINEMHNKAKFVRVTDAGVNESHVHDVSITKEPPNYQKS

SEQ ID NO: 83541 - protein, 130 aa, Unknown
  Bacterial polypetide isolated from the Sargasso Sea
AAGADAVMIGSLFAGTDEAPGKKIKKKGKFYKYFRGMGSIGAMNKGSADRYFQSKQKDTSKYVAEGVEGYIKYKGKVDKIIYNLVGGLKSSMGYMGAKKIIDLRKKPKFLKITKAGFYESMVHNIDVVKK

SEQ ID NO: 83542 - protein, 55 aa, Unknown
  Bacterial polypetide isolated from the Sargasso Sea
MSIREGVTFDDVLLVPKFSDISSRTQTDLSTKLSKNITLNIPLISANMDTVTEST

SEQ ID NO: 83543 - protein, 259 aa, Unknown
  Bacterial polypetide isolated from the Sargasso Sea
MSTNFTLENFKKVFYENNFVELLLTTFYFTFFGTVGAIIFGILAAQLVNQNIQGRTYMRGILLFPYVGPVVALAYTWTLLLDPNSGTLNALLVNFNIIEKPINLLGQKYITMSILGFEFKLRLALTTVIFFEIWRYFPLAFLFILARLQAIPKSLYEAADVDGASPIQKFIHITLPQITAIISILFMIRFIWNFNKFEDIFLLTGGASGTRTLPINVYQQGFAVSDIGMGSAVSIVIVMLLISFMVIYFRLIGKRANEV

SEQ ID NO: 83544 - protein, 139 aa, Unknown
  Bacterial polypetide isolated from the Sargasso Sea
MDPIKEALTFDDVTLAPQYSKVLPSDVSTATVLSNQLKLDIPILSSAMDTVTESKMAIALAKQGGIGVIHRNLTISQQINEIKKVKSKSFKVGAAVGTNESELNRIKNILKLNIDLIVVDTAHGHSQKVADTILKIKKI

SEQ ID NO: 83545 - protein, 33 aa, Unknown
  Bacterial polypetide isolated from the Sargasso Sea
MQIREALTFDDVLLVPAQSSILPSDADTRTQVT

SEQ ID NO: 83546 - protein, 141 aa, Unknown
  Bacterial polypetide isolated from the Sargasso Sea
MVPIKEALTFDDVTLVPKYSELLPSEVDTSIKLTNNLKLKIPLLSSAMDTVTESKMAIAIAKAGGLGVIHRNLDIKTQLLEIKKVKIKKLLVGAAVGAGPNEFKRADAILKENVDMIVVDTAHGHTKKVSEIIKFIKKKKN

SEQ ID NO: 83547 - protein, 233 aa, Unknown
  Bacterial polypetide isolated from the Sargasso Sea
FIFTFFGTVGAIIFGMFAAQLVNQKFYGRTFMRSILLFPYVGPVVALAYTWTLLLDPNSGTLNALLVNFGIIDKPINLLGQKYMTLNLLGFDIKLRLALTTVIMFEIWRYFPLAFLFILARLQAVPKVLYEAAEVDGAGPLRKFINITLPQITAILSILFMIRFIWNFNKFEDIFLLTGGASGTRTLPINVYQQGFAVSNIGMGSAVSIVIVMLLIIFMIIYFKLIGKRANEI

SEQ ID NO: 83548 - protein, 222 aa, Unknown
  Bacterial polypetide isolated from the Sargasso Sea
STVKNIKKAFPDCELIAGNVATAQGTEDLIKAGVDAVKVGVGSGSICITRVITGSGVPQLTAVMDCAEIGKQYDIPIISDGGTRTSGDATKALAAGASSVMLGSMLGGTDESPGSTITKNGKRYKFYSGMASLGAARRRKSKEATQTDNEDDLNDYVAEGVEAMVPYKGTVIDILVQITGGIRSGLSYCGGHDIKQMQNNAEFIKMSRAGFAESQPHDVDVL

SEQ ID NO: 83549 - protein, 121 aa, Unknown
  Bacterial polypetide isolated from the Sargasso Sea
DESPGEVFLFQGRSYKSYRGMGSLGAMARGSADRYFQDEINEAIKLVPEGIEGRIPYKGQVSNVLFQLTGGLRSGMGYTGSKNLTTLKKNAKFVRLTNSGINESHVHGVQVTKEAPNYRSN

SEQ ID NO: 83550 - protein, 280 aa, Unknown
  Bacterial polypetide isolated from the Sargasso Sea
PAHSEVLPNEVTLKTRLTKKLNLNIPLVSAAMDTVTESRMSIALSELGGIGIIHKNLSIDAQASEVKKVKKYESGIVRDPITIRSDKEVGELIQLTNELNISGMPVVDNDNLVGIVTSRDFRNEQNFSAKVSEIMTPKEKLVTAKEGEDLEVIKKLLQDNRIEKILLVDSSFSLTGLVTLKDINKSLDFPDAARDEEGRLLVGAAIGTKSDTMQRCESLVQAGVDVLVLDSAHGHSEGVLSQIKEVKNAFKDIQVIGGNIATGDGALALVKAGADGVKVG

SEQ ID NO: 83551 - protein, 131 aa, Unknown
  Bacterial polypetide isolated from the Sargasso Sea
IFFEIWRYFPLAFLFILARLQAIPQSLYEAADVDGASPIQKFIHITLPQITAIISILFMIRFIWNFNKFEDIFLLTGGASGTRTLPINVYQQGFAVSDIGMGSAVSIVIVMLLISFMVIYFRLIGKRANEV

SEQ ID NO: 83552 - protein, 87 aa, Unknown
  Bacterial polypetide isolated from the Sargasso Sea
RYLQEDVDADKLVPEGIEGRVPYKGLVINVINQLIGGLRQSMGYVGCKTIKEMQENSQFIEITNAGMTESHVHDVMITKEAPNYQRS

SEQ ID NO: 83553 - protein, 125 aa, Unknown
  Bacterial polypetide isolated from the Sargasso Sea
GMDESPGEFILFEGRQYKSYRGMGSLGAMQDGGGERYFQNDTEDKKLVPEGIEGIVPYRGSVKNTIHQLMGGLRSSMGYCGGENILDFQKKAEFIQSTQAGVKESHPHEVKITKEAPNYQISDTK

SEQ ID NO: 83554 - protein, 138 aa, Unknown
  Bacterial polypetide isolated from the Sargasso Sea
RLALTTVIMFEIWRYFPLAFLFILARLQAVPKDLYEAAEVDGAGPLRKFINITLPQITAILSILFMIRFIWNFNKFEDIFLLTGGASGTRTLPINVYQQGFAVSNIGMGSAVSIIIVMLLIIFMIIYFKLIGKRANEI

SEQ ID NO: 83555 - protein, 98 aa, Unknown
  Bacterial polypetide isolated from the Sargasso Sea
SIGAMSSGSSDRYFQKNYKDKSKFVPEGVESRVLFKGKISKIIYQLQGGLRSSMGYIGAQTINEVRKKSKFIKITKAGFYESMVHSVEAINSTANYKL

SEQ ID NO: 83556 - protein, 168 aa, Unknown
  Bacterial polypetide isolated from the Sargasso Sea
MVNFNILESPINLLGQKYITMSILGFEFKLRLALTTVIFFEIWRYFPLAFLFILARLQAIPQTLYEAADVDGASPIQKFIHITLPQITAIISILFMIRFIWNFNKFEDIFLLTGGASGTRTLPINVYQQGFAISDIGMGSAVSIVIVMLLLSFMVIYFKLIGKKANED

SEQ ID NO: 83557 - protein, 143 aa, Unknown
  Bacterial polypetide isolated from the Sargasso Sea
MVYQINTNYSVTFDDVLLSPAYSEIKPKDVDTSITIGKVKLHIPILSSAMDTVTENKMAINLALHGGLGVIHRNMPIDKQASEVKKVHNFKVNSKKFENAVINSNKQIAVGAAIGVENNAYLRLLDLLKVGVDIVFIDVAHAH

SEQ ID NO: 83558 - protein, 190 aa, Unknown
  Bacterial polypetide isolated from the Sargasso Sea
MRGILLFPYVGPVVALAYTWTLLLDPNSGTLNALLVNFNIIEQPINLLGQKYITMSILGFEFKLRLALTTVIFFEIWRYFPLAFLFILARLQAISQSLYEAAEVDGASPIQKFIHITLPQITAIISILFMIRFIWNFNKFEDIFLLTGGASGTRTLPINVYQQGFAVSDIGMGSAVSIVIVMLLLSFMVI

SEQ ID NO: 83559 - protein, 177 aa, Unknown
  Bacterial polypetide isolated from the Sargasso Sea
PNSGTLNALLVNFGIIDKPINLLGQKYLILSLFGFEIKLRLALTTVIMFEIWRYFPLAFLFILARLQAVPKDLYEAAEVDGAGPFRKFINITLPQITAILSILFMIRFIWNFNKFEDIFLLTGGASGTRTLPINVYQQGFAVSNIGMGSAVSIVIVMLLIIFMIIYFKLIGKRANEV

SEQ ID NO: 83560 - protein, 68 aa, Unknown
  Bacterial polypetide isolated from the Sargasso Sea
MTIREGFTFDDVLLVPKFSDITSRSQTDLSTKLSRNIKLNIPLVSANMDTVTESTMATTMARQGGIGL

SEQ ID NO: 83561 - protein, 87 aa, Unknown
  Bacterial polypetide isolated from the Sargasso Sea
YFQSKSNNKKLVPEGIEGMVPYKGPVGDTVHQLMGGIKSSMGYCGAREIKDFPKQAEFIKITSSGIVESHPHDIKITKESPNYHKPK

SEQ ID NO: 83562 - protein, 212 aa, Unknown
  Bacterial polypetide isolated from the Sargasso Sea
VNQKFYGRTFIRSILLFPYVGPVVALAYTWTLLLDPNSGTINSLLVNYGVIEKPINLLGQKYLIINILGFELKLRLALTTVIFFEIWRYFPLTFLFVLARLQAIPKDLYEAAEVDGAGPFRKFFYITLPQITAILSILFMIRFIWNFNKFEDIFLLTGGASGTLTLPISVYQQGFAISNIGMGSAVSIVIVLLLITFMIIYFKLIGKKVNEI

SEQ ID NO: 83563 - protein, 168 aa, Unknown
  Bacterial polypetide isolated from the Sargasso Sea
MVNFNIIEQPINLLGQKYITMSILGFEFKLRLALTTVIFFEIWRYFPLAFLFILARLQAIPQSLYEAAEVDGASPIQKFIHITLPQITAIISILFMIRFIWNFNKFEDIFLLTGGASGTRTLPINVYQQGFAVSDIGMGSAVSIVIVMLLLSFMVIYFRLIGKRANEV

SEQ ID NO: 83564 - protein, 128 aa, Unknown
  Bacterial polypetide isolated from the Sargasso Sea
MKIFQMPQKIKKGRPLVGAAVGVKGDFLDRTEALLGAGADAIVVDIAHGHSENAISTVKNIKKAFPDCELIAGNVATAQGTEDLIKAGVDAVKVGVGSGSICITRVITGSGVPQLTAVMDCAEIGKQI

SEQ ID NO: 83565 - protein, 168 aa, Unknown
  Bacterial polypetide isolated from the Sargasso Sea
MEKVLTEALTFDDVLVLPMHSDVLPKEVSLKSKFTKNISLNLPFCSAAMDTVTESKMAIALASLGGIGIIHKNNTPEEQAIQVRQVKKFESGIVRDPISIRSNNTIGELKQLTSELKISGMPVVDDDELKGIVTGRDFRYARDMEQTVSEIMTPREKLITVKEGETQD

SEQ ID NO: 83566 - protein, 172 aa, Unknown
  Bacterial polypetide isolated from the Sargasso Sea
MDKVKSKAFTFDDVLLLPRYSNFVPSEADTETRLTKSIKIKMPLISAAMDTVTESRMAIALAEAGGLGIIHKNNSIEEQAAIVKAVKKHESGIVRDPTTIRSSKTIGELKQLTAELSISGMPVVDDGDLKGIVTSRDFRYADDMDADVASIMTPLDKLVTVSEGTSQDEVKK

SEQ ID NO: 83567 - protein, 219 aa, Unknown
  Bacterial polypetide isolated from the Sargasso Sea
MEKVLTEALTFDDVLVLPMHSDVLPKEVSLKSKFTKNISLNLPFCSAAMDTVTESKMAIALASLGGIGIIHKNNTPEEQAIQVRQVKKFESGIVRDPISIRSNNTIGELKQLTSELKISGMPVVDDDELKGIVTGRDFRYARDMEQTVSEIMTPREKLITVKEGETQDVVKSLMYKHRIEKILVLDDKDKLVGLMTMKDIEKSIDYPLASRDSEGRLIV

SEQ ID NO: 83568 - protein, 277 aa, Unknown
  Bacterial polypetide isolated from the Sargasso Sea
MTIREGFTFDDVLLVPKFSDITTRSQTDLSTNLSRNIKLNIPLVSANMDTVTESIMATTMARQGGIGIIHRFLTIEEEVNQILKVKRSGSVMIDNPYQISSEKSIEQAIDLMGEKEVSGLLVVDSDSKLVGILTERDVLFESLDSKKSVSELMTKDVISATENTSLEEAKDILKKQRIEKLPLLNDKKQIVGLYTTQDIMNIENFPNASKDKKGRPLVGAAVGVKGDFLDRTEALLTAGADAIVVDIAHGHSENAITTVKNIKKAFPDCELIAGYVA

SEQ ID NO: 83569 - protein, 236 aa, Unknown
  Bacterial polypetide isolated from the Sargasso Sea
MTTFYFTFFGTLGAILLGIFAAQLVNQKFYGRTFMRSILLFPYVGPVVALAYTWTLLLDPNSGTINSLLVNYGVIEKPINLLGQKYLIINILGFEFKLRLALTTVIFFEIWRYFPLAFLFILARLQAIPRDLYEAADVDGAGPFRKFFYITLPQITAILSILFMIRFIWNFNKFEDIFLLTGGASGTLTLPISVYQQGFAISNIGMGSAVSIVIVLLLITFMIIYFKLIGKKANEI

SEQ ID NO: 83570 - protein, 657 aa, Unknown
  Bacterial polypetide isolated from the Sargasso Sea
MGQPRSYPSSGLMSILSKDDNYEFHLKPNGTINWWWQTTTGATREFDSTSSVALGQWSHVLIHYTASEQRIYINGTPAGTANLSGMPRANVDPLQLGWDQIAGRHFDGDLDELRIYKGALSHEQITALVNERHPCETELQCYSNFLEPSTFASNWAVSSRGLAHFVPQLVDGRLRLTSNAGNVATAAALQRLFPAEGQFIQVSFRHYAYDGNGADGIAMILSDASVTPQPGGYGGSLGYAQLNGQSGFAGGWLGVAIDEYGNFSTHTEGRVGGLGRDPVPDTVSVRGPGTGIIGYEYLTGTASALAPEIDATNSRYPAPGHVYRITIDGRTTNQARLTVERDTGSGFRVLPNLDAVDVLSLNGQTALPQNLYLSFTGSTGGQNNIHEIEELEVCAADIRPLTARIHHFELNYAPTALTCSPHAVTIRACMDDACSATYQEPVSATLQPVGDWTAGNPVRFSGGSTILHLRSNNSGTVQLGVSESTPQTQSFSQTVCSTANCEVVFADSGFVFDVPNMIAARPESGIALQAVKKDDRTQACVPGFDDGGKRTLQFSSSYVNPDTGTRQVVVNGTPVGASPTDIELTFDSEARASLEVSYADAGLIDLFARYAPAAGEEKGLVMTGSDQFSSRPYGLCLLTEADQADGGAACESDDLDC

SEQ ID NO: 83571 - protein, 162 aa, Unknown
  Bacterial polypetide isolated from the Sargasso Sea
IEKPINLLGQKYLIFNILGFDLKLRLALTTVIFFEIWRYFPLAFLFILARLQAIPKDLYEAADVDGAGPFKKFFYITLPQITAILSILFMIRFIWNFNKFEDIFLLTGGASGTLTLPISVYQQGFAVSNIGMGSAVSIVIVLLLITFMIIYFRLIGKKANEI

SEQ ID NO: 83572 - protein, 226 aa, Unknown
  Bacterial polypetide isolated from the Sargasso Sea
MEKVLTEALTFDDVLVLPMHSDVLPKEVSLKSKFTKNISLNLPFCSAAMDTVTESKMAIALASLGGIGIIHKNNTPEEQAIQVRQVKKFESGIVRDPISIRSNNTIGELKQLTSELKISGMPVVDDDELKGIVTGRDFRYARDMEQTVSEIMTPREKLITVKEGETQDVVKSLMYKHRIEKILVLDDKDKLVGLMTMKDIEKSIDYPLASRDSEGRLIVGAAIGVG

SEQ ID NO: 83573 - protein, 419 aa, Unknown
  Bacterial polypetide isolated from the Sargasso Sea
MSDTLSKIEKRTAYTLLLPAVFLVFSIILFPIFANIWISFKEVSLKDIRIPEPRAKKIVKSISDNNSELKIVYKLRNSSLIQKISDVEFKDKLPSNVIPVDLDSRCEFKSKIIKCQFGEWKAKYRENFEVLIKDENNNEIDKEVIKSQKPSLSGKADNILLTTNFTLKNFKKVFYENDFLDLLLTTFYFTFFGTIGAIFFGILAAQLVNQNFYGRSFMRSILLFPYVGPVVALAYTWTLLLDPNSGTFNALMVNFNIFDEPINLLGQKYIVMNVFGFELKLRLALTTVIFFEIWRYFPLAFLFILARLQAVPKDLYEAAEVDGAGPLKKFVHITLPQITAIISILFMIRFIWNFNKFEDIFLLTGGASGTRTLPINVYQQGFAISDIGMGSAVSIVIVLLLIIFMFIYFKLIGRKANEI

SEQ ID NO: 83574 - protein, 358 aa, Unknown
  Bacterial polypetide isolated from the Sargasso Sea
MVPIKEALTFDDVTLAPKYSEILPSDADTSVSLTKHLKLKIPLLSSAMDTVTESRMAIAIAKAGGIGVIHRNLDIKKQVSEIKKVKKQKLIVGAAVGAAPNEFIRAKEIIKEGVDLIVVDTAHGHTKKVAEIIKYIKKIKTNKIALCAGNIATPEAAKFLIKLGVDIIKIGIGPGSICTTRLVAGIGVPQLSAILAVRSGLKNKNVKIISDGGIKYSGDLAKAFAAGADAVMIGSLFAGTNETPGKLIKKNGQLFKSFRGMGSVGAMNKGSADRYFQKKQKDSSKYVPEGVEGFVKYKGDVGSIIYKLIGGLKSSMGYLGSKTIIKLRNKPQFVKITKAGFYESMVHNVDVVKNDSKY

SEQ ID NO: 83575 - protein, 130 aa, Unknown
  Bacterial polypetide isolated from the Sargasso Sea
MFEIWRYFPLAFLFILARLQAVPKDLYEAAEVDGAGPLRKFINITLPQITAILSILFMIRFIWNFNKFEDIFLLTGGASGTRTLPINVYQQGFAVSNIGMGSAVSIVIVMLLIIFMIIYFKLIGKRANEI

SEQ ID NO: 83576 - protein, 105 aa, Unknown
  Bacterial polypetide isolated from the Sargasso Sea
TYRGMGSIGAMSERNDTNRYSQDGISNEKMVPEGVEGRVPFKGWVVNVIDQLIGGIRQSMGYVGCKTIEDMHQETQFVEITNAGITESHVHDVMITKEAPNYQRS

SEQ ID NO: 83577 - protein, 259 aa, Unknown
  Bacterial polypetide isolated from the Sargasso Sea
MTTNFTLENFKKVFYENNFVELLLTTFYFTFFGTVGAIIFGILAAQLVNQNIQGRTYMRGILLFPYVGPVVALAYTWTLLLDPNSGTLNTLLVNFNIIETPINLLGQKYITISILGFEFKLRLALTTVIFFEIWRYFPLAFLFILARLQAIPQSLYEAAEVDGASPIQKFIHITLPQITAIISILFMIRFIWNFNKFEDIFLLTGGASGTRTLPINVYQQGFAVSDIGMGSAVSIVIVMLLLSFMVIYFRLIGKRANEV

SEQ ID NO: 83578 - protein, 179 aa, Unknown
  Bacterial polypetide isolated from the Sargasso Sea
MVPIKEALTFDDVTLVPKYSEILPSEVDTSIKLTESLKLQIPLLTSAMDTVTESKMAIAIARSGGLGIIHRNLDIKKQVLEVKKVKKQKLLVGAAVGAGPIEFKRAGALLKEKLDMIVVDTAHGHTKKVSEIIRFIKKNKNKKTALCAGNIATPDAAKFLLKLGVDIIKVGIGPGSICT

SEQ ID NO: 83579 - protein, 328 aa, Unknown
  Bacterial polypetide isolated from the Sargasso Sea
KFPKNISPIDLDPRCFFKSKKIICDFGNWEAKYRENFEVIIKNTNDEKIDKKIIKSRKPILRGTANNPLLTTNFTLKNFKKVFYENNFVELLSTTFYFTFFGTVGAIIFGILAAQLVNQKIQGRTYMRGILLFPYVGPVVALAYTWTLLLDPNSGTLNALLVNFNIIDKPINLLGQKYITMSILGFEFKLRLALTTVIFFEIWRYFPLAFLFILARLQAIPQTLYEAAEVDGASPIQKFIYITLPQITAIISILFMIRFIWNFNKFEDIFLLTGGASGTRTLPINVYQQGFAVSDIGMGSAVSIVIVMLLISFMVIYFRLIGKKANEI

SEQ ID NO: 83580 - protein, 365 aa, Unknown
  Bacterial polypetide isolated from the Sargasso Sea
VKKIVKNIQDSNSELKIIYKLRNSSLIQDIREVKFSDKLPKNIEPVNLDRRCEFKSQKIKCFFGNWEAGYRENLEIFVKDVNNNAINSKYIKSSKPDLNGKSNNILLTTDFTLKNFKNVFINNNFVELLMTTFYFTFFGTLGAILLGIFAAQLVNQKFYGRTFMRSILLFPYVGPVVALAYTWTLLLDPNSGTINSLLVNYGVIEKPINLLGQKYLIINILGFELKLRLALTTVIFFEIWRYFPLAFLFILARLQAIPKDLYEAADVDGAGPFRKFFYITLPQITAILSILFMIRFIWNFNKFEDIFLLTGGASGTLTLPISVYQQGFAVSNIGMGSAVSIVIVLLLITFMIIYFKLIGKKANEI

SEQ ID NO: 83581 - protein, 318 aa, Unknown
  Bacterial polypetide isolated from the Sargasso Sea
MDKRCEFKSQKVKCFFGNWEAGYRENFEIFVKEVNNDAINKNDVKSYNPDLNGKSNNILLTTDFTLKNFKNVFINNNFFELLMTTFYFTFFGTIGAILLGIFAAQLVNQKFYGRTFMRSILLFPYVGPVVALAYTWTLLLDPNSGTINSLLVNYGVIEKPINLLGQKYLIISILGFEFKLRLALTTVIFFEIWRYFPLAFLFILARLQAIPKDLYEAADVDGAGPFRKFFYITLPQITAILSILFMIRFIWNFNKFEDIFLLTGGASGTLTLPISVYQQGFAISNIGMGSAVSIVIVLLLITFMIIYFKLIGKKANEI

SEQ ID NO: 83582 - protein, 419 aa, Unknown
  Bacterial polypetide isolated from the Sargasso Sea
MSDSLSKLEKKTAYTLVLPAVLLVFAIVLFPIFANVWISFKDIELKDIRIPEPRAKKIVKSISENESELKVVYKLRNSSLIQEIRNVQFQDKFPKNISPIDLDPRCNFKSKKIICDFGNWEAKYRENFEVIIKNTNDERIDKKIIKSRKPILSGTANNPLLTTNFTLKNFKKVFYENNFVELLLTTFYFTFFGTVGAIIFGILAAQLVNQNIQGRTYMRGILLFPYVGPVVALAYTWTLLLDPNSGTLNALLVNFNIIEKPINLLGQKYITMSILGFEFKLRLALTTVIFFEIWRYFPLAFLFILARLQAIPQSLYEAADVDGASPIQKFIHITLPQITAIISILFMIRFIWNFNKFEDIFLLTGGASGTRTLPINVYQQGFAVSDIGMGSAVSIVIVMLLLSFMIIYFRLIGRKANED

SEQ ID NO: 83583 - protein, 172 aa, Unknown
  Bacterial polypetide isolated from the Sargasso Sea
MVARSHQSRSKVFSDEALAFDDILLVPAYSDILPVNVDLSTQLTREIGLKIPILSAAMDTVTESQMAISLASEGGVGIIHKNLSVEDQAKQVRFVKKYESGVINDPITASAESTVQEINNITEKYGISGVPIVDKDKLIGIVTNRDLRFVENINTKVTSIMTPKERLVTVNE

SEQ ID NO: 83584 - protein, 324 aa, Unknown
  Bacterial polypetide isolated from the Sargasso Sea
KSVTFDDVLLLPSYSDFLPSDANTESKLSKNISLKIPLISAAMDTVTESSMAIALAEAGGIGIIHKNNSIKEQASLVRSVKKYESGIVRDPVTISSKKSIGELKQLTSELSISGMPVVDDGELKGIVTSRDFRYAENMESDVSTIMTPLEKLVTVKEGVSQTEVMQLMYKNRIEKVLVLDDKDKLSGLVTMRDIENTAKNPDATKDNFGRLIVGAALGTDKDTFDRAEALFHEGVDVLVIDSAHGHSKNVIETIKAVKQKFPSVDVIGGNIATADAAMELVKAGADAVKVGMGPGSICTTRIIAGIGVPQISAIFDVSTALKNT

SEQ ID NO: 83585 - protein, 197 aa, Unknown
  Bacterial polypetide isolated from the Sargasso Sea
MDPIKEALTFDDVTLAPRYSEILPSQVDTSTYLRNDFKIDIPLLSSAMDTVTESKMAIALARAGGIGIIHRNFTIDKQVREIRKVKSKNYKVGAAVGAGDLESKRALAIIKEKIDMIVVDTAHGHTKKVKDIIKIIKKNKNKKTLLCAGNIATAEAANFLANLGVDIIKVGIGPGSICTTRLVAGIGVPQLSAIIKC

SEQ ID NO: 83586 - protein, 160 aa, Unknown
  Bacterial polypetide isolated from the Sargasso Sea
MDKLKQKALTFDDVLLLPSYSDFLPSDANTESKLSKNISLKIPLISAAMDTVTESSMAIALAEAGGIGIIHKNNSIKEQASLVRSVKKYESGIVRDPVTISSKKSIGELKQLTSELSISGMPVVDDGELKGIVTSRDFRYAENMESDVSTIMTPLEKLVT

SEQ ID NO: 83587 - protein, 344 aa, Unknown
  Bacterial polypetide isolated from the Sargasso Sea
WIYQQTFSRNIKLNIPLVSANMDTVTESTMATTMARQGGIGIIHRFLTIEEEAEQVLKVKRSGSVMIDNPYQIFSEKSVEEAIDLMNEKEVSGLLVVDSDSKLIGVLTERDVLFESINSKKSVSELMTKDVISSNENTTLDEAKDILKSHRIEKLPLVNDKNHIVGLYTTQDILNIENFPNASKDKKGRPLVGAAVGVKGDFLDRTEALLGAGADAIVVDIAHGHSENAISTVKNIKKAFPDCELIAGNVATAQGTEDLIKAGVDAVKVGVGSGSICITRVITGSGVPQLTAVMDCAEIGKQYDIPIISDGGTRTSGDATKALAAGASSVYVGSMLGGTDESPG

SEQ ID NO: 83588 - protein, 188 aa, Unknown
  Bacterial polypetide isolated from the Sargasso Sea
MDTIKEALTFDDVTLAPNYSEILPSEVSTSVNLTDQLKIEIPLLSSAMDTVTESSMSVAMAKAGGLGIIHRNLNIEEQIKEIRKVKSKNKLVGAAVGASEKELKRAEKILKENLDIIVIDTAHGHTKKVGDAIKKIKKLRPKKTAICAGNIATEEGARFLVGLGVDIIKVGIGPGSICTTRLVAGIGV

SEQ ID NO: 83589 - protein, 291 aa, Unknown
  Bacterial polypetide isolated from the Sargasso Sea
LTERDVLFESINSKKPVSELMTNDVISSNENTTLDEAKDILKSNRIEKLPLVNDKNQIVGLYTTQDILNIENFPNASKDKKGRPLVGAAVGVKGDFLDRTEALLGAGADAIVVDIAHGHSENAISTVKNIKKAFPDCELIAGNVATAHGTEDLIKAGVDAVKVGVGSGSICITRVITGSGVPQLTAVMDCAEIGKKYDIPIISDGGTRTSGDATKALAAGASSVMLGSMLGGTDESPGSTITKNGKRYKFYSGMASLGAARRRKSKEATQSDSGDDLNDYVAEGVEAMVPY

SEQ ID NO: 83590 - protein, 114 aa, Unknown
  Bacterial polypetide isolated from the Sargasso Sea
MEKLKHKALTFDDVLLLPRYSDFLPSEADIESHLTKSISLKMPLLSAAMDTVTESRMAISLAEAGGIGIIHKNNSIDSQAAEVRAVKKYESGIVRDPVTINSQKTIWRIKTANK

SEQ ID NO: 83591 - protein, 206 aa, Unknown
  Bacterial polypetide isolated from the Sargasso Sea
GNISTIDAAKFLSKLGVDAIKVGIGPGSICTTRLVAGIGVPQLSAIMAARKGLGKKKIMLVADGGIKFSGDISKALAAGADAVMIGSLFAGTNESPGKIIKKNGKYFKSFRGMGSVGAMNKGSADRYFQKKQKDPSKYVPEGVEGLVKYKGPIEKIVYQLIGGLKSSMGYLGSKNIKDLRNKPKFVKITKAGFYESMVHNIDQVLK

SEQ ID NO: 83592 - protein, 211 aa, Unknown
  Bacterial polypetide isolated from the Sargasso Sea
MRITNEALTFDDVLLRPAYSDVLPKDVDITTALTTDIKLNIPLLSAAMDTVTESAMSIALAQEGGMGIIHKNMSISDQAKEVLKVKKFESGIVKDPITVSSNTTIQEVIDLTKAKGISGVPVVDNNETVGIVTHRDWRYENDLNASVSKIMTPKEKLVKVSEDASEEEVLSLLHKHRIEKVLVVDNDFSLKGLITAKDFQKATDFQMHAKT

SEQ ID NO: 83593 - protein, 173 aa, Unknown
  Bacterial polypetide isolated from the Sargasso Sea
MIRDRIFDGLTFDDILLVPGYAEIHPSEVSLKSKLTLKLECNIPLLSAAMDTVTEADTAICMAQEGGLGVIHKNLSIEEQANQVNRVKRSESGMITNPITIEPDQPISEALKLMERYRISGVPVIRRTELVGILTNRDLRFEPIMKTRLELMTEAGQLVTVLRDRDGAAKRCC

SEQ ID NO: 83594 - protein, 165 aa, Unknown
  Bacterial polypetide isolated from the Sargasso Sea
VAGAGMPQITAITDVANQLKGTDTCIISDGGIRYSGDIAKAIAAGANSIMLGSLFAGTEESPGEIELYQGRSFKSYRGMGSLGAMAQQHGSKDRYFQSDVEEPEKLVPEGIEGRVPYKGKLSKIIEQLVGGLRQSMGYTGCKDITELQTKTEFVRITDSGKREGH

SEQ ID NO: 83595 - protein, 102 aa, Unknown
  Bacterial polypetide isolated from the Sargasso Sea
MDKVKAKALTFDDVLLVPSYCDFLPSQASVKTSLTRNIDINLPLLSAAMDTVTEYRMAIALAEAGGIGILHKNCSIQEQSNAVRNVKKYEKWCCTRSNHNKL

SEQ ID NO: 83596 - protein, 268 aa, Unknown
  Bacterial polypetide isolated from the Sargasso Sea
IIHRNLSINKQCNEVKKVKNKKLLVGAAVGTSKEDIIRANKLIDNGIDLIVIDTAHGHSKKVLLTLKKLKKIKSKVKICAGNIATSESARLLSNEGADILKVGIGPGSICTTRIVSGIGVPQISAVMDVKEGIKKNKKIKIISDGGIKFLGDAAKALAAGADAVMMGSVFAGTEESPGKKFKYKNKIYKSFRGMGSIGAMMDGSAGRYFQKNFKDKSKFVPEGVEGRVLYKGKVEKIIYQLKGGLKSSMGYIGAKNIINLQKKSKFVK

SEQ ID NO: 83597 - protein, 230 aa, Unknown
  Bacterial polypetide isolated from the Sargasso Sea
VAEIIKYIKKIKSKKVALCAGNIATPEAAKFLIKLGVDIIKVGIGPGSICTTRLVAGIGVPQLSAIISVRNGLKNKKVKIISDGGIKYSGDLAKAFAAGADAVMIGSLFAGTDETPGKLIKKNGKFFKSFRGMGSVGAMNKGSADRYFQKKQKDISKYVPEGVEGFVKYKGGVERIIYKLIGGLKSSMGYLGSSEIIKLRNNPHFVKITKAGFYESMVHNVDVVKNESKY

SEQ ID NO: 83598 - protein, 82 aa, Unknown
  Bacterial polypetide isolated from the Sargasso Sea
TESNKHVPEGIEGRVPYKGPISPIIYQLVGGLKASMGYTGSKDIVEFKKNVKFVEITGAGLKESHVHDVDITRESPNYPTNI

SEQ ID NO: 83599 - protein, 223 aa, Unknown
  Bacterial polypetide isolated from the Sargasso Sea
MVPIKEALTFDDVTLAPNYSEILPSEVDTSVSLTSRLKLKVPLLSSAMDTVTESKMAIAMAKAGGIGVIHRNLNIKQQILEIKKVKKLSLKVGAAIGASEKEFIRAKEIIKEGVDLIVIDTAHGHSKKVGDIIKYVKNIKSNKTALCAGNIATPEAAKFLIKLGVDIIKVGIGPGSICTTRLVAGIGVPQLSAILSVRNGVKNKKVKIISDGGIKYSGDLAKA

SEQ ID NO: 83600 - protein, 224 aa, Unknown
  Bacterial polypetide isolated from the Sargasso Sea
MIRKIKDKKTALCAGYIATPGAAKFLLKLGVDILKVGIGPGSICTTRLIAGIGVPQLSAILSVRNGIKNKNVKIIADGGIKYSGDLAKAFAAGADAVMIGSLFAGSDEAPGKIIKKDGKLFKSFRGMGSVGAMNKGSADRYFQLKQKDISKYVPEGVEGYAKYKGNVSDIIYKLIGGLRSSMGYLGSKQIKYLRDKPKFVKITKAGFYESMVHNVDIVKSDSKY

SEQ ID NO: 83601 - protein, 220 aa, Unknown
  Bacterial polypetide isolated from the Sargasso Sea
QFIEKAKKVLKKTPLIVGNIATKKAASDLISAGGDAIKVGIGPGSICTTRVVTGVGIPQLSAVMDTFQVAKKFKIPVIADGGIKTSADIAKAIAGGASACMIGSLFAGTEEAPGKLLTIKGKKFKSYRGMGSVGAMQKGSFDRYSQEETKNAKKLVAEGVEGMVPYKGKIEDVAYQLVGGLKSSMGYTGHKTIKKMQGNCKFVFISKAGARESNVHDVIM

SEQ ID NO: 83602 - protein, 216 aa, Unknown
  Bacterial polypetide isolated from the Sargasso Sea
MIPSNQKFIETGLTFDDVLLVPAYSELLPNEVNLHSKFSKNLSMKVPIVSAAMDTVTESKMAIAMAQEGGIGVIHKNLSIEDQSNKVRKVKRSESGMILDPITLSKNETVKDALNCMSEYSIGGIPIVDKAGKLIGIVTNRDLRFEKDMNKKLDNVMSSENLITGSKELTLKEAESILQKSKIEKLPIIDNNNKLIGLITFRDIQKITLKLSSNKG

SEQ ID NO: 83603 - protein, 128 aa, Unknown
  Bacterial polypetide isolated from the Sargasso Sea
GGLFAGTEEAPGKVELFQGRSFKTYRGMGSIGAITERQDANRYMQEDLDAEKLVPEGIEGRVPYKGLVINVINQLIGGLRQSMGYIGCKTIQDIHNKSEFVEITNAGMTESHVHDVMITKEAPNYQRS

SEQ ID NO: 83604 - protein, 125 aa, Unknown
  Bacterial polypetide isolated from the Sargasso Sea
MAQVKEYLTFDDVLLKPQASTILPNNVDISTNLTKEIKLNIPIISAAMDTVTESKMAISMSQNGGLGVIHKNYDIETQSYEVKKVKRYEAGIVYNPITMSPNNTIEDVLNVMEKQNIFWFSQWSI

SEQ ID NO: 83605 - protein, 131 aa, Unknown
  Bacterial polypetide isolated from the Sargasso Sea
AVMVGSLLAGTDETPGEVFLFQGRSYKSYRGMGSLGAMARGSADRYFQAEIETLKLVPEGIEGQVPYKGPAQNVIHQLVGGLKSAMGYTGNININEMQQKCIFKRISNAGLKESHVHDVTITREAPNYRPS

SEQ ID NO: 83606 - protein, 161 aa, Unknown
  Bacterial polypetide isolated from the Sargasso Sea
ALSGTGVPVIADGGIRYTGDVVKALAAGADSVMLGSMFAGVEESPGETIIYEGRKFKSYRGMGSIEAMQKGSKDRYFQDAEDDISKLVPEGISGRVPYKGNLVEVMHQIIGGLKAGMGYCGSGTIAKLKESDFVRITSAGVRESHPHDVRISREAPNYSIK

SEQ ID NO: 83607 - protein, 282 aa, Unknown
  Bacterial polypetide isolated from the Sargasso Sea
NLSIEKQVKEVKKVKRNKCIVGAAIGVGEKDLDRAIELNKANVDLLIIDTAHGHTEKVSKMINKVKKKISSRILCAGNIATGKAAKFLADNGADIVKVGIGPGSICTTRLVAGIGVPQLSAIIDVKKSLRDYKTKIISDGGIKFSGDLAKALAAGADCIMIGSLFSGTNESPGKIIKVKGKLYKNFRGMGSVGAMSVGSSDRYYQKKYKDISKYVPEGVEGLVKYKGQVSKIIYNLVGGLKSSMGYLGSKKIKDLQRNGEFVKITKAGFYESMVHNVDHIKQ

SEQ ID NO: 83608 - protein, 107 aa, Unknown
  Bacterial polypetide isolated from the Sargasso Sea
SYRGMGSIGAMSGDQGSSDRYFQDSAEATEKLVPEGIEGRVPYKGWLQAVIHQMIGGLRQSMGYTGSHDIATMRTKPKFVQITSAGVNESHVHDVSVTKEAPNYRMS

SEQ ID NO: 83609 - protein, 88 aa, Unknown
  Bacterial polypetide isolated from the Sargasso Sea
MIRDRIFDGLTFDDILLVPGYAEIHPSEVSLKSKLTRKLECNIPLLSAAMDTVTEADTAICMAQEGGLGVIHKNLSIDEQANQVNRVK

SEQ ID NO: 83610 - protein, 151 aa, Unknown
  Bacterial polypetide isolated from the Sargasso Sea
SDGGIKFSGDLIKAIAAGADAIMMGSIFAGTEESPGKKFKIKNKLYKVYRGMGSIGAMSSGSSQRYFQKNYKDKSKFVPEGVESRVLYKGKVSDIIYQLQGGLRSSMGYIGAQYIDDVIKKSRFVKITKAGFYESMVHSVEAIKNSANYKL

SEQ ID NO: 83611 - protein, 320 aa, Unknown
  Bacterial polypetide isolated from the Sargasso Sea
MKKKYSGLLVVDSDSKLVGVLTERDVLFESINSKKSVSELMTKDVISSNENTTLDEAKDILKSHRIEKLPLVNDKNQIVGLYTTQDILNIENFPNASKDKKGRPLVGAAVGVKGDFLDRTEALLGAGADAIVVDIAHGHSGNAISTVKNIKKAFPDCELIAGNVATAQGTEDLIKAGVDAVKVGVGSGSICITRVITGSGVPQLTAVMDCAEIGKKYDIPIISDGGTRTSGDATKALAAGASSVMLGSMLGGTDESPGSTITKNGKRYKFYSGMASLGAARRRKSKEATQSDSEDDLNDYVAEGVEAMGSYKGTVIDILV

SEQ ID NO: 83612 - protein, 169 aa, Unknown
  Bacterial polypetide isolated from the Sargasso Sea
MLRIANQALTFDDVLLVPDHSDVLPKDVELKTRLTKNLNLNIPLLSAAMDTVTESRMGIALSELGGIGIIHKNFSIEDQAIEVKKVKKYESGIVRDPITIRSDNEVGELIQLTKELNISGMPVVDDGNLVGIVTSRDFKYQENFTAKVSEIMTTKDKLVTAKEGESPDL

SEQ ID NO: 83613 - protein, 163 aa, Unknown
  Bacterial polypetide isolated from the Sargasso Sea
KKSLYKKKIKIISDGGIKFSGDLAKALAAGADAIMMGSIFAGTEESPGTKFKYKNKWYKAYRGMGSIGAMSAGSAERYFQKKQKDKSKFVAEGVEGRVVYKGFVKNIIYQLQGGLRSSMGYIGSKNIVDIYKKAKFVKITKAGFYESMVHSVEQTDKVLNFKL

SEQ ID NO: 83614 - protein, 267 aa, Unknown
  Bacterial polypetide isolated from the Sargasso Sea
AKEMMSLYKISGLPVVENEKLIGIITNRDIRFETDETLQVTERMTTEKLVTVPQGTTLDQAKKVLQEHRIEKLLVVDKTGSLAGLITVKDIQKKEDFPHACKDKSGRLRVGAALSVTSDFLERAQELHLKEVDVIVVDTAHGHSAGVLNQIRNIKKSIPDLQIIGGNIATSDGTKALIDAGVDCVKVGIGAGASCTTRIVAGIGVPQLTAIMDCVDVAKKSNIPVIADGGIRYSGDISKAIAAGADTVMLGSILAGMDESPGEFILF

SEQ ID NO: 83615 - protein, 185 aa, Unknown
  Bacterial polypetide isolated from the Sargasso Sea
MLHLAAAKFLLKLGVDVIKVGIGPGSICTTRLVAGIGVPQLSAILEVRNGIKNKNVKIISDGGIKYSGDLAKAFAAGADAVMIGSLFAGTDEAPGKLIRRNGKLFKNFRGMGSVGAMNKGSADRYFQSKQKDSSKYVPERVEGFAKYKGKVNNIIFKLIGGLRSSMGYLGSRQIKYLRDKPQFVK

SEQ ID NO: 83616 - protein, 221 aa, Unknown
  Bacterial polypetide isolated from the Sargasso Sea
MVPIKEALTFDDVTLAPKYSEIMPSEADTSIQLTNHLRLKIPLLSSAMDTVTESKMAIAIAKAGGLGIIHRNLDIKKQIIEIKKVKKEKLLVGAAVGAGPKEHERAKKILKENLDMIVVDTAHGHTKKVSEIIRFIKKIKKKNTALCAGNIATPEAAKFLLKLGVDVIKVGIGPGSICTTRLVAGIGVPQLSAILNVRNGIRNKNVKIISDGGIKYSGDLA

SEQ ID NO: 83617 - protein, 240 aa, Unknown
  Bacterial polypetide isolated from the Sargasso Sea
MDKVKAKALTFDDVLLVPSYCDFLPSQASVKTSLTKNIDINLPLLSAAMDTVTEYRMAIALAEAGGIGILHKNCSIQEQSNAVRNVKKYESGVVRNPSTISSKQTIGQLKQLTGELNISGMPVVDNGMVKGIVTSRDFRYADNMDGLVESIMTPSEKLITVLEGTSQEVVKRMMYENRIEKVLVLDETEKLTGLVTMKDIEKSEKHPNATKDDAGQLRVGAAIGTGSETLDRAKSLFDSG

SEQ ID NO: 83618 - protein, 263 aa, Unknown
  Bacterial polypetide isolated from the Sargasso Sea
VGASDKEFNRVKEIIREGVDLIVVDTAHGHTRKVGEIIKYIKKFKNNKIALCAGNIATPDAAKFLIKLGVDIIKVGIGPGSICTTRLVAGIGVPQLSAILSVRNGVKNKKIKIISDGGIKYSGDLAKAFAAGADAVMIGSLFAGTDETPGKLIKKNGKIFKSFRGMGSVGAMNKGSADRYFQNKQKDMSKYVPEGVEGFVKYKGDVGRIIYKLVGGLKSSMGYLGSKNIVGLRNKPHFVKITKAGFYESMVHNVDVIKSDGRY

SEQ ID NO: 83619 - protein, 94 aa, Unknown
  Bacterial polypetide isolated from the Sargasso Sea
MGIIKEALTFDDVLLLPQYSSVLPSETSIDTQLTNKIHLKVPFMSAAMDTVTESKMAIGMAKNGGIGVIHRNLTIKDQSEEVKKVKSKQLLVEL

SEQ ID NO: 83620 - protein, 128 aa, Unknown
  Bacterial polypetide isolated from the Sargasso Sea
MAYQINTNYYVTFDDVLLSPSYSEIKPKDVDTSITIGKVKLHIPILSAAMDTVTENKMAINLALNGGLGVIHRNMPIDKQASEVNKVHSFKVNVKKFQNAVINTNKQIAVGAAIGVENNAYLRLLELL

SEQ ID NO: 83621 - protein, 228 aa, Unknown
  Bacterial polypetide isolated from the Sargasso Sea
MVPIKEALTFDDVTLVPKYSEILPSEVDTSIKLTKILKLKIPLLSSAMDTVTESKMAIAIAKAGGLGIIHRNLEIKKQVLEIKKVKRQKFLVGAAVGAGPSEFKRAQSILRENIDMIVVDTAHGHTKKVSDIIKYIKKIKNKKTALCAGNIASPEAAKFLIKLGVDIIKVGIGPGSICTTRLVAGIGVPQLSAILSVRNGIKNRNVKIISDGGIKYSGDLAKALQQER

SEQ ID NO: 83622 - protein, 203 aa, Unknown
  Bacterial polypetide isolated from the Sargasso Sea
IDAGADCVKVGIGAGASCTTRIVAGIGVPQLTAVMDCVDEVKKIGIPVIADGGIRYSGDIAKAIAAGADTVMLGSILAGMDESPGEFILFEGRQYKSYRGMGSLGAMQDGDGARYFQDDTEDKKLVPEGIEGIVPYRGSVKNTIHQLMGGLRSSMGYCGGKDILDFQSNAEFIQNTQAGVKESHPHEVKITKEAPNYQISDTK

SEQ ID NO: 83623 - protein, 209 aa, Unknown
  Bacterial polypetide isolated from the Sargasso Sea
NIATPSAAKFLLKLGVDVIKVGIGPGSICTTRLVAGIGVPQLSAILEVRNGIKNKNVKIISDGGIKYSGDLAKAFAAGADAVMIGSLFAGTDEAPGKLIKRNGKLFKNFRGMGSVGAMNKGSADRYFQSKQKDTSKYVPEGVEGFAKYKGKVDSIIFKLIGGLRSSMGYLGSKQIKYLRDKPQFVKITKAGFYESMVHNVDIVKSDNKY

SEQ ID NO: 83624 - protein, 162 aa, Unknown
  Bacterial polypetide isolated from the Sargasso Sea
MEKIKFRALTFDDVLLLPRYTDFMPSEAELETRVSKNISLKIPLISAAMDTVTEAAMAIALAENGGIGIIHKNNTIEEQTFEVKTVKKYESGVVRDPTTIKSTKTINELMQLTTELSISGMPVVDDGKLMGIVTRRDFRYADNLTELVSSIMTPYEKLITVE

SEQ ID NO: 83625 - protein, 184 aa, Unknown
  Bacterial polypetide isolated from the Sargasso Sea
ICTTRVVAGVGYPQFSAVLEVANAIKSSGVPVIADGGIKYTGDIPKAIAAGADCVMLGSLLAGTKESPGETIIFEGRKFKSYRGMGSLEAMKKGSGDRYFQEFESEVTKLVPEGIVGRVPYKGDLTESVHQFIGGLRAGMGYCGAKDIKTLKDKSKFVKITSAGIIESHPHGINITKEAPNYSR

SEQ ID NO: 83626 - protein, 300 aa, Unknown
  Bacterial polypetide isolated from the Sargasso Sea
ILSEAFTFDDVLLQPAYSDILPSQVDVSSYLTKNIKLNIPLISSPMDTVTESSLAIAIALKGGMGIIHKNMTIDDQVKEVKKVKRSQSTIIKDPVTLNKNSTVKDALQIMKKNKIGGIPIVDENNYLHGIVTNRDIRFHKDLKVKLSEIMTSENLITAQNNTDLFKAEQLLKKHKIEKLPIVNTKNILVGLVTYKDILKNKSMPDACKDRFGRLRVGAAIGNELDYEKRLNKLIGQGVDVIVIDTAHAHSKSVISLCKKIKKNYEIDLIVGNVATASAVKDLVSAGADAIKVGIGPGSIC

SEQ ID NO: 83627 - protein, 201 aa, Unknown
  Bacterial polypetide isolated from the Sargasso Sea
MDPIKEALTFDDVTLAPNYSEILPSETNTFTKLSNNLTLKIPLISSAMDTVTEGRMAATIAEKGGIGVIHRNLSIKKQIDEIQKVKNKKLLVGAAVGGSLDEHKRAERLLKENIDLIVVDTAHGHTKKVSDIIKKIVKIKPKKTSLCAGNIATAEAAKFLIKLGVDIIKVGIGPGSICTTRLVAGIGVPQLSAIMNVKKGI

SEQ ID NO: 83628 - protein, 98 aa, Unknown
  Bacterial polypetide isolated from the Sargasso Sea
HSKGVATAIKKVKDKFNHIDLVVGNIATAEAAKFLSDLGVDGIKVGIGPGSICTTRIIAGVGYPQFSAILEVASSLKDKDIPIIADGGIRYTGDISKA

SEQ ID NO: 83629 - protein, 252 aa, Unknown
  Bacterial polypetide isolated from the Sargasso Sea
GKIIKCKVDLIVVDTAHGHTKRVANIIKFIKKKKSNKTTLCAGNIATAEAAKFLCKLGVDIVKVGIGPGSICTTRLVAGIGVPQLSALLDAKKGLSKNVKMISDGGIKFSGDIAKALAAGADAVMVGSMIAGTNEAPGKIIKKNGKLFKVFRGMGSVGAMNKGSADRYFQKKQKDSSKYVPEGVEGLIKYKGDVSKIIFKLIGGLKSSMGYLGSKNVINLRNKPKFVKITKAGFYESMVHSIDEVKKNSQYL

SEQ ID NO: 83630 - protein, 156 aa, Unknown
  Bacterial polypetide isolated from the Sargasso Sea
MRLIQKALTFDDVLLVPAFSDVLPRDTSLKTKLTRNISLNMPLVSAAMDTVTEGRLAIAMAQQGGVGIVHKNLTPAEQAREVAKVKRFESGVVRDPITVPPQMKVRDVIALSRQHGISGFPVVEGPQLVGIVTNRDLRFETRLDEPVKSIMTPRER

SEQ ID NO: 83631 - protein, 251 aa, Unknown
  Bacterial polypetide isolated from the Sargasso Sea
RVEELSKVKTDLIVIDTAHGHTKKVLNMIRKIKKKLKNSTLCVGNIATGKAAEFLADNGVDIVKVGIGPGSICTTRLVAGIGVPQLSAVMDVKKALKKYKAKIISDGGIKFSGDLAKAIAAGADAIMIGSLFSGTLESPGKIIKYKGKLYKNFRGMGSVGAMSAGSADRYYQKKNKDITKYVPEGVEGMVKFKGSVKEIVYNLVGGLKSSMGYMGAKTIEDLQKKGQFLKISKAGFYESMVHNVDHVIKNE

SEQ ID NO: 83632 - protein, 85 aa, Unknown
  Bacterial polypetide isolated from the Sargasso Sea
VPQITALLSVKRAMKKNKIKIISDGGIKFSGDIIKAIAAGADAIMMGSIFAGTEESPGKIFKIKNKLYKLYRGMGSIGAMSSGSS

SEQ ID NO: 83633 - protein, 273 aa, Unknown
  Bacterial polypetide isolated from the Sargasso Sea
MKLEDAITFDDVLLVPAKSSVTPDMVDTATFVTKDIKINIPLISSAMDTVTEKNMAIAMAQSGGIGVIHRNLSISRQAKYVSAVKRFESGIVYNPITLNCNDTVKIAKKIAVRYNITGFPVVDKENKILGILTNRDIRFLDDNSIKVSEVMTKENLAIVKEPINSKEAKQIMAKRRIEKLLVVDESNYLIGLLTIKDIEKSVLNPLACKDELGRLRCAAASSTGNEGYERSVSLIDSGADVIVIDTAHGHSLDVIKSVKRLKKEFANTPSYCG

SEQ ID NO: 83634 - protein, 116 aa, Unknown
  Bacterial polypetide isolated from the Sargasso Sea
KVELFQGRSFKTYRGMGSIGAMTERDDANRYMQEDVDQNKLVPEGIEGRVPYKGLVINVINQLEGGLRQSMGYVGCKSIKEMQNNSQFVEITNAGMTESHVHDVMITKEAPNYQRS

SEQ ID NO: 83635 - protein, 159 aa, Unknown
  Bacterial polypetide isolated from the Sargasso Sea
MRLLGKALTFDDVLLVPAYSQVLPKDTSLATKLSRNIQLNLPLVSAAMDTVTEARLAIAIAQEGGIGIVHKNLTAQEQAAHVAKVKRYESGVLRDPVVITPEHTVLQVLQLSEQLGISGFPVCDGGKVVGIVTGRDLRFETRYDVKVHQIMTPREKLIT

SEQ ID NO: 83636 - protein, 199 aa, Unknown
  Bacterial polypetide isolated from the Sargasso Sea
MIKLGVDIIKVGIGPGSICTTRLVAGIGVPQLSAILSVRNGVKNKNVKIISDGGIKYSGDLAKAFAAGADAVMIGSLFAGTDETPGKLIKKNGKLFKSFRGMGSVGAMNKGSADRYFQTKQKDTSKYVPEGVEGFVKYKGDVGSIIFRLIGGLKSSMGYLGSKEIVKLRNKTQFVKITKAGFFESMVHNVDVIKNDSKY

SEQ ID NO: 83637 - protein, 282 aa, Unknown
  Bacterial polypetide isolated from the Sargasso Sea
TKYLKLNIPLLSSAMDTVTESKMAIAIAKAGGMGIIHRNLDIKKQILEIKKVKKLKLLVGAAVGAGPSEFKRAEAILKEKIDMIVVDTAHGHTKKVSEIIKFIKKTKDKKTALCAGNIATPVAAKFLLKLGVDVIKVGIGPGSICTTRLVAGIGVPQLSAILEVRNGIKNKNVKIISDGGIKYSGDLAKAFAAGADAVMIGSLFAGTDEVPGKLIRRNGKLFKNFRGMGSVGAMNKGSADRYFQSKQKDSSKYVPEGVEGFAKYKGKVDNIIFKLIGGLRSS

SEQ ID NO: 83638 - protein, 95 aa, Unknown
  Bacterial polypetide isolated from the Sargasso Sea
MAYQINTNYSITFDDVLLSPAYSEIKPKDVDTSITIGKVKLHIPILSAAMDTVTENKMAINLALNGGLGVIHRNMPIDNQANEVNKVHNFKVNIK

SEQ ID NO: 83639 - protein, 253 aa, Unknown
  Bacterial polypetide isolated from the Sargasso Sea
MTIREGFTFDDVLLVPKFSDITSRSQTNLSTNLSRNIKLNIPLVSANMDTVTESTMATTMARQGGIGIIHRFLTIEEEAEQVLKVKRSGSVMIDNPYQISSEKSIEEAIDLMTEKEVSGLLVVDSDSKLVGVLTERDVLFESINSKKSVSELMTKDVISSNQNTTLDDAKDILKSHRIEKLPLVNEKNHIVGLYTTQDILNIENFPNASKDKKGRPLVGAAVGVKGDFLDRTEALLGAGADAIVVDMHMVTAK

SEQ ID NO: 83640 - protein, 152 aa, Unknown
  Bacterial polypetide isolated from the Sargasso Sea
DGGIKYSGDLAKAIAAGADCAMIGSLLAGTDEAPGEVFLYEGRSYKSYRGMGSLGAMARGSADRYFQAEVADTLKLVPEGIEGQVAYKGPALTVVHQLVGGLRAAMGYTGNANLPEMQNRCRFLRLTNAGLRESHVHDVTITREAPNYRQNA

SEQ ID NO: 83641 - protein, 211 aa, Unknown
  Bacterial polypetide isolated from the Sargasso Sea
MDPIKEALTYDDVLLTPKYSEILPSETIIETKLSNNLNLKIPIISSAMDTVTESSMAIEIAKLGGIGVIHRNLDIKKQILEIRKVKSKNLKVGAAVGAGPFEIKRAEALLKEKIDLIVVDTAHGHTKKVAEIVKKIKILKSKKTTLCAGNIATTEASKFLSNLGVDAIKVGIGPGSICTTRIVAGIGVPQLSAILAAKKGLGKKKITLIAD

SEQ ID NO: 83642 - protein, 262 aa, Unknown
  Bacterial polypetide isolated from the Sargasso Sea
MTIREGFTFDDVLLVPKFSDITSRSQTNLSTNLSRNIKLNIPLVSANMDTVTESTMATTMARQGGIGIIHRFLTIEEEAEQVLKVKRSGSVMIDNPYQISSEKSVEEAIDLMNEKEVSGLLVVDSDSKLVGVLTERDVLFESINSKKFVSELMTKDVISSNENTTLDEAKDILKSHRIEKLPLVNDKNHIIGLYTTQDILNIENFPNASKDKKGRPLVGAAVGVKGDFLDRTEALLEAGADAIVVDIAHGHSENAISTVKNI

SEQ ID NO: 83643 - protein, 155 aa, Unknown
  Bacterial polypetide isolated from the Sargasso Sea
TYQVAKKFKIPVIADGGIKTSGDIAKAIAGGASACMIGSLFAGTEESPGKLLTIKGKKFKSYRGMGSVGAMQKGSFDRYSQEETKNAKKLVAEGVEGMVPYKGKIEDVAYQLVGGLKSSMGYTGHKTIKKMQGNCKFVFISKAGARESNVHDVIM

SEQ ID NO: 83644 - protein, 217 aa, Unknown
  Bacterial polypetide isolated from the Sargasso Sea
MGTINEALTFDDVLILPKYSSILPTKTDLSLKLTNKIYLKVPFLSSAMDTVTESSMAIAIGREGGIGVIHRNLSLKKQSLEVKKVKNKNYLVGAAVGTNQEDLDRTKSLVANGVDLIVIDTAHGHSEKVLKTLSKLKKIVGKVPICVGNIATGEAAKKLYNSGADIIKVGIGPGSICTTRMVAGIGVPQISAIIDVKKTLNKKKIKIISDGGIKFQE

SEQ ID NO: 83645 - protein, 268 aa, Unknown
  Bacterial polypetide isolated from the Sargasso Sea
MVPIKEALTFDDVTLAPNYSEILPSEADTTVSLTNHLKLKIPLLSSAMDTVTESKMAIAIAKAGGIGVIHRNLDIKTQVSEIRKVKKYSLKVGAAVGASEKEFIRAKEIINEGVDLIVVDTAHGHTKKVGEIIKYIKKSKNNKIALCAGNIATPEAAKFLIKLGVDIIKVGIGPGSICTTRLVAGIGVPQLSAILAVRNGIKNKKVKIISDGGIKYSGDLAKAFAAGADAVMIGSLFAGTNETPGKLIKKNGKLFKSFRGMGSVGAMN

SEQ ID NO: 83646 - protein, 216 aa, Unknown
  Bacterial polypetide isolated from the Sargasso Sea
NIALCAGNIATPEAAKFLIKLGVDIIKVGIGPGSICTTRLVAGIGVPQLSAILSVRNGLENKNVKIISDGGIKYSGDLAKAFAAGADAVMIGSLFAGTDETPGKLIKKNGKLFKNFRGMGSVGAMNKGSADRYFQTKQKDTSKYVPEGVEGFVKYKGDVGSIIFKLIGGLKSSMGYLGSKEIVKLRNEPQFVKITKAGFYESMVHNVDVIKNDSKY

SEQ ID NO: 83647 - protein, 213 aa, Unknown
  Bacterial polypetide isolated from the Sargasso Sea
LCAGNIATPAAAKFLLKLGVDVIKVGIGPGSICTTRLVAGIGVPQLSAILEVRNGIKNKNVKIISDGGIKYSGDLAKAFAAGADAVMIGSLFAGTDEAPGKLIKRNGKLFKNFRGMGSVGAMNKGSADRYFQSKQKDTSKYVPEGVEGFAKYKGKVDNIIFKLIGGLRSSMGYLGSKQIKYLRDKPQFVKITKAGFYESMVHNVDIVKSDNKY

SEQ ID NO: 83648 - protein, 251 aa, Unknown
  Bacterial polypetide isolated from the Sargasso Sea
MDKVKSKALTFDDVLLLPRYSDFVPSEAVTETKLTKNITIKTPLISAAMDTVTESKMGIALAEAGGLGVIHKNNSIEEQAQLVKAVKKYESGIVRDPMTIDSNRTIGELKQLTTELSISGMPVIDSGVLKGIVTSRDFRYADDMESKVSSIMTPLENLVTVQEGTPQKEVKKLMYENRIEKILVLDNRGALTGLVTMKDIEKAAQHPNATKDISGRLMVGAALGTGKETLERAKAIAEAGVDVFVIDSAHG

SEQ ID NO: 83649 - protein, 247 aa, Unknown
  Bacterial polypetide isolated from the Sargasso Sea
CKVDLIVVDTAHGHTKRVVNIIKFIKKKKSSKTSLCAGNIATAEAAKFLCKLGVDIVKVGIGPGSICTTRLVAGIGVPQLSALLDVKKGLSKNVKMISDGGIKFSGDIAKALAAGADAVMVGSMIAGTNEAPGKIIKKNGKLFKVFRGMGSVGAMNKGSADRYFQKKQKDSSKYVPEGVEGLIKYKGDVSKIIFKLIGGLKSSMGYLGSKNVINLRNKPKFVKITKAGFYESMVHSIDEVKKNSQYL

SEQ ID NO: 83650 - protein, 237 aa, Unknown
  Bacterial polypetide isolated from the Sargasso Sea
MSENTPKILEEGLTFEDVLVVPAYSEILPRETNTETKVSRNIGLKLPIVSAAMDTVTESSLAISIARSGGLGFIHKNMSIKDQARQVRKVKRAESGLITDPITLEESAMIGDALKIMKENRIGGIPIINKDKNLIGILTNRDLRFTKDMNLTVSSIMTKAPLITAKEGTTLKQAEVILEKHKIEKLPIVNENNILTGLITYKDILRVVSYPNANKDSLGRLRVGAAIGVTADMLERL

SEQ ID NO: 83651 - protein, 257 aa, Unknown
  Bacterial polypetide isolated from the Sargasso Sea
MVARSHQSRSKVFSDEALAFDDVLLVPAYSDILPVNVDISTQLTREIDLKTPILSAAMDTVTESQMAISLASEGGIGIIHKNLSVEDQAKQVRLVKKYESGVINDPITASAQSTVREINNITEKYGISGVPIVDQDKLIGIVTNRDLRFVENINTKVTSIMTPKEKLVTVSENYSKKQVIQLLRTNRIEKILIVNKKNQLKGMITFKDIQKSSTYPNASKDNNGSLLVGAAVSTNSESIDRIHALINENVDVITMIL

SEQ ID NO: 83652 - protein, 170 aa, Unknown
  Bacterial polypetide isolated from the Sargasso Sea
MAFDDVLLVPAYSEILPINVCITSNLTKSIQLKTPVLSAAMDTVTESKMAITLASEGGIGIIHKNLSVDDQAKQVRFVKKYESGVINSPITASVNSTVSEINQITKKYGISGVPIVDKQKVVGIVTNRDLRFVENINTKVKTIMTPKDKLVYVGEKYNKKSVIELLRKIE

SEQ ID NO: 83653 - protein, 120 aa, Unknown
  Bacterial polypetide isolated from the Sargasso Sea
MKNRPPFDKALTFDDVLLVPKASDILPRDVILKTRLTQKISMNIPLLSAAMDTVTENEMAVALARQGGIGIIHKNLSIDQQALMVDRVKRSESGMIANPITLSADKSINDAKKVMENYHI

SEQ ID NO: 83654 - protein, 296 aa, Unknown
  Bacterial polypetide isolated from the Sargasso Sea
FSDITSRSQTDLSTNLSRNIKLNIPLVSANMDTVTESTMATTMARQGGIGIIHRFLTIEEEAEQVLKVKRSGSVMIDNPYQISSEKSVEEAIDLMNEKEVSGLLVVDSDSKLVGVLTERDVLFESINSKKSVSELMTKDVISSNENTTLDEAKDILKSHRIEKLPLVNDKNHIVGLYTTQDILNIENFPNASKDKKGRPLVGAAVGVKGDFLDRTEALLGAGADAIVVDIAHGHSENAISTVKNIKKAFPDCELIAGNVATAQGTEDLIKAGVDAVKVGVGSGSICITRVITGSGV

SEQ ID NO: 83655 - protein, 85 aa, Unknown
  Bacterial polypetide isolated from the Sargasso Sea
DGLLLPRYSDFVPSEAVTETKLTKNSTIKTPLMTAAMDTVTESKMGIALAEAGGLGVIHKNNPIEEQAQLVRAVKKYESGIVRDP

SEQ ID NO: 83656 - protein, 121 aa, Unknown
  Bacterial polypetide isolated from the Sargasso Sea
EAPGQVELFQGRSYKAYRGMGSVGAMSGESSSGDRYFQDNQQTDKLVPEGIEGRVPYKGWVETTIHQMLGGLRQSMGYTGCKDIGTMKTKPKFVQITTSGMSESHVHDVSVTKEAPNYRIT

SEQ ID NO: 83657 - protein, 118 aa, Unknown
  Bacterial polypetide isolated from the Sargasso Sea
MIRDRIFDGLTFDDILLVPGYAEIHPSEVSLKSKLTRKLECNIPLLSAAMDTVTEADTAICMAQEGGLGVIHKNLSIEEQANQVNRVKRSESGMITNPITIEPDQPISEALKLMERYR

SEQ ID NO: 83658 - protein, 116 aa, Unknown; identical to SEQ ID NO: 83634
  Bacterial polypetide isolated from the Sargasso Sea

SEQ ID NO: 83659 - protein, 139 aa, Unknown
  Bacterial polypetide isolated from the Sargasso Sea
MVNTSNSKKSNVIITEEGLAFDDVLLVPQYSEILPSDVVLTTKLTKNIELKTPVLSAAMDTVTESQMAITLAGEGGIGIIHKNMSIEEQAKQVRFVKKYESGVINDPVTASPNMTISEINRITKKYNISGVPIVDNNKL

SEQ ID NO: 83660 - protein, 261 aa, Unknown
  Bacterial polypetide isolated from the Sargasso Sea
MTIREGFTFDDVLLVPKFSDITSRSQTDLSTNLSRNIKLNIPLVSANMDTVTEATMATTMARQGGIGIIHRFLTIEEEANQVLKVKRSGSVMIDNPYQISREKSIEQAIDLMNEKEVSGLLVVDSDSKLVGILTERDVLFESLDSKKSVSELMTKDVISANENTSLDQAKDILKNQRIEKLPLVNDKNQIVGLYTTQDIMNIENFPNATKDTKGRPLVGAAVGVQGDFLDRTEALLEAGADAIVVDIAHGHSENAINTVKN

SEQ ID NO: 83661 - protein, 176 aa, Unknown
  Bacterial polypetide isolated from the Sargasso Sea
MPQVTAIADVATELKGTDTCIIADGGIRYSGDIAKAIAAGADSIMLGSLFAGTEESPGEIELYQGRSFKSYRGMGSLGAMAQQHGSKDRYFQSDVEEAEKLVPEGIEGRVPYKGKLSKIIEQLVGGLRQSMGYTGCKDIQELQTKTEFVRITDSGKKEGHVHDVSITKEAPNYSVD

SEQ ID NO: 83662 - protein, 123 aa, Unknown
  Bacterial polypetide isolated from the Sargasso Sea
TEEAPGEVELYQGRSFKTYRGMGSIAAMSKRTDANRYMHGDEVDTDKLVPEGIEGRVPFRGWLKDVVFQLEGGLRQGMGYTGSKTLEELKHRVKFMKITRSGVMESHVHDVSITKEAPNYRSD

SEQ ID NO: 83663 - protein, 276 aa, Unknown
  Bacterial polypetide isolated from the Sargasso Sea
FGFSGFPVTEEAGGKLVGILTNRDTRFANNPNQLVKELMTAHLDEKPLVTVEEGIKLDEAKVLLHQYRLEKLVVVDEQSRCVGLITVKDIEKAQAYPDACKDQKGRLRVAAATGIGSKGYERAERLVDSEVDLIVVDTAHGHSEGVIEAVKQIKKIKNCAPILAGNIATSEGAKALIDAGVDAIKVGIGPGTICTTRMVAGVGVPQFSAIVETSETAKKANIHVVADGGVKYSGDVAKAIAAGADSVMIGSLFAGTEESPGEVFLYQGRSYKSYRG

SEQ ID NO: 83664 - protein, 161 aa, Unknown
  Bacterial polypetide isolated from the Sargasso Sea
MDKVKSKALTFDDVLLLPRYSDILPSEAITETYLTKNISLKTPLISAAMDTVTESRMGISLAEAGGLGIVHKNNSIEEQSNIVRAVKKYESGIVRDPVTINSTKSISELKQLTNELNISGMPVLDNGELRGIVTSRDFRYADNMESSVSSIMTPLDRLVTV

SEQ ID NO: 83665 - protein, 191 aa, Unknown
  Bacterial polypetide isolated from the Sargasso Sea
IKVGIGPGSICTTRLVAGIGVPQLSAILEVRNGIKNKNVKIISDGGIKYSGDLAKAFAAGADAVMIGSLFAGTDEAPGKLIKRNGKLFKNFRGMGSVGAMNKGSADRYFQSKQKDSSKYVPEGVEGFAKYKGKVHNIIFKLIGGLRSSMGYLGSRQIKYLRDKPQFVKITKAGFYESMVHNVDVIKSDTKY

SEQ ID NO: 83666 - protein, 199 aa, Unknown
  Bacterial polypetide isolated from the Sargasso Sea
MESKKFIGKGLTYDDVLLVPRYSEVLPKDVSIVSRFSRNISLNIPIVSAAMDTVTESNMAIAMAREGGIGVIHKNMTIKEQVENIRKVKRAESGMIMDPVVLFEDSKVGDAKESMSQNKIGGIPIVDSKGKLLGIVTNRDLRFENNKSRPIKEVMTVKDLITVREGTSLKDAEEILQKHKIEKLPVVDQKNNLVGLITS

SEQ ID NO: 83667 - protein, 136 aa, Unknown
  Bacterial polypetide isolated from the Sargasso Sea
MTSSRFSFPAEDEKFAIDGLTFDDVLLLPAASEVLPDAVDTKCRFTKNINLNIPLASAAMDTVTEARLAIAMARHGGIGVIHRNLDIEEQANEVDKVKRSESGMIVEPITLPPHATLAQAEELMGRFKISGVPITD

SEQ ID NO: 83668 - protein, 316 aa, Unknown
  Bacterial polypetide isolated from the Sargasso Sea
SEILPSEADTTVSLTNHLKLKIPLLSSAMDTVTESKMAIAIAKAGGIGVIHRNLDIKTQVSEIRKVKKYSLKVGAAVGASEKEFIRAKEIINEGVDLIVVDTAHGHTKKVGEIIKYIKKSKNNKIALCAGNIATPEAAKFLIKLGVDIIKVGIGPGSICTTRLVAGIGVPQLSAILAVRNGIKNKKVKIISDGGIKYSGDLAKAFAAGADAVMIGSLFAGTNETPGKLIKKNGKLFKSFRGMGSVGAMNKGSADRYFQKKQKDMSKYVPEGVEGFVKYKGDVGSIIYKLVGGLKSSMGYLGSKNIIGLRNKPHFVK

SEQ ID NO: 83669 - protein, 225 aa, Unknown
  Bacterial polypetide isolated from the Sargasso Sea
MATLKESLTFDDVTLVPQYSSILPSEASIETSLGSELKLKIPFLSSAMDTVTESKMAIAIAEQGGLGIIHRNLSINKQCNEVRKVKSKKLLVGAAVGTSKEDIIRANKLIDNGIDLIVIDTAHGHSKKVLLTLKKLKKIKSKVKICAGNIATAESARLLSNEGADILKVGIGPGSICTTRIVSGIGVPQISAVMDVKEGIKKNKKIKIISDGGIKFLGDAAKALA

SEQ ID NO: 83670 - protein, 206 aa, Unknown
  Bacterial polypetide isolated from the Sargasso Sea
TPAAAKFLLKLGVDVIKVGIGPGSICTTRLVAGIGVPQLSAILEVRNGIKNKNVKIISDGGIKYSGDLAKAFAAGADAVMIGSLFAGTDETPGKLIKRNGKLFKNFRGMGSVGAMNKGSADRYFQSKQKDSSKYVPEGVEGFAKYKGKVDNIIFKLIGGLRSSMGYLGSRQIKYLRDKPQFVKITKAGFYESMVHNVDIVKSDNKY

SEQ ID NO: 83671 - protein, 144 aa, Unknown
  Bacterial polypetide isolated from the Sargasso Sea
DIAKAIALGADVIMIGSLFAGTDESPGEVFLSNGRTYKSYRGMGSIAAMGKGSADRYFQEEIQHNEKFVPEGVEGRVPYRGTVVKIIEQLVGGLKASMGYTGNKNLIDFKNKTKVVKITSAGLNESHVHSISITRESPNYQLNK

SEQ ID NO: 83672 - protein, 241 aa, Unknown
  Bacterial polypetide isolated from the Sargasso Sea
MCDTAHGHTKRVANIIKFIKRKKSSKTSLCAGNIATAEAAKFLCKLGVDIVKVGIGPGSICTTRLVAGIGVPQLSALLDVKKGLNKNVKMISDGGVKFSGDIAKALAAGADAVMVGSMIAGTNEAPGKIIKKNGKLFKVFRGMGSVGAMNKGSADRYFQKKQKDSSKYVPEGVEGLIKYKGEVSKIIFKLIGGLKSSMGYLGSKNVINLRNKPKFVKITKAGFYESMVHSIDEVKKNSQYL

SEQ ID NO: 83673 - protein, 166 aa, Unknown
  Bacterial polypetide isolated from the Sargasso Sea
MVSIKESLTFDDVLLLPRYSDVLPSETDISLSLTTKINLGVPFLSSAMDTVTESKMAIAIAKAGGIGIIHRNLNIREQTKEIIKVKKKKLLVGAAVGTNKEDVDRAKSLIANGCDLIVIDTAHGHSKRVLKTLSKLKKIGNSIPFCVGILLQEKQQKSCTMREQIL

SEQ ID NO: 83674 - protein, 155 aa, Unknown
  Bacterial polypetide isolated from the Sargasso Sea
MAYQINTNYSVTFDDVLLSPAYSEIKPKDVDTSVTIGKVKLHIPILSAAMDTVTENKMAINLALHGGLGVIHRNMPIDKQASEVKKVHSFKVNAKKFQNAVINSNGKIAVGAAIGVENNAYLRLLELLKFGVDIVFIDVAHAHTKTTLQFIEKAK

SEQ ID NO: 83675 - protein, 99 aa, Unknown
  Bacterial polypetide isolated from the Sargasso Sea
MQIREALTFDDVLLVPAQSSVLPSDVDTRTQVTKEITLNIPLLSSAMDTVTESQMAITMAQAGGIGVIHRNLEIEDQAEQVRRVKRFESEIVYNPNYTW

SEQ ID NO: 83676 - protein, 186 aa, Unknown
  Bacterial polypetide isolated from the Sargasso Sea
MDPIKEALTFDDVTLAPQYSKVLPSDVSTRTILSNQLKLDIPILSSAMDTVTESKMAIALAKQGGIGVIHRNLTISQQINEIKKVKSKSFKVGAAVGTNESELNRIKNILKHDIDLIVVDTAHGHSQKVADTILKIKKIKPKKTTLCAGNIATAEAARFLSKLGVDVIKVGIGPGSICTTRLVAGI

SEQ ID NO: 83677 - protein, 181 aa, Unknown
  Bacterial polypetide isolated from the Sargasso Sea
MDPIKEALTFDDVTLAPRYSEILPSQVDTSTYLSNDYKINIPLLSSAMDTVTESKMAIAIAKAGGIGVIHRNFTIDKQIKEIRKVKSKNLKVGAAVGAGELESKRALAIIKEKIDLIVVDTAHGHTKKVKEIIKTIKKYKNKKTLLCAGNIATAEAANFLAKLGVDLIKVGIGPGSICTTR

SEQ ID NO: 83678 - protein, 175 aa, Unknown
  Bacterial polypetide isolated from the Sargasso Sea
MDKVKAKALTFDDVLLVPSYCDFLPSQASVKTRLTKNIDINLPLLSAAMDTVTEYRMAIALAEAGGIGILHKNCSIQEQSNAVRNVKKYESGVVRDPTTISSDQTIAQLKQLTGELNISGMPVVDDGVVKGIVTSRDFRYADNMDDMVESIMTPREKLITVLEGTSQEVVKKMMY

SEQ ID NO: 83679 - protein, 219 aa, Unknown
  Bacterial polypetide isolated from the Sargasso Sea
KKKNKKTALCAGNVATSEAAKFLYKLGVDIIKVGIGPGSICTTRLVAGIGVPQLSAILNVRNGVKNKNVKIISDGGIKYSGDLAKAFAAGADAVMIGSLFAGTDETPAKLIKINGKLFKSFRGMGSVGAMNKGSADRYFQSKQKDNSKYVPEGVEGLAKYKGRVNDVIFKLIGGLRSSMGYLGSKQIKYLRDKPQFVKITKAGFYESMVHNVDIVKGEK

SEQ ID NO: 83680 - protein, 274 aa, Unknown
  Bacterial polypetide isolated from the Sargasso Sea
VPDHSDILPKDVDLKTRLTQNLDLNIPLLSAAMDTVTESRMGIALSELGGIGIIHKNLSIEAQAAEVRKVKKYESGIVRDPITIRSDNEVGELVQLTKELNISGMPVVDNGALVGIVTSRDFRYQENLSAKVSDIMTPKDRLVTAKEGESPDVIKKLLQENRIEKILLIDDSFKLTGLVTLKDINKSLDFPDAARDEEGRLLAGAAIGTKADTLDRCQALIDAGVDVLVADSAHGHSEGVLNQIKAVKSNFKDIQIIGGNVATGEGALALVKAG

SEQ ID NO: 83681 - protein, 192 aa, Unknown
  Bacterial polypetide isolated from the Sargasso Sea
MEKLKHKALTFDDVLLLPRYSDFLPSEASIKSHLTKSISLKMPLLSAAMDTVTESRMAISLAEAGGIGIIHKNNSIDSQAAEVRAVKKYESGIVRDPVTIHSQKTIGELRQLTSELKISGMPVVDDGNLRGIVTGRDFRYAENMEAKVATIMTPLSKLVTVKEGFSQEDVMKLMYKNRIEKVLVIGEDDVLT

SEQ ID NO: 83682 - protein, 222 aa, Unknown
  Bacterial polypetide isolated from the Sargasso Sea
MEKLKYKALTFDDVLLLPKYSDFLPSEANIESNLTKNISLQMPLLSAAMDTVTESRMAISLAEAGGIGVIHKNNSIEEQAQEVKIVKKYESGIVRDPVTINSNKSIGELKQLTSELSISGMPVVDEGKLKGIVTSRDFRYAENMEANVSSIMTSFDKLITVEEGFTQEDVMQLMYTNRIEKVLVLNENKDLSGLVTMKDIEKSAQYPNATKDSSGRLRVAAA

SEQ ID NO: 83683 - protein, 193 aa, Unknown
  Bacterial polypetide isolated from the Sargasso Sea
PVAKKDRHGGIITNRDIRFETNDLLSVSECMTSKDLISVPVGTSLEKAKDILQEHRIEKLLVVDEDHNLTGLITVKDIQKNEDYPHACKDNNGRLRVGAAVGVSGDAIERASQLANADVDAIVIDTAHGHSKGVLRSIEKIKSSHPTVALIAGNVATGDGAQAMIDAGVDCVKVGIGAGASCTTRVIAGVGVP

SEQ ID NO: 83684 - protein, 214 aa, Unknown
  Bacterial polypetide isolated from the Sargasso Sea
SSTLCVGNIATGKAARFLADNGVDIVKVGIGPGSICTTRLVAGIGVPQLSAVIDVKRSLKNYKTKIISDGGIKFSGDLAKAITAGADAIMIGSLFSGTNESPGKIIRYKGKMYKNFRGMGSVGAMNAGSADRYYQKKNKDIKKYVPEGVEGLVKYKGTVEKIIFNLIGGLKSSMGYLGAKKIKDLQEKGEFLKISKAGFYESMVHNVDHVIKNE

SEQ ID NO: 83685 - protein, 281 aa, Unknown
  Bacterial polypetide isolated from the Sargasso Sea
DDVLLLPAHSEILPTSVSLETKITRSVGLKIPLISSAMDTVTESRLAIAMAQEGGLGVIHKSMSIEKQAREVRSVKKFESGVVRDPFTIPVTATIRDLISLMQENSISGMPVTDSAGLVGIVTSRDVRFESNLDATVDKIMTPKQDLVTVKENFELDEVKELLHKHRIEKILVVNNEFELKGLITLKDIRKSEDFPNAAKDDLGRLRAAAAVGPSLDARERVSAIVDAGVDVLVVDTAHGHSQRVLDQVKSIKSDYPELPVIGGNIGTADAAKALAEAGAD

SEQ ID NO: 83686 - protein, 246 aa, Unknown
  Bacterial polypetide isolated from the Sargasso Sea
MVPIKEALTFDDVTLAPNYSEILPSEADTTVSLTNNLKLKIPLLSSAMDTVTESKMAIAIAKAGGIGVIHRNLDIKTQVSEIRKVKKYSLKVGAAVGASEKEFIRAKEIINEGVDLIVVDTAHGHTKKVGEIIKYIKKSKNNKIALCAGNIATPEAAKFLIKLGADIIKVGIGPGSICTTRLVAGIGVPQLSAILAVRNGIKNKKVKIISDGGIKYSGDLAKAFAAGADAVMIGSLFAGTNETPGK

SEQ ID NO: 83687 - protein, 245 aa, Unknown
  Bacterial polypetide isolated from the Sargasso Sea
MVPIKEALTFDDVTLAPKYSEILPSEVNTSVNLTINLKLKIPLLSSAMDTVTESNMAIAIGKAGGIGVIHRNLDIQKQILEIKKVKKQKLLVGAAVGASIAEFDRAKAILKEGVDLIVVDTAHGHTKKVGEIVKFIKKIKDKNIALCAGNIATPEAAKFLIKLGVDIIKVGIGPGSICTTRLVAGIGVPQLSAILSVRNGLKNKNVKIISDGGIKYSGDLAKAFAAGADAVMIGSLFAGTDETPG

SEQ ID NO: 83688 - protein, 203 aa, Unknown
  Bacterial polypetide isolated from the Sargasso Sea
MVPIKEALTFDDVTLMPKYSEILPSDVDTSIKLTNYLKLKIPLLSSAMDTVTESKMAIAIAKAGGIGIIHRNLDIKKQILEIKKVKKQKLLVGAAVGAGPSEFKRAEAILKEKIDMIVVDTAHGHTKKVSEIIKFIKKTKDKKTALCAGNIATPAAAKFLLKLGVDVIKVGIGPGSICTTRLVAGIGVPTLSAILESRNGIKN

SEQ ID NO: 83689 - protein, 185 aa, Unknown
  Bacterial polypetide isolated from the Sargasso Sea
MDKVKQKALTFDDVLLLPKYSDFLPSEASTQTKLSKNINIKVPLVSAAMDTVTESSMAIALAEAGGIGIIHKNNSIEEQVALVKKVKKYESGVVRDPITIDSKKSIGELIQLTSELNISGMPVVDDGDLKGIVTSRDFRYADNMNALVSSIMTPFEKLVTVEEGTQQDYVKKLMHENRIEKILVV

SEQ ID NO: 83690 - protein, 228 aa, Unknown
  Bacterial polypetide isolated from the Sargasso Sea
MDPIKEALTFDDVTLKPKYSEVLPSQVDTSIKLTNYLKLDIPLLSSAMDTVTESKMAIEIAKLGGLGVIHRNLDIKKQVSEIKKVKKLKLLVGAAVGAGPNEFIRAKAILKEDLDMIVVDTAHGHTKKVSEIIKFIKKIKKNKTALCAGNIATPEAAKFLLRLGVDIIKVGIGPGSICTTRLVAGIGVPQLSAILSVRKGVKNKNVKIISDGGIKYSGDLAKALQLVQ

SEQ ID NO: 83691 - protein, 246 aa, Unknown
  Bacterial polypetide isolated from the Sargasso Sea
KKVKKKKLIVGAAIGTSKEDIYRANKLIENNIDMLVIDTAHGHSKKVLDILKKLKKIVKKIPICAGNIATAESARALSNEGADILKVGIGPGSICTTRIVSGIGVPQISAVMDVKKGIKKNKKTKIISDGGVKFLGDAAKAIAAGADAVMMGSVFAGTEESPGKKFKYKKKFYKTFRGMGSIGAMMDGSSGRYFQKNFKDKSKFVPEGVEGRVEYKGKVEKILYQLKGGLKSSMGYIGAKNIKSLQ

SEQ ID NO: 83692 - protein, 271 aa, Unknown
  Bacterial polypetide isolated from the Sargasso Sea
FGVIHRNLPISDQLLEIKKVQKKGLAVGAAVGTNDTELSRAEKIIKSKVDLIVVDTAHGHTKRVANIIKFIKKRKSSKTTLCAGNIATAEAAKFLCKLGVDIVKVGIGPGSICTTRLVAGIGVPQLSALLDAKKGLSKNVKMISDGGIKFSGDIAKALAAGADAVMVGSMIAGTNEAPGKIIKKNGKLFKVFRGMGSVGAMNKGSADRYFQKKQKDSSKYVPEGVEGLIKYKGGVSKIIFKLIGGLKSSMGYLGSKNVINLRNKPRFVKIT

SEQ ID NO: 83693 - protein, 358 aa, Unknown
  Bacterial polypetide isolated from the Sargasso Sea
MVLLKEALTFDDVTLAPNYSEILPSEADTTVSLTNHLKLKIPLLSSAMDTVTESKMAIAIAKAGGMGVIHRNLDIKTQVSEIRKVKKHSLKVGAAVGASEKEFTRAKEIIKEGVDLIVVDTAHGHTKKVGEIIKYIKKSKNNKIALCAGNIATPEAAKFLIKLGVDIIKVGIGPGSICTTRLVAGIGVPQLSAILSVRNGIKNKKVKIISDGGIKYSGDLAKAYAAGADAVMIGSLFAGTDETPGKLIKKNGKLFKSFRGMGSVGAMNKGSADRYFQKKQKDMSKYVPEGVEGFVKYKGDVRSIIYKLVGGLKSSMGYLGSKNIIGLRNKPHFVKITKAGFYESMVHNVDVIKSDSKY

SEQ ID NO: 83694 - protein, 320 aa, Unknown
  Bacterial polypetide isolated from the Sargasso Sea
MGTIKDSLTFDDVTLVPQYSSILPTDAITNCKLSKNLNLQIPLISSAMDTVTESKMSIAISKSGGIGVIHRNLAIQKQVAEVQKVKRKNYIVGAAIGVNEKDLERAEELSRIKTDLIVIDTAHGHTKKVLNMIRKIKKKLKNSTLCVGNIATGKAAKFLADNGVDIVKVGIGPGSICTTRLVAGIGVPQLSAIMDVKKALKKYKTKIISDGGIKFSGDLAKAIAAGADAIMIGSLFSGTTESPGKIIRFKGKLYKNFRGMGSVGAMNAGSADRYYQKKNKDVAKYVPEGVEGMVKYKGSVKEIIYNLIGGLKSSMGYMGA

SEQ ID NO: 83695 - protein, 103 aa, Unknown
  Bacterial polypetide isolated from the Sargasso Sea
MEKLKYKALTFDDVLLLPKYSDFLPSQACIESKLTKNISLKTPLISAAMDTVTESKMAISLAEAGGIGIIHKNNSISDQAALVKSVKKYESGIVRDPVTIGSN

SEQ ID NO: 83696 - protein, 254 aa, Unknown
  Bacterial polypetide isolated from the Sargasso Sea
MTFDDVLLVPSYSAIMPAAVNVKTKITKKISLNIPIISAAMDTVTEARTAIAMAQEGGLGVIHKNMSIEDQSDEIQKVKKYEGGMIIEPHTISPQSTGKQALDIMTTKNFTGLPVTENGGTLLGIITMRDLRYEKNLHYKVSKLMTQKENLKVVEAGTSPNEARELLHKYKIEKLPVVDKKFRLQGLITMKDIQKSKQFPSASKDKQGRLLAAAAIGVGSDMEDRVKSLIKSGLDILFIDTAHAHSKKVIDALK

SEQ ID NO: 83697 - protein, 142 aa, Unknown
  Bacterial polypetide isolated from the Sargasso Sea
MKVREAITFDDVLLEPSESAVLPSETILKTKITKNIDLNVPLASAAMDTVTESNMAIAMAQAGGIGVIHRNLEIEQQIKEVNKVKKYESGMVVNPLTISPNSTLEDALALMKENNISGVPVTDTKTNKLEGILTNRDVRFAS

SEQ ID NO: 83698 - protein, 355 aa, Unknown
  Bacterial polypetide isolated from the Sargasso Sea
MTIIKDSLTFDDVTLVPQYSSILPNNTITDCKLSNNLKLRIPLISSAMDTVTESKMSLAMSRSGGIGVIHRNLSIEKQIIEVQKVKNSNCLVGAAIGVGPKDIERAEELARIKTDLIVIDTAHGHTKKVLSIIKKIKKKLKSSTLCVGNIATGKAAKFLADNGVDIVKVGIGPGSICTTRLVAGIGVPQLSAVMDVKKALKNYKTKIISDGGIKFSGDLAKAIAAGADAIMIGSLFSGTVESPGKIIKYKGKVYKNFRGMGSIGAMNAGSADRYYQKKFKDVTKYVPEGVEGMVKFKGPVKEIIYNLVGGLKSSMGYLGAKTINDLQKKGLFLKISKAGFYESMVHNVDHVIKNE

SEQ ID NO: 83699 - protein, 261 aa, Unknown
  Bacterial polypetide isolated from the Sargasso Sea
MTIEKTALTFDDVLLKPNYSDVLPRETNLSTKLTRNLSIQIPLLSAAMDTVTEYQLAIAIAQEGGMGIIHKNFSIEDQASQVNRVKKFASGIISDPVTVSPDITIREVLDITKFNNISGVPVVDNGITVGIVTNRDLRFETNLDGLVSSVMTPKEKLVTVKEGADEEEVLGLLHQHRIEKVLVVNDSFELKGMVTAKDFQKATDFPLASKDGNGALLVGAAVGVGDGSEERVEALKSAGVDVIVVDTAHAHTEGVINQVKS

SEQ ID NO: 83700 - protein, 268 aa, Unknown
  Bacterial polypetide isolated from the Sargasso Sea
MDKVKDKALTFDDVLLVPAYSDFLPSEASLKTSLTKNIEINLPLVSAAMDTVTEYRMAIALAEAGGIGILHKNCSIKEQMNAVRNVKKYESGVVRDPTTISSNKTIGQLKQLTDELNVSGMPVVDDGVVKGIVTSRDFRYADNMDDLVSSIMTPREKLITVSEDTSQDVVKKLMYENRIEKVLVLNGEELTGLVTMKDIEKSEKHPNATKDEAGQLRVGAAIGTGAETMERAKALYEAGVDLFVIDSAHGHFKNVVKTIKAIKKSFLV

SEQ ID NO: 83701 - protein, 358 aa, Unknown
  Bacterial polypetide isolated from the Sargasso Sea
MVPIKEALTFDDVTLVPKYSEILPSEVDTSIKLTKSLKLKIPILSSAMDTVTESRMAIALGKAGGLGIIHRNLDIKKQVLEIKKVKKQKLLVGAAVGAGPNEFKRAYAILKENIDMIVVDTAHGHTKKVSEIIRYIKRIRNKTTALCAGNIATPEAAKFLLKLGVDILKVGIGPGSICTTRLVAGIGVPQLSAILSVRNGTKNKNVKVISDGGIKYSGDLAKAFAAGADAVMIGSLFAGTDETPGKLIRRNGKLFKSFRGMGSVGAMNKGSAERYFQSKQKDISKYVPEGVEGFAKYKGKVSDIIYKLIGGLRSSMGYLGSKQIKFLRDKPKFVKITKAGFYESMVHNVDIVKNDSKY

SEQ ID NO: 83702 - protein, 311 aa, Unknown
  Bacterial polypetide isolated from the Sargasso Sea
MDTVTESNMAIAIAKAGGIGVIHRNLDIKKQILEIKKVKKQKLLVGAAVGASIAEFDRAKAILKEGVDLIVVDTAHGHTKKVGEIVKYIKKIKGKNTALCAGNIATPEAAKFLIKLGVDIIKVGIGPGSICTTRLVAGIGVPQLSAILAVRNGLKNKNAKIISDGGIKYSGDLAKAFAAGADAVMIGSLFAGTDETPGKLIKKNGKLFKSFRGMGSVGAMNKGSADRYFQTKQKDTSKYVPEGVEGFVKYKGDVGSIIFKLIGGLKSSMGYLGSKEIVKLRNKPQFVKITKAGFYESMVHNVDVIKNDSKY

SEQ ID NO: 83703 - protein, 241 aa, Unknown
  Bacterial polypetide isolated from the Sargasso Sea
MLRIAEQALTFDDVVLVPEHSDILPKDVDLKTRLTKNISLNIPLVSAAMDTVTESKMGIAISELGGIGVIHKNLSIQDQATEVRKVKKYESGVVRDPITIRSDKQVGELIQLTNDLSISGMPVVDDGELVGIVTSRDFRNERNLGATVAEIMTPKNKLVTAKEGEDLEVIKALLQDNRIEKILLVDEKFELTGLVTLKDINKSLDFPNAARDSEGRLIVGAAIGTKADTLERASALIESGV

SEQ ID NO: 83704 - protein, 208 aa, Unknown
  Bacterial polypetide isolated from the Sargasso Sea
EATEDLIKAGADCVKIGIGAGSSCTTRIIAGVGVPQLSAVMDCAQVGIKNKIPIIADGGIRYSGDIAKSLAAGANVVMLGGMLAGMDESPGETIVYEGRRYKSYRGMGSLAAMKEGGGERYFQQEKDELKLVPEGIEGMVPFRGPVNNTIFQLIGGLKSSMGYCGAKDLKSLYENKKFIEISSAGVKESHPHEVSIIKEAPNYQGHDK

SEQ ID NO: 83705 - protein, 62 aa, Unknown
  Bacterial polypetide isolated from the Sargasso Sea
MKNRPPFKQALTFDDVLLVPQKSSILPKEVNLKTKLTQKIEMNIPLLSAAMDTVTESGMAVA

SEQ ID NO: 83706 - protein, 174 aa, Unknown
  Bacterial polypetide isolated from the Sargasso Sea
MKVREAITFDDVLLEPSESAVLPSETILKTKITKNIDLNVPLASAAMDTVTESSMAIAMAQAGGIGVIHRNLEIEQQIKEVNKVKKYESGMVVNPLTISPDSTLEDALALMKENNISGVPVTDIKTNKLEGILTNRDVRFASNKNQKVSELMTKNDLITVKDNVSENEAKEILH

SEQ ID NO: 83707 - protein, 208 aa, Unknown
  Bacterial polypetide isolated from the Sargasso Sea
IATAEAAKFLCKLGVDIVKVGIGPGSICTTRLVAGIGVPQLSALLDVKKGLTKNVKMISDGGVKFSGDIAKALAAGADAVMVGSMIAGTNEAPGKIIKKNGKLFKVFRGMGSVGAMNKGSADRYFQKKQKDSSKYVPEGVEGLIKYKGDVSKIIFKLVGGLKSSMGYLGSKNVINLRNKPKFVKITKAGFYESMVHSIDEVKKNSQYL

SEQ ID NO: 83708 - protein, 161 aa, Unknown
  Bacterial polypetide isolated from the Sargasso Sea
MAYQINTNYSVTFDDVLLSPAYSEIKPKDVDTSVTIGKIKLHIPILSAAMDTVTENKMAINLALNGGLGVIHRNMPIDKQASEVKKVHSINVNKKKYENAVINSNKQILVGAAIGVENNAYLRLLELLKVGVDIVFIDVAHAHTKTTLQFIEKAKKVLKKT

SEQ ID NO: 83709 - protein, 56 aa, Unknown
  Bacterial polypetide isolated from the Sargasso Sea
MGTIKESLTFDDVLLIPKYSDVLPSETDISLNLSKKITLKVPFLSSAMDTVTESKM

SEQ ID NO: 83710 - protein, 77 aa, Unknown
  Bacterial polypetide isolated from the Sargasso Sea
MVYKINTNYSVTFDDVLLSPAYSEIKPKDVITSTTLGNLKLHIPIISAAMDTVTENKMAINLSLKGGLGVIHRNMPI

SEQ ID NO: 83711 - protein, 109 aa, Unknown
  Bacterial polypetide isolated from the Sargasso Sea
MDKLKHKALTFDDVLLLPRYSDFLPSEADISSNLTKNITLKMPLLSAAMDTVTESKMAISLAEAGGIGVIHKNNSIEKQASEVKSVKKYESGIVRDPVTISSTNSIEEL

SEQ ID NO: 83712 - protein, 125 aa, Unknown
  Bacterial polypetide isolated from the Sargasso Sea
MGTDESPGEVYLFKGRSYKSYRGMGSLGAMARGSADRYFQEEITESNKHVPEGIEGRVPYKGPITPIIYQLVGGLRASMGYTGSKDIVEFKKNVKFVEITGAGLKESHVHDVDITRESPNYPTNI

SEQ ID NO: 83713 - protein, 113 aa, Unknown
  Bacterial polypetide isolated from the Sargasso Sea
HQGRSYKSYRGMGSMGAMARGSADRYFQEEVSDHQKFVPEGIEGQVPYKGPISAVVHQLVGGLKAAMGYTGSASIPEMQKDKKFLRITNAGLRESHVHDVTITREAPNYRPNL

SEQ ID NO: 83714 - protein, 354 aa, Unknown
  Bacterial polypetide isolated from the Sargasso Sea
MDPIKEALTYDDVLLTPKYSEILPSETVIKTKLSKNLNLKIPIISSAMDTVTESSMAIAIAKLGGIGVIHRNLDIKRQILEIRKVKSKNLKVGAAVGAGPLEIKRAEALLKEKIDLIVVDTAHGHTKKVAEIVKKIKKLKSKKTTLCAGNISTIDAAKFLSKLGVDAIKVGIGPGSICTTRLVAGIGVPQLSAIMAARKGLGKKKIMLVADGGIKFSGDISKALAAGADAVMIGSLFAGTNESPGKIIKKNGKYFKSFRGMGSVGAMNKGSADRYFQKKQKDPSKYVPEGVEGLVKYKGPIEKIVYQLIGGLKSSMGYLGSKNIKDLRNKPKFVKITKAGFYESMVHNIDQVLK

SEQ ID NO: 83715 - protein, 349 aa, Unknown
  Bacterial polypetide isolated from the Sargasso Sea
VGVLTERDVLFESINSKKSVSELMTKDVISSNDNTTLDEAKDILKNNRIEKLPLVNDKNQIVGLYTTQDILNIENFPNASKDKKGRPLVGAAVGVKGDFLDRTEALLAAGADAIVVDIAHGHSENAISTVKNIKKAFPDCELIAGNVATAQGTEDLIKAGVDAVKVGVGSGSICITRVITGSGVPQLTAVMDCAEIGKKYDIPIISDGGTRTSGDATKALAAGASSVMLGSMLGGTDESPGSTITKNGKRYKFYSGMASLGAARRRKSKEATQSDTEDDLNDYVAEGVEAMVPYKGTVIDILVQITGGIRSGLSYCGGHDIKQMQNNAEFIKMSRAGFAESQPHDVDVV

SEQ ID NO: 83716 - protein, 355 aa, Unknown
  Bacterial polypetide isolated from the Sargasso Sea
MGIIKDSLTFDDVTLVPQYSSVLPTETITNCQLSKSINLKIPLLSSAMDTVTESNMCLALAKLGGIGVIHRNLSIEKQTIEVKKVKKKKYLVGAAIGVNDKDLERAEELSRIKTDLIVIDTAHGHTQKVLNMIKKIKKKLKNSNLCVGNIATGKAARFLADNGVDIVKVGIGPGSICTTRLVAGIGVPQLSAVIDVKKSLKNYKTKIISDGGIKFSGDLAKAVTAGADAIMIGSLFSGTNESPGKIIRYKGKLYKNFRGMGSVGAMNAGSADRYFQKKNKDIKKYVPEGVEGLVKFKGSVEKIIFNLIGGLKSSMGYLGAKTIKDLQKKGQFLKISKAGFYESMVHNVDHVIKNE

SEQ ID NO: 83717 - protein, 99 aa, Unknown
  Bacterial polypetide isolated from the Sargasso Sea
MSNNVEKKLTFDDVLLVPRRSSVLPKEVDCATNLTKNITLNIPIMSAAMDTVTESDMAIALARQGGIGVIHKNLSIKDQALMVDKVKRYESGMIRNPIT

SEQ ID NO: 83718 - protein, 327 aa, Unknown
  Bacterial polypetide isolated from the Sargasso Sea
TSCKLSSNLNLQIPLISSAMDTVTESKMSIAIAKSGGIGVIHRNLSIKKQLIEVLKVKKNNYLVGAAIGVGPQDLERAEELAKIKTDLIVIDTAHGHTKKVLNMIKNIKKKLKNSTLCVGNIATGKAAKFLADNGVDIVKVGIGPGSICTTRLVAGIGVPQLSAVIDVKKALKNYKTKIISDGGIKFSGDLAKAIAAGADAIMIGSLFSGTIESPGKIIKYKGNLFKNFRGMGSVGAMNAGSADRYYQKKNKDNTKYVPEGVEGMVKFKGSVKEIIYNLIGGLKSSMGYMGTKTIKDLQKRGQFLKISKAGFYESMVHNVDHVIKND

SEQ ID NO: 83719 - protein, 160 aa, Unknown
  Bacterial polypetide isolated from the Sargasso Sea
MKNRPPFKQALTFDDVLLIPQKSSILPKEVNLKTKLTQKIEMNIPLLSAAMDTVTESGMAVALAREGGIGIIHKNLSIEEQASMVDRVKRYESGMIVNPVTLSSDKTIKDAKEVMGLYKISGLPVVENEKLIGIITNRDIRFETDESLPVTDRMTTEKLV

SEQ ID NO: 83720 - protein, 96 aa, Unknown
  Bacterial polypetide isolated from the Sargasso Sea
MDKVKSKALTFDDVLLLPRYSDFLPSEAVTETYLTKNITLKTPLISAAMDTVTESRMGISLAEAGGLGIVHKNNSIEEQSNIVRAVKKYESGIVRD

SEQ ID NO: 83721 - protein, 61 aa, Unknown
  Bacterial polypetide isolated from the Sargasso Sea
MEKLKHKALTFDDVLLLPRYSDFLPSEVDISSKLTNSITLKMPLLSAAMDTVTESKMAIPS

SEQ ID NO: 83722 - protein, 308 aa, Unknown
  Bacterial polypetide isolated from the Sargasso Sea
METIKDSLTFDDVTLVPQYSSILPTDAITNCKLSRNLNLRIPLISSAMDTVTESKMGIAISKSGGIGVIHRNLSINKQVAEVQKVKRRNYIVGAAIGVSAKDLERAEELSRIKTDLIVIDTAHAHTKKVLNMIKKIKKKLKNSTLCVGNIATGKAAKFLADNGVDIVKVGIGPGSICTTRIVAGIGVPQLSAVIDVKKALKKYKTKIISDGGIKFSGDLAKAIAAGADAIMIGSLFSGTTESPGKIIKYKGKLYKNFRGMGSVGAMNAGSADRYYQKKNKDVTKYVPEGVEGMVKYKGPVKEIIYNLI

SEQ ID NO: 83723 - protein, 93 aa, Unknown
  Bacterial polypetide isolated from the Sargasso Sea
MAYQINTNYSVTFDDVLLSPAYSEIKPKDVDTSITIGKVKLRIPILSAAMDTVTENKMAINLALHGGLGVIHRNMPIDKQASEVKKVHSFKVT

SEQ ID NO: 83724 - protein, 174 aa, Unknown
  Bacterial polypetide isolated from the Sargasso Sea
MEAIKEALTFDDVLLLPRFSEILPSDTNITVNLSKNIKLNTPFLSSAMDTVTESIMAIAIAKSGGIGIIHRNLNIKKQSKEVGKVKKKNLLVGAAIGTNTEDIIRAKSLVDSGVDLIVIDTAHGHSKKVLNILKNVKKNKIPICVGNIATAEAAKKLYNSGADIIKVGIGPGSI

SEQ ID NO: 83725 - protein, 266 aa, Unknown
  Bacterial polypetide isolated from the Sargasso Sea
MVPIKEALTFDDVTLAPKYSDILPSEVDTSISLTNFLELKIPLLSSAMDTVTESKMAIAIGKAGGIGVIHRNLDIKKQVQEIRKVKKKKLIVGAAVGAGPKEFERATAILKENIDMIVIDTAHGHTKKVSEIIKFVKRKKNKKTALCAGNIATAEAAHFLYELGVDILKVGIGPGSICTTRLVAGIGVPQLSAILNVRKGVKNKNIKIISDGGIKYSGDLAKAFAAGADAVMIGSLFSGTYETPGKLIKKNGKLFKSFRGMGSVGA

SEQ ID NO: 83726 - protein, 357 aa, Unknown
  Bacterial polypetide isolated from the Sargasso Sea
MGIIKDSLTFDDVTLIPDYSSVLPSETNTLTQISSRLNLKIPLLSSAMDTVTESKMAIAISKAGGIGVIHRNLSIQKQISEVKKVKKSNCIVGAAIGVNNADIERAYELNKAKVDLIIIDTAHGHTKKVLEMIKKVKNNIKNTTLCAGNIATGKAAKFLGDSGVDIVKVGIGPGSICTTRLVAGIGVPQLSAIIEVKKALKRHKTKIISDGGIKFSGDLAKAIAAGADAIMIGSLFSGTSESPGKILKKNGKLYKNFRGMGSVGAMSVGSSDRYYQKRFKDISKYVPEGVEGVVKYKGPVDKIIYNLIGGLKASMGYLGAKTIKDLQRKGEFLKITKAGFYESMVHNVDQVKDNGTK

SEQ ID NO: 83727 - protein, 255 aa, Unknown
  Bacterial polypetide isolated from the Sargasso Sea
MVTQKNKSLNSLTDTGIAYDDVLLVPQYSEVLPNDVSLSTRLTKSLNIKIPILSAAMDTVTESQMAISLASAGGIGIIHKNMSIKEHANQIRFVKKHESGVIREPLTASPGMTVDEIYGITNKYNISGVPVVENNQLVGIITSRDLRFVENLDMKISQIMTPKDKLVTVREDYTKEEVVSLLRENRIEKILITNKKFELKGMITFKDIQKTSTYPDASKDTNGSLIVGGAIGTTDESIERAEALVSQGVDVLVID

SEQ ID NO: 83728 - protein, 184 aa, Unknown
  Bacterial polypetide isolated from the Sargasso Sea
MVPIKEALTFDDVTLAPNYSEILPSEADTTVSLTNNLKLKIPLLSSAMDTVTESKMAIAIAKAGGIGVIHRNLDIKTQVSEIRKVKKYSLKVGAAVGASEKEFIRAKEIINEGVDLIVVDTAHGHTKKVGEIIKYIKKSKNNKIALCAGNIATPEAAKFLIKLGVDIIKVGIGPGSICTTRLVR

SEQ ID NO: 83729 - protein, 346 aa, Unknown
  Bacterial polypetide isolated from the Sargasso Sea
VTLVPKYSEILPSEVDTSIKLTDTLKLKIPLLSSAMDTVTESRMAITIAKSGGLGIIHRNLDIKKQVLEVKKVKKKKLLVGAAVGAGPNELKRAEALLKEKLDMIVVDTAHGHTKKVSEIIRFIKKNKNKKTALCAGNIATPDAAKFLLKLGVDIIKVGIGPGSICTTRLVAGIGVPQLSAILNVRNGIKNKNVKIISDGGIKYSGDLAKAFAAGADAVMIGSLFAGTDETPGKLIKKNGKLFKSFRGMGSVGAMNKGSADRYFQKKQKDSSKYVPEGVEGLAKYKGKVNKVVFKLVGGLRSSMGYLGSKQIKYLRYKPQFVKITKAGFYESMVHNVDIVKSDSKY

SEQ ID NO: 83730 - protein, 322 aa, Unknown
  Bacterial polypetide isolated from the Sargasso Sea
LSNNLFLKIPIISSAMDTVTESSMAIEIAKLGGIGVIHRNLDINNQILEIKKVKSKNLKVGAAVGAGPLEIKRAEALLKEKIDLIVVDTAHAHTKKVAEIIKKIKKLKSKKTTLCAGNIATAEAAKFLSKLGVDAIKVGIGPGSICTTRLVAGIGVPQLSAILSAKKGLGKKKIMLVADGGIKFSGDISKALAAGADAVMIGSLFAGSKESPGKLIKKNGKYFKNFRGMGSIGAMNKGSADRYFQKKQKDQSKYVPEGVEGLVKYKGPVEKIIYQLIGGLKSSMGYLGSKNIKDLRNKPKFVKITKAGFYESMVHNIDQVLK

SEQ ID NO: 83731 - protein, 331 aa, Unknown
  Bacterial polypetide isolated from the Sargasso Sea
MVPIKEALTFDDVTLAPKYSEILPSEVNTGVALTKYLKLKIPLLSSAMDTVTESKMAIAIAKAGGIGVIHRNLNVKEQIIEIKKVKKKKLLVGAAVGAGPNEFIRAKALVNEGVDLIVVDTAHGHTKKVAEIIKFIKRIKNKKIALCGGNIATPEAAKFLIKLGVDIIKIGIGPGSICTTRLVAGIGVPQLSAILSVRSGIKNKNIKIISDGGIKYSGDLAKAFAAGADAVMIGSLFAGTDEAPGKLIKKNGKLFKSFRGMGSVGAMNKGSADRYFQSKQKDTSKYVPEGVEGFAKYKGDVGSILYKLIGGLKSSMGYLGSKDILKLRNKP

SEQ ID NO: 83732 - protein, 210 aa, Unknown
  Bacterial polypetide isolated from the Sargasso Sea
MLRIVNKALTFDDVLLLPDHSDILPKDVDLKTRLTQKINLNIPLLSAAMDTVTESRMGIALSELGGIGIIHKNLSIQDQAAEVRKVKKYESGIVRDPITIRSDNKVGELIQLTNELNISGMPVVDDGNLVGIVTSRDFRFQEQHSVQVSEIMTPKEKLITAREGESPDVIKTLLQVNRIEKILLVDDSFALTGLVTLKDINKSLDFPNAT

SEQ ID NO: 83733 - protein, 257 aa, Unknown
  Bacterial polypetide isolated from the Sargasso Sea
MTNSKILSEGLTYEDVLLIPQYSDILPQKVNLKTRFSKNIDLNIPIVSAAMDTVTESKMAIAVAREGGIGVIHKNLSIENQSNEVRLVKRAESGMIIDPVTLKLNAYVKDAKKYMKKYKIGGIPIISDKGKLRGIVTNRDLRFEKEDNKPISKVMTSKNLITVKSGTSLDDAEDVLKKHKIEKLPVVDSKNNLVGLITFRDINKHSTKSISNKDDLGRLRVAAAIGVDRDLLKRSRELISAGVDALVIDTAHAHSKS

SEQ ID NO: 83734 - protein, 165 aa, Unknown
  Bacterial polypetide isolated from the Sargasso Sea
MAQVKEYLTFDDVLLKPQVSNTLPNDVDISTNLTKDIVLNTPIISAAMDTVTESKMAIAMSQNGGLGVIHKNFDIETQSYEVKKVKRYEAGIVYNPITMNPNNTIEDVLSVMKEQNISGFPVVDKDNTLQGIITNRDVRFVINKKTKVKDLMTRKVISITQTQSK

SEQ ID NO: 83735 - protein, 942 aa, Unknown
  Bacterial polypetide isolated from the Sargasso Sea
MPQITAIMKQIDGWERSLRQGRRIQDRLESLERKRSEWDRLLAIETQEKEEQVNALRDSIERKRTNSYKLFIKDGLNRFHNDGDPDEIADRMSEESIALDEQEIKKIEQSFGRFIKRYDAFMIRYRKNHKDIMKKLKPYGGRRNIILKKIRNGKEKVEKLESMIENWVNKLDEKNESLIAKEKEYNELKKETNTKLAEIESELQRAPEKEQRARSDIDSRTERKLLLISDKEENLKSDMEEELLSIDDELSNHPVVLKINESEEKMLSFFSEIEETKEQVTSLEKEIQKLSKDRSLSESRLEKAFKKHDKAQQSIEVKETQFKEEKNSLKDKMDVNRKDFSSVQQQLLILDQQKDEILARLENVEKDLNTSNNLVRDLKKKILVSNQIPKSVDNSKKSSISSKKKENRKEQLRYLDQMEKDLRINIDRLDLLIKESNILIDNMRNEESGLESSISLIENDLEYFNTDISRLETLMKNNEEHLKKISKDHRNALNGISNIKELYPKCKIMLNERIANLYTLVELKTKDRDEIDIALDEIKTELKDKRVETAMLGQQLSKINDEMKEALENSFYEQESEDQEWKWEIAEHKMQSYMDLAQLKINAKDLFDEIVKIEKRIAQLKTKESSIKNVISENEKISHKKLKKMEDTCTRLELRIIKEKNELEGIENEVQQLKGLAFNYGDRIEVLEKELAEFKEKEIEYELILKDLDRSIESVQERADKIIRSKGSIKENSIELDYMANLGLLMDPHSRLNILPDEHRKEFSYYRSNQILQNSVLALLMTFSLSAFFQRTSIKPLKDQLPIKQSELSLLSMRQDMKNVVESRNKVANTFGQLINDDKNISDDMVSLLKHLSKTLPVNFLVTNVTLDKQASSSISTPDITEFYDLLITVDGFYDNDIEKASLYAEKLRKSFIAQGHFKNVEISKGKVLKRSRTGFKITILL

SEQ ID NO: 83736 - protein, 238 aa, Unknown
  Bacterial polypetide isolated from the Sargasso Sea
MIVIDTAHGHTKKVSTIIYKVKKILKKIPLCAGNIATGKAAKFLVSCGVDIVKVGIGPGSICTTRLVAGVGVPQLSAILDVKKALGKSKTKIISDGGIKFSGDLAKAIAAGADAIMIGSLFSGTTESPGKILKRKGKLYKTFRGMGSAGAMSVGSADRYYQKKFKDISKFVPEGVEGIVKFKGPVNKIIYNLTGGLRSSMGYLGAKTINDLQKKGEFVKISKAGFYESMVHNVDQVIK

SEQ ID NO: 83737 - protein, 303 aa, Unknown
  Bacterial polypetide isolated from the Sargasso Sea
TESKMCIAIAKAGGIGIIHRNLDIKKQVAEIKKVKKKKLLVGAAVGAGINEFERAKNVLKENIDLIVVDTAHGHTKKVADIIKKIKKIKPKKTALCAGNIATAEAAKFLIKLGVDIIKVGIGPGSICTTRLVAGIGVPQLSAILNVRKGVGARKVSIIADGGIKFSGDIAKALSAGADAVMIGSLFAGTDEAPGKIIKKNGKLFKSFRGMGSIGAMNKGSADRYFQKKQSDSTKYVPEGVEGFIKYKGAVSRIVYKLVGGLRSSMGYLGCKEIKKLKNKPKFVKITKAGFYESMVHNIDKVIR

SEQ ID NO: 83738 - protein, 285 aa, Unknown
  Bacterial polypetide isolated from the Sargasso Sea
VDGLVSSVMTPKDKLVTVKEGAGEEEVLRLLHQHRIEKVLVVDDSFHLKGMVTAKDFQKATDFPLASKDGNGALLVGAAVGVGDGSEERVEALKAAGADVIVVDTAHAHTEGVINQVKSIKKMHSDLEVIAGNIATGEAAKALADAGADAVKVGIGPGSICTTRVVAGAGMPQITAITDVANQLKGTDTCIISDGGIRYSGDIAKAIAAGANSIMLGSLFAGTEESPGEIELYQGRSFKSYRGMGSIGAMAQQHGSKDRYFQSDVEEPEKLVPEGIEGRVPYKGN

SEQ ID NO: 83739 - protein, 329 aa, Unknown
  Bacterial polypetide isolated from the Sargasso Sea
TFLSENLSLKIPLLSSAMDTVTESKMAIQIAKLGGIGIIHRNLSIKKQILEIRKVKNKNLKVGAAVGTSENEFIRAKAVLKLGIDIIVIDTAHGHTKKVSEIIKKIKRIKNKKTVLCAGNIATSDAANFLAKQGVDVVKVGIGPGSICTTRIVAGIGVPQLSAILEVKKGLKGKKTKIIADGGIKFSGDIVKALTAGADAVMIGSLFAGTDESPGKIIKKNGKMFKSFRGMGSIGAMNKGSADRYNQKVQKDSSKYVPEGVEGYVKYKGPLEKIVFKLIGGLKSSMGYLGSKKILNLKNRASFVKITKAGFYESMVHNIDKLKTKEENI

SEQ ID NO: 83740 - protein, 298 aa, Unknown
  Bacterial polypetide isolated from the Sargasso Sea
NVSAEEILQTHKIEKLPVVDSKGILIGLITFRDINKHSEKPTSNKDKLGRLMVSAAIGTDKDYKKRAQKLIKSGVDALVVDTAHAHSSKVGEVLKNLKDSFSEVDIVVGNIATADAANYLKENGADGIKVGIGPGSICTTRVVAGVGYPQLSAVLEVSEVLKNSKIPLIADGGIRYTGDISKAIAAGADSVMLGSLLAGTEESPGETIIYDGRKFKTYRGMGSVEAMQKGSRDRYFQSEQADKKKLVPEGIVGRVPYKGQLNESIHQFIGGLRSGMGYCGAKDIASLKKSSNLLRYWF

SEQ ID NO: 83741 - protein, 288 aa, Unknown
  Bacterial polypetide isolated from the Sargasso Sea
TKPPSKPNACKDEFGRLRVGAAVGVGPGTDERIAALVEAGVDILLIDTSHGHSEGVLDRVRQTRALYPDLQIVAGNVATAEGAKALALAGANAVKVGIGPGSICTTRIVTGCGVPQLTAISDAVDGVKGLDVCIIADGGIRFSGDIAKALVAGAHCVMVGSMFAGTEEAPGDVELYQGRYYKSYRGMGSLGAMAQRNGSSDRYFQGSNNAEKLVPEGIEGRVAYKGPIGTIIHQQMGGLRSSMGLTGCATMAEFRSKPEFVKVTSAGMGESHVHDVQITKEAPNNRLG

SEQ ID NO: 83742 - protein, 292 aa, Unknown
  Bacterial polypetide isolated from the Sargasso Sea
RDINKHSEKPISNKDKLGRLMVAAAIGTDNDYKKRAKRLVESGVDAIVVDTAHAHSSRVGDVLKSLKDLFTETDIVIGNIATGEAANYLKENGADAIKVGIGPGSICTTRVVAGVGYPQLSAIMNVSEALKNSSVPLIADGGVKYTGDIVKAIAAGADSVMLGSLLAGTEESPGETVIYEGRKFKTYRGMGSVEAMQKGSKDRYFQSDQSDNKKLVPEGIVGRVPYKGQLNESIHQFVGGLKSGMGYCGSKDIKTHKGSSKFVKITGSGIRESHPHNVSITKEAPNYSPPKL

SEQ ID NO: 83743 - protein, 291 aa, Unknown
  Bacterial polypetide isolated from the Sargasso Sea
ITVKDIFKRRRYPDACKDEHGRLRVGAAIGASAEDIERAGMLVDAGVDVIVVDTAHGHSEGVLKAVAKVRERFPDVQLIGGNVGTVEGARALVERGVDAVKVGVGPGSICTTRVVTGVGLPQLTAIMDAAEGADGLVPIIADGGIRYSGDIVKALAAGAHCVMMGSIFAGTDESPGETFLLEGRRFKTVRGMGSMSAMEEGSADRYFQDASRDKRKLVPEGIEARVPYKGPVSDTIYQLVGGLRAGMGYCGVGSISELRTESRFNRVTMGGLRESHPHDVTITREAPNYHG

SEQ ID NO: 83744 - protein, 172 aa, Unknown
  Bacterial polypetide isolated from the Sargasso Sea
FSAIMECSEEANKSGINVIGDGGIKYSGDIAKAIGAGATSVMIGSLFAGTDEAPGEVYLFKGRSYKSYRGMGSLGAMARGSADRYFQEEITENYKLVPEGIEGRVPYKGPISPIIHQLLGGLKASMGYTGSKDIDSFKKNVKFVQISSAGLKESHVHDVDITRESPNYPTNV

SEQ ID NO: 83745 - protein, 265 aa, Unknown
  Bacterial polypetide isolated from the Sargasso Sea
LGTDKDTFDRAEALFHEGVDVLVIDSAHGHSKNVIETIKAVKQKFPSVDVIGGNIATADAAMELVKAGADAVKVGMGPGSICTTRIIAGIGVPQISAIFDVSTALKNTEVAVIADGGIRFSGDIAKAIAAGADSVMLGSLFAGTEEAPGKVELFQGRSFKTYRGMGSIGAMTEREDANRYMQEDVAADKLVPEGIEGRVPYKGLVLNVVNQLIGGLRQSMGYIGCKNISEMHKKSQFVEITNAGMTESHVHDVMITKEAPNYQRS

SEQ ID NO: 83746 - protein, 188 aa, Unknown
  Bacterial polypetide isolated from the Sargasso Sea
IIKVGIGPGSICTTRLVAGVGVPQLSAVIEVKNALRNKKTKIISDGGIKFSGDLAKAIGAGADAIMIGSLFSGTLESPGKILKRKGKLYKSFRGMGSAGAMAVGSADRYYQKKFKDLSKFVPEGVEGIVRFKGPVNKIIYNLVGGLRSSMGYLGAKTLKDLQNKSEFVKITKAGFYESMVHNVDQVVK

SEQ ID NO: 83747 - protein, 336 aa, Unknown
  Bacterial polypetide isolated from the Sargasso Sea
SALMTKNVITVKETVTAEDARKLLHKHRIEKLVVVDMDNFCVGLITVKDMEKAQNHPDSCKDKQGRLRVAAATGVGKDGIKRAEALINAGVDVLIVDTAHGHSEMVLETVRAISKLSSQIALIGGNVATGDATRALIDAGANGIKVGIGPGSICTTRMVAGVGVPQLTAITDCAKVAKKNSIPIIADGGIKYSGDIAKAIAGGASAVMVGSILAGTDETPGEVFLFQGRSYKSYRGMGSLGAMARGSADRYFQAEIETLKLVPEGIEGQVPYKGPAQNVIHQLVGGLKSAMGYTGNININEMQKKCIFKRISSAGLKESHVHDVTITREAPNYRPS

SEQ ID NO: 83748 - protein, 103 aa, Unknown
  Bacterial polypetide isolated from the Sargasso Sea
MIDIPEALTFDDVLLVPAKSDVLPTQTNTTTRLTRTIELGIPLISAAMDTVTEANLAIALAQAGGIGVIHKNLEPEEQAEEVRKVKKYESGMVINPLTINPHA

SEQ ID NO: 83749 - protein, 267 aa, Unknown
  Bacterial polypetide isolated from the Sargasso Sea
GAAIGVGKDLMDRTKALVEAGVDVFVLDSAHGDSKRVIDAIKQVKKKFPDIDMVGGNVATASGAKSLIKAGVDAVKVGVGPGSICTTRVVSGVGVPQLSAVMDIVSVAGDIPVISDGGVRYSGDIVKAIGAGANTVMLGSVFAGTEEAPGEIELFQGRSFKTYRGMGSLGAMSKRADAERYMQGEDTAAEKLVPEGIEGRVPFRGWLKDVVYQLEGGLRQGMGYTGSKDIKDLQKRVQFQKITRSGMTEGHVHDVSITKEAPNYRVD

SEQ ID NO: 83750 - protein, 305 aa, Unknown
  Bacterial polypetide isolated from the Sargasso Sea
MDPIKESLTFDDVLLEPKYSEILPSDVITETSLSKNLKLKIPILSSAMDTVTESKMAISIAQSGGIGIIHRNLSIKNQIKEIRKVKSKNLLVGAAIGAGPLEYDRAKNILKENLDLIVIDTAHGHTKKVSEIVKKVRSIKPKKTALCAGNIATLEAAKFLIRLGVDIIKVGIGPGSICTTRIVAGIGVPQLSAILSVKKGIGKKNIKIIADGGIKFSGDITKALAAGADAVMIGSLFAGTSESPGKIFKKNGKYFKSFRGMGSIGAMNKGSADRYFQKKQKNISKYVAEGVEGFVKYKGPVDKIS

SEQ ID NO: 83751 - protein, 157 aa, Unknown
  Bacterial polypetide isolated from the Sargasso Sea
KKIKNISDGGIKFSGDIAKALAAGADAIMMGSIFAGTDESPGKKFKIKEKLYKQFRGMGSIGAMSSGSANRYFQKNFKDKSKFVPEGVEGRVEYKGNVSKIIYQLQGGLRSSMGYIGAKNLNQIQKKAKFIKITKAGFYESMVHSVEITQKTTNYKL

SEQ ID NO: 83752 - protein, 213 aa, Unknown
  Bacterial polypetide isolated from the Sargasso Sea
VVRGTAEGALALVEAGVNAVKVGIGPGSICTTRIVTGVGVPQITAVSDAAEAVKGLGIPVIADGGVRFSGDLAKALAAGASCIMAGSMFAGTDEAPGETELYQGRAYKSYRGMGSLGAMSQGSSDRYFQSDNAADKLVPEGIEGRVPYKGKLKEIIHQHMGGLRSCMGLTGCATIQELNEKAQFVKVTSAGMGESHVHDVTITKEAPNYRSGA

SEQ ID NO: 83753 - protein, 286 aa, Unknown
  Bacterial polypetide isolated from the Sargasso Sea
KAERKPNACKDELGRLRVGAAVGAGAGNEERVDALVKAGVDVLLIDSSHGHSEGVLQRIRETRAKYPDLQMIGGNVATAEGALALVEAGVNAVKVGIGPGSICTTRIVTGVGVPQITAVSDAAEAVKGLGIPVIADGGVRFSGDLAKALAAGASCIMAGSMFAGTDEAPGETELYQGRAYKSYRGMGSLGAMSQGSSDRYFQSDNAADKLVPEGIEGRVPYKGKLKEIIHQHMGGLRSCMGLTGCATIQELNEKAQFVKVTSAGMGESHVHDVTITKEAPNYRSGA

SEQ ID NO: 83754 - protein, 289 aa, Unknown
  Bacterial polypetide isolated from the Sargasso Sea
MFPIKEALTFDDVTLAPKYSEVLPSEVDTSIKLTKFLKLKIPLLSSAMDTVTESKMAIAIAKAGGLGIIHRNLDIKKQVSEVKKVKKLSLLVGAAVGAGPREVKRAEALLKENLDMIVVDTAHGHSKKVFEIISFIKKKKNKKTALCAGNIATPEAAKFLLKTGVDVIKVGIGPGSICTTRLVAGIGVPQLSAILNVRGGIKNKNVKIISDGGIKYSGDLAKAFAAGADAVMIGSLFAGTDETPGKLIKKNGKLYKSFRGMGSVGAMNKGSADRYFQSKQKDQSKYVPE

SEQ ID NO: 83755 - protein, 283 aa, Unknown
  Bacterial polypetide isolated from the Sargasso Sea
MGVIHKNNSIEKQASEVKFVKKYESGIVRDPVTISSTNSIEELKNLTDKLSISGMPVVDNGQLRGIVTGRDFRYAENMDSNVSTIMTPFEKLVTVNEGFSQEDVMQLMYKNRIEKVLVLDANKNLSGLVTMKDIEKSAQYPNATKDDSGRLRVAAAIGTEQNTLERAEALFEAGVDVFVIDSAHGHSKNVIDTIKTIKRSFKDIEIIGGNIATADAAKELAQAGVSAVKVGMGPGSICTTRIIAGIGVPQITAILEIKQAIKKNNVKVIADGGIRFSGDIAKA

SEQ ID NO: 83756 - protein, 220 aa, Unknown
  Bacterial polypetide isolated from the Sargasso Sea
MGSIKDSLTFDDVSLVPQESSVVPNETITKITLHKRLNLQIPLISSAMDTVTESKMAIAIAKMGGIGVIHRNLSADAQVSEIRKVKKAKFLVGAAIGVNNNDLDRVKKLIEANVDMIVIDTAHGHTQKVSKMIYKVKKIIKKIPLCAGNIATGKAAKFLSSCGVDIVKVGIGPGSICTTRLVAGVGVPQLSAILDVKKALGKSKTKIISDGGIKFSGDLA

SEQ ID NO: 83757 - protein, 149 aa, Unknown
  Bacterial polypetide isolated from the Sargasso Sea
MNLREGLTFDDVLLEPAASKVLPANADTRTYVTKTIELGIPLLSAAMDTVTESRLAIAVAQAGGMGVIHKNMDISVQADEVRKVKKAEAGMVINPLTISPGRPVIEALKLKDEHGISGIPVVEEGNGKLVGILTNRDVRFVTDLNQPVR

SEQ ID NO: 83758 - protein, 206 aa, Unknown
  Bacterial polypetide isolated from the Sargasso Sea
MIDAGVDAVKVGIGPGSICTTRMVAGIGMPQISAIDSVAEALRKTDLPIIADGGIKYSGDIVKALAAGAHSVMIGSLFAGTAETPGQVILYQGRRYKLYRGMGSLGAMKEGSKDRYFQTEIQEVQKLVPEGIEGRVPYKGPLAESIFQFTGGLRAGMGYTGCASINELQNKASYVRISNAGLRESHVHDVYITEEAPNYPSFKPDV

SEQ ID NO: 83759 - protein, 190 aa, Unknown
  Bacterial polypetide isolated from the Sargasso Sea
PGSICTTRIVTGVGVPQITAVAEVTEALIKKDIPVIADGGIRFSGDIAKAIAAGGHTVMLGSVLAGTEEAPGELELYQGRSYKSYRGMGSIGAMSGDQGSSDRYFQDSSEATEKLVPEGIEGRVPYKGWLQAVIHQMIGGLRQSMGYTGSHDIATMRTKPKFVQITSAGVNESHVHDVSVTKEAPNYRMS

SEQ ID NO: 83760 - protein, 266 aa, Unknown
  Bacterial polypetide isolated from the Sargasso Sea
NSNKQIAVGAAIGVENNAYLRLLELLKVGVDIVFIDVAHAHTKTTLQFIEKAKKVLKKTPLIVGNIATKKAASDLISAGVDAIKVGIGPGSICTTRVVTGVGIPQLSAVMDTFQVAKKFKIPVIADGGIKTSGDIAKAIAGGASACMIGSLFAGTEESPGKLLTIKGKKFKSYRGMGSVGAMQKGSFDRYSQEETKNAKKLVAEGVEGMVPYKGKIEDVAYQLVGGLKSSMGYTGHKTIKKMQGNCKFVFISKAGARESNVHDVIM

SEQ ID NO: 83761 - protein, 288 aa, Unknown
  Bacterial polypetide isolated from the Sargasso Sea
HLKIPLISSAMDTVTEAKMAISIAKLGGIGVIHRNLPIDAQIKEIRKVKSQKCLVGAAVGASLAEHNRAKKILQENIDLIVVDTAHAHTKKVAEIIKIIKKIKPNKTSLCAGNIATSEAAKFLIKLGVDILKVGIGPGSICTTRLVAGIGVPQLSAILNVRDGIGKNKTKLIADGGIKFSGDIAKALTAGADAVMIGSLFAGTDQAPGKLIKKKGKLFKNFRGMGSIGAMNKGSADRYFQKKQKDSTKYVAEGVEGYIKYKGSVNKIIYQLVGGLKSAMGYLGSTKSY

SEQ ID NO: 83762 - protein, 179 aa, Unknown
  Bacterial polypetide isolated from the Sargasso Sea
MIAGIGVPQILQIMEVKKALKNKKIKIVSDGGIKFSGDAAKALAAGADAIMMGSIFAGTDESPGKKFKIGNKIYKSYRGMGSIGAMSSGSSDRYFQKNQIDKSKYVAEGVEARVRYKGPVSKIIYQLQGGLRSSMGYIGAKNLEGIKKNAKFIKITKAGFYESMVHSVETTNGGTNYKL

SEQ ID NO: 83763 - protein, 311 aa, Unknown
  Bacterial polypetide isolated from the Sargasso Sea
MDTVTENKMAINLALHGGLGVIHRNMPIDKQASEVKKVHSFKVNGKKFQNAVINSNGKIAVGAAIGVENNAYLRLLELLKFGVDIVFIDVAHAHTKTTLQFIEKAKKVLKKTPLIVGNIATKKAASDLISAGVDAIKVGIGPGSICTTRVVTGVGIPQLSAVMDTFQVAKKFKIPVIADGGIKTSGDIAKAIAGGASACMIGSLFAGTEESPGKLLTIKGKKFKSYRGMGSVGAMQKGSFDRYSQEETKNAKKLVAEGVEGMVPYKGKIEDVAYQLVGGLKSSMGYTGHKTIKKMQGNCKFVFISKGRSPR

SEQ ID NO: 83764 - protein, 281 aa, Unknown
  Bacterial polypetide isolated from the Sargasso Sea
MDTVTESKMAIAIAKEGGIGIIHRNLNIKDQTKEVKLVKDKKNFVGAAIGTNHEDLDRTKSLISNGVDLIVIDTAHGHSEKVLKTLSKIKKIVGKIPVCVGNIATGEAAKKLYNSGADIIKVGIGPGSICTTRMVAGIGVPQISAVMDVKKTLRKKKIKIISDGGIKFSGDIAKALAAGADAIMMGSIFAGTEESPGKKFKIKGKIYKQYRGMGSIGAMSSGSANRYFQKNFNDKSKFVPEGVEGRVEYKGKVSQIIYQLQGGLRASMGYIGAKNLKEINK

SEQ ID NO: 83765 - protein, 148 aa, Unknown
  Bacterial polypetide isolated from the Sargasso Sea
SGDIAKAIAAGGHVVMLGSLFAGTEESPGEVVIFQGRSFKSYRGMGSVGAMSQTHGSSDRYFQDSENGLDKLVPEGIEGRVAYKGSVITIINQMVGGLRSAMGYTGCVTISEMRTKPQFVKITPAGMKESHVHDVAITKEAPNYRSTS

SEQ ID NO: 83766 - protein, 219 aa, Unknown
  Bacterial polypetide isolated from the Sargasso Sea
AIGTGAETFDRAKSLADSGVDLFVVDSAHGHTKSVIETVKMIKKEFPTKDVIAGNVATPEGAEALIEAGADGIKIGMGPGSICTTRIIAGIGVPQISAILTIYEKVKGKVPLIADGGMRYSGDIAKAIAAGADSVMLGSIFAGTEEAPGEFELYQGRSFKTYRGMGSLGAMSKRDDSNRYFQEDIDAEKLVPEGVEGRVPYKGWAINVINQLIGGLRQS

SEQ ID NO: 83767 - protein, 244 aa, Unknown
  Bacterial polypetide isolated from the Sargasso Sea
EQQAAEVAQVKKFEAGVIRDPITVGPETTIRDVLALTQARNISGVPVVDGGGQLVGIVTHRDMRFETELDDPVRHIMTKKDRLITVKEGAASDEVLQLLHRNRIEKILVVNDDFALRGLITVKDIQKNTDYPNAAKDTATRLLVGAAVGVGGDTDRRVEALVTAGVDVLVVDTAHGHSQGVLDRVRWVKKNFPNVQVVGGNICTGEAALALLDSGADAVKVGIGPGSICTTRVVAGVGVPQITA

SEQ ID NO: 83768 - protein, 227 aa, Unknown
  Bacterial polypetide isolated from the Sargasso Sea
RETRAKYPDLQIIGGNVATAEGALALVEAGVNAVKVGIGPGSICTTRIVTGVGVPQITAVSDAAEAVKGLGIPVIADGGVRFSGDLAKALAAGASCIMAGSMFAGTDEAPGETELYQGRAYKSYRGMGSLGAMSQGSSDRYFQSDNAADKLVPEGIEGRVPYKGKLKEIIHQHMGGLRSCMGLTGCATIQELNEKAQFVKVTSAGMGESHVHDVTITKEAPNYRSGS

SEQ ID NO: 83769 - protein, 245 aa, Unknown
  Bacterial polypetide isolated from the Sargasso Sea
VIDTAHAHSKSVAEALKKVKNNFNNIDVVVGNIATKEAANFLIDIGADGLKVGIGPGSICTTRIVAGVGYPQFSAVLEVAKSIKNKNIPIIADGGIRYTGDISKAIAAGADSVMLGSLLAGTEESPGETVIFNGRKFKTYRGMGSVEAMKEGSKSRYFQGSENDSKKLVPEGIVGRVPYKGELQESIHQFVGGLRSGMGYCGAKSINELKSKSKFVKITGSGIKEGHPHNVTITKEAPNYSPPKV

SEQ ID NO: 83770 - protein, 91 aa, Unknown
  Bacterial polypetide isolated from the Sargasso Sea
MLRIEDKALTFDDVLLVPAHSEVLPNEVDLKTRLTKKLNLNIPLVSAAMDTVTESRMSIALSELGGIGIIHKNLSIDAQASEVRKVKKYES

SEQ ID NO: 83771 - protein, 267 aa, Unknown
  Bacterial polypetide isolated from the Sargasso Sea
FDDVLLVPRYSSVLPSNTSLITNLGDSLKLKIPFLSSAMDTVTESKMAIAIAKAGGLGIIHRNLSAKHQAHEVSKVKKKKLIVGAAIGTKREDLDRVKILLNHGVDLIVIDTAHGHSEKVIRILSKVKKMSFKTKICVGNIASKEAARKLCEEGADILKVGIGPGSICTTRLVAGIGVPQISAIIEVKKGIKNKKVKIISDGGIKFSGDIIKALGAGADAVMMGSIFAGTEESPGKKFKYKKKFYKSFRGMGSVGAMSEGSSNRYFK

SEQ ID NO: 83772 - protein, 202 aa, Unknown
  Bacterial polypetide isolated from the Sargasso Sea
ELIDVGADGIKVGIGPGSICTTRIIAGVGMPQLTAIINCAKEADLHNIPVIADGGIRFSGDFAKSIASGASCAMIGSLFAGTDESPGEISLYQGRSFKNYRGMGSLGAMARGSADRYFQKEVEADKLIPEGIEGQVPYKGSVNNIIYQLVGGLKASMGYTGNKNINQMKNGCKFIKISGAGLSESHVHDVRITNESPNYSNN

SEQ ID NO: 83773 - protein, 247 aa, Unknown
  Bacterial polypetide isolated from the Sargasso Sea
TILKENLDIIVIDTAHGHTKKVEEIIKKIKKIRPKKTAICAGNIATAEAAKFLVGLGVDIIKVGIGPGSICTTRLVAGIGVPQLSAILDVKKGIGKSKTRLIADGGIKFSGDIAKALAAGADAVMIGSLFAGTDEAPGKKIKKNGKLYKYFRGMGSIGAMNKGSADRYFQTKQKDTSKYVAEGVEGYIKYKGKVDKIIYNLVGGLKSSMGYMGAKKVIDLRKKPKFVKITKAGFYESMVHNIDVVKK

SEQ ID NO: 83774 - protein, 213 aa, Unknown
  Bacterial polypetide isolated from the Sargasso Sea
MIDIPEALTFDDVLLVPAKSDILPGQTNTSTRLTRTIGLGIPLISAAMDTVTEANLAIALAQAGGIGVIHKNLKPQEQAEEVRKVKKYESGMVINPLTINPQATLADALAMKERNGFSGIPVVEDDGKLVGILTNRDVRFADNPNQPVSELMTIHSEHEPLITVKEGIDRNEAKKLLHRHRIERLLVVDNRFRCVGLITVKDIEKGATHPNAA

SEQ ID NO: 83775 - protein, 307 aa, Unknown
  Bacterial polypetide isolated from the Sargasso Sea
MTPFEKLVTVNEGFSQEDVMQLMYKNRIEKVLVLDANKNLSGLVTMKDIEKSAQHPNATKDDSGRLRVAAAIGTEQNTLERAEALFEAGVDVFVIDSAHGHSKNVIDTIKIIKQSFKDIEIIGGNIATADAAKELAKAGVSAVKVGMGPGSICTTRIIAGIGVPQITAILEIKQAIKKNNVKVIADGGIRFSGDIAKAISAGADSVMLGSLFAGTEEAPGKVELFQGRSFKTYRGMGSIGAMTERNDANRYLQEDKESDKLVPEGIEGRVPYKGLVINVINQLEGGLRQSMGYVGCKNIEAMQKESQ

SEQ ID NO: 83776 - protein, 308 aa, Unknown
  Bacterial polypetide isolated from the Sargasso Sea
HLTIREGFTFDDVLLVPKFSDITSRSQTNLSTNLSRNIKLNIPLVSANMDTVTESTMATTMARQGGIGIIHRFLTIEEEAEQVLKVKRSGSVMIDNPYQISSEKSVEEAIDLMNEKEVSGLLVVDSDSKLVGVLTERDVLFESINSKKSVSELMTKDVISSNENTTLDEAKDILKSHRIEKLPLVNDKNHIVGLYTTQDILNIENFPNASKDKKGRPLVGAAVGVKGDFLDRTEALLGAGADAIVVDIAHGHSENAISTVKNIKKAFPDCELIAGNVATAQGTEDLIKAGVDAVKVGVGSGSICITRV

SEQ ID NO: 83777 - protein, 219 aa, Unknown
  Bacterial polypetide isolated from the Sargasso Sea
IKRLKPKKTTLCAGNVATAEAAKYLIKLGIDIIKVGIGPGSICTTRLVAGIGVPQLSAILSVKKGMGKSKCTLIADGGIKFSGDIAKALAAGADAVMIGSLFAGTDQAPGKIIKRNGKLFKSFRGMGSIGAMNKGSADRYFQTKQKDTSKYVAEGVEAFVKYKGSVNKIIYQLVGGLKSSMGYLGSPRVVDLRKKPKFVKITKAGFYESMVHNIDELKK

SEQ ID NO: 83778 - protein, 186 aa, Unknown
  Bacterial polypetide isolated from the Sargasso Sea
PGSICTTRMIAGVGLPQLSAIMECSNIAKKYDIPVVADGGIKYSGDIAKAIASGADAVMIGSLFAGTDEAPGDVFLYQGRSYKSYRGMGSLGAMSRGSADRYFQEEIEKLKLVPEGIEGQVPYKGPLENIIHQLVGGLKSSMGYTGNTDINSMQNNCKFRRITNAGLKESHVHDVMITREAPNYRQ

SEQ ID NO: 83779 - protein, 312 aa, Unknown
  Bacterial polypetide isolated from the Sargasso Sea
AYSEVTAKEVSLVTRLTRNIPLNIPLVSAAMDTVTEMRLAIALAQEGGIGIIHKNMTVQEQAEEVRRVKKFESGVVKDPITIESTASIAQLIELTRSNGISGVPVMESGNLVGIVTRRDIRFETDTEQPVSEIMTKKEKLVTVKEGAPLEEVQSLLHEHRIEKILVVDDEFDLKGLITVKDFDKAESFPHACKDGFGQLRVGASVGTSPDTDERVEALIRAGVDVLVVDTAHGHSKNVLDRVSMIKAAHPDVDVIGGNIATAEAAVALRDAGADAVKVGIGPGSICTTRIVTGVGVPPNLRLSRRCPRHCRS

SEQ ID NO: 83780 - protein, 267 aa, Unknown
  Bacterial polypetide isolated from the Sargasso Sea
KKLLVGAAVGASEKELIRAKNLLKENLDIIVIDTAHGHTKKVADIIKKIKKLRPKNTAICAGNIATTEAAKFLVKLGVDIIKVGIGPGSICTTRLVAGIGVPQLSAILNVKKGIGKSKTTLIADGGIKFSGDIAKALAAGADAVMIGSLFAGTDQAPGKKIKKKGKLYKYFRGMGSIGAMNKGSADRYFQSKQKDTSKYVAEGVEGYIKYRGSVDKIIYNLIGGLKSSMGYLGAKKVTELRKNPKFVKITKAGFYESMVHNIDLVKK

SEQ ID NO: 83781 - protein, 189 aa, Unknown
  Bacterial polypetide isolated from the Sargasso Sea
MVPIKEALTFDDVTLTPKYSEILPADVDTSIKLTENLKLKIPLLSAAMDTVTESKMAISIAKAGGIGIIHRNLDIKKQILEIKKVKKQKLLVGAAVGAGPSEYKRAEAILKENVNMIVVDTAHGHTKKVSDIIRFIRKKKSKKTALCAGNVATPEAAKFLLKLGVDIIKVGIGPGSICTTRLVAGIGVP

SEQ ID NO: 83782 - protein, 260 aa, Unknown
  Bacterial polypetide isolated from the Sargasso Sea
RVGASVGVGGDSDDRVAALVEAGVDIVVVDTAHGHTKAVLDRVSWIKQKYPELDVMGGNVATSDGARALIDSGVDSVKVGIGPGSICTTRIVAGIGVPQVTAITDAVEAALESEVPVVADGGIRYSGDIAKAIAAGANVVMIGSLLAGAEESPGEVELFQGRTYKSYRGMGSMGAMAQSHGSSDRYFQEVGSDAGKLVPEGVEGRVAYKGPVSSIVHQLMGGLRASMGYTGCSNIGAMRTETKFVRVSAASMAESHVHDV

SEQ ID NO: 83783 - protein, 305 aa, Unknown
  Bacterial polypetide isolated from the Sargasso Sea
LIKKLLQENRIEKILLIDDSFKLTGLVTLKDINKSLDFPDAARDEEGRLLAGAAIGTKSDTLQRCEALIEAGVDVLVVDSAHGHAEGVLSTVSEVKKNFREVEIIGGNVATAEGALALAKAGADAVKVGIGPGSICTTRIVTGVGVPQITAVAEVTEALTKKNIPVIADGGIRFSGDIAKAIAAGGHSVMLGSILAGTEEAPGELELYQGRSYKSYRGMGSIGAMAGEQGSSDRYFQDSAEATEKLVPEGIEGRVPYKGWLQAVIHQMIGGLRQSMGYTGSRDIEEMRTKPKFVQITSAGVSESH

SEQ ID NO: 83784 - protein, 158 aa, Unknown
  Bacterial polypetide isolated from the Sargasso Sea
GVPLIADGGIRYSGDVAKALAAGAHTVMMGGMFAGTDESPGEVFLFQGRSYKSYRGMGSVGAMKDGAADRYFQEDNTANVDKLVPEGIEGRVPYKGSALPIVHQLTGGVRSSMGYCGCASIAEWHEKAQFVEITAAGMNESHVHDVQITKEAPNYHRD

SEQ ID NO: 83785 - protein, 193 aa, Unknown
  Bacterial polypetide isolated from the Sargasso Sea
GIGPGSICTTRVVAGAGMPQITAITDVANQLKGTDTCIISDGGIRYSGDIAKAIAAGANSIMLGSLFAGTEESPGEIELYQGRSFKSYRGMGSLGAMAQQHGSKDRYFQSDVEEPEKLVPEGIEGRVPYKGKLSKIIEQLVGGLRQSMGYTGCKDITELQTKTEFVRITDSGKREGHVHDVSITKEAPNYSVD

SEQ ID NO: 83786 - protein, 317 aa, Unknown
  Bacterial polypetide isolated from the Sargasso Sea
NGYCNAGRENVMQIREALTFDDVLLVPAQSSILPSDVDTRTQVTKEITLNIPLLSSAMDTVTESKMAITIAQAGGIGVIHRNLEVEHQAEEVRRVKRFESGIVYNPITLGENQTLGDANILRDRYNVTGFPVVDEKDRVIGIVTNRDMRFAADSSTPVSRMMTKENLAILTEPADRRQAINLMKERRIEKLLITDKQGRLTGLLTLKDTEQAVLNPTACKDKLGRLRVAAATTVGDEGYLRSDCLIDAGIDLLVIDTAHGHSDAVIEAVGRVKKRSNNVQVVAGNVATADACQALIDAGADAVKVGLALDQFVQHEW

SEQ ID NO: 83787 - protein, 257 aa, Unknown
  Bacterial polypetide isolated from the Sargasso Sea
METIKEALTFDDVTLAPNYSAILPSEVSTSINLTESLKMKIPLLSSAMDTVTESSMGIAMGRAGGLGIIHRNLNIEEQIKEIRKVKSKKILVGAAVGASEKELKRAEKILKENLDIIVIDTAHGHTKKVGDIIKKIKKIRPKKTAICAGNIATAQAAKFLVGLGVDIIKVGIGPGSICTTRLVAGIGVPQLSAILNVKKGIGKSKTRLIADGGIKFSGDIAKALAAGADAVMIGSLFAGTDEAPGKKIRKNGKLYKY

SEQ ID NO: 83788 - protein, 286 aa, Unknown
  Bacterial polypetide isolated from the Sargasso Sea
IVLKVPFLSSAMDTVTESKMAIAMSRNGGLGVIHRNLDLKTQSKEVNKVKKLNLNVGAAIGTSNDDLERARSLINNGVDLLVIDTAHGHSKKVLNILSKIKRISSIKSICVGNIASGEAARELYNEGADILKVGIGPGSICTTRLVAGIGVPQLSAIMNVKKELKNKNIKIISDGGIKFSGDIIKALAAGADAIMMGSLFAGTEESPGKKFRYKNKLYKSYRGMGSIGAMSSGSSNRYFQKNYKDKSKFVAEGIEGRVLYKGAVEKIIYQLQGGLRSSMGYIGAKK

SEQ ID NO: 83789 - protein, 310 aa, Unknown
  Bacterial polypetide isolated from the Sargasso Sea
TESRMAITLAGEGGIGIIHKNMSIEEQAKQIRFVKKYESGIINDPVTASPNMTIGEINMITKKYNISGVPIVDNNQLVGIVTNRDLRFVDDLNLKVSKIMTPQARLITVKENFTKEEVISALRKNRIEKILIINKKHELKGMVTFKDIQKSTTYPNASKDDTGSLRVGAAVGTGNESVDRAEALIEQKTDIIVIDTAHGHSKLVIKMLKHLKKAYPSQELIVGNIATADAAKDLIASGADAIKIGIGPGSICTTRIVAGVGVPQLTAIMNISKIAKKNKIPLIADGGIRYSGDIAKALAAGADSVMLGGL

SEQ ID NO: 83790 - protein, 322 aa, Unknown
  Bacterial polypetide isolated from the Sargasso Sea
MLSAAMDTVTEASLAIAMAQEGGLGILHKNMTIEAQAQEVRKVKKFETGIIQDPVICSPNITVRELLGITRHHNISGVPVVEGDNLVGIVTGRDIRFVPDLDVQVREVMTPKERLVTVTEGAGHQEIQGKLHKHRIEKVLMVDDDFRLRGLVTVKDIMKAESHPDAAKDAAKRLLAAAAIGTGPEGEDRVRALVEAGVDVLVVDTAHGHSQGVLDRVAWIKQNFPRVEVIGGNIATGEAAKALVEVGADAVKVGIGPGSICTTRIVAGVGVPQVSAIANVASALIGSGVPLIADGGIRYSGDIAKAISAGASTVMVGSLLAG

SEQ ID NO: 83791 - protein, 294 aa, Unknown
  Bacterial polypetide isolated from the Sargasso Sea
TFDDVTLTPNYSEILPSEVDTKIQLSRNITLKIPLLSSAMDTVTESKMAISIAKAGGIGVIHRNLNIKKQIQEIKKVKSKNLLVGAAVGAGVDEIARAEAILKEGVDLIVVDTAHGHTKKVAEIIKKIKRKKGKLTSICAGNIATPEAAKFLLKLGVDIIKVGIGPGSICTTRLVAGIGVPQLSAIINVKSGVKNKNVKIISDGGIKFSGDIAKALSAGADAVMIGSLFAGTVESPGKLIKKKGKLYKNFRGMGSVGAMNKGSADRYFQKKQKDKSKYVPEGVEGLVKFKGSVE

SEQ ID NO: 83792 - protein, 295 aa, Unknown
  Bacterial polypetide isolated from the Sargasso Sea
GLVTMKDIEKSAEHPDATKDNSGSLMVGAALGTESDTLKRAKALSMTGVDVFVIDSAHGHSKNVIDTIKIIKKEFPNIDIIGGNVATSEGAKELEKAGADGIKVGMGPGSICTTRIIAGIGVPQITAILDIKHAMKDSDIGIIADGGIRFSGDIAKAIAAGADSVMLGGLFAGTEEAPGKVELFQGRSFKTYRGMGSIGAMTERQDANRYMQEDLDAEKLVPEGIEGRVPYKGLVINVINQLIGGLRQSMGYIGCKTIQDIHNKSEFVEITNAGMTESHVHDVMITKEAPNYQRS

SEQ ID NO: 83793 - protein, 271 aa, Unknown
  Bacterial polypetide isolated from the Sargasso Sea
LNLTKNIKLKTPFLSSAMDTVTEYSMAIAMAKSGGIGIIHRNLDIKKQSKEVEKVKRKKLFVGAAIGTNTDDLKRAKSLIDNGVDLIVIDTAHGDSKKVLKTLSKVKKNKIPICVGNIATAEAAKRLFNSGADIIKVGIGPGSICTTRMVAGIGVPQISAIMEVHNALKGKKIKIISDGGIKFSGDIAKAIAAGSDAIMMGSIFAGTQESPGKKFKIKNKFYKQYRGMGSIGAMSAGSSNRYFQKNYKDKSKFVPEGVEGRVEYKGNVSKI

SEQ ID NO: 83794 - protein, 306 aa, Unknown
  Bacterial polypetide isolated from the Sargasso Sea
KLVGIVTNRDLRFVDDLDLKVSEIMTPQDRLITVREDFTKDEVISALRTNRIEKILISNNKQELKGMVTFKDIQKSTTYPNASKDETGSLRVGAAIGTGQDSIERAEALIEQKIDVIVIDTAHGHSKLVIKMLKHLKKSYPTQELIAGNIATEEAAKDLITSGADAIKIGIGPGSICTTRIVAGVGVPQLTAIMNISKIAKKNNIPLIADGGIRYSGDIAKALAAGADSVMLGGLLAGTDESPGEVELFEGRTYKAYRGMGSIGAMQQGSKDRYFQDGVQKSSKLIPEGIEGRVAYKGTMKTILHQ

SEQ ID NO: 83795 - protein, 178 aa, Unknown
  Bacterial polypetide isolated from the Sargasso Sea
VTGVGVPQFTAVMSAVEECTQRDVPVIADGGIKYSGDIAKAIASGADCVMVGSLLAGTDESPGETILYQGRAYKQYRGMGSLGAMSKGSSDRYFQSSQGDTRKYVPEGIEGRVPSRGPVDQVLYQLMGGLRSSMGYTGNSTIKEMKSECKFVRITNAGLSESHVHDVEITREAPNYRR

SEQ ID NO: 83796 - protein, 223 aa, Unknown
  Bacterial polypetide isolated from the Sargasso Sea
AMDTVTESRMAIAMAQNGGIGVIHRNMEIKQQINEIKKVKKHNLNVAAAIGTSKKELTRAKSLIDSGTSMLVIDTAHGHSKNVIDILNKIKKFSKNITICVGNIATSEAAKILYDSGADILKVGIGPGSICTTRMVAGIGVPQITAILNVKKAMRKKNIKIISDGGIKFSGDIIKAIAAGADAIMMGSIFAGTEESPGKKFKLKNKFYKLYRGMGSIGAMSSG

SEQ ID NO: 83797 - protein, 316 aa, Unknown
  Bacterial polypetide isolated from the Sargasso Sea
AIAKAGGVGVIHRNLDIKKQIAEIKKVKKQNLFVGAAVGAGMNEFSRAQAIIKEKVDLIVVDTAHGHTKKVEEIVKKIKKQKSKNTLLCAGNIATADAANFLAKLGVDIIKVGIGPGSICTTRLVAGIGVPQLSAILDVKKGLKYRNVKIIADGGIKFSGDIAKALSAGADAVMIGSLFAGTDESPGKIVKKNGKLFKNFRGMGSIGAMNKGSADRYFQKKQKDKSKYVPEGVEGYVKYKGPVKKIIFKLIGGLKSSMGYLGSKKVINLRNKPRFVKITKAGFYESMVHNIDEVKKMKNIKTLILFLITGIFLTTN

SEQ ID NO: 83798 - protein, 311 aa, Unknown
  Bacterial polypetide isolated from the Sargasso Sea
RLAITMPQLGGIGVLHKNFSIKEQASEVKKVKKFEAGMVVNPVTIKPDQSLGDAFKLMEKNKISGIPVVEGLKNKLVGILTNRDVRFANDLNQTVSALMTKNVITVKESVSKKEARKLLHQHRIEKLVVVDEDGFCVGLITVKDMEKSQNHPDACKDEQGRLRVAAATGVGKDGLSRAEALIDAEVDVLIVDTAHGHSKMVLDSVSKISKMSKQVALIGGNVATGDATKALIDAGANGVKVGIGPGSICTTRMVAGVGVPQLSAIMDCVEVANKFSVPIIADGGIKYSGDIAKAIAGGSSAVMVGSLLAGT

SEQ ID NO: 83799 - protein, 299 aa, Unknown
  Bacterial polypetide isolated from the Sargasso Sea
VIHRNMPIDKQASEVKKVHSFKVNVKKFQNAVINSNKQITVGAAIGVENNAYLRLLELLKVGVDIVFIDVAHAHTKITLQFIEKAKKVLKKTPLIVGNIATKKAASDLISAGVDAIKVGIGPGSICTTRVVTGVGIPQLSAVMDTFQVAKKFKIPVIADGGIKTSGDIAKAIAGGASACMIGSLFAGTEESPGKLLTIKGKKFKSYRGMGSVGAMQKGSFDRYSQEETKNAKKLVAEGVEGMVPYKGKIEDVAYQLVGGLKSSMGYTGHKTIKKMQGNCKFVFISKAGARESNVHDVIM

SEQ ID NO: 83800 - protein, 262 aa, Unknown
  Bacterial polypetide isolated from the Sargasso Sea
TTVGDEGYLRSDYLIDAGIDLLVIDTAHGHSDAVIEAVGRVKKRSNNVQVVAGNVATADACKALIDAGADAIKVGIGPGSICTTRMVAGVGVPQLTAILDCVEASGQTPVIADGGIKFSGDFAKAIAAGASCAMVGSMIAGTDESPGEVILYQGRSFKAYRGMGSLGAMARGSADRYFQKDAASDKLVPEGIEGQVPYKGPANAVIHQMVGGLRASMGYTGCQTITEMRNNCQFVKITGAGLKESHVHDVQITRESPNYRVI

SEQ ID NO: 83801 - protein, 255 aa, Unknown
  Bacterial polypetide isolated from the Sargasso Sea
DIEKARKYPNANKDEVGRLLVGAALGVSEDLLQRAEALIQAEVDLVVLDSAHGHSQGVLEGIRKLRSHFPELQIVGGNIATAEGADALIDAGVDAVKVGIGPGSICTTRMVAGIGMPQISAIDSVAEALRKTDVPIIADGGIKYSGDIVKALAAGAQSVMIGSLFAGTAETPGQVILYQGRRYKLYRGMGSLGAMKEGSKDRYFQTGVQEVQKLVPEGIEGRVPYKGPLAESIFQFTGGLRAGMGYTGCTSIEEL

SEQ ID NO: 83802 - protein, 236 aa, Unknown
  Bacterial polypetide isolated from the Sargasso Sea
HSKLVLDMVSKIKNRVNLEIIVGNIATTEAAISLIDSGASAVKVGIGPGSICTTRIVAGIGIPQLTAILDVCSIAKKKNIPVIADGGIKFSGDLAKAIAAGASVAMVGSLFAGTDETPGEVFLKQGLPYKYYRGMGSTPAMASGSADRYFQSDIRNNLKLVPEGIEGSVTYKGPVRNVINQLIGGLKASMGYTGNKNIKEMQENCEFIKITNAGLRESHVHDVNIIRQPSNYNQDK

SEQ ID NO: 83803 - protein, 280 aa, Unknown
  Bacterial polypetide isolated from the Sargasso Sea
VLDDNNNLSGLVTMKDIEKSAQHPNATKDSSGRLQVGAAIGTGEDTLHRAEALVEAGVDVFVIDSAHGHSLNVINTIKAIKNKFKDIDIIGGNIATAEAAIELEKAGVDAVKVGMGPGSICTTRIIAGIGVPQISAILEIKNALIGKDINIIADGGIRFSGDIAKAIAAGADSVMLGSLFAGTEEAPGKVELFQGRSFKTYRGMGSIGAMTERDDANRYLQEDIETDKLVPEGIEGRVPYKGLVINVINQLVGGVRQSMGYIGCKNIKDMQINSQFVEIT

SEQ ID NO: 83804 - protein, 232 aa, Unknown
  Bacterial polypetide isolated from the Sargasso Sea
GVDRDLLKRSRELISAGVDALVIDTAHAHSKSVAEALKKVKNNFNNIDVVVGNIATKEAANFLIDIGADGLKIGIGPGSICTTRIVAGVGYPQFSAVLEVAKSIKNKNIPIIADGGIRYTGDISKAIAAGADSVMLGSLLAGTEESPGETVIFNGRKFKTYRGMGSVEAMKEGSKSRYFQGSENDSKKLVPEGIVGRVPYKGEIHESIHQFVGGLKKGMGYCGAKSINELKS

SEQ ID NO: 83805 - protein, 285 aa, Unknown
  Bacterial polypetide isolated from the Sargasso Sea
RPHEIREALTFDDVLLEPSRSAVLPAETNVATRLTRSISLNIPLVSAAMDTVTEHRLAIAMAQAGGIGVIHKNMSIESQAAEISRVKKYESGMVVNPLTITPERTLGEALELMKVHQISGIPVVDGEGKPPHRLVGILTNRDVRFASDLNQKVWDLMTREVITIGESATQEDAKRLLHEHRIEKLVVVDGKQSCIGLITVKDIEKAKNHPLAAKDSAGRLLVAAATGAGPEGHERAEALIEAGADVVVVDTAHGHSKGVLGAVGAIRKMANEVQVIGGNVATADG

SEQ ID NO: 83806 - protein, 305 aa, Unknown
  Bacterial polypetide isolated from the Sargasso Sea
PAEVDLSTRLTTGISLNAPIVSAAMDTVTEAEMAIAMAQSGGIGVIHRNMPIEEQAVEVDKVKRFESGLVLEPVTVDPKMTVGELRSLKDQYGFSGFPVINGDGSIVGMVTNRDIRFVEDPNTEVSEVMTTDLITVPEHVDMEEAKRLLHQHRIEKLVVVNEGGGFSGLITVRDINRSRDNPLSCKDDMGRLRVVAATGTGEKGILRALAMFEAGADAVAVDTAHGHSHGVLDTVRTIREQAGADAQIIAGNVGTPEAAGALIDSGANAVKVGIGPGSICTTRIVTGVGVPQFTAVMSAVEVCAQ

SEQ ID NO: 83807 - protein, 198 aa, Unknown
  Bacterial polypetide isolated from the Sargasso Sea
GADAVKVGMGPGSICTTRIIAGIGVPQISAILDIKNALKKTDINIIADGGIRFSGDIAKAISAGADSVMLGSLFAGTEEAPGKVELFQGRSFKTYRGMGSIGAMTERDDANRYMQEDVDQSKLVPEGIEGRVPYKGLVINVINQLEGGLRQSMGYVGCKSVKEMQNDSQFVEITNAGMTESHVHDVMITKEAPNYQRS

SEQ ID NO: 83808 - protein, 250 aa, Unknown
  Bacterial polypetide isolated from the Sargasso Sea
MGSIKDSLTFDDVSLVPQESSVVPSETITKITLHKRLNLGIPLISSAMDTVTESKMAISIAKMGGIGVIHRNLSTDSQINEIKKVKRAKCLVGAAIGVNNNDVDRAKKLLEADIDLIVIDTAHGHTQKVSKMINKVKKIIKKIPLCAGNIATGKAAKFLENCGVDIVKVGIGPGSICTTRLVAGVGVPQLSAVLEVKKTLGKSKTKIISDGGIKFSGDLAKAIAAGADAVMIGSLFSGTTESPGKILKRK

SEQ ID NO: 83809 - protein, 215 aa, Unknown
  Bacterial polypetide isolated from the Sargasso Sea
MGPIKESLTFDDVMLMPRYSDVLPSEVSTTTKLQKNLKLKIPLMSSAMDTVTESKMAIEIGKLGGIGIIHRNLSIKKQIQEIKKVKSKKILVGAAVGASEQEMIRAKSILKENLDIIVVDTAHGHSKKVAEIVKMIKKIKPKKTSLCAGNIASPEAAIFLSKIGVDIIKVGIGPGSICTTRLVAGIGVPQLSAIIEIKKALKNKKISIIADGGIK

SEQ ID NO: 83810 - protein, 305 aa, Unknown
  Bacterial polypetide isolated from the Sargasso Sea
VLLSDAFKIKEKYNISGIPVVETGSKKLVGIITNRDIRFAKNMNQKVESLMTKENLITVQQNISMTNAKKLLHQHRIEKLLVVDKNYKCIGLITVKDIEKAQKFPNASKDKMGRLLVGAAVGVGNEQGLDRAQYLVKAGVDVIVIDTAHGHTKNVIDTLSKIKKTYPHLPVIVGNVATSEAAKDLIKGGADSIKVGIGPGSICTTRIIAGIGVPQLHAISETSKVAKKYKIPIISDGGIKFSGDIAKAIALGADVVMIGSLFAGTDESPGEIFLSNGRTYKSYRGMGSLSAMGRGSADRYFQEEV

SEQ ID NO: 83811 - protein, 311 aa, Unknown
  Bacterial polypetide isolated from the Sargasso Sea
MISSAMDTVTESKMAIAIGKLGGIGIIHRNLSIEKQVQEVKKVKRQKLSVGAAIGVNKNDLDRAKKLSKANVDLLVIDTAHGHTNKVLKIIKKVKKIIKKTPLCAGNIATGKAAKFLADSGVDIVKVGIGPGSICTTRLVAGVGVPQLSAVLEVKNALRNRKTKIISDGGIKFSGDLAKAIGAGADAVMIGSLFSGTLESPGKIFKVKGKLYKSFRGMGSAGAMAVGSADRYYQKKFKDLSKFVPEGVEGIVKFKGSVNKIIYNLVGGLRSSMGYLGAKTVKDLQKKGEFVKITKAGFYESMVHNVDQVVK

SEQ ID NO: 83812 - protein, 248 aa, Unknown
  Bacterial polypetide isolated from the Sargasso Sea
KRDLKSKFDLIVVDTAHGHTQKVGEIIKKIKKIKPKTVSLCAGNVATQEAAIFLIKLGVDIVKVGIGPGSICTTRLVAGIGVPQLSAILNVRNGIKNKKVSIIADGGIKFSGDIAKALAAGADAVMIGSLFAGTDEAPGKIIKRGGKLFKSFRGMGSIGAMNRGSADRYYQSKQKDKSKYVAEGVEGYVKYKGRVDKIFYQLIGGLKSSMGYLGAKKINILKQNPKFVKITKAGFYESMVHNIDEIKK

SEQ ID NO: 83813 - protein, 291 aa, Unknown
  Bacterial polypetide isolated from the Sargasso Sea
ESGVVRDPTTIRSTKTIDELMKLTNELSISGMPVVDDGKLMGIVTRRDFRYAEDLSALVSSIMTPREKLITVKEGFDQDDVKKLMYNNRIEKILVINEEDSLTGLVTMKDIDKSAEHPFATKDPRGQLQVGAALGTGGDTLERASALSDAGVDLFVIDSAHGHSKNVLETIKNIKNKFPEIDVMGGNVATPEGAEALIDAGVDSVKIGMGPGSICTTRIIAGIGVPQITAILSIKEKLKSNNIPLIADGGIRFSGDIAKAIAAGANAVMLGGIFAGTEEAPGELELFQGRS

SEQ ID NO: 83814 - protein, 192 aa, Unknown
  Bacterial polypetide isolated from the Sargasso Sea
MSNNVEKKLTFDDVLLVPRRSSVLPKEVDCATNLTRNIALNIPIMSAAMDTVTESDMAIALARQGGIGVIHKNLSIEDQALMVDKVKRYESGMIRNPITLDEEKTVRDAKQLMEQYSIGGLPVLSKGKLVGIITKRDIRFESDLNTLVKDRMTSKNLITVDSDTSNEDAKKILQKHRIERLLVVDKQNNLDG

SEQ ID NO: 83815 - protein, 254 aa, Unknown
  Bacterial polypetide isolated from the Sargasso Sea
LRLLHHHRIEKVLVVDDDFQLKGMITAKDFQKATDFPLASKDSNGALLVGAAVGVGESTDERVSALQAAGVDVIVVDTAHAHTESAIGQLRSIKSNYSDLEVIAGNIATGEAAIALAEAGADAVKVGIGPGSICTTRVVAGAGMPQVTAITEVTEALKKSDVCVISDGGIRYSGDIAKAIAAGANSIMLGSLFAGTEESPGEIELYQGRSFKSYRGMGSIGAMASQHGSKDRYFQSDVEESEKLVPEGIEGRVP

SEQ ID NO: 83816 - protein, 278 aa, Unknown
  Bacterial polypetide isolated from the Sargasso Sea
RDIRFVEDESTEISEVMTTDLVTVPEHVDLEDAKRLLHQHRIEKLVVVNPDGGFSGLITVRDINRSKDNPLSCKDERGRLRVVAATGTGDKGVLRALAMIEAGADAVAVDTAHGHSHGVLETVRLIRDQAGEKAQIIAGNVGTSEAASALIHSGANAIKVGIGPGSICTTRIVTGVGVPQFTAVMSAVEACSKMGVPVIADGGIKYSGDIAKAIASGADCVMVGSLLAGTDESPGETILYQGRSYKQYRGMGSIGAMTKGSSDRYFQSSQGDTRKYVP

SEQ ID NO: 83817 - protein, 200 aa, Unknown
  Bacterial polypetide isolated from the Sargasso Sea
EAAKFLVGLGVDVIKVGIGPGSICTTRLVAGIGVPQLSAILNVKKGIGKSKTRLIADGGIKFSGDIAKALAAGADAVMIGSLFAGTDEAPGKKIKKNGKLYKYFRGMGSIGAMNKGSADRYFQTKKKDSSKYVAEGVEGYIKYKGKVDKIIYNLVGGLKSSMGYMGAKKVIDLRKKPKFIKITKAGFYESMVHNIDVVKK

SEQ ID NO: 83818 - protein, 230 aa, Unknown
  Bacterial polypetide isolated from the Sargasso Sea
LKILKQIKKFSNKITICVGNIATGEAAKLLYNSGADILKVGIGPGSICTTRMVAGIGVPQITALLNVKKAINKKKVKIISDGGIKFSGDIIKAIAAGADAIMMGSIFAGTEESPGKKFKIKKKLYKLYRGMGSIGAMSSGSSERYFQKSYKDKTKFVPEGVESRVLFKGPVSKIIYQLQGGLRSSMGYIGAKKIDEVGKRSKFIKITKAGFYESMVHSVETIKSTTNYKL

SEQ ID NO: 83819 - protein, 301 aa, Unknown
  Bacterial polypetide isolated from the Sargasso Sea
MEHHKISGIPVVRRRTDKLAGIITNRDVRFATELAQPVSELMTKRVVTVQETVTSDEARQLLHRHRIEKLVVINKDQKCVGLITVKDIEKAQNFPHASKDEQGRLRTAAATGIGDEGLERAAALFDSEVDILVIDTAHGHSQNVLDSIKQIRKLSNYTQIIAGNVATAEGAKALLDAGTDAIKVGIGPGSICTTRMVAGVGVPQLTAVMDAVEVCKKANIPVISDGGIKYSGDLAKAIAAGADCAMLGSLFAGTDESPGEVFLHQGRSYKSYRGMGSMGAMARGSADRYFQEEVSDQQKFV

SEQ ID NO: 83820 - protein, 242 aa, Unknown
  Bacterial polypetide isolated from the Sargasso Sea
NLDIIVIDTAHGHTKKVADIIKKIKKLRPKNTAICAGNIATTEAAKFLVKLGVDIIKVGIGPGSICTTRLVAGIGVPQLSAILNVKKGIGKSKTTLIADGGIKFSGDIAKALAAGADAVMIGSLFAGTDQAPGKKIKKKGKLYKYFRGMGSIGAMNKGSADRYFQSKQKDTSKYVAEGVEGYIKYRGSVDKIIYNLIGGLKSSMGYLGAKKVTELRKNPKFVKITKAGFYESMVHNIDLVIK

SEQ ID NO: 83821 - protein, 259 aa, Unknown
  Bacterial polypetide isolated from the Sargasso Sea
METDISLSLTSKIKLRVPFLSSAMDTVTESRMAIAIAEAGGIGIIHRNLNIKEQTKEIIKVKKKKLFVGAAVGTNKDDIDRAKSLIANGCDLIVIDTAHGHSKKVLKILSKLKKLENSIPFCVGNIATAEAAKKLYNSGADIIKIGIGPGSICTTRMVAGIGVPQISAILEVKNALKKKKVKIISDGGIKFSGDIAKALAAGADAIMMGSIFAGTDESPGKKFKFKGKLYKQYRGMGSIGAMSSGSANRYFQKNFKDKS

SEQ ID NO: 83822 - protein, 149 aa, Unknown
  Bacterial polypetide isolated from the Sargasso Sea
ICTTRVVAGVGVPQLTAIMNVYKAARKSKIPIIADGGIRYSGDIAKALAAGADTVMLGGLLAGTDEAPGEVEMYEGRTYKSYRGMGSIAAMQKGSKDRYNQDSASSSKLVPEGIEGRVPYKGTMNTLLHQLIGGLKSSMGYVWCEIYLK

SEQ ID NO: 83823 - protein, 296 aa, Unknown
  Bacterial polypetide isolated from the Sargasso Sea
MVPQKSKILPNETVLKTRLTNSIELNIPILSAAMDTVTEEEMAIAMAREGGIGVIHKNCDIESQKSMVDKVKRSESGMILKPVTIRPERSINEAKKIMSEFRISGLPVVDDEKLVGIITNRDIRFQVDGELEVSACMTANGLVTVPLDTSLNDAEELLHKHRIEKLLVVDDSGMLAGLITVKDIKKKQQYPNACKDSNGRLRVSAAIGVSGDAYERAKELVNADVDIIVVDTAHGHSKGVLDAISKLKAQDSSLSIIAGNVATGYGAKALIDAGVDCVKVGIGAGASCTTRIVAGV

SEQ ID NO: 83824 - protein, 287 aa, Unknown
  Bacterial polypetide isolated from the Sargasso Sea
QKNKIEKLPIIDEKNKLVGLITFRDIQKITLKPSSNKDEFGRLRVAAAIGVGGENLERCKMLYKAGVDAIVIDTAHAHTKSVLKIIKDVKKTFPDLDVVAGNVATAEAAKFLAKAGVDGVKVGIGPGSICTTRIIAGVGYPQLSAIYNVSNALKGTDISIIADGGVKHTGDITKAIAAGADCVMLGSLLAGTLESPGETIIYEGRKFKTYRGMGSVEAMEKGSKERYFQSTIKDKNKLVPEGIVGRVPYKGSVVESMFQFVGGLKSGMGYCGSKNIKELKDNSKFVQ

SEQ ID NO: 83825 - protein, 265 aa, Unknown
  Bacterial polypetide isolated from the Sargasso Sea
AVGVGGDSGDRVAALIEKGVDVVVIDTAHGHSKGVLDAVARCKEKYPSQNIIAGNIATKEAARDLISAGADAIKVGMGPGTICTTRIIAGIGVPQITAIMDCVSVARESGVPVIADGGITQSGEITKAIAAGANVVMIGYLFAGTDEAPGETVIYQGRTFKVYRGMGSLGAMQRGSKDRYFQSEVEERKLVPEGIEGQVPYKGSLSGFIYQLVGGLRSGMGYCGTSTIDALRSDAKFVRATPAAARESHAHDVSITKEAPNYRLE

SEQ ID NO: 83826 - protein, 317 aa, Unknown
  Bacterial polypetide isolated from the Sargasso Sea
SVETIMTPKSELVTVKEDFELSEVKELLHRHRIEKILVVNDNFELRGLITLKDIRKSEDYPNASKDELGRLRAAAAVGPSNDAEERVSAIVDAGVDVLVVDTAHGHSQRVIDQVKSIKSRYPELPVVGGNIGTADAAKVLAKAGADAVKVGIGPGSICTTRIVTGVGVPQITAVANVAHALKGSDVCVISDGGVRYSGDISKVIAAGAHIVMVGSLLAGSEEAPGEVELYQGRSYKSYRGMGSLGAMSHSHGSGDRYFQDVESGADKLVPEGIEGRVPYKGPMSAIVSSLMGGVRSSMGYTGCKDIDEMRNNTKFCE

SEQ ID NO: 83827 - protein, 196 aa, Unknown
  Bacterial polypetide isolated from the Sargasso Sea
DAIKVGIGPGSICTTRIVAGVGVPQLSAIYECAKISKKFKIPLIADGGVRYSGDIAKAIAAGSDTVMLGGLLAGTDEAPGEVEMFEGRTYKSYRGMGSIGAMQSGSKDRYFQEHHSESKKLIPEGIEGRVPYKGTMKSILHQLTGGLKSSMGYLGCKNIKLMKTKTNFIKVSSSSKIESHTHDVAIVKEPPNYQSR

SEQ ID NO: 83828 - protein, 231 aa, Unknown
  Bacterial polypetide isolated from the Sargasso Sea
VLFTLNKVKKISKKIPVCVGNIATSEAAKTLYNSGADILKVGIGPGSICTTRMVAGIGVPQITAIINVKNSMKNKNIKIISDGGIKFSGDIIKAIAAGADAIMMGSIFAGTEESPGKKFKIKNKIFKLYRGMGSIGAMSSGSSERYFQKNYRDKSKFVPEGVESRVAYKGKVAKIIYQLQGGLRSSMGYIGAQNISDVIKKSKFIKITKAGFYESMVHSVETIKSSPNFKL

SEQ ID NO: 83829 - protein, 282 aa, Unknown
  Bacterial polypetide isolated from the Sargasso Sea
MEINKALTFDDVLLVPNYSQILPKHVNVETNLSDTLNLKIPLLSSAMDTVTESRMAIALASNGGMGVIHRNLNIKKQLNEVRIVKNKKFKVGAAIGVGLKEIERAEALIEANVDLLVIDTAHGHTKRVFDTLREINKIKKNKTSLCAGNIATAEAANFLIKGGADIIKIGIGPGSICTTRIVAGIGVPQLSAILNIKKKIKTKKVSFISDGGIKFSGDLAKAFSAGADAIMIGSLFAGTDQAPGKIIKKNKILYKKFRGMGSIGAMSQGSADRYNQKSNLKK

SEQ ID NO: 83830 - protein, 178 aa, Unknown
  Bacterial polypetide isolated from the Sargasso Sea
MSNNVEKKLTFDDVLLVPRRSSVLPKEVDCSTNLTKNITLNIPVMSAAMDTVTESEMAIALARQGGIGVIHKNLSIEDQALMVDKVKRYESGMIRNPITLDEEKTVRDAKQLMEQYSIGGLPVLSKGKLVGIITKRDIRFESDLNTLVKNRMTSKNLITVDSDTSNEDAKKILQKHRI

SEQ ID NO: 83831 - protein, 197 aa, Unknown
  Bacterial polypetide isolated from the Sargasso Sea
RDGREVRIGPGSICTTRIVAGVGVPQVTAISNVSEALKGTGVPVIADGGVRFSGDVSKALAAGANSVMMGSMFAGTEEAPGDVFLFQGRQYKSYRGMGSVGAMKDGAADRYFQDNSANIDKLVPEGIEGRVAYKGSVNAILFQLIGGVRASMGYCGCRTIAEMNDKAEFVQITGAGLRESHVHDVQITKEAPNYHVD

SEQ ID NO: 83832 - protein, 248 aa, Unknown
  Bacterial polypetide isolated from the Sargasso Sea
MQWLKRVVIGVIHKNLTIKQQAEKIRKVKRSESGMILDPVTLTKKSKVKDALKCMKEFSIGGIPIVDKSNSLVGILTNRDLRFESDMNKSVNDVMTKDNLVTGNPGITLKQAEKILQKNKIEKLPIIDEKNKLVGLITFRDIQKITLKPSSNKDEFGRLRVAAAIGVGGENLERCKMLYKAGVDAIVIDTAHAHTKSVLKIIKDVKKTFPDLDVVAGNVATAEAAKFLAKAGVDGVKVGIGPGSICTT

SEQ ID NO: 83833 - protein, 278 aa, Unknown
  Bacterial polypetide isolated from the Sargasso Sea
VIKKLLQENRIEKILLIDDSFKLTGLVTLKDINKSLDFPDAARDEEGRLLAGAAIGTKADTLDRCQALIDAGVDVLVADSAHGHSEGVLNQIKAVKSNFKDIQIIGGNVATGEGALALVKAGADAVKVGIGPGSICTTRVVTGVGVPQITAVAEVTEALKKKDIPVIADGGIRFSGDIAKAIAAGGHTVMLGSVLAGTEEAPGELELYQGRSYKSYRGMGSIGAMSGDQGSSDRYFQDSAEATEKLVPEGIEGRVPYKGWLQAVIHQMIGGLRQSMGY

SEQ ID NO: 83834 - protein, 308 aa, Unknown
  Bacterial polypetide isolated from the Sargasso Sea
QYSSILPSEASIETSWGSELKLKIPFLSSAMDTVTESKMAIAIAEQGGLGIIHRNLSINKQCNEVRKVKSKKLLVGAAVGTSKEDIIRANKLIDNGIDLIVIDTAHGHSKKVLLTLKKLKKIKSKVKICAGNIATAESARLLSNEGADILKVGIGPGSICTTRIVSGIGVPQISAVMDVKEGIKKNKKIKIISDGGIKFLGDAAKALAAGADAVMMGSVFAGTEESPGKKFKYKNKMYKSFRGMGSIGAMMDGSAGRYFQKNFKDKSKFVPEGVEGRVLYKGKVEKIIYQLKGGLKSSMGYIGAKKYY

SEQ ID NO: 83835 - protein, 248 aa, Unknown
  Bacterial polypetide isolated from the Sargasso Sea
AKKLIKANVDLLVIDTAHGHTNKVFKIIKKIKKVIKRVPLCAGNIATGKAAKFLADSGVDIVKVGIGPGSICTTRLVAGVGVPQLSAVIEVKNALRNRKTKIISDGGIKFSGDLAKAIGAGADAIMIGSLFSGTLESPGKIFKRKGKLYKSFRGMGSAGAMAVGSSDRYYQKKFKDLSKFVPEGVEGIVKFKGPVNKIIYNLVGGLRSSMGYLGAKTIKDLQKKGEFVKITKAGFYESMVHNVDQVVK

SEQ ID NO: 83836 - protein, 300 aa, Unknown
  Bacterial polypetide isolated from the Sargasso Sea
PSGVDTSIKLTESLKLKIPLLSSAMDTVTESRMAIALAKAGGLGVIHRNLDIKKQVLEIRKVKKQRLVVGAAVGAGLNEFKRAEAILKEKIDMIVVDTAHGHTKKVAEIIKFIKKKKDKKTSLCAGNIATTEAAKFLLNLGVDIIKVGIGPGSICTTRLVAGIGVPQLSAILNVRNGIKNKNVKIISDGGIKYSGDLAKAFAAGADAVMIGSLFAGTDETPGKLITKNGKLFKSFRGMGSVGAMNKGSADRYFQSKQKNKSKYVPEGVEGFAKYKGKVDNIIFKLIGGLRSSMGYLGSNK

SEQ ID NO: 83837 - protein, 232 aa, Unknown
  Bacterial polypetide isolated from the Sargasso Sea
MIRDRIFDGLTFDDILLVPGYAEIHHSEVSLKSKLTRKLECNIPLLSAAMDTVTEADTAICMAQEGGLGVIHKNLSIEEQANQVNRVKRSESGMITNPITIEPDQPISEALKLMERYRISGVPVIRGTELVGILTNRDLRFETNHEKPVSELMTGGRDKLVTVAPGIEMESAKRLLHQHRIEKLLVVNANYELQGLITIKDIEKARKYPNANKDEVGRLLVGAALGISEDLL

SEQ ID NO: 83838 - protein, 289 aa, Unknown
  Bacterial polypetide isolated from the Sargasso Sea
MTVKDIEKAKAYPLASKDDQGRLRVGAAVGTGADTGDRVGALVNAGVDVIIVDTAHGHSKGVIDRVRWVKQSFPDVQVIGGNIATGAAAKALVEAGADGVKVGIGPGSICTTRIVAGVGVPQISAVANVAAALAGTGVPLIADGGIRFSGDLSKAIVAGASAVMIGSMLAGTEEAPGEVELFQGRSYKAYRGMGSLGAMAQAQGSSDRYFQDSSAGAEKLVPEGIEGRVPYKGAMSAIVHQLMGGLRASMGYTGCATIEDMRTKPEFVRITGAGMAESHVHDVQITKEA

SEQ ID NO: 83839 - protein, 258 aa, Unknown
  Bacterial polypetide isolated from the Sargasso Sea
MGVNNDDLDRAKKLSKANVDLLVIDTAHGHTNKVLKIIKRIKKIIKRVPLCAGNIATGKAAKFLADSGVDIVKVGIGPGSICTTRIVAGVGVPQLSAVMEVKNALRNRKTKIISDGGIKFSGDIAKAIGAGADAIMIGSLFSGTLESPGKIFKRRGKLYKSFRGMGSAGAMAVGSADRYYQKKFKDLSKFVPEGVEGIVKFKGSVNKIIYNLVGGLRSSMGYLGAKTVKDLQKKGEFVKITKAGFYESMVHNVDQIVK

SEQ ID NO: 83840 - protein, 180 aa, Unknown
  Bacterial polypetide isolated from the Sargasso Sea
SGIGVPQITAVSEASRAAEEDDIPVIADGGIRYSGDIAKAICAGASSVMVGSLLAGTEEAPGEIELYQGRTYKSYRGMGSMGAMAQSHGSSDRYFQEVEGDGRKLVPEGIEGRVPFRGPTGPIIHQLMGGLRGAMGYTGSGDIDYLRKHPEFIKVSAAGMAESHVHDVAITKEAPNYPVS

SEQ ID NO: 83841 - protein, 308 aa, Unknown
  Bacterial polypetide isolated from the Sargasso Sea
RIEKLLVVDDSGMLAGLITVKDIKKKQQYPNACKDLNGRLRVSAAVGVAEDTFERAQELVRADVDVIVVDTAHGHSKGVLDTISKLKAQDSNLSIIAGNVATGYGAKALIDAGADCVKVGIGAGASCTTRIVAGVGVPQLTAIMDAVEITKKEDIPVIADGGLRYSGDIAKALASGADSIMLGSMLAGMDESPGETILYEGRQYKTFRGMGSLGAMEEGSGDRYFQEDTDNKKLVPEGIEGMVPFRGPVKNTIHQLTGGIRSSMGYCGCKTINEFGEKSEFIEITAAGVREGHPHEVRIVKEAPNYSP

SEQ ID NO: 83842 - protein, 248 aa, Unknown
  Bacterial polypetide isolated from the Sargasso Sea
MFVGAAVGTNEEDVDRAKSLIDNGCDLIVIDTAHGHSKKVLKILSKLKKIDNSIPFCVGNIATGEAAKRLYNSGADIIKIGIGPGSICTTRMVAGIGVPQISAILDVKNALKNKKIKIISDGGIKFSGDIAKALAAGADAIMMGSIFAGTDESPGKKFKFKGKFYKQYRGMGSIGAMSSGSANRYFQKNFKDKSKFVPEGVEGRVEYKGSVSKIIYQLKGGLRSSMGYIGAQNLGQITKNAKFIKITK

SEQ ID NO: 83843 - protein, 317 aa, Unknown
  Bacterial polypetide isolated from the Sargasso Sea
MDSDVSTIMTPFKKLVTVNEGFSQEDVMQLMYKNRIEKVLVLDENKNLSGLVTMKDIEKSAQHPNATKDDSGRLRVAAAIGTEQNTIERAEALFDAGVDVFVIDSAHGHSKNVINTIKTIKQSFREIEIIGGNIATADAAKELAKAGVSAVKVGMGPGSICTTRIIAGIGVPQITAILEIKQALKKNNVKVIADGGIRFSGDIAKAISAGADSVMLGSLFAGTEEAPGKVELFQGRSFKTYRGMGSIGAMTERNDANRYLQEDAESDKLVPEGIEGRVPYKGLVINVINQLEGGLRQSMGYVGCKNIKAMQLESKSL

SEQ ID NO: 83844 - protein, 231 aa, Unknown
  Bacterial polypetide isolated from the Sargasso Sea
DQEEVKKLMYQNRIEKVLVLDKAGSLSGLVTMKDIDKSAEFPLATKDNSGQLLVAAALGTGTDTLERAEALNEMGVDVFVVDSAHGHSKNVIETIKLLKDNFKDVQVIAGNVATPDGAVALDEAGADAIKIGMGPGSICTTRIIAGMGVPQITAILSIRDAMKNSPTPLIADGGIRFSGDLAKAIAAGASSVMLGSMLAGTEEAPGEIELYQGRSFKTYRGMGSLGAIQKE

SEQ ID NO: 83845 - protein, 292 aa, Unknown
  Bacterial polypetide isolated from the Sargasso Sea
VKKFETGMVIDPVTIAPEATLSDALDLMKENQISGVPVVDINDKLLGILTNRDVRFATNMSQKISELMTSENLITVKEGISSDDAQKLLHAHRIEKLIVVDGNRKCIGLITVKDIEKSQLNPHASKDAKGRLIVGSAIGVGIEAINRAERLVDAGVDVLVIDTAHGHSEKVISTLEEIKSLFSIDVVVGNVATKEATKELIDKGADCIKVGIGPGSICTTRVVAGIGVPQFSAILDCAEIAVKRNIPVIADGGIKYSGDIAKALGAGANAVMIGSLFAGTDESPGEVYLFKG

SEQ ID NO: 83846 - protein, 314 aa, Unknown
  Bacterial polypetide isolated from the Sargasso Sea
MIGIITNRDIRFETDGNLSVKDRMTSENLVTVSEGTTLEDAKKVLQQHRIEKLLVVNDEGNLAGLITVKDIQKKEDFPNACKDENGRLRVGAAIGVNNDSIDRAKALLDADVDVIVIDTAHGHSSGVLDSVKNIKKAVGDLDIIAGNVATSEGTKALIDSGVDCVKVGIGAGASCTTRVVAGVGMPQLSGIMGCVDEAQKHEIPIIADGGIRYSGDLAKAIAAGAESVMLGSIFAGMDESPGEFILYEGRQYKSYRGMGSLGAMKKGSGDRYFQEDMESTKLVPEGIEGMVPYRGSVHMTIHQLMGGLRSSMGY

SEQ ID NO: 83847 - protein, 261 aa, Unknown
  Bacterial polypetide isolated from the Sargasso Sea
AGNEERVDALVKAGVDVLLIDSSHGHSEGVLQRIRETRAKYPDLQIIGGNVATAEGALALVEAGVNAVKVGIGPGSICTTRIVTGVGVPQITAVSDAAEAVKGLGIPVIADGGVRFSGDLAKALAAGASCIMAGSMFAGTDEAPGETELYQGRAYKSYRGMGSLGAMSQGSSDRYFQSDNAADKLVPEGIEGRVPYKGKLKEIIHQHMGGLRSCMGLTGCATIQELNEKAQFVKVTSAGMGESHVHDVTITKEAPNYRSGA

SEQ ID NO: 83848 - protein, 267 aa, Unknown
  Bacterial polypetide isolated from the Sargasso Sea
KARKYPNANKDEVGRLLVGAALGVSEDLLQRAEALIQAEVDLVVLDSAHGHSRGVLEGIRKLRSHFPELQIVGGNIATAEGADALIDAGVDAVKVGIGPGSICTTRMVAGIGMPQISAIDSVAEALSKTDVPIIADGGIKYSGDIVKALAAGAHSVMIGSLFAGTAETPGQVILYQGRRYKLYRGMGSLGAMKEGSKDRYFQTGVQEVQKLVPEGIEGRVPYKGPLAESIFQFTGGLRAGMGYTGCASIDELQNKASYVRISNAGLR

SEQ ID NO: 83849 - protein, 262 aa, Unknown
  Bacterial polypetide isolated from the Sargasso Sea
MLRIVDQALTFDDVLLVPDHSDILPKDVDLKTRLTQNLDLNIPLLSAAMDTVTESRMGIALSELGGIGIIHKNLSIEAQAAEVRKVKKYESGIVRDPITIRSDNEVGELVQLTKELNISGMPVVDNGALVGIVTSRDFRYQENLSAKVSDIMTPKDRLVTAKEGESPDVIKKLLQENRIEKILLIDDSSKLTGLVTLKDINKSLDFPDAARDEEGRLLAGAAIGTKADTLDRCQALIDAGVDVLVADSAHGHSERGLKSNQG

SEQ ID NO: 83850 - protein, 228 aa, Unknown
  Bacterial polypetide isolated from the Sargasso Sea
MLRIEDKALTFDDVLLVPAHSEVLPNEVDLKTKLTKKLNLNIPLVSAAMDTVTESRMGIALSELGGIGIIHKNLSIESQASEVRKVKKYESGIVRDPITIRSDKEVGELIQLTNELNISGMPVVDDGDLVGIVTSRDFRNEQNFSAKVSEIMTPKDKLVTAKEGEDLDVIKKLLQDNRIEKILLVDGSFGLTGLVTLKDINKSLDFPDAARDGEGRLLVGAAIGTKSD

SEQ ID NO: 83851 - protein, 254 aa, Unknown
  Bacterial polypetide isolated from the Sargasso Sea
MDPIKEALTFDDVTLAPNYSEILPTDVNTSIILSKNITLKIPIISSAMDTVTEAKMCIAIGKSGGIGVLHRNLSVKKQILEIRKVKSKGFKVGAAVGASYKEQARARRILEEKVDLIVVDTAHAHTKKVAEIIKVIKKNKSHKTTLCAGNIATSEAAKYLIKLGVDIIKVGIGPGSICTTRLVAGIGVPQLTAITNVKKGIGKSKTKLIADGGIKFSGDIAKALAAGADAVMIGSLFAGTDQAPGKIIKRNGKL

SEQ ID NO: 83852 - protein, 258 aa, Unknown
  Bacterial polypetide isolated from the Sargasso Sea
IPIISSAMDTVTESDMAIAIARAGGIGVIHRNLEINKQISEIRKVKSKNLKVGAAVGAGEQEIKRAKAILKEKIDLIVVDTAHGHTKKVAEIIKKIKKFKSNKTALCAGNIATTEAAKFLSKLGVDVIKVGIGPGSICTTRLVAGIGVPQLSAILAVKKGISKKNITLIADGGIKFSGDISKALAAGADAVMIGSLFAGSKESPGKIIKKNGKYFKSFRGMGSIGAMNKGSADRYFQKKQKDSSKYVPEGVEGLVKYK

SEQ ID NO: 83853 - protein, 149 aa, Unknown
  Bacterial polypetide isolated from the Sargasso Sea
GGIKFSGDFAKAIAAGASCAMVGSMIAGTDESPGEVILYQGRSFKAYRGMGSLGAMARGSADRYFQKDAASDKLVPEGIEGQVPYKGPANAVIHQMVGGLRASMGYTGCQTIAEMRNDCQFVKITGAGLKESHVHDVQITRESPNYRII

SEQ ID NO: 83854 - protein, 266 aa, Unknown
  Bacterial polypetide isolated from the Sargasso Sea
ATGTGEKGILRALAMFESGADAVAVDTAHGHSHGVLDTVRTIREQAGADAQIIAGNVGTPEAAGALIDSGANAVKVGIGPGSICTTRIVTGVGVPQFTAVMSAVEACAERGVPVIADGGIKYSGDIAKAIASGADCVMVGSLLAGTDESPGETILYQGRAYKQYRGMGSLGAMSKGSSDRYFQSSQGDTRKYVPEGIEGRVPSRGPVDQVLYQLMGGLRSSMGYTGNSTIKEMKSECKFVRITNAGLSESHVHDVEITREAPNYRR

SEQ ID NO: 83855 - protein, 250 aa, Unknown
  Bacterial polypetide isolated from the Sargasso Sea
VDVDVIVIDTAHGHSRGVLGSIDKIKNSHPDISLIAGNVATGDGTQAMIDAGVDCVKVGIGAGASCTTRVIAGVGVPQLTAIMDSVDVARKNNIPVIADGGLRYSGDLAKAIAAGAESVMLGSLLAGMDESPGETILYEGRQYKSYRGMGSMGAMEKGSGDRYFQEGAEATKLVPEGIEGMVPYRGPVRNTIHQLIGGIRSSMGYCGCSSIEEFGLNSNLIQVTSAALKENHPHEVRIVKEAPNYQVSEG

SEQ ID NO: 83856 - protein, 239 aa, Unknown
  Bacterial polypetide isolated from the Sargasso Sea
SKDGNGALLVGAAVGVGDGSEERVEALKTAGVDVIVVDTAHAHTEGVINQVKSIKKMHSDLEVIAGNIATGEAAKALADAGADAVKVGIGPGSICTTRVVAGAGMPQITAISDVANQLKGTDTCIISDGGIRYSGDIAKAIAAGANSIMLGSLFAGTEESPGEIELYQGRSFKSYRGMGSIGAMAQQHGSKDRYFQSDVEEPEKLVPEGIEGRVPYKGKLSKIIEQLVGGLRQSMGYTG

SEQ ID NO: 83857 - protein, 300 aa, Unknown
  Bacterial polypetide isolated from the Sargasso Sea
RCVGLITVKDMEKESQNPNACKDEKGQLRVAAATGTGDNGLDRAKVLSETGVDVIVVDTAHGHSESVIKSVKEIKNFKNYTQVIAGNIVTPEGAKALIDAGADCIKVGIGPGTICTTRMVAGVGMPQLSAILEVAKICREENIPLIADGGIKYSGDIAKAVAAGAESVMIGSLFAGTDESPGEVFLYQGRSYKSYRGMGSIGAMARGSADRYFQAEVSNSLKLVPEGVEGRVPYKGPIKTILHQLVGGLKSSMGYTGCPDINAMRNKAKFRRITGAGLRESHVHDITITREAPNYGKNIP

SEQ ID NO: 83858 - protein, 296 aa, Unknown
  Bacterial polypetide isolated from the Sargasso Sea
DDVTLAPNYSAILPSEVKTSINLTESLKIKIPLLSSAMDTVTESSMGIAIGRAGGLGIIHRNLNIEEQIKEIRKVKSKKILVGAAVGASEKEFKRAEKILKENLDIVVIDTAHGHTKKVGEIIKKIKKIRPKKTAICAGNIATAEAAKFLVGLGVDIIKVGIGPGSICTTRLVAGIGVPQLSAILNVKKGIGKSKTRLIADGGIKFSGDIAKALAAGADAVMIGSLFAGTDEAPGKKIKKNGKLYKYFRGMGSIGAMNKGSADRYFQTKQKDSSKYVAEGVEGYIKYKGKVDKIIY

SEQ ID NO: 83859 - protein, 286 aa, Unknown
  Bacterial polypetide isolated from the Sargasso Sea
MEIREALTFDDVPLIPAKSSVLPKDTEINSKLTKIISLKTPLLSSAMDTVTESKMAIAMAQLGGVGVIHRNLDISSQCEEVKKVKRFESGMVINPVTIKDDTNLSHALNIMKNYNISGIPVVSNNDNTLVGIITNRDVRFATDKNQPVNELMTKHPLILAKDGVNMEEAKKLLHKNRIEKLIITDKDDKCIGLITVKDILKSQIFPNASKDEKGRLIVAAATTVGRIGLERSKALIDSDVDVLVVDTAHGHSTRVLDCVEELKKISNDIQIVAGNVATADAAADLI

SEQ ID NO: 83860 - protein, 242 aa, Unknown
  Bacterial polypetide isolated from the Sargasso Sea
AKSLIANGCDLIVIDTAHGHSKKVLKILSKLKKIDYSIPLCVGNIATGEAAKKLYNSGADIIKIGIGPGSICTTRMVAGIGVPQISAILEVKNALKNKKIKIISDGGIKFSGDIAKALAAGADAIMMGSIFAGTDESPGKKFRYKGKIYKHYRGMGSIGAMSSGSANRYFQKNFKDKSKFVPEGVEGRVEYKGSLSKIIYQLKGGLRSSMGYIGAKNLNQITKNAKFIKITKAGFYESMVHS

SEQ ID NO: 83861 - protein, 309 aa, Unknown
  Bacterial polypetide isolated from the Sargasso Sea
FASGIISDPVTVSPFITIREVLDITKFNYISGVPVVDNGITVGIVTNRDLRFETNLDGLVSSVMTPKEKLVTVKEGADEEEVLGLLHQHRIEKVLVVNDSFELKGMVTAKDFQKATDFPLASKDGNGALLVGAAVGVGDGSEERVEALKSAGVDVIVVDTAHAHTEGVINQVKSIKKMHSDLEVIAGNIATGEAAKALVEAGADAVKVGIGPGSICTTRVVAGAGMPQVTAIADVATELKGTDTCIIADGGIRYSGDIAKAIAAGADSIMLGSLFAGTEESPGEIELYQGRSFKSYRGMGSLGAMAQQH

SEQ ID NO: 83862 - protein, 261 aa, Unknown
  Bacterial polypetide isolated from the Sargasso Sea
IKIPLLSSAMDTVTESSMGIAMGMSGGLGIIHRNLNIEEQIKEIRKVKSKKILVGAAVGASEKELNRAEKILKENLDIIVIDTAHGHTKKVGDIIKKIKKIRPKKTAICAGNIATAEAAKFLVGLGVDIIKVGIGPGSICTTRLVAGIGVPQLSAILDVKRGIGKSKTRLIADGGIKFSGDIAKALAAGADAVMIGSLFAGTDEAPGKKIKKNGKLYKYFRGMGSIGAMNKGSADRYFQTKQKDSSKYVAEGVEGYIKYKR

SEQ ID NO: 83863 - protein, 279 aa, Unknown
  Bacterial polypetide isolated from the Sargasso Sea
FRDINKHSEKPVSNKDKLGRLIVAAAIGTDSDYKKRAKKLVESGVDAIVVDTAHAHSSRVGDVLKDLKDTFSDTDIVVGNIATADAAKYLMENGADAIKVGIGPGSICTTRVVAGVGYPQLSAIINISEVLKNSSVPLIADGGVKYTGDISKAIAAGADSVMLGSLLAGTEESPGETVIYEGRKFKTYRGMGSVEAMQKGSKDRYFQSDESDNKKLVPEGIVGRVPYKGQLNESIHQFVGGLRSGMGYCGSKDIKSLKNSSKFVKITGSGIRESHPHNV

SEQ ID NO: 83864 - protein, 267 aa, Unknown
  Bacterial polypetide isolated from the Sargasso Sea
LGIVTNRDIRFAENDNISVRTVMTKRNLAIVGEPFSVVEARKLMKARRIEKLLVVNQSNELLGLITLKDLEQSVLNPNASKDELGRLRVAAASTVGAVGLERSLSLIDAGADLIVIDTAHGHSDAVLRAVDDIKKRSSQVQVLAGNVATASATQALIDKGADSIKVGIGPGSICTTRIVAGVGVPQLTAIMDCVEIASKYNIPVIADGGIKYSGDFAKSIAAGAACAMIGSMLAGTDEAPGETIYYQGRSYKSYRGMGSEGAMARGS

SEQ ID NO: 83865 - protein, 222 aa, Unknown
  Bacterial polypetide isolated from the Sargasso Sea
MKVREAITFDDVLLEPSESAVLPSETILKTKITKNIDLNVPLASAAMDTVTESSMAIAMAQAGGIGVIHRNLEIEQQIKEVNKVKKYESGMVVNPLTISPDSTLEDALALMKENNISGVPVTDTKTNKLEGILTNRDVRFASNKNQKVSELMTKNGLITVKDNVSENEAKEILHKHRIEKLLVVDNEYRCIGLITVKDIEKSNLHPDATKDEKGRLRVAAAT

SEQ ID NO: 83866 - protein, 312 aa, Unknown
  Bacterial polypetide isolated from the Sargasso Sea
RMTMEKLITVPKGTTLDQAKDELQKHRIEKLLVVNDDDSLAGLITVKDIQKKEDYPNACKDSNGRLRVGAAIGNSSDAIERAKALRGVNVDVIIIDTAHGHSSGVLNLVKNIKKEINEVQLIAGNVATSEGVKALIEAGVDCVKVGIGAGASCTTRVVAGVGMPQLTSIMNAVDEAKKHEIPIIADGGIRFSGDLAKAIAAGSDVVMLGSILAGMDESPGELILFEGRQYKSYRGMGSLGAMQDGSGDRYFQEGEEAKKLVPEGIEGMVPYRGSVKNTIHQLMGGLKASMGYCGSGSILEFHNKSEFIQTTT

SEQ ID NO: 83867 - protein, 201 aa, Unknown
  Bacterial polypetide isolated from the Sargasso Sea
MEAIKEALTFDDVLLLPRFSNILPSETDISLNLTKNIKLKTPFLSSAMDTVTESSMAIAMAKSGGIGIIHRNLDIKKQSKEVEKVKRKKLFVGAAIGTNADDFKRAKLLVDSGVDLIVIDTAHGHSEKVLKTLSKVKKNNKIPICVGNIATAEAAKRLYNSGAEVIKVGIGPGSICTTRMVAGIGVPQISAIMEVHDALKG

SEQ ID NO: 83868 - protein, 257 aa, Unknown
  Bacterial polypetide isolated from the Sargasso Sea
RAAQLASVDVDVIVIDTAHGHSRGVLDSIDKIKNSHPDISLIAGNVATGDGTQAMIDAGVDCVKVGIGAGASCTTRVIAGVGVPQLTAIMDSVDVARKNNIPVIADGGLRYSGDLAKAIAAGAESVMLGSLLAGMDESPGETILYEGRQYKSYRGMGSMGAMEKGSGDRYFQEGAEATKLVPEGIEGMVPYRGPVRNTIHQLIGGIRSSMGYCGCSSIEEFGLNSNLIQVTSAALKENHPHEVRIVKEAPNYQVSEG

SEQ ID NO: 83869 - protein, 293 aa, Unknown
  Bacterial polypetide isolated from the Sargasso Sea
TRLTNDIELNIPILSAAMDTVTESEMAIALARTGGIGVIHKNLSIDDQASMVDRVKRSESGMILNPIKVDFGSTIKNAKKIMQEYKISGLPVVKDDRLVGIITNRDIRFETNDMLMVSDRMTSENLVTVPIGTSLEKAKDILQEHRIEKLLVVDGDHNLTGLITVKDIQKNEDYPNACKDSNGRLRAAAAIGVSGDAFERANELARVDIDAIIIDTAHGHSKGVLDTISKIKSDNKQISVIAGNVATGEGAKALIKAGVDCVKVGIGAGASCTTRVIAGVGVPQINRKLWMLL

SEQ ID NO: 83870 - protein, 240 aa, Unknown
  Bacterial polypetide isolated from the Sargasso Sea
NLIVVDTAHGHTKKVADIIKKIKKIKQKKTALCAGNIATPEAARFLIKLGVDIIKVGIGPGSICTTRLVAGIGVPQLTAILNVKKGLGKRKVSIIADGGIKFSGDIAKALSAGADAVMIGSLLAGTDEAPGKIIKKDGKLFKSFRGMGSIGAMNKGSADRYFQKKQSDSSKYVPEGVEGLIKYKGTVSKIVYKLVGGLRSSMGYLGCKQIKNLKNKPKFVKITKAGFYESMVHNIDKVIR

SEQ ID NO: 83871 - protein, 211 aa, Unknown
  Bacterial polypetide isolated from the Sargasso Sea
AIVNEPVSNKKARSILSERRIEKLLIVNKQNELIGLMTVKDLENSVLNPLATKDSLGRLRVGAASTVGQKGLQRSTALVEAGADLIVIDTAHGHSSHVLKAVEEFKTKFPDVSIIAGNVATSEATAALFKVGADAVKVGIGPGSICTTRIVAGVGVPQFTALLDCAEEADKHDKVIIADGGIKYSGDFAKAIAAGASCVMVGSLLAGTDEA

SEQ ID NO: 83872 - protein, 255 aa, Unknown
  Bacterial polypetide isolated from the Sargasso Sea
KILPNETVLKTRLTNSIELNIPILSAAMDTVTEEEMAIAMAREGGIGVIHKNCDIESQKSMVDKVKRSESGMILKPVTIRPERSINEAKKIMSEFRISGLPVVDDEKLVGIITNRDIRFQVDGELEVSACMTANDLVTVPLDTSLNDAEELLHKHRIEKLLVVDDSGMLAGLITVKDIKKKQQYPNACKDSNGRLRVSAAIGVSGDTYERAQELVKADVDIIVVDTAHGHSKGVLDTISKLKAQNSSLSIIAGNV

SEQ ID NO: 83873 - protein, 202 aa, Unknown
  Bacterial polypetide isolated from the Sargasso Sea
TADAAKFLIKLGVDVIKVGIGPGSICTTRLVAGIGVPQLSAILNVRNGIKNKKVSIIADGGIKFSGDIAKALAAGADAVMIGSLFAGTDEAPGKVTKRGGKWFKSFRGMGSIGAMNRGSADRYYQSKQKDKSKYVPEGVEGFVKYKGKVDKIFYQLIGGLKSSMGYLGAKKIKILSQNPKFVKITKAGFYESMVHNIDEIKK

SEQ ID NO: 83874 - protein, 290 aa, Unknown
  Bacterial polypetide isolated from the Sargasso Sea
GGIGVIHRNLSADAQVSEIKKVKKAKFLVGAAIGVNNNDLDRAKKLIEANVDMIVIDTAHGHTQKVSKMIYKVKKIIKKIPLCAGNIATGKAAKFLASCGVDIVKVGIGPGSICTTRLVAGVGVPQLSAILDVKKALGKSKTKIISDGGIKFSGDLAKAIAAGADAVMIGSLFSGTTESPGKILKRKGKLYKTFRGMGSAGAMSVGSADRYYQKKFKDISKFVPEGVEGIVKFKGPVNKIIYNLTGGLRSSMGYLGAKTINDLQKRGEFVKISKAGFYESMVHNVDQVIK

SEQ ID NO: 83875 - protein, 261 aa, Unknown
  Bacterial polypetide isolated from the Sargasso Sea
KDRLVTAKEGESPDVIKKLLQENRIEKILLIDDSFKLTGLVTLKDINKSLDFPDAARDEEGRLLAGAAIGTKADTLDRCQALIDAGVDVLVADSAHGHSEGVLNQIKAVKSNFKDIQIIGGNVATGEGALALVKAGADAVKVGIGPGSICTTRIVTGVGVPQITAVAEVTEALKKKDIPVIADGGIRFSGDIAKAIAAGGHTVMLGSVLAGTEEAPGELELFQGRSYKSYRGMGSIGAMSGDQGSSDRYFQDSAEATEKLV

SEQ ID NO: 83876 - protein, 203 aa, Unknown
  Bacterial polypetide isolated from the Sargasso Sea
KRLYNSGADIIKVGIGPGSICTTRMVAGIGVPQISAIMDVKKALNKKKIKIISDGGIKFSGDIAKALAAGADAIMMGSIFAGTEESPGNKFKFKKKIYKQYRGMGSIGAMSAGSANRYFQKNFKDKSKFVPEGVEGRVEYKGKVSKIIYQLQGGLRSSMGYIGAKNLKEINKKAKFVKITKAGFYESMVHSVEMTQKTINFKL

SEQ ID NO: 83877 - protein, 266 aa, Unknown
  Bacterial polypetide isolated from the Sargasso Sea
ALAMMKGHNISGVPVVEGVGVGPHRLVGILTNRDVRFASDMDQNVGDLMTREVVTVCNGATQDDAKRLLHENRIEKLVVVDAKGRCTGLITVKDMEKAKNHPMASKDGAGRLLVAAATGSGSDGQARAEALIDAGVDVIIVDTAHGHSEGVLNAVSAVRKMANAVQVIGGNVATADGAKALIDAGADAVKVGIGPGSICTTRMVAGVGVPQLTAIMDVAEVCRREGVPVIADGGIKYSGDLAKAIAAGGDVAMIGSLLAGTDETLG

SEQ ID NO: 83878 - protein, 283 aa, Unknown
  Bacterial polypetide isolated from the Sargasso Sea
MDPIKEALTYDDVLLTPKYSEILPSETITETKLSNNLNLKIPIISSAMDTVTESSMAIEIAKLGGIGVIHRNLNIKKQILEIRKVKSKNLKVGAAVGAGPFEIIRAEALLNEKIDLIVVDTAHGHTKKVAEIIKKIKILKSKKTTLCAGNIATAESAKFLAKLGVDAIKVGIGPGSICTTRLVAGIGVPQLSAIIDVRRGLGKKNIKLIADGGIKFSGDISKALAAGADAVMIGSLFAGSSESPGKKIKKNGKYFKSFRGMGSIGAMNKGSADRYFSKKQKDI

SEQ ID NO: 83879 - protein, 264 aa, Unknown
  Bacterial polypetide isolated from the Sargasso Sea
NIQRFYLRKLIQKYNIKKYNLKIPLLSSAMDTVTESKMAISIARAGGVGIIHRNLNIKKQIKEIKKVKSKNLIVGAAVGAGIDEIKRAEAILKEGVDLIVVDTAHGHTKKVAEIIKKIKRKKNNNTAICAGNIATSDAAKFLIRLGVDIIKVGIGPGSICTTRLVAGIGVPQLSAIINVKSGVKNKNVKIISDGGIKFSGDIAKALAAGADAVMIGSLFAGTIESPGKLIKKKGTFYKKFRGMGSVGAMNKGSADRYFQKKQKD

SEQ ID NO: 83880 - protein, 259 aa, Unknown
  Bacterial polypetide isolated from the Sargasso Sea
MKVKKKDYIVGAAIGTSNEDLKRAKMLIDNGVDLLVIDTAHGHTQRVINTLKKLRIKNYKVPICVGNIATGEAAIKLYNEGADILKVGIGPGSICTTRMVAGIGVPQLSAVLEVKKSVKNKKIKIISDGGIKFSGDIIKALAAGADAIMMGSIFAGADESPGKKFKYKNKYFKHYRGMGSIGAMSSGSSQRYFQKNFKDKSKFIAEGVEGRVEYKGYVKDIIYQLQGGLRSSMGYIGAKKISEISKKAKFIKITKARFY

SEQ ID NO: 83881 - protein, 215 aa, Unknown
  Bacterial polypetide isolated from the Sargasso Sea
ICTGNIATGEAAKRLFNAGTDIIKVGIGPGSICTTRMVAGIGVPQITAIMDVSKALKGKKIKIISDGGIKFSGDIAKALAAGADAIMMGSIFAGTDESPGKKYKIKNKFYKKYRGMGSIGAMSAGSSDRYFQKNFKDRSKFVPEGVDGRVVYKGKVSKIIYQLKGGLRSSMGYIGAKNIKDIKKNAKFIKITKAGFYESMVHSVEMIEPTLNYKL

SEQ ID NO: 83882 - protein, 249 aa, Unknown
  Bacterial polypetide isolated from the Sargasso Sea
MHIRDALTFDDVLLEPSSSSVIPSSVTTSTRLTKEITLGIPLLSAAMDTVTESRLAIAMAQLGGLGVIHKNMDIEKQAAEVKAVKKFEAGMVVNPVTIFPDETLADALELMSHHKISGIPVVRRKSGKLAGILTNRDVRFATNKLQPVSELMTKKVITVAEGVTPSDAQRLLHLHRIEKLVVTDSEQKCVGLITVKDMEKADNHPDACKDSQGRLRSAAATGVGDEGVERARALFDAEVDVIVVDTAHG

SEQ ID NO: 83883 - protein, 199 aa, Unknown
  Bacterial polypetide isolated from the Sargasso Sea
GADGVKVGIGPGSICTTRVVAGVGVPQITAISDTAAALREFAIPVIADGGIRFSGDIAKAIAAGANAVMVGGLLAGTEEAPGEIELFQGRSYKSYRGMGSLGAMQEGSKDRYFQEGQSDPGKLVPEGIEGRVPFKGPMSQIIHQLTGGLRASMGYTGCATIAEMRSHCRFVQITHSGYTESHVHDVTVVKEAPNYQRGS

SEQ ID NO: 83884 - protein, 303 aa, Unknown
  Bacterial polypetide isolated from the Sargasso Sea
SLAIALAQEGGIGFIHKNMKPEEQAKHVLEVKKYESGVVSDPVTVTKDATIGDVIALSKSKGYSGFPVTDEENNLIGIVTGRDLRFEKRLELPISNVMTGKDDLVTVKEGASSDVVLDLMHEHRIEKILVVDDAFKLTGLITVKDFQKAENKPNACKDSLGRLRVGAAVSVGPGTDERIKLLVDAGVDVLLIDTSHGHSQGVIDRVKKVRQDYPDVQIIAGNVATREGAKALADAGVDAVKVGIGPGSICTTRIVTGCGMPQITAVADAVEALEGTGIPVIADGGISFSGDIAKALAAGASCV

SEQ ID NO: 83885 - protein, 209 aa, Unknown
  Bacterial polypetide isolated from the Sargasso Sea
LCAGNIATTKAAKFLIKLGVDIIKVGIGPGSICTTRLVAGIGVPQLSAILNVKKGLGKNKTIIIADGGIKFSGDIAKALSAGADAVMIGSLFAGTDEAPGKIIKKDGAFFKSFRGMGSIGAMNKGSADRYFQKKQSDSSKYVPEGVEGFIKYKGPVSKIVYKLVGGLRSSMGYLGCKQIKNLKNKPEFVKITKAGFYESMVHNIDKVIR

SEQ ID NO: 83886 - protein, 285 aa, Unknown
  Bacterial polypetide isolated from the Sargasso Sea
AERKPNACKDELGRLRVGAAVGAGAGNEERVDALVKAGVDVLLIDSSHGHSEGVLQRIRETRAKYPDLQIIGGNVATAEGALALVEAGVNAVKVGIGPGSICTTRIVTGVGVPQITAVSDAAEAVKGLGIPVIADGGVRFSGDLAKALAAGASCIMAGSMFAGTDEAPGETELYQGRAYKSYRGMGSLGAMSQGSSDRYFQSDNAADKLVPEGIEGRVPYKGKLKEIIHQHMGGLRSCMGLTGCATIQELNEKAQFVKVTSAGMGESHVHDVTITKEAPNYRSGA

SEQ ID NO: 83887 - protein, 265 aa, Unknown
  Bacterial polypetide isolated from the Sargasso Sea
VSEQAEQVSLVKRFESGIVYKPIALKPHETVEKAKELGRKYNVTGFPVVDDLQKVLGIVTNRDIRFVENIKTPVREIMTTKDLAIVMQPINTKDAKKIMAQRRIEKLLVIDKDRKLSGLLTIRDIEQSVLNPHACKDSLGRLRCAAASTVGDEGFIRSMALIEAEADILVIDTAHGHSQDVIEAVKRIKRDFMDFPVVAGNVATKEATKALIDAGADGIKVGIGPGSICTTRIIAGVGVPQLTAIINCVEEANKHDIPIIADGGI

SEQ ID NO: 83888 - protein, 232 aa, Unknown
  Bacterial polypetide isolated from the Sargasso Sea
DRVRWVKQNFPEVQVIGGNIATGAAAKALAEAGADAVKVGIGPGSICTTRIVAGVGVPQISAIANVAAALEGTGVPLIADGGIRFSGDLSKAIVAGASCVMMGSMFAGTEEAPGEIELFQGRSYKAYRGMGSLGAMSQAQGSSDRYFQDSSAGAEKLVPEGIEGRVPYKGTLSAIIHQLMGGLRSSMGYTGSANIEEMRTKPEFVRITGAGMAESHVHDVQITKEAPNYRVG

SEQ ID NO: 83889 - protein, 260 aa, Unknown
  Bacterial polypetide isolated from the Sargasso Sea
FERAEALIDADVDAIVIDTAHGHSEGVINAVKNIRAKYPDIEIIAGNIATSQAAADLIKAGVDAVKVGIGPGSICTTRIIAGVGVPQLTAIMDVAKVCRDAAVPLIADGGIRFSGDVAKAIAAGADSIMIGGLFAGTDEAPGEKILFQGRSYKVYRGMGSLGAMTKGSADRYSQGKVSDQSKFVPEGVEGRVPFKGELSDVIYQLIGGLRSAMGYCGNKDIIRMQENCEFITITSASMRESLPHDIIITKAAPNYDGGVN

SEQ ID NO: 83890 - protein, 327 aa, Unknown
  Bacterial polypetide isolated from the Sargasso Sea
LTFDDVLLVPQASKILPSDAVTTTCVTNSISLNIPLLSSAMDTVTEQNMAIAMAQAGGMGVIHRNLSIQKQASLVANVKRFESGLVHDPIILKRGQTLEDARALQQKFKITGFPVVDQQKKLVGIVTNRDMRFAKDKKTPVEKMMTASNLAVLSEPFDMLEARNLMEVRRIEKVLVINDQGKLTGLVTLKDLEQAVLNPSACKDSLGRLRVAAASTVGSAGFERSTALIDSGVDLIVVDTAHGHSNSVLKAVSEIKKVSTKTQVLAGNVATGDATKALIDAGADAIKVGIGPGSICTTRIVAGVGVPQLTAIMNCVEAAAKTGHPVV

SEQ ID NO: 83891 - protein, 271 aa, Unknown
  Bacterial polypetide isolated from the Sargasso Sea
KKVKRQKLFVGAAIGVNNSDLERAKELSKANVDLIVIDTAHGHTNKVLKIIKKIKKTIKKIPLCAGNIATGKAAKFLADSGVDIVKVGIGPGSICTTRLVAGVGVPQLSAVIEVKNALRNRKIKIISDGGIKFSGDLAKAIAAGADAVMIGSLFSGTSESPGKIFKRSGKFYKNFRGMGSAGAMAVGSADRYYQKKFKDLSKFVPEGVEGIVKFKGPVNKIIYNLVGGLRSSMGYLGAKTVKDLQTKGEFVKITKAGFYESMVHNVDEIVK

SEQ ID NO: 83892 - protein, 262 aa, Unknown
  Bacterial polypetide isolated from the Sargasso Sea
NKMAINLALNGGLGVIHRNMPIDKQASEVKKVHGFKVNAKKFQNAVINSNGKIAVGAAIGVENNAYLRLLELLKFGVDIVFIDVAHAHTKTTLQFIEKAKKVLKKTPLIVGNIATKKAASDLISVGVDAIKVGIGPGSICTTRVVTGVGIPQLSAVMETFQVAKKFKIPVIADGGIKTSGDIAKAIAGGASACMIGSLFAGTEESPGKLLTIKGKKFKSYRGMGSVGAMQKGSFDRYSQEETKNAKKLVAEGGKEWFHTKVK

SEQ ID NO: 83893 - protein, 193 aa, Unknown
  Bacterial polypetide isolated from the Sargasso Sea
VGIGPGSICTTRIIAGVGVPQLTAIMDCVDEAKKQSIPVIADGGIKFSGDLAKAIAGGSDLAMIGSLFAGTDETPGEVFLHQGRRFKSYRGMGSVAAMAEGSADRYFQSDLSASDKLVPEGIEGQVPYIGSVHNVIYQLIGGLRASMGYTGCKNIEDFQTKTNFIKITAASLNESHTHDVVVTREAPNYPTRG

SEQ ID NO: 83894 - protein, 198 aa, Unknown
  Bacterial polypetide isolated from the Sargasso Sea
DAVKVGIGPGSICTTRIVTGVGVSQITAIANAVKALKGKNVPVIADGGIRFSGDVAKAIATGAHTVMLGSVLAGTEEAPGEVELFQGRSYKSYRGMGSIGAMSGDQGSGDRYFQESSEATEKLVPEGIEGRVPYKGWMEAVVHQMMGGLRQSMGYTGSKDIETMRTKPKFIQITHAGVSESHVHDVNVTKEAPNYRMS

SEQ ID NO: 83895 - protein, 306 aa, Unknown
  Bacterial polypetide isolated from the Sargasso Sea
ESAVLPAEVDISSRLTDSIRLNIPLISAAMDTVTESDMAIAMAQAGGIGVIHRNMTTEAQAAEVYRVKRFESGLVLDPVTVSPDSSIGELRRMKSQNGFSGFPVVDDSGILVGIITNRDIRFVSDDSEKVSTMMTTGVVTVPEGVDPEEAKRLLHKHRIEKLVVVDDDGGCAGMMTVRDIQRSRDNPDSCKDRQGRLRVAAATGTGDKGVERALALFESGADAIVVDTAHGHSHGVIDTVKEIRSLAPDKAQIVAGNIATGAAADMLIDAGANAVKVGIGPGSICTTRIVSGVGVPQLTAVLGVVS

SEQ ID NO: 83896 - protein, 271 aa, Unknown
  Bacterial polypetide isolated from the Sargasso Sea
RLRVGAAIGVGEKGFERAEALIDAGVDLLVVDTAHGHNSQVIETIKKLSKSYNNVSIMGGNVATSDATKALIDAGANSVKIGIGPGSICTTRMVAGVGLPQLSAIMECSEIAKKNNIHVIADGGIKYSGDIAKAIASGASAVMVGSLLAGTDEAPGDVFLYQGRSYKSYRGMGSLGAMARGSADRYFQEEIEQLKLIPEGIEGQVPYKGPLENVLHQLSGGLKSAMGYTGNSNIESMKNKCNFRKITNAGLKESHVHDVIITREAPNYRRS

SEQ ID NO: 83897 - protein, 252 aa, Unknown
  Bacterial polypetide isolated from the Sargasso Sea
LVDAGVDVLVIDTAYGHSEKVISTLKEIKSKFSTDVIVGNVATNEATEELIDQGADCVKVGIGPGSICTTRVVAGIGVPQFSAILDCAETAAKKGVPIIADGGIKYSGDIAKALGAGASGVMIGSLFAGTDESPGEVYLFKGRSYKSYRGMGSLGAMARGSADRYFQEEITESNKHVPEGIEGRVPYKGPISPIIYQLVGGLKASMGYTGSKDIVEFKKNVKFVEITGAGLKESHVHDVDITRESPNYPTNI

SEQ ID NO: 83898 - protein, 272 aa, Unknown
  Bacterial polypetide isolated from the Sargasso Sea
LSAAMDTVTEHRLAITMAQLGGIGVLHKNFSIKEQASEVKKVKKFEAGMVVNPVTIKPDQSLGDAFKLMENFKISGIPVVEGHKNKLVGILTNRDVRFANDLNQTVSALMTKNVITVRESVSKEEARILLHKHRIEKLVVVDEDGFCVGLITVKDMEKSQNHPDSCKDEQGRLRVAAATGVGKDGILRAEALIEAGVDVLIVDTAHGHSEMVLDAVNKISKLSNEVALIGGNVATSDATKALIDAGANGIKVGIGPGSICTTRMVAGVGVPQ

SEQ ID NO: 83899 - protein, 190 aa, Unknown
  Bacterial polypetide isolated from the Sargasso Sea
VDIVKVGIGPGSICTTRLVAGVGVPQLSAILDVKKALGKSKTKIISDGGIKFSGDLAKAIAAGADAVMIGSLFSGTTESPGKIFKRKGKLYKTFRGMGSAGAMSVGSADRYYQKKFKDISKFVPEGVEGIVKFKGPVNKIIYNLTGGLRSSMGYLGAKTINDLQRRGEFVKISKAGFYESMVHNVDQVIK

SEQ ID NO: 83900 - protein, 138 aa, Unknown
  Bacterial polypetide isolated from the Sargasso Sea
KAGADALKVGIGLGSICTTRVVAGVGVPQLTAIMNVYKAARKSKIPIIVDGGIRYSGDIVKALAAGADTVMLGGLLAGTDEAPGEVEMYEGRIYKSYRGMGSIGAMQKGSKDRYNQDGASSSKLVPEGIEGRVPYKGT

SEQ ID NO: 83901 - protein, 263 aa, Unknown
  Bacterial polypetide isolated from the Sargasso Sea
VKKFESGVVRDPITISSKKSVGELIKLTQDLNISGMPVVNEGDLVGIVTSRDFRNVSDLSAPVESIMTPKKRLVTAEEDAKLDIIKNLLYKNRIEKILLVDKSFALKGLVTLKDINKNKDFPLASKDTEGRLLVGAAVGNGEETDERVDALVEAGVDVLVVDSAHGHSKGIIDRVKRIKKMNKGIQVIGGNVATGDGALDLIKAGADAIKVGIGPGSICTTRIVTGVGVPQISAIANVVKAIGKKNIPVIADGGIRFSGDIAK

SEQ ID NO: 83902 - protein, 228 aa, Unknown
  Bacterial polypetide isolated from the Sargasso Sea
ENLDIIVIDTAHGHTKKVGDIIKKIKKIRPKKTAICAGNIATAEAAKFLVGLGVDIIKVGIGPGSICTTRLVAGIGVPQLSAILDVKEGIGKSKTKLIADGGIKFSGDIAKALAAGADAVMIGSLFAGTDEAPGKKINKNGKLYKYFRGMGSIGAMNKGSADRYFQTKQKDTSKYVAEGVEGYIKYKGKVDKIIYNLVGGLKSSMGYLGAKNVIDLRKKPKFVKITKA

SEQ ID NO: 83903 - protein, 264 aa, Unknown
  Bacterial polypetide isolated from the Sargasso Sea
IGVGGENLERCKMLYKAGVDAIVIDTAHAHTKSVLKIIKDVKKTFPDLDVVAGNVATAEAAKFLAKAGVDGVKVGIGPGSICTTRIIAGVGYPQLSAIYNVSNALKGTDISIIADGGVKHTGDITKAIAAGADCVMLGSLLAGTLESPGETIIYEGRKFKTYRGMGSVEAMEKGSKERYFQSTIKDKNKLVPEGIVGRVPYKGSVVESMFQFVGGLKSGMGYCGSKNIKELKDNSKFVQITSAGLDESHPHNITITKESPNYTR

SEQ ID NO: 83904 - protein, 273 aa, Unknown
  Bacterial polypetide isolated from the Sargasso Sea
PVSDIMTCEGLVTATGAVSLDEAEKILMANKVEKLLLVDQSGLLTGLITIKDIDMMKRFPNACKDSQGRLRVGAAVGVFDYERADSLIAKGVDVLVVDSAHGHSKNVMETVTAIKKRWDIDVIAGNIATRAGCRDLIKAGADGVKVGIGPGSICTTRIISGVGVPQISAVWEAAQEAADANVPIIADGGIRYSGDMTKAIAAGAHCCMVGGLLAGVAESPGQTVLYQGRTFKSYRGMGSLGAMVKGSSERYRQKAGHGSNKLVPEGVEGTSAF

SEQ ID NO: 83905 - protein, 203 aa, Unknown
  Bacterial polypetide isolated from the Sargasso Sea
MEIIKEALTFDDVTLAPNYSQVLPSEVNTSTNLSKNLSLKVPLLTSAMDTVTESKMAIAMAELGGIGVIHRNLTIEQQISEIRKVKAKKCLVGAAVGASAREHLRAQKILKENLDLIVVDTAHAHTKKVGEIIKKIKRLKPKKTTLCAGNVATAEAAKYLIKLGVDIIKVGIGPGSICTTRLVAGNGVPQLSAILSLKKEWKK

SEQ ID NO: 83906 - protein, 219 aa, Unknown
  Bacterial polypetide isolated from the Sargasso Sea
FSRTDIVVGNIATAEAARDLIKAGADALKVGIGPGSICTTRIIAGIGVPQLTAILDVCSVAKRSKTPVIADGGIKYSGDITKALAAGANCVMIGNLLAGTDETPGDLVLYQGRSFKTYRGMGSVEAMKDGSKDRYYQEDLIDSKLVPEGIEGRVPYRGPISKVVYQLVGGVKAGMGYTGSKNLKELKSAKFLKLTSAGLRESHVHDIDISREAPNYSLD

SEQ ID NO: 83907 - protein, 306 aa, Unknown
  Bacterial polypetide isolated from the Sargasso Sea
AIALARAGGIGIIHKNLTIEGQVNMVDKVKRSESGMIQNPITINEGATISDAKKIMSEYKISGLPVVKNEVLVGIITNRDIRFEIDGTLPVSERMTSKDLVTVPVGTSLNKAKDILQKHRIEKLLVVDDKRNLTGLITVKDIQKNEDYPNACKDKNGRLRVGAAIGVKGEDVERASELANVDVDVIVIDTAHGHSKSVLKSIELLKTKLPQLSIIAGNVATGDGTKALIDSGVDCVKVGIGAGASCTTRVIAGVGVPQLTAIMDSVDIARKEDIPVIADGGLRYSGDIAKALAAGANSVMLGSLLP

SEQ ID NO: 83908 - protein, 220 aa, Unknown
  Bacterial polypetide isolated from the Sargasso Sea
MELIKEALTFDDVLLLPRYSDILPSETNTSIRLSKKIFLKLPFISSAMDTVTESKMAIAIARQGGLGVIHRNFDIKTQSNEVSKVKKLNFFVGAAVGTSSQDITRVKNLINAGVDLIVIDTAHGHSKRVLKTLEKIKKIAKDQTMCVGNIATSEAAKKLYNLGADVVKVGIGPGSICTTRIIAGIGVPQLTAIMEVKKALKGKKIKIISDGGIKFSGDIA

SEQ ID NO: 83909 - protein, 228 aa, Unknown
  Bacterial polypetide isolated from the Sargasso Sea
LKEIKSKFSTDVIVGNVATNEATEELIDQGADCVKVGIGPGSICTTRVVAGIGVPQFSAILDCAETAAKKGVPIIADGGIKYSGDIAKALGAGASGVMIGSLFAGTDESPGEVYLFKGRSYKSYRGMGSLGAMARGSADRYFQEEITESNKHVPEGIEGRVPYKGPISPIIYQLVGGLKASMGYTGSKDIVEFKKNVKFVEITGAGLKESHVHDVDITRESPNYPTNI

SEQ ID NO: 83910 - protein, 294 aa, Unknown
  Bacterial polypetide isolated from the Sargasso Sea
MITFKDIQKSSTYPNASKDINGSLLVGAAVSTSKESYERIDALVRENVDVITIDTAHGHSKSVIDTLKYIKKKHPAQQVIVGNIATADAAELLIKNGADAIKVGIGPGSICTTRIVAGVGVPQLSAIYHCSKIANKHKIPLIADGGIRYSGDIAKAIAAGADSVMLGGLLAGTDESPGEVEMFEGRTYKSYRGMGSIGAMQSGSKDRYFQDHESESKKLIPEGIEGRVPYKGTMKTILYQLTGGLRSSMGYLGCKNIKLMKTKTNFIKISNSSKIESHTHDVAIVKEPPNYQPK

SEQ ID NO: 83911 - protein, 357 aa, Unknown
  Bacterial polypetide isolated from the Sargasso Sea
MGIIKDSLTFDDVTLIPSFSSILPSETITTTDLGQKLRLKIPLMSSAMDTVTEAKMAIALSKAGGLGVIHRNLSIEKQVKEVKKVKRSKCIVGAAIGVSEKDLERAIELNKANVDLLIIDTAHGHTTKVSNMIKNVKKRTSKSNLCAGNIATGKAAKFLADNGADIVKVGIGPGSICTTRLVAGIGVPQLSAIIDVKKSLRNYKTKIISDGGIKFSGDLAKGLAAGADCIMIGSLFSGTNESPGKIIKIKGKLYKNFRGMGSVGAMSVGSSDRYYQKRYKDISKYVPEGVEGLVKYKGQVSKIIYNLVGGLKSSMGYLGSKKIKDLQKNGEFVKITKAGFYESMVHNVDHVKQNGTK

SEQ ID NO: 83912 - protein, 249 aa, Unknown
  Bacterial polypetide isolated from the Sargasso Sea
AYLRLLELLKAGVDIVFVDVAHAHTKTTLKFIEKAKKVLKKTSLIVGNIATKKAASDLISSGVDAIKVGIGPGSICTTRVVTGVGIPQLSAVMDTFQVAKKFKIPVIADGGIKTSGDIAKAIAGGASACMIGSLFAGTEESPGKLLTIKGKKYKSYRGMGSVGAMQKGSFDRYSQEETKNIKKLVAEGVEGMVPYKGKIEDVAYQLVGGLKSSMGYTGHNTIKKMQGNCKFVFISKAGARESNVHDVIM

SEQ ID NO: 83913 - protein, 325 aa, Unknown
  Bacterial polypetide isolated from the Sargasso Sea
DESIDNIKTLLYRNRIEKILLVDDTFGLKGLITLKDINKSKDYPSATKDSEGRLLVGAAIGNGTDTEERTEKLVQAGVDVLVVDSAHGHSQGILDRVKKVKKDYPNIDVIGGNVATAEGATALMKAGADGVKVGIGPGSICTTRIVTGVGVPQITAISDVVSSMKKKGIPVIADGGIRFSGDFAKAIAAGADSVMLGSILAGTEEAPGQVELFQGRSYKAYRGMGSVGAMSGESSSGDRYFQDNQQTDKLVPEGIEGRVPYKGWVETTIHQMLGGLRQSMGYTGCKDIDTMKTKPKFVQITTSGMSESHVHDVSVTKEAPNYRIT

SEQ ID NO: 83914 - protein, 354 aa, Unknown
  Bacterial polypetide isolated from the Sargasso Sea
METIKEALTFDDVTLAPNYSSILPSEVNTSVNLTESLKIKIPLLSSAMDTVTESSMGIAMGRAGGLGIIHRNLNIQEQIKEIRKVKSKKILIGAAVGASEKELNRAEKILKENLDIIVIDTAHGHTKKVGDIIKKIKKIRPKKTAICAGNIATAEAAKFLVGLGVDIIKVGIGPGSICTTRLVAGIGVPQLSAILNVKKGIGKSKTRLIADGGIKFSGDIAKALAAGADAVMIGSLFAGTDEAPGKKIKKNGKLYKYFRGMGSIGAMNKGSADRYFQTKQKDTSKYVAEGVEGYIKYKGKVDKIIYNLVGGLKSSMGYMGAKKVIDLRKKPKFVKITKAGFYESMVHNIDVVKK

SEQ ID NO: 83915 - protein, 358 aa, Unknown
  Bacterial polypetide isolated from the Sargasso Sea
MVPIKEALTFDDVTLVPKYSTVLPTDVDTSIKLSNNLKLKIPLIASAMDTVTESKMAIAIAKAGGIGIIHRNLDIKNQIIEIRKVKNQKLLVGAAVGAGPKELQRAKDVLKEGVDLIVVDTAHGHTKKVSEIVRFIRKTKDKKTALCAGNIATPEAAKFLLKLGVDIIKVGIGPGSICTTRLVAGIGVPQLSAILSVRKGIKNKKVKIISDGGIKYSGDLAKAFAAGADAVMIGSLFAGTDEAPGKIIKKNGKLFKNFRGMGSVGAMNKGSADRYFQSKQKDISKYVPEGVEGFAKYKGGVKDIIYKLIGGLKSSMGYLGSKQIKYLRKKPKFVKITKAGFYESMVHNVDIVKKDNEY

SEQ ID NO: 83916 - protein, 401 aa, Unknown
  Bacterial polypetide isolated from the Sargasso Sea
MSNNIEKKLTFDDVLLVPRKSSVLPKEVDCATKLTKNITLNIPVMSAAMDTVTESDMAIALARQGGIGVIHKNLSIEDQALMVDKVKRYESGMIRNPITLDDKKTVRDAKQLMDQYSIGGLPVLSKGKLVGIITKRDIRFESNLDTLVKDRMTSKDLITVNSDTSNEDAKKILQKHRIERLLVVDKQNNLDGLITVKDLTKKEEFPLSTKDKNGRLRVAAAISVREDWKDRVKALVKVGVDAIVVDTAHGHSKFVLDLVKKVKKEFPKVDLIAGNVSTAEATEDLIKSGADCVKIGIGAGSSCTTRIIAGVGVPQLSAVMDCAQVGIKHNTPIIADGGIRYSGDIAKSLAAGANVVMLGGMLAGMDESPGETIVYEGRRYKSYRGMGSLAAMKEGGGERYF

SEQ ID NO: 83917 - protein, 312 aa, Unknown
  Bacterial polypetide isolated from the Sargasso Sea
MNKYKIEKLPVVDKDFRLQGLITMKDIEKSKQHPYSSKDSQGRLIAAAAIGVGNDMLERLDSLIKHGLDLVFIDTAHAHSKKVIDSVKIIKKKYKKLEIVVGNIATAEAAKALISAGVDSLKVGIGPGSICTTRIIAGIGVPQMTAIMDVVSIAKKSNIPVIADGGIKYSGDITKALAAGADCVMIGNLLAGTDESPGDLVLYQGRSYKTYRGMGSVEAMKDGSRDRYNQDDIIDSKLVPEGIEGRVPYRGATSKVIFQLVGGLKAGMGYTGSKNLKDLKKAKFLKLTGAGLKESHVHDVDISREAPNYTLD

SEQ ID NO: 83918 - protein, 490 aa, Unknown
  Bacterial polypetide isolated from the Sargasso Sea
MKSRPPFKQAFTFDDVLLVPQKSKVLPSDVSLKTKLTKSIDMNIPLLSAAMDTVTESSMAVAIAREGGIGIIHKNLSIEDQALMVDRVKRYESGMIVNPVTLSSDKTIKEAKAVMSMYKISGLPVVENEKLIGIITNRDIRFETDESLPVKDRMTKEKLVTVEQGTTLEQAKKVLQEHRIEKLLVVDNEGNLAGLITVKDIQKKEDFPNSCKDKSGRLRVGAALSVTEDFLERAQELHSKEVDVIVVDTAHGHSLGVLNQIKEIKKSIPALQIIGGNIATGDGAKALIDAGTDCVKVGIGAGASCTTRIVAGIGVPQLTAVMDCVDEAKKNDIPVIADGGIRYSGDIAKAIAAGADTVMLGSILAGMDESPGEFILFEGRQYKSYRGMGSLGAMQDGDGARYFQNDTEDKKLVPEGIEGIVPYRGSVKNTIHQLMGGLRSSMGYCGGENIADFQRKAEFIQNTQAGVKESHPHEVKITKEAPNYQISDTK

SEQ ID NO: 83919 - protein, 204 aa, Unknown
  Bacterial polypetide isolated from the Sargasso Sea
IATAEAAKFLIKLGVDIIKVGIGPGSICTTRLVAGIGVPQLSAILNVRNGLGKRKTLIVADGGIKFSGDIAKALSAGADAVMIGSLFAGTDEAPGKIIKRDGKLFKSFRGMGSIGAMNKGSADRYFQKKQSDSSKYVPEGVEGLIKYKGSVSKIIYRLVGGLRSSMGYLGCRQIKNLKNKPKFVKITKAGFYESMVHNIDKVIR

SEQ ID NO: 83920 - protein, 359 aa, Unknown
  Bacterial polypetide isolated from the Sargasso Sea
MQGIVTSRDFRYAENMNAKVSSIMTPFEKLVTVEEGFPQEDVMKLMYKNRIEKILVLDGDNNLSGLVTMKDIEKSAQHPNATKDSSGRLQVGAAIGTGEDTLDRAEALAEAGVDVFVIDSAHGHSLNVINTIKVIKDKFKDIDVIGGNIATADAATELVKAGADAVKVGMGPGSICTTRIIAGIGVPQISAILEIKKALDGKDINIIADGGIRFSGDIAKAIAAGADSVMLGSLFAGTEEAPGKVELFQGRSFKTYRGMGSIGAMTERDDANRYLQEDVENDKLVPEGIEGRVPYKGLVINVINQLVGGVRQSMGYIGCKNIEDMQNNSQFVEITNAGMAESHVHDVMITKEAPNYQRS

SEQ ID NO: 83921 - protein, 167 aa, Unknown
  Bacterial polypetide isolated from the Sargasso Sea
VPQLSAILNVKKGLKKKKVSIIADGGIKFSGDIAKALAAGADAVMIGSLFAGTDEAPGKIIKKNGKLYKSFRGMGSIGAMNKGSADRYYQLKQKDKSKYVPEGVEGFVKYKGKVDKIFYKLIGGLKSSMGYLGAKKLNLLRTNPKFVKITKAGFYESMVHNIDEIKK

SEQ ID NO: 83922 - protein, 448 aa, Unknown
  Bacterial polypetide isolated from the Sargasso Sea
MKIPLVSAAMDTVTEAAMAIALADNGGIGIIHKNNTIEDQALEIRTVKKYESGVVRDPTTIRSTKTIDELMKLTNELSISGMPVVDDGKLMGIVTRRDFRYAEDLSALVSSIMTPREKLITVKEGFDQEDVKKLMYNNRIEKILVINEEDSLTGLVTMKDIDKSAEHPFATKDSRGQLQVGAALGTGGDTLERASALSDAGVDLFVIDSAHGHSKNVLETIKNIKNKFPEIDIMGGNVATPEGAEALIDAGVDSVKIGMGPGSICTTRIIAGIGVPQITAILSIKEKLKSNNIPLIADGGIRFSGDIAKAIAAGANAVMLGGIFAGTEEAPGELELFQGRSFKTYRGMGSIGAMSERNDLNRYSQDGVSTEKMVPEGVEGRVPFKGWVVNVIDQLIGGIRQSMGYVGCKSIEEMHNDTQFVEITNAGITESHVHDVMITKEAPNYQRS

SEQ ID NO: 83923 - protein, 486 aa, Unknown
  Bacterial polypetide isolated from the Sargasso Sea
MRLIQKALTFDDVLLVPAFSDVLPRDTSLKTKLTRNISLNMPLVSAAMDTVTEGRLAIAMAQQGGVGIVHKNLTPAEQAREVAKVKRFESGVVRDPITVPPQMKVRDVIALSRQHGISGFPVVEGPQLVGIVTNRDLRFETRLDEPVKSIMTPRERLVTVKEGTPLAEAKALMHSHRLERVLVVNDAFELRGLMTVKDITKQTEHPDACKDEHGKLRAGAAVGVGPDNEERVELLVQAGVDVIVVDTAHGHSKGVLERVRWVKQNFPHVEVIGGNIATAAAAKALVEYGADAVKVGIGPGSICTTRIVAGVGVPQISAIANVAEALKGTGVPCIADGGVRFSGDVSKALAAGANAVMMGSMFAGTEEAPGDVFLYQGRQYKSYRGMGSVGAMKDGAADRYFQDNSANIDKLVPEGIEGRVAYKGSVNAILFQLVGGVRASMGYCGCKTIDELHDKAEFVQITAAGMRESHVHDVQITKEAPNYHVD

SEQ ID NO: 83924 - protein, 354 aa, Unknown
  Bacterial polypetide isolated from the Sargasso Sea
MDPIKEALTFDDVTLAPNYSEILPSETNTSTKLSKNLKLKIPLISSAMDTVTEGRMAISIAEKGGIGVIHRNLSIKKQIDEIRKVKNKKFLVGAAVGASLEEHKRAERILKENLDLIVVDTAHGHTKKVSDIIKKIIKIKPKKTTLCAGNIATAEAAKFLIKLGVDIIKVGIGPGSICTTRLVAGIGVPQLSAIINVKKGIGNSKTSIIADGGIKFSGDIAKALAAGADAVMIGSLFAGTDQAPGKIIKKNGKLFKSFRGMGSISAMNKGSADRYFQIKQKNTSKYVPEGVEGYVKYKGKIDNIIFQLVGGLKSSMGYLGTKKVIDLRKKPKFFKITKAGFYESMVHNIDEVKK

SEQ ID NO: 83925 - protein, 420 aa, Unknown
  Bacterial polypetide isolated from the Sargasso Sea
MIRDRIFDGLTFDDILLVPGYAEIHPSEVSLKSKLTRKLECNIPLLSAAMDTVTEADTAICMAQEGGLGVIHKNLSIAEQANQVNRVKRSESGMITNPITIEPDQPISEALKLMERYRISGVPVIRGTELVGILTNRDLRFETNHEKPVSELMTGGRDKLVTVAPGIEMEAAKRLLHQHRIEKLLVVNANYELQGLITIKDIEKARKYPNANKDQVGRLLVGAALGVSEDLLQRAEALIQAEVDLVVLDSAHGHSQGVLGGIRKLRSHFSELQIVGGNIATTEGADALIDAGVDAVKVGIGPGSICTTRMVAGIGMPQISAIDSVAEALRKTDVPIIADGGIKYSGDIVKALAAGAHSVMIGSLFAGTAETPGQVILYQGRRYKLYRGMGSIGAMKEGSKDRYFQTGVQEVQKLVPEGIE

SEQ ID NO: 83926 - protein, 489 aa, Unknown
  Bacterial polypetide isolated from the Sargasso Sea
MLRIVDKALTFDDVLLLPDHSDILPKDVDLKTRLTQKINLNIPLLSAAMDTVTESRMGIALSELGGIGIIHKNLSIQDQAAEVRKVKKYESGIVRDPITIRSDNKVGELIQLTNELNISGMPVVDDGNLVGIVTSRDFRFQEQHSVQVSEIMTPKEKLITAREGESPDVIKALLQVNRIEKILLVDDSFALTGLVTLKDINKSLDFPNATRDEEGRLLAGAAIGTKADTLDRCEALIEAGVDVLVLDSAHGQSEGVLKQIKAVKSTFKDIQIIGGNIATGEGALALVEAGADAVKVGIGPGSICTTRIVTGVGVPQVSAVAEVTSALLKKDIPIVADGGIRFSGDIAKAIAAGGHTVMLGSVLAGTEEAPGELELYQGRSYKSYRGMGSIGAMSGDQGSSDRYFQDSAGATEKLVPEGIEGRVPYKGWLEAVIHQMIGGLRQSMGYTGSHDIESMRTKPKFVQVTSAGVNESHVHDVSVTKEAPNYRMS

SEQ ID NO: 83927 - protein, 354 aa, Unknown
  Bacterial polypetide isolated from the Sargasso Sea
MDPIKEALTFDDVTLAPNYSEILPSETNTSTKLSKNLTLKIPLISSAMDTVTEGRMAIAIAEKGGIGVIHRNLSIKKQIDEIRKVKNKKFLVGAAVGASLDEHKRAERILKENIDLIVVDTAHGHTKKVSDIIKKIVKIKPKKTTLCAGNVATAEAAKFLIKFGVDIIKVGIGPGSICTTRLVAGIGVPQLSAIINVKKGIGSSKASIIADGGIKFSGDIAKALAAGADAVMIGSLFAGTDQAPGKVIKKNGKLFKSFRGMGSIGAMNKGSADRYFQTKQKNTSKYVPEGVEGYVKYKGKLDNIIYQLVGGLKSSMGYLGSKKVIDLRKKPKFFKITKAGFYESMVHNIDEVKK

SEQ ID NO: 83928 - protein, 486 aa, Unknown
  Bacterial polypetide isolated from the Sargasso Sea
MKITEEALTFDDVLLVPDYSEILPRQASLQTQLTRDIKMNIPLVSAAMDTVTESELAIALAQEGGVGIIHKNMDPELQAKNVRRVKKYESGIIQEPVTVGPYTSIQEVIDLTRQKNISGVPVVDGDELVGIVTSRDLRFEEKPDDPVRNIMTRKESLVTVEEHATKEEVRALLHKHRIEKILVVNNKFQLAGLITVKDMQKASEYPNACLDDAEQLRVGAAVGVGEIARKRAALLVESNVDVIVVDTAHGHSKGVLDMVKWIKTNFKETQVIGGNIATADAALALVKAGADAVKVGIGPGSICTTRVISGVGMPQISAVTNVAKALKNKGIPVISDGGVRYSGDLAKGLAAGANSMMVGGLFAGTEEAPGEVELYQGRSYKTYRGMGSLGAMAEKYGSSDRYFQENDEVEKLIPEGIEGRVPYKGALEAVVHQLCGGIRAALGYTGCLDLKEMRDKAKFVRLTSAGFKESHVHDVAITKEPANYRL

SEQ ID NO: 83929 - protein, 212 aa, Unknown
  Bacterial polypetide isolated from the Sargasso Sea
MSKTKFIETGLTFDDVLLVPSYSEVLPSDVVLLSKFSRNLSLKVPVVSAAMDTVTESKMAIAMAQEGGIGVIHKNLTIKQQAEKIRKVKRSESGMILDPVTLTKKSKVKDALKCMKEFSIGGIPIVDKSNSLVGILTNRDLRFESDMNKSVNDVMTKDNLVTGNPGITLKQAEKILQKNKIEKLPIIDDKNKLVGLITFRDIQKNNFKTVIK

SEQ ID NO: 83930 - protein, 256 aa, Unknown
  Bacterial polypetide isolated from the Sargasso Sea
MRSKSLIDNGCDLIVVDTAHGHSEKVLKILSKLKKINGKIPICVGNIATGEAAKKLYNSGADIIKVGIGPGSICTTRMVAGIGVPQISAVMDVKKALKKKNVKIISDGGIKFSGDIAKALAAGADAIMMGSIFAGTDESPGKKFKYKGKLYKQYRGMGSIGAMSSGSANRYFQKNFKDKSKFVPEGVEGRVIYKGSVSKIIYQLKGGLRSSMGYIGAKNLNQIKKNAEFIKITKAGFYESMVHSVEMTEKTINFKL

SEQ ID NO: 83931 - protein, 186 aa, Unknown
  Bacterial polypetide isolated from the Sargasso Sea
MDTIKESLTFDDVLLLPQYSNVLPSQTDISLELTKKIKLKVPFLSSAMDTVTESKMAIAIAKAGGIGIIHRNLDIKKQSKEIALVKKRKLLVGAAVGTTNDDIKRAKSLIDCGCDLIIIDTAHGHSTKVLNTLSKLKKIRGTAPICVGNIATGEAAKKLFDSGADIIKVGIGPGSICTTRMVAGIG

SEQ ID NO: 83932 - protein, 487 aa, Unknown
  Bacterial polypetide isolated from the Sargasso Sea
MDKVKSKAFTFDDVLLLPRYSDFVPSEADTETRLTKSIKIKMPLISAAMDTVTESRMAIALAEAGGLGIIHKNNSIEEQAAIVKAVKKHESGVVRDPTIIRSSKTIGELKQLTAELSISGMPVVDDGDLKGIVTSRDFRYADDMDADVASIMTPLDKLVTVSEGTPQDEVKKLMYENRIEKILVLDELNKLSGLVTMKDIEKSAEHPDATKDSSGRLRVGAALGTGADTIDRAKALQEAGVDVFVVDSAHGHSKNVLDIVKLIKKEFKDIEVIGGNVATPEGALELVKSGVDSVKIGMGPGSICTTRIIAGIGVPQITAIMEIKNALKGKDVSIIADGGIRFSGDIAKAIAAGADSVMLGGLFAGTEEAPGEVELFQGRSFKIYRGMGSIGAMTERDDANRYSQEDVEPDKLVPEGIEGRVPYKGWVISVINQLIGGLRQSMGYVGCKTIPEMQKDSQFVEITNAGMTESHVHDVMITKEAPNYQRS

SEQ ID NO: 83933 - protein, 489 aa, Unknown
  Bacterial polypetide isolated from the Sargasso Sea
MSNRPPFKQAFTFDDVLLVPQKSSVLPKDVSLKTKLTNDIELNIPILSAAMDTVTESEMAISLARTGGMGVIHKNLSIEDQSNMVDKVKRSESGMILNPITIEESSTIEDAKKIMSEYKISGLPVVKNDRLVGIITNRDIRFETNDLLSVSECMTSKDLVSVPVGTSLEKAKDILQEHRIEKLLVVDKDHNLTGLITVKDIQKNEDYPHACKDDNGRLRVGAAVGVSGDAIERASQLASADVDAIVIDTAHGHSKGVLRSIEKIKSSHPTVALIAGNVATGDGAQAMIDAGVDCVKVGIGAGASCTTRVIAGVGVPQLTAIMDCVDIARKNNIPVIADGGLRYSGDLAKALAVGANSVMLGSLLAGMDESPGETILYEGRQYKSYRGMGSMGAMQQGSGDRYFQEGSEETKLVPEGIEGMVPYRGPVRNTIHQMIGGIRSSMGYCGCSTIEEFGMNTTLVQVTSAALKENHPHEVRIVKEAPNYQVSDG

SEQ ID NO: 83934 - protein, 485 aa, Unknown
  Bacterial polypetide isolated from the Sargasso Sea
MDKVKDKALTFDDVLLVPAYSDFLPSQASLKTSLTKNIEINLPLVSAAMDTVTEYRMAIALAEAGGIGILHKNCSIKEQMNAVRNVKKYESGVVRDPTTISSNKTIGQLKQLTDELNVSGMPVVDDGVVKGIVTSRDFRYADNMDDLVSSIMTPREKLITVSEDTSQDVVKKLMYENRIEKVLVLNGEELTGLVTMKDIEKSEKHPNATKDEAGQLRVGAAIGTGAETMERAKALYEAGVDLFVIDSAHGHSKNVVETIKAIKKEFSDKDVIAGNVATPEGAEALIDAGADSVKIGMGPGSICTTRIIAGIGVPQISAILSIYKKVKGKVPLIADGGMRYSGDIAKAIAAGADCVMLGSIFAGTEEAPGEFELYQGRSFKTYRGMGSLGAMSKRDDTDRYFQEDVDAEKLVPEGVEGRVPYKGWAINVINQLVGGLRQSMGYVGCKNIHEMKENSKFVEITNAGMTESHVHDVQITKEAPNYQRS

SEQ ID NO: 83935 - protein, 262 aa, Unknown
  Bacterial polypetide isolated from the Sargasso Sea
EDWQERIKELIKVGVDAIVVDTAHGHSEFVLKLVKEIKKEFPNLDLIAGNVATPEATEDLIKAGADCVKIGIGAGSSCTTRIIAGVGVPQLSAVMDCSQVGIKHNIPIIADGGIRYSGDIAKSLAAGANVVMLGGMLAGMDESPGETIVYEGRRYKSYRGMGSLAAMKEGGGERYFQQEKDELKLVPEGIEGMVPFRGPVNNTIFQLIGGLKSSMGYCGAKDLKSLYENKKFIEISSAGVKESHPHEVSIIKEAPNYQGHDK

SEQ ID NO: 83936 - protein, 235 aa, Unknown
  Bacterial polypetide isolated from the Sargasso Sea
DTAHGHTKKVGEIIKKIKKIKPKSVSLCAGNVATEDAAKFLIKLGVDIIKVGIGPGSICTTRLVAGIGVPQLSAILNVRNGVKSRKVSIIADGGIKFSGDIAKALAAGADAVMIGSLFAGTDEAPGKVIRRGGKLFKSFRGMGSIGAMNRGSADRYYQSKQKDKSKYVPEGVEGFVKYKGRVDKIFYQLIGGLKSSMGYLGAKKIKILRQNPKFVKITKAGFYESMVHNIDEIKK

SEQ ID NO: 83937 - protein, 358 aa, Unknown
  Bacterial polypetide isolated from the Sargasso Sea
MDPIKEALTFDDVTLAPKYSKVLPSDVSTRTSLSNQLKLDIPILSSAMDTVTESKMAIALAKQGGLGVIHRNLTISQQINEIKKVKSKSFKVGAAVGTNESELNRIKNILKLNIDLIVVDTAHGHSQKVADTILKIKKIKPKKTTLCAGNIATAEAARFLSKLGVDVIKVGIGPGSICTTRLVAGIGVPQLSALLDVKKGLNKKVKMISDGGIKFSGDIAKALAAGADAVMVGSMLAGTSEAPGKIIKKKGKLFKVFRGMGSVGAMNKGSADRYFQKKQKDKSKYVPEGVEGLIKYKGDVSKTINKLVGGLRSSMGYLGAEQIKYLNKKAKFVKITKAGFYESMVHSIDEVKKNSEYL

SEQ ID NO: 83938 - protein, 419 aa, Unknown
  Bacterial polypetide isolated from the Sargasso Sea
DILLVPGYAEIHPSVVSLKSKLTRKLECNIPFLSAAMDTVTEADTAICMAQEGGLGVIHKNLSIEEQANQVNRVKRSESGMITNPITIEPDQPISKALKLMERYRISGVPVIRGTELVGILTNRDLRFETNHEKPVSELMTGGRDKLVTVAPGIEMEAAKRLLHQHRIEKLLVVNANYELQGLITIKDIEKARKYPNANKDVVGRLLVGAALGVSEDLLQRAEVLIQAEVDLVVLDSAHGHSQGVLEGIRKLRSHFPELQIVGGNIATAEGADALIDAGVDAVKVGIGPGSICTTRMVAGIGMPQISAIDSVAEALRKTDVPIIADGGIKYSGDIVKALAAGAHSVMIGSLFAGTTETPGQVILYQGRRYKLYRGMGSLGAMKEGSKDRYFQTGVQEVQKLVPEGIEGRVPFKGPLAES

SEQ ID NO: 83939 - protein, 263 aa, Unknown
  Bacterial polypetide isolated from the Sargasso Sea
LGEDTLSRAEALAQAGVDVFVIDSAHGHSLNVINTIKAIKDKFKDVDVIGGNIATAEAATELVKAGADAVKVGMGPGSICTTRIIAGIGVPQISAILEIKKALYGKDINIIADGGIRFSGDIAKAIAAGADSVMLGSLFAGTEEAPGKVELFQGRSFKTYRGMGSIGAMTERDDANRYLQEDVETDKLVPEGIEGRVPYKGLVINVINQLVGGVRQSMGYIGCKCIKDMQNNSQFVEITNAGMAESHVHDVMITKEAPNYQRS

SEQ ID NO: 83940 - protein, 488 aa, Unknown
  Bacterial polypetide isolated from the Sargasso Sea
MERSTIQKSLSFDDVLIKPARSSILPTEVQSHTSITSNIKLGIPLISSAMDTVTEYKLAIAIAQSGGLGILHKNMSIDDQAQNVAKVKKFETGMVIDPVTIAPEATLSDALDLMKEHQISGVPVVDSNDKLLGILTNRDVRFATNMSQKISELMTSENLITVKEGISSDDAQKFLHAHRIEKLIVVDDNRKCIGLITVKDIEKSQLNPHASKDAKGRLLVGSAIGVGIEAINRAERLVDAGVDVLVIDTAHGHSEKVISTLEEIKSHFSIDVVVGNVATKEATAELIDKGADCIKVGIGPGSICTTRVVAGIGVPQFSAILDCAEIANKKNIPVIADGGIKYSGDIAKALGAGANAVMIGSLFAGTDESPGEVYLFKGRSYKSYRGMGSLGAMARGSADRYFQEEITESNKHVPEGIEGRVPYKGPISPIIYQLVGGLKASMGYTGSKDIMQFKKNVQFIEITGAGLKESHVHDVDITRESPNYPTNI

SEQ ID NO: 83941 - protein, 377 aa, Unknown
  Bacterial polypetide isolated from the Sargasso Sea
MKENNISGVPVTDTKTNKLEGILTNRDVRFASNKNQKVSELMTKNDLITVKDNVSENEAKEILHKHRIEKLLVVDEKYRCIGLITVKDIEKSNLHPDATKDEKGRLRVAAATTVGDEGFKRAEALIDSETDIIVVDTAHGHSVKVPKIIERIKKLSNSVQVVAGNVATKEASKSLIGAGADCIKVGIGPGSICTTRIIAGVGVPQLTAIMDCVDEAKKHSIPVIADGGIKFSGDLAKAIAGGADLAMIGSLFAGTDETPGEVFLHQGRRFKSYRGMGSVAAMSEGSADRYFQSDLSASDKLVPEGIEGQVPYIGSVHNVIYQLVGGLRASMGYTGCKNLDDFQTKTNFIKITTASLNESHTHDVVVTREAPNYPTRG

SEQ ID NO: 83942 - protein, 478 aa, Unknown
  Bacterial polypetide isolated from the Sargasso Sea
MTIREGFTFDDVLLVPKFSDITSRSQTDLSTKLSQNIKLNIPLVSANMDTVTESTMATTMARQGGIGIIHRFLTIEEEAEQVLKVKRSGSVMIDNPYQISSEKSVEEAIDLMNEKEVSGLLVVDSGSKLVGVLTERDVLFESINSKKSVSELMTKDVISSNENTTLDEAKDILKSHRIEKLPLVNDKNHIVGLYTTQDILNIENFPNASKDKKGRPLVGAAVGVKGDFLDRTEALLGAGADAIVVDIAHGHSENAISTVKNIKKAFPNCELIAGNVATAQGTEDLIKAGVDAVKVGVGSGSICITRVITGSGVPQLTAVMDCAEIGKQYDIPIISDGGTRTSGDATKALAAGASSVMLGSMLGGTDESPGSTITKNGKRYKFYSGMASLGAARRRKSKEVTQTDSEDDLNDYVAEGVEAMVPYKGTVIDILVQITGGIRSGLSYCGGHDIKQMQNNAEFIKMSRAGFAESQPHDVDVL

SEQ ID NO: 83943 - protein, 308 aa, Unknown
  Bacterial polypetide isolated from the Sargasso Sea
MDKVKAKALTFDDVLLLPSYCDFLPSQASVKTSLTKNIDINLPLLSAAMDTVTEYRMAIALAEAGGMGILHKNCSIQEQSNAVRNVKKYESGVVRDPTTISSKQTIGQLKQLTGELNISGMPVVDDGVVKGIVTSRDFRYADNMDDLVESIMTPREKLITVLEGTSQEVVKKMMYENRIEKVLVLDKAEKLTGLVTMKDIEKSEKHPNATKDDAGQLRVGAAIGTGAETLDRAKSLADSGVDLFVVDSAHGHTKSVIETVKMIKKEFPTKDVIAGNVATPEGAEALIEAGADCIKIGMGPGSICTTRI

SEQ ID NO: 83944 - protein, 489 aa, Unknown
  Bacterial polypetide isolated from the Sargasso Sea
MPNKPPFIYKYTFDDVLLVPQSSKVLPKDVNLSSNITSSIKINIPLISAAMDTVTESEMAIALAREGGMGVIHKNLSISDQVNMVDKVKRSESGMIINPLIMDPSKTIREAKAMMDNYHISGLPVVKDGKLVGIITNRDIRFEKDLDLFVSDRMTTESLVTVPVGTTLDKAKEILQEHRIEKLLVVDGDGSLAGLITVKDIQKKEQFPIACKDKNGRLRVAAAIGVNDEAIERAQALQNSGLDALVVDTAHGHSSGVLKLIEKLKHSIGTMALIAGNVATKEGVRSLIDAGVDCPKIGIGAGASCTTRVVAGVGVPQLSSIIDCAEEAAKSNIPIIADGGIRYSGDIAKSIAAGASSVMLGSLLAGMDESPGETILFEGRQYKSYRGMGSLGAMKEGSGDRYFQEGAESTKLVPEGIEGMVPYRGPVRNTIHQLTGGLKASMGYCGADTISNFSKNSNFIQITSAGVKEGHPHEVKVIKEAPNYQISDE

SEQ ID NO: 83945 - protein, 272 aa, Unknown
  Bacterial polypetide isolated from the Sargasso Sea
MVGAAVGVGDGSEERVEALKSAGVDVIVVDTAHAHTEGVINQVKAIKKMHPDLEVIAGNIATGEAAKALSEAGADAVKVGIGPGSICTTRVVAGAGMPQVTAIADVAKELKGTDTCIIADGGIRYSGDIAKAIAAGADSIMLGSLFAGTEESPGEIELYQGRSFKSYRGMGSLGAMAQQHGSKDRYFQSDVEEAEKLVPEGIEGRVPYKGKLSKIIEQLVGGLRQSMGYTGCKDIQELQTKTEFVRITDSGKREGHVHDVSITKEAPNYSVD

SEQ ID NO: 83946 - protein, 354 aa, Unknown
  Bacterial polypetide isolated from the Sargasso Sea
MDPIKEALTFDDVTLAPNYSEILPSEVRTEVKLSKHLNISIPLLTSAMDTVTESNMAISIGKRGGIGVIHRNLSINDQIKEIRKVRAKKMLVGAAVGASLNEHIRAQKILKENIDLIVVDTAHGHTKKVAEIIKKIKKIKPTKTALCAGNIATAEAAKFLIKQGVDIIKVGIGPGSICTTRLVAGIGVPQLSAILDVKKGMGKSKTTLIADGGIKFSGDIAKALAAGADAVMIGSLFAGTDQAPGRIIKRGGKLFKSFRGMGSIGAMNKGSADRYFQSKQKDTSKYVAEGVEGFVKYKGTVEKIIYQLVGGLKSSMGYLGAKRIKDLRKKPKFVKITKAGFYESMVHNIDEIKR

SEQ ID NO: 83947 - protein, 486 aa, Unknown
  Bacterial polypetide isolated from the Sargasso Sea
MDKVKAKALTFDDVLLVPSYCDFLPSQASVKTSLTKNIDINLPLLSAAMDTVTEYRMAIALAEAGGIGILHKNCSIQEQSNAVRNVKKYESGVVRDPTTISSKQTIGQLKQLTGELNISGMPVVDNGVVKGIVTSRDFRYADNMDGLVESIMTPSEKLITVLEGTSQEVVKKMMYENRIEKVLVLDKSEKLTGLVTMKDIEKSEKHPNATKDDAGQLRVGAAIGTGAETLDRAKSLFDSGVDLFVVDSAHGHTKSVIETVKKIKKEFPTKDIIAGNVATPEGAEALIEAGADGIKIGMGPGSICTTRIIAGIGVPQISAILTIYERVKGKVPLIADGGMRYSGDIAKAVAAGADSVMLGSIFAGTEEAPGEFELYQGRSFKTYRGMGSLGAMSKRDDSNRYFQEDIDAEKLVPEGVEGRVPYKGWAINVINQLIGGLRQSMGYVGCKNIQEMKENSRFVEITNAGMTESHVHDVQITKEAPNYQRS

SEQ ID NO: 83948 - protein, 269 aa, Unknown
  Bacterial polypetide isolated from the Sargasso Sea
MRLIQTALTFDDVLLVPAFSDVLPRDTSLKTRLTRNISLNMPLVSAAMDTVTEARLAIAMAQMGGVGIIHKNLTAAEQAREVAKVKRFESGVVRDPITVPPQMKVRDVIALSRQHGISGFPVVEGAQLVGIVTNRDLRFEERLDEPVRNIMTPRERLVTVKEGTPLAEAKALMHSHRLERVLVINDAFELRGLMTVKDITKQTEHPDACKDEHGKLRAGAAVGVGEDNEERVELLVQAGVDVIVVDTAHGHSKGVLERVRWVKQNFPHV

SEQ ID NO: 83949 - protein, 487 aa, Unknown
  Bacterial polypetide isolated from the Sargasso Sea
MEKLKHKALTFDDVLLLPRYSDFLPSEVDISSNLTEKISLKMPLLSAAMDTVTESMMAISLAEAGGIGVIHKNSSINEQASEVKTVKKYESGIVRDPVTISSTSSIEELKKLTNELSISGMPVVDNGKLKGIVTSRDFRYAENMVSNVSTIMTPFEKLVTVEEGFSQDKVMQLMYENRIEKILVLDKSRNLSGLVTMKDIEKSALHPNATKDESGRLRVAAAIGTENNTIERAEALFAAGVDVFVIDSAHGHSKNVIDTIKDIRNKFKEVEIIAGNIATASAAVELSEAGVDAVKVGMGPGSICTTRIIAGIGVPQITAILKIKEALKKENVNVIADGGIRFSGDIAKAIAAGADSVMLGSLFAGTEEAPGKVELFQGRSFKTYRGMGSIGAMTERNDANRYLQEDIESDKLVPEGIEGRVPYKGLVINVINQLEGGLRQSMGYVGCKNISEMQSKTQFIEITNAGMAESHVHDVMITKEAPNYQKS

SEQ ID NO: 83950 - protein, 484 aa, Unknown
  Bacterial polypetide isolated from the Sargasso Sea
MIVEALTFDDVLIKPCASSVLPNQTELTTNITSAIKLNIPIISSAMDTVTEANLAIAMAQVGGMGVIHRNLEPKEQANQIAQVKKFESGMVVNPVTINQDAKLKEAINLMHNHSISGIPVVAKNNKLVGIITNRDVRFITDFDVAVADLMTKDKIITVNENATTEEAKGLLHKYRIEKLIVVDKDYKCIGLITVKDIEKAKLYPDASKDTLGRLIVGGATTVGKKGMERTELLVDAGADIVVVDTAHGHSSRVIKAVEEIKKKYNVQVMAGNIATKEAAQALVDAGADAVKVGIGPGSICTTRVVAGIGVPQFSAILETADYLTKANIPLIADGGIKYSGDLAKALAGGANAAMIGSLFAGTDESPGEIFLYQGRSYKYYRGMGSLGAMARGSADRYFQEEVKDTYKLVPEGIEGQVPYKGPLSGVIHQLIGGLRASMGYTGAKNLSEFRKNAVFQRISSAGLKESHVHDVVITRESPNYPSVR

SEQ ID NO: 83951 - protein, 297 aa, Unknown
  Bacterial polypetide isolated from the Sargasso Sea
MGTINESLTFDDVLLLPRYSNILPSDTNISLNLTKKIILKVPFLSSAMDTVTESRMAIAIAKSGGLGIIHRNLNINDQTKEIIKVKNKNLLVGAAVGTSKEDLLRSKYLIDNGCDLIVVDTAHGHSEKVLRTLSKLKKINGTIPICVGNIATGEAAKKLYNSGADIIKVGIGPGSICTTRMVAGIGVPQLSAVMDVKKALKNKKVKIVSDGGIKFSGDIAKALAAGADAIMMGSIFAGTEESPGKKFKYKGKLYKQFRGMGSIGAMSSGSANRYFQKNFKDKYKFVPEGVAGRVILK

SEQ ID NO: 83952 - protein, 489 aa, Unknown
  Bacterial polypetide isolated from the Sargasso Sea
MLRIVNQALTFDDVLLVPDHSDVLPKDVDLKTRLTQELNLNIPLLSAAMDTVTESRMGIALSELGGIGIIHKNLSIENQAAEVRKVKKYESGIVRDPITIRSDNKVGELIQLTNELNISGMPVVDDGKLVGIVTSRDFRYQEQHSVQVSEIMTPKDKLITANEGESPDVIKRLLQDNRIEKILLVDDSFTLTGLVTLKDINKSLDFPNATRDEEGRLLAGAAIGTKPDTLERCEALVEAGVDVLVLDSAHGHSEGVLNQIKAVKSTFKDLQIIGGNIATGEGALALVEAGADAVKVGIGPGSICTTRIVTGVGVPQVSAVAEVTQALKKKDIPIIADGGIRFSGDIAKAIAAGGHTVMLGSVLAGTEEAPGELELYQGRSYKSYRGMGSIGAMSGDQGSSDRYFQDSAGATEKLVPEGIEGRVPYKGWLEAVIHQMIGGLRQSMGYTGSHDIPSMRTKTKFVQITSAGVNESHVHDVSVTKEAPNYRMS

SEQ ID NO: 83953 - protein, 487 aa, Unknown
  Bacterial polypetide isolated from the Sargasso Sea
MKVREAITFDDVLLEPSESSVLPSETILKTKITKDIDLNVPLASAAMDTVTESEMAIAMAQAGGIGVIHRNLEIEDQVNAVNKVKKYESGMVVNPLTISPESTLEDALVLMKENSISGVPVTDKKTNKLEGILTNRDVRFASNKNQKVSELMTKEELITVKDNVSENEAKEILHKHRIEKLLVVDDNYSCVGLITVKDIEKSNLHPDATKDEKGRLRVAAATTVGDKGFERAEALIDSETDIIVVDTAHGHSIKVPKIIERIKKLSNSVQVVAGNVATKEASKSLIGAGADCIKVGIGPGSICTTRIIAGVGVPQLTAIMDCVEEAKKNSIPVIADGGIKFSGDLAKAIAGGADLAMIGSLFAGTDETPGEVFLHQGRRFKSYRGMGSVAAMAEGSADRYFQSDLGASDKLVPEGIEGQVPYIGSVHNVIYQLVGGLRASMGYTGCKNIEDFQTKTNFIKITSASLNESHTHDVVVTREAPNYPTRG

SEQ ID NO: 83954 - protein, 486 aa, Unknown
  Bacterial polypetide isolated from the Sargasso Sea
MEKVLTEALTFDDVLVLPMHSNVLPKEVSLKSKFTKNISLNLPFCSAAMDTVTEAKMAIALASLGGIGIIHKNNTPEEQAIQVKQVKKFESGIVRDPISIRSNNTIGELKQLTSELKISGMPVVDDDELKGIVTGRDFRYAKDMEQTVSEIMTSREKLITVKEGETQDVVKTLMYKHRIEKILVLDDKDKLVGLMTMKDIEKSIDYPLASRDSEGRLIVGAAIGVGKDLMERTKALVNAGVDVFVLDSAHGDSKRVIDAIKEIKKKFPEIDIVGGNVATASGAKSLIKAGVDAIKVGVGPGSICTTRVVSGVGVPQLSAVMDIVSVSGDIPVISDGGVRYSGDIVKAIGAGANTVMLGSVFAGTEEAPGEVELFQGRSFKTYRGMGSLGAMSKRADAERYMQGEETNADKLVPEGIEGRVPFRGWLKDVVYQLEGGLRQGMGYTGSKDITDLQKRVQFQKITRSGRAEGHVHDVSITKEAPNYRVD

SEQ ID NO: 83955 - protein, 360 aa, Unknown
  Bacterial polypetide isolated from the Sargasso Sea
MKKTESSELLPNRDMRFAADSSTPVSRMMTKENLAILTEPADRRQAINLMKERRIEKLLITDKRGRLTGLLTLKDTEQAVLNPTACKDNLGRLRVAAATTVGDEGYLRSDCLIDAGIDLLVIDTAHGHSDAVIEAVGRVKKRSNNVQVVAGNVATAEACKALIDAGADAIKVGIGPGSICTTRMVAGVGVPQLTAILDCVAASGQTPVIADGGIKFSGDFAKAIAAGASCAMVGSMIAGTDESPGEVILYQGRSFKAYRGMGSLGAMARGSADRYFQKDAASDKLVPEGIEGQVPYKGPANAVIHQMVGGLRASMGYTGCQTIEEMRNNCQFVKITGAGLKESHVHDVQITRESPNYRII

SEQ ID NO: 83956 - protein, 426 aa, Unknown
  Bacterial polypetide isolated from the Sargasso Sea
MDKVKAKALTFDDVLLVPSYCDFLPSQASVKTSLTKNIDINLPLLSAAMDTVTEYRMAIALAEAGGMGILHKNCSIQEQSNAVRNVKKYESGVVRDPTTISSKQTIGQLKQLTGELNISGMPVVDDGVVKGIVTSRDFRYADNMDGLVESIMTPSEKLITVLEGTSQEVVKKMMYENRIEKVLVLDKTEKLTGLVTMKDIEKSEKHPNATKDDAGQLRVGAAIGTGSETFDRAKSLVDSGVDLFVVDSAHGHTKSVIETVKMIKKEFPTKDVIAGNVATPEGAEALIEAGADGIKIGMGPGSICTTRIIAGIGVPQISAILTIYEKVKGKVPLIADGGMRYSGDIAKAIAAGADSVMLGSIFAGTEEAPGEFELYQGRSFKTYRGMGSLGAMSKRDDSNRYFQEDIDAEKLVPEGVEGRVPYKGWA

SEQ ID NO: 83957 - protein, 309 aa, Unknown
  Bacterial polypetide isolated from the Sargasso Sea
MGPIKEALTFDDVTLAPKYSEVLPSEVDTKIQLSKHISLKIPLLSSAMDTVTESKMAIAIAKAGGIGIIHRNLSVTKQIQEIKKVKANKLIVGAAVGAGLNEIIRADAILKEGVDLIVVDTAHGHTKKVAEIIKKIKKKKDMKTAICAGNIATPEAAKFLIKLGVDIIKVGIGPGSICTTRLVAGIGVPQLSAIINVKNGVKKKKIKIISDGGIKFSGDIAKALAAGADAVMIGSLFAGTIESPGKLIKKRGKLFKNFRGMGSVGAMNKGSADRYFQNKQKDKSKYVPEGVEGLVKFKGNVDKVIFKSS

SEQ ID NO: 83958 - protein, 387 aa, Unknown
  Bacterial polypetide isolated from the Sargasso Sea
PNWFSVLRGCTPRRLKSGVSTDKNFEIHRRQENAMEGKIVQAGITFDDVLLIPRFSTVVPSEVDVSTRLTRSIGLNLPLVSSPMDTVTESAMAISLAQEGGLGVIHKNLSIEGQADEVDKVKRTANGIIADPVTLPPTATVARAREVMAQSNISGVPITTEGQKLVGIITKRDLRFLERGDTPIAEIMTQTGLVTATGTVTLDEAEKVLMANKVEKLLLVDGEGVLTGLITIKDIDMLKRFPNACKDNQGRLRVGAAVGVFDFERAENLISKGVDVLVVDSAHGHSSNVMETVQEIKKRWEIQVIAGNVATREGCRDLLKSGADGIKVGIGPGSICTTRVISGVGVPQISAVWEASQEVAGTDVPIIADGGIRYSGDITKAIAAGAN

SEQ ID NO: 83959 - protein, 306 aa, Unknown
  Bacterial polypetide isolated from the Sargasso Sea
MDTVTESKMAIAIAKMGGIGVIHRNLSVDAQISEIKKVKKANFVVGAAIGVNNNDLDRVKKLTEANVDMIVIDTAHGHTQKVSKMIYKVKKITKKIPLCAGNIATGKAAKFLASCGVDIVKVGIGPGSICTTRLVAGVGVPQLSAILDVKKALGKSKTKIISDGGIKFSGDLAKAIAAGADAVMIGSLFSGTTESPGKILKRKGKLYKTFRGMGSAGAMSVGSADRYYQKKFKDISKFVPEGVEGIVKFKGPVNKIIYNLTGGLRSSMGYLGAKTINDLQKRGEFVKISKAGFYESMVHNVDQVIK

SEQ ID NO: 83960 - protein, 367 aa, Unknown
  Bacterial polypetide isolated from the Sargasso Sea
MPVVDNGQLKGIVTGRDFRYAENMDSNVSTIMTPFEKLVTVNEGFSQEDVMQLMYKNRIEKVLVLDENKNLSGLVTMKDIEKSAQHPNATKDSSGRLRVAAAIGTEQNTLERAEALFEAGVDVFVIDSAHGHSKNVIDTIKTIKRSFKDIEIIGGNIATADAAKELAKAGVSAVKVGMGPGSICTTRIIAGIGVPQITAILEIKQAIKKNNVKVIADGGIRFSGDIAKAISAGADSVMLGSLFAGTEEAPGKVELFQGRSFKTYRGMGSIGAMTERNDANRYLQENTESDKLVPEGIEGRVPYKGLVINVINQLEGGLRQSMGYVGCKNIEAMQKESQFIEITNAGMTESHVHDVMITKEAPNYQRS

SEQ ID NO: 83961 - protein, 351 aa, Unknown
  Bacterial polypetide isolated from the Sargasso Sea
MEKIKFKSLTFDDVLLLPRFSDFAPNDAILKTAFTKEINLNLPIVSAAMDTVTESKMAIALAESGGIGVIHKNNDIDAQAQQVKTVKKYESGIVKDPITISSTKTIDELMQLTSELNISGMPVVDNGKLRGIVTARDFRYADDMNAKVASIMTTYEDLVTVSEGTDQDTVKKLMYQNRIEKVLVLDKAGNLSGLVTMKDIEKSAAFPLATKDSSGQLIVAAAIGTETQTIERAEALEAAGVDVLVVDSAHGHSKNVIDTVKLIKQTFSDIQVVGGNVATPDGALALIEAGADAVKIGMGPGSICTTRIIAGIGVPQVTAILKIREAIKKLSVPLIADGGIRFSGDLAKAIA

SEQ ID NO: 83962 - protein, 486 aa, Unknown
  Bacterial polypetide isolated from the Sargasso Sea
MEKVLAEALTFDDVLVLPMHSDVLPKQVLLKSRFTKNISLNLPFCSAAMDTVTESKMAIALASLGGIGIIHKNNSPDEQALEVKKVKKFESGIVKDPITIKSSNTIEELKQLTSELNISGMPVVDEDELKGIVTGRDFRYARDMEQTVAEIMTPKEKLITVKEGESQDVVKSLMYKNRIEKVLILDDHNKLSGMITMKDIEKSIDYPLASRDSEGRLIVGAALGVSSDLMERAEKLSAAGVDVFVLDSAHGDSEGVINAIKEVKKKFSKIEIIGGNVATAEGAKALIDAGVDAVKVGVGPGSICTTRIIAGVGVPQLSAVLNVVQAAKDIPVISDGGVRFSGDIVKAIGAGADSVMLGSALAGTEEAPGEVELYQGRSFKTYRGMGSIGAMSKRTDANRYMQGEDIDTDKLVPEGIEGRVPFRGWLKDVVYQLEGGLRQGMGYTGSKNIEELKKKVQFQKITRSGVLESHVHDVSITKEAPNYRAD

SEQ ID NO: 83963 - protein, 489 aa, Unknown
  Bacterial polypetide isolated from the Sargasso Sea
MAQVKEYLTFDDVLLKPQASTILPNNVDISTNLTKDIKLNIPIISAAMDTVTESKMAISMSQNGGLGVIHKNYDIETQSYEVKKVKRYEAGIVYNPITMSPNNTIEDVLNVMEKQNISGFPVVDKANKLQGIITNRDVRFVINKKTKVKDLMTKKVISITQTQSKGMSSFGLAKKLLQENRIEKLVVTDNNNKCIGLITVKDIQRGEKFPYSVKDKNGQLLVGAAIGSKPNDLQRAIELDKAGVDILFIDTAHGHSSAVLESFKKIRKKIKLPIVVGNIATPEAAKDLIKLGADAIKVGIGPGSICTTRIVAGVGVPQFTAIQDIATITNKNKIPMISDGGIRYSGDIVKALAAGANCIMAGSLFAGTDESPGEVFLFQGRSYKSYRGMGSLGAMARGSADRYFQDEINEAIKLVPEGIEGRIPYKGQVSNVLFQLTGGLRSGMGYTGSKNLTILKKNAKFVRLTNSGINESHVHGVQVTKEAPNYRSN

SEQ ID NO: 83964 - protein, 426 aa, Unknown
  Bacterial polypetide isolated from the Sargasso Sea
MTIEKTALTFDDVLLKPNYSDVLPRETNLSTRLTKNLSIQIPLLSAAMDTVTEYQLAIAIAQEGGIGIIHKNFSVDDQASQVNRVKKFESGIISDPVTVSSDITIREVLEITKFNNISGVPVVDDGVTVGIVTNRDLRFETNLDGLVSSVMTPKDKLVTVKEGAGEEEVLRLLHQHRIEKVLVVDDSFHLKGMVTAKDFQKATDFPLASKDGNGALLVGAAVGVGDGSEERIEALKAAGVDVIVVDTAHAHTEGVINQVKSIKKMHSDLEVIAGNIATGEAAKALADAGADAVKVGIGPGSICTTRVVAGAGMPQITAITDVANQLKGTDTCIISDGGIRYSGDIAKAIAAGANSIMLGSLFAGTEESPGEIELYQGRSFKSYRGMGSIGAMAQQHGSKDRYFQSDVEEPEKLVPEGIEGRVPYKG

SEQ ID NO: 83965 - protein, 455 aa, Unknown
  Bacterial polypetide isolated from the Sargasso Sea
MQIKEALTFDDVLLVPNKSNILPNEANTQTLITSRISLNSPIMSSAMDTVTESRMAIALAQYGGIGIIHRNLKIKEQVACVNDVKRFESAIVYDPVTLKENQKLREAKDLQKKLNITGFPVVNENNILKGILTNRDMRFVENLETPVSEMMTDTNLAIVNEPVSNEKARAILSERRIEKLLIINKHNELVGLMTVKDLENSVLNPLATKDSLGRLRVGAASTVGQKGLQRSMALIEAGADLIVIDTAHGHSSHVLESVEDLRNKFPDIDIVAGNVATKEATRALIKAGADAVKVGIGPGSICTTRIVAGVGVPQFTALLECAEEAEKHGKVIIADGGIKYSGDFAKAIAAGASCVMVGSLLAGTDEAPGEVLYYQGSSVKNYRGMGSVGAMARGSADRYFQKEVEADKLIPEGIEGHVPYKGPVGKVLHQLLGGLKAAMGYTGNQTIDSMRKNCS

SEQ ID NO: 83966 - protein, 489 aa, Unknown
  Bacterial polypetide isolated from the Sargasso Sea
MLRIIQEALTFDDVLLVPGHSTVLPHTANLQTRLTRGVTLNIPMVSAAMDTVSEARLAIALAQEGGIGFIHKNMKPEEQAKHVREVKKYESGVVSDPVTVEENATIGEVIALSKRLGYSGFPVTDKDNNLIGIVTGRDLRFEKRLNLPIRNVMTGKDDLVTVKEGASSDVVLDLMHEHRIEKILVVDDAFKLTGLITVKDFQKAENKPNACKDSLGRLRVGAAVSVGPGTDERIALLVDAGVDVLLIDTSHGHSQGVIDRVKKVRADYPDVQIIAGNVATGDGAKALADAGVDAVKVGIGPGSICTTRIVTGCGVPQITAVSDAVEALKDTDIPVIADGGIRFSGDIAKALAAGASCVMVGSMLAGTEEAPGEVELFQGRYYKSYRGMGSLGAMDQSHGSSDRYFQDSDNAEKLVPEGIEGRVAYKGPIANIIHQQMGGLRSAMGLTGCATIEELNTKAQFVRVTSAGMGESHVHDVSITKEAPNYRLG

SEQ ID NO: 83967 - protein, 486 aa, Unknown
  Bacterial polypetide isolated from the Sargasso Sea
MHIRDALTFDDVLLEPSSSSVVPSSVSTSTRLTQDITLGIPLLSAAMDTVTESRLAIAMAQLGGLGVIHKNMDIEKQAAEVKAVKKFEAGMVVNPVTIFPDETLADALALMCQYKISGIPVVRRRSGKLAGILTNRDVRFATNKLQPISELMTKKVITVTEGVTASDAQRLLHLHRIEKLVVTDSENKCVGLITVKDMEKADNHPDACKDAQGRLRSAAATGVGDEGVERARALFDAEVDVIVVDTAHGHSENVIDSVSRIRKLSNYSQIIAGNIATTEGAKALIDAGADSVKVGIGPGSICTTRMVAGVGVPQLTAILDAVEACRKSDIPVISDGGIKYSGDLAKAIAAGADCAMLGTLFAGTEESPGEVFLHQGRSYKSYRGMGSMGAMARGSADRYFQEEVSDHQKFVPEGIEGQVPYKGPISAVVHQLVGGLKAAMGYTGSASILEMQKEKKFLRITNAGLRESHVHDVTITREAPNYRPNL

SEQ ID NO: 83968 - protein, 358 aa, Unknown
  Bacterial polypetide isolated from the Sargasso Sea
MVPIKEALTFDDVTLMPKYSEILPSDVDTSIKLTNYLKLKIPLLSSAMDTVTESKMAIAIAKAGGIGIIHRNLDIKKQILEIKKVKKQKLLVGAAVGAGPSEFKRAEAILKEKIDMIVVDTAHGHTKKVSEIIKFIKKTKDKKTALCAGNIATPAAAKFLLKLGVDVIKVGIGPGSICTTRLVAGIGVPQLSAILEVRNGIKNKNVKIISDGGIKYSGDLAKAFAAGADAVMIGSLFAGTDEAPGKLIRRNGKFFKNFRGMGSVGAMNKGSADRYFQSKQKDSSKYVPEGVEGFAKYKGKVDNIIFKLIGGLRSSMGYLGSRQIKYLRDKPQFVKITKAGFYESMVHNVDIVKSDNKY

SEQ ID NO: 83969 - protein, 341 aa, Unknown
  Bacterial polypetide isolated from the Sargasso Sea
AIALAQEGGIGVIHKNLDPTMQAEEVKKVKKYESGIITEPVVTSPLASINQVLDLTKKHNISGVPIVNGKELKGIVTARDLRFVTKTNNKISSIMTPKERLVTVKEGASKEEIKKLLHKHRIEKILVVNDKFHLKGLITVKDIQKSTDYPNACKDKFGRLRVGAAIGVNKDALSRADILIKSEVDFLVVDTAHGHSEMVISTVKALKKKHPKTDVIAGNIATKKAALDLKKAGVDAVKVGIGPGSICTTRIVSGVGVPQITAIDEVSRALKRSNVKVIADGGIRFSGDISKAIVAGADTVMLGGLFAGTQESPGEIELYQGRTYKNYRGMGSIAAMKDGSK

SEQ ID NO: 83970 - protein, 358 aa, Unknown
  Bacterial polypetide isolated from the Sargasso Sea
MGPIKEALTFDDVTLTPNYSEILPSEVDTKIQLSRNITLKIPLLSSAMDTVTESKMAISIAKAGGIGIIHRNLNIEKQIQEIKKVKSKNLLVGAAVGAGVDEIVRAEAILKEGVDLIVVDTAHGHTKKVAEIIKKIKRKKGKSTSICAGNIATPEAAKFLLKLGVDIIKVGIGPGSICTTRLVAGIGVPQLSAIINVKSGVKNKNVKIISDGGIKFSGDIAKALSAGADAVMIGSLFAGTVESPGKLIKKKGKLYKNFRGMGSVGAMNKGSADRYFQKKQKDKSKYVPEGVEGLVKFKGSVEKVIYKLIGGLKSSMGYLGAKTITKLRKKPNFVKITKAGFYESMVHNIDEVKKDSEF

SEQ ID NO: 83971 - protein, 368 aa, Unknown
  Bacterial polypetide isolated from the Sargasso Sea
MAYQINTNYSVTFDDVLLSPAYSEIKPKDVDTSITIGKVKLHIPIISAAMDTVTENKMAINLALNGGLGVIHRNMPIDKQASEVKKVHSFKVNVKKFQNAVINSNKQIAVGAAIGVENNAYLRLLELLKVGIDIVFIDVAHAHTKTTLQFIEKAKKVLKKTPLIVGNIATKKAASDLISAGVDAIKVGIGPGSICTTRVVTGVGIPQLSAVMDTYQVAKKFKIPVIADGGIKTSGDIAKAIAGGASACMIGSLFAGTEESPGKLLTIKGKKFKSYRGMGSVGAMQKGSFDRYSQEETKNAKKLVAEGVEGMVPYKGKIEDVAYQLVGGLRSSMGYTGHKTIKKMQGNCKFVFISKAGARESNVHDVIM

SEQ ID NO: 83972 - protein, 452 aa, Unknown
  Bacterial polypetide isolated from the Sargasso Sea
IDLNVPLASAAMDTVTESSMAIAMAQAGGIGVIHRNLEIEQQIKEVNKVKKYESGMVVNPLTISPDSTLEDALALMKENNISGVPVTDTKTNKLEGILTNRDVRFASNKNQKVSELMTKNDLITVKDNVSENEAKEILHKHRIEKLLVVDDEYRCIGLITVKDIEKSNLHPDATKDEKGRLRVAAATTVGDKGFERAEALIDSETDIIVVDTAHGHSIKVPQIIERIKKLSNSVQVVAGNVATKEASKSLIGAGADCIKVGIGPGSICTTRIIAGVGVPQLTAIMDCVNEAKKHSIPVIADGGIKFSGDLAKALAGGADLAMIGSLFAGTDETPGEVFLHQGRRFKSYRGMGSVAAMAEGSADRYFQSDLSASDKLVPEGIEGQVPYIGSVHNVIYQLIGGLRASMGYTGCKNLEDFQTKTNFIKITAASLNESHTHDVVVTREAPNYPTRG

SEQ ID NO: 83973 - protein, 354 aa, Unknown
  Bacterial polypetide isolated from the Sargasso Sea
MESIKEALTFDDVTLAPNYSAILPSEVSTSINLTESLKIKIPLLSSAMDTVTESSMGIAIARSGGLGIIHRNLNVDEQIKEIRKVKSKKLLVGAAVGASDKELKRAQKILKENLDLIVIDTAHGHTKKVGDIIKKIKKIRPKKTAICAGNIATAEAAKFLVGLGVDIIKVGIGPGSICTTRLVAGIGVPQLSAILNVKKGIGKSKTRLIADGGIKFSGDIAKALAAGADAVMIGSLFAGTDEAPGKKIKKNGKLYKYFRGMGSIGAMNKGSADRYFQTKQKDTSKYVAEGVEGYIKYKGKVDNIIYNLVGGLKSSMGYMGAKKVIDLRKKPKFVKITKAGFYESMVHNIDVIKK

SEQ ID NO: 83974 - protein, 354 aa, Unknown
  Bacterial polypetide isolated from the Sargasso Sea
MGPIKESLTFDDVTLAPKYSEILPSEVITETKLAKNLTLKVPILSSAMDTVTESKMAIALAKSGGIGIIHRNLTISKQKIEIKKVQKQKFIVGAAVGAGENEEKRARSILKENIDLIVVDTAHGHTKKVAQIIKVIKKIKPSKTALCAGNVATIDAAKFLIRLGVDIIKVGIGPGSICTTRLVAGIGVPQLGAITEVRRGIKKSKTTLIADGGIKFSGDIPKALAAGADAVMIGSLFAGTDEAPGKLIKKGGKKFKSFRGMGSIGAMNKGSADRYFQKKQRDTSKYVAEGVEGLVKYKGKVDKIIYQLIGGLKSSMGYLGSKRIINLRKGPKFIKITKAGFYESMVHNVDEIKK

SEQ ID NO: 83975 - protein, 331 aa, Unknown
  Bacterial polypetide isolated from the Sargasso Sea
MEHSTIQKSLSFDDVLIKPARSSILPTEVQSHTSITSNIKLGIPLISSAMDTVTEYKLAIAIAQSGGLGILHKNMPIDDQAQNVAKVKKFETGMVIDPVTIAPEATLSDALDLMKEHQISGVPVVDSNDKLLGILTNRDVRFATNMSQKISELMTSENLITVKEGISSDDAQKLLHAHRIEKLIVVDDNRKCIGLITVKDIEKSQLNPHASKDAKGRLLVGSAIGVGIEAINRAERLVDAGVDVLVIDTAHGHSEKVISTLEEIKSHFSIDVVVGNVATKEATAELIDKGADCIKVGIGPGSICTTRVVAGIGVPHFSAILDCAGIANKKK

SEQ ID NO: 83976 - protein, 482 aa, Unknown
  Bacterial polypetide isolated from the Sargasso Sea
MQIREALTFDDVLLVPAQSSVLPLDVDTRTNVTKDITLNIPLLSSAMDTVTESQMAITMAQSGGIGVIHRNLEVEQQAEEVRKVKRFESGIVYNPITLSENQTLADADNLRDRYNVTGFPVVDEKSRVVGIVTNRDMRFAADSSTPVSKMMTKENLAILTEPADRRQAINLMKERRIEKLLITDNQRRLTGLLTLKDTEQAVLNPTACKDNLGRLRVAAATTVGDKGYLRSDCLIDSGVDLLVIDTAHGHSDAVIEAVSRVKKLSNNVQVVAGNVATADACKALIDVGADAIKVGIGPGSICTTRMVAGVGVPQLTAILDCVEASGKTPIIADGGIKFSGDFAKAIAAGASCAMVGSMIAGTDESPGEVILYQGRSFKAYRGMGSLGAMARGSADRYFQKDAASDKLVPEGIEGQVPYKGPANSVIHQMVGGLRASMGYTGCKTIAEMRNNCQFVKITGAGLKESHVHDVQITRESPNYRII

SEQ ID NO: 83977 - protein, 324 aa, Unknown
  Bacterial polypetide isolated from the Sargasso Sea
MLRLIKEALTFDDVLLVPAHSTVLPNTAILKTRLTNTIELNIPLVSAAMDTVTEARLAIAMAQEGGLGFIHKNMSIEKQAEEVRKVKIYEAGVVQQPVTVTPSTTLADLKVLTAKNGFAGYPVVNEANELVGIITGRDVRFVTDWSKTVEEVMTPKARLVTVAEGTKLDEVQKLMHSNRIEKVLVVDDNFKLKGLITVKDFEKAERKPNACKDELGRLRVGAAVGAGAGNEERVDALVKAGVDVLLIDSSHGHSEGVLQRIRETRAKYPDLQIIGGNVATAEGALALVEAGVNAVKVGIGPGSICTTRIVTGVGVPQITAVSDA

SEQ ID NO: 83978 - protein, 489 aa, Unknown
  Bacterial polypetide isolated from the Sargasso Sea
MLRIVDQALTFDDVLLVPDHSDILPKDVKLQTRLTRTLDLNIPLLSAAMDTVTESRMGIALSELGGIGIIHKNLSIENQAAEVRKVKKYESGIVRDPITIRSDNEVGELIQLTKELNISGMPVVDNSELVGIVTSRDFRYQENLTAKVSEIMTPKERLVTAKEGESPDVIKRLLQENRIEKILLIDDSFQLTGLVTLKDINKSLDFPDAARDSEGRLLVGAAIGTKPDTLDRCEALINAGVDVLVADSAHGHSEGVLSKITEIKNTFKDIQIIGGNVATGEGALALVKAGADAVKVGIGPWIICTTRIVTGVGVPQVTAVAQVTEALKKTDVPIIADGGIRFSGDIAKAIAAGGHTVMLGSVLAGTEEAPGELELYQGRSYKSYRGMGSIGAMSGDQGSSDRYFQDSSEATEKLVPEGIEGRVPYKGWLQAVIHQMIGGLRQSMGYTGSHDIETMRTKPKFVQITSAGVSESHVHDVSVTKEAPNYRIS

SEQ ID NO: 83979 - protein, 358 aa, Unknown
  Bacterial polypetide isolated from the Sargasso Sea
MGPIKEALTFDDVTLTPNYSEILPSDVNTTTFLSKKFKLKIPLISSAMDTVTESKMAIAIAKAGGIGVIHRNLDIKKQILEIKKVKKQNLLVGAAVGAGPLEFERAKAIINEKVNLIVVDTAHGHTKKVADIIKKIKKIKNKNTLLCAGNIATANAANFLAKLGVDIIKVGIGPGSICTTRLVAGIGVPQLSAILDVKKGLKNKNIKIIADGGIKFSGDIAKALSAGADAVMIGSLFAGTDESPGKIVKKNGKLFKNFRGMGSIGAMNKGSADRYFQKKQKNKSKYVPEGVEGYVKYKGSVEKIIFKLIGGLKSSMGYLGSRKIIYLRKKPKFVKITKAGFYESMVHNIDEIKKDEKY

SEQ ID NO: 83980 - protein, 356 aa, Unknown
  Bacterial polypetide isolated from the Sargasso Sea
MVPIKEALTFDDVTLVPKYSSVLPSDVITKTELSKNLTLRIPLLSSAMDTVTESKMAIAMAEAGGIGVIHRNLSIKKQILEIRKVKKKKLIVGAAVGAGGEEVKRAEAIIKENINLIVVDTAHGHSKKVAEIIKKIKKIKSSKTTLCAGNIATPEAAKFLIKLGVDVVKVGIGPGSICTTRLVAGIGVPQLSAILNVREKFKSKNVKIISDGGIKFSGDIAKALAAGADAVMIGSLFAGSREAPGKLIKKKGIIYKNFRGMGSVGAMNKGSADRYFQKKQTDTSKYVPEGVEGLVKFKGKVDKIIYKLIGGLKSSMGYLGSKEIKGLRSKPKFVKITKAGFYESMVHNIDEVKKET

SEQ ID NO: 83981 - protein, 401 aa, Unknown
  Bacterial polypetide isolated from the Sargasso Sea
VKKYEGGMIIEPHTISPEATGHQALEVMTTKNFTGLPVTINDGDLLGIVTMRDLRYEKNLHFKVKKLMTPKDKLITVQAGIGSNEARELLNKYKIEKLPVVNKSFKLQGLITMKDIEKSKEFPNSSKDKQGRLIAAAAIGVGQDMIERVSSLVSSGLDVVFIDTAHAHSKKVIDSVKLIKKKFKSLEIVAGNIATSEAALALIKAGADALKVGIGPGSICTTRIIAGIGVPQMTAIMDVSSVAKKYKIPVIADGGIKFSGDITKALAAGADCVMIGNLLAGTDESPGDLVLYQGRSYKTYRGMGSIEAMKEGSKDRYYQEDIIDSKLVPEGIEGRVPYRGTTSKVIFQLVGGLKAGMGYTGSKNLLALKKANFMKLTGAGLKESHVHDVVISREAPNYSLD

SEQ ID NO: 83982 - protein, 227 aa, Unknown
  Bacterial polypetide isolated from the Sargasso Sea
MKYIKKNFKNQEVIVGNIATEDAALDLIKAGADALKVGIGPGSICTTRVVAGVGVPQLTAIMNVYKAARKSKIPIIADGGIRYSGDIAKALAAGADTVMLGGLLAGTDEAPGEVEMYEGRTYKSYRGMGSIAAMQKGSKDRYNQDSASSSKLVPEGIEGRVPYKGTMNTLLHQLIGGLKSSMGYVGCENLSEMKNKTKFIRITSSAKQESHIHDVDIVKEPPNYQPR

SEQ ID NO: 83983 - protein, 368 aa, Unknown
  Bacterial polypetide isolated from the Sargasso Sea
MAYQINTNYSVTFDDVLLSPAYSEIKPKNVDTSITIGKIKLHIPILSAAMDTVTENKMAINLALNGGLGVIHRNMPIDKQASEVKKVNSFKVNSKKFQNAVINSNKKIAVGAAIGVENNAYLRLLELLKVGVDIVFIDVAHAHTKTTLQFIEKAKKVLKKTPLIVGNIATKKAASDLISAGVDAIKVGIGPGSICTTRVVTGVGIPQLSAVMDTFQVAKKFKIPVIADGGIKTSGDIAKAIAGGASACMIGSLFAGTEESPGKLLTIKGKKFKSYRGMGSVGAMQKGSFDRYSQEETKNAKKLVAEGVEGMVPYKGKIEDVAYQLVGGLKSSMGYTGHKTIKKMQGNCKFVFISKAGARESNVHDVIM

SEQ ID NO: 83984 - protein, 487 aa, Unknown
  Bacterial polypetide isolated from the Sargasso Sea
MSNNIEKKLTFDDVLLVPRKSSVLPKEVDCSSKLTKNITLNIPIMSAAMDTVTESDMAIALARQGGIGVIHKNLSIEGQALMVDKVKRYESGMIRNPITLDDQKTVRDAKQLMDQYSIGGLPVLSKGKLVGIITKRDIRFESDLDTLVKNRMTSKDLITVNSDTSNEDAKKILQKHRIERLLVVDKQNNLDGLITVKDLTKKEEFPLSTKDKNGRLRVAAAISVRDDWKDRVKALVKVGVDAIVIDTAHGHSQFVLDLVKKVKKEFPKVDLIAGNVSTAEATEDLIKAGADCVKIGIGAGSSCTTRIIAGVGVPQLSAVMDCAKVGTKLNTPIIADGGIRYSGDIAKSLAAGANVVMLGGMLAGMDESPGETIVYEGRRYKSYRGMGSLAAMKEGGGERYFQQEKDELKLVPEGIEGMVPFRGPVNNTIFQLIGGLKSSMGYCGAKDLKSFYKNKKFIEISAAGIKESHPHEVSIIKEAPNYQGHDK

SEQ ID NO: 83985 - protein, 172 aa, Unknown
  Bacterial polypetide isolated from the Sargasso Sea
VAGIGVPQLSAILNVKKGIGKSKIRLIADGGIKFSGDIAKALAAGADAVMIGSLFAGTDEAPGKKIKKNGKLYKYFRGMGSIGAMNKGSADRYFQTKQKDSSKYVAEGVEGYIKYKGKVDKIVYNLVGGLKSSMGYMGAKKVIDLRKNPKFVKITKAGFYESMVHNIDVVKK

SEQ ID NO: 83986 - protein, 489 aa, Unknown
  Bacterial polypetide isolated from the Sargasso Sea
MLRIVKEAITFDDVLLVPAHSTVLPHTADLRTQLTSKITLNIPMVSASMDTVTEARLAIALAQEGGLGFIHKNMTIEEQAANVRKVKKYESGVVSDPVTVRPEQSIREVQQLAAQHGFSGFPVVDADNNLVGIVTGRDLNVETNPQLAISSVMTPKERLVTVNEAGPRAEALALMHKHRIEKVLVVDNDFKLKGLITVQDYNKAASKPNACKDEFGRLRVGAAVGVGPGTDERIAALVEAGVDILLIDTSHGHSEGVLDRVRQTRAMYPDLQIVAGNVATAEGAKALALAGANAVKVGIGPGSICTTRIVTGCGVPQLTAISDAVDGVQGMDVCIIADGGIRFSGDIAKALVAGAHCVMVGSMFAGTEEAPGDVELYQGRYYKSYRGMGSLGAMAQRNGSSDRYFQGSNNAEKLVPEGIEGRVAYKGPIGTIIHQQMGGLRSSMGLTGCSTIAEVRTKPVFVKVTSAGMGESHVHDVQITKEAPNYRLG

SEQ ID NO: 83987 - protein, 222 aa, Unknown
  Bacterial polypetide isolated from the Sargasso Sea
IKKIKKLRPTRTAICAGNIATEEGAKFLVGLGVDIIKVGIGPGSICTTRLVAGIGVPQLSAILNVKKGIGKSKTRLIADGGIKFSGDIAKALAAGADAVMIGSLFAGTDEAPGKKIRKKGKLYKYFRGMGSIGAMNKGSADRYFQSTQKDTSKYVPEGVEGYIKYKGKVDKIIYNLVGGLKSSMGYMGAKKVIDLRKKPKFVKITKAGFYESMVHNIDVIKK

SEQ ID NO: 83988 - protein, 485 aa, Unknown
  Bacterial polypetide isolated from the Sargasso Sea
MAQIETALSYDDVLLLPAESAVLPAEVDLSTRLTTGISLNAPIVSAAMDTVTEAEMAIAMAQSGGIGVIHRNMPIEEQAVEVDKVKRFESGLVLEPVTVDPKMTVGELRSLKDQYGFSGFPVINGDGSIVGMVTNRDIRFVEDPNTEVSEVMTTDLITVPEHVDMEEAKRLLHQHRIEKLVVVNEGGGFSGLITVRDINRSRDNPLSCKDDMGRLRVVAATGTGEKGILRALAMFEAGADAVAVDTAHGHSHGVLDTVRAIREQAGPDAQIIAGNVGTPEAAGALIDSGANAVKVGIGPGSICTTRIVTGVGVPQFTAVMSAVEACAERGVPVIADGGIKYSGDIAKAIASGADCVMVGSLLAGTDESPGETILYQGRAYKQYRGMGSLGAMSKGSSDRYFQSSQGDTRKYVPEGIEGRVPSRGPVDQVLYQLMGGLRSSMGYTGNSTIKEMKSECKFVRITNAGLSESHVHDVEITREAPNYRR

SEQ ID NO: 83989 - protein, 209 aa, Unknown
  Bacterial polypetide isolated from the Sargasso Sea
TADAALELVKAGVDAVKVGMGPGSICTTRIIAGIGVPQISAILDIKNALKKTDINIIADGGIRFSGDIAKAIAAGADSVMLGSLFAGTEEAPGKVELFQGRSFKTYRGMGSIGAMTERDDANRYMQEDVDQSKLVPEGIEGRVPYKGLVINVINQLEGGLRQSMGYVGCKSIKEMQNNSQFVEITNAGMTESHVHDVMITKEAPNYQRS

SEQ ID NO: 83990 - protein, 388 aa, Unknown
  Bacterial polypetide isolated from the Sargasso Sea
MTIEKTALTFDDVLLKPNYSDVLPRETNLSTRLTKNLSIQIPLLSAAMDTVTEYQLAIAIAQEGGIGIIHKNFSVDDQASQVNRVKKFESGIISDPVTVSSDITIREVLEITKFNNISGVPVVDDGVTVGIVTNRDLRFETNLDGLVSSVMTPKDKLVTVKEGADEEEVLRLLHQHRIEKVLVVDDSFHLKGMVTAKDFQKATDFPLASKDGNGALLVGAAVGVGDGSEERVEALKTAGVDVIVVDTAHAHTEGVINQVKSIKKMHSDLEVIAGNIATGEAAKALADAGADAVKVGIGPGSICTTRVVAGAGMPQITAISDVANQLKGTDTCIISDGGIRYSGDIAKAIAAGANSIMLGSLFAGTEESPGEIELYQGRSFKSYRGMGS

SEQ ID NO: 83991 - protein, 489 aa, Unknown
  Bacterial polypetide isolated from the Sargasso Sea
MLRIVNQALTFDDVLLVPDHSDVLPKDVKLKTRLTKNLNLNIPLLSAAMDTVTESRMGIALSELGGIGIIHKNFSVEDQAAEVKKVKKYESGIVRDPITIRSDNEVGELIQLTKELNISGMPVVDDGNLVGIVTSRDFKYQENSTAKVSEIMTPKDRLVTAKEGESADLIKKLLQENRIEKILLIDDSFKLTGLVTLKDINKSLDFPNAARDEEGRLLAGAAIGTKLDTIKRCEALIEAGVDVLVVDSAHGHSEGVLSTISEIKKNFKDVEIIGGNVATAEGALALAKAGADAVKVGIGPGSICTTRIVTGVGVPQITAVAEVTEALTKKNIPVIADGGIRFSGDIAKAIAAGGHSVMLGSILAGTEEAPGELELYQGRSYKSYRGMGSIGAMAGEQGSSDRYFQDSAEATEKLVPEGIEGRVPYKGWLQAVIHQMIGGLRQSMGYTGSRDIEEMRTKPKFVQITSAGVSESHVHDVSVTKEAPNYRVS

SEQ ID NO: 83992 - protein, 277 aa, Unknown
  Bacterial polypetide isolated from the Sargasso Sea
IKKVKKKNLKVGAAVGAGPLEFKRAQAIIKENIELIVVDTAHGHTKKVAEIIKKIIKNKSKKTALCAGNVATYDGAKFLSKLGVDIIKVGIGPGSICTTRLVAGIGVPQLSAILEAKKGCKGKKISIIADGGIKFSGDISKALAAGADAVMIGSLFAGTDESPGKIINKNGKLFKNFRGMGSIGAMNKGSADRYFQKKQKDMSKYVPEGVEGLVKYKGPVNKIIYQLIGGLKSSMGYLGSKKITSLRKKPKFVKITKAGFYESMVHNIDEIKGNGKY

SEQ ID NO: 83993 - protein, 490 aa, Unknown
  Bacterial polypetide isolated from the Sargasso Sea
MKNRPPFKQALTFDDVLLVPQKSSILPKEVNLKTKLTQKIEMNIPLLSAAMDTVTESGMAVALAREGGIGIIHKNLSIEEQASMVDRVKRYESGMIVNPVTLSSNKTIKDAKEVMGLYKISGLPVVENEKLIGIITNRDIRFETDESLPVTDRMTTEKLVTVPQGTTLDQAKKVLQEHRIEKLLVVDKEGSLAGLITVKDIQKKEDFPYACKDKNGRLRVGAALSVTNDFLERAQELHSKEVDVIVIDTAHGHSKGVLSQIEKIKKSMSGLQIVGGNVATSEGAKALINAGVDCVKVGIGAGASCTTRIVAGIGVPQLTAVMDCVDAATTDNIPVIADGGIRYSGDIAKAIAAGASTVMLGSILAGMDESPGEFILFEGRQYKSYRGMGSLGAMQDGGGERYFQNDTEDKKLVPEGIEGIVPYRGSVKNTIHQLMGGLRSSMGYCGGENILDFQKKAEFIQSTQAGVKESHPHEVKITKEAPNYQISDTK

SEQ ID NO: 83994 - protein, 337 aa, Unknown
  Bacterial polypetide isolated from the Sargasso Sea
TPKDRLVTAKEGESPDVIKKLLQENRMKKILLIDDSSKLTGLVTLKDINKSLDFPDAARDEEGRLLAGAAIGTKADTLDRCQALVDAGVDVLVADSAHGHSEGVLNQIKAVKSNFKDIQIIGGNVATGEGALALVKAGADAVKVGIGPGSICTTRIVTGVGVPQITAVAEVTEALIKKDIPVIADGGIRFSGDIAKAIAAGGHTVMLGSVLAGTEEAPGELELYQGRSYKSYRGMGSIGAMSGDQGSSDRYFQDSAEATEKLVPEGIEGRVPYKGWLQAVIHQMIGGLRQSMGYTGSHDIATMRTKPKFVQITSAGVNESHVHDVSVTKEAPNYRMS

SEQ ID NO: 83995 - protein, 315 aa, Unknown
  Bacterial polypetide isolated from the Sargasso Sea
MVNTSNSKKSNVIITEEGLAFDDVLLVPQYSEILPSDVVLTTKLTKNIELKTPILSAAMDTVTESQMAITLAGEGGIGIIHKNMSIEEQAKQIRFVKKYESGVINDPVTASPNMTISEINRITKKYNISGVPIVDNNKLVGIVTNRDLRFVDDLNLKVSEIMTPKDRLITVKEDFTKDEVISALRKNRIEKILITNNKYELKGMITFKDIQKSTTYPNASKDETGSLRVGAAIGTGQDSIERAEALIEQKIDVIVIDTAHGHSKLVIKMLKHLKKSYPTQELIAGNIATEDAAKDLITSGADAIKIGIGPRFNLY

SEQ ID NO: 83996 - protein, 456 aa, Unknown
  Bacterial polypetide isolated from the Sargasso Sea
ETFVTKDIKLNIPLLSSAMDTVTETNMAIAMAQCGGIGVIHRNLSISKQVKYVSAVKRFESGIVYNPITLNFDDTVKTAKKIAKKYNITGFPVVDKANKVLGILTNRDIRFLEDNNVRVGDIMTKENLAMVKEPINTKEAKDIMAKRRIEKLLVVDNNNFLSGLLTIKDIEKSVLNPFASKDRLGRLRCAAASSVGDNGFERSSSLIEAGVDIIVIDTAHGHSVEVIEAVKRLKKEFSDTQIIAGNVVTAEATKELIGVGADGIKVGIGPGSICTTRIIAGVGMPQITAIINCAKEAERHNIPIIADGGIRYSGDFAKSIASGASCAMVGSLLAGTDESPGEITLYQGRSFKNYRGMGSIGAMARGSADRYFQKDIQADKLIPEGIEGQVPYKGSVNKIIYQLVGGLKASMGYTGNENIKLMKKDCKFIKITGSGLSESHVHDVRITNESPNYSNN

SEQ ID NO: 83997 - protein, 354 aa, Unknown
  Bacterial polypetide isolated from the Sargasso Sea
MDPIKEALTYDDVLLTPRYSQILPSEVSTSTNLSKYLNLKIPIVSSAMDTVTESNMAIEIARLGGIGVIHRNLNINKQITEIKKVKSKNLKVGAAVGAGPIEIKRAESLLKEGIDLIVVDTAHAHTRKVGEIIKKISKLKPKKTTLCAGNIATTEAAKYLSKLGVDAIKVGIGPGSICTTRLVAGIGVPQLSAIIAARKGVGKKNITIIADGGIKFSGDIPKALAAGADAVMIGSLLAGSKESPGKIIKKEGKYFKSFRGMGSIGAMNKGSADRYFQKKQKDSSKYVPEGVEGLVKYKGPVEKIIFQLIGGLKSSMGYLGSENIKKLRNKPKFVKITKAGFYESMVHNIDRVLK

SEQ ID NO: 83998 - protein, 489 aa, Unknown
  Bacterial polypetide isolated from the Sargasso Sea
MLRISTDALTFDDVLLLPAYSEILPSDVCLKSKLTKRIGLNIPVVSSAMDTVTEARLAVSMAQEGGLGIVHKNLSVEDQAREVRLVKKFESGIIRDPVTIHPEATIETLIATTTENRISGVPVVDGEKLVGIITTRDIRFLDRIDLKVKDVMTPQDRLLTAKEGASNEEIKRILHEHRIEKVLLVNDEFELTGMVTVKDITKAETYPSACKDEQGRLRVGASVGTSEETDDRVAALVEADVDVIVVDTAHGHSRGVVDRIAWIKQTYPNLDVIGGNVATYDGARALIDAGVDAVKVGIGPGSICTTRIVSGIGVPQITAVSEASRAAEEDDIPVIADGGIRYSGDIAKAICAGASSVMVGSLLAGTEEAPGEIELYQGRTYKSYRGMGSIGAMAQSHGSSDRYFQEVEGDGRKLVPEGIEGRVPFRGPTGPIIHQLMGGLRAAMGYTGSGDINYLRKHPEFIKVSAASMAESHVHDVAITKEAPNYPVS

SEQ ID NO: 83999 - protein, 487 aa, Unknown
  Bacterial polypetide isolated from the Sargasso Sea
MLRLIKEALTFDDVLLVPAHSTVLPNTAILKTRLTNTIELNIPLVSAAMDTVTEARLAIAMAQEGGLGFIHKNMSIEKQAEEVRKVKIYEAGVVQQPVTVTPSTTLADLKVLTAKNGFAGYPVVNEANELVGIITGRDVRFVTDWSKTVEEVMTPKARLVTVAEGTKLDEVQKLMHSNRIEKVLVVDDNFKLKGLITVKDFEKAERKPNACKDELGRLRVGAAVGAGAGNEERVDALVKAGVDVLLIDSSHGHSEGVLQRIRETRAKYPDLQMIGGNVATAEGALALVEAGVNAVKVGIGPGSICTTRIVTGVGVPQITAVSDAAEAVKGLGIPVIADGGVRFSGDLAKALAAGASCIMAGSMFAGTDEAPGETELYQGRAYKSYRGMGSLGAMSQGSSDRYFQSDNAADKLVPEGIEGRVPYKGKLKEIIHQHMGGLRSCMGLTGCATIQELNEKAQFVKVTSAGMGESHVHDVTITKEAQTTVQV

SEQ ID NO: 84000 - protein, 354 aa, Unknown
  Bacterial polypetide isolated from the Sargasso Sea
MDPIKEALTFDDVTLAPNYSEILPSETNTSIKLSKNLTLKIPLISSAMDTVTEGSMAAAIAEKGGIGVIHRNLSIEKQIFEIKKVKQKKLLVGAAVGASSEEHRRAKRILKENLDLIVVDTAHAHTKKVSDIIKMIVKTKPKKTTLCAGNIATAEAAKFLIKLGVDTIKVGIGPGSICTTRLVAGIGVPQLSAIMNVKSGVGNRKVSIIADGGIKFSGDIAKALAAGADAVMIGSLFAGTDQAPGKIIKKNGKLFKSFRGMGSIGAMNKGSADRYFQTKQKNSSKYVPEGVEGFVKYKGKVDKVIYQLVGGLKSSMGYLGSKKITHLRKKPKFYKITKAGFFESMVHNIDEVKN

SEQ ID NO: 84001 - protein, 290 aa, Unknown
  Bacterial polypetide isolated from the Sargasso Sea
MGIIKDSLTFDDVTLIPSFSSILPSEAITTTDLGQKLRLKIPLMSSAMDTVTEAKMAIALSKAGGLGVIHRNLSIESQVKEVKKVKRSKSIVGAAIGVSEKDLERAIELNKANVDLLIIDTAHGHTTKVSKMIKNVKKKISRVNLCAGNIATGKAAKFLADSGADIVKVGIGPGSICTTRLVAGIGVPQLSAIIDVKKSLRNYKTKIISDGGIKFSGDLAKGLAAGADCIMIGSLFSGTNESPGKIIKIKGKLYKNFRGMGSVGAMSVGSSDRYYQKKYKDISKYVPEGV

SEQ ID NO: 84002 - protein, 174 aa, Unknown
  Bacterial polypetide isolated from the Sargasso Sea
VPQISAILDIKNALNKTDTTIIADGGIRFSGDIAKAIAAGADSVMLGSLFAGTEEAPGKVELFQGRSFKTYRGMGSIGAMTERDDANRYMQEDVDQNKLVPEGIEGRVPYKGLVINVINQLEGGLRQSMGYVGCKSIKEMQNNSQFVEITNAGMTESHVHDVMITKEAPNYQRS

SEQ ID NO: 84003 - protein, 322 aa, Unknown
  Bacterial polypetide isolated from the Sargasso Sea
MVYHINTNYSVTFDDVLLSPAYSEIKPKDVDTSITIGKVKLHIPILSAAMDTVTENKMAINLALNGGLGVIHRNMPIDKQASEVKKVHSFKVNGKKFQNAVINSNGQIAVGAAIGVENNAYLRLLELLKVGVDIVFIDVAHAHTKTTLQFIEKAKKILKTTPLIVGNIATKKAASDLISAGVDAIKVGIGPGSICTTRVVTGVGIPQLSAVMDTFQVAKKFKIPVIADGGIKTSGDIAKAIAGGASACMIGSLFAGTEESPGKLLTIKGKKFKSYRGMGSVGAMQKGSFDRYSQEETKNAKKLVAEGVERMVPYKGKIEDVA

SEQ ID NO: 84004 - protein, 487 aa, Unknown
  Bacterial polypetide isolated from the Sargasso Sea
MDKLKQKALTFDDVLLLPSYSDFLPSDANTESKLSKNISLKIPLISAAMDTVTESSMAIALAEAGGIGIIHKNNSIKEQASLVRSVKKYESGIVRDPVTIHSKKSIGELKQLTSELSISGMPVVDDGDLKGIVTSRDFRYAENMESDVSTIMTPLEKLVTVKEGVSQTEVMQLMYKNRIEKVLVLDDEDKLSGLVTMRDIENTAKNPDATKDDFGRLIVGAALGTDKDTFDRAEALFHEGVDVLVIDSAHGHSKNVIETIKAIKQKFPNVDVIGGNIATADAAMELVKAGADAVKVGMGPGSICTTRIIAGIGVPQISAIFDVSTALKNTEVAVIADGGIRFSGDIAKAIAAGADSVMLGSLFAGTEEAPGKVELFQGRSFKTYRGMGSIGAMTEREDANRYMQEDVAADKLVPEGIEGRVPYKGLVLNVVNQLIGGLRQSMGYIGCKNISEMHKKSQFVEITNAGMTESHVHDVMITKEAPNYQRS

SEQ ID NO: 84005 - protein, 418 aa, Unknown
  Bacterial polypetide isolated from the Sargasso Sea
IHKNCDIESQKSMVDKVKRSESGMILKPVTIRPERSINEAKKIMSEFRISGLPVVDNEKLVGIITNRDIRFQVDEELEVSACMTANDLVTVPLDTSLNDAEELLHKHRIEKLLVVDDSGMLAGLITVKDIKKKQQYPNACKDSNGRLRVSAAVGVSGDTYERTQELVRADVDVIVLDTAHGHSKGVLDTISKLKAQDSSLSIIAGNVATGYGAKALIDAGADCVKVGIGAGASCTTRIVAGVGVPQLTAIMDAVEVTKKEDIPVIADGGLRYSGDIAKALASGADSIMLGSVLAGMDESPGETILYEGRQYKTFRGMGSLGAMEEGSGDRYFQEDTDNKKLVPEGIEGMVPFRGPVKNTIHQLTGGIRSSMGYCGCKTIDEFGEKSEFIEITAAGVRESHPHEVRIVKEAPNYSPSDS

SEQ ID NO: 84006 - protein, 376 aa, Unknown
  Bacterial polypetide isolated from the Sargasso Sea
KNLSINIPIISSAMDTVTESRMAIALAELGGIGIIHRNLSIEDQANEVRAVKKFESGIVRDPTTISSSSTVGDLIQLTKELNISGMPVVDDDNLVGIVTSRDFRNESNMTATVSSIMTPKEKLITAKENESIDNIKTLLYRNRIEKILLVDDAFGLKGLITLKDINKSKDYPSATKDSEGRLLVGAAIGNGPDTDERTEKLVQAGVDVLVVDSAHGHSQGILDRVKKVKKDYPNIDVIGGNVATAEGATALMKTGADGVKVGIGPGSICTTRIVTGVGVPQITAIADVVSSMKKKGIPVIADGGIRFSGDFAKAIAAGADSVMLGSILAGTEEAPGQVELFQGRSYKAYRGMGSVGAMSGESSSGDRYFQDKNKPT

SEQ ID NO: 84007 - protein, 259 aa, Unknown
  Bacterial polypetide isolated from the Sargasso Sea
ERVEALKTAGVDVIVIDTAHAHTEGVINQVKSIKKMHSDLEVIAGNIATGEAAKALADAGADAVKVGIGPGSICTTRVVAGAGMPQITAITDVANQLKGTDTCIISDGGIRYSGDIAKAIAAGANSIMLGSLFAGTEESPGEIELYQGRSFKSYRGMGSIGAMAQQHGSKDRYFQSDVEEPEKLVPEGIEGRVPYKGKLSKIIEQLVGGLRQSMGYTGCKDITELQTKTEFVRITDSGKREGHVHDVSITKEAPNYSVD

SEQ ID NO: 84008 - protein, 326 aa, Unknown
  Bacterial polypetide isolated from the Sargasso Sea
MDPIKEALTFDDVTLAPRYSEILPSQVDTTTYLRNDCKINIPLLSSAMDTVTESKMAIAIAKAGGIGVIHRNFTIDNQIKKIRKVKSKNLKVGAAVGAGELESKRALAIIKEKIDLIVVDTAHGHTKRVKEIIKIIKKNKNKKTLLCAGNIATAEAANFLANLGVDLIKVGIGPGSICTTRLVAGIGVPQLSAIINVKKGLRNKKVKIIADGGIKFSGDIVKALAAGADAVMIGSLFAGTNESPGKIIKKNGKMFKVFRGMGSIGAMNKGSADRYFQTKQKDKSKYVPEGVEGFVKYKGPVDKIIFKLIGGLKSSMGYLGSKKVLN

SEQ ID NO: 84009 - protein, 487 aa, Unknown
  Bacterial polypetide isolated from the Sargasso Sea
MDKLKHKALTFDDVLLLPRYSDFLPSEADISSNLTKNITLKMPLLSAAMDTVTESKMAISLAEAGGIGVIHKNNSIEKQASEVKSVKKYESGIVRDPVTISSTNSIEELKNLTNELSISGMPVVDNGQLKGIVTGRDFRYAENMDSNVSTIMTPFDKLVTVNEGFSQEDVMQLMYKNRIEKVLVLDENKNLSGLVTMKDIEKSAQHPNATKDSSGRLRVAAAIGTEQNTLERAEALYDAGVDVFVIDSAHGHSKNVLKTIKTIRNSFDDIEIIGGNIATADAAVELAKAGVNAVKVGMGPGSICTTRIIAGIGVPQITAILEIKEALKKNNVKIIADGGIRFSGDIAKAISAGADSVMLGSLFAGTEEAPGKVELFQGRSFKTYRGMGSIGAMTERNDANRYLQEDIQSDKLVPEGIEGRVPYKGLVINVINQLEGGLRQSMGYVGCKDIKSMQLDSQFIEITNAGMTESHVHDVMITKEAPNYQRS

SEQ ID NO: 84010 - protein, 276 aa, Unknown
  Bacterial polypetide isolated from the Sargasso Sea
MGTIKESLTFDDVLLLPQYSDILPSETDISLQLTKNILLKVPFLSSAMDTVTESKMAISIAHAGGLGVIHRNLNIVDQTKEIKKVKEKNLLVGAAVGTNKDDLERARSLVTNGCDLIVIDTAHGHSEKVLKTLSKLKRISKKIPICVGNIATAAAAKKLYNSGADIIKVGIGPGSICTTRMVAGIGVPQISAIMEVKQELKKKKIKIISDGGIKFSGDIAKALAAGADAIMMGSIFAGTDESPGKKFKIKGKIFKEYRGMGSIGAMSSGSANRYFQ

SEQ ID NO: 84011 - protein, 354 aa, Unknown
  Bacterial polypetide isolated from the Sargasso Sea
MGPIKEALTFDDVLLTPNYSNILPSEVSTSTSLSSNINLKIPVLSSAMDTVTESKMAISIARAGGLGIIHRNLKIKKQIIEIKKVKSKKLLVGAAVGAGPIEIKRAEALLKENIDMIVVDTAHGHTQKVAEIIKKIRKIKPKKTLLCAGNIATAEAAKFLASLGVDVIKVGIGPGSICTTRLVAGIGMPQLSAILTVRKGLGNKKIKIIADGGIKFSGDIPKALAAGADAVMIGSLFAGTSEAPGKILKRNGKYFKSFRGMGSIGAMNKGSADRYFQVKQSDNSKYVPEGVEGLVKYKGSVNKIIFQLVGGLKSSMGYLGRKKVKDLRKNAKFVKITKAGFYESMVHNIDQVLK

SEQ ID NO: 84012 - protein, 356 aa, Unknown
  Bacterial polypetide isolated from the Sargasso Sea
MVPIKEALTFDDVTLVPKYSEILPSEVDTSIKLTNNLKLRIPLLSSAMDTVTESKMAIAIAKAGGLGVIHRNLDIKAQISEIKKVKIKKLLVGAAVGAGPSEFKRADAILKENIDMIVVDTAHGHTKKVSEIIKFIKKKKNKKTALCAGNIATPEAAKFLLKLGVDIIKVGIGPGSICTTRLVAGIGVPQLSAILTVRNGVKNKNVKIISDGGIKYSGDLAKAFAAGADAVMVGSLFAGTDETPGKLIRRGGKLFKSFRGMGSVGAMNKGSADRYFQSKQKDISKYVPEGVEGFAKYKGKVEKIIFKLIGGLKSSMGYLGSKQIKYLRNKPQFVKITKAGFYESMVHNVDIVKSDD

SEQ ID NO: 84013 - protein, 487 aa, Unknown
  Bacterial polypetide isolated from the Sargasso Sea
MEKVKQKALTFDDVLLLPRYSDFVPSEASTHTRLTKNINIKVPLISAAMDTVTESRMAIALAEVGGIGIIHKNNSIEDQIAQVKIVKKYESGVVRDPITIETNKSIGELIQLTAELNISGMPVVDNGKLKGIVTSRDFRYADNLDASLSSIMTPFDELITVEEGTSQEIVKKLMHENRIEKVLVIDQSGKLSGLVTMKDIEKSAEHPDATKDDSGSLMVGAALGTGPDTLKRAKALSEAGVDVFVIDSAHAHSKNVIETVKMIKKEFSSIDLIAGNVATSDGAMELVKAGADAIKVGMGPGSICTTRIIAGIGVPQISAILDIKEALKDLSVGIIADGGIRFSGDIAKAIAAGADSVMLGGLFAGTEEAPGKVELFQGRSFKTYRGMGSIGAMTERDDANRYMQEDVSSEKLVPEGIEGRVPYKGLVINVINQLIGGLRQSMGYIGCKTFDEVHENSEFVEITNAGMTESHVHDVMITKEAPNYQRS

SEQ ID NO: 84014 - protein, 429 aa, Unknown
  Bacterial polypetide isolated from the Sargasso Sea
MGKKSIKIYNAGVKVKNRPPFKQAFTFDDILLVPQRSSILPRNVKLKTKLTNHIALNIPIISAAMDTVTETDMAIALSRAGGMGIIHKNLTIEGQASMVDKVKRSESGMIQNPITINEGATISDAKKIMSEYRISGLPVVKNEILVGIITNRDIRFETDGTLPVSERMTSKDLVTVPVGTSLNKAKDILQKHRIEKLLVVDDNRNLTGLITVKDIQKNEDYPNACKDKNGRLRVGAAIGVKGEDVERASELANVDVDVIVIDTAHGHSKSVLKSIELLKTKLPQLSIIAGNVATGDGTKALIDSGVDCVKVGIGAGASCTTRVIAGVGVPQLTAIMDSVDIARKEDIPVIADGGLRYSGDIAKALAAGANSVMLGSLLAGMDESPGETILYEGRQYKSYRGMGSMGAMKQGSGDRYFQDHPDSSKLVPE

SEQ ID NO: 84015 - protein, 161 aa, Unknown
  Bacterial polypetide isolated from the Sargasso Sea
MKGKKVQIIADGGIRFSGDIAKAIAAGADTVMLGSLFAGTEEAPGKIELFQGRSFKTYRGMGSIGAMTERNDANRYLQEDVESNKLVPEGIEGRVPYKGLVINVIDQLIGGLRQSMGYIGCKDITAMQQDSQFVEITNAGMTESHVHDVMITKEAPNYQRS

SEQ ID NO: 84016 - protein, 356 aa, Unknown
  Bacterial polypetide isolated from the Sargasso Sea
MDKVKSKAFTFDDVLLLPRYSDFVPSEADTETRLTKSIKIKMPLISAAMDTVTESRMAIALAEAGGLGIIHKNNSIEEQAAIVKVVKKHESGVVRDPTTIRSSKTIGELKQLTAELSISGMPVVDDGNLKGIVTSRDFRYADDMDADVASIMTPLDKLVTVSEGTSQDEVKKLMYENRIEKILVLDESNHLSGLVTMKDIEKSAEHPDATKDSSGRLRVGAALGTGADTINRAKALQEAGVDVFVVDSAHGHSKNVLDIVKLIKKEFKDIEVIGGNVATPEGALELVNSGVDSVKIGMGPGSICTTRIIAGIGVPQITAIMDIKNALKGKDVSIIADGGIRFSGDIAKAIAAGADS

SEQ ID NO: 84017 - protein, 320 aa, Unknown
  Bacterial polypetide isolated from the Sargasso Sea
MDPIKEALTYDDVLLAPKYSEVLPSETKTETKLSNNLSLKIPIISSAMDTVTESGMAIEIAKLGGIGVIHRNLDIKNQILEIKKVKSKNLKVGAAVGTGPLEIKRAEALLKENIDLIVVDTAHGHTKKVAEIIKKIKKLKSAKTTLCAGNIATEEAAKFLSKLGVDIIKVGIGPGSICTTRLVAGIGVPQLSAILAAKKGIGKKKIMLIADGGIKFSGDISKALAAGADAVMIGSLFAGSKESPGKLIKKKGKYFKSFRGMGSIGAMNKGSADRYFQKKQKDPSKYVPEGVEGLVKYKGPVEKIIYQLIGGLKSSMGYLG

SEQ ID NO: 84018 - protein, 290 aa, Unknown
  Bacterial polypetide isolated from the Sargasso Sea
MEIVEGLTFDDVLLVPAESDVMPSEVSTLTEVVEGITLNTPIMSSAMDTVTEAEMAIAMAQYGGLGVIHRNMDIEKQAQLVSDVKRFESFVITDPITLREFNTVREARELQDKFNITGFPVISDNKKLVGIVTNRDMRFSTDDSTPVASIMTRNDLATINSCSDPKQAKSIMASRRIEKLPIVNKDNSLTGLITIKDLERAVLNPDATKDDHGRLRVAAATTVGEQGFSRSKRLIESGVDILIIDTAHGHSNQVIEAVKKIKNSFKATKVIAGNVATPEGTRALINAGAD

SEQ ID NO: 84019 - protein, 202 aa, Unknown
  Bacterial polypetide isolated from the Sargasso Sea
MAYQINTNYSVTFDDVLLSPAYSEIKPKEVDTSITIGKVKLHIPILSAAMDTVTENKMAINLALHGGLGVIHRNMPIDKQASEVNKVHSFKVNAKKFQHAVINSNGKIAVGAAIGVENNAYLRLLELLKVGVDIVFIDVAHAHTKTTLQFIEKAKKVLKKTPLIVGNIATKKAASDLISAGVDAIKVGIGPGSICTTRVVTG

SEQ ID NO: 84020 - protein, 338 aa, Unknown
  Bacterial polypetide isolated from the Sargasso Sea
VSEMMTTDLVTVPEHVDPEVAKKLLHQHRIEKLLVVDEEGKCAGMMTVRDIQRSRDNPYSCKDKHGRLRVAAATGTGEKGIERALALFEAGADAVVVDTAHGHSHGVLHTVHQIREAAGPEAQIIAGNVATGAAADALIAAGANAVKVGIGPGSICTTRIVSGVGVPQLTAVQSVVAVCKKANIPVIADGGIKFSGDIAKAIAAGADCVMVGSVLAGTDEAPGEVILYQGRSYKVYRGMGSVGAMSKGAHERYFQSEQGDTRKYVPEGIEGRVPARGPVEHVLHQLIGGLRSSMGYTGNGDINAMRENCQFVKITNAGLSESHVHDVEITREAPNYRR

SEQ ID NO: 84021 - protein, 235 aa, Unknown
  Bacterial polypetide isolated from the Sargasso Sea
HNSKVLESIKYISKKYSNKSILAGNVATPEAVKALIDVGATSIKIGIGPGSICTTRMIAGVGLPQLSAIMECVKVAKKNKVNLISDGGIKYSGDIAKAIAAGASAVMIGSLFAGTDESPGEVFLYQGRSYKSYRGMGSLGAMARGSADRYFQEEIEHLKLVPEGIEGQVPYKGPLENVFYQLAGGLKSAMGYTGNRNIVNMQKNCKFRKITNSGLKESHVHDVLITREAPNYRPS

SEQ ID NO: 84022 - protein, 429 aa, Unknown
  Bacterial polypetide isolated from the Sargasso Sea
WPSPAGLGVIHRNMTPAQQAEQASTVKKYESGIIKNPVCVPSSATVGEVVALIREKNFSGVPVLDEGGRLTGIVTSRDIRFEDRFDQAVTAVMTPRERLVTAPEKATREDIRGLLHEHRIEKVLLVDEAFNLKGLVTVKDIQKQTEFPDACKDDEGRLRVAAAVGTGGDSAERCERLVEAGVDAIVVDTAHGHSRGVLERVREIKKSLGNVEVVAGNIATADAARALADAGADGVKVGIGPGSICTTRVVAGVGVPQITAISDTASALRESAIPVIADGGIRFSGDIAKAIAAGANAVMVGGLLAGTEEAPGEIELFQGRSYKSYRGMGSLGAMQEGSKDRYFQEGQSDPEKLVPEGIEGRVPFKGPMSQIIHQLTGGLRASMGYTGCATIGEMRSHCRFVQITHSGYTESHVHDVTVVKEAPNYQRGS

SEQ ID NO: 84023 - protein, 291 aa, Unknown
  Bacterial polypetide isolated from the Sargasso Sea
GGLGIIHRNLDIKKQIIEIKKVISKKLPVGAAVGAGSAEFKRAQALLKQNITMIVVDTAHGHTKKVAEIIKKIKKIKSKNTALCAGNIATPEAAKFLANLGVDVIKVGIGPGSICTTRLVAGIGMPQLSAILAVKKGLKNKNIKIIADGGIKFSGDIPKALAAGADAVMIGSLFAGTDEAPGKIIKKNGRFYKSFRGMGSIGAMNKGSADRYFQTKQKDKSKYVPEGVEGLVKYKGEVSNIIFQLVGGLKSSMGYLGRKNIKDLRKKAKFVKITKAGFYESMVHNIDQVFK

SEQ ID NO: 84024 - protein, 227 aa, Unknown
  Bacterial polypetide isolated from the Sargasso Sea
KEIKSKFSTDVIVGNVATNEATEELIDQGADCVKVGIGPGSICTTRVVAGIGVPQFSAILDCAETAAKKGVPIIADGGIKYSGDIAKALGAGASGVMIGSLFAGTDESPGEVYLFKGRSYKSYRGMGSLGAMARGSADRYFQEEITESNKHVPEGIEGRVPYKGPISPIIYQLVGGLKASMGYTGSKDLVEFKKNVKFVEITGAGLKESHVHDVDITRESPNYPTNI

SEQ ID NO: 84025 - protein, 410 aa, Unknown
  Bacterial polypetide isolated from the Sargasso Sea
EEQAIQVRQVKKFESGIVRDPISIRSNNTIGELKQLTSELKISGMPVVDDDELKGIVTGRDFRYARDMEQTVSEIMTPREKLITVKEGETQDVVKSLMYKHRIEKILVLDDKDKLVGLMTMKDIEKSIDYPLASRDSEGRLIVGAAIGVGKDLMDRAKALVGAGVDVFVLDSAHGDSKRVIDAIKQVKKKFPDIDMVGGNVATASGAKSLIKAGVDAVKVGVGPGSICTTRVVSGVGVPQLSAVMDIVSVAGDIPVISDGGVRYSGDIVKAIGAGANTVMLGSVFAGTEEAPGEIELFQGRSFKTYRGMGSLGAMSKRADAERYMQGEDTDAEKLVPEGIEGRVPFRGWLKDVVYQLEGGLRQGMGYTGSKDIKDLQKRVQFQKITRSGMTEGHVHDVSITKEAPNYRVD

SEQ ID NO: 84026 - protein, 267 aa, Unknown
  Bacterial polypetide isolated from the Sargasso Sea
GAAIGTGSETLDRAKSLFDSGVDLFVVDSAHGHTKSVIETVKMIKKEFPTKDVIAGNVATPEGAEALIEAGADGIKIGMGPGSICTTRIIAGIGVPQISAILTIYEKVKGKVPLIADGGMRYSGDIAKAIAAGADSVMLGSIFAGTEEAPGEFELYQGRSFKTYRGMGSLGAMSKRDDSNRYFQEDIDAEKLVPEGVEGRVPYKGWAINVINQLIGGLRQSMGYVGCKNIQEMKENSRFVEITNAGMTESHVHDVQITKEAPNYQRS

SEQ ID NO: 84027 - protein, 327 aa, Unknown
  Bacterial polypetide isolated from the Sargasso Sea
GRVHNSGDMLDKTYTDSLLLMKDGVIIYEKYFNGMTEQSVHLMNSVSKSFLGILIGTLVDEGLVKTEKLLTDYLPDFKDTGFSGTTVQQALDMTGSVKYGEVYLERESDFWKETSVVGWRPALVNDKTPETLYEYARGLKEVEQENGSAFHYRTVYTNILGMVAEKVTGKTLKDLLQKKLWEKICPEQNAYIVCDKDEFPYMGAGMNACTRDLARFGQMIVNRGMFGNERVVSEDWIVKTLAGTDKARQNFEVTEYTPLIPGGHYMNQFWASSNSEILACVGIHGQGIYMNMANKTVAVKFSSHPDPDDGPLFIETFTALDALTRSI

SEQ ID NO: 84028 - protein, 191 aa, Unknown
  Bacterial polypetide isolated from the Sargasso Sea
MRKIVIVGTGYVGLVTGAGISEFGHHVTCVDIDKDKINQLNDGKIPIYEPGLSSLIKENCKKKRLYFSVDIENAIKESDIIFIAVGTPQKKSGEVDLSYVKSVSKTISKNINKYKIICTKSTVPVGTGKMIEKILLKNNDITDFNYVSNPEFLREGSAVKDFLIPDRLVIGAKSEKAFSIMKEVYRPIFCK

SEQ ID NO: 84029 - protein, 281 aa, Unknown
  Bacterial polypetide isolated from the Sargasso Sea
MNIVIIGTGYVGLVTGVGLASLGNKVTFIDLDTDKISKLNNKKLPFYEPGLDKYFEDEQVFERMHFASNYSDVNWEDEEIVFVCVQTPNNLDTNSVDTKFLESAITEVSNVNNKNLVITIKSTIPPYEIEKICNKVGLDVDSLTFNPEFLREGTAVEDFFKPDRIVIGGNDSSKVKKLEDLYSNFKAEIIITDPISSQLIKYLANTYLPLRLSFVNEAARLVNSSGGNLDDVLKGVGMDTRIGQHYFRPSPAWGGSCFPKDVVEVNNFYDPNEVNVPLIAN

SEQ ID NO: 84030 - protein, 300 aa, Unknown
  Bacterial polypetide isolated from the Sargasso Sea
MNLTIVGTGYVGLVTGACFAEFGYSVTCVDNDIKRLEILKSGKCPFFEPGMDELLDKHINKTKLITFESTIKNNLDNTDIIFITVGTPTRRLEDEADLSFVWQVAEEIAENIKKYCLVVTKSTVPVGTTREVQKIISNKIDQKLFDVVSNPEFLREGSAINDFIRPDRVVIGTENKKSENIMKELYRPLFLKETPIVATSIETSEIIKYASNSFLATKIAFINEVADLCEVVGADVQQVAYAMGIDKRIGSKFLNAGPGFGGSCFPKDVKAFASTAKKKNIDLSIIDAVNKSNQERIIKI

SEQ ID NO: 84031 - protein, 199 aa, Unknown
  Bacterial polypetide isolated from the Sargasso Sea
GAGYVGGPTMAVFAEHCKDINITVADINESRINSWNETDTSYLPIYEPGLDEIILKCRNKNLFFTTNIKESIQNADMIFLSVNTPTKSKGVGAGKASDLKWVEISARQIAEFSRGHTIVVEKSTLPVRTAKTIEKILINSQNKKSENKNKTFSVLSNPEFLSEGTAINDLEFPDRVLIGGDDELAINLLADLYRNWVPE

SEQ ID NO: 84032 - protein, 317 aa, Unknown
  Bacterial polypetide isolated from the Sargasso Sea
IGHQVVCVDKDINKIKKLNLCISPIYEPGLDELLKKNFLSKRLTFTTEINEAIKSSDIIFICVGTPTKKGSLNVDLSYVYKCTKEILKYTKKKKIIVTKSTVPIGTGDSIEKILKKKKKYFTIVSNPEFLREGDAIRDFRFPDRIVIGSNDKKVFNTMKKLYMPLINKGAKFFTTSRRGAELIKYASNAFLATKITFINELANLCEKSEINIEDIALGMGSDNRIGGRFLRAGPAYGGSCFPKDTKGLVSVANKFKIDLSVVKSVIKSNHKRVELLKQRIHKILGSNLKNKKISFLGVTFKPNTDDMRDSTSLKMIP

SEQ ID NO: 84033 - protein, 61 aa, Unknown
  Bacterial polypetide isolated from the Sargasso Sea
MKLCMIGTGYVGLVSGVCFSDLGNDVICVDKDIKKIELLKKGKVPIYEPGLSELVAKNYKN

SEQ ID NO: 84034 - protein, 311 aa, Unknown
  Bacterial polypetide isolated from the Sargasso Sea
ACFADLGNIVYCVDKDKDKIQMLTNGSIPIYEPGLTEIVKKNFLSERLKFTTNLDLAVKNSDIIFICVGTPTSKKNNSANLQYVFKAAQEISKSINKFKIIVTKSTVPVATGDKIEKIILKKKKRKLFEVVSNPEFLREGEAIRDFRFPDRIVVGSNNKKINRKLESLYEPLIKKGAVYFSTNRRGAELIKYASNAFLATKISFINEIANLCEKTGVNVEDVSLGMGLDKRIGARFLRAGPAYGGSCFPKDTKAITVTGDLFDTNLSIIKSVVKSNAKRRLLLIQRIKHILSNKLKNKRIAVLGVTFKPQY

SEQ ID NO: 84035 - protein, 254 aa, Unknown
  Bacterial polypetide isolated from the Sargasso Sea
MKLVLVGTGYVGLVSGSCFAEFGYEVICVDNDESRISKLKKGKCPFFEPGMEELLSKHRDQTKLLSFTTSLPEAMEDADIIFITVGTPSKRLEEEADLSAVWNVAKDIANNIKKYILVVTKSTVPVGTTKEIKKIISKIVTKDNFDVVSNPEFLREGSAINDFMRPDRIIIGTDNKKSAKIMNELYRPLYLLETPIITSSIESSEIIKYASNSFLATKISFINQVADLCESVGADVQEVAKGMGIDKRIGAKFL

SEQ ID NO: 84036 - protein, 271 aa, Unknown
  Bacterial polypetide isolated from the Sargasso Sea
MVIKINNICCIGAGYVGGPTMSVIADKCSDITVNVVDKNKNKIDSWNSDDLSELPIYEPGLNEIIERCRGKNLFFSTDIKGKIENADMIFISVNTPTKKKGIGAGKASDLKWVEACAREVAKHSKGYTIVVEKSTLPVKTAEVIKNILEASETSFKDNINKSFDVLSNPEFLSEGSAIKDLKFPDRILIGGENKDAIIALHNIYINWVSKDKILHTNIWSSELAKLTANAFLAQRISSINSIGAICEATGADVREVARAIGTDSRIGSKFL

SEQ ID NO: 84037 - protein, 293 aa, Unknown
  Bacterial polypetide isolated from the Sargasso Sea
VEATVAAADMVFISVNTPTKTKGLGAGQASDLRWVEACARTVAQAATGHTIVVEKSTLPVRTAAAIKTILEAAQADDQQRSFTVLSNPEFLAEGTAIRDLEAPDRVLIGGDDTASIEALAAVYSHWVPEQQILRTNLWSSELSKLTANAFLAQRISSINSVAALCEATGADVREVARAIGTDSRIGPKFLNAGPGFGGSCFQKDILNLVYLCRHFGLPEVADYWESVVALNTWQQHRIAQLVVQKLFGTVTGKRLAILGFAFKADTNDTREAPAIRICGDLLDEGAQLAIHDP

SEQ ID NO: 84038 - protein, 273 aa, Unknown
  Bacterial polypetide isolated from the Sargasso Sea
PNSNDTKKKFDVLSNPEFLAEGSAIIDLENPDRVLIGGESDNAIIALSNIYRNWVPKEKILHTNIWSSELSKLTANAFLAQRISSINSISALCESTGADIREVASAIGLDSRIGSKFLNCGPGFGGSCFKKDILNLVYLSRYFNLNDVADFWESVVKLNNWHQNRLSQLIINNLFKTVSGKKICILGFAFKANTNDTRESAAIKICKDLLEEGAFLSIHDPKVSKEQINKNLGFESLNAANYSNRNDFFNFEGQWVFEDSIYRAIENSDAVVI

SEQ ID NO: 84039 - protein, 251 aa, Unknown
  Bacterial polypetide isolated from the Sargasso Sea
NIEACAKDIAKYSKKDKIVVEKSTLPVRTAEKIKEILYENSTDNHFEVLSNPEFLAEGTAIQDLFKSDRVLIGGDDSESGQNAVKALVDIYANWIPKEKILTTNVWSSELAKLASNAMLAQRISSINSLSGLCEKTGANIDELSRAIGMDHRIGPKFLKASAGFGGSCFQKDILNLVYLCKFYGLEQEAEYWHQVVRINDNQKKRFAQKVIDYFNGDLNGVRIAILGWAFKANTNDSRESASIKVSEILYK

SEQ ID NO: 84040 - protein, 122 aa, Unknown
  Bacterial polypetide isolated from the Sargasso Sea
MKLCMIGTGYVGLVSGVCFSDLGNDVVCVDKDENKINKLKKGIIPIYEPGLEELVQKNFKNKRLKFSTDINNSVKNSDIVFICVGTPAKRNGSDADLSQIYSVANEISKSINKFKIIYTKST

SEQ ID NO: 84041 - protein, 121 aa, Unknown
  Bacterial polypetide isolated from the Sargasso Sea
MKICIIGTGYVGLVSGTCFSDMGNKVICVDTDINKINKLNSGTVPIYEPGLEELVLKNKKNDRLFFSTDINGSIKKSDIVFICVGTPTKNNKADLKYVFKAVYSISKNLNKYKIIVTKSTV

SEQ ID NO: 84042 - protein, 82 aa, Unknown
  Bacterial polypetide isolated from the Sargasso Sea
MKICIIGSGYVGLVSGACFSDLGNTVTCVDINRETIEKLKKGIVPIYEPGLQELVVRNLKKKRLLFTTDISSSIKKSDIIFI

SEQ ID NO: 84043 - protein, 142 aa, Unknown
  Bacterial polypetide isolated from the Sargasso Sea
MKICIIGSGYVGLVSGACFSDLGNTVTCVDINREIIEKLNKGIIPIYEPGLQELVVRNIKKKRLLFTTDISSSIKKSDIIFICVGTPTKNNKADLKYVFNVTKSIKSNLNRYKIIVTKSTVPVTTGDKITKILKSNKNKNKV

SEQ ID NO: 84044 - protein, 303 aa, Unknown
  Bacterial polypetide isolated from the Sargasso Sea
PGAISEADIIFVSVNTPTKKFGEGAGKAADLQYWEKTSRDILQNSRKPDVIVVEKSTLPVRTAEAMARILESGNSKTKFSVVSNPEFLAEGTAIQDLANPDRVLIGGEENENGQKAANKVAEIYAHWVPQDRILLTSVWSSELSKLVANAMLAQRISSVNSISALCERTEADITEVSSAIGMDTRIGAKFLQASIGFGGSCFRKDILHLSYLCEFYGLPEVADYWASVVNINEWQINRFFQSILNELFNTLAGKTITMLGFAFKQNTGDTRDSPAIPLCERLVGENAKVRIHDPKALENARLN

SEQ ID NO: 84045 - protein, 265 aa, Unknown
  Bacterial polypetide isolated from the Sargasso Sea
MKLCVIGTGYVGLVSGVCFSDVGNTVYCVDKDKKKIELLNKGIVPIFEPGLEEILKKNYKQKKLIFTTDLNEAVINSDIIFICVGTPTKKNSNSADLKNIYSVAKDLKKIINKYKILVTKSTVPVSTGDQIEKILFSLKKKKLLDIVSNPEFLREGEAIRDFVYPDRVIIGTDSKKANRILKSLYLPIIKKNSRYFHTSRRGAELIKYASNAFLATKISFINEMANLCEKTGIDVKDISLGMGSDQRIGDRFLRAGPAYGGSCFP

SEQ ID NO: 84046 - protein, 262 aa, Unknown
  Bacterial polypetide isolated from the Sargasso Sea
MKICIIGSGYVGLVSGACFSELGNNVICVDINKQKIENLKKGIIPIFEPGLEELIKRNVKQNRLQFTTNLSISVRKADIIFICVGTPTNKKTYNADLNYVFQVANDIKKNLNKYKIIIMKSTVPVTTGDKIENLLNSKNNKNKFDVVSNPEFLREGEAIRDFMFPDRVVIGTSSKKANNILKNLYFPLIKKTNRYFHTSRRAAELIKYAANAFLATKITYINEIANLCEKLKVNVNDISLGIGLDDRIGSRFLRAGPGYGGS

SEQ ID NO: 84047 - protein, 272 aa, Unknown
  Bacterial polypetide isolated from the Sargasso Sea
IPIYEPGLEEMVLRNIKNKRIEFSTNLESSIRNSDIVFICVGTPTKKGSSSADLSQIYNVAKIIGKFINKFKIIVTKSTVPVTTGDNIEKILKKKNKKNKFSVISNPEFLREGEAIRDFTYPDRIVIGTNDKRSNRIMNNLYSPLISKGAKYIHTNRRAAELIKYASNAFLATKITFINEIANLCEKTNINVEDISIGMGLDKRIGSRFLRAGPAYGGSCFPKDTKAIINTADKFNTNLSVIKTVVKSNENRSNLLLGRVYDILNNKVRNKK

SEQ ID NO: 84048 - protein, 260 aa, Unknown
  Bacterial polypetide isolated from the Sargasso Sea
EAVKKSDIIFICVGTPTKKKSNSADLKYVFNVAKQLKKSISKYKIIITKSTVPVTTGDKIEKILRNLKKKKLIDVVSNPEFLREGEAIRDFIYPDRVVIGTDSGKANKILKSLYLPIIKKSSRYFKTSRRGAEMIKYASNAFLATKISYINELANLCEKTGVNVQDISIGMGLDQRIGDRFLRAGPAYGGSCFPKDTRALIDVANKYKIDLSIVKSVVKSNNQRKIILTKRIDKILNNKLKNKIITFLGVTFKPNTDDMR

SEQ ID NO: 84049 - protein, 207 aa, Unknown
  Bacterial polypetide isolated from the Sargasso Sea
MKLVLVGTGYVGLVSGSCFAEFGYEVICVDKDKSRILELKKGKCPFFEPGIEELLLKHRDQTKLLSFTSSLPEAMEGADIIFITVGTPSKRLEEDADLSAVWNVAKDIANNIKKYCLVVTKSTVPVGTTKEIKKIISKIVPTENFDVVSNPEFLREGSAINDFMRPDRIIIGTDNEKSTKIMKELYRPLYLLETPIITSSIESSEII

SEQ ID NO: 84050 - protein, 265 aa, Unknown
  Bacterial polypetide isolated from the Sargasso Sea
FSLNWLWSNIRIYDSNPENSHNSLEDTVNNSEFIFLSVPTPADKDGFNDLSIVKSVLKNIDSVCTSPDNIVLVRSTVVPGTTRDLQKKFPNLRLVFNPEFLTERSASFDFINQTRVILGGEKNYTQRVKYLYKHRFGDYLPVIETDFETAEMIKYMNNLFFATKVSFLNEMKLLGDKVGVNWNEAVDGFVLDGRVGHSHLSVPGPDGKFGFGGSCFPKDIQALIKFGEINGVDMNVLKGAWKTNLNVRPERDWEKLKGRAVSSED

SEQ ID NO: 84051 - protein, 236 aa, Unknown
  Bacterial polypetide isolated from the Sargasso Sea
MNKIVIIGAGYVGLVSSAGFAELGFKIICIENNREKYSDLQQGIIPIYEPQLEDLISKGQKAGNLVFASDYKNHLDDATAVIIAVGTPTNELTQNVDLSAVFSVVEELALQLNPNTVIITKSTVPIGTNRKILSILQRKRSGIRFSVASNPEFLREGSAVDDFFNPDRIIFGVSDERARQIGTLIYEDFCKQKKTSLLFTNLESSETIKYAANAFLATKIAFINEMSDLCEKSGEA

SEQ ID NO: 84052 - protein, 311 aa, Unknown
  Bacterial polypetide isolated from the Sargasso Sea
VDTNKNKIKKLISGLIPIYEPGLDELVKKNFTQRRLSFTTNIDEAIKKSDIIFICVGTPTNKKTNTADLKFVFQVANRISKNINSYKIIVNKSTVPVTTGDKIESILKNKNKNKSFEVVSNPEFLREGEAIRDFIYPDRVVVGTNNKKANKIMKSLYLPIIKKATRYFHTSRRGAELVKYASNAFLATKIAFINELANLCEKTSVDIKDISLGMGLDQRIGERFLRAGPAYGGSCFPKDTRALVKTADKFKIDLSIVKNVIKSNEKRKLLLINKINEIIGKNIKNKKITFLGVTFKPNTDDMREASSLIMI

SEQ ID NO: 84053 - protein, 251 aa, Unknown
  Bacterial polypetide isolated from the Sargasso Sea
MKSKEICCIGAGYVGGPTMAVIAHNCPDYNITVVDSNEKRIAEWNGPENSLPIYEPGLKEIIRNVRGKNLTFSNDVEKSINKADIIFIAVNTPTKTHGEGKGMAADLTNIEKCAKLIAQSSSSNKIIVEKSTAPVGTGKKIKSVLNSENSKIKFQIVSNPEFLAEGTAINDLMNPDRVLIGGEESEEGHKAVKTIADIYREWLPENKIILTNLWSSELSKLASNAFLAQRISSINSLSALCEKSGADIDEV

SEQ ID NO: 84054 - protein, 132 aa, Unknown
  Bacterial polypetide isolated from the Sargasso Sea
MKICMIGTGYVGLVSGTCFADLGNKVFCVDKDKIKINKLKNIISPIYEPGLDDLIRNNVRAKRLNFTNDLEKAVKESQIIFICVGTPTKKGSNMVDLSQVFNVAKSISKYIKNYKIIVNKSTVPVSTGDQIE

SEQ ID NO: 84055 - protein, 92 aa, Unknown
  Bacterial polypetide isolated from the Sargasso Sea
MKICMIGTGYVGLVSGSSFAELGNDVICTDINKIKINKLNEGMIPIYEPGLEELVRRNFKQGRLKFSTDIPSSIKYCDIIFICVGTPTNKKT

SEQ ID NO: 84056 - protein, 131 aa, Unknown
  Bacterial polypetide isolated from the Sargasso Sea
MKICMIGTGYVGLVSGTCFAELGNDVICVDIDKKKIDKLNSGIIPIYEPGLEELVKRNLKHGRLKFSTNISLAIKNCNVIFICVGTPTNKITKKADLKYVFNVTKNIKNNLNNFKLIVTKSTVPVMTGDKI

SEQ ID NO: 84057 - protein, 235 aa, Unknown
  Bacterial polypetide isolated from the Sargasso Sea
MKICIIGSGYVGLVTGVCFSELGNSVICVDVDKPKIENLKKGIIPIYEPGLEELILRNYKQKRLHFSTQISSAIKNSNIIFICVGTPLDKNLNKANLKYVFKVVSDIKKNLNNYKVVVTKSTVPVTTGDQIEKILSSKKNKKNFDVVSNPEFLREGEAIRDFMYPDRVIIGTSSNKANNIMKNLYLPLIKKSNRYFHTSRRAAELIKYSANAFLATKISYINEIANLCENLNIDI

SEQ ID NO: 84058 - protein, 260 aa, Unknown
  Bacterial polypetide isolated from the Sargasso Sea
IVSKNFISGRLKFTTNFASAVRNSDLIFICVGTPTAKNGSANLKYVYSVAKEISKNINKFKIIVNKSTVPVTTGDYVENIIAKKVKRNNFEVISNPEFLREGEAVRDFRFPDRIVIGTNNTKILKKIKLLYEPLIKKGAVFFSTSRRSAEMIKYASNAFLATKITFINEISNLCENINVNIEDVSLGIGLDKRIGGRFLRAGPAYGGSCFPKDTKAIVVTANKYKTDFSLIKSVIKSNDKRQSLLTKKVEKFYLINLKKK

SEQ ID NO: 84059 - protein, 125 aa, Unknown
  Bacterial polypetide isolated from the Sargasso Sea
MKLCMIGTGYVGLVSGVCFSDLGNDVICIDKDKNKINNLKNGKIPIYEPGLEELVRKNLQNKRLNFSTNLKESVSKSDIIFICVGTPTKKNSYSADLSQVYSVAKEISKSIKKFKIIITKSTVPV

SEQ ID NO: 84060 - protein, 302 aa, Unknown
  Bacterial polypetide isolated from the Sargasso Sea
GLVSGVCFSDLGNTVYCVDKNKEKINSLNNGNIPIYEPGLEEILKKNFKQKRLIFTSDLKMAVNNSDIIFICVGTPTKKKSNSADLKYVFQVANELKKYIKKYKIVITKSTVPVTTGDKIEKILIKQKNKKLVDVVSNPEFLREGEAIRDFVYPDRVVIGTDSNKANRILKSLYLPIIKKTSRYFNTSRRGAELIKYASNAFLATKISYINELANLCEKTGVDIKNVSFGMGLDQRIGERFLRAGPAYGGSCFPKDTRALVDTSKYFKTNLSIVKTVIKSNDDRKVLLTKKVEKILSKKIKN

SEQ ID NO: 84061 - protein, 307 aa, Unknown
  Bacterial polypetide isolated from the Sargasso Sea
KDLDKISSLKKGKVPIYEPGLSELVIKNFRNKRLNFSTDLKKSVKESDIIFICVGTPTKKGGSSADLSQIYNVTKEISSSINRFKIIITKSTVPVTTGDEIEKILSRKNSKKKFSVVSNPEFLREGEAIRDFSYPDRVVIGTNDKKAGKIMKNLYNPLISKGASYLQTSRRAAELIKYASNAFLATKITFINEIANLCEKTGINVEDISIGMGLDKRIGSRFLRAGPAYGGSCFPKDTKAIISTADKFKTNLSVVKSVIKSNENRSKILLDRIYRMLNKKIKNKKITFLGVTFKGNTDDMRDSISLK

SEQ ID NO: 84062 - protein, 87 aa, Unknown
  Bacterial polypetide isolated from the Sargasso Sea
MNIVMLGAGYVGLVSGACFSELGFNVTCLDNDVEKIDNLKKGILPIYEPGLEVLVKKNISTGRLSFNIEKKEYIKKADAIFIAVGTP

SEQ ID NO: 84063 - protein, 293 aa, Unknown
  Bacterial polypetide isolated from the Sargasso Sea
FITVGTPSKRIDHQADFSQVFKVAKEISKNLKKYSVIVTKSTVPVGTTRKIKEIISKYKSSDDFDVVSNPEFLREGSAINDFMRPDRIIIGVESKKAENIMRRLYKPLYLLKTPIVTTSFETAEIIKYASNSFLATKISFINQVADYCEKAGGNVQDVAKAMGIDKRIGSKFLHAGPGFGGSCFPKDAKAFIASANKFNVDLSILKAVNYSNEQRPKMILKKIKKCFSNNLSNKTFCLLGLSFKPNTDDVRSSISIKIAKLLINAKSSVKSYDPVAMEAAKKILPKIIYCDSV

SEQ ID NO: 84064 - protein, 51 aa, Unknown
  Bacterial polypetide isolated from the Sargasso Sea
MKLCMIGTGYVGLVSGVCFADLGNEVICVDKDLNKINSLKKGKVPIYEPGL

SEQ ID NO: 84065 - protein, 255 aa, Unknown
  Bacterial polypetide isolated from the Sargasso Sea
QAATGHTIVVEKSTLPVRTAAAIKTILEAAQADDQQRSFSVLSNPEFLAEGTAICDLEAPDRVLIGGEDAASIEALAGVYSHWVPEPQILRTNLWSSELSKLTANAFLAQRISSINSVAALCEATGADVREVARAIGTDSRIGPKFLNAGPGFGGSCFQKDILNLVYLCRHFGLPEVADYWESVVALNTWQQHRIARLVVQKLFGTVTGKRLAVLGFAFKADTNDTREAPAIRICGDLLEEGAQLAIHDPKVDPA

SEQ ID NO: 84066 - protein, 284 aa, Unknown
  Bacterial polypetide isolated from the Sargasso Sea
RNNVVCVDVDKNKIKNLNKGIIPIYEPGLEELVGRNTKQNRLKFSIDINKSIKSSDIIFICVGTPTNKKTNKSNLNHVYNVANQIKINLNKFKIVVNKSTVPVGTGDTIEKIISSKKNKNKFEVVSNPEFLREGEAIRDFLYPDRVVIGTGSKKANNKMKSLYLPIIKKKNRYFNTSRKAAELIKYASNAFLATKITFINEIANLCEKASIDVKEVSIGMGLDERIGGRFLRAGPGYGGSCFPKDTRALLTTAKKFNTALSVVKSVVASNNNRNKILFSRIKKI

SEQ ID NO: 84067 - protein, 227 aa, Unknown
  Bacterial polypetide isolated from the Sargasso Sea
NKDKIANWNSDNLPIYEPGLLELVLEARGKNLFFVTDVEKEIKDSDIIFVSVNTPTKSFGEGAGRAADLQYWEKTARDILENCQKPWVVVVEKSTLPVRTAEAMAKILKSGNSKTEFSIVSNPEFLAEGTAIEDLKNPDRVLIGGEENENGQKAAEKVAKLYSHWVPEDRLLMTNVWSSELSKLVANAMLAQRISSVNSISALCERTEADITEVSKAVGMDSRIGAR

SEQ ID NO: 84068 - protein, 254 aa, Unknown
  Bacterial polypetide isolated from the Sargasso Sea
MNTRNKIVVVGSGYVGMSLATMLSKKYQVCVLDIDESRVNAINERTSTIRDKDIQKTLSSADLKLHATKNKEEAYKDADFIIVCTPTNFDESTYFFDTSIVDLVSKEANSMCPNALVVIKSTIPVGHTLKLQNELKTRNIVFSPEFLREGSALRDNLHPSRIIVGNESNKSEEFAEILSESASIDIEPILMTSSDAEAVKLFSNTYLAMRIAFFNELDTFALAKNLNTQKIINGISLDPKDRKGLQQSFFWLWR

SEQ ID NO: 84069 - protein, 216 aa, Unknown
  Bacterial polypetide isolated from the Sargasso Sea
MTFEIKNICCIGAGYVGGPTMSVIADKCPNININVVDKSPERIALWNSSNLELLPIYEPGLDKIIARCRDKNLTFSTKIKEKISDADMIFISVNTPTKTKGIGAGQASDLKWVEACAREVALSAKGHTIVVEKSTLPVKTAEVIKTILEASQLNSNELKKTFDVLSNPEFLAEGSAISDLESPDRVLIGGESDDAIIALSNIYRNWVPIEKILHTN

SEQ ID NO: 84070 - protein, 229 aa, Unknown
  Bacterial polypetide isolated from the Sargasso Sea
VGGECESSLEFSDLLREGAIEDSIEVLSMKSTEAEAVKLFANTYLAMRVSFFNELDSYALANNLDTKSIIEGVSLDKRIGSDYNNPSFGYGGYCLPKDTKQLLANYEHVPQTLIKAIVSSNTTRKDFIADEIRRLNPRVVGFYRLVMKMNSDNFRSSAIQGIMKRIKAKGIEVVVFEPELDETEFFGSKVITDLNEFKKLSDVIVANRMSDALNDVQSKCFSRDLFGEN

SEQ ID NO: 84071 - protein, 288 aa, Unknown
  Bacterial polypetide isolated from the Sargasso Sea
KIDRLNAGEVPIYEPGLNGYIQRNREAGRLEFTTDVEKGVDHGLFQFISVGTPPDEDGSADLQHVLAVARTIGGHMTEYRIIVDKSTVPVGTADKVTHEINTALAERGASVEFDVVSNPEFLKEGAAINDFVKPDRIVVGTNNPRTNELLRALYEPFNRNRDRMITMDVRSAELTKYAANAMLATKISFMNELANLAEGVGADIEMVRLGIGSDPRIGYQFIYPGAGYGGSCFPKDVRALTRSAEQAGYKAELLDAVEAVNNRQKHRMFDKVSGHFGDDLAGKTLAVW

SEQ ID NO: 84072 - protein, 92 aa, Unknown
  Bacterial polypetide isolated from the Sargasso Sea
MKICMIGTGYVGLVSGACFADLGNNVWCVDKNHQKIDMLNDGHIPIYEPGLEEVVNKNSISGRLKFTTDLQLAVNSSDIIFICVGTPTSKKT

SEQ ID NO: 84073 - protein, 51 aa, Unknown
  Bacterial polypetide isolated from the Sargasso Sea
MKLCMIGTGYVGLVSGTCFADLGNDVICVDKDDDKIIKLKKGIIPIYEPGL

SEQ ID NO: 84074 - protein, 288 aa, Unknown
  Bacterial polypetide isolated from the Sargasso Sea
DTKFLESAISEVNSVKNKDLVITIKSTIPPYEIDKICEKVGLDSEILTFNPEFLREGTAVKDFFNPDRIVIGGNDKKKVNKLKDLYKDFKAEIIITDPISSQLIKYLANTYLPLRLSFVNEATRLINDSGGNLSDVLQGVGMDSRIGSQYFRPSPAWGGSCFPKDVVEVNNFYDSSELNLPLISNIIESNKIQTNWTTTMIKNIIEKENLNGAILVGAAFKEDTDDLRNSPTLDIKKQLTEIGVNVSIYDELIDSEEFIKLNDFEKIDSPHLIALMYPINESLLNKNK

SEQ ID NO: 84075 - protein, 55 aa, Unknown
  Bacterial polypetide isolated from the Sargasso Sea
MKLCMIGTGYVGLVSGVCFSDLGNDVICVDKDLKKINNLKNGIVPIYEPGLEELV

SEQ ID NO: 84076 - protein, 303 aa, Unknown
  Bacterial polypetide isolated from the Sargasso Sea
GKIPIYEPGLSELVIKNYKNKRLTFSTNLKKSVKESDIIFICVGTPTKKGGGSADLSQIYNVSKEISSSIIKFKIIITKSTVPVTTGDEIEKILSKKNNKKNFSVVSNPEFLREGEAIRDFIYPDRIVIGTSDKKTGKILKNLYGPLISKGASYLQTSRRAAELIKYASNAFLATKITFINEIANLCEKTGINVEDISIGMGLDKRIGSRFLRAGPAYGGSCFPKDTKAIITTADKFKTNLSVIKSVIKSNENRSKILLDRVNRILNNKIRNKRITFLGVTFKANTDDMRDSSSLKMIPYLSK

SEQ ID NO: 84077 - protein, 64 aa, Unknown
  Bacterial polypetide isolated from the Sargasso Sea
MKICIVGTGYVGLVSGVCFADLGNIVYCVDKNKDKVQSLNNGNIPIYEPGLEEILKRNQKQKRL

SEQ ID NO: 84078 - protein, 217 aa, Unknown
  Bacterial polypetide isolated from the Sargasso Sea
MKIAIAGTGYVGLSNAILLAQHNEVVALDIIQAKVDKLNQKISPIVDTEIEHYLQHKTLNFRATTDKHEAYLGADYVVIATPTDYDPVTNNFDTRSVEAVIQDVMTINPTAVMVIKSTVPVGYTKKIKQKLCCNNLMFSPEFLREGKALYDNLYPSRIIVGEQSERARVFAGLLAQGAVKQDVATLFVDSTEAEAVKLFSNTYLAMRVSFFTNWILM

SEQ ID NO: 84079 - protein, 213 aa, Unknown
  Bacterial polypetide isolated from the Sargasso Sea
DSSLSSCDSIDDLISKVQIIFVCVPTPMNKNGSCDLSIVENIIDKINCCIEAKSDKIVIIKSTIPPGTTEELNNKYQNFNIIFNPEFLTEANFIEDFKNQNRIILGGSKVITDKVKEIYIKIFPEAKIVETGSTYAEMVKYFSNTFLATKVSFANEMKMICDKLNIDYTKVVEYSTYDNRLGDSHWSVPGPDGKLGFGGSCFPKDINALIFLA

SEQ ID NO: 84080 - protein, 285 aa, Unknown
  Bacterial polypetide isolated from the Sargasso Sea
MSKHLNDTKLLSFTPSIAEAVEDANVVFITVGTPTKRLENDADLSAVWDVAEELSQHIKNYCVVVTKSTVPVGTTTKLKKIISKKLDLNKFDVVSNPEFLREGSAINDFMRPDRIVLGTESKKSENIMCELYRPLNLIGTPIVSTSIETSEVIKYASNSFLATKIGFINQIADLCEKVGANVQDVSKAMGIDKRIGSKFLDAGPGFGGSCFPKDVKAFVNTAYKHDLDFSILDAVMKSNEARPTNIAKKIIKLKNFKPGNTIALLGLSFKPIQTMYASLLPLKLQ

SEQ ID NO: 84081 - protein, 218 aa, Unknown
  Bacterial polypetide isolated from the Sargasso Sea
MGIKISIVEMGYVGCGNALMLARDNEVSIVDIDKEKVNNFNNKKLPIQDNFAQDFFESENLNLSATCDLFESIVDASYIILSLPTNFDEETKEFDTSIIEKVIADILHKNSKALIIIKSTVNIGFTKSLRKKFETTRIIFSPEFLREGHALEDNLYPSRIIVGGLSADAKLFGNILINSSKDKKVPLLFMESTEAESVKLFSNTYLAMRVAYFKKLDG

SEQ ID NO: 84082 - protein, 57 aa, Unknown
  Bacterial polypetide isolated from the Sargasso Sea
MKLCMIGTGYVGLVSGVCFADLGNDVICVDKDEDKINKLKKGIIPIYEPGLEELVKK

SEQ ID NO: 84083 - protein, 84 aa, Unknown
  Bacterial polypetide isolated from the Sargasso Sea
MCWIDSWLFSRVVCCIGAGYVGGPTMAMIAKKCPEISVTVVDISQPRIDAWNSSELPIYEPGLDEIVFACRGKNLFFSTAVEDA

SEQ ID NO: 84084 - protein, 260 aa, Unknown
  Bacterial polypetide isolated from the Sargasso Sea
MKISIIGVGYVGLVTGLCFAEKGHKVIAYDINKKIVDKINDKNLTIYEPKLKKILNKNINKNFYCTNNLQSAIFNSEITFVAVPTPYTNKGFDLKYIRLASVNIAKILNIKNNKHLVVFKSTILPDTCDKIIIPLFKKKLKKQIYKKTSFAFNPEFLREGSAVNDFMYPDRLVIGANNKKTFSLLKDVYSSFNFDNIFTTNIKTAEMIKYASNAFFANLISFSNEIANLSSTLENVDSKDVIYGKKLDNRFYTKIKNNLI

SEQ ID NO: 84085 - protein, 297 aa, Unknown
  Bacterial polypetide isolated from the Sargasso Sea
SESVFICVGTPSNPDGSANINHVERSLKQILLVDNLKIEDIVIKSTVPPGTADRLTSEICEKRNIDLVSCPEFLREGSAVQDFLKPQRIILGLHDQRKRDKFRSIFSPFNRKQDRIIFMDPVSAELTKYASNAMLATKISFINELSRYSDLKGANIESVRMGMGLDSRIGLEYLYPGCGFGGSCFPKDIDALISSAKESNLNLDLIKVVKRINQSQPDYLIDKLSDHYKNQLNGKTISLWGLSFKPNTDDLRSAPALKIISKLLDLGCFLKIYDPKAMENFKNSPLYSPNTLLCNSA

SEQ ID NO: 84086 - protein, 131 aa, Unknown
  Bacterial polypetide isolated from the Sargasso Sea
MKLCMIGTGYVGLVSGVCFSDLGNEVICVDKDLNKINLLKKGKIPIYEPGLSELVVKNYKNKRLSFSSDLKTSVKKSDIIFICVGTPTKKKGSSADLSQVFNVAKELSSSIDKFKIIITKSTVPVTTGDEI

SEQ ID NO: 84087 - protein, 144 aa, Unknown
  Bacterial polypetide isolated from the Sargasso Sea
MKICVIGSGYVGLVSGACFAELGNNVTCVDNDLNKIANLKKGIIPIYEPGLEELILRNLKQKRLQFSSNISESIKKGDLIFICVGTPTKTKSNEADLKYVFQVVKDIKKNLNKYKVIVTKSTVPVTTGDKIEKLLTTNKNKKYS

SEQ ID NO: 84088 - protein, 240 aa, Unknown
  Bacterial polypetide isolated from the Sargasso Sea
EFLAEGTAIKDLFKSDRVLIGGESTESGKEAIKSLVKIYSKWIPKDKILTTNVWSSELSKLASNAMLAQRISSINSLSALCEKTGADIEELSKAIGMDHRIGPYFLKASVGFGGSCFKKDILNLVYLCKHYGLDEVAEYWHQVVKINTYQRNRFAKKIIDGLGGNLKGKKILILGWAFKANTNDSRESASIYVCEQLYLKAADIEIYDPMVSEKSIKNDIKDYWNIDRKNNFIEKRIKIL

SEQ ID NO: 84089 - protein, 246 aa, Unknown
  Bacterial polypetide isolated from the Sargasso Sea
MRETKALYDNLYPSRIVVGDFSNKAKEFGNILYKCSNKKKIQMLFMESKEAEAVKLFSNTFLAMRVSFFNELDSFAEIQGLSSRNIIDGISSDPRVGHYYNNPSFGYGGYCLPKDTKQLLDNFSKIPNNIIKATVEANNTRKEFIVNSILKRSPKTVGIYRLTMKKGSDNFRESAVLDIVSKLEIKKINMVIYEPFINNNTFNGIPVINEIGSFIKKSDLIIANRFSKELDHVAGKVYSRDLFQEN

SEQ ID NO: 84090 - protein, 220 aa, Unknown
  Bacterial polypetide isolated from the Sargasso Sea
MKICFIGTGYVGLVSGVLFSDFGNRVVCVDNNRKKIENLKKGIIPIFEPGLDELVIRNCKSKRLFFTTDINKAIKDSDIVFIAVGTPTAKDGVSADLKNVYAVAKIISKNINKYKIVITKSTVPVCTGDEVENIIKKNNPISKFDVVSNPEFLREGEAIRDFRYPDRVVIGSNNLKKTKPILEKLYEPITKKGSKFIATTRRSSELIKYAANAFLATKIT

SEQ ID NO: 84091 - protein, 265 aa, Unknown
  Bacterial polypetide isolated from the Sargasso Sea
LVSGVCFSDLGNDVICVDKDLDKIQLLQNGKVPIYEPGLSELVVKNYKNKRLKFSNDLKKSVIESEIIFICVGTPTKKGSSSADLAQVYNVAKEISKSINKYKVIVTKSTVPVTTGDKIEKILQKKNKKNKFSVVSNPEFLREGEAIRDFIYPDRIVIGSNDKRSSKLMKSLYNPLISKGAQFLLTKRRAAELIKYASNSFLATKITFINEIANLCEQTGINVEDISIGIGLDKRIGGRFLRAGPAYGGSCFPKDTKAIVSTAEK

SEQ ID NO: 84092 - protein, 251 aa, Unknown
  Bacterial polypetide isolated from the Sargasso Sea
MKIVVVGCGYVGLSLATLMSEKYEVTAIDVDQEKIDRINNRVAPINEPQIQNFYNDKNLNLKATKNFVNAYKEASFIIICTPTNYDEVTNQFNLDSIYSVLEDIVKSETSSAIVIRSTIPVGFCNSLNIKFPNNDIFFSPEFLREGNALEDNLNPSRIVIGSSSSNAKKFSEILLQISGSSKKNIPVEFMESSEAEAVKLFANTYLAMRISFFNELDSYCESFGLDTSNVIRGICHDNRIGDYYNNPSIWL

SEQ ID NO: 84093 - protein, 292 aa, Unknown
  Bacterial polypetide isolated from the Sargasso Sea
SNPEFLAEGTAIQDLSNPDRVLIGGEENENGHKAANSVAELYAHWVPRERILLTSVWSSELSKLVANAMLAQRISSVNSISALCERTEADITEVSRAIGMDSRIGAKFLQASIGFGGSCFRKDILHLSYLCEFYGLPEVADYWASVVHINEWQTNRFFQNILHELFNTLAGKTITMLGFAFKQDTGDTRDSPAIPLCERLVGENAKVRIHDPKALENARIELKNLKGDLSFVEDVYEAVDGAHALALVTQWDEYLDLDYEKIHQAMVEPAFIFDGRNHLDHDKLYKIGFNVS

SEQ ID NO: 84094 - protein, 187 aa, Unknown
  Bacterial polypetide isolated from the Sargasso Sea
MKLCMIGTGYVGLVSGVCFSDVGNTVYCVDKDQKKIDLLNKGIVPIFEPGLEEILKRNFKQKRLIFTSNLKNAVINSDIIFICVGTPTKKNTNSADLKYVFSVAKDLKKIIKKYKIIITKSTVPVSTGDQIEKILINLKKNKLVDVVSNPEFLREGEAIRDFIYPDRVIVGTDSKKANKILKSLYLP

SEQ ID NO: 84095 - protein, 296 aa, Unknown
  Bacterial polypetide isolated from the Sargasso Sea
KINKKESTISDKDIQNFLATKDLSLSSTADKKKAYEDSDFIVIATPTDYNSDTNFFETNSVDSCIKDALSINKEALIVIKSTIPIGHTKLLQERYETDHIIFSPEFSREGKALHDNLYPSRIIIGCDNEKGKQFYDLLIQGAQKDKIPSLFISSTEAEAIKLFSNSYLAMRVAFFNELDSFALANKLNTKNIINGVSLDKRIGDTYNNPSFGYGGYCLPKDTKQLLANYNDVPQKLINAIVESNITRKNFIANEIINKNPNPVGIYRLQMKKDSDNLRSSSTQGIIKRIVNEGLKL

SEQ ID NO: 84096 - protein, 281 aa, Unknown
  Bacterial polypetide isolated from the Sargasso Sea
PDANIVIKSTIPIGFTDLMRKKYKNSKVFFSPEFLRENNALLDNLNPSRIVVGDTTKEATEFANILSSCAEKKEDIPILYMQSKEAEAVKLFSNTYLAMRVSFFNELDSFAEIQNLSARKIIEGVSLDPRIGNFYNNPSFGYGGYCLPKDTKQLLANFDKIPNNIIKAVVAANETRKDFIVETILKKSPSTVGVYGLSMKHGSDNHRESAVIDVLNKIIQKNIKVILFEPNIKNLKIKNVQIANDVNELINLSDLIIANRYTRELDSVVDKVYSRDLFNEN

SEQ ID NO: 84097 - protein, 259 aa, Unknown
  Bacterial polypetide isolated from the Sargasso Sea
MRITVAGTGYVGLSLAVLISKYHDVIAYDKNKEVVNLIKKSKSPFKDVELENFLKKEKLNLYATSDRTEAFDKSDVVIVCTPTDYDHESGKFDTSSVEDVVKHSLELNKNTLIVIKSTIPMGFTSKLRDKYKTDKIIFSPEFLRETKAIYDNLYPSRIIVGSNCENGKKFAKILEKCAIKKDVPIIFMKSEEAESVKLFSNSYLAMRISYFNELDAFCQVHSLDTRKVILGVSNDPRIGNYYNNPSFWLWRILSSKRYE

SEQ ID NO: 84098 - protein, 283 aa, Unknown
  Bacterial polypetide isolated from the Sargasso Sea
GPTMAVIAKHCPEIEIKIVDINEDRIRLWNSKNLNDLPVFEPGLGEIIREVRNKNLSFSTNVDDSIKEADMIFISVNTPIKKNGLGAGETSDLRWIESCARQINKIAIGHTIVVEKSTLPVKTAQTIKEILFSSEIHDRTFTVLSNPEFLAEGTAIKDLENPDRVLIGGDDEESMEELKKIYLRWIPDNKIIFTNLWSSELSKLSANAFLAQRISSINSISAICEFTGANINEVSNAIGKDSRIGSKFLRAGPGFGGSCFKKDILNLVYLSKFYGLNEVANFG

SEQ ID NO: 84099 - protein, 288 aa, Unknown
  Bacterial polypetide isolated from the Sargasso Sea
YVGLVSGVCFSDLGNEVICVDKDLNKINNLKNSIIPIYEPGLDELVKKNYKSGRLSFTTNLSNAVKRSDIIFICVGTPTKKNGIEADLSQIFNASKKISNYITKFKIIINKSTVPVTTGDKVEKIISKKVKKKLFSVVSNPEFLREGEAIRDFIYPDRIVIGTDNNRSNKILKQLYSPLISKGAKYLNTSRRAAELIKYASNAFLATKITYINEIANMCEKLNVNVEDVSIGMGLDKRIGGRFLRAGPAYGGSCFPKDTRAILHTANEIKSNLSLIKSVIKSNDNRSK

SEQ ID NO: 84100 - protein, 75 aa, Unknown
  Bacterial polypetide isolated from the Sargasso Sea
MKICMIGTGYVGLVSGTCFAELGNQVICTDINKIKIGKLNECVIPIYEPGLEELVKRNFKQGRLKFSSDISSSIK

SEQ ID NO: 84101 - protein, 85 aa, Unknown
  Bacterial polypetide isolated from the Sargasso Sea
MKLCMIGTGYVGLVSGVCFSDLGNTVYCVDKDQNKIELLNKGTVPIYEPGLEEILKRNYKEKRLIFTTDLKKAVSNSDIIFICVG

SEQ ID NO: 84102 - protein, 136 aa, Unknown
  Bacterial polypetide isolated from the Sargasso Sea
MKLCMIGTGYVGLVSGTCFSDLGNKVICVDIDKNKINKLNSGIIPIYEPGLDELVKKNFNQKRLSFSTDINSSVKESDIIFICVGTPTKKKSNMANLNYVYNAAKLIASNINKYKIIVTKSTVPVTTGDKIEKIIK

SEQ ID NO: 84103 - protein, 228 aa, Unknown
  Bacterial polypetide isolated from the Sargasso Sea
MPVRTAEAMARILESGNSTTNFSVVSNPEFLAEGTAIKDLANPDRVLIGGEENENGHKAANTVADLYAHWVPRERILLTSVWSSELSKLVANAMLAQRISSVNSISALCERTEADITEVSRAIGMDTRIGAKFLQASIGFGGSCFRKDILHLSYLCEFYGLPEVADYWASVVRINEWQTNRFFQNILHELFNTLAGKTITMLGFAFKQDTGDTRDSPAITLCERLVGE

SEQ ID NO: 84104 - protein, 124 aa, Unknown
  Bacterial polypetide isolated from the Sargasso Sea
MKICMIGSGYVGLVSGACFSDLGNIVTCVDINQEIISKLNKGIIPIYEPGLHELIIRNLKQKRLFFSTDISNSIKKSDIIFICVGTPTKKNKAVLKYVYKVVKNIKSNLNKYKIIVTKSTVPVS

SEQ ID NO: 84105 - protein, 211 aa, Unknown
  Bacterial polypetide isolated from the Sargasso Sea
MKLVLVGTGYVGLVSGSCFAEFGYEVICVDKDKSRISELKKGKCPFFEPGMKELLLKHRNQTKLLSFTTSLPEAMEGADIIFITVGTPSKRLEEEADLSAVWNVAKDIAYNIKKYCLVVTKSTVPVGTTKEIKKIISKIVTKENFDVVSNPEFLREGSAINDFMRPDRIIIGTDNEKSTKIMKELYRPLYLLETPIITSSIESSENNKICL

SEQ ID NO: 84106 - protein, 70 aa, Unknown
  Bacterial polypetide isolated from the Sargasso Sea
MNITIIGCGYVGLVSGTCFSEFGADVSCYDIDKDRIEKLSNGEIPIYEPGLDNLVKKNIKTRKIKIHISN

SEQ ID NO: 84107 - protein, 159 aa, Unknown
  Bacterial polypetide isolated from the Sargasso Sea
EGVGLDPRIGNHYNNPSFGYGGYCLPKDTKQLLANYSEVPNNMIQAIVDANRTRKDFIADSIVSRKPKIVGIYRLIMKSGSDNFRASAIQGIMKRIKAKGIEVVVYEPVLKEEDFFNSRVVNDLEEFKKISDVIVANRVTGDIEDVLDKVYSRDLFNAD

SEQ ID NO: 84108 - protein, 296 aa, Unknown
  Bacterial polypetide isolated from the Sargasso Sea
FSDLGNEVICVDKDNQKIENLKKGIVPIYEPGLNELVKKNFKAKRLSFTTDISEAIKKSNIIFVCVGTPTKKNSYAADLSQVFTVAKIIAKNIKSHKIIINKSTVPVTTGDQVENIISKKVSKKLFSVVSNPEFLREGEAIRDFIYPDRIVIGTSNKKINNILKSLYAPLISKGAKYVNTSRRGAELIKYASNAFLATKISFINEIANLCEKINVNVEDVSIGMGLDKRIGGRFLRAGPAYGGSCFPKDTRAILDTAIKFKTDLSIVKSVIKSNSKRSKLLLNRVLKLLNNKIRNK

SEQ ID NO: 84109 - protein, 304 aa, Unknown
  Bacterial polypetide isolated from the Sargasso Sea
KINESYSNADYIIIATPTDYDIESGEFDTSTIEKTLSDILKINKSSTIIIKSTIPLGYTEKLRNKFSYTDIYFSPEFLREGHALYDNLYPSRIVMGGTNAQSKTFSNILSELALKDKNEISQYFMSSTEAEAVKLFANTHLAMRIAFFNELDSYCEKYNISTRKVIEGVSSDPRIGNFYNNPSFGYGGYCLPKDTMQLLKNYEKVPNNLIKAIVDANSTRKDFISESIISKNPEIVGIYRLIMKEGSDNFRTSAIQGVMKRIKSKGIKIIIYEPLCHKKLFFNSEVINDIQKFKKNSTIIMLTE

SEQ ID NO: 84110 - protein, 297 aa, Unknown
  Bacterial polypetide isolated from the Sargasso Sea
YSTKTHQFDTSVVESSIKAALKVNKRAIIFIKSTIPVGFTDKLRRKLKYENIYFSPEFLREGSAILDNKKPSRIIVGGFTKQAKKFGKLLLSITVNKNVPVEFMNSKDAEAVKLFSNTYLALRIAFFNELDTYCETKDLNAKNVIKGIGLDSRIGNFYNNPSFGYGGYCLPKDTQQLLKNYENVPNNIIKATVQANTTRKQFIADKVIQKKPSVVGIYRLAMKEGSDNFRESAVQGVMKRIKAKGIKVIIYEPNYKKDKFFMSDVIQDLKYFKNVSDIILANRFHKDLKNVKSKVYS

SEQ ID NO: 84111 - protein, 246 aa, Unknown
  Bacterial polypetide isolated from the Sargasso Sea
MIGTGYVGLVSGVCFSDAGNKVYCVDNNKKKIDLLNKGIVPIFEPGLEEILKKNQKQKRLIFTTDLKEAVKNSDIIFICVGTPTKKNSNSADLRYVLQVANQLKKIIKKYKIVIMKSTVPVTTGDKIEKILNKLKNKNLVDVVSNPEFLREGEAIRDFIFPDRVIIGTDSKKANNILKSLYLPIIKKTNRYFNTSRRSAELIKYASNAFLATKITFINELANLSEKTGVDIKDISLGMGSDQRIGE

SEQ ID NO: 84112 - protein, 270 aa, Unknown
  Bacterial polypetide isolated from the Sargasso Sea
YVGLVSGSCFADLGNKVWCVDNDKNKIEKLKNSISPIYEPGLDDLIRNNYRSKRLIFTDNLEKAVKEAQIIFICVGTPTKKNSNLVDLSQVYKVAKTISKYIKNYKIIVTKSTVPVTTGDQIEKIIRKRVKRNLFDVISNPEFLREGEAIRDFKYPDRIIIGSNNKKVFKKMKVLYEPLIKKGAKYFCASRKAAELIKYASNAFLATKISFINEIANLCETVGINVEDVSVGIGSDARIGSRFLRAGPAYGGSCFPKDTKGLVSTGDKFK

SEQ ID NO: 84113 - protein, 291 aa, Unknown
  Bacterial polypetide isolated from the Sargasso Sea
VGLVSGVCFSDLGNDVICVDKDINKINNLKNGIIPIYEPGLEELVLKNYKNKRLNFSTNIKDSVRKSDIIFICVGTPTKKNGNSADLSQVYAAGNEISKSINKFKIIINKSTVPVTTGDELEKIISKKVNKKYFSVVSNPEFLREGEAIRDFIYPDRIVVGSNDDKSQKILKNLYSPLISKGAKFISTKRRAAELIKYASNAFLATKITFINEIANLCEKTGIDVEDISIGIGLDKRIGSRFLRAGPSYGGSCFPKDTKAIVSTAEKFKTNLSIIKSVIRSNDLRSDLLSK

SEQ ID NO: 84114 - protein, 58 aa, Unknown
  Bacterial polypetide isolated from the Sargasso Sea
MKICIIGSGYVGLVSGACFSDLGNTVTCVDINKEIVEKLKKGIIPIYEPGLQELVKEI

SEQ ID NO: 84115 - protein, 312 aa, Unknown
  Bacterial polypetide isolated from the Sargasso Sea
MTERKKITIVGAGYVGMSIAAALAVKEDILILESNKEKIDRINSGKPSINDSDINSFCHDQSLSIKATENKKDAYHEADFIIICVPTDFDEESASFDTTILESVLNDAITINSNALVIIRSTIPVGYSDQAREKHQTKNIIFSPEFLREHSAMHDVLNPSRIIVGNDSELSTDFAELISESTENKPEIILMPSSDAEAVKLFSNTYLAMRVAFFNELDTFSIAKGLSTKNVIKGVSADYRIGMKYNNPSFGYGGYCLPKDTKQLLANFEDLPQTIIQSVISSNEARKKFMINEITKHSPKVVGIYKLTNNRN

SEQ ID NO: 84116 - protein, 247 aa, Unknown
  Bacterial polypetide isolated from the Sargasso Sea
MKLCMIGTGYVGLVSGVCFSDAGNKVYCVDNNKKKIDLLKKGIVPIFEPGLEEILKKNQKQKRLIFTTDLKEAVKNSDIIFICVGTPTKKNSNSADLKYVFKVANDLKKIIKKYKIVVMKSTVPVTTGDKIEKILSKLKNKNLVDVVSNPEFLREGEAIRDFIFPDRVIIGTDSKKANNKLKSLYLPIIKKTSRYFSTSRRSAELIKYASNAFLATKITFINELANLSEKTGVDIKDISLGMGSDQR

SEQ ID NO: 84117 - protein, 74 aa, Unknown
  Bacterial polypetide isolated from the Sargasso Sea
MKLCMIGTGYVGLVSGVCFSDLGNDVICVDKDIRKINNLKKGIIPIYEPGLEELVLKNYKNERLSFSTNLKESV

SEQ ID NO: 84118 - protein, 138 aa, Unknown
  Bacterial polypetide isolated from the Sargasso Sea
MKITMLGTGYVGLVSGTCFSEFGFDVCCVDKDKNKITNLKKNIIPIYEPGLENLVKKNKDANRLTFSNDVKKNIADAEIVFIAVGTPARRGDGYADLSYVYEAAEEIAENLMGYTVIVTKSTVPKGTGNKIKKIIKKT

SEQ ID NO: 84119 - protein, 206 aa, Unknown
  Bacterial polypetide isolated from the Sargasso Sea
MTKRRKITVVGAGYVGMSIASSLARKDEILILETNKDKIQRINSGKSSIDDPDISAFCNQHDLTIKAIEKKEEAYQGADFIIICVPTDFNDKTSSFDTDILEGVISDAISNNNDALIIIKSTIPVGYTSQAREKYQTKNIIFSPEFLREHSAMNDVLNPSRVIVGNDSELSADFAELIAELTENEPEIILMPSSDAEAVKLFSNTY

SEQ ID NO: 84120 - protein, 131 aa, Unknown
  Bacterial polypetide isolated from the Sargasso Sea
MKKITILGTGYVGLVSGAGISDFGHKVTCADIAKDKINLLKSGVIPIYEPGLEELVKKNVDAKRLAFTSNTDLAIQNAEVVFIAVGTPEGKDGVADISAVESVAASIGKNLNEYKVMCTKSTVPVGTGELI

SEQ ID NO: 84121 - protein, 192 aa, Unknown
  Bacterial polypetide isolated from the Sargasso Sea
MKKITVVGSGYVGMSLSALLSSKHEVQVLDIDEKKVKKINQKKTTVADVDIEKVLKDKNLSLCATLDKKEAYKDADFIIVCTPTDFDSNANRFNTSVVDKVISDAIEQNDKALIVIKSTLPIGHTQYLQKKFKTKRIIFSPEFLREGKALFDNLNPTRIVIGGDCESSINFAEILEDCSNKSNVLKLFMNAS

SEQ ID NO: 84122 - protein, 299 aa, Unknown
  Bacterial polypetide isolated from the Sargasso Sea
FSNDIEKTIKESDIIFIAVGTPQNNNGDVDLNYVESVSKTISKNLNKYKIICTKSTVPVGTGKLIEKTLLKNNDRSDFDYVSNPEFLREGSAVKDFLIPDRLVIGARNEKAFSIMKEVYRPFFINETPILNTSVETAELIKYASNAFLALKISYINEIANLCETVGADIHHVAKAMGQDGRISAKFLHPGPGFGGSCFPKDTMALVNMGKKFNHPVRTVEAAIEVNKKQFLRMINKIDSLLDNQISGKKIAILGLSFKPQTDDIREAPSTKIIPKLIIKGAKINAYDPVAIENFRTNYP

SEQ ID NO: 84123 - protein, 152 aa, Unknown
  Bacterial polypetide isolated from the Sargasso Sea
MKLCMIGTGYVGLVSGVCFSDLGNTVYCVDKDKEKIDHLNNGKIPIYEPGLEEILKKNFKQKRLIFTTDLKTAVNNSDIIFICVGTPTKKNSNSADLKYVFQVANELKKCIKKYKIIITKSTVPVTTGDKIEKILKKLKMKKLVDIVSNPEF

SEQ ID NO: 84124 - protein, 152 aa, Unknown
  Bacterial polypetide isolated from the Sargasso Sea
MKICMIGTGYVGLVSGTCFADLGNKVYCVDKDKSKINKLKNSISPIYEPGLEDLIKNNLRAKRLIFTDDLKKAIEDSQIIFICVGTPTKKGSNLVDLSQVYRVTKSISKHIKNYKIIVTKSTVPVTTGDQIERIIRKRVKKSLFEVVSNPEF

SEQ ID NO: 84125 - protein, 299 aa, Unknown
  Bacterial polypetide isolated from the Sargasso Sea
RIAQWNSTDLNKLPVYEPGLAEIIEKCRGLNLNFSTKVTKNISEADMIFISVNTPTKRKGIGAGKASNLKWIESCTREISKYAKGETIVVEKSTLPVRTAEVISNILEVADKYDSKSNPRSFTVLSNPEFLAEGSAINDLENPDRVLIGGDNEDSIQALIEIYLNWVNPDKILTTDLWSSELAKLTSNAFLAQRISSINSISSLCEATGADIKDVSLAVGKDSRIGDKFLNAGPGFGGSCFKKDILNLVYICDYYGLKEVALYWQKVVDINSWQQKRITEIVVEKLFKNLSGKKIAILG

SEQ ID NO: 84126 - protein, 272 aa, Unknown
  Bacterial polypetide isolated from the Sargasso Sea
IIRKCRGQNLFFSSDIETKIASADMVFISVNTPTKKKGIGAGKASDLRWVEECARTVAKFSTGHTIVVEKSTLPVKTAETIKSILKTANNSKNSNHATFDVLSNPEFLAEGSAINDLENPDRVLIGGENQDSIAALSNIYKNWVPENKILQTNIWSSELAKLTANAFLAQRISSINSIGALCEATGADVREVARAIGTDSRIGSRFLDSGPGFGGSCFKKDILNLVYLSTYFGLPEVACFWEEVVKLNNWHQHRISNLVVKKLFGTITGKKI

SEQ ID NO: 84127 - protein, 262 aa, Unknown
  Bacterial polypetide isolated from the Sargasso Sea
MEAPDRVLIGGDDAASIEALAAVYSHWVPESQILRTNLWSSELSKLTANAFLAQRISSINSVAALCEATGADVREVARAIGTDSRIGPKFLNAGPGFGGSCFQKDILNLVYLCRHFGLPEVADYWESVVALNTWQQHRIARLVVQKLFGTVTGKRLAVLGFAFKADTNDTREAPAIRICGDLLEEGAQLAIHDPKVEPAQMASDLKQEEAPTADALSGTGSWALAESVEEAVIGADAVLILTEWNDYRQLNWAELAKRMRKP

SEQ ID NO: 84128 - protein, 263 aa, Unknown
  Bacterial polypetide isolated from the Sargasso Sea
MILIREIIKKLNKGTIPIYEPGLQELVVRNLKKKRLLFTTDISSSIKKSDIIFICVGTPTKNNKADLKYVFNVTKSIKSNLNRYKIIVTKSTVPVTTGDKITKILKSNKNKNKFDVVSNPEFLREGEAIRDFQFPDRVIVGTSSNKANKIMKKLYLPLIKKGGRYFHTSRRSAELIKYASNAFLATKITFINEIANLCEKSNIDVKEVAIGMGLDERIGSRFLRAGPAYGGSCFPKDTRALVSTGRIFKTNLSVVKSVINSND

SEQ ID NO: 84129 - protein, 268 aa, Unknown
  Bacterial polypetide isolated from the Sargasso Sea
SPIYEPGLDELIKKNFTAKRLTFTTNIDSAINTSDIIFICVGTPTRKGSIKVDLSFVYKCTKEILKFSKRKKIIVTKSTVPVGTGDEIEKIVKRKKKLFTVISNPEFLREGEAIRDFRYPDRIVIGSDEKKAFNIMKKLYTPLTNKGSKFFTTSRRGAELIKYASNAFLATKITFINELANLCEKSGVNIEDISLGMGSDSRIGGRFLRAGPAYGGSCFPKDTKGLVSAAEKYKINLSVVKSVIKSNQERVSLLTQRIHKILGSNIRN

SEQ ID NO: 84130 - protein, 293 aa, Unknown
  Bacterial polypetide isolated from the Sargasso Sea
IGVDKDKDKIDFLNKGKIPIYEPGLDELIKKNFKQKRLFFTTDLKLAVQKSDIIFICVGTPTNKNSDSANLKYVFQVANELKKIIKKYKIIVTKSTVPVTTGDKIEKILIKLKRKKLVDIVSNPEFLREGEAIRDFVYPDRVVIGTNSKKANKIIKNLYLPIIKKNSRYLQTSRRGAELIKYASNSFLATKISFINELANLCEKTNVDIKDISNGMGLDQRIGDRFLRAGPAYGGSCFPKDTRALIDTATKYKIDLSIVKSTIKSNNLRKIQLTKKIEKILNNKVKNKKITFL

SEQ ID NO: 84131 - protein, 111 aa, Unknown
  Bacterial polypetide isolated from the Sargasso Sea
MKICILGTGYVGLVSGACFSDIGNKVICVDTDKRKINNLNNGVIPIYEPGLEDLVIKNKKQNRLFFSTDINNSIKKSDIIFICVGTPTKNNKADLKNVFKSINNIKKNLNK

SEQ ID NO: 84132 - protein, 142 aa, Unknown
  Bacterial polypetide isolated from the Sargasso Sea
MKLCMIGTGYVGLVSGVCFADLGNEVICVDKDLNKINSLKKGKVPIYEPGLSELVIKNYRNKRLNFSTDLKKSVKDSDIIFICVGTPTKKKENSADLSQIYNVIKEISTSIKSFKIIITKSTVPVTTGDEIEKILSRKNNKK

SEQ ID NO: 84133 - protein, 116 aa, Unknown
  Bacterial polypetide isolated from the Sargasso Sea
MKLCMIGTGYVGLVSGVCFSDLGNDVICVDKDKNKIDLLQRGKVPIYEPGLSELVVKNFKNKRLSFSTNLQKSIKDSDIIFICVGTPTKKGGSSADLSQIYKVAKEIASSINKFKI

SEQ ID NO: 84134 - protein, 65 aa, Unknown
  Bacterial polypetide isolated from the Sargasso Sea
MKLCMIGTGYVGLVSGVCFSDLGNDVICVDKDQNKINSLQKGKIPIYEPGLSELVLKNFRNGRLS

SEQ ID NO: 84135 - protein, 218 aa, Unknown
  Bacterial polypetide isolated from the Sargasso Sea
MKLVIVGTGYVGLVSGACFAEFGYQTICVDKDKDRIESLNSGKCPFFEPGMDDLLYKHLKISKLLSFSSSLSDSIKDADIIFITVGTPNRRLEDDADLTSVWSVAEEISENIKHYCLVVTKSTVPIGTSDEIKKIIEKKISKDNFDVVSNPEFLREGSAIKDFMHPDRVVIGTENQRSENIMKKLYNPLIIKKTPIIFTSIKSSEIIKYASNSFLATK

SEQ ID NO: 84136 - protein, 273 aa, Unknown
  Bacterial polypetide isolated from the Sargasso Sea
IIKSTIPVGYTSQAREKYQTKNIIFSPEFLREHSALHDVLNPSRIIVGNDSELSTDFAEHISESTENESEIILMPSSDAEAVKLFSNTYLAMRVAFFNELDTFSIAKEISTENVIKGVSTDPRIGKQYNNPSFGYGGYCLPKDAKQLLANFEDLPQTIIQSVISSNEARKNFIIEEIKKLRPEVVGIYKLASNPKVKNFRSSEMLDIITGLSNYFDDLIIFEPLISEKDYMGFKVINDIDIFKKESDLIVTNRKCDQLNDVSEKLYCRDIFRG

SEQ ID NO: 84137 - protein, 69 aa, Unknown
  Bacterial polypetide isolated from the Sargasso Sea
MKLCMIGTGYVGLVSGVCFADLGNDVICVDKDVKKINSLTKGNIPIYEPGLSELVVKNYKNKRLSFSTD

SEQ ID NO: 84138 - protein, 333 aa, Unknown
  Bacterial polypetide isolated from the Sargasso Sea
DVIFIAVGTPPRESDGHADLTFVYDVARAVARCLDGYKVIVTKSTVPVGTACEVERIIREENPDADFDVVSNPEFLREGAAIGDFMRPDRVVVGTQSARAQQVLETVYRPLYLNETPIVFTSRETAEITKYAANAFLATKITFMNEIADLCEAAGGNVQEVARALGLDGRISGKFLHAGPGFGGSCFPKDTLALAQTGQKLGAPQKIVESVVSVNEDRKIRMAEKVIKACGGSVDGKKIGVLGVAFKPKTDDVRDAPSLKIIPHLQQAGGRIAAYDPEAMDEAAKHLSDVDWQDNAYAVAEDADVLVIITEWNAFRALDLSVLKERMATPADR

SEQ ID NO: 84139 - protein, 148 aa, Unknown
  Bacterial polypetide isolated from the Sargasso Sea
MKLCMIGTGYVGLVSGVCFSDLGNTVYCVDNNKEKIKSLNNCVVPIYEPGLEEILKRNYKKKRLIFTTDIKKAVLNSDVIFICVGTPTKKNANSADLRYVFSVTRKLKKIISKYKIIITKSTVPVTTGDKIEKILSTLKKKKLVDVVS

SEQ ID NO: 84140 - protein, 274 aa, Unknown
  Bacterial polypetide isolated from the Sargasso Sea
SNPEFLAEGTAINDLINPDRVLIGGDNTKNGKKAIEEIFNIYNHWIDSEKILTTNSWSSELSKLASNAFLAQRISSINSLSLLCDVSGANIKEVSKAVGADSRIGDKFLNASVGFGGSCFKKDILNLVYLCKHYGLEEVSDYWSQVLKINSYQKYRFSKRIIDEFNGNIRSKNITILGWAFKKDTNDSRESAAIDIANTFLKNRCIIKIYDPMVSKERIYQDLKNTNKIEDYKSIIKRVEIFDNLYDASKNSDCITILTEWDEFKNIDWNKIKK

SEQ ID NO: 84141 - protein, 192 aa, Unknown
  Bacterial polypetide isolated from the Sargasso Sea
MRICMIGTGYVGLVSGTCFADLGNKVYCIDKDNEKIKKLNSGISPIFEPGLNEILKKNFNAGRLIFSTDLKEAVNNSDIIFICVGTPTKKGSHSVDLKYVFKAVKEIAKVSKRKKIIVNKSTVPVGTGDKVEKILKKLKKRKFDIISNPEFLREGEAIRDFRYPDRIVIGSDNKKVFSVMRKLYQPINYERS

SEQ ID NO: 84142 - protein, 266 aa, Unknown
  Bacterial polypetide isolated from the Sargasso Sea
DYDFVLLCLPTDYDYDSNELDTSVIESYIEFFINNSNSKIIIKSTIPIGFTQSQLERHNSERISFSPEFLREGSSLDDVMNPSRVIYGPRNSSSNEFNEIIKESYKNSSYETRFMHSSEAEAVKLFSNTYLALRVAFFNELDNFSIKEDLNTENIIKGICDDERIGMYYNNPSFGFGGYCLPKDSKELSSFLSKKDIPANLIKTINHSNLERKKFISQDILINNPEVIGIYRISMKANSTNFRYSSTIDIIDSLKNENVKVMIYEP

SEQ ID NO: 84143 - protein, 281 aa, Unknown
  Bacterial polypetide isolated from the Sargasso Sea
IKKTKLISFSSKIENNLDYTDIIFITVGTPTRRLEDEADLSFVWQVAEEIANNINKYCLVVTKSTVPVGTTREVKKIISKKIDQNLFDVVSNPEFLREGSAINDFIRPDRVVIGTENKKSENMMKELYRPLFLKETPIVATSIETSEIIKYASNSFLATKIAFINEVADLCEVVGADVQQVAYAMGIDKRIGSKFLNAGPGFGGSCFPKDVKAFASTAKKKNIDLSIVNAVNKSNQDRINKISNKIISKIKNNSTVTFLGLSFKPNTDDVRDSTSMKIAST

SEQ ID NO: 84144 - protein, 268 aa, Unknown
  Bacterial polypetide isolated from the Sargasso Sea
MEKICIIGVGYVGLVSAAGLSEFGNEVTCVDLDEEKIKQLNNGEIHIYEPGLKSLVKTNFNNKKLRFTTDINKSIKNSKIIFIAVGTPQKKNGEADLSYVYSVANSIADNLNNYKIISTKSTVPVGTGEEIEKVLSSKSDTKLFDYVSNPELIREGSAVNDFMIPDRLVIGSRSNKAFNLMKNVYRPLFINETPILHSSVETAEMIKYASNAFLALKISYINEIANLCEIVGADVHQVAKAMGQDGRISSKFLHPGPGFGGSCFPKDT

SEQ ID NO: 84145 - protein, 65 aa, Unknown
  Bacterial polypetide isolated from the Sargasso Sea
MKIAMIGAGYVGLVSGACFSEFGVDVVCVDKDDNKIKQLNSCVCPIYEPGLENLITSNVNSKRLF

SEQ ID NO: 84146 - protein, 311 aa, Unknown
  Bacterial polypetide isolated from the Sargasso Sea
ARQIAEYATGHTIVVEKSTLPVRTAKTIKKILFNSQINKEDSDTDKTFSVLSNPEFLSEGNAINDLQKPDRVLIGGDDEIAIESLADLYLKWIPNEKIIRTNIWSSELSKLTANAFLAQRISSINAMSALCELTEADIKQVSEAIGLDSRIGKKFLNPGPGFGGSCFQKDILNLVYLCEYYNLNEVARYWEQVLTINNWQKDRISKLIVNSLFGTVSDKKLAVLGFSFKANTNDTRNSACIKICKDLIEEGAILSIYDPKVSKNQIEADLGSPPYDMEINLMNEAWTYSKSIESSIKDSHAIIILTDWSEF

SEQ ID NO: 84147 - protein, 154 aa, Unknown
  Bacterial polypetide isolated from the Sargasso Sea
MIARVLIIGAGYVGISHAVALAENNEIIILDNNQDKVNKINNGDSVINEPDLNESFNIRRTNITATCDKSLILENHEFILICLPTDLNNESGELDTSIISDYIEYIVKNTKSKIIIKSTVPIGYTQNQIDRYGDDRIIFSPEFLREGNSLDRYL

SEQ ID NO: 84148 - protein, 155 aa, Unknown
  Bacterial polypetide isolated from the Sargasso Sea
MKYKKNITVVGLGYVGLSMSILLAQSNNIIALDIDRNKINKINKRISPLSDDFMSHYLRTKKLNLEGTLEKDKAYQNAQFIIICVPTDYNHMKKRFDTELIDQIISDILSINNSANIIIKSTIPIGFTEKLRKKFNYENIIFAPEFLREGHALYD

SEQ ID NO: 84149 - protein, 162 aa, Unknown
  Bacterial polypetide isolated from the Sargasso Sea
MKICIIGSGYVGLVSGACFSELGNQVVCVDNNKQKIENLKKGIIPIYEPGLEELLLRNYKNKRLNFSAEINSSIKKSDIIFICVGTPTNKNSNNANLKYVFKVVSSIKENLNKYKIIVTKSTVPVMTGDKIEKVLNLNKNKIKIDVISNPLNFFEKEKLLET

SEQ ID NO: 84150 - protein, 122 aa, Unknown
  Bacterial polypetide isolated from the Sargasso Sea
MKLCMIGTGYVGLVSGVCFSDIGNTVYCVDKDKEKINLLNNGKVPIYEPGLEEILKRNYKKKRLIFTTDLKKAVNNSDMIFICVGTPTKKNTNSADLKYVFAVARQLKKIICKYKIIITKST

SEQ ID NO: 84151 - protein, 150 aa, Unknown
  Bacterial polypetide isolated from the Sargasso Sea
MKLCMIGTGYVGLVSGVCFADLGNNVICVDKDLKKIDILSKGKIPIYEPGLTELVNKNYKNKRLKFSSDLKKSVKDSDIVFICVGTPTKKGGSNADLTQIYKVAKEISSSINKFKVIVTKSTVPVTTGDEIEKILLRNKKNKNKFSIVSN

SEQ ID NO: 84152 - protein, 279 aa, Unknown
  Bacterial polypetide isolated from the Sargasso Sea
MKLTIVGTGYVGLVSGACFAEFGYKTICIDKDEKRIESLKSGKCPFYEPGMDNLLYKHLSNTKLLTFSSSISDSIKDADVVFITVGTPSRRLEDEADLTNVWSVAEEISQNINKYCLVVTKSTVPVGTSKEIKRIIGNNISNDLFDVVSNPEFLREGSAIDDFMRPDRVVIGSENVKSEKIMKELYRPLYLKETPLVSTSIETAEIIKYASNSFLATKIGFINEVADLCEAVGANVQEVSRAMGIDQRIGAKFLNAGPGYGGSCFPKDVKAFASTAKKF

SEQ ID NO: 84153 - protein, 119 aa, Unknown
  Bacterial polypetide isolated from the Sargasso Sea
MKLCMIGTGYVGLVSGVCFSDLGNTVYCVDKDKKKIDSLNNGIIPIYEPGLEEILKRNYKANRLIFTTDFKKAVSNSDVIFICVGTPTKRNSNSANLKYVFDVAPSLKKTISKYKIIVT

SEQ ID NO: 84154 - protein, 237 aa, Unknown
  Bacterial polypetide isolated from the Sargasso Sea
DKDLKKINNLKKGIVPIYEPGLEELVLKNYKNKRLNFSINLKESVKKSDIVFICVGTPTKKNSNSADLSQVYAAAKEISKSIKKFKIIVNKSTVPVTTGDEIEKIISKKVNKKFFSVVSNPEFLREGEAIRDFIYPDRVVVGSNDSKSQRILKSLYSPLISKGAKFLSTKRRAAELIKYASNAFLATKITFINEISNLCEKTGIDIEDISIGIGLDKRIGSRFLRAGPAYGGSCFPK

SEQ ID NO: 84155 - protein, 122 aa, Unknown
  Bacterial polypetide isolated from the Sargasso Sea
MKLCMIGTGYVGLVSGVCFSDLGNNVVCVDKDKEKINSLNNGIIPIYEPGLEEILKRNFKASRLTFTTDLKKAVSNSDIIFICVGTPTKKKSNSADLKYVFAVAHKLKKIISKYKIIITKST

SEQ ID NO: 84156 - protein, 117 aa, Unknown
  Bacterial polypetide isolated from the Sargasso Sea
MKLCMIGTGYVGLVSGVCFADLGNEVICVDNNTNKIDLLKKGKIPIYEPGLSELVIKNYKNKRLTFSTNLKKSVKESDIIFICVGTPTKKGGGSADLSQIYNVSKEISSSINKFKII

SEQ ID NO: 84157 - protein, 138 aa, Unknown
  Bacterial polypetide isolated from the Sargasso Sea
MKLCMVGTGYVGLVSGVCFADLGNEVICVDKDSNKINSLKKGKVPIYEPGLSELVIKNYRNKRLNFSTDLKKSVRESDIIFICVGTPTKKGGGSADLSQIYNVTKEISSSINRFKIIITKSTVPVTTGDEIEKILSRK

SEQ ID NO: 84158 - protein, 127 aa, Unknown
  Bacterial polypetide isolated from the Sargasso Sea
MIGTGYVGLVSGTCFAELGNDVICVDIDKKKIDKLNSGIIPIYEPGLEELVKRNLKHGRLKFSTNISLAIKNCNVIFICVGTPTNKITKKADLKYVFNVTKNIKNNLNNFKLIVTKSTVPVMTGDKI

SEQ ID NO: 84159 - protein, 431 aa, Unknown
  Bacterial polypetide isolated from the Sargasso Sea
MNLTIVGTGYVGLVTGACFAEFGYSVTCVDNNIKRLEILKSGKCPFFEPGMDELLDKHINKTKLITFESTIKNNLDNTDIIFITVGTPTRRLEDEADLSFVWQVAEEIAENIKKYCLVVTKSTVPVGTTREVQKIISNKIDQKLFDVVSNPEFLREGSAIDDFIRPDRVVIGTDNQNSENIMRELYRPLFLKETPIVATSIETSEIIKYASNSFLATKIAFINEVADLCEVVGADVQQVARGMGIDKRIGSKFLNAGPGFGGSCFPKDVKAFASTAKKKNIDLSIINAVNKSNQDRINKISNKIISKIKNNSTVTFLGLSFKPNTDDVRDSTSMKIASTIFEKGIKVQCYDPEAMDNAKKENSNLILFNSAYEACEGSSAIIIGTEWNEFRALNFEKISKLLKEKIIFDLRNIYIPENLKEMGYEYYGTGK

SEQ ID NO: 84160 - protein, 431 aa, Unknown
  Bacterial polypetide isolated from the Sargasso Sea
MKICMIGSGYVGLVSGACFAELGNNVTCVDSNLNKITNLKKGIIPLYKPGLEELIIRNLKQKRLQFSSNISKSIKKGDLIFICVGTPTKTKSNETHLKYVFQVVKDIKKNLNKYKIIVTKSTVPVTTGDKIEKLLTTNKNKKLFDVASNPEFLREGEAIRDFMFPDRVVVGTNSKKANNILKNLYSPIVKKKSRYFNTSRRAAEVIKYASNAFLATKITFINEISNLCEKLNVDVTDVSVGIGADERIGGRFLRAGPGYGGSCFPKDTRALISTSKKFKTNLSIVKSTINANDNRYKYLLAKIREILNNNLKSKKITFLGVTFKAGTDDMRDSASLKLIPYLIKKGSKVSYYEPTGIKNDFDKKKVTYFNNIKDACKNSDLLIIHTEWNEFKQLNFKKLNNKKKFKIYDLRNLYSPSKMKSKNIEYYSIGR

SEQ ID NO: 84161 - protein, 423 aa, Unknown
  Bacterial polypetide isolated from the Sargasso Sea
YVGLVSGTCFADIGNEVICVDVDNKKINNLSSGIIPIYEPGLEEMVKRNLKQGRLKFSTNVSNAIKKSNLIFICVGTPIIKKTNAANLKYVFQVAKKIKSNLINYKIIVTKSTVPVTTGDKIENILKKNKFKSKFDVVSNPEFLREGEAIRDFVVPDRVVVGTTSKKAIKIMKSLYLPIIKKSTRFFSTSRRGAELIKYASNAFLATKISFINEMANLCEECNINIEDISVGMGLDQRIGERFLRAGPGYGGSCFPKDTRAIVTLAKKFRTNLSIVNSVIKSNENRSKILFNRILKILKNKIKNKQITFLGTTFKANTDDMRESPCLSLMPALLLRGAKINYYEPTGAKKELHKFKKVNYSKNIVNATKKADLIIIHTEWNEFKHLNLKKLIKNKNVIIYDMRNIYSPEKMKKNGIKYYGIGK

SEQ ID NO: 84162 - protein, 374 aa, Unknown
  Bacterial polypetide isolated from the Sargasso Sea
VSGVCFADLGNEVICVDKNADKINLLKKGKIPIYEPGLSELVIKNFKNKRLNFSTNLKKSVSESDIIFICVGTPSKKGSSTADLSQIYNVAKEISSSINKFKLVITKSTVPVTTGDEIEKILSRKNNKNKFSVVSNPEFLREGEAIRDFIYPDRVVIGTLDKKSNRILKNLYSPLISKGASYLQTSRRAAELIKYASNAFLATKITFINEIANLCEKTGVNVEDISIGMGLDKRIGSRFLRAGPAYGGSCFPKDTKAITSTADKFKTNLSVVKSVIKSNKNRSKILLNRVYEILNKKIKNKKITFLGVTFKANTDDMRDSSSLIMIPALSKKGAQIKYFDPTGIKKEFSKIKNVYNSNTIKDAIKGSDLVIIHT

SEQ ID NO: 84163 - protein, 389 aa, Unknown
  Bacterial polypetide isolated from the Sargasso Sea
MSKRIIIFGLGYVGTSMAILLSQKNYVRAIDIDEKKVNLLNNKVSPIKDNLIDRFLDKKNLNLEASLDIEDFDNFDFVVIATPTDYDEDKDYFDVSTVKDIVAKVKDRNKNIPIIIKSTIPVGFTDEINSLHKCDNIYFSPEFLRENSALEDNLSPTRIIISGKSKQAKDFVNTISNCTRNKDYPILYIGRNEAESVKLFANTYLAMRVSFINELDNFGIHKKLNVDEIIKGISSDPRIGDFYNNPSFGYGGYCLPKDSKQLLANFDEVPQALISSIIKSNKLRKDFIAEQIILLKPKMVTFYRLAMKSESDNYRSAAIRGVIDRLKNKKIKLQIYEPTLDVDYYDDISVENNLDLVKKESDLIVCNRLYDELEDVKNKVFTRDIFGNN

SEQ ID NO: 84164 - protein, 388 aa, Unknown
  Bacterial polypetide isolated from the Sargasso Sea
MKISIFGAGYVGLSLAALFMDSHEVSIIESDADKINKLKKRISPIEDLNIQKTLKNSKSKLHIFSSMPEKYDSDLTILCLPTNYDAQANFFDTSIIENVISEIFQNKENNSPILIKSTVPVGFTDNLNKSLKTNRIYFSPEFLREGNSLEDNLFPSRIIVGGSDNNSEMIGNLFLDAAKNKPDLMYMGNMEAESVKLFSNTYLALRVAFFNELDSYCMKKDIDVASVIKGVSSDTRIGNFYNNPSFGYGGYCLPKDTKQLLANYDSVPQNLIKAIVESNSTRKDFISEYIDKKDNKTIGIFRMVMKEGSDNIRDSSIQGVIKRLNAKGNRMLIYEPLLDKNEGFFGIEVTHDLEHLKQQSSIIISNRMSKKLIDVKEKVFTRSIFDID

SEQ ID NO: 84165 - protein, 226 aa, Unknown
  Bacterial polypetide isolated from the Sargasso Sea
MKLCIIGTGYVGLVSGACFSDLGNNVICVDKDKKKINNLKKGLIPIFEPGLEELVAKNYKNKRLNFTTNLDNAVKKSDIIFICVGTPSKKNSKQADLSQIFSVAKEISKSINKFKIIITKSTVPVTTGDDIEKTILKRVPINKFSVVSNPEFLREGEAIRDFIYPDRVIVGSNDKKSNLIIKNLYSPLVSKGAKYMSTNRRSAELIKYASNSFLATKVTFINEIAN

SEQ ID NO: 84166 - protein, 433 aa, Unknown
  Bacterial polypetide isolated from the Sargasso Sea
MKLCMIGTGYVGLVSGVCFSDIGNTVYCVDKDQKKIDLLNKGIIPIFEPGLEEILKRNYKQKRLIFTSDLKKAVINSDIIFICVGTPTKKNANSADLKYVYSVAKDLKKIIKKKYKIIITKSTVPVSTGDKIEKILTNLKKKKLVDVVSNPEFLREGEAIRDFIYPDRVIIGTDSNKANRILKSLYLPIIKKKSRYFNTSRRGAELIKYASNAFLATKISFINEIANLCEKTGVDIKDVSQGMGSDERIGDRFLRAGPAYGGSCFPKDTRALIDTGNQFKTDLTIIKSVVNSNDNRKTLLIKRVVKILGGNLKNKIITFLGVTFKPNTDDMREATSIPMIKYLNKKNSKIKYYDPSGEKADFKNLKNVNYCNTISFACLNADMVILHTEWNDFKLLNFKKLVKKQKFKIFDMRNMYSPSRMKKLNIDYYGVGR

SEQ ID NO: 84167 - protein, 364 aa, Unknown
  Bacterial polypetide isolated from the Sargasso Sea
MNIVIIGTGYVGLVTGVGLASLGNKVTFIDLDEDKIENLNNKKLTFYEPGLDKYFEDDKTFKNMEFVSSYTDIDWQGKEIVFICVQTPNNVETNSVDTKFLESAINEVSSVQNENLVITIKSTIPPYEIEKICNQVGLDMDSLTFNPEFLREGTAVEDFFKPDRIVIGGNDSSKVQKLKDLYSDFEAEILITDPISSQLIKYLANTYLPLRLSFVNEAARLVNSSGGNLDDVLKGVGMDSRIGQHYFRPSPAWGGSCFPKDVVEVNNFYDSEEVNLPLIANIIESNKIQTQWTAKMLKSIHNEKKLSGIILVGAAFKEDTDDLRNSPTIDIYNELKAENMNTMIYDDLIKSEEYLSIEDFENLE

SEQ ID NO: 84168 - protein, 200 aa, Unknown
  Bacterial polypetide isolated from the Sargasso Sea
MKLVLVGTGYVGLVSGSCFAEFGYEVICVDKDEFRISELKKGKCPFFEPGIEELLSKHRDQTKLLSFTSSLTEAMEGADIIFITVGTPSKRLEGEADLSAVWNVAKDIANNIKKYTLVVTKSTVPVGTTQEIKKIISKIVPKENFDVVSNPEFLREGSAINDFMRPDRIIIGTDNEKSTKIMKELYRPLYLLETPNYYFI

SEQ ID NO: 84169 - protein, 433 aa, Unknown
  Bacterial polypetide isolated from the Sargasso Sea
MKLCMIGTGYVGLVSGVCFSDIGNTVYCVDRDQKKIDLLNKGIIPIFEPGLEEILKKNYKQKRLIFTSDLKKAVTNSDIIFICVGTPTKKNTNSADLKYVYSVAKDLKKIIKKKYKIIITKSTVPVSTGDKIEKILSNLKKKKLVDVVSNPEFLREGEAIRDFIYPDRVVIGTDSKKANRILKSLYFPIIKKTTRYFNTSRRGAELIKYASNAFLATKISFINEIANLCEKTGVDIKDVSLGMGSDERIGERFLRAGPAYGGSCFPKDTRALIDTGNQFKTDLTIVKSVVNSNDNRKKLLIERVVKILGGNLKNKIITFLGVTFKPNTDDMREATSIPMIKYLNKKNSKIKYYDPSGEKVDFKDLKNVNYCNTISSACLNADMVILHTEWNDFKLLNFKKLVKKQRFKIYDMRNMYSPLRMKKLNIDYYGVGR

SEQ ID NO: 84170 - protein, 389 aa, Unknown
  Bacterial polypetide isolated from the Sargasso Sea
MVKKNIFANRLHFDIGLSKSFDKCDSIFIAVGTPTNSRDNSANLVYVYKVIEEIVSLINIKNKSKLIVTKSTVPVGTGQEIIKFISNLRPELKLYKHFDIASNPEFLREGSAIEDFMRPDRVVCGVESEFAKNIMQKLYRPLNLRETPILFTGRETAELIKYASNGFLATKISFINEISDICEKVGADVQQVAKGIGLDGRIGSKFLHPGPGFGGSCFPKDTRALAEIGKKYKARSRIIESVIDINENRKLNMVKKIQDAIGNLKNKSISILGLTFKPNTDDMRESPSIIIVSELLNMCKKLRVYDPAGMDNAKKMSEFNGVEWCQNAYDCIKDTDAMVLITEWNEFRALDLIKVKTLLKQPIIIDLRNVYSKEYMQEVGINYVSVGRN

SEQ ID NO: 84171 - protein, 345 aa, Unknown
  Bacterial polypetide isolated from the Sargasso Sea
MNIVIIGTGYVGLVTGVGLASLGNKVTFIDLDEDKIGNLNNKKLTFYEPGLDKYFEDDETFKNMEFVSSYSDIDWKDKEIVFICVQTPNNVETNSVDTKFLESAITEVSSLQNENLVITIKSTIPPYEIEKICNQVGLDMDLLTFNPEFLREGTAVEDFFKPDRIVIGGNDSSKVQKLKDLYSDFEAEIIITDPISSQLIKYLANTYLPLRLSFVNEAARLVKSSGGNLDDVLKGVGMDSRIGQHYFRPSPAWGGSCFPKDVVEVNNFYDSDEVNLPLIANIIESNKIQTQWTANMLKSIHNEKKLNGIILVGAAFKEDTDDLRNSPTIDIYNQLLAENMNIMIL

SEQ ID NO: 84172 - protein, 193 aa, Unknown
  Bacterial polypetide isolated from the Sargasso Sea
IKLFANTYLAMRVSFFNELDSFCLLNNLNSYDVINGVCLDERIGKNYNNPSFGYGGYCLPKDTKQLLSNFKNTPQNIISAIVDSNNTRKKVISDTIISKGISIVGIYRLVMKKNSDNIRSSSIVDVIDNLKKSNVQIIIYEPEIKDDFFEGCKIENDINLFKNKSEIIVCNRLSSEIEDVKDKVFTRDIFNEN

SEQ ID NO: 84173 - protein, 399 aa, Unknown
  Bacterial polypetide isolated from the Sargasso Sea
MTELIERKKITIVGAGYVGMSIAVALAVKEDVLILESNKEKIDRINSGKPSINDSDINLFCHDQSFSIKATDNKKEAYHEADFIIICVPTDFDEESSSFDTSILESVLDDAITNNSDALVIIRSTIPVGYSDQAREKYQTKNIIFSPEFLREYSAMHDVLNPSRIIVGNDSELSIDFAELISESTENKPEIILMPSSDAEAVKLFSNTYLAMRVAFFNELDTFSIAKGLSTENVIKGVSADPRIGMKYNNPSFGYGGYCLPKDTKQLLANFEDLPQTIIQSVISSNEARKKFMIDDIKKHGPKVVGIYKLTNNRKAENFRSSEMLDIINGLSNDVDELIIFEPLIKEDDYMGFKVINDIDRFKSKSDLIIANRNDSQLSDVTDKLYCRDIFSEDGEGTI

SEQ ID NO: 84174 - protein, 65 aa, Unknown
  Bacterial polypetide isolated from the Sargasso Sea
MKLCMIGTGYVGLVSGVCFSDLGNTVYCVDNNKAKINSLNSGKIPIYEPGLEEILKKNYKQKRLI

SEQ ID NO: 84175 - protein, 447 aa, Unknown
  Bacterial polypetide isolated from the Sargasso Sea
MSVKSICCIGAGYVGGPTMAVIALKCPEIKIVVVDKNKEKINLWNGDLDKLPVFEPGLKDIIANVRGVNLFFSTDIDTAIDESEIIFMAVNTPTKTKGEGAGMAADLTYVELCAQDIARVSKSDKIVVEKSTLPVRTAEKIKNILTTNGNGVNFEVISNPEFLAEGSAIEDLFKSDRVLIGGDKTPSGQKAVKKLVDIYSQWIPKEKIFTTNVWSSELSKLASNAMLAQRISSINSLSALCEKTEADIQEVSKAIGMDHRIGPYFLNPSPGFGGSCFQKDILNLVYLCQFYGLHEVADYWHQVLKINDYQRDRITNKIMEVIEGSNNKVVTVLGWSFKKNTNDSRESSSIYITFNLLKKGITVNVYDPKVKYQRIISDLENLISENNEKNINIKRNLNIYNSIDESIADSELIVVLTEWDEFKSIKTNKKIIDTRDVVKDSIAYFKL

SEQ ID NO: 84176 - protein, 155 aa, Unknown
  Bacterial polypetide isolated from the Sargasso Sea
MKLCMIGTGYVGLVSGVCFADLGNDVICVDNNVDKINLLKKGKIPIYEPGLSELVIKNFKNKKLNFSTDLKKSIKDSDIIFICVGTPIKKGGSSADLSQIYKVSKEISSSINKFKIIITKSTVPVTTGDEIEKILSKKNSKKKFSVVSNPEFLRE

SEQ ID NO: 84177 - protein, 216 aa, Unknown
  Bacterial polypetide isolated from the Sargasso Sea
LLVQGAKKKNIETLFIQSTEAEAVKLFANTYLAMRVSFFNELDSYAEANELNSREIIEGMCLDPRIGSHYNNPSFGYGGYCLPKDTKQLKANYQDVPHSLISAVVDANSTRKDFIANSIIAKSPKVVGVHRLIMKSGSDNYRASAIHGIMERIKAKGIEVIIFEPVIEEVDFFNSKVIRDLDEFKKLSDLIITNRMSDELISVKNKVYTRDLFNNY

SEQ ID NO: 84178 - protein, 449 aa, Unknown
  Bacterial polypetide isolated from the Sargasso Sea
MKINVIGAGYVGLVTAACFAHSGHEVKCYDIDKDKIDLLKKGKTNIYEPQLESLLKENLEKSRLSFSDNLNDISAFSNIFFICVGTPPRGSGEANLLALYKSIFSISENTKDAFFIIKSTVPPGTCEELSAMIDSSKNINISMCPEFLREGTAVKDFLKPDRIVIGKNPDISEDFFLTIFSPFIKENKSIIFMDTLSAELTKYASNSFLATKISFMNELSIYADLKGADIEKVRMGIGLDKRIGYEYLYPGLGFGGSCFPKDIRALIDNANDANLDLKLLKSVIEINDFQVDIFTKKITEYFKSDDLSGFTLSIWGVSFKPNTDDIRFAPAIKLIKNLLNKGALVKAYDPKALDNLRETIQHKNLSFCQNPFDAAKESNALIIATEWKEFFNINLEELKTYLKNAVIFDGRNIYDPNLLSEKGFDYICIGRPTKINDTKEFSNSLNVVK

SEQ ID NO: 84179 - protein, 400 aa, Unknown
  Bacterial polypetide isolated from the Sargasso Sea
MNIVIIGTGYVGLVTGVGLASLGNKVTFIDLDEDKISNLNNKKLTFYEPGLDKYFEEDKTFTNMEFVSSYSDIDWKDKEIVFICVQTPNNVETNSVDTKFLESAITEVSSVQNENLVITIKSTIPPYEIEKICNQVGLDMDSLTFNPEFLREGTAVEDFFKPDRIVIGGNDSSKVQKLKDLYSNFEAEIIITDPISSQLIKYLANTYLPMRLSFVNEAARLVNSSGGNLDDVLKGVGMDSRIGQHYFRPSPAWGGSCFPKDVVEVNNFYDSEEVNLPLIANIIESNKIQTKWTANMLKSIHNEKKLNGIILVGAAFKEDTDDLRNSPTIDIYNQLLAENMNTMIYDDLIKSEEYLSIEDFEKLEGAHLIALMYPVKENLMLKINSIVSNTNSFLYTPWQL

SEQ ID NO: 84180 - protein, 79 aa, Unknown
  Bacterial polypetide isolated from the Sargasso Sea
MKICMIGTGYVGLVSGTCFADLGNKVYCVDKDKSKINKLKNSISPIYEPGLEDLIRNNLRAKRLIFTDDLQKAIEDSQI

SEQ ID NO: 84181 - protein, 340 aa, Unknown
  Bacterial polypetide isolated from the Sargasso Sea
MLEKITVVGSGFVGFSLAVLMSQKKEITIVDLDKEKLKKINQKISPIKDKNIQEFLDTKKLKLKTSNNLKDSIEDVDLVILALPTNFDNDSNNFDTSIIDETVKEILSHDKSIPILIKSTVPIGYTNILRNKYRNSEIIFSPEFLREGHALHDNLFPNRIIIGSKNKFAIELSELFLDFAQNKPKIFFMGSDEAESVKLFSNTYLANRVNFFNELDSFAIEKGLDTKSIIDGVTSDERIGDGYHNPSFGYGGYCLPKDSRQLESNFGSIPQMSITATIEGNSLRKSFLANYINSLGKKNIGIYRLIMKKDSDNFRESSIIDLISLLKEINPTINFAIYEP

SEQ ID NO: 84182 - protein, 82 aa, Unknown
  Bacterial polypetide isolated from the Sargasso Sea
MKLCMIGTGYVGLVSGVCFADLGNNVICVDKDLNKIDLLSKGKIPIYEPGLTELVKKNYKNKRLKFSSDLKKSIKNSDIIFI

SEQ ID NO: 84183 - protein, 187 aa, Unknown
  Bacterial polypetide isolated from the Sargasso Sea
MLNILVIGLGYVGTANAVLLSQQNEVTCFDIDVSKSNNLVNGISPIEDKEVSEYLSSKKLNLKTVNNYPTEIDNFDIAIIATPTNYDIETNKFDTSSIEQSLDNIQKSNSNPTVIIRSTIPVGYIKKIQKKYPNFEIIFVPEFLREGRALKDSLYPSRIVIGSHSKKGKEFAKLLMDASLDKNVQTI

SEQ ID NO: 84184 - protein, 165 aa, Unknown
  Bacterial polypetide isolated from the Sargasso Sea
MKVSIIGMGYVGLSNAVLLSLKNNVVCHDIDTSKLDCINKRISPIKDSLISSYFKNKKLRLTTSEYINKEMSNSDFIIISTPTDFDVQKKTFNTSSIDVILKKLNSLKSTAHIIIKSTLPIGYTKKVNSLYKKLKIYFSPEFLREGKALYDNLYPSRIIVGGKDK

SEQ ID NO: 84185 - protein, 217 aa, Unknown
  Bacterial polypetide isolated from the Sargasso Sea
MKLVMVGTGYVGLVSGACFAEFGYQTICVDNDSNRISELNSGKCPFYEPGMDDLISKHLNTTKLLTFSNSLNESMKNADIIFITVGTPSRRLEDEANLGYVWSAAEEIGNNIKKYCLVVTKSTVPVGTSQEIKKIIQKKVSDENFDVVSNPEFLREGSAINDFMRPDRVVIGTENKKSENIMKKLYRPLYLRETPLVSTSIETSEIIKYASNSFLAT

SEQ ID NO: 84186 - protein, 170 aa, Unknown
  Bacterial polypetide isolated from the Sargasso Sea
MKKITIIGTGYVGLVSGAGISDFGHSVICVDIIKEKISRLKNGMIPIFEPGLQELVNKNVDAGRLSFTSNIAAAIKEGEVIFIAVGTPEAEDGTADISAVESVAKAIGKNINGYKVICTKSTVPVGTGKLVTKVINETKDSKYEFDYVSNPEFLREGSAVKDFLWPDREL

SEQ ID NO: 84187 - protein, 360 aa, Unknown
  Bacterial polypetide isolated from the Sargasso Sea
ILPIYEPGLDELIKKNYSVGRLIFTNDLKNAISKSELIFICVGTPNKKKSNEVDLSYVFKATKEIAKSTKNKKILITKSTVPVGTGDAIEKLLKKFKKKNIDIISNPEFLREGEAVRDFRFPDRIVIGSNKKKYFKTLKRLYQPLINKGANFFTTSRRGAELIKYASNAFLATKITFINELANLCEKANINIEDIALGMGSDSRIGSRFLRAGPAYGGSCFPKDTKGLVSTGDRFKTNLSIVKSVIKSNENRKKIHTERIKKILGTLKGKKIAFLGVTFKPNTDDMRDSVSLKMIPNLCKKGSIITYYDPTGPKQHFKGIKNCQYKKSIKETCNNVDLIVLHTEWDEFKSLEFNKIVKKV

SEQ ID NO: 84188 - protein, 152 aa, Unknown
  Bacterial polypetide isolated from the Sargasso Sea
MKLCMIGTGYVGLVSGVCFSDLGNKVYCVDKDVNKINSLNKGLVPIYEPGLEEILKKNHKQKRLFFTSNLKKAVQNSDVIFICVGTPTKKNSNSADLKSVFNVANDLKKLISKYKIIVTKSTVPVTTGDKIEKILYNLKKKNLIDVVSNPEF

SEQ ID NO: 84189 - protein, 73 aa, Unknown
  Bacterial polypetide isolated from the Sargasso Sea
MSNILCIGAGYVGGPTMAMIAKYCPEHTITIVDINQERIDHWNSDDLPIYEPGLLDVVQQTRGKNLFFQTDIA

SEQ ID NO: 84190 - protein, 128 aa, Unknown
  Bacterial polypetide isolated from the Sargasso Sea
MKITIVGTGYVGLVSGACLSDFGHQVVCVDKNLERIQDLKKGIIPIYEPGLDILVKKNVKSRRLTFTDNIDDSLRSSEVVFIAVGTPSRRGEGGADLSYVHEAAQEIAKMSDNYILFVTKSTVPVGSN

SEQ ID NO: 84191 - protein, 122 aa, Unknown
  Bacterial polypetide isolated from the Sargasso Sea
MKICIIGSGYVGLVSGTCFSELGNKVICVDKNKQKIENLINGIIPIYEPGLEELIIRNVKQKRLNFSTDVDNSIRNSDVIFICVGTPTSKKSNKANLKYVYKVVNDISKNLNKYKIIVTKST

SEQ ID NO: 84192 - protein, 404 aa, Unknown
  Bacterial polypetide isolated from the Sargasso Sea
VDKDIKKINNLKKGIIPIYEPGLEELVLKNYKNKRLNFSTNLKESVKKSDIVFICVGTPSKKNSNSADLSQVYAVAKEISKSIKKFKIIINKSTVPITTGDELEKIISKKVNKKFFSVVSNPEFLREGEAIRDFIYPDRVVVGSNDSRSQRILKSLYSPLISKGAKFVSTKRRAAELIKYASNAFLATKITFINEIANLCEKTGIDIEDISIGIGLDKRIGSRFLRAGPAYGGSCFPKDTKALVSTADKFKTNLSVIKSVIRSNRIRSDLLSKRVSLILKNKIKNKVVSFLGVTFKANTDDMRDSSSLKLIPFLSKKGAKIKYFDPTGSKKEFKKLKNVEFSNSIQESIKGSDIVIIHTEWNDFKSINFKKFSKNKKLIIYDMRNIYSPNKIKKLGLKYFGIGR

SEQ ID NO: 84193 - protein, 393 aa, Unknown
  Bacterial polypetide isolated from the Sargasso Sea
EFPPIYEPGLDELIKKNFTSKRLSFTTNIDNAINTSDIIFICVGTPTRKGSIKVDLSFVYKCTKEILKYSKRKKIIVTKSTVPVGTGDEIEKIIKKKKKLFTVISNPEFLREGEAIRDFRYPDRIIIGSNEKKAFNIMKKLYAPLTNKGSKFFTTSRRGAELIKYASNAFLATKITFINELANLCEKSGVNVEDISLGMGSDSRIGGRFLRAGPAYGGSCFPKDTKGLVSAAEKYKINLSVVKSVIRSNRQRVNLLTKRVHKILGPNLKNKKISFLGVTFKPNTDDMRDSSSLKMIPYLCKKGAKVRYYDPSGEKNEFKRIKNCNYRNNIKSNCNDTDLVVLLTEWDEFKSIDFKKVVKNTKFKVYDLRNLYSAEEMKKKKIKYYSVGRPNTN

SEQ ID NO: 84194 - protein, 211 aa, Unknown
  Bacterial polypetide isolated from the Sargasso Sea
MKLCMIGTGYVGLVSGVCFSDLGNTVYCVDKDKKKINLLNSGKVPIYEPGLEEILKKNFKQKRLIFTTDLKSAVTSSDIIFICVGTPTKKKGNSADLKYIFQVANEIKKYIKKYKIVITKSTVPITTGDKIEKVLLNLKRKKLVDIVSNPEFLREGEAIRDFIYPDRVVIGTDSNKANKILKSLYLPIIKKTSRYFNTSRRGAELIKYASN

SEQ ID NO: 84195 - protein, 311 aa, Unknown
  Bacterial polypetide isolated from the Sargasso Sea
MKICMIGTGYVGLVSGTCFADLGNKVYCVDKDKSKINKLKNSISPIYEPGLEDLIRNNLRAKRLFFTDDLKKAIQDSQIIFICVGTPTKKGSNLVDLSQVYSVTKSISKYIKNYKIIVTKSTVPVTTGDQIEKIISKRVKKSLFEVVSNPEFLREGEAIRDFKYPDRIVIGSNNKKIFKKMELLYEPLIKKGAKFFCSSRKGAELIKYASNAFLATKITFINEIANLCETAGINVEDISVGMGSDARIGSRFLRAGPAYGGSCFPKDTKGLVSIAEKFKSNLSIVKSVIKSNQNRKMLLTKRVLKIMNNKI

SEQ ID NO: 84196 - protein, 302 aa, Unknown
  Bacterial polypetide isolated from the Sargasso Sea
STVEGVILDCIEINPKGLIVIKSTIPLGFTDNMRNKFNKADIIFSPEFLRESKALYDNLYPSRIVIGGESKKAVKFGEMLLECSFYSKKDVQVIIMEPKEAEAVKLFSNTFLAMRISFFNELDSFAEIKKLSTEKIIEGVSTDPRIGNYYNNPSFGYGGYCLPKDTKQLLDNFNKIPNNIIKAVVESNKTRKNFIINSILNKYPDTVGVYRLIMKEGSDNFRESAVLDILNNLKRKKIKIILFEPFVKENYFNDIEVVPNIRSFIERSDLIIANRLSDDLKPGSEQSIFKRYFPRELIDFKK

SEQ ID NO: 84197 - protein, 180 aa, Unknown
  Bacterial polypetide isolated from the Sargasso Sea
MKKYKIAVAGTGYVGLSNAVLLAQHNEVKAIDLVPEKVEMLNNRQSPIEDIEISDYLATKELDLEATLDANIAYRDADYVIIATPTDYDAQTNYFNTSSVDAVIKSVLAVNPKAVMVIKSTVPVGFTREAKARHGSDNIIFSPEFLREGKALYDNLHPSRIIVGERSERAEIFAKLLEQG

SEQ ID NO: 84198 - protein, 219 aa, Unknown
  Bacterial polypetide isolated from the Sargasso Sea
MKLCMIGTGYVGLVSGVCFSDLGNTVYCVDKDFNKINLLNKGLVPIYEPGLEEILKKNFKQKRLIFTNNLKKAVSNSDLIFICVGTPTKKNSNSADLKYVFKVARELKNIINKYKIIITKSTVPVTTGDKIEKILKNLKNKKLIDVVSNPEFLREGEAIRDFIYPDRVIIGTDSKKANKILKTLYMPIIKKTSRYFNTSRRGAELIKYASNSFLATKIS

SEQ ID NO: 84199 - protein, 341 aa, Unknown
  Bacterial polypetide isolated from the Sargasso Sea
TVLLTWHNVICVDNNSNKISKLKNGEIPIYEPGLEELIKRNLRQKRLEFSTNISASIKKSDLIFICVGTPTNPKSNKADLKYVYQVLTDIKKNLNKYKIIVTKSTVPVTTGDNIQNLLTTKNNKKLFDVVSNPEFLREGEAIRDFMFPDRVVVGTNSKKANNVLKNLYSPIIKKKGRYFNTSRRAAEIIKYASNAFLATKITFINEISNLCEKLNVDVTDISVGMGADERIGGRFLRAGPGYGGSCFPKDTRALVSTSKKFKTNLSIVKSTIYSNDNRYKYLLNNIKQILNNKIKNKKITFLGVTFKAGTDDMRDSASLKLIPYLTKKGAKVSYYEPTGIK

SEQ ID NO: 84200 - protein, 315 aa, Unknown
  Bacterial polypetide isolated from the Sargasso Sea
TGYVGLVSGVCFSDLGNTVYCVDNNIEKINALNKGILPIYEPGLEEILKRNYKQKRLIFTNNLKEAVENSDIVFICVGTPTKKNSNSADLKYVFNVANNLKKFIKKYKIIITKSTVPVTTGDKIEKILIKQKRKKLVDVVSNPEFLREGEAIRDFLSPDRVVVGTDSNKANKYLKNLYLPIVKKTSRYFRTSRRGAELIKYASNAFLATKISYINELANLCEKTNVDIKEISQGMGSDQRIGDRFLRAGPAYGGSCFPKDTRAIIDTSNKFKSNLSIIKAVIKSNEDRKKLLTEKVYQILNNNLKNKLITFLGVT

SEQ ID NO: 84201 - protein, 290 aa, Unknown
  Bacterial polypetide isolated from the Sargasso Sea
SVIEKVLEFNNNCTIVIKSTIPIGYTDHLKNKFKYKKIFFSPEFLREGSALYDNLYPSRIIIGDTGEEAAIFYQLISKSAKKDNIPVLYMNSNEAEAVKLFANTYLAMRISFFNELDSLSESSSMDTLKIIQGVCLDPRIGDYYNNPSFGYGGYCLPKDTKQLLKNYESVPNSIIKSIVSSNSIRKDFIADSIMKRKIKTVGVYRLIMKFGSDNWRNSAIKDVISRIKSKGLDVIVYEPTFEKKTFFGLDIVNDIAKFKEDSDLIIANRIDNGISDVISKVYSRDLFNRD

SEQ ID NO: 84202 - protein, 184 aa, Unknown
  Bacterial polypetide isolated from the Sargasso Sea
MKICMIGTGYVGLVSGTCFADLGNKVFCVDKDKIKINKLKNVISPIYEPGLDDLIRNNVKTKRLNFTNDLSKAVKESQIIFICVGTPTIKGSNKVDLSQVYSVAKSVAKYIKNYKIIVNKSTVPVTTGDQIEKIIGKKVKKSLFDVISNPEFLREGDAIRDFKYPDRIVIGSDNKKVFKRMNLL

SEQ ID NO: 84203 - protein, 220 aa, Unknown
  Bacterial polypetide isolated from the Sargasso Sea
MEFTVVGAGYVGLSLATLISQNYNVILYDIDEQKISSINKKKSPIKDKKIQDFLKYKKLKLFSTSKIEEAYNRTDFVIIATPTNYDYERGTFDTSSVEKSIKQSLSYQPNACIIIKSTVPLGFSEKMRLKFKYKKIFFSPEFLREGSALHDNLFPSRIIVGGNQPELKIFANVLAECAEIKKNNIKMLFMESSEAEAVKLFANTYLAMRVSFFNELDSSH

SEQ ID NO: 84204 - protein, 314 aa, Unknown
  Bacterial polypetide isolated from the Sargasso Sea
MKICVIGSGYVGLVSGACFAELGNNVIGVDKNLNKISNLKNGVIPIYEPGLEELIQRNVKQKRLQFSENISTSIIKSDVIFICVGTPTKVKSNEADLKYIFQVVKDLKQNLKKYKIIVTKSTVPVTTGDKIQKLLTTKKNKKLFDVVSNPEFLREGEAIRDFMFPDRVVVGTNSKKANNVLKNLYSPIIKKKGRYFNTSRRAAEVIKYAANAFLATKITFINEISNLCEKLNVDVTDVAVGIGADERIGGRFLRAGPGYGGSCFPKDTRALVSTSKKFKSNLSIVKSTIYSNDNRYKYLLTKIKEILNNNLKNK

SEQ ID NO: 84205 - protein, 264 aa, Unknown
  Bacterial polypetide isolated from the Sargasso Sea
MKLCMIGTGYVGLVSGVCFSDLGNTVYCVDKDKKKINLLNSGKVPIYEPGLEEILKKNFKQKRLIFTTDLKSAVINSDIIFICVGTPTKKKGNSADLKYVFQVAKDIKKYIKKYKIIITKSTVPVTTGDKIEKVLLKLKRKKLVDIVSNPEFLREGEAIRDFIYPDRVVIGTDSNKANKILKSLYLPIIKKTSRYFNTSRRGAELIKYASNAFLATKITYINELSNLCEKTDVDIKDVSFGMGLDQRIGDRFLRAGPAYGGSCF

SEQ ID NO: 84206 - protein, 178 aa, Unknown
  Bacterial polypetide isolated from the Sargasso Sea
MKLCMIGTGYVGLVSGVCFSDLGNTVYCVDKDKKKINLLNSGKVPIYEPGLEEILKRNFKQNRLIFTTDLKSAVTSSDVIFICVGTPTKKKGNSANLKYVFQVANEIKKYIKKYKIIITKSTVPITTGDKIEKVLLNLKRKKLVDIVSNPEFLREGEAIRDFIYPDRVVIGTDSNKAN

SEQ ID NO: 84207 - protein, 296 aa, Unknown
  Bacterial polypetide isolated from the Sargasso Sea
ARYCPEHKITVVDINEERIRRWNSEDLPIYEPGLDEWVRETRGKNLFFSTIIHQSIAEADIIFVSVNTPTKMFGQGAGRAADLQYWEKTARDILSHARQPEVVVVEKSTLPVRTAQAMARILDSGDSKTHFEVVSNPEFLAEGTAIQDLENPDRVLIGGRESEEGSWAAETVAKLYAHWVPEDRILLTNVWSSELAKLVSNAMLAQRISSINSISALCEKTEADIGQIAKAIGMDRRIGSKFLQTSIGFGGSCFRKDILHLAYLCEYYGLPEVSDYWESVVRINEWQTERFFQNIL

SEQ ID NO: 84208 - protein, 247 aa, Unknown
  Bacterial polypetide isolated from the Sargasso Sea
MKICMIGTGYVGLVSGTCFADLGNKVYCVDKDKSKINKLKKAISPIYEPGLKDLIRNNLRAKRLFFTDDLKKAIQESQIIFICVGTPTKKGSNLVDLSQVYSVTKSISKYIKNYKIIVTKSTVPVTTGDQIEKIISKRVKKSLFEVVSNPEFLREGEAIRDFKYPDRIVIGSNNKKIFKKMELLYEPLIKKGAKFFCSSRKGAELIKYASNAFLATKITFINEIANLCETAGISVEDISVGMGTDAR

SEQ ID NO: 84209 - protein, 193 aa, Unknown
  Bacterial polypetide isolated from the Sargasso Sea
MKLCMIGTGYVGLVSGACFSDLGNNVICVDKDKKKIINLKNGLIPIYEPGLDELVAKNYKNKRLNFTTDLVSAVKKSDIIFICVGTPSKRNSKKADLSQIFSVAKEISKSINKFKIIITKSTVPVTTGDDIEKIILKKVSKNKFSVVSNPEFLREGEAIRDFIYPDRVVVGTNDKKSNLIIKNLLFTISVKRC

SEQ ID NO: 84210 - protein, 219 aa, Unknown
  Bacterial polypetide isolated from the Sargasso Sea
MKNALVIGLGFVGLSNAIFLSKNIKITAYDNDKDKINLLKHNKPPFKDKSIENYLKDDTINFKVSSDKFVLTKSYDLVIIALPTNYSENDKCFDTSSIEYYLDFFSKNNPNTIVLIKSTIPIGFCNSMEKRFDGLKLIFSPEFLREGHALTDCFYPSRLIISGEKLSANKFAKLCTKSFKIKNVPTMLIDHSEAESIKLFSNAYLANRVAFFNELDSFS

SEQ ID NO: 84211 - protein, 239 aa, Unknown
  Bacterial polypetide isolated from the Sargasso Sea
MKLCMIGTGYVGLVSGVCFADLGNEVICIDKDASKISKLKKSIVPIYEPGLDELVKKNSKAGRLKFSTNLADAIKESSIIFICVGTPTKKNTFEADLSQVYSASNQISKNIKSFKIIINKSTVPVMTGDKVEKIISKKVSKKLFSVVSNPEFLREGEAIRDFIYPDRIVIGTSSKKSSKILKNLYSPLISKGAKFISTSRRAAELIKYASNSFLATKITFINELANLCEKLNINVEDVS

SEQ ID NO: 84212 - protein, 324 aa, Unknown
  Bacterial polypetide isolated from the Sargasso Sea
SVIASKCSKIQVSVVDINKERIDLWNSKDLKNLPIYEPGLDLIIKKYRGKNLTFSTDIEREIALADMIFISVNTPTKTKGLGAGQASDLKWVEACARQVAKFAKGHTIVVEKSTLPVKTAQVIKKILVSSQNPEQTSSFDILSNPEFLAEGSAIKDLENPDRVLIGGEREEAIIALNNIYLNWVPKNKILNTNIWSSELAKLTANAFLAQRISSINSIAALCEVTGADIREVSRAIGSDSRIGSKFLDSGPGFGGSCFKKDILNLVYLCKYYDLHEVANFWESVVTLNNWHQHRLSSLIVKELFGTVSGKKICILGFAFKSNTN

SEQ ID NO: 84213 - protein, 167 aa, Unknown
  Bacterial polypetide isolated from the Sargasso Sea
MSTTTSAIKAFKNSNFIVICTPTNYDPINNQFDTSSIEKVINQVIKHNLSNATIVIKSTIPVGYTNKIRKIFSYKKIFFSPEFLREGSALNDNLYPSRIIIGSKQSYAKKFAELLIDSAELNKDEIPLLIMNSNEAEAVKLFANTYLAMRIAYFNELDSYCAARKLD

SEQ ID NO: 84214 - protein, 229 aa, Unknown
  Bacterial polypetide isolated from the Sargasso Sea
MKLCMIGTGYVGLVSGVCFADIGNQVICVDKDKNKIDKLNSGISPIYEPGLDELIKKNFIAKRLSFTTNIDKAISLSDIIFICVGTPTKKGSIKVDLSFVNKCTKEILKYSKKKKIIVTKSTVPVGTGDEIEKILKKKKKLFTVISNPEFLREGEAIHDFRYPDRIVIGSNEKKIFNIMRKLYAPLTNKGSKFFITSRRGAELIKYASNAFLATKITFINELANLCENL

SEQ ID NO: 84215 - protein, 248 aa, Unknown
  Bacterial polypetide isolated from the Sargasso Sea
MKLCMIGTGYVGLVSGVCFADIGNQVVCVDKDKNKIEKLNSGISPIYEPGLDELIQKNFTAKRLSFTSNIDRAINSSDIIFICVGTPTKKGSIKVDLSFVYKCTKEILKYSKRKKIIITKSTVPVGTGDEIEKILKKKKKLFTVISNPEFLREGEAIRDFRYPDRIVIGSNEKRTFNIMRKLYAPLTNKGSKFFTTSRRGAELIKYASNAFLATKITFINELANLCEKSGVNIEDISLGMGSDSRIGG

SEQ ID NO: 84216 - protein, 212 aa, Unknown
  Bacterial polypetide isolated from the Sargasso Sea
MKLCMVGTGYVGLVSGVCFADLGNDVICVDNDISKINNLKKGIIPIYEPGLEELVKKNYKSKRLSFTSNIAEAIKKSNVIFICVGTPTKKNSNAADLSQIYNVAKEIRKNIKSFKIIINKSTVPVTTGDEVEKIISKKVNKKLFSVVSNPEFLREGEAIRDFIYPDRVVIGTSNKKTNKVLKLLYSPLISKGAKYINTSRRGAELIKYASNA

SEQ ID NO: 84217 - protein, 259 aa, Unknown
  Bacterial polypetide isolated from the Sargasso Sea
MKLCMIGTGYVGLVSGVCFADLGNDVICVDKDLSKINSLQKSIIPIYEPGLEELVRKNSKSGRLKFSTDLSTSIQKSDIIFICVGTPTKKNKYEADLSQVYSVANIISKNIKSFKIIINKSTVPVMTGDKLEKIISKKTKKNLFSVVSNPEFLREGEAIRDFIYPDRVVIGTTDKRSNRILKNLYSPLISKGAKYLNTSRRAAELIKYASNAFLATKITFINELANLSEKLDINIEDVSIGIGSDKRIGSRFLRAGPAY

SEQ ID NO: 84218 - protein, 307 aa, Unknown
  Bacterial polypetide isolated from the Sargasso Sea
KDEILILETNKEKIQRINSGKSSIDDPDISAFCNEHNLTLKAIENKEEAYQEADFIIICVPSDFNNETSSFDTHIIEDVINDAVRNNNDALIIIKSTIPVGYTSQAREKYQTKNIIFSPEFLREHSAIHDVLNPSRVIVGNDSELSTAFAELIAESVENEPEIILMPSSDAEAVKLFSNTYLAMRVAFFNELDTFSIAKGISTENVINGVSTDPRIGKQYNNPSFGYGGYCLPKDTKQLLANFEDLPQTIIQSVISSNEARKNFIIEEIKKLRPEVVGIYKLASNPKVKNFRNSEMLDIITGLSNLC

SEQ ID NO: 84219 - protein, 265 aa, Unknown
  Bacterial polypetide isolated from the Sargasso Sea
MRVSIIGMGYVGLSNAVMLSQKNNVICHDIDISRLECINKRVSPIKDSLISSYFKNKKLRLTTSERINKEMSKSDFIIISTPTDFDVQKKTFNTLSIDVILKKLNSLKSTAYIIIKSTLPIGYTKKVNSLYKKLKIYFSPEFLREGKALYDNLYPSRIIVSGKDKGAKQFANLLKNSSLKKNIKTLFMNSSEAESVKLFSNSYLAARISFFNELDSFSMSNNLDSKQIIDGICSDPRIGDGYNNPSFGYGGYCLPKDTKQLKLAS

SEQ ID NO: 84220 - protein, 226 aa, Unknown
  Bacterial polypetide isolated from the Sargasso Sea
MKICMIGSGYVGLVSGACFSDLGNTVTCVDIDKDIIEKLNKGIIPIYEPGLHELILRNFKKKRLLFSTDISSSIRKSDIIFICVGTPTKNNKADLKYVINVVNTIKSNLNRYKIIVTKSTVPVTTGDKITKILKSNKNKNKFDVVSNPEFLREGEAIRDFQFPDRVVVGTNSNKANKIMKKLYLPLIKKGGRYFHTSRRSAELIKYASNAFLATKITFINEIANLC

SEQ ID NO: 84221 - protein, 310 aa, Unknown
  Bacterial polypetide isolated from the Sargasso Sea
KICIIGSGYVGLVSGTCFSELGNKVICVDINKQKIENLKRGIIPIYEPGLEELIKRNVKQNRLKFTTNLSISVRKSDIIFICVGTPTNKKTYNADLNYVFQVANDIKKNLNKYKIIIMKSTVPVTTGDKIESLLNSKNNKNKFDVVSNPEFLREGEAIRDFMYPDRVVIGTSSKRANNILKNLYVPLIKKTNRYFHTSRRAAELIKYAANAFLATKITYINEIANLCEKLNVNVNDISLGIGSDDRIGSRFLRAGPGYGGSCFPKDTRALLSISKKLKTNLSIVKSTVKSNDSRYKYLLNRIRGILKNKF

SEQ ID NO: 84222 - protein, 243 aa, Unknown
  Bacterial polypetide isolated from the Sargasso Sea
GKALYDNLYPSWIIVGDHSDEARTFAELLKEGAIRKDIPVVFTSPAEAEAIKLFANTYLAMRVAYFNELDSYAVHYGLDTCQIIEGVCLDPRIGDHYNNPSFGYGGYCLPKDTKQLLANYKDVPNNLIQAIVDANRTRKDFVADDILKRKPRRVGVYRLIMKAGSDNFRASSVQGIMKRIKAKGVEVVVYEPALEEDTFFGSTVMRDFDAFAQSCDVIISNRMVDVLKPYAEKVYTRDLFGSD

SEQ ID NO: 84223 - protein, 262 aa, Unknown
  Bacterial polypetide isolated from the Sargasso Sea
MKICIIGSGYVGLVSGACFSDLGNKVTCVDINKEIIEKLNRGIIPIYEPGLQELVERNLKKKRLLFSTNISSSIKKSDIIFICVGTPTKNNKADLKYVFNVVKSIKSNLNKYKIIVTKSTVPVTTGDKITKILKSNKNKNKFDVVSNPEFLREGEAIRDFQFPDRVVVGTSSNKANKIMKKLYLPLIKKGGRYFHTSRRSAELIKYASNAFLATKITFINEIANLCEKSNIDVKEVCIGMGLDERIGSRFLRAGPAYGGSCF

SEQ ID NO: 84224 - protein, 249 aa, Unknown
  Bacterial polypetide isolated from the Sargasso Sea
MKVVMIGAGYVGLVSGACFSEFGADVTCIDLLQEKIDQLNKGKIPIYEPGLDNLVTRNLNAGRLSFSTSLDQFVPNADIIFIAVGTPTRRGDGHADLKYVYEAARNIANHLSGYTVIVNKSTVPVGTARQVSRIIRQENSKAEFSVASNPEFLREGAAISDFMRPDRVVLGVEDKRSENLLKELYRPINLIEAPILVTDWESAELIKYSANAFLATKISFINEIANLCESVGADVHSVAKGMGLDGRIG

SEQ ID NO: 84225 - protein, 200 aa, Unknown
  Bacterial polypetide isolated from the Sargasso Sea
MKLCMIGTGYVGLVSGVCFSDLGNDVICVDKDKKKINNLKKGIIPIYEPGLEELVLKNFKNKRLNFSTNIKESVKKSDIVFICVGTPTKKNSNSADLSQVYAAAKEISKSVKKFKIIINKSTVPVTTGDEIEKIISKKVNKKFFSVVSNPEFLREGDAIRDFIFPDRVVVGSNDSKSKRILKNLYSPLISKGAKFVSTKR

SEQ ID NO: 84226 - protein, 251 aa, Unknown
  Bacterial polypetide isolated from the Sargasso Sea
FSPEFLREGKALYDNLFPSRIIMGSESRNAKEFASILSGCAEKKDIKNLHMSADEAEAVKLFANTYLAMRVSFFNELDSYSMKHQLQTKNVIEGVCSDERIGSTYNNPSFGYGGYCLPKDTKQLLANYAEVPQNLIKAIVQSNSTRKDFIAEEIIKLKPKIIGIYRLAMKTNSDNFKFSSVQGIMKRLKAKGIKIIIYEPLYNKKEFFNSLIENNLENFKNISDLILANRNSSDLDDVTEKIFTRDLFNKD

SEQ ID NO: 84227 - protein, 208 aa, Unknown
  Bacterial polypetide isolated from the Sargasso Sea
AIKDLENPDRVLIGGSDKKAINLLSSIYKRWIPEDKILITNVWSSELSKLIANAFLAQRISSINSISALCEATGADIKEVVKAIGSDKRIGEKFLAPGPGFGGSCFKKDILNLVYLCRFYGLETVANYWEQILYINEWQKKRISTLIIEKFFGTVSNKKIVILGFAFKSSTNDTRESPAIEIVKDLIENGANLFINDPKVSALQIEKE

SEQ ID NO: 84228 - protein, 200 aa, Unknown
  Bacterial polypetide isolated from the Sargasso Sea
MSTRQNITIFGAGYVGMSLAVLLAEKNIVQIFDIDQQKVELINEGHSTIEDSLISDFILKKNIKLQATDIPSNAINHSDYYIIATPTDYNPETQFFDTSSVEKCIQMIIASGLNGTIIIKSTIPIGFTELMRKKFNYEKIIFSPEFLREGSALEDNLNPSRIIVGGKCKFSKKFGKLLAESAEKEDVSILYMDSKSAEST

SEQ ID NO: 84229 - protein, 249 aa, Unknown
  Bacterial polypetide isolated from the Sargasso Sea
MKICMIGTGYVGLVSGTCFADLGNKVICVDKERNKINKLKNAVSPIYEPGLDDLIRNNFRSKRLDFTDNLEKAIKDSQIIFICVGTPTKKGSNFVDLSQVYSVAKSISKYIKNYKIIVTKSTVPVTTGDKIEKIIGKKVKKSLFDVISNPEFLREGEAIRDFKYPDRIVIGSNNNKVFKKMELLYEPLIKKGAKFFCTSRKGAELIKYASNAFLATKITFINEIANLCESAGINVEDISVGMGSDARIG

SEQ ID NO: 84230 - protein, 187 aa, Unknown
  Bacterial polypetide isolated from the Sargasso Sea
MKICMIGTGYVGLVSGTCFADLGNKVLCVDKDLKKISKLKKAISPIYEPGLDDLIKNNFRAKRLDFTDNIEKAVKDSQIIFICVGTPTKKGSNLVDLSQVYNVAKAISKYIKTYKVIVTKSTVPVTTGDEIERIIGNKVKRSLFDVISNPEFLREGEAIRDFKYPDRIVIGSNNKKIFKKMELLYEP

SEQ ID NO: 84231 - protein, 261 aa, Unknown
  Bacterial polypetide isolated from the Sargasso Sea
MNHKIVIYGAGYVGFSLAVLLAEKNQVTLIEKDIDKLGLINRGISPIVENDIDKIFAPSQNNLKLYSQDSFSDDLIDADFIILALPTDFDESTSSFNTSIIEKVVKELLTKKIQSTIVIKSTIPVGFTNKLRSETGYKNIIFSPEFLREGSSIHDHRFPSRIIVGNESDRSDNFANVLYDLCNSSHKTKIISMSSTDAEAVKLFANSYLATRVAFFNELDNFAFKNGLCTKDIIKGVCEDVRIGDHYNNPSFGYGGYCLPK

SEQ ID NO: 84232 - protein, 251 aa, Unknown
  Bacterial polypetide isolated from the Sargasso Sea
YVGLVSGACFAELGNNVACVDSNLNKISNLKNGVIPIYEPGLEELITRNLKQKRLLFTTNISASIKKADLIFICVGTPTKTKSNDADLKYVFQVIKDIKKNLNKYKVIVTKSTVPVTTGDKIHKLLTTKKNKKLFDVVSNPEFLREGEAIRDFMFPDRVVVGTNSKKANNILKNLYSPIIKKKGRYFNTSRRAAEIIKYASNAFLATKITFINEISNLCEKLNVDVTDVSVGIGADERIGARFLRAGPGYE

SEQ ID NO: 84233 - protein, 306 aa, Unknown
  Bacterial polypetide isolated from the Sargasso Sea
GYVGLVSGVCFSDLGNVVYCVDKNIEKINKLNNGNVPIYEPGLEEILKKNFKQKRLIFTTDLKNAVINSDIIFICVGTPTKKNQNSADLKYVFHVAKELKKYIKKYKVIVTKSTVPVTTGDKIENVLKNLKKKKLVDIVSNPEFLREGEAIRDFLYPDRVVIGTDSNKANKILRSLYLPIIKKTSRYFNTSRRGAELIKYASNAFLATKISYINELANLCEKTGVDVKDVSFGMGLDQRIGERFLRAGPAYGGSCFPKDTKALVDTANSFKINLSIVKRVIKSNEERKLLLTNRVTKILKGNIKIK

SEQ ID NO: 84234 - protein, 279 aa, Unknown
  Bacterial polypetide isolated from the Sargasso Sea
MKKITIIGTGYVGLVTGAGLSDFGNYVTCVDTIKSKIKLLASGSIPIYEPGLRDLIKHNMLEQRLSFTIDIKKAIKNSEVIFIAVGTPELPNGDADLSFIEKVAEQIGENINGYKVICTKSTVPVGTGDIICKIIKSKNKKDIPFDYVSNPEFLREGSAVKDFLWPDRVVIGASNKKSFSVMKNVYRPLYINEKPIIHTNIETAEMIKYAANSFLALKISYINEIANLCEEVGADVHQVANGMGEDGRISSKFLHPGPGLEVHAFQKDTRAFANLASEN

SEQ ID NO: 84235 - protein, 254 aa, Unknown
  Bacterial polypetide isolated from the Sargasso Sea
MKICMIGTGYVGLVSGACFADLGNTVWCVDKNVKKINMLNDNKIPIYEPGLQEVVTKNYKSGRLKFTTNLKKAVQDSELIFICVGTPTSKNGSADLKYVFAAASEISKYINSFKVIINKSTVPVSTGDKVEQIISKKNKKNKFVVISNPEFLREGEAIRDFRFPDRIVVGSNDKKVIKKIRYLYQPLISKGAVFFSTNRRGAEIIKYASNAFLATKISFINEIANLCEKTNVDVEDVALGIGLDKRIGPRFLRV

SEQ ID NO: 84236 - protein, 318 aa, Unknown
  Bacterial polypetide isolated from the Sargasso Sea
MKLCMIGTGYVGLVSGVCFADLGNDVICVDKDEDKITKLKKGIIPIYEPGLEELVRKNYKSKKLSFTSNISEAIKKSNIIFICVGTPTKKNSNAADLSQIFAVAKEISKNIKSFKIIINKSTVPVTTGDEVEKIISKNVKKKLFSVVSNPEFLREGEAIRDFIYPDRVVIGTSNKKTNKILKSLYSPLISKGAKYINTSRRGAELIKYASNAFLATKISFINELANLCEKTDVNVEDISIGMGLDKRIGGRFLRAGPAYGGSCFPKDTRAIVDTGSKFKTNLSIIKAVIKSNKNRSKLLLDRVSRILKNKIRNKKISF

SEQ ID NO: 84237 - protein, 216 aa, Unknown
  Bacterial polypetide isolated from the Sargasso Sea
MKIPTKISIIGAGYVGMSLALVLSRSHYVTILDINQDRVNAINNRESFFEDEKIEIFLQNQSINLQAVSSQNESFRKSELFLICTPTDFDANTQSFNTKDIEQIVKDIFSFSNDALIVIKSTIPIGFIDKLQDRYNTGNILYSPEFLREGSALNDNLKPSRIVIGSKSKKAKLFGLLMMQAADIDDVPILYTDPNEAEAIKLFANTYLAMRVAFFN

SEQ ID NO: 84238 - protein, 259 aa, Unknown
  Bacterial polypetide isolated from the Sargasso Sea
MKLCMIGTGYVGLVSGVCFSDLGNDVICVDKDDNKINNLKNGEIPIYEPGLEELVRKNSKNKRLNFSTNLRESVKKSDIIFICVGTPTKRNSNSADLSQVFSVGKEISKSINKFKIIITKSTVPVTTGDELEKIISKKVNKKLFSVVSNPEFLREGEAIRDFIYPDRVVVGSNEEKSKKILSNLYSPLISKGAKYVSTNRRAAELIKYASNAFLATKITFINEIANLCEKTGIDVEDISIGIGLDKRIGSRFLRAGPAL

SEQ ID NO: 84239 - protein, 294 aa, Unknown
  Bacterial polypetide isolated from the Sargasso Sea
NINNDRLSFSSNVKESILKSDVIVIAVGTPEGQNGQADMSFVFSVAETISNNLNNYKLVVTKSTVPIGSGKKIVDLIYNRVNDKKSFDYVSNPEFLREGSALKDFLWPDRVIIGTDSKKAYEIMRNVYRPLYINKNPITHTSIETAEMIKYASNSFLALKISYINEIANLCEAVGADVHKVANAMGQDGRISDKFLHPGPGFGGSCFPKDLEALLSISENNNVKMKTVEAAIIANNNQKKRMVEKLINLFDGDIKNKKIAILGLAFKANTDDIRESSSINMITSLVSKGGVISA

SEQ ID NO: 84240 - protein, 228 aa, Unknown
  Bacterial polypetide isolated from the Sargasso Sea
IGTGYVGLVSGTCFADIGNQVICVDKDIDKIKKLNSGISPIYEPGLDELIKKNYLAKRLSFTTNIKKAVNDSDIIFICVGTPTMKSSLKVDLTYVYKCSKEILKYTKKKKILITKSTVPVGTGDEIEKIIKKKKRFLTVISNPEFLREGEAIRDFRYPDRIVIGSNEKKIFNTMKKLYLPLTNKGSKFFKTSRRGAELIKYASNAFLATKITFINELANLCEKSGIKY

SEQ ID NO: 84241 - protein, 233 aa, Unknown
  Bacterial polypetide isolated from the Sargasso Sea
MKLCMIGTGYVGLVSGACFADLGNDVICVDKDLIKINNLKKGIIPIYEPGLEELVLKNYKNKRLNFSTDLINSVKKSDIVFICVGTPTKKNSNKADLSQVYNVSREISKSIDKFKIIVNKSTVPVTTGDEIEKIIAKKVNKKNFSVVSNPEFLREGEAIRDFIYPDRIIVGSNYEKSTRILKNLYSPLVSKGAKFQSTKRRAAELIKYASNAFLATKITFINEIANLCEKIGI

SEQ ID NO: 84242 - protein, 243 aa, Unknown
  Bacterial polypetide isolated from the Sargasso Sea
GQFGLGMNPEFLREGNAIDDFMKPDRIVLGHDDENTLKLLKKLYKPWTCDKISVNTRTAEMIKYANNSLLATQISSVNELANIAAAIEGIDILDVMNAVHLDKRWSPISPNNVRISPEILTYLVPGCGFGGSCFPKDVQALRSLAHVVGVQPDILDAVLNVNKKQPYEVVKLLKKSLVDLKAKKILLLGLAFKHGTDDVRESVSLKIIEYLLKNKAQIFAHDPVAIENTKKVINNHKNLNFSV

SEQ ID NO: 84243 - protein, 274 aa, Unknown
  Bacterial polypetide isolated from the Sargasso Sea
GSGKRIVNLINDKVDNSELFDYVSNPEFLREGSALKDFLWPDRVIIGTDSKKAYEIMRNVYRPLYINKNPIMHTSIETAEMIKYASNSFLALKISYINEIANLCEAVGADVHKVASAMGQDGRISDKFLHPGPGFGGSCFPKDLEALLSISEVNNVKMRTVEAAIIANDNQKKRMVKKITQLFGGDIINKKIAILGLAFKANTDDIRESSSINMINSLIFKGAAINAYDPIANNEMAKIISNINYFDSLYDAVNEVDAVVVMTEWNEFRSLDLE

SEQ ID NO: 84244 - protein, 194 aa, Unknown
  Bacterial polypetide isolated from the Sargasso Sea
MKLCMIGTGYVGLVSGVCFSDLGNTVYCVDNNEDKIKKLNDGIVPIYEPGLEELIKKNYRQKRLIFTTDIKKAVTKADIIFICVGTPTKKNSNSADLKYVFQVAKQINKFINKYKIVITKSTVPVTTGDKLEKIFKSKIKKKLVDVVSNPEFLREGEAIKDFTSPDRVVIGTNSKRANLKLKSLYFPIVKKTSR

SEQ ID NO: 84245 - protein, 272 aa, Unknown
  Bacterial polypetide isolated from the Sargasso Sea
SWNQEDISKLPIYEPGLDQIIKKTRNKNLFFTTNIRESIAKADLIFLSVNTPTKLKGVGAGKASDLRWVEASARQIAEFATGYTIVVEKSTLPVRTAKTIKKILFNSQINKEDKHIKKTFSVLSNPEFLSEGNAINDLQNPDRVLIGGDDEIAIKSLADLYLKWIPNEKIIRTNIWSSELSKLTANAFLAQRISSINAMSALCELTEADIKQVAEAIGLDSRIGRKFLNPGPGFGGSCFQKDILNLVYLCEYYNLNEVARYWEQVLTINNWQ

SEQ ID NO: 84246 - protein, 193 aa, Unknown
  Bacterial polypetide isolated from the Sargasso Sea
MKICVIGTGYVGLVSGTCFADLGNKVFCVDKDKIKINKLKNIISPIYEPGLDDLIRNNVRAKRLNFTNDLENAVKESQIIFICVGTPTKKGSNTVDLSQVFNVAKSISKYIKNYKIIVNKSTVPVSTGDQIEKIILKKVKRSLFDVISNPEFLREGDAIRDFKYPDRIVIGSDNKKVFKKMQLLYEPLIKKGA

SEQ ID NO: 84247 - protein, 315 aa, Unknown
  Bacterial polypetide isolated from the Sargasso Sea
INVVDNNEDRIINWNNSDLSKLPIYEPGLAAILERCRGKNLHFSTSVEEKIRSADMIFISVNTPTKTKGIGAGKASDLKWVEACARQVARFSSGHTIVVEKSTLPVKTAEVIKSILKAPHNINKSDENNLTFDVLSNPEFLAEGTAINDLNIPDRVLIGGESNEAIEALAKIYQEWVPAEKILRTNIWSSELAKLTANAFLAQRISSINSISALCEATGADVREVARAIGSDSRIGSKFLASGPGFGGSCFKKDILNLVYLCEHFGLEEVANFWNSVVTLNNWHQKRISQLITKKLYGSLSNKIIIVLGFSCKAN

SEQ ID NO: 84248 - protein, 229 aa, Unknown
  Bacterial polypetide isolated from the Sargasso Sea
MKICMIGSGYVGLVSGTCFAELGNNVICVDKNLNKISNLKKGVIPIYEPGLEELIIRNLNQKRLQFSTNISESIKKSDLIFICVGTPTKTKSNDANLKFVFQVVKDIKKNLNKYKIIVTKSTVPVTTGDKIQKLLTTKSNKKLFDVISNPEFLREGEAIRDFMFPDRVVVGTNSKKANNILKNLYSPIIKKKGRYFNTSRRAAEVIKYASNAFLATKITFINEISNLCE

SEQ ID NO: 84249 - protein, 248 aa, Unknown
  Bacterial polypetide isolated from the Sargasso Sea
MKLCMIGTGYVGLVSGTCFADIGNQVYCVDKDKNKIDKLNSGVSPIYEPGLDELIKKNYDANRLIFTTDIKKAINASDLIFICVGTPTKKGSLKVDLSFVYKCVKEVLKHTKKKKIIITKSTVPVGTGAEIEKIIKKKKKLFSVISNPEFLREGEAIRDFRYPDRIVIGSDNKSQFKTMKKLYSPLISKGAKFFTTTRKGAELIKYASNAFLATKITFINELANLCEKTGINVEDISLGIGSDSRMAA

SEQ ID NO: 84250 - protein, 166 aa, Unknown
  Bacterial polypetide isolated from the Sargasso Sea
MKLCMIGTGYVGLVSGVCFSDLGNDVVCVDKDKKKIDLLQKGKVPIYEPGLSELVIKNFKNKKISFSTNLKKSVNDSDIIFICVGTPTKQGGSSADLSQIYKVAKEISSSINKFKIIITKSTVPVTTGDEIEKIIAKKNSKKKFSVVSNPEFLREGEAIRDFTYPD

SEQ ID NO: 84251 - protein, 271 aa, Unknown
  Bacterial polypetide isolated from the Sargasso Sea
SENDKDIPILIKSTVDVGFTDRLRKQTSNQKIIFSPEFLREGNALRDNLYPSRIVFGSHSDSAREIMEFIKSFCLNDPKSFFMSSSEAESVKLFSNSFLAMRVAYFNELDTYAMNLDLNTKNIIDAVCSDPRISDGYNNPSFGYGGYCLPKDTKQLLANYSSLPQNIISAIVESNESRMDAIVANILKHDISSIGIYRLVMKKNSDNLRESSIHGILSRLKQRSISMIVYEPLIKENEYMGISICNDLERFKEESMLIIANRKDEEIKDVS

SEQ ID NO: 84252 - protein, 163 aa, Unknown
  Bacterial polypetide isolated from the Sargasso Sea
MKLCMIGTGYVGLVSGVCFADLGNNVICVDKDLKKIDLLSSGKIPIYEPGLTELVNKNYKNKRLKFSSDLKKSIKDSDIIFICVGTPTKKGSASADLSQIFQVAKQISLSINKFKIIVTKSTVPVTTGDEIEKIILKKKSNKNKFSVVSNPEFLREGEAIRDF

SEQ ID NO: 84253 - protein, 206 aa, Unknown
  Bacterial polypetide isolated from the Sargasso Sea
MKLCMIGTGYVGLVSGVCFADIGNQVICVDKDKNKINKLNSGISPIYEPGLDELIKKNFTAKRLSFTTDINKALSISDIIFICVGTPTKKKSIKVDLSFVYKCAKEILKYSKRKKIIITKSTVPVGTGDEIEKILKKKKKLFTAISNPEFLREGEAIRDFRYPDRIVIGSNEKKAFNIMRKLYAPLINKGAKFFTTSRRGAELIKY

SEQ ID NO: 84254 - protein, 302 aa, Unknown
  Bacterial polypetide isolated from the Sargasso Sea
KIDNLKSGILPIYEPGLEEIIKRNVKYNRLSFSSNVKESIIESDVVVIAVGTPEGENGKADMSFVLSVAETISNDLNSYKLVVTKSTVPIGSGKQIIDLINDRVGDRKLFDYVSNPEFLREGSALKDFLWPDRVIIGTDSDKAYEIMRNVYRPLYINKNPITRTSIETAEMIKYASNSFLALKISYINEIANLCEAVGADVHKVANAMGQDGRISDKFLHPGPGFGGSCFPKDLEALLSISKDKNVKMKTVEAAIIANRSQKKMMVKKLIKLFNGDIKNKMIAILGLAFKANTDDVRESSSI

SEQ ID NO: 84255 - protein, 209 aa, Unknown
  Bacterial polypetide isolated from the Sargasso Sea
MKLCMIGTGYVGLVSGVCFSDLGNTVYCVDNNSDKIKKLNNGIVPIYEPGLEELIKKNYRQKRLIFTTDIKKAVLKADIIFICVGTPTKKNSNSADLKYVFQVAKQIKKFINKYKIIITKSTVPVTTGDKLEKIFKSKIKNNLVDVVSNPEFLREGEAIKDFTSPDRVVIGTNSKRANAKLKSLYFPIIKKTSRYINTSRRGAELIKYA

SEQ ID NO: 84256 - protein, 225 aa, Unknown
  Bacterial polypetide isolated from the Sargasso Sea
MKICMIGTGYVGLVSGACFADLGNNVWCVDRIKEKIDMLNDGDIPIYEPGLKEIVSKNFVSKRLKFTTNLPLAVRESDLIFICVGTPTSKDGSANLKYVYNVAKEISRNINKFKIIINKSTVPVCTGDIVEKIISKKTQKKNFEVISNPEFLREGEAIRDFRFPDRIVIGANNKKVVKKIKVLYEPLIKKGATFFSTNRRGAEIIKYASNAFLATKISYMNEIGN

SEQ ID NO: 84257 - protein, 156 aa, Unknown
  Bacterial polypetide isolated from the Sargasso Sea
MKKIAVIGTGYVGLVSGAGLAEFGHEVTCIDINEEKIHKLNEGMIPIYEPGLKSLVSKNVKDKRLFFSSNIESVIRDSRIIFIAVGTPQGSDGKADLASVSSAVDTIISNLSSYKIICTKSTVPVGTGKWISSKISEKHTSDKFDYVSNPEFLREG

SEQ ID NO: 84258 - protein, 203 aa, Unknown
  Bacterial polypetide isolated from the Sargasso Sea
MKITMLGTGYVGLVSGACFSEFGFDVCCVDKDKDKIINLEKNVIPIYEPGLENLVKKNKDANRLSFSIDVKKNIADADVIFIAVGTPARRGEGHADLSYIYEAAEEIAKNLIGYTLIVTKSTVPIGTGNKIKNIIKKNNPKAKFDVVSNPEFLREGNAIEDFMRPDRVVVGCETEKAKKVISKIYKPLYLIETPILFTDLKQQ

SEQ ID NO: 84259 - protein, 197 aa, Unknown
  Bacterial polypetide isolated from the Sargasso Sea
MKICMIGTGYVGLVSGVCFADIGNQVVCVDKAKNKIEKLNSGKSPIYEPGLDELIKKNFISKRLSFTTDINKAISTSDIIFICVGTPTRKGSIKVDLSFVYKCTKEILKYSKRKKIIVTKSTVPVGTGDEIEKILKKRKKLFTVISNPEFLREGEAIRDFRYPDRIVIGSNEKKAFNIMRKIYAPLINKGSKFFTTT

SEQ ID NO: 84260 - protein, 194 aa, Unknown
  Bacterial polypetide isolated from the Sargasso Sea
MRIAMIGTGYVGLVSGACFSEFGTEVACVDKDKSKIERLLAGDIPIYEPGLDTLVEKNVAAERLSFTTDLEAAVKGADAVFIAVGTPSRRGDGHADLSYVFAAAAEIAYAIDGYTVVVTKSTVPVSTGRRVHQIISENRDPDEFDVASNPEFLREGSAIEDFMRPDRVVIGTDSERAAEVLRQLYRPLYLLETP

SEQ ID NO: 84261 - protein, 289 aa, Unknown
  Bacterial polypetide isolated from the Sargasso Sea
MTVIADNCPNIKVNVVDINQERIDLWNSNNLNELPIYEPGLEEIVYRCRGKNLIFSTKIEESIALADMVFISVNTPTKTKGVGAGQASDLKWVEASARQVAKFAKGYTIVVEKSTLPVKTAEVIKEILESSQSELAEKSNAKFDVLSNPEFLSEGTAIQDLQNPDRVLIGGDSKEAIMALSNIYTNWVDEKKILHTNIWSSELAKLTSNAFLAQRISSINSIAALCESTGADIREVSRAIGLDSRIGSKFLNSSPGFGGSCFKKDILNLVYLSKFYGLNEVATFWESVV

SEQ ID NO: 84262 - protein, 158 aa, Unknown
  Bacterial polypetide isolated from the Sargasso Sea
MKICMIGSGYVGLVSGACFSDLGNIVTCVDINKEIINKLNNGIIPIYEPGLQELVARNLKQRRLSFSIDISNSIKKSDIIFICVGTPTKNNKADLKYVFKVVHNIKSNLNKYKIIVTKSTVPVTTGDKIEKILNSKKNKNKFDVVSNPEFLREGEAIR

SEQ ID NO: 84263 - protein, 234 aa, Unknown
  Bacterial polypetide isolated from the Sargasso Sea
MKICIIGSGYVGLVSGACFSDLGNSVICVDINKEIINKLNKGIIPIYEPGLHELVTRNLKKNRLFFSTDISSSIKKSDIIFISVGTPTKNNKADLKYVFKVIKSIKSNLNRYKIIVTKSTVPVTTGDKIEKILKSNKNKNKFDVVSNPEFLREGEAIRDFQFPDRVVVGTSSNKANKVMKKLYLPLIKKGGRYFHTSRRSAELIKYASNAFLATKITFINEIANLCEKSNIDIK

SEQ ID NO: 84264 - protein, 243 aa, Unknown
  Bacterial polypetide isolated from the Sargasso Sea
MRVAMIGTGYVGLVSGACFSEFGVDVVCVDKDESKIATLESGTLPIYEPGLEDLVAKNVEAGRLSFTTTLSNAVKGADAVFIAVGTPSRRGDGHADLSYVYAAAKEIAEAVDGYTVVVTKSTVPVGTGREVEKIIKEVGPSGDVDVVSNPEFLREGSAIEDFMRPDRVVIGTNSQRAQDVMRSLYRPLYLIETPIVFTSRQTSELIKYAANTFLATKITFINEIADLCEVVDADVQDVARGIV

SEQ ID NO: 84265 - protein, 255 aa, Unknown
  Bacterial polypetide isolated from the Sargasso Sea
IIFSPEFLREEKALYDNLYPSRIVIGDKTIKGRQFAKLLTNSTYISKKKINIHLMESTEAEAVKLFSNTYLAMRVAFFNELDTFSEVYKVSSKDIISAVSDDPRIGNYYNNPSFGYGGYCLPKDTKQLLRTYKKIPNKLIKAVIDSNKTRKLFISNSIKKKYPKRIGVFRLAMKSGSDNFRESAVLDLIKILKKQNLQIYLYEPLLKKSNIKNVSLINNFEQFISVSDLIIANRMSNKLIKVKNKVYTRDLFGEN

SEQ ID NO: 84266 - protein, 298 aa, Unknown
  Bacterial polypetide isolated from the Sargasso Sea
MKICMIGTGYVGLVSGTCFADLGNKVYCVDKDKSKINKLKNAISPIYEPGLEDLIRSNLRAKRLIFTDDLKKAIRDSNIIFICVGTPTKKGSNLVDLSQVYSVTKSISKHIKNYKIIVTKSTVPVTTGDQIEKIISKKVKKSLFEVVSNPEFLREGEAIRDFKYPDRIVIGSNNKKIFKKMELLYEPLIKKGAKFFCSTRKGAELIKYASNAFLATKITFINEIANLCETAGISVEDISVGMGSDARIGSRFLRAGPAYGGSCFPKDTKGLVSIAEKFNSNLSIVKSVNKSNQNRKIL

SEQ ID NO: 84267 - protein, 231 aa, Unknown
  Bacterial polypetide isolated from the Sargasso Sea
MKICMIGTGYVGLVSGTCFADLGNKVYCVDKDKTKIQKLKKAISPIYEPGLDHLIRNNFRSKRLDFTDNLEKAVKDSQIIFICVGTPNKKNSNLVDLSQIYNVAKKISKYIKSYKIIVIKSTVPVTAGDQIEKIIGKRVKRNLFDVISNPEFLREGDAIRDFKYPDRIVVGSNNKKIFKKMELLYEPLIKKGAKFFLTSRKGAELIKYASNAFLATKISFINEIANLCEAT

SEQ ID NO: 84268 - protein, 222 aa, Unknown
  Bacterial polypetide isolated from the Sargasso Sea
MKLCMIGTGYVGLVSGVCFADIGNQVVCVDKDKNKINKLNSGISPIYEPGLDELIKKNFTAKRLSFTTNINEAISSSDIIFICVGTPTRKGSIKVDLSFVYKCTKEILKYSKRKKIIVTKSTVPVGTGDEIEKIVKGKKKLFTVISNPEFLREGEAIRDFRYPDRIVIGSNEKKPFNIMKKLYAPLINKGSKFFTTSRRGAELIKYASNAFLATKITFINEL

SEQ ID NO: 84269 - protein, 432 aa, Unknown
  Bacterial polypetide isolated from the Sargasso Sea
MKLCMIGTGYVGLVSGVCFSDLGNTVYCVDNDIEKINALNKGILPIYEPGLEEILKRNYKQKRLIFTNNLKEAVENSDIIFICVGTPTKKNSNSADLKYVFNVANNLKKFIKKYKVVITKSTVPLTTGDKIEKILIKQKRKKLVDVVSNPEFLREGEAIRDFLSPDRVVVGTDSNKANKYLKNLYLPIVKKTSRYFRTSRRGAELIKYASNAFLATKISYINELANLCEKTNVDIKEISQGMGSDQRIGDRFLRAGPAYGGSCFPKDTRAIIDTSNKFKSNLSIIKAVIKSNEDRKKLLTEKVYKILNNNLKNKLITFLGVTFKPNTDDMREASSLYMIPKLLKKGAIINYFDPSGKKNEFKKFKRVKYCKNVSQACLRSDLIILHTEWNEFKTLNFKKLIKKSNFKIFDMRNLYSPKSMKKKGINYFGVGR

SEQ ID NO: 84270 - protein, 428 aa, Unknown
  Bacterial polypetide isolated from the Sargasso Sea
MKLCMIGTGYVGLVSGVCFSDLGNDVICVDKDLKKINNLKKGIVPIYEPGLEELVLKNYKNKRLNFSTNLKESVKKSDIVFICVGTPTKKNSNSADLSQVYAVAKEISKSIKKFKTIINKSTVPVTTGDEIEKIISKKVNKKLFSVVSNPEFLREGEAIRDFIYPDRVVVGSNDSKSQRILKNLYSPLISKGAKFVSTKRRAAELIKYASNAFLATKITFINEISNLCEKTGIDIEDISIGIGLDKRIGSRFLRAGPAYGGSCFPKDTKALVSTADKFKTNLSVVKSVIRSNDLRSDLLSKRVSLILNNKIKNKIVSFLGVTFKANTDDMRDSSSLKLIPFLSKKGAKIKYYDPTGSKKEFKKFKNVEFSNSIQESIKGSDIVIIHTEWNDFKSINFKKLSKNKKLIIYDMRNIYSPNKIKKLGFKYF

SEQ ID NO: 84271 - protein, 258 aa, Unknown
  Bacterial polypetide isolated from the Sargasso Sea
MKLCMIGTGYVGLVSGACFSDMGNKVICADIDKKKISQLNLGKIPIYEPGLEELVKKNFNQKRLFFTTNIDWAIKNSDIIFICVGTPTFKNSNKADLKYVFQVANLISKNISKYKLIVTKSTVPVTTGDKIENIIKKRNKKILFDVVSNPEFLREGEAIRDFIYPDRVVVGTLSKKANRVMKSLYLPIVKKDSRYFNTSRRGAELVKYASNAFLATKISYINELANLCEKASVDIKDISIGIGLDQRIGERFLRAGPA

SEQ ID NO: 84272 - protein, 432 aa, Unknown
  Bacterial polypetide isolated from the Sargasso Sea
MKLCMIGTGYVGLVSGVCFSDLGNDVICVDNDKKKIDLLKKGKVPIYEPGLSELVIKNFKNKKISFSTNLNKSVNDSDIIFICVGTPTKQGGSSADLSQIYNVAKEISSSINKFKIIITKSTVPVTTGDEIEKIIAKKNSKKKFSVVSNPEFLREGEAIRDFIYPDRIVVGSNDKKTNRILKNLYNPLISKGAQYFHTTRRAAELIKYASNAFLATKITFINEIANLCEKTGINIEDISIGMGLDKRIGSRFLRSGPAYGGSCFPKDTKAIVSTADKFKSNLSVIKSVIKSNKNRSNILLKRVHQILNNKVKNKKISFLGVTFKANTDDMRDSSSLIMIPSLSKKGAIIKYYDPTGFKKEFAKNRNVTYENSIRKTIEGSDLVIIHTEWNDFKSINFKSFSKKKKFIIYDMRNIYSSEKIKEHGLKYYSIGR

SEQ ID NO: 84273 - protein, 432 aa, Unknown
  Bacterial polypetide isolated from the Sargasso Sea
MKICMIGTGYVGLVSGVCFSDLGNTVYCVDKDKTKIKLLNSGIIPIYEPGLEEIVKRNHNKKRLIFTTNIKEAIKNSKIIFICVGTPTKKNSNKADLKYVFQVTNQLKKYINNYKIIVTKSTVPITTGDKIEKILSKQKTKKLIDVVSNPEFLREGEAIRDFLYPDRVIVGSNSKKANKLMKSLYLPIIKKESRYFNTSRRAAEMIKYASNAFLATKISYINEIANLCEKVSVDIKDISIGMGLDQRIGERFLRAGPAYGGSCFPKDTRAIVDTADKFKTNLSIIKNVINSNEKRKIFLLKRVHEILGKNLKGKKICFLGVTFKPNTDDMREASSLKMIPYLSKKGAIIRYHDPSGEKEFFKNKKNVSFKKNITSACEKSDLIIIHTEWNDYKQLNFKKLVKKNNFKVYDLRNLYSPTKMFRLNIKYFAIGR

SEQ ID NO: 84274 - protein, 303 aa, Unknown
  Bacterial polypetide isolated from the Sargasso Sea
MQIQINLIPLLLIQLFSEILKRNKESFIIIKSTIPIGHTKHLIEKHNYQKICFSPEFLREGNALYDNLFPSRIIMGSNNKAAKEFSKILKSAASNKNFETLFVKSEEAEAIKLFSNSYLALRVAFFNELDSFCLKKDLKSKNIIDGISLDKRIGSGYNNPSFGYGGYCLPKDTKQLLSNFQNVPQDIIGAIVKSNETRKDFIANIIYSLDIKTVGFYRLSMKKGSDNYRFSAVLDIIKKLQSKGKRILIYEPMLQGNNFWECEVIKDKEDFLSSSDLIVANRISSSLKNFEEKVFTRDIYNRD

SEQ ID NO: 84275 - protein, 438 aa, Unknown
  Bacterial polypetide isolated from the Sargasso Sea
MKVVMVGTGYVGLVSGACFSEFGAQVTCVDKDEKKIKALTEGKIPIYEPGLDEIVEKNLKSGHLEFTTDLKSAAEDADLIFIAVGTPSRRGDGHADLKYVFAAAEEIANSISKYSVIVNKSTVPVGTAQKVKDIIQKSNPSADFDVASNPEFLREGSAIEDFMRPDRVVIGVESKKAKEVMMSLYQTLSLIKTPIFFTNLESAELIKYASNAFLATKISFINELSMLSEKTGADIHSVAQGMGLDDRIGAKFLQAGPGYGGSCFPKDTLALIQTFEDFELDNKIVKSVVEINTAQKERMIKKIRNSLGGDESGKVIAVFGLTFKPETDDMRDAPSLTILPPLIEAGAHVKAHDPEGTEQAQTLLPKSIEYFPDIFEAADGADAVILMTEWNQYKDLDLQLLKNKMKGKIFLDLRNVYEPNEMNDAGFEYYCIGRGGNF

SEQ ID NO: 84276 - protein, 454 aa, Unknown
  Bacterial polypetide isolated from the Sargasso Sea
MKIVVIGTGYVGLVSGVCFAEIGHNVTCIDIDQNKVDLINNGISPIHENKLQDLLERNISRKNLEASLDLNAAIKDADISFITVSTPFDNDSIDLSYVNKVSRDIGKALKELNHYHVVCVKSTVEPGTTEKLVGPLITKYSGKKLGTDWGLSMNPEFLAEGSAVKDFMNPDRIVIGANDKKASKMMQKLYSIFKDSEVIITNIMTAEMIKYASNTFLATVISFANEIANLCEVAGDIDAVDVVKGVHADRRLSPIFPEGRIIPDLMSFLYPGTGFGGSCFPKDLKSLIAYGKKIEQPMHILEAVIEINNNQPLRTIDMTRKAIGNLSGKKIAVLGLSFKPGTDDIRESPAIPIIKTLINDGAMVLAHDPIAINNMEVILSDKSLTYVSDLKSAINDIDAIILVTSWPDYQNLSMYLKSNKIPIIDGRRFLDKNKYNKYSGIGLGSKLTISEVNV

SEQ ID NO: 84277 - protein, 319 aa, Unknown
  Bacterial polypetide isolated from the Sargasso Sea
MKLCMIGTGYVGLVSGVCFADLGNYVICVDKDLKKIDLLSKGKIPIYEPGLTELVNKNYKNKRLKFSSDLKKSIKESDIIFICVGTPTKKGGSSADLSQIFQVAKEISLSINKFKIIVTKSTVPVTTGDEIEKILLKKKSNKNKFSVVSNPEFLREGEAIRDFIFPDRIVVGSNDKKSNRLLNNLYAPLISKGAQYINTSRRAAELIKYASNAFLATKITFINEIANLCEKTGINVEDISIGMGLDKRIGSRFLRAGPGYGGSCFPKDTKAIISTADKFKINLSVIKSVIKSNENRSNFLLNKVYKILNNKIKNKKITF

SEQ ID NO: 84278 - protein, 431 aa, Unknown
  Bacterial polypetide isolated from the Sargasso Sea
MKICMIGSGYVGLVSGACFAELGNNVICVDKNLNKISNLKKGAIPIYEPGLEELIQRNVKQERLQFSTDISRSIIKSDIIFICVGTPTKIKSNEADLKYIFQVVKDLKKNLNKYKIIITKSTVPVTTGDKIQKLLTTKTNKKLFDVVSNPEFLREGEAIRDFMFPDRVIVGTNSNKANNVLKNLYSPIIKKKGRYFNTSRRAAEVIKYAANAFLATKITFINEIANLCEKLNVDVTDVSLGIGTDERIGARFLRAGPGYGGSCFPKDTRALISTSKKFKTNLSIVKSTINSNENRHKYLLNKIKEILNNNLKSKKITFLGVTFKAGTDDMRDSASLKLIPYLIKKGAKVSYYEPTGIKKDFDKKKIFYFNNIKDACKNSDLLIIHTEWNEFKQLNFNKLKNKKKFKIYDLRNLYSPKKMKNKNIDYFSVGR

SEQ ID NO: 84279 - protein, 431 aa, Unknown
  Bacterial polypetide isolated from the Sargasso Sea
MNICIIGSGYVGLVSGACFSELGNKVVCVDNNKEKIENLKKGIIPIYEPGLEELVLRNYKNKRLNFSTEIDSSIKKSDIIFICVGTPTNKNSNNANLKYVFKVVSSIKNNLNKYKIIVTKSTVPVMTGDKIEKVLNLNKNKIRFDVISNPEFLREGEAIRDFMYPDRVVVGTNSKKANNVMRSLYLPLIKKSNRYFQTSRRAAELIKYAANAFLATKISFINEISNLCEKSNIDVKDVSTGIGLDERIGERFLRAGPGYGGSCFPKDTRALVYTSHKFKTNLSIVKSVIKSNDDRYKILLNKIKKIMNNNLKGKNITFLGVTFKAGTDDMREAASLKLIPYLTKRGSKVSYYEPTGEKKNFNYKKVKFVNNLRDACKKADLLIIHTEWNEFKQLNFKKISNKKNYKIYDLRNLYSPTKMKKNNVNYYSVGR

SEQ ID NO: 84280 - protein, 385 aa, Unknown
  Bacterial polypetide isolated from the Sargasso Sea
MKLCMIGTGYVGLVSGACFSDLGNKVICVDIDKNKINKLNSGIIPIYEPGLAELVKKNFNQRRLAFSTDINSSIKESDIIFICVGTPTKKKSNMADLKYVYSVAKLIAKNINKYKIIVTKSTVPVSTGDIIEKIIRNKNNRKKFDVVSNPEFLREGEAIRDFISPDRVVVGTNSKKANRIMKSLYLPIIKKESRFFSSSRRGAELIKYASNAFLATKISFINELANFCEKAEVNIKDISSGMGLDQRIGERFLRAGPAYGGSCFPKDTRALVNTGDKYNVNFSIVKSVIKSNDNRKILLLKRVHKIIGKNIRNKKITFLGVTFKPGTDDMREASSLKMIPYLSKNGAYINYTDPSGPKKILDKIKNVKFLKSVAASCKSADLIII

SEQ ID NO: 84281 - protein, 386 aa, Unknown
  Bacterial polypetide isolated from the Sargasso Sea
MKLCMIGTGYVGLVSGVCFADIGNQVVCVDKDKNKIDKLNSGISPIYEPGLDELIKKNFTAKRLSFTTNIDRAINTSDIIFICVGTPTRKGSIKVDLSFVNKCTKEILKYSKRKKIIVTKSTVPVGTGDEIEKIVKKKKKLFTVISNPEFLREGEAIRDFRYPDRIVIGSNEKKTFNIMRKLYAPLTNKGAKFFATSRRGAELIKYASNAFLATKITFINELANLCEKSGVNIEDVSLGMGSDSRIGGRFLRAGPAYGGSCFPKDTKGLVSAAEKYKINLSVVKSVIKSNQGRVNLLTKRVHKILGSNLKNKKISFLGVTFKPNTDDMRDSTSLKMIPYLCKKGAKVSYYDPSGEKKEFRKIKNCNYRNNIKSNCNGADLVVLLTE

SEQ ID NO: 84282 - protein, 432 aa, Unknown
  Bacterial polypetide isolated from the Sargasso Sea
MKLCMIGAGYVGLVSGVCFSDLGNVVYCVDNDKRKIDQLNNGKVPIYEPGLEEILKKNFKQKRLIFTTNLEKAISNSDIVFICVGTPTKKGSNSADLKYVFQVANQLKKLIKTYKIVITKSTVPVTTGDKIEKILIKQKKKNLVDIVSNPEFLREGEAIRDFIYPDRVVIGTDSEKANRILKSLYLPIIKKTSRFFRTSRRGAEMIKYASNAFLATKISYINEIANLCEKTGVDVKEISVGMGSDQRIGERFLRAGPAYGGSCFPKDTKAIVDTGSKFKTNLSIIKSVIKSNNNRKKLLTIKAEKLLKGTLKKKSITFLGVTFKPNTDDMREACSLAMIPHFSKKVLKVKYFDPTGPKKEFSKHKNVEYCSNIELACLNSDLIILHTEWNEFKLLNFKKLVRKKNFIIYDMRNLYSPINMKKNKIKYFGVGR

SEQ ID NO: 84283 - protein, 276 aa, Unknown
  Bacterial polypetide isolated from the Sargasso Sea
MKISVIGCGYVGLVSGVCFADSGHTVTCIDNDNKKIQLLKDNQVPIYEPGLNELLLKNIKGNNLHFELNINENIKDSEIVIITVGTPTDENGEADLTFVRQCANEIAEFISPNTLVIVKSTVPVGTCDEIEGIIYEKCAHSEFSVISNPEFLREGNAIYDFMNPDRIVIGIKDQNHKKRIIDLYTNISNEDKILFTSRRSSELIKYASNSMLAMRIIFINEIADLCEKIGADVTDIAKGIGLDKRIGPHFLEPGPGFGGSCFPKDARALIESGKKI

SEQ ID NO: 84284 - protein, 228 aa, Unknown
  Bacterial polypetide isolated from the Sargasso Sea
MKLCMIGTGYVGLVSGVCFSDVGNTVYCVDKDKNKINSLNKGIVPIYEPGLEEILKKNHKQKRLIFTTDLKKAVINSDIIFICVGTPTKKNSNSANLKYVFNVAHELKKIISKYKIIITKSTVPVTTGDQIEKILHNLKKKKLVDIVSNPEFLREGEAIRDFIYPDRVIVGTNSKKANMILRSLYLPIIKKTSRFFSTSRRGAELIKYASNAFLATKISFINEIANLC

SEQ ID NO: 84285 - protein, 430 aa, Unknown
  Bacterial polypetide isolated from the Sargasso Sea
MIGTGYVGLVSGVCFADIGNQVVCVDKDKTKIDKLNFGVSPIYEPGLDELIKKNFLAKRLSFTTNINKAISTSDIIFICVGTPTRKGSIKVDLSFVYKCTKDIFKYSKRKKIIVTKSTVPVGTGDEIEKILKKKKKLFTVISNPEFLREGEAIRDFRYPDRIVIGSNEKKAFNTMRKLYAPLINKGSKFFTTSRRGAELIKYASNAFLATKITFINELANLCEKTGVNIEDISLGMGSDSRIGGRFLRAGPAYGGSCFPKDTKGLVSAADKFKINLSVVKSVIKSNQERVNLLTQRIHKILGSNIRNKNISFLGVTFKPNTDDMRDSSSLKMIPYLCKKGAKVKYYDPSGEKNEFKKIKNCKYRNNIKSCCNGADLIILLTEWDEFKSIDFKKVAKNTKFKVFDLRNLYSAEEMKRNKIKYYSVGRPDAN

SEQ ID NO: 84286 - protein, 431 aa, Unknown
  Bacterial polypetide isolated from the Sargasso Sea
MKISVIGCGYVGLVSGFCFADSGHKVTCIDNNDQKIKLLKDNKIPIYEPGLNELLLKNIENGNLAFELNISENIKDSEIVLIAVGTPTGKNGDANLTFVYQCAREIAEFISPNTQIIIKSTVPVGTCDEVENIIKENCIHSEFSVISNPEFLREGNAISDFINPDRVVIGTDDQTNKRIMINLYKSITNEDKILFTSRRSSELIKYASNSMLAMRIIFINEIADLCEKIGADVTDIAKGIGLDKRIGPHFLEPGPGFGGSCFPKDARALIESGKKYDAPQTLLESVILGNENRKKNISKKILNKLDKQTENQIGILGVTFKAETDDMRESPSLIIIPDLQENGMNISVYDPEGEKEASKILKDVNWKKTAYEAAENVDCLVILTDWEEFKNLDLDKIKNSMKRPLIYDFRNIFDPDMMTELGFEYFSIGRG

SEQ ID NO: 84287 - protein, 171 aa, Unknown
  Bacterial polypetide isolated from the Sargasso Sea
MKICMIGTGYVGLVSGTCFADLGNKVLCVDKDKLKINKLKKSISPIYEPGLDDLIKNNYRAKRLDFTSDLRKAVNESQIIFICVGTPTKNKSNLVDLSQVYNVAKAISKYIKNYKIIVTKSTVPVTTGDLIEKIISKKVRKSLFDVVSNPEFLREGEAIRDFKYPDRIVIG

SEQ ID NO: 84288 - protein, 390 aa, Unknown
  Bacterial polypetide isolated from the Sargasso Sea
MTKRRKITIVGAGYVGMSIASSLARKDEILILETNKEKIERINSGQSSIDDPDINAFYNEHDLNIKAIERKEEAFQGADFIIICVPTDFNNETSSFDTDILEDVIDDAIRNNNDALIIIKSTIPVGYTSQAREKYQTKNIIFSPEFLREHSAMHDVLNPSRIIVGNDSELSTDFAEHISESTENESEIILMPSSDAEAVKLFSNTYLAMRVAFFNELDTFSIAKDISTENVINGVSTDPRIGKQYNNPSFGYGGYCLPKDTKQLLANFEDLPQTIIQSVISSNEARKNFIIEEIKKLRPEVVGIYKLASNPKVKNFRSSEMLDIITGLSNYFDDLIIFEPLISEKDYMGLKVINDIDIFKKESDLIVTNRKCDQLNDVSEKLYCRDIFRG

SEQ ID NO: 84289 - protein, 200 aa, Unknown
  Bacterial polypetide isolated from the Sargasso Sea
MNIVVVGMGYVGLSNAVLLAQQNHVVAIDLMPERVALVNARKPTVADSLIEEYLQHKALNLSATTDKNAVKEADFVIIATPTDYDPQTNYFNTQSVERVVKEALTLNPDTTIVIKSTVPVGFTEGLRNKLNSDNILFSPEFLREGKALYDNLHPSRIIVGERSERAQAFADLLARAAIKQDIPILLTDSTEAEAIKLFAN

SEQ ID NO: 84290 - protein, 388 aa, Unknown
  Bacterial polypetide isolated from the Sargasso Sea
MKILIIGLGYVGTANAVLLSQHNEVTCFDLDISKSNNLINGISPIEDKLVSEYLSSKKLNLKSAESFPTEVENYDFVIIATPTNYDIETNKFNTSSIEQSLESIQNSKSNPTVIVRSTTPVGYVSKVQKKFPDLEIIFVPEFLREGRALKDSLYPSRIVIGSHSEKGKGFAKLLKDASLDKNVQIVFTNSREAESSKLFSNAYLAMRVTFFNELDSFAMSKDLNTKEIIKAVSLDPRIGDFYNNPSFGYGGYCLPKDTKQLLANFDKVPQKIMEAIIESNSMRKDFIGLEIAKLKPKTVGVYKLIMKDGSDNIRESSMQGIMKRVKAKGIRVIVYEPLIKDKQFFNSEVYQDLELFKKDADLILCNRNHTELNDVQDKIFTRDLFNQD

SEQ ID NO: 84291 - protein, 243 aa, Unknown
  Bacterial polypetide isolated from the Sargasso Sea
MKLCMIGTGYVGLVSGVCFADLGNDVICVDKNLDKINLLKRGKIPIYEPGLSELVNKNYKNKRLIFSTDLKKSVKASDIIFICVGTPTKKGGNSADLSQIFSVAKEIVSSINKFKIIVTKSTVPVTTGDEIEKILSKKNNRNKFSILSNPEFLREGEAIRDFTYPDRIVVGSNDKKSNRIMKNLYAPLISKGAQYINTSRRGAELIKYASNSFLATKITFINEIANLCEKTGISIEDISIGMG

SEQ ID NO: 84292 - protein, 269 aa, Unknown
  Bacterial polypetide isolated from the Sargasso Sea
MKNITILGTGYVGLVSGAGISDFGHSVICADIIKEKIKSLKNGKIPIYEPGLEELVNKNVDVGRLSFTSNIDAAIQKAEVIIIAVGTPEAEDGTADISAVESVARAIGKNINGYKVICTKSTVPVGTGKLITKIINETNDSKYKFDYVSNPEFLREGSAVKDFLWPDRVVIGADNDKAFKVMKEVYSPLYINDKPILHTSVITAEMIKYAANAFLALKISYINEVANLCDSMGADVHQVAKAMGQDGRISPKFLHPRSRIWWFLFSKRY

SEQ ID NO: 84293 - protein, 204 aa, Unknown
  Bacterial polypetide isolated from the Sargasso Sea
MKLCMIGAGYVGLVSGVCFSDLGNEVVCVDKDQNKINNLKNSIIPIYEPGLEELVKKNYKAGRLSFTTNLSNAVKSSDVIFICVGTPTKKKGIGADLSQIFSVSKELSNYIKKFKIIVNKSTVPVITGDKVENIISKKVKKKFFSVVSNPEFLREGEAIRDFIYPDRIVIGTDDKKSNKILKQLYAPLISKGAKYLNTSRRAAE

SEQ ID NO: 84294 - protein, 432 aa, Unknown
  Bacterial polypetide isolated from the Sargasso Sea
MKLCMIGTGYVGLVSGVCFAELGNDVICVDKDITKINKLKKSIIPIYEPGLEELVKKNYKSGRLKFSTDLAESVRKSNIIFICVGTPTIKNKYEADLSQVYSVTKEISKNIKSFKIIINKSTVPVTTGDKVEKIISLKVKKQLFSVVSNPEFLREGEAIRDFIYPDRVVIGTSEKKSNKILKNLYSPLISKGAKYINTSRRAAELIKYASNAFLATKITFINELANLCEKLDINIEDVSIGIGTDNRIGSRFLRAGPAYGGSCFPKDTRALIDTAKKSKSPLSIINTVINSNNKRSHLLLTRIAKILKNKIKNKKITFLGVTFKANTDDMRESASLKMIPFLNKKGAIINYYDPSGKKNEFEKYKNVKFKNNIKDACEMSDLIIVHTEWNEFKLLDLKKIVKKRNFIIYDMRNIYSAEKMKKQKIKYFGIGK

SEQ ID NO: 84295 - protein, 343 aa, Unknown
  Bacterial polypetide isolated from the Sargasso Sea
MKLCMIGTGYVGLVSGVCFSDLGNDVICVDKDKDKINLLKKGKVPIYEPGLSELVVKNYRNKRLTFSSDLKTSVRNSDIIFICVGTPTKKNGSSADLSQVYNVAKELSLSINKFKIIITKSTVPVTTGDVIEKIILKKNNKKKFSVVSNPEFLREGEAIRDFIYPDRIVVGSNDKNSNRILKNLYSPLISKGAQYVNTSRRAAELIKYASNAFLATKITFINEIANLCEKTGINVEDISIGMGLDKRIGGRFLRAGPAYGGSCFPKDTKAIVSTADNFKINLSVIKSVIKSNKNRSNILLKRVYEILKKRVKNKKITFLGVTFKANTDDMRDSSSLNYDTGLV

SEQ ID NO: 84296 - protein, 174 aa, Unknown
  Bacterial polypetide isolated from the Sargasso Sea
MKLCMIGTGYVGLVSGVCFADIGNQVICVDKDKTKIDKLNFGVSPIYEPGLDELIEKNFKAKRLSFTTNMNKAISTSDIIFICVGTPTRKGSIKVDLSFVIKCTKEIFKYSKRKKIIVTKSTVPVGTGDEIEKILKKKKKLFTVISNPEFLREGEAIRDFRYPDRIVIGSNEKK

SEQ ID NO: 84297 - protein, 313 aa, Unknown
  Bacterial polypetide isolated from the Sargasso Sea
MKLCMIGTGYVGLVSGVCFSDLGNDVICVDKDINKINNLKKGVIPIYEPGLEEMVLKNFKNKRLNFSSNLKDSVRKSDIIFICVGTPTKKNSNSADLSQVYAVGNEISKFINKFKIIINKSTVPVTTGDELEKIISKKVNKKYFSVVSNPEFLREGEAIRDFIYPDRIVVGSNDSRSQTILKNLYSPLISKGAKFISTQRRAAELIKYASNAFLATKITFINEIANLCEKTGIDVEDISIGIGLDKRIGSRFLRAGPSYGGSCFPKDTKAIVSTAQKFKTNLSIIKSVIKSNDKRSDLLSKRINLILKKKIKK

SEQ ID NO: 84298 - protein, 434 aa, Unknown
  Bacterial polypetide isolated from the Sargasso Sea
MNITIIGTGYVGLVSGICFAEFGFKVTCVDKEIKKIQKLQDGEVPIYEPGLEVILERNIDANRIIFTTELESAVRNADIVFIAVGTPSRRGDGHADLSFVFSAAEQIAKSINGYTLVVTKSTVPVGTGNQVKQIIKKANYKAEFDIASNPEFLREGSAVEDFMRPDRVVVGVETERAKKMMATLYRPLFLLETPIVYTSLESAELIKYASNAFLAVKISYINQMSDLCEKVDANIDDIAKGMGLDKRIGNKFLHTGPGYGGSCFPKDTLALVKTAHQYKSEVSIVEQTIKYNDLRKKHMVKKIQSSVDSLSNKDIAILGLSFKPETDDMRESPSIDIINGLLDLNANIFAYDPEAMNEAKKIFSDKINYLQNTQECISGKDMLVVLTEWNEFRALNPKEISKLMRGNTVIDLRNIFDSKSMADAKLDYISLGKK

SEQ ID NO: 84299 - protein, 467 aa, Unknown
  Bacterial polypetide isolated from the Sargasso Sea
MNVRIAIVGTGYVGLVSGACFADLGHDVVCIDNNRGKIDALNEGCMPIYEPGLDAVVARNVERGTLRFSSDLAASVRDRDAVFIAVGTPTLPGTDQADLRYVEAAAREIASNLTGFAVVVTKSTVPVGTNRIVKQIVERCAPDGIDAAIASNPEFLREGSAIDDFMHPDRVVFGAEHPRAIEIMKAIYAPLEAMGHLVLATEIETAELVKYAANAFLAVKISYINEISDLCEAVGADVELVANGMGLDRRIGASFLKAGPGWGGSCFPKDTRALKATASEHAVPLRIVSAAIESNALRKEQILRRIEKACGGSIKDKRIAVLGLTFKGQTDDVRESPSIDVIQLLVGAGAHIRAYDPARPHEASRLLPQVFMEGSAIDAVRSADAVVVMTEWKAFEALDLADLADHMADPVMLDMRNLFNERLAVDSGFRRYERLGRSCGERTPADPAPEQPHASEDTRPPRGLLQD

SEQ ID NO: 84300 - protein, 266 aa, Unknown
  Bacterial polypetide isolated from the Sargasso Sea
MKLCMIGTGYVGLVSGVCFADIGNQVVCVDKDKNKIDKLNSGISPIYEPGLDELIKKNFTAKRLSFTTNIERAISTSDIIFICVGTPTRKGSIKVDLSFVYKCTKEILKYSKRKKIIVTKSTVPVGTGDEIEKIIKRKKKLFTVISNPEFLREGEAIRDFRYPDRIVIGSNEKKPFNIMRKLYTPITNKGSKFFTTSRRGAELIKYASNAFLATKITFINELANLCEKCGVNIEDISLGMGSDSRIGGRFLRAGPGLRWIMFSKGY

SEQ ID NO: 84301 - protein, 342 aa, Unknown
  Bacterial polypetide isolated from the Sargasso Sea
MSKHLEISIKKVTIFGAGYVGMSYAALFGQKCSVSIYDLDSKKVDQINNKKSPISDEMISEFLLRDNYKISAYTNMRESLKNTDLVIISLPTDFDEGIGAFNTSIIEKSIKELRKINKDAFVLIKSTVPVGFSEAMVERYDSKIIFSPEFLREGNALEDNIRPSRIIIGSDSEDAERIGKFLLSFAENDPPLLIMTSSEAEAVKLFSNTYLAMRVSFFNELDTFCLENGMSSDALIKGICFDPRIGDFYNNPSFGYGGYCLPKDSKQMETSFNNTPQNLISATIKSNMTRKEYLSEKILESGKNIIGIYRLIMKSNSDNFRESAIFDLINLLKKEIKDNPNF

SEQ ID NO: 84302 - protein, 438 aa, Unknown
  Bacterial polypetide isolated from the Sargasso Sea
MKQITIIGTGYVGLVTGAGISDFGHSVTCADIIEEKIKLLRNGKIPIFEPGLEELVNKNMDAGRLSFTLNIDAAIQEAEVIIIAVGTPEAEDGTADISAVESVARVIGKNINGYKVICTKSTVPVGTGKLITKVINETKDSKYEFDYVSNPEFLREGSAVKDFLWPDRVVVGASNDKAFKVMKEVYSPLYINEKPILHTSVITAEMIKYAANAFLALKISYINEVANLCDSLGADVHQVAKAMGQDGRISPKFLHPGPGFGGSCFPKDTKAFAALSRAQDLRMNTIEAAIETNEIQKQIMVDKMKNLMGGNFDGKQIAILGLAFKPNTDDIRDSASITMIDSIIKGGGHIRAYDPIANQSMKNIFPDLNYFMSWEDATKDADGVAVMTEWNEFRGISLSSLKSLLKSPIILDTRNIFSIENLEKNDFKYDNVGRSSIK

SEQ ID NO: 84303 - protein, 419 aa, Unknown
  Bacterial polypetide isolated from the Sargasso Sea
MKLCMIGTGYVGLVSGVCFSDVGNTVYCVDKDKKKIDELNKGNVPIYEPGLEEILKKNYKQNRLKFTTDLKKAVLSSDIIFICVGTPTKKNSNSANLKYVFSVAKELKKIIKSYKIIITKSTVPVTTGDKIENILKNLKKKKLVDIVSNPEFLREGEAIRDFVYPDRVIIGTDSNKANKILKSLYMPIIKKSSRYFNTSRRAAELIKYASNAFLATKISFINEIANLCEKTGIDVKDISIGMGSDERIGDRFLRAGPAYGGSCFPKDTRALIDTGKKFNTDLSIVKTVVLSNDKRRFLSIKRVEKILNYKLLNKTITFLGVTFKPNTDDMRESSSIPMIKYFNKKNCKIRYFDPSGEKKEFKNLKNVNYFNNINTACLNSDLIILHTEWNDFKLLNFKKLVKKRNFKIYDMRNMYSPIK

SEQ ID NO: 84304 - protein, 456 aa, Unknown
  Bacterial polypetide isolated from the Sargasso Sea
MSNILCIGAGYVGGPTMTAIARYCPEHKITVVDINEERIRRWNSEDLPIYEPGLDEWVRETRGKNLFFSTSIHQSIAEADIIFVSVNTPTKMFGQGAGRAADLQYWEKTARDILTHARQPEVVVVEKSTLPVRTAQAMARILDSGDSKTHFEVVSNPEFLAEGTAIQDLENPDRVLIGGRESEEGSRAAETVAKLYAHWVPEERILLTNVWSSELAKLVANAMLAQRISSINSISALCEKTEADIGQIAKAIGMDSRIGPKFLQTSIGFGGSCFRKDILHLAYLCEYYGLPEVSDYWESVVRINEWQTERFFQNILKQQFNTLAGKTVAVLGFAFKADTGDTRDSPAIPLCQKLLEEKARVRIHDPKALENAREDLRGMQGDVEFVEDAYQACKGAHSIALVTQWQEYRELDFQRIHDEMVKPAFMFDGRNHLDPQSLHQIGFNVFPLGKKPLLHL

SEQ ID NO: 84305 - protein, 370 aa, Unknown
  Bacterial polypetide isolated from the Sargasso Sea
MKICIIGSGYVGLVSGACFSDLGNTVTCVDINKEIINNLNKGVIPIYEPGLQELVARNLQKNRLFFSTDISSSIINSDVIFICVGTPTKNNKADLKYVYKVIKSIKSNLNKYKVIVTKSTVPVTTGDKIEKILKSKKNKNKFDVVSNPEFLREGEAIRDFQFPDRVVVGTSSKKANKVMKNLYLPLIKKGGRYFHTSRRSAELIKYASNAFLATKITFINEIANLCEKSNIDVKEISIGMGLDERIGSRFLRAGPSYGGSCFPKDTRALVTTGQSFHTNLSVVKSVIKSNDKRNNLLLNKVIKIMNNKIKNKNITFLGVTFKPGTDDIRESPSLKMIPALVKKGALISYYEPTGKKNIFKSKNITFYANI

SEQ ID NO: 84306 - protein, 391 aa, Unknown
  Bacterial polypetide isolated from the Sargasso Sea
MKNITIIGAGYVGYSLALLLAKRNIVKVIDIDETKIDLINKSQPVIKDGYIEKYLLDNKLKISATNNKEDAYKEAEFIVIATPTDYDPDSNSFNTSAVDCVIDEAIKHNPSATIIIKSTVPVGYTEKLKRKLNTKKIIFSPEFLREGQSLKDNLFPSRVIVGAKNEKAKLFAELLVENIKKKKEDVSILFTDSSEAEAIKLFSNTYLAMRVAFFNELDTYCESLDLNSKQIIEGVSLDPRVGNYYNNPSFGYGGYCLPKDTKQLLANYKDVPNNLIQAIVSANSTRKDFIAESILKKKPKIVGVYKLSMKKESDNFRSSSIQGVMKRIKAKGVQVIVYEPSIDDKFFYNSEIVKDLDSFKQRADVVISNRFSEELADIEEKVYTRDLFRKD

SEQ ID NO: 84307 - protein, 431 aa, Unknown
  Bacterial polypetide isolated from the Sargasso Sea
MKISVIGCGYVGLVSGFCFADSGHKVTCIDNNDQKIKLLKDNKIPIYEPGLNELLLKNIENGNLAFELNISENIKDSEIVLIAVGTPTGKNGDANLTFVYQCAREIAEFISPNTQIIIKSTVPVGTCDEVENIIKENCIHSEFSVISNPEFLREGNAISDFINPDRVVIGTDDQTNKRIMINLYKSITNEDKILFTSRRSSELIKYASNSMLAMRIIFINEIADLCEKIGADVTDIAKGIGLDKRIGPHFLEPGPGFGGSCFPKDARALIESGKKYDAPQTLLESVILGNENRKKNISQKILNKLDKQTENQIGILGVTFKAETDDMRESPSLIIIPDLQENGMNISVYDPEGEKEASKILKDVNWKKTAYETAENVDCLVILTDWEEFKNLDLDKIKNSMKRPLIYDFRNIFDPDMMTELGFEYFSIGRG

SEQ ID NO: 84308 - protein, 387 aa, Unknown
  Bacterial polypetide isolated from the Sargasso Sea
MVIGAGYVGLSISVMLAQRNDLTIVDIDQEKINLINNRKSPIKDDAISDLLLNEELSIKGIIPGNENFESFDFVILATPTDFNEATKTFDTSVLEEIIGKILKTNFKGLIIIKSTIPIGFTDRISKKYDTDKISFSPEFLREGSALEDNQNPSRIIVGGSNKNKNQEFMEMIKDSISSEHSPPFFFMKAAEAEAVKLFSNAFLAMRVSFFNELDSFSMENKLNTYEIIQGVSCDPRIGNHYNNPSFGYGGYCLPKDTKQLLSNFGDVPQNIFSSIIASNQTRKELMVNSILEREISRIGVYRLNMKQNSDNFRESAILDILDMLKDRVASIVIYEPLINESTFKEYSIIKDLEIFKEKADLIISNRFNNDLEDVKWKVFTRDIFNKD

SEQ ID NO: 84309 - protein, 434 aa, Unknown
  Bacterial polypetide isolated from the Sargasso Sea
YVGLVTATCFSEFGYEVICIDNDKYKIKQLKKNIIPIYEPGLSDLVKKNTKSKYLLFSNSISKIKDAHIIFVAVGTPSSRRGDGEADLKFVFSVVKDISKFLIKGKKQLVITKSTVPVGTGKKIQDIMCELRPDLIHNKDYFISSNPEFLREGSAIEDFMRPDRVVCGVTDKKAEETLKELYRPLNLREAPVLFTDLESAEIIKYASNSFLALKISFINEVANLCENTGGNVQMVAKGMGLDNRIGPKFLHPGPGFGGSCFPKDTRALYASFKKNKINNILVKSVINFNEDRKISIVNKIKNILKPNIKNKVIAFLGVTFKPNTDDLRESPSLEIIPRLRKLGVKIHAHDPAFNSEFIKIKKFDKVKWYGNVLDAIKNADLLVIHTEWNEYRGLDLLKVKKELKNPIILDLRNIFNPDDVKKFNIKYYGIGFKS

SEQ ID NO: 84310 - protein, 199 aa, Unknown
  Bacterial polypetide isolated from the Sargasso Sea
MKLCMIGTGYVGLVSGVCFSDLGNEVICVDKDINKINNLKKGIIPIYEPGLEELVLKNYKNKRLNFSTNLKESVKKSDIIFICVGTPTKKNSNSADLSQVYAAAKEISKAVNKFKIIINKSTVPVTTGDEVEKIISKKVNKKFFSVVSNPEFLREGEAIRDFIYPDRVVVGSNDDKSKKILRGLYSPLISKGAKFVSTK

SEQ ID NO: 84311 - protein, 192 aa, Unknown
  Bacterial polypetide isolated from the Sargasso Sea
MKLCMIGTGYVGLVSGVCFSDLGNTVYCVDNNSDKIKKLNNGIVPIYEPGLEELIKKNYRQKRLIFTTDIKKAVLKADIIFICVGTPTKKNSNSADLKYVFQVAKQIKKFINKYKIIITKSTVPVTTGDKLEKIFKSKIKNKLVDVVSNPEFLREGEAIKDFTSPDRVVIGTNSKRANAKLKSLYFPNYKKN

SEQ ID NO: 84312 - protein, 434 aa, Unknown
  Bacterial polypetide isolated from the Sargasso Sea
MKLCMIGTGYVGLVSGVCFADIGNQVVCVDKDKNKIDKLNSGISPIYEPGLDELIKKNFTAKRLSFTSNINRAVSTSDIIFICVGTPTRKGSMKVDLSFVYKCTKEILKYSKRKKIIVTKSTVPVGTGDEIEKIVKKKKKLFTVISNPEFLREGEAIRDFRYPDRIVIGSNEKKSLNIMRKLYAPIINKGSKFFTSSRRGAELIKYASNAFLATKITFINELANLCEKSGVNVEDISLGMGSDSRIGGRFLRAGPAYGGSCFPKDTKGLVSAAEKYKINLSVVKSVIKSNQERVNLLTKRVHKILGSNLKNKKISFLGVTFKPNTDDMRDSSSLKMIPYLCKKGAKVRYYDPSGEKNEFKKIKNCNYRNNIKSNCNDTDLVVLLTEWDEFKSIDFKKIVKNNKFKVYDLRNLYSAEEMKKNKIKYYSVGRPNTN

SEQ ID NO: 84313 - protein, 247 aa, Unknown
  Bacterial polypetide isolated from the Sargasso Sea
MKLCMIGTGYVGLVSGVCFSDLGNNVICVDKDANKIDQLKNGKIPIYEPGLEELVLKNYKNKLLSFSTNLKDAVKKSDIIFICVGTPTKRAGSGADLSQIYSVAKEVSSSINKFKIIITKSTVPVTTGDEVEKILLKKNNKKKFSVVSNPEFLREGEAIRDFIYPDRVVIGTNDKKSNKILKNLYQPLISKGAKYINTSRRAAELIKYASNAFLATKITFINEIANLCEKIGIDIEDISIGMGLIKE

SEQ ID NO: 84314 - protein, 162 aa, Unknown
  Bacterial polypetide isolated from the Sargasso Sea
MKLCMIGTGYVGLVSGVCFADLGNEVICVDKDLSKINSLKKGKVPIYEPGLSELVIKNYRNKRLNFSTDLKKSVKESDIIFICVGTPTKKGGSSADLSQIYNVIKEISTSIKSFKIIITKSTVPVTTGDEIEKILSRKNNKKKFSVVSNPEFLREGEAIRDL

SEQ ID NO: 84315 - protein, 369 aa, Unknown
  Bacterial polypetide isolated from the Sargasso Sea
MRICMIGTGYVGLVSGTCFADLGNKVYCVDKDSIKINKLKNAISPIYEPGLDDLIRNNLRAKRLNFTNDLEKAIKESQIIFICVGTPTKKGSNLVDLSQVYSVAKSISKYINSYKIIVTKSTVPVTTGDQVEKIIRKKVKKSLFDVVSNPEFLREGEAIRDFKYPDRIIIGSNNKKIFKKIELLYEPLIKKGAKFFCTSRKGAELIKYASNAFLATKITFINEIANLCESAGINIEDISVGMGSDARIGSRFLRAGPAYGGSCFPKDTKGLVSIADKFRINLSIVKSVIKSNQNRKILLTKKVSKILNNKIKNKKISVLGVTFKANTDDMRESSSLVLIPYLLKKGATVKYHDPSGPKKEFKKIKIFNL

SEQ ID NO: 84316 - protein, 188 aa, Unknown
  Bacterial polypetide isolated from the Sargasso Sea
MVSKKQSITIVGSGYVGMSLSVLLSKGNNRVKILEIDKEKVKKINKGLSTVRDELIEEYISKEKLNISATLDPEEALNNADYFIIATPTNYDEKTNKFDTESVKSTIEKILTFSKNGSIIIKSTIPIGYTDYLKEKFKTDRIIFSPEFLREGNALYDNLYPSRIIMGDNSPAAVCFAEMLKNLSLKKS

SEQ ID NO: 84317 - protein, 310 aa, Unknown
  Bacterial polypetide isolated from the Sargasso Sea
MKLCMIGTGYVGLVSGVCFSDLGNTVYCVDNNEDKIKKLNDGIVPIYEPGLEELIKKNYRQKRLIFTTDIKKAVTKADIIFICVGTPTKKNSNSADLKYVFQVAKQINKFINKYKIVITKSTVPVTTGDKLEKIFKSKIKKKLVDVVSNPEFLREGEAIKDFTSPDRVVIGTNSKRANLKLKSLYFPIVKKTSRYINTSRRGAELIKYASNAFLATKISYINEMADLCEKSGVDIKDISYGMGSDQRIGERFLRAGPAYGGSCFPKDTRAVLDTAKTFKVELSIIKSVIKSNDNRKLLLTKKLVKILSGN

SEQ ID NO: 84318 - protein, 388 aa, Unknown
  Bacterial polypetide isolated from the Sargasso Sea
MKNISIIGIGYVGMSLACLFGQKYQVSVVDIDKKKLELLKANKSTIKDQAITKYLKKNPKAFNVFSDIEKIINATDLYILCLPTNYDPELNFFNTTALDEVLEQISTKDPTTTILIKSTVPVGFTENARKKFNNENIIFSPEFLREGSAYDDNLRPDRIVIGDDGAKGKKISKIFNDLVKNEPDVYLMDSTEAESVKLFSNAYLALRISFFNELDSYALNKKIRSKKIIEAVGADKRIGHDYNNPSFGYGGYCLPKDTKQLLSNYEDIPQSLIEAIVRSNSIRKDFISDSIIKRKPKVVGIYRLIMKEKSDNIRESSIQGIMKRIKAKGIEVVVYEPILKEESFFGSKIISNIDVFKQVSDLIICNRFNEDLRDCKKKVFTRDIFGED

SEQ ID NO: 84319 - protein, 432 aa, Unknown
  Bacterial polypetide isolated from the Sargasso Sea
MKLCMIGTGYVGLVSGVCFADLGNEVICVDKDVDKISKLKRGIIPIYEPGLSELVKKNYKAKRLSFTTSISDAVQKSNIIFLCVGTPTKKKTNGADLSQIFNAAKEVSRNIKSSKIIINKSTVPVTTGDQIEKIISKKVKKKYFSVVSNPEFLREGEAIRDFTFPDRVIIGTSNKKSNRILKSLYSPLISKGAKYINTSRRGAELIKYASNAFLATKISFINEIANLCEKTDVNVEDVSIGMGLDKRIGGRFLRAGPAYGGSCFPKDTRAIVDTGSKFKTDLSIIKSVIRSNENRSKLLLLKVSKILKNKIKNKKICFLGVTFKANTDDMRESSSLTMIPSLSKKGALIKYYDPTGYKNEFSKNKNVFNCTTIEEACFDADLIIIHTEWNDFKSLNYKKLSKKKNFIIYDMRNILPYDKIKKDKIKYFGIGK

SEQ ID NO: 84320 - protein, 206 aa, Unknown
  Bacterial polypetide isolated from the Sargasso Sea
MKICMIGSGYVGLVSGTCFADLGNKVYCVDKDKTKINKLKKAISPIYEPGLDDLIRNNFRAKRLNFTDNLETAIKDSQIIFICVGTPTKKGSNLVDLSQVYSVAKSISKYIKNYKIIVTKSTVPVTTGDQIEKIISKKVKKSLFDVISNPEFLREGEAIRDFKYPDRIVIGSNNKKIFKKMELLYEPLIKKRAKFFCTSRKGAEFG

SEQ ID NO: 84321 - protein, 448 aa, Unknown
  Bacterial polypetide isolated from the Sargasso Sea
MWNHEWLYQVKFGDFKKMKICMIGTGYVGLVSGACFSELGNDVICSDIDSDKIEKLNNGKVPIYEPGLEEIVKRNFTQGKLKFSSDISLSIKKSDIIFICVGTPTNKKTNQANLKYVYSVAKRIKKNLNKYKVIVNKSTVPVTTGDKIEKILNTRKNKNKFDVISNPEFLREGEAIRDFLYPDRVVVGTNSNRPNKIMKNLYLPIIKKSNRYFNTSRRAAELIKYASNAFLATKISFINEIANLCEKINIDVKDISAGMGLDERIGGRFLRAGPGYGGSCFPKDTKALLSTARKFKTNLSIVKTVIKSNSDRNKLIINRINKIMKNKLKNKKISFLGVTFKAGTDDVRESPALTLIPSLVKRGANLHYYDPTGKKKEFKNKKIKFCSSTKEACINSDLIIIHTEWNEFKQLNFKKLVNKPNFKIFDLRNLYSFSKMKSNKLNYFRIGI

SEQ ID NO: 84322 - protein, 261 aa, Unknown
  Bacterial polypetide isolated from the Sargasso Sea
REKFGTGNLIFSPEFLREGKALYDNLYPSRIIVGERSERAEEFAGLLKQGAIKQDIEILFTDSTEAEAIKLFSNTYLAMRVAYFNELDSYAEAHGLNSKQIIEGVGLDPRIGKHYNNPSFGYGGYCLPKDTKQLLANYQNVPNNMIQAIVDANRTRKDFVANAILMRNPKVVGIYRLVMKAGSDNFRASAIQGIMKRLKAKGIEVVVFEPELKQDDFYNSRVIRDLAEFKQISDVIVANRRNDVLADVDAKVYTRDLFGSD

SEQ ID NO: 84323 - protein, 277 aa, Unknown
  Bacterial polypetide isolated from the Sargasso Sea
SLAVLLAQKYEVVALDISKDRVESINKKKSPIKDTELEDFLKNKSLNLKSTINKNEAYENADYIIIATPTNYDSATGSFDTSTVEGVILDCIEINPKALIVIKSTIPLGFTDNMRNKFDKADIIFSPEFLRESKALYDNLYPSRIVIGGESKRAVKFGEMLLECSFYSKKDALIITMDSKEAEAVKLFSNTFLAMRISFFNELDSFAEIKKLSSEKIIEGVSTDPRIGNYYNNPSFGYGGYCLPKDTKQLLDNFNKIPNNIIKAIVEANKTRKDFII

SEQ ID NO: 84324 - protein, 392 aa, Unknown
  Bacterial polypetide isolated from the Sargasso Sea
MVNKIKITVVGSGYVGMSLSVLLAQHNDVTVLDIDTERVDKINKKQSTIVDTEIEQFLKNNSLSLKATVDKKIAYKDANFIIVATPTNYDLDTNRFDTYSVDSVVEDALKFSPQALIVIKSTIPVGHTKLLQEKFKTNRVIFSPEFLREGQALKDNLYPSRIIVGSYCKSGQEFAELLKQGSKKTDVETLLIRSTEAEAVKLFANTYLAMRVSFFNELDSYALANDLDTRSIIEGVSLDERIGDNYNNPSFGYGGYCLPKDTKQLLANYEHVPQTLINAIVSSNTTRKDFIADEIRKLNPNVVGFYRLVMKADSDNFRSSAVQGIMKRIKAKGVEVVVYEPELGEEEFFGSKVITDLDKFKEMSDVIVANRKADCLSDVEDKCFSRDLFGDN

SEQ ID NO: 84325 - protein, 387 aa, Unknown
  Bacterial polypetide isolated from the Sargasso Sea
MNIVVVGMGYVGLSNAVLLAQQNHVVAIDLMPERIALVNARKPTVADSLIEEYLQHKALNLSATSDKNVVKEADFVIIATPTDYDPQTNYFNTQSVERVAKEVLALNPDTTIVIKSTVPVGFTEGLRSKLNSDNILFSPEFLREGKALYDNLHPSRIIVGERSERAQAFADLLARAAIKQDIPILLTDSTEAEAIKLFANTFLAMRVAYFNELDTYAESRRLNTRQIIEGVCLDPRIGDYYNNPSFGYGGYCLPKDTKQLLANYNDVPNNLISAIVDSNTTRKDFIANAIISKQPKRVGIYRLIMKSDSDNFRASAVQGVMKRIKAKGIEVVVYEPVLKEDEFFNSKVIRDLHEFKAMCDVIISNRMANELEDVAAKVYTRDLFHHD

SEQ ID NO: 84326 - protein, 388 aa, Unknown
  Bacterial polypetide isolated from the Sargasso Sea
MKIAIAGTGYVGLSNAILLAQYHQVIAVDVIAEKVALINARKSPIVDTEIEDFLAHCELDLTASLDKQLAYQDAEFVIIATPTDYDPKTNYFNTSTVESVIQDVLAINPMAVMVIKSTVPVGFTAKVKQKFQCDNILFSPEFLREGKALYDNLHPSRIIVGERSERAKIFADLLVQGAIKKDIQVLFTDSTEAEAVKLFSNTYLAMRVAYFNELDTYAETHGLDSRQIIEGVCLDPRIGNHYNNPSFGYGGYCLPKDTKQLRANYADVPNSIIGAIVESNTTRKDFIAESILSRNPKVVGIYRLIMKSGSDNFRASSIQGIMKRLKAKGIEVIVYEPVLKEKEFFHSRVVTDLTAFKAVADVIVSNRMAKELADVTDKVYTRDLFGND

SEQ ID NO: 84327 - protein, 278 aa, Unknown
  Bacterial polypetide isolated from the Sargasso Sea
MCWIDSWLFSRVVCCIGAGYVGGPTMAMIAKKCPEISVTVVDISQPRIDAWNSSELPIYEPGLDEIVFACRGKNLFFSTAVEDAIRDCEMIFVSVNTPTKKTGLGKGKAADLTYWELAARTIASCSDSDKIIVEKSTVPVRTAEAIEKVLQRNCPNKGVRFDILSNPEFLAEGTAMTDLDAPDRVLIGGKIENPEGQAAVDALVGVYSHWVPKENILTANLWSAELSKLAANAFLAQRISSINAMSALCEATGADVQQVSYAIGTRYQNRLQVLERLR

SEQ ID NO: 84328 - protein, 206 aa, Unknown
  Bacterial polypetide isolated from the Sargasso Sea
MQKLKIAVAGTGYVGLSNAVLLAQHNEVKAVDLVPEKVEMLNNKKSPIEDKEIAEYLTTKELNLKATLDAQEAYKDADYVVIATPTDYDPQTNYFNTGSVEAVIKTVMEVNPDAVMVVKSTVPVGFTKDAKARFGSDNIIFSPEFLREGKALYDNLYPSRIIVGERSERAEIFANLLQQGAIKEEIDVLFTDSTEAEAIKLFANTY

SEQ ID NO: 84329 - protein, 387 aa, Unknown
  Bacterial polypetide isolated from the Sargasso Sea
MNIVVVGMGYVGLSNAVLLAQQNHVVAIDLMPERVALVNARKPTVADSLIEEYLQHKALNLSATTDKNVVKEADFVIIATPTDYDPQTNYFNTQSVERIAKEVLDLNPDTTIVIKSTVPVGFTEGLRNKLNSDNILFSPEFLREGKALYDNLHPSRIIVGERSERAQAFANLLARAAIKQDIPILLTDSTEAEAIKLFANTFLAMRVAYFNELDTYAESRGLNTRQIIEGVCLDPRIGDYYNNPSFGYGGYCLPKDTKQLLANYNDVPNNLISAIVDSNTTRKDFIANAIISKQPKRVGIYRLIMKSDSDNFRASAVQGVMKRIKAKGIEVVVYEPVLKEDEFFNSKVIRDLHEFKAMCDVIISNRMANELEDVAAKVYTRDLFHHD

SEQ ID NO: 84330 - protein, 278 aa, Unknown
  Bacterial polypetide isolated from the Sargasso Sea
MTIKYLKKATKTASTDDTKTKEIVQNLLKELEKSKEEGCKELTKKFDKYDGEIIVSKEKIEDIKKKLDKKTKDDIKFSYDRVKKFAEAQLKNYGKDFEVELSNGLYAGQKLVPVNTAGCYIPGGRYAHIASAVMSVTTAKVAGVKNIIACSPPKENIGAHPSIIYTADLCGADVILNLGGVPAIAAMTYGLFGNAPADILVGPGNQFVAEAKRILFGKVGIDLFAGPTEIGIIADETADPEIVAVDLVGQAEHGYNSPAWLYTTSQKLADAVMKRVPE

SEQ ID NO: 84331 - protein, 163 aa, Unknown
  Bacterial polypetide isolated from the Sargasso Sea
KKLAEEVMKRVPELIADLPELPKQSAGDAWRDFGEVILCDTDEEMAKISDEYAPEHLEVQTKNLKWFHERLKNYGSLFIGEETTVAYGDKCSGTNHILPTKGAGRYTGGLFVGKFIKTLSFQRMTKESTKEVGAAAARISRYEGMEAHARTGDVRLRKYGFSN

SEQ ID NO: 84332 - protein, 72 aa, Unknown
  Bacterial polypetide isolated from the Sargasso Sea
DYFAGPNHTLPTSGCAKFASPLGVQDFTKSSSVLAYSEERLQREGSAIIRFAEEEKLFAHAESIRVRMRTTE

SEQ ID NO: 84333 - protein, 167 aa, Unknown
  Bacterial polypetide isolated from the Sargasso Sea
AQSILITDNKNFANKVLSSIKDLITNLPKKNTIKKSLDTYGLIILVDDFKNCHNIINNIAPEHLHLQNKDRNKIYKKVINAGAIFLGKYSSEVFGDYIVGTNHILPTSGAAKFSSGLGVLDFMKRTSIVEMNFSGYQKYASKVAKMANIENLEGHKLSVKIRQNDKK

SEQ ID NO: 84334 - protein, 137 aa, Unknown
  Bacterial polypetide isolated from the Sargasso Sea
EAAWRDYGEVILCDTDEEMANISDDYAPEHLEVQTKNLKWFHERLQNYGSLFIGEETTVAYGDKCSGTNHILPTKGAGKYTGGLFVGKFIKTLSFQRMTKESTKEVGSAAARISRYEGMEAHARTGDVRLRKYGFSN

SEQ ID NO: 84335 - protein, 136 aa, Unknown
  Bacterial polypetide isolated from the Sargasso Sea
AWKDYGEVILCDNDEDMAKISDEYAPEHLEVQAKNLKWFHDRLKNYGSLFIGEETTVAYGDKCSGTNHILPTKGAGKYTGGLFVGKFIKTLSFQRMTKESTKEVGSTAARISRYEGMEAHARTGDVRLRKYGFSNK

SEQ ID NO: 84336 - protein, 167 aa, Unknown
  Bacterial polypetide isolated from the Sargasso Sea
MNSKDKIEYIVNWIKNYTKTIKSQPVTLVIGVSGGVDSALTSTLCAHTGLKTIAISMPIKQNSSQHDLSLRHLDYLKKNFDNVDCKIIGLDNIFKTFESTMQDFDSELAFANSRSRLRMVTLYQAAQSNNGIVVGTGNKVEDFGVGFYTKKGDGGVDISPIADLLSQ

SEQ ID NO: 84337 - protein, 136 aa, Unknown
  Bacterial polypetide isolated from the Sargasso Sea
AAWRDYGEVIMCDTKEEMMKVSDEYAPEHLEVQAENLDWYLKNLKNYGSLFLGEETTVAYGDKCSGPNHILPTKGAGKYTGGLYVGKFIKTVTYQKMNKESNKEVGAAAARISRYEGMEAHARTGDVRLRKYGFSN

SEQ ID NO: 84338 - protein, 260 aa, Unknown
  Bacterial polypetide isolated from the Sargasso Sea
LCGADVILNLGGIAAIASMAYGCFNNPAVDFLVGAGNQYVAEAKRILFGKVGIDLFAGPTEIAIIADKSADKEIVAADIVGQAEHGYNSPGWVFTTDKSLANYVIKRIPELITELPEGPRASAEPAWRDYGEVILCDSNEDMASVSDKYAAEHLEVHAANLDWWLKRLKNYGSLFLGEETTVAYGDKCSGPNHILPTKGAGKYTGGLYVGKFIKCLTFQRMTKEANKIVGATAARLGRAEGMEAHARTGDIRLKKYGHSN

SEQ ID NO: 84339 - protein, 166 aa, Unknown
  Bacterial polypetide isolated from the Sargasso Sea
VNVFLVTKNKEIIKKVKKNIILNIKKLPRKKIAKKSLKKHGLIILCQNDRQIIDVINEIAPEHLELNVSNYKKYLNHIFNVGSVCIGKYTPMAVTDYNSGSQHTLPTLGSAKFSSGLNVNDFFKKISYVNLSKKGVAKIGKFAIQMSDFEELKAHSESIKSRIRRN

SEQ ID NO: 84340 - protein, 246 aa, Unknown
  Bacterial polypetide isolated from the Sargasso Sea
RTTPSVVAYGEEIKVGDSAKNQAVTNPENTLYAIKRLIGRKHDDDVVKKDANMVAYKILAADNGDAWVEAEGKKLAPQQVSAEILKKMKKTAEDYLGQEVKEAVITVPAYFNDSQRQATKDAGKIAGLEVKRIINEPTAAALAYGLDKGKGDQKIAVYDLGGGTFDVSIIEIAEIDGEHQFEVLSTNGDTFLGGEDFDITLIEYLAEEFKKESGLDLHNDSAALQRLKEAAEKAKIELSSNQQSEI

SEQ ID NO: 84341 - protein, 158 aa, Unknown
  Bacterial polypetide isolated from the Sargasso Sea
KVMKRVPELFAELPEVPRTNADAAWRDYGEVILCDTDEEMVKISDEYAPEHLEVQTENLKWFHERLTNYGSLFVGEETTVAYGDKCSGTNHILPTKGAGRYTGGLFVGKFIKTLSFQRMTKESTELVGAAAARISRYEGMEAHARTGDVRLKKYGYSN

SEQ ID NO: 84342 - protein, 302 aa, Unknown
  Bacterial polypetide isolated from the Sargasso Sea
KIVEETLSKIESEGDKYVRELSQKFDNYSPDSFRLSEDQINQLMSEVSDEDKEDIKFAQKQVRSFAEAQLKTLSELEVETHPGVILGHKNIPVQAVGCYVPAGKFPMVASAHMSVITASVAGVPRIVATTPPFKGKPNPAVVTAMKLGGAHEIYVLGGMQGVGAMAIGTETIKPVDMLVGPGNAFVAEAKRQLYGKVGIDLFAGPTETMIIADETVDGEICATDILGQAEHGYNSPAVLITNSKKLAEDTLNQIDRLLEILPTKETAAVSWREYGEIILCDTYDEMLVKANEIASEHVQVMT

SEQ ID NO: 84343 - protein, 237 aa, Unknown
  Bacterial polypetide isolated from the Sargasso Sea
AIMSIATAKVAGVENVIACSAPSGKDGPHPAILYAMNMCGADTILSLGGVQGIAAMAFGLFTGKPARLLVGPGNRFVAEAKRMLFGRVGIDMFAGPTEIAVIADETADAVVVAEDLVSQAEHGPDSPAWLITTSRQLAEDVMAQMDRHINALPEIAKNAASMAWRDYGEVILCNSDDEVASISDEYAAEHLEVHTAKDAWYKNRLKNYGSLFVGEETTVTYGDKCYGTNHILPTKGA

SEQ ID NO: 84344 - protein, 142 aa, Unknown
  Bacterial polypetide isolated from the Sargasso Sea
PRKSAEAAWRDYGEVILCDTDEEMVKISDEYAPEHLEVQTENLKWFHERLTNYGSLFVGEETTVAYGDKCSGTNHILPTKGAGRYTGGLFVGKFIKTLSFQRMTKESTELVGAAAARISRYEGMEAHARTGDVRLKKYGYSN

SEQ ID NO: 84345 - protein, 207 aa, Unknown
  Bacterial polypetide isolated from the Sargasso Sea
MIKINKFISTKGLEKLKQILDKRRFSQNSTIPIVSKILKDVKKNKYKAVKKYEKKLSKNTIIKPSIREINQSIKSLSPEIKKAIDYAYTRIFKYHSLQKIKNINYRDKFNNFIQYKSVPINKVGIYVPANLPSTLLMNAIPAKIAGVKKIILANPRLNKQLNPAVIYAAKKLGINDIYSMGGAQAIGSLTYVQKVDKIVGTWKYLCS

SEQ ID NO: 84346 - protein, 287 aa, Unknown
  Bacterial polypetide isolated from the Sargasso Sea
LNELIYSRDKLEDSYNLLPREIKDDLIFLKSRIQSFHESILTTDWQKTDKVFSKYGQVSRPIKRVGLYAPGGSAIYPSSVLMTSVLAKIAGVKEILLCFPPSNEKNTRLMLASAFLGEVDQVISIGGAQAIGAMAFGTDNFEKVDKIFGPGNQYVAEAKRQVFGIVGIDAMTGPSEVMIIADETADLEMIALDLIAQAEHGPNSTCILVLVNNLIAKKVEDKISEYLNNLNFNKDSNAYKSLKNFGLIVNVSDFEEAKEVCNQFNPEHLQLILKNEGQVNLKEIYAG

SEQ ID NO: 84347 - protein, 85 aa, Unknown
  Bacterial polypetide isolated from the Sargasso Sea
NSAQLQRDPMKEVEEETLPGVILGHRHIPMNRGGSYVPGGKYPKVATAHMSVVTAKVAGVKEINTCAPPYLGKPADAIVAAQSRG

SEQ ID NO: 84348 - protein, 74 aa, Unknown
  Bacterial polypetide isolated from the Sargasso Sea
AGCEIILAGPNHTLPTSGNSRFSGSLGVETFMKNTSIIEFNEESLKVNSLDIINLAKSEGLHSHANSVEIRFED

SEQ ID NO: 84349 - protein, 201 aa, Unknown
  Bacterial polypetide isolated from the Sargasso Sea
MKILDSNNNNFDNSLNKLLLLRKKKIQSSSISVTSIIKDIKKNGDKALLKYEKRFNKNKIIVPSSKQINNSIKSLNQNVKKAIDVAYNRIYKFHSLQKFKNISYIDKFKNKLEYKYLPLDSVAIYVPGSSASYPSSVLMNAIPAIVAGVKRLIMINPGFKGKQNPAVLYAARKCKIKEIYSIGGPSAVAAVAYGNKKNKKS

SEQ ID NO: 84350 - protein, 270 aa, Unknown
  Bacterial polypetide isolated from the Sargasso Sea
MTITYLKKSPKTSSTDDNKTTEIVKNLLKEIETSKEDACINLTKKFDKYNGEIIVSKERIEKIKKELDQKTKDDIQFSHERVRKFAEAQLKNYGQDFEIELSPGLFAGQKLIPVNTAGCYIPGGRYAHIASAVMSVTTAKVAGVKNIIACSPPKENVGVHPAIVYTADLCGADVILNLGGVPGIAAMTNGLFNNPPADILVGPGNQFVAEAKRILFGKVGIDLFAGPTEIAVIADDKADAEMVAVDLVGQAEHGYNSPAWLYTTSKRLAS

SEQ ID NO: 84351 - protein, 208 aa, Unknown
  Bacterial polypetide isolated from the Sargasso Sea
VIADETVDGEICATDLLGQAEHGYNSPAVMITNSRKLAEETFKEIDRILEILPTKETASTSWKDYGEIILCDTYEEMLSKANEIASEHVQVMTKKDDWFLENMRSYGALFLGARTNVANGDKVIGTNHTLPTKKAGRYTGGLWVGKFIKTHTYQKILTDEAAKLIGEYGSRLSYLEGFIGHAEQCNIRVRRYGGLNVEYGKPASKIKS

SEQ ID NO: 84352 - protein, 143 aa, Unknown
  Bacterial polypetide isolated from the Sargasso Sea
LPKQSAGDAWRDFGEVILCDTDEEMAKISDEYAPEHLEVQTKNLKWFHDRLKNYGSLFIGEETTVAYGDKCSGTNHILPTKGAGRYTGGLFVGKFIKTLSFQRMTKESTKEVGAAAARISRYEGMEAHARTGDVRLRKYGFSN

SEQ ID NO: 84353 - protein, 292 aa, Unknown
  Bacterial polypetide isolated from the Sargasso Sea
TKEEGCIELSKKFDKYEGEVVVTREKIEQIKKNLDPKTKDDIQFSHERVRKFAEAQLKNYGQDFEVELSDGLFAGQKLIPVNTAGCYVPAGRYAHIASAVMSVTTAKVAGVKNIIVCSSPKPGVGVHPAIVYTADLCGADVIMNLGGVQAIAAMTYGLFGNAPADMLVGPGNQFVAESKRILFGKVGIDLFAGPTEIAVIADETADPELVAFDLVGQAEHGYNSPAWLFTTSKSLAEYVMKRVPELIADLPDLPKENSGAAWRDYGEVILCDTNEEMAKISDEYAPRTFRDT

SEQ ID NO: 84354 - protein, 86 aa, Unknown
  Bacterial polypetide isolated from the Sargasso Sea
MAGGIFLGEYSVEAFGDYIVGTNHVLPTSGAAKFSSGLGVLDFMKRSSYVEMNQKSFNILSEDTQKMSGLEGLDGHKLSVKIRQKK

SEQ ID NO: 84355 - protein, 170 aa, Unknown
  Bacterial polypetide isolated from the Sargasso Sea
SWLYTTSKELADKVMKRVPELIADLPELPRTSAEAAWRDYGEVVLCDTDEEMATISDEYAPEHLEVHTKNLEWFHKRLKNYGSLFIGEETTVAYGDKCSGTNHILPTKGAGRYTGGLFVGKFIKTLSFQRMTKESTELVGAAAARISRYEGMEAHARTGDVRLKKYGYMK

SEQ ID NO: 84356 - protein, 258 aa, Unknown
  Bacterial polypetide isolated from the Sargasso Sea
MAIEYLKIGLDEKQRIEDNDKVKKIVEETLSKIESEGDEHIRELSQKFDNYSPDSFRLNEDQINQLISEVSDDDKEDIKFAQKQVRSFAEAQLKTLSELEVETHPGVILGHKNIPVQAVGCYVPAGKFPMVASAHMSVVTASVAGVPRIVATTPPFKGKPNPAVVTAMKMGGAHEIYVLGGMQGVGAMAIGTETIKPVDMLVGPGNAFVAEAKRQLYGKVGIDLFAGPTETMVIADETVDGEICATDLLGQAEHGYNS

SEQ ID NO: 84357 - protein, 187 aa, Unknown
  Bacterial polypetide isolated from the Sargasso Sea
MQKNKNIKYVDKQNNKIEYKYIPIQSVGIYVPSNLPSTLLMNAILAKKIAGVKRVVLANPRLNGKLNPAVMYAAKKCGISEIISVGGSQAIASLAYIQKVNKIVGPGNDYVARAKKEVFGDVGIEGIAGPSEITVVADKNTNLKEVLTSLIGQAEHDTNSQCILIVNNQDFIKSLKKVLKQELNKIP

SEQ ID NO: 84358 - protein, 127 aa, Unknown
  Bacterial polypetide isolated from the Sargasso Sea
VNCDEQAIEIINLIAPEHLQLCVERPEQYLHQIMNAGAIFCGNYSTESFGDYLAGPSHVLPTFGSARFSSPLGVYDFVKKSSIIGISQEGATLLSEPASIIANGEGLEAHALASRIRGVDFDSNILK

SEQ ID NO: 84359 - protein, 166 aa, Unknown
  Bacterial polypetide isolated from the Sargasso Sea
TTSKELAEKVMKRVPELIAELPEVPRTSAEAAWRDYGEVILCDTDKEIVKISDEYAPEHLEVQTENLKWFHERLTNYGSLFVGEETTVAYGDKCSGTNHILPTKGAGRYTGGLFVGKFIKTLSFQRMTKQSTKLVGAAAARISRYEGMEAHARTGDVRLRKYGFSN

SEQ ID NO: 84360 - protein, 116 aa, Unknown
  Bacterial polypetide isolated from the Sargasso Sea
ISDEYAPEHLEIQTKNLQWFHDRLKNYGSLFIGEETTVAYGDKCSGTNHILPTKGAGKYTGGLFVGKFIKTLSFQRMTKESTKEVGAACARISRYEGMEAHARTGDVRLRKYGFSN

SEQ ID NO: 84361 - protein, 132 aa, Unknown
  Bacterial polypetide isolated from the Sargasso Sea
GPRGGIIVVDNLDQATDFINLYAPEHLQIHSIDPDKYLSKIKNAGEIMLGDYAPMSIANFALGPNNVIPTNAWSRTKSPLGVHDFLKSTSIGKIDKNGYETLSPYANKFAKYEGFDAHANAVSSLRIDAMKK

SEQ ID NO: 84362 - protein, 69 aa, Unknown
  Bacterial polypetide isolated from the Sargasso Sea
SGTNHVLPTAGAARAYSGVSVASFQNLISVQSATPAGIAAIGECARILARAEGLDAHENAVTLRMEAAA

SEQ ID NO: 84363 - protein, 156 aa, Unknown
  Bacterial polypetide isolated from the Sargasso Sea
SFLKEIKSLIKINLKNLPRRKIAEKSLKANGLLIHAKNDKNVIDLINLIAPEHLELNISKPKKYINKIVNAGSICIGKFSAMAVTDYNAGTNHVLPTMGSAKFSSGLNVGDFYKKISYINLSKKGIEVIGKQAITLAEYENLEGHAQSIKSRIRSY

SEQ ID NO: 84364 - protein, 163 aa, Unknown
  Bacterial polypetide isolated from the Sargasso Sea
MIKKIFASSDSFESDLKELRSLDLLEDQELDRTVDKILRDIRLNGDSAVLSYVKEFEREDVKSRSDLKIDPELLASSWKKVSEEERNALSFAIERIETFHQRQIESSWSYKDRQNNLLGQQITPINRVGVYIPGGRASYPSTALMTVIPAKVAGVREIVSPLP

SEQ ID NO: 84365 - protein, 204 aa, Unknown
  Bacterial polypetide isolated from the Sargasso Sea
DLFAGPTETLVIADDSVDGELCAADLLGQAEHGLNSPAVLLTNSEQLGKDTMAEVERQLTILPTAEVASVAWRDYGEVIVCDTYDEMLEVANDLAFEHVQIMTKDVPYFQKNMRNFGALFLGPETNVSYGDKCIGTNHTLPTKGAGRYTGGLWVGKFLKTCTYQRVTEEASVMVGEYCSRLCAIEGFAGHKEQADIRLRRYGKK

SEQ ID NO: 84366 - protein, 211 aa, Unknown
  Bacterial polypetide isolated from the Sargasso Sea
QLFGTVGVDSIAGPSEIVVLADETSSPELVAWDLMAQAEHDEDASSILICTSSEVINEVKQIILNELPNLDRELIIKSSLKTNGLVIKIENLEQSIKLINRFAPEHLNLAFENKVIDVKDLTAGIILEGSDSAVSLSDYVLGPSHILPTNTSSRFSSPLSVEDFMVSSTKVGIRSQANKALYNKFIDTASIIARAEGLTAHAISAEKRKKN

SEQ ID NO: 84367 - protein, 170 aa, Unknown
  Bacterial polypetide isolated from the Sargasso Sea
MIKVLNCRSKNYIKKLKFFLQKRRSEKYLVNNKVKSILNDIKKNGIKAVLKYERRFSKNNEIKPSIKKIRFCVKSLDPKIKNAINFAYNRIYKFHKKQRIKNLSYKDNLGNKLQYKYVPMDSVGIYVPANLPSTLLMNAVPAKIAGVKRIVLVNPKFKGKLNAAVLYAAK

SEQ ID NO: 84368 - protein, 135 aa, Unknown
  Bacterial polypetide isolated from the Sargasso Sea
VVLKSLKNNGLIVLAQSDKQIIEAINEVAPEHLEINVSNYKKYLNQIHNAGSIMIGKYSPMAVSDYNVGSNHVLPTLGSAKFSSGLNLSEFYKKISHITLTKKGIEKLGESATHLAEYEELDNHAQSIKSRMRRI

SEQ ID NO: 84369 - protein, 304 aa, Unknown
  Bacterial polypetide isolated from the Sargasso Sea
KEIELKGDSYVRELSEKFDEYSPSSFRLSEDEISKLVDEVSDNDKEDIRFAQKQVRSFAEVQLKSLSEIEVETQPGVILGHKNIPVQSVGCYVPAGKFPMVASAHMSVVTASVAGVPRIIATTPPYQGKPNAAVVTAMKMGGAHEIYVLGGMQGVGAMAIGTETIKPVDMIVGPGNAYVAEAKRQLFGKVGIDLFAGPTETMIICDDTVDAEICATDLLGQAEHGYNSPAIMITNSRDLATETIKEIDRLLKILPTRDTAGVSWKDYGEIILCESYDEMLMKANEIASEHVQVMTDRDEWFLKI

SEQ ID NO: 84370 - protein, 272 aa, Unknown
  Bacterial polypetide isolated from the Sargasso Sea
DEINFDFSKKNGNKTLLDFLNKRRSGLRVDTSIVDKIINDVKKNKNKAVIKYEKKFSGNNKIKPSKKEIYNAIKSLDKNVIKAIDLAFKRIQKFHKLQKVSNIKLIDNYNNKIEYRHVPLKSVGIYVPANLPSSLLMNAIPAKISKVKRIVLANPRTGGKLNSAIMYVAKKCGIKEIITVGGAQAIASLAYIQNVDKIVGPGNDFVAKAKQKVFGQVGTESIIAGPSEVTIIADSKSDIKQISTSMAAQSEHGINSQSILISKNKDVLIKCD

SEQ ID NO: 84371 - protein, 284 aa, Unknown
  Bacterial polypetide isolated from the Sargasso Sea
KKFDKYDGEIIVSKERIEKIKKSLDQKTKDDIQFSFDRVRKFAEAQLKNYGQDFEVELSDGLYAGQKLIPINTAGCYIPGGRYAHIASAVMSVTTAKVAGVKNIIACSPPKENVGAHPTIVYTADLCGADIILNLGGVPAIAAMTNGLFKNPPADIIVGPGNQFVAEAKRILFGKVGIDLFAGPTEIGIIADAKADSEIIAVDLVGQAEHGYNSPCWLYTTCKDLAEKVMKRVPELIAELPEVPRTNAEAAWKDYGEVILCDTDEEMVKISDQYAPEPFRSSNG

SEQ ID NO: 84372 - protein, 160 aa, Unknown
  Bacterial polypetide isolated from the Sargasso Sea
AKYVMKRVPEINADYPELPRENSEAAWRDYGEVILCDTDEEIAKISDKYAPEHLEVQTKNLKWFHERLKNYGSLFIGEETTVAYGDKCSGTNHILPTKGAGRYTGGLFVGKFIKTLSFQRMTKASTKEVGAACARISRYEGMEAHARTGDVRLRKYGFSN

SEQ ID NO: 84373 - protein, 95 aa, Unknown
  Bacterial polypetide isolated from the Sargasso Sea
INNGILMYVSSDAKIISVINKIAPEHLELNIRNYKSLVPKIKNSGSICLGKYAVMAMTDYNVGSNHVLPTNGSAKYSSGISVNEFYKRISYLNLS

SEQ ID NO: 84374 - protein, 284 aa, Unknown
  Bacterial polypetide isolated from the Sargasso Sea
GCIELTKKFDKYDGEIVVSKERIEKIKKTLDQKTKDDIQFSYDRVRKFAEAQLKNYGQNFEVELSDGLYAGQKLVPVNTAGCYIPGGRYAHIASAVMSVTTAKVAGVKNIIACSPPKEGVGAHPTIIYTADLCGADVILNLGGVPAIAAMTNGLFKNPPADIIVGPGNQFVAEAKRILFGKVGIDLFAGPTEIGIIADAKADPEIVAVDLVGQAEHGYNSPCWLYTTSKELAEKVMKRVPELITELPEVPRKNAEAAWRDYGEVILCDTDEEMVKISDEYAPEH

SEQ ID NO: 84375 - protein, 129 aa, Unknown
  Bacterial polypetide isolated from the Sargasso Sea
EVILCNTDEEMAKISDQYAPEHLEVQTKNLKWFHERLKNYGSLFIGEETTVAYGDKCSGTNHILPTKGAGRYTGGLFVGKFIKTLSFQRMTKESTKEVGAAAARISRYEGMEAHARTGDVRLRKYGFSN

SEQ ID NO: 84376 - protein, 136 aa, Unknown
  Bacterial polypetide isolated from the Sargasso Sea
SIAKQSLKKNGILIYVNSDKKIVEVLNKIAPEHLELNIKNYKSFLPKIRNSGSICLGKYAVMAMTDYNVGSNHVLPTNGSAKYSSGISVNEFYKRISYINLSKKGIESLGPSVITLANYEGLVGHAQSIKKRIRRK

SEQ ID NO: 84377 - protein, 192 aa, Unknown
  Bacterial polypetide isolated from the Sargasso Sea
MKILKSTNKNFNNSLNKLLLQRKKKVQSSSISVTSIVRDVKKNGDKALLKYEKRFNQNRTIVPTSNQINNSIKSLNQKVKKAIDIAYNRIYKFHSLQKFKNISYVDKFKNKLEYKYLPLDSVAIYVPGSSASYPSSVLMNAIPAIVAGVKRLIMINPGFKGEQNSAVLYAARKCKIREIYSIGGPSAVAAAA

SEQ ID NO: 84378 - protein, 141 aa, Unknown
  Bacterial polypetide isolated from the Sargasso Sea
RVSAEAAWRDYGEVILCDTDEEMATISDEYAPEHLEVQTENLDWFHKRLKNYGSLFIGEETTVAYGDKCSGTNHILPTKGAGRYTGGLFVGKFIKTLSFQRMSKESTKSVGAACARISRYEGMEAHARTGDARLRKYGFSN

SEQ ID NO: 84379 - protein, 295 aa, Unknown
  Bacterial polypetide isolated from the Sargasso Sea
SPKTSSTDDNKTIGIVQDLLKNIETTKEQGCIDLTRKFDKYDGEIIVSKDKIEEIKKTLDQKTKDDIQFSFERVRKFAEAQLKNYGQDFEIELSDGLYAGQKLVPVNTAGCYIPGGRYAHIASAVMSVTTAKVAGVKNIIACSPPKKGVGAHPTIVYTADLCGADVILNLGGVPAIAAMTNGLFKNPPADIIVGPGNQFVAEAKRILYGKVGIDLFAGPTEIGIIADAKADPEIVAVDLVGQAEHGYNSPCWLYTTSEELAKKVMKRVPELIAELPEVPRTSAEAAGETRRSNSL

SEQ ID NO: 84380 - protein, 213 aa, Unknown
  Bacterial polypetide isolated from the Sargasso Sea
LFAGPTETLIIADKTSDPEICAIDLLGQAEHGPTSPAILLTDSNKLAIDTIKEVERQLNILPTAEIAKESWKEYGQVIVCDNIEEMVTVADDLAFEHVQVMTEDPDYFHKNMTNYGALFLGSRTNVAFGDKVIGTNHTLPTKTAARYTGGLWVGKFLKTCTYQKVLTDEASALVGEYCSRLCALEGFSGHGEQANVRVRRYGRKNIEPYAAAE

SEQ ID NO: 84381 - protein, 252 aa, Unknown
  Bacterial polypetide isolated from the Sargasso Sea
MSEVSDDDKEDIKFAQKQVRSFAEAQLKTLSELEVETHPGVILGHKNIPVQAVGCYVPAGKFPMVASAHMSVVTASVAGVPRIVATTPPFKGKPNPAVVTAMKMGGAHEIYVLGGMQGVGAMAIGTETIKPIDMLVGPGNAFVAEAKRQLYGKVGIDLFAGPTETMVIADETVDGEICATDLLGQAEHGYNSPAVMITNSRKLAEETFKEIDRILEILPTKETASTSWRDYGEMILCDTYEEMLSKANEIAS

SEQ ID NO: 84382 - protein, 228 aa, Unknown
  Bacterial polypetide isolated from the Sargasso Sea
EFNFPLEITVSHIGYKAQTKRFDKNNINGINFILNRDFIRMNELVVTGTRTQKLHDNVPIATEVISQDDINNSGAQTIADLLSQRAGVSLQTSVEGGSVLNILGMDSRYILILMDGQPITGRFNNRVALDQILINRVKKVEIVKGPNSSLYGSEAMAGVVNIITKDKNSLESIDVSAQYNNTQNKFENTGIKNGSQILSINGYKPLNKLKIKFKNDLNQTNNDKSIQL

SEQ ID NO: 84383 - protein, 156 aa, Unknown
  Bacterial polypetide isolated from the Sargasso Sea
MKRVPELISELPEMPRASAEAAWRDYGEVILCDTDEEMASISDEYAPEHLEVQTKNLKWFHDRLKNYGSLFIGEETTVAYGDKCSGTNHILPTKGAGRYTGGLFVGKFIKTLSFQRMTKESTKEVGAAAARISRYEGMEAHARTGDVRLRKYGYSN

SEQ ID NO: 84384 - protein, 194 aa, Unknown
  Bacterial polypetide isolated from the Sargasso Sea
MIKILQVGNVDSFVESRRQKTSQKDRKIVQSILDDVRKNGDSAVKKYEQKFNGKKTTQLHLTKQEVKNAKITDAEFSALQLSAIRLSKSQRILNKSLIQSIKKIPDISFIPIPSVGCYIPGGQARYPSSAIMSVITAAEAGVKKIVVVSPPNSDGKIDPMTITVAQNCGAEIYKVGGAQAIAALAYGTKSIPKV

SEQ ID NO: 84385 - protein, 118 aa, Unknown
  Bacterial polypetide isolated from the Sargasso Sea
GKISDEYAPEHLEVQTENLKWFHERLTNYGSLFVGEETTVAYGDKCSGTNHILPTKGAGRYTGGLFVGKFIKTLSFQRMTKESTELVGAAAARISRYEGMEAHARTGDVRLRKYGYSN

SEQ ID NO: 84386 - protein, 226 aa, Unknown
  Bacterial polypetide isolated from the Sargasso Sea
MSVTYLKRGMPEADRAEDDAKTRGIVESTLKDIEARGDVAVRELSEKFDSYTPESFRLSQQEIDDLIGQLSEREVADIRFAQEQVRNFAQAQRDTMLDLEVETMPGVILGHKNIPVQSVGCYVPGGKFPMVASAHMSVATASVAGVPRIIACTPPFQGKPNPAVIAAMHFGGAHEIYVLGGIQAIGAMAIGTETIEPVHMLVGPGNAFVAEAKRQLFGRVGIDLFA

SEQ ID NO: 84387 - protein, 277 aa, Unknown
  Bacterial polypetide isolated from the Sargasso Sea
MAITYLKRSPKTSSTDDTKTREIVENILKDIEKTKEEGCKELSKKFDKYEGDVIISKEKIEEIKKNLDQKTKDDIQFSHERVRKFAEAQLKNYGQDFEVELSDGLFAGQKLIPVNTAGCYVPAGRYAHIASAVMSVTTAKVAGVKNIIVCSSPKPGVGVHPSIVYTADLCGADVIMNLGGVQAIAAMTNGLFGNAPADILVGPGNQFVAEAKRLLFGKVGIDLFAGPTEIAVIADETADPEMVAYDLVGQAEHGYNSPAWLFTKSKKIADYVLQRGS

SEQ ID NO: 84388 - protein, 135 aa, Unknown
  Bacterial polypetide isolated from the Sargasso Sea
IARKSILNNGILMHIGSDKKIVEVINKIAPEHLELNIKNYKSFVPKIKNSGSICLGKYAVMAMTDYNIGTNHVLPTNGTSKYSSGISVNEFYKRISVINLSKKGIESLGPSVITLANYEGLAGHAVSVRKRIRRK

SEQ ID NO: 84389 - protein, 129 aa, Unknown
  Bacterial polypetide isolated from the Sargasso Sea
EVVLCDTDEEMSKISDEYAPEHLEVQTENLDWFHKRLKNYGSLFIGEETTVAYGDKCSGTNHILPTKGAGRYTGGLFVGKFIKTLSFQRMTKESTELVGAAAARLSRYEGMEAHARTGDIRLKKYGYSK

SEQ ID NO: 84390 - protein, 191 aa, Unknown
  Bacterial polypetide isolated from the Sargasso Sea
MKVLYSNSKNFDKNLDSLLLQRKKKVQSNSVSVSSIINDVRKNGDQALVKYEKRFNQNNVIVPSQKQVSNSIKSLDKKVKHAIDIAYNRIYKFHLLQKFKNISYIDKYKNKLEYKYVPLDSVAIYVPGSTASYPSSVLMNAIPAIVAGVKRVVMINPGFKGKQNSAVLYAARKCKIKEIYSIGGPSAIAAV

SEQ ID NO: 84391 - protein, 283 aa, Unknown
  Bacterial polypetide isolated from the Sargasso Sea
EEAIKKVDQKTKDDVKFAHDRIKKFAEHQLKSMNNGFEVELSKGLFAGQRLIPVDTAGCYIPGGRYAHISSAVMAITPAKVAGVKTIICASPPKDKDGANPGIIFAANHCGADVIMNLGGVAAIGSMTHGCFKNPPVDFLVGAGNQYVAEAKRIVYGKVGIDQFAGPTEIAIIADKSADKEIVAVDLVGQLEHGYNSPGWLFTTDKALADFTMKRVPELINELPELAKVNATAAWKDYGEVILCDSNEEMAEVSDKYASEHLEVHAENLDWWLKRLRIMDLYF

SEQ ID NO: 84392 - protein, 136 aa, Unknown
  Bacterial polypetide isolated from the Sargasso Sea
AAWRDYGEVILCDTDEEMVKVSDEYAPEHLEIQTENLKWFHEKLTNYGSLFVGEETTVAYGDKCSGTNHILPTKGAGKYTGGLFVGKFIKTLSFQRMTKESTKEVGAAAARISRYEGMEAHARTGDVRLRKYGFSN

SEQ ID NO: 84393 - protein, 265 aa, Unknown
  Bacterial polypetide isolated from the Sargasso Sea
MAINYIKKAAKTPETDDHKTQAAVQEILNDIAKRKEEALKELNKKFDKYDGEVVVSKEKIEEAIKKVDQKTKDDVKFAHDRIRKFAEHQLKSMNNDFEVELSKGLFAGQRLIPIDTAGCYIPGGRYAHISSAVMAITPAKVAGVKTIICASPPKDKDGANPGIIFAANHCGADVIMNLGGVAAIGSLTHGCFNNPPVDFLVGAGNQYVAEAKRIVYGKVGIDQFAGPTEIAIIADKSADKEIVAVDLVGQLEHGYNSPGWLFTTD

SEQ ID NO: 84394 - protein, 147 aa, Unknown
  Bacterial polypetide isolated from the Sargasso Sea
LMKELNKIPRKNIAKKSLLRNGLILRVYNNTQIIDSINEIAPEHLELNLKNYKKLVNKIKNVGSICIGKYSAMAATDYNVGTNHILPTLGSAKFSSGLNVGEFYKKISYIKLSKKGIEVIGKKAITLAEYEGLIGHAQSIKSRIRRS

SEQ ID NO: 84395 - protein, 133 aa, Unknown
  Bacterial polypetide isolated from the Sargasso Sea
RDYVEVILCDTDEEIVKISDEYAPEHLEVQTENLEWFHERLTNYGSLFVGEETTVAYGDKCSGTNHILPTKGAGRYTGGLFVGKFIKTLSFQRMTKESTKLVGAAAARISRYEGMEAHARTGDVRLRKYGFSN

SEQ ID NO: 84396 - protein, 190 aa, Unknown
  Bacterial polypetide isolated from the Sargasso Sea
LADRKTDLNQVITSIIGQAEHDVNSQCILITKDKKLVNKFNIEIIGRIQKVQRKSVVLKSLKNNGLIVLAQSDKQIIEAINEVAPEHLEINVSNYKKYLNQIHNAGSIMIGKYSPMAVSDYNVGTNHVLPTLGSAKFSSGLNSSEFYKKISHITLTKKGIEKLGKSATHLAEYEDLDNHAQSIRSRMKGK

SEQ ID NO: 84397 - protein, 284 aa, Unknown
  Bacterial polypetide isolated from the Sargasso Sea
MAIKYLKKSPKTSSTDDLKTREIVQNLLNDLEKSREDGCKELTKKFDKYDGEIIVSKEKIEEIKKKLNLKTKDDIKFSYDRVRKFAEAQLKNYGQDFEVELSKGLYAGQKLIPVNTAGCYVPGGRYAHIASAVMSVTTAKVAGVKNIIACSPPKKDVGAHPAIVYTADLCGADVILNLGGVPAIAAMTYGMFGNSPADILVGPGNQFVAEAKRILFGKVGIDLFAGPTEIAVIADETADPEIVAVDLVGQAEHGYNSPAWLFTTSKKVADEVIKRMPELIANLP

SEQ ID NO: 84398 - protein, 150 aa, Unknown
  Bacterial polypetide isolated from the Sargasso Sea
KIEITKQLKEIPRASVARRSLINNGILMYISSDAKITSVVNKIAPEHLELNIKNYKSLVPKIKNSGSICLGRYAVMAMTDYNVGSNHVLPTNGSAKYSSGISVNEFYKRISYINLSKKGIESLGPSVITLANYEGLVGHAQSVVKRIRRK

SEQ ID NO: 84399 - protein, 252 aa, Unknown
  Bacterial polypetide isolated from the Sargasso Sea
TQPGVVLGHKNIPVQSVGCYVPAGKFPMVASAHMSVVTASVAGVPRIIATTPPYQGKPNAAVVTAMKMGGAHEIYVLGGMQGVGAMAIGTETIEPVDMIVGPGNAYVAEAKRQLFGKVGIDLFAGPTETMIICDDTVDAEICATDLLGQAEHGYNSPAIMITNSRDLATETIKEIDRLLKILPTKDTAGVSWKDYGEIILCESYDEMLMKANEIASEHVQVMTDRDEWFLKNMTSYGALFLGARTNVANEIK

SEQ ID NO: 84400 - protein, 192 aa, Unknown
  Bacterial polypetide isolated from the Sargasso Sea
TVVCDKFSNPEWVASDLIGQAEHDILAQCILISKDKNLLEKVKIEINKQLKEIPRASVARRSLINNGILMYISSDTKIISVVNKIAPEHLELNIKNYKQLVPNIKNSGSICLGKYAVMAMTDYNVGSNHVLPTNGSAKYSSGISVNEFYKRISYVNLSKKGIESLGPSVITLANYEGLVGHAQSVVKRIRRK

SEQ ID NO: 84401 - protein, 226 aa, Unknown
  Bacterial polypetide isolated from the Sargasso Sea
RQLYGKVGIDLFAGPTETMVIADETVDGEICATDLLGQAEHGYNSPAVMITNSRKLAEETFKEIDRILEILPTKETASISWRDYGEIILCDTYEEMLSKANEVASEHVQVMTKKDDWFLENMTSYGALFLGARTNVANGDKVIGTNHTLPTKKAGRYTGGLWVGKFIKTHTYQKITTDEAATLIGEYGSRLSHLEGFIGHAEQCNVRVRRYGKKNVGYGKPAGEKI

SEQ ID NO: 84402 - protein, 131 aa, Unknown
  Bacterial polypetide isolated from the Sargasso Sea
SIKKIKKDLSKKKIIEKSLNNNGIIALVDNIELASEIINFVAPEHLHIHISNNKKLLSNINNAGGIFLGEYSVEAFGDYIVGTNHVLPTSGAAKFSSGLGVLDFMKRTSVVDMNKKSFNALSEDTKKMSGL

SEQ ID NO: 84403 - protein, 153 aa, Unknown
  Bacterial polypetide isolated from the Sargasso Sea
VPELIADLPELPRENSEAAWRDYGEVILCDTDEEIAKVSDEYAPEHLEVQTKNLKWFHDRLKNYGSLFVGEETTVAYGDKCSGTNHILPTKGAAKYTGGLFVGKFIKTLSFQRMTKASTKEVGAACARISRYEGMEAHARTGDVRLRKYGFSN

SEQ ID NO: 84404 - protein, 315 aa, Unknown
  Bacterial polypetide isolated from the Sargasso Sea
DINYVDKLKNKIHYKNVVIDSVGLYVPSNLPSTALMVGVPAKIAGVKKIVLANPRHNGKLNPAVMYVCKKLGIKNILSIGGAQAIASMAYIYKTSKIFGPGNHFVAKAKQLVFGNVGIEGAIMGPSEVTVVADSKTDINQAITSIAAQQEHGLNSQSILISKDKKFIKIFKERIFKEIKSFPRKKIIRQGLINNGLIIYAKKESDIIEAINIISPEHLEFLNKDYNKYIHKIKNAGCIALNKYSPVAASDYVVGVNHTLGVMGSSKFASGLNLSDYYKKISVFSLTKKGIEVIGKKAITLAEYEGLKFHAQSIKS

SEQ ID NO: 84405 - protein, 165 aa, Unknown
  Bacterial polypetide isolated from the Sargasso Sea
TSKELAEKVMKRVPELIAELPEVPRTSAEAAWRDYGEVILCDTDEEIVKISDEYAPEHLEVQTENLEWFHERLTNYGSLFVGEETTVAYGDKCSGTNHILPTKGAGRYTGGLFVGKFIKTLSFQRMTKESTKLVGAAAARISRYEGMEAHARTGDVRLRKYGFSN

SEQ ID NO: 84406 - protein, 281 aa, Unknown
  Bacterial polypetide isolated from the Sargasso Sea
MSIKYLKKSPKTSSTDDLKTREIVQNLLNDLEKSREDGCKELTKKFDKYDGEIIVSKEKIEEIKKSLDQKTKDDIKFSYDRVRKFAEAQLKNYGQDFEVELSKGLYAGQKLIPVNTAGCYVPGGRYAHIASAVMSVTTAKVAGVKNIIACSPPKESVGAHPAIVYTADLCGADVILNLGGVPAIAAMTYGMFGNSPADILVGPGNQFVAEAKRILFGKVGIDLFAGPTEIAVIADETADPEIVAVDLVGQAEHGYNSPAWLFTTSKKVADEVIKRMPELIA

SEQ ID NO: 84407 - protein, 301 aa, Unknown
  Bacterial polypetide isolated from the Sargasso Sea
MTIKYLKKASKTASTDDTKTKEIVQNLLKELENSKEEGCKELTKKFDKYDGEIIVSKEKIEDIKKKLDQKTKDDIRFSYDRVKKFAEAQLKNYGQDFEVELSNGLYAGQKLVPVNTAGCYIPGGRYAHIASAVMSVTTAKVAGVKNIIACSPPKENIGAHPSIIYTADLCGADVILNLGGVPAIAAMTYGLFGNAPADILVGPGNQFVAEAKRILFGKVGIDLFAGPTEIGIIADETADPEIVAVDLVGQAEHGYNSPAWLYTTSQKLADAVLKRVPELIDELPEVPRLSAEAAWRDYVKY

SEQ ID NO: 84408 - protein, 235 aa, Unknown
  Bacterial polypetide isolated from the Sargasso Sea
FAQEQVRSFAVAQLKTLNEMEIETQPGVILGHKNIPVQAVGCYVPAGKFPMVASAHMSVVTASVAAVPRIIATTPPFEGKPNPAVVTAMKMGGAHEIYVLGGMQGVGAMAIGTETIKAVDMLVGPGNAYVAEAKRQLFGKVGIDLFAGPTETMVICDDTVDAEICATDLLGQAEHGYNSPAIMITNSKKLAQETLKEIDRLLEILPTKDTASVSWREYGEVIYCETYEEMLLKAN

SEQ ID NO: 84409 - protein, 160 aa, Unknown
  Bacterial polypetide isolated from the Sargasso Sea
ISKNKELIDKVQKEIKIQLQSLPRRKIASGSLKKNGLLIFANSDKKISNIINIIAPEHLELSVDKYKSILKNVKNAGSICTGKYSAMAVTDYCAGSNHTLPTHSSAKFFSGLSVFDFFKRISYINLSKKGIETIGEKVINLATYEGLDGHAKSVKLRIGE

SEQ ID NO: 84410 - protein, 171 aa, Unknown
  Bacterial polypetide isolated from the Sargasso Sea
HDNNAQSILITDSELFLNKVQHEIIRLSSKLSKKKIIETSLKNNGLIILVDDLNESHEIINYIAPEHLHLHTKEQNNLLSNVKNAGCIFLGELASEAFGDYIVGTNHILPTSGAAKFSSGLSVTDYMKRSSVVQMNQNSYNNLHKDAEQMAEVEGLDAHKLSVKIRQTSEN

SEQ ID NO: 84411 - protein, 276 aa, Unknown
  Bacterial polypetide isolated from the Sargasso Sea
DIKKNKFKALIKYEKKFSNNKKINPTQKEINQSIKTLDPKVKKAIDFAYSRIFKFHSLQKTKNFKFVDYYKNKIEYKHVPIQKIGVYVPSNLPSTLLMNVVPAKIAGVKRIVLANPTLNGKLNSAVMYAAKKCGVHEIITCGGAQAIGSLAYIQKVNKIIGPGNDYVAKAKQLVFGNVGTESMIAGPSEICVVADKKTNLNDITTSLLGQSEHDENSQSILVTKYKDLIYKVQNDIKININKLPRKKIVSKSLKNHGLIILCQNDKQIIDVINEIA

SEQ ID NO: 84412 - protein, 271 aa, Unknown
  Bacterial polypetide isolated from the Sargasso Sea
RCFPPDSNGKIDPMTITVAQNCGAEIYKMGGAQAIGALAYGTKSLPKVDKIVGPGGKFVSIAKAIVSEETSIDMIAGPTELGIIADTSSNPELIAYDLISQAEHSNDTTCFVITTSRNLAKQIQKSLEKIIPDVERNSIVKQSITKNGFIAICKNQNEIIELANKIAPEHIELMVKNGRALSKKITGPGLVLIGSNTPSSASDYLLGTNHILPTSGFGRVRGGLSVLDFLKLQSIVQTKKSDLSNIAKKLKTLTDAEGLPNHYKAVERRLK

SEQ ID NO: 84413 - protein, 168 aa, Unknown
  Bacterial polypetide isolated from the Sargasso Sea
MFTTSKKVAEDVIKRMPELIAELPEVPRMSAEAAWKDYGEVILCDTDEEMASISDEYAPEHLEVQTKNLKWFHDRLKNYGSLFIGEETTVAYGDKCSGTNHILPTKGAGRYTGGLFVGKFIKTLSFQRMTKESTKEVGAAAARISRYEGMEAHARTGDVRLRKYGFSN

SEQ ID NO: 84414 - protein, 294 aa, Unknown
  Bacterial polypetide isolated from the Sargasso Sea
LLNELEKSREDGCKELTQKFDNYDGEIIVSKEKIEEINKSLKEKTKDDIKFSYDRVKKFAEAQLKNYGQDFEVELSKGLYAGQKLIPINTAGCYIPGGRYSHIASAVMSVTTAKVAGVKNIIACSPPKEGVGASPSVIYTANLCGADTILNLGGVPAIAAMTYGMFGNEPADMLVGPGNQFVAEAKRILFGKVGIDLFAGPTEIAIIADETADPEIVAVDLVGQAEHGYNSPAWLYTTSKKLADEVMNRVPQLISELPELPKTSAEAAWRDYGEVILCENDEEMAKISDEYAPE

SEQ ID NO: 84415 - protein, 103 aa, Unknown
  Bacterial polypetide isolated from the Sargasso Sea
EHLHLQCKYNKQIIKKVYNSGAIFEGKYSAEALGDYIIGTNHILPTNRTSRFSSGLNVLDFMTRKSIINVSKKGFNLLSLHTKNMAEVEGLDAHKLSIQIREK

SEQ ID NO: 84416 - protein, 294 aa, Unknown
  Bacterial polypetide isolated from the Sargasso Sea
TLSKKFDHFSPPNFKLSEDEISQLMSEISDEDMDDIKFAQKQVRSFAEAQLKTINELEVEIQPGVILGHKNIPVQAVGCYVPAGKFPMVASAHMSVVTASVAGVPRIVATTPPFQGKPNPAVVTAMKLGGAHEIYVLGGMQGVGAMAIGTETIKPVDMLVGPGNAFVAEAKRQLFGKVGIDLFAGPTETMIIADDSVDGEICATDLLGQAEHGYNSPAVMITNSRKLAEETKNEIKRILEILPTKDTAGVSWRDYGEIILCDTYKEMLDKANETASEHVQVMTDRDDWFLNNMT

SEQ ID NO: 84417 - protein, 296 aa, Unknown
  Bacterial polypetide isolated from the Sargasso Sea
DIEKTKEEGCKLLSKKFDKYEGDVVISKEKIEEIKKNLDQKTKDDIQFSHERVRKFAEAQLKNYGQDFEVELSEGLYAGQKLIPVNTAGCYVPAGRYAHIASAVMSVTTAKVAGVKNIIVCSSPKPGVGVHPSIVYTSDLCGADVIMNLGGVQAIAAMTNGLFGNAPADILVGPGNQFVAEAKRLLFGKVGIDLFAGPTEIAVIADETADAELVAFDLVGQAEHGYNSPAWLFTTSKKLADYVMKRVPELIADLPELPRENSEAAWRDYGEVILCDTDEEIAKVSDEYAPRTLRST

SEQ ID NO: 84418 - protein, 200 aa, Unknown
  Bacterial polypetide isolated from the Sargasso Sea
DLIAGPSEIIVLANKDNNPSWVAADLMAQAEHDINAQSILITDNLKFSKKVLEEINNLVKKTSKKNIIKQSLKKNGLIILVNRISESIDIINYIAPEHLHLQIKSYKKLLPKINNAGGIFLGEYSAEAFGDYIVGTNHILPTSGSAKFSSGLGVLDFMKRNSIVEMNSKSYNTLKKDTENMANIEGLEAHKLSVKIRQNK

SEQ ID NO: 84419 - protein, 160 aa, Unknown
  Bacterial polypetide isolated from the Sargasso Sea
MIKEINCNKKNYLNILTKFLDHRRSGKKSENKIISKILNDIKKNKIKALIKYEKKFSKNTQIKPSINEINNAIKFLDPNIKKAIDFAYKRILNFHNTQKTKNIFYKDNLNNKIEYKYVPIQSVGVYVPANLPSTLLMNAIPAKIAGVKKIVLANPKNNGK

SEQ ID NO: 84420 - protein, 289 aa, Unknown
  Bacterial polypetide isolated from the Sargasso Sea
VVAYGEEIKVGDSAKNQAVTNAANTLYAIKRLIGRKHSDDVVKKDSDMVPYKIISAENGDAWVEAEGKKLAPQQVSAEILKKMKKTAEDYLGQEVKEAVITVPAYFNDSQRQATKDAGKIAGLEVKRIINEPTAAALAYGLDKGKGDQKIAVYDLGGGTFDVSIIEIAELDGEHQFEVLSTNGDTFLGGEDFDIALIDYLADEFKKESGLDLHNDSAALQRLKEAAEKAKIELSSNQQSEINLPYITADSSGAKHFVHKLTRAKLESLVEGLVDRTIKPTETALKDAGL

SEQ ID NO: 84421 - protein, 176 aa, Unknown
  Bacterial polypetide isolated from the Sargasso Sea
HGYNSPAWLFTTSKKLAEDVIKRVPELIADLPELPKQSAGDAWRDFGEVILCDTDEEMAKISDEYAPEHLEVQTKNLKWFHERLKNYGSLFIGEETTVAYGDKCSGTNHILPTKGAGRYTGGLFVGKFIKTLSFQRMTKESTKEVGAAAARISRYEGMEAHARTGDVRLRKYGFSN

SEQ ID NO: 84422 - protein, 243 aa, Unknown
  Bacterial polypetide isolated from the Sargasso Sea
MAKVIGIDLGTTNSCVSVMEGDQAKVIENSEGKRTTPSVVAYGEEIKVGDSAKNQAVTNAENTLYAIKRLIGRKHSDDVVKKDSGMVAYKIISAENGDAWVEAEGKKLAPQQVSAEILKKMKKTAEDYLGQEVKEAVITVPAYFNDSQRQATKDAGKIAGLEVKRIINEPTAAALAYGLDKGKGDQKIAVYDLGGGTFDVSIIEIAEVDGEHQFEVLSTNGDTFLGGEDFDIALIEYLADEFK

SEQ ID NO: 84423 - protein, 78 aa, Unknown
  Bacterial polypetide isolated from the Sargasso Sea
VEEIAKVSDDYAPEHLEVQTKNLQWYHDRLKNYGSLFIGEETTVAYGDKCSGTNHIFPTKGAGKYTGGLFVGKFIKTL

SEQ ID NO: 84424 - protein, 246 aa, Unknown
  Bacterial polypetide isolated from the Sargasso Sea
MNYKNSLSLKKLSTFLERRRFAENKDIGIVQNILKDIKKNKVKALKKYELRFGNNTQINISKDQIKKSIKNLDPKVKKAIDFAYKRIFNFHLKQKKTIGDIFYRDSYGNKLQYKNVPISSVGFYVPGNLPSTLLMNTIPAKIAKVKRLVLATPKINGMLNPAVLYAAKKVGINEIYSMGGAQAIASLAFIQKVNKIVGPGNKFVAEAKKQLSTNLVGTESMYCGASEICVLADKYTDVNQSCYLSS

SEQ ID NO: 84425 - protein, 202 aa, Unknown
  Bacterial polypetide isolated from the Sargasso Sea
MKILNSKSKNFDKLLDNLLLQRKKKIQSDSVSVTNIIKDVKKHGDKALLKYEKRFNQNNIIIPSSKQINKSINSLDKKVKKAIDMAYNRIYKFHSLQKFKNITYTDKLKNKLEYKYVPLESVAIYVPGSTASYPSSVLMNAVPAIVAGVKRIVMINPGYKGKQNPAVLYAAKKCKIKEIYSIGGPSAIAAVSYGTKKIKKVN

SEQ ID NO: 84426 - protein, 292 aa, Unknown
  Bacterial polypetide isolated from the Sargasso Sea
MAITYLKKSPKTSSTDDTKTREIVENILKDIETSKEEGCMELSKKFDKYEGDVIVSKEKIEEIKKNLDQKTKDDIQFSHERVRKFAEAQLKNYGQDFEVELSDGLFAGQKLIPVNTAGCYVPAGRYAHIASAVMSVTTAKVAGVKNILVCSSPKPGVGVHPSIVYTADLCGADVIMNLGGVQAIGAMTNGLFGNAPADILVGPGNQFVAEAKRILFGKVGIDLFAGPTEIAVIADETADPEMVAYDLVGQAEHGYNSPAWLFTKSKKVADYVMQRVPELIADLPDLPRENSG

SEQ ID NO: 84427 - protein, 265 aa, Unknown
  Bacterial polypetide isolated from the Sargasso Sea
TRDIVQNLLNDLEKSKEEGCKELTKKFDKYEGEIIVSKDKIEEIKKNLDQKTKDDIKFSYERVRKFAEAQLKNYGNDFEVELSDGLYAGQKLIPVNTAGCYIPGGRYAHIASAVMSVTTAKVAGVKNVIACSPPKAEVGAHPTIIYTADLCGADVILNLGGVPAIAAMTYGLFGNAPADILVGPGNQFVAEAKRILFGRVGIDLFAGPTEIGIIADETADPEIVAVDLVGQAEHGYNSPCWLYTTSKELAEKVMKRVPELISELP

SEQ ID NO: 84428 - protein, 277 aa, Unknown
  Bacterial polypetide isolated from the Sargasso Sea
MAITYIKKSPKTSSTDDSKTTSIVQDLLKDIEKTKEQGCINLTKKFDKYDGEIILSKERIDEIKKNLNQKTKDDIQFSYDRVRKFAEAQLKNYGQDFEVELSKGLFAGQKLIPVNTAGCYIPGGRYAHIASAVMSVTTAKVAGVKNIIACSPPKKGIGAHPTIVYTADLCGADVILNLGGVPAIAAMTNGLFKNPPADIIVGPGNQFVAEAKRILYGKVGIDLFAGPTEIGIIADAKADPEIVAVDLVGQAEHGYNSPCWLYTTSKDLAEKVLKRVP

SEQ ID NO: 84429 - protein, 208 aa, Unknown
  Bacterial polypetide isolated from the Sargasso Sea
MKILNSTNNNFNSSLNKLLLQRKKKVQSSSISVTNIVKDVKKNGDKALLKYEKKFNQNKIIVPSPKQISASIKSLNQKVKKAIDIAYNRIYKFHSLQKFKNISYIDKFKNKLEYKYLPLDSVAIYVPGSSASYPSSVLMNAIPAIVAGVKRLIMINPGFKGKQNPAVLYAARKCKIKEIYSIGGPSAVAAAAYGTRKIKKVDKIIGPG

SEQ ID NO: 84430 - protein, 154 aa, Unknown
  Bacterial polypetide isolated from the Sargasso Sea
RVPELIADLPDLPRENSSAAWRDYGEVILCDTDEEMAKISDEYAPEHLEIQTKNLKWFHDRLKNYGSLFIGEETTVAYGDKCSGTNHILPTKGAGKYTGGLFVGKFIKTLSFQRMTKESTKEVGAACARISRYEGMEAHARTGDVRLRKYGFSN

SEQ ID NO: 84431 - protein, 246 aa, Unknown
  Bacterial polypetide isolated from the Sargasso Sea
GTKKIKAVDMLVGPCNAYVAEAKRQLYGRVGIDLFAGPTETLIIADETVDGEICATDLLGQAEHGYNSPCILVTNSEKLANETIIQVDKLLKVLPTKETAGQSWKNFGEVILCADFDEMLEVSNQISSEHVQVMTKNDDFFLNKMRNYGALFLGPRTNVSNGDKVIGTNHTLPTKKAGRYTGGLWVGKFIKTHTYQKILTDEAAVKVAEYCSRLCILEGFIGHAEQANIRIRRYGGKDIPYGEASD

SEQ ID NO: 84432 - protein, 123 aa, Unknown
  Bacterial polypetide isolated from the Sargasso Sea
MYVNSDKKIIKIVNKIAPEHLELNIKNYKSYVPKIRNAGSICLGKYAVMAMTDYNVGSNHVLPTNGSAKYSSGISVNEFYKRISYINLSKKGIESLGPSVITLANYEGLVGHAQSVIKRIRRK

SEQ ID NO: 84433 - protein, 286 aa, Unknown
  Bacterial polypetide isolated from the Sargasso Sea
MNINYLKKAKKTSSTDDTKTREIVQNLLSELEKTKEEGCKKLTKKFDKYEGEIVISKEKIEEIKKDIDQKTKDDIKFSYDRVRKFAEAQLKNYGKNFEVELSDGLFAGQTLIPVNTAGCYVPAGRYAHIASAVMSITTAKVAGVKNIIACSSPKPNVGAHPKIVYTADLCGADVILNLGGVQAIAAMAFGFFGNERADILVGPGNQFVAEAKRILFGKVGIDLFAGPTEIAIIADKTADPEIVAYDLVGQAEHGYNSPAWLYTTSKDLADKVMKRVPELIKDLPEL

SEQ ID NO: 84434 - protein, 128 aa, Unknown
  Bacterial polypetide isolated from the Sargasso Sea
VILCDTDEEMAKISDEYAPEHLEVQTKNLKWFHDRLKNYGSLFIGEETTVAYGDKCSGTNHILPTKGAGRYTGGLFVGKFIKTLSFQRMTKESTKEVGAAPARISRYEGMEAHARTGDVRLRKYGYSN

SEQ ID NO: 84435 - protein, 177 aa, Unknown
  Bacterial polypetide isolated from the Sargasso Sea
MNILNSKNKNFDKLLEDLLLQRKKKIQSNSVSVTNIIKDVKKNGDKALLKYEKKFNQNNVIIPSSKQIKKSINSLDKKVKKAIDTAFSRIYKFHSLQKFKNISYIDKLKNKLEYKYVPLESVAIYVPGSTASYPSSVLMNAIPAIVAGVKRIVMINPGHKGKTKSSCTIRCKKMQNK

SEQ ID NO: 84436 - protein, 254 aa, Unknown
  Bacterial polypetide isolated from the Sargasso Sea
MAITYLKKSPKTSSTDDNKTTGIVQDLLKKIETTKEQGCIDLTRKFDKYDGDIIVSKDKIEEIKKTLDQKTKDDIQFSFDRVRKFAEAQLKNYGQDFEVELSDGLYAGQKLVPVNTAGCYIPGGRYAHIASAVMSVTTAKVAGVKNIIACSPPKEGVGAHPTIVYTADLCGADVILNLGGVPAIAAMTNGLFKNPPADIIVGPGNQFVAEAKRILYGKVGIDLFAGPTEIGIIADAKADPEIVAVDLVGQAEHG

SEQ ID NO: 84437 - protein, 184 aa, Unknown
  Bacterial polypetide isolated from the Sargasso Sea
MIKILNSKSKDFKKNLNYYLSLRRRYSESKVNIVRKIVKDVRKYKDKSIIKYEKKFNNIKFLSKKNFYFSNTEIKKNITKLDNKVKNSIDLAYKRISSFHKNQKFKGFKIKDSYNNVFSYRSKPISKVGIYVPGGRASYPSSVMMNSIPAIIAGVKEIYMTVPSLHGQINPGVLYAAKKCKIKK

SEQ ID NO: 84438 - protein, 277 aa, Unknown
  Bacterial polypetide isolated from the Sargasso Sea
MAVKYIKKASKTPETDDHKTQAAVQDILNDIAKRKEEALRELNKKFDKYEGEVIVSKEKIEEAIKKVDQKTKDDVKFAHDRIKKFAEHQLKSMNNGFEVELSKGLFAGQRLIPVDTAGCYIPGGRYAHISSAVMAITPAKVAGVKNIICASPPKDKDGANPGIIFAANHCGADVIMNLGGVAAIGSLTHGCFNNPPVDFLVGAGNQYVAEAKRIVYGKVGIDQFAGPTEIAIIADKSADKEIVAVDLVGQMEHGYNSPAWLFTTDKELADFTMKRVP

SEQ ID NO: 84439 - protein, 129 aa, Unknown
  Bacterial polypetide isolated from the Sargasso Sea
EIILCDTDEEIAKVSDDYAPEHLEVQTKNLQWYHDRLKNYGSLFIGEETTVAYGDKCSGTNHILPTKGAGKYTGGLFVGKFIKTLSFQRMSKEATKEVGAACARISRYEGMEAHARTGDVRLRKYGFSN

SEQ ID NO: 84440 - protein, 267 aa, Unknown
  Bacterial polypetide isolated from the Sargasso Sea
MGRIVGIDLGTTNSVVAVLEAGRPHVIANAEGGRTTPSVVGYSKDQELLVGQLARRQLVLSPRNTFSNLKRFVGRDWEELEDSSLAVPYTVRANDRGQVRVPCPVTEREYAPEELVASIIRKLVDDASTYLGETVEAAVVTVPAYFNDAQRQATRDAGRLAGISVERILNEPTAAALAYGFDRSAVRRVLVFDLGGGTFDVSLLRIANGVFDVKATNGDTQLGGNDFDQRIVDWIADAFQAEHGVDLRRDRQALQRLTEAAEKAKQE

SEQ ID NO: 84441 - protein, 257 aa, Unknown
  Bacterial polypetide isolated from the Sargasso Sea
MAIKYLKKSPKTSSTDDSKTREIVENILKDIEKKKEEGCKELGKKFDKYDGEIIISNEKIEEIKKNLDQKTKDDIQFSHERVRKFAEAQLKNYGQDFEVELSDGLYAGQKLIPVNTAGCYVPAGRYAHIASAVMSVTTAKVAGVKNIIVCSSPKPNIGVHPSIVYTADLCGADVIMNLGGVQAIAAMTNGLFGNAPADILVGPGNQFVAEAKRILFGKVGIDLFAGPTEIAIIADETADPEIVAYDLVGQAEHGYNS

SEQ ID NO: 84442 - protein, 162 aa, Unknown
  Bacterial polypetide isolated from the Sargasso Sea
MFRWNEENQQAQQAVLTRPAVTASKEVEAICIDILNAVKTEGDAALLKMAKEFDKRETPRLLVPVEEINQAEQLLSNELKAAIETAYANVKRFHQAQLPKDIKLTTQPGVLCELKYQAIEAVGIYVPGGSAPLPSSVNMQGVLAQLSGAQTVVLTTPVKGRR

SEQ ID NO: 84443 - protein, 130 aa, Unknown
  Bacterial polypetide isolated from the Sargasso Sea
GEVILCETDEEMATISDEYAPEHLEVQTKNLKWFHSRLKNYGSLFIGEETTVAYGDKCSGTNHILPTKGAGKYTGGLFVGKFIKTLSFQRMTKESTKEVGSAAARISRYEGMEAHARTGDVRLRKYGFSN

SEQ ID NO: 84444 - protein, 316 aa, Unknown
  Bacterial polypetide isolated from the Sargasso Sea
MTIKYLKKATKTASTDDTKTKEIVQNLLKELEKSKEEGCKELTKKFDKYDGEIIVSKEKIEDIKKKLDQKTKDDIRFSYDRVKKFAEAQLKNYGQDFEVELSNGLYAGQKLVPVNTAGCYIPGGRYAHIASAVMSVTTAKVAGVKNIIACSPPKENIGAHPSIIYTADLCGADVILNLGGVPAIAAMTYGLFGNAPADILVGPGNQFVAEAKRILFGKVGIDLFAGPTEIGIIADETADPEIVAVDLVGQAEHGYNSPAWLYTTSQKLADAVMKRVPELIEELPEVPRLSAEAAWRDYGEVILCDTNEEMVKVSDD

SEQ ID NO: 84445 - protein, 172 aa, Unknown
  Bacterial polypetide isolated from the Sargasso Sea
AEHDNLAQCILISKDENLIKKVKIEISNQLKDISRSSIVKKSLSKNGILIYVNSDRKIIEMINKIAPEHLELNIKNYKSYVPKIRNAGSICLGKYAVMAMTDYNIGSNHVLPTNGSAKYSSGIGVNEFYKRISYINISKRGIENLGPSAITLANYEGLTGHALSVKKRIRRK

SEQ ID NO: 84446 - protein, 282 aa, Unknown
  Bacterial polypetide isolated from the Sargasso Sea
KTREIVEGILKYIEKTKENGCKELSKKFDKYEGDVIISKEKIEEIKKNLDQKTKDDVQFSHERVRKFAEAQLKNYGQDFEVELSDGLYAGQKLIPVNTAGCYVPAGRYAHIASAVMSVTTAKVAGVKNILVCSSPKPSVGVHPTIVYTADLCGANVIMNLGGVQAIAAMTYGLFGNAPADILIGPGNQFVAEAKRILFGKVGIDLFAGPTEIAIIADKNADAEIVAVDLVGQAEHGYNSPAWLFTKSKDLAEKVIKRVPELIADLPELPRNNAEAAWRDMAK

SEQ ID NO: 84447 - protein, 166 aa, Unknown
  Bacterial polypetide isolated from the Sargasso Sea
SQSIIISKDIKILKKIKKSIYINLKNIPRKKIAITSIKRNGLLINATNDQNIIDLINLIAPEHLELNINKPQKFLKKINNAGSICVGKYSAMAVTDYNAGTNHVLPTFGSARFSSGLNVGDFYKKISYITLSKKGIEVIGKKAITLAEYENLEGHAQSIKSRIRRN

SEQ ID NO: 84448 - protein, 285 aa, Unknown
  Bacterial polypetide isolated from the Sargasso Sea
HNLKGINVDIPKKQFVVITGVSGSGKSSLAFDTIYAEGQRRYVESLSSYARQFLERIEKPKVDKISGLSPAIALEQKISSSNPRSTVGTKTEIYDYIKILFSRFGKTYSPISGKEVKKNKVSEIIDDIKKQSVGDKLIILTKLDDINSGNIEQKIESLINQNYNRIFYENEIIKLNDIKFDRISKYNNLFLVIDRIVRGESDEFLSRVADSLETAIYEGKGKCLVNNLTKSKIKKYNTILEADGIKFTKPDTNFFSFNNPYGACTKCEGYGDIVGIDERLVISKY

SEQ ID NO: 84449 - protein, 332 aa, Unknown
  Bacterial polypetide isolated from the Sargasso Sea
MATKYIKKASKTPETDDHKTQAAVQDILNDIAKRKEAAIKELNKKFDKYDGEVIVSKEKIEEAIKKVDQKTKDDVKFAHERIRKFAEHQLKSMNNDFEVELSKGLFAGQRLIPVDTAGCYIPGGRYAHISSAVMAITPAKVAGVKTIICASPPKDKDGANPGIIFAANHCGADVIMNLGGVAAIGSMTHGCFKNPPVDFLVGAGNQYVAEAKRIVYGKVGIDQFAGPTEIAIIADKTADKEIVAVDLVGQMEHGYNSPAWLFTTDKELADFTMKRVPELINELPELAKVNATAAWKDYGEVILCDTNEEMAEVSDKYASEHLEVHAENLDWW

SEQ ID NO: 84450 - protein, 275 aa, Unknown
  Bacterial polypetide isolated from the Sargasso Sea
MAIQYLKKSPKTSSTDDSKTTGIVQDLLKDIESTKEQGCIDLTKKFDKYEGEIIVSKERIEEIKKNLDQKTKDDVQFSHERVRKFAEAQLKNYGQDFEVELSKGLYAGQKLVPVNTAGCYVPGGRYAHIASAVMSVTTAKVAGVKNIIACSPPKKGVGAHPTIVYTADLCGADVILNLGGVPAIAAMTNGLFKNPPADIIVGPGNQFVAEAKRILFGKVGIDLFAGPTEIGIIADEKADPEIVAVDLVGQAEHGYNSPCWLYTTSRELAEKVMKR

SEQ ID NO: 84451 - protein, 266 aa, Unknown
  Bacterial polypetide isolated from the Sargasso Sea
MAIEYLKKSPKTSSTDDTKTKGIVQDLLKDIEKTKEQGCIDLTKKFDKYDGEIVVTKEKIEEIKKTLDQKTKDDIQFSYERVRKFAEAQLKNYGQDFEVELSNGLYAGQKLVPVNTAGCYIPGGRYAHIASAVMSVTTAKVAGVKNIIACSPPKENIGAHPTIIYTANLCGADVFLNLGGVPAIAAMTNGLFQNPSADIIVGPGNQFVAEAKRILFGKVGIDLFAGPTEIGIIADAKADPEIVAVDLVGQAEHGYNSPCWVYTTSK

SEQ ID NO: 84452 - protein, 261 aa, Unknown
  Bacterial polypetide isolated from the Sargasso Sea
MTITYLKKSPKTSSTDDTKTTGIVQDLLKDLDNTKEQGCIDLTKKFDKYDGEIVVSKERIEEIKKSLDQKTKDDIQFSFDRVRKFAEAQLKNYGQDFEVELSDGLYAGQKLIPVNTAGCYIPGGRYAHIASAVMSVTTAKVAGVKNIVACSPPKEGVGAHPTIVYTADLCGADVILNLGGVPAIAAMTNGLFNNPPADIIVGPGNQFVAEAKRILFGKVGIDLFAGPTEIGIIADAKADPEIVAVDLVGQAEHGYNSPCWL

SEQ ID NO: 84453 - protein, 435 aa, Unknown
  Bacterial polypetide isolated from the Sargasso Sea
MSEVYLKKAKKTPETGTSETRKIVERMLSEIEIGKETIAKKYASDLDGFNGDIIVSQESIENASKMVPEKLKDDIKFAHERIKKFAEAQKQSISEFETELSPGLWAGQKLIPIQTAGCYVPGGRYAHVASAIMSITTARVAGVENIIACSAPKGEDGPNPAILYTMNYCGADKILALGGVQAIASMAFGLFTDLPAKILVGPGNRFVAEAKRTLFGKVGIDLFAGPTEIAIIADESADADIVAEDLVSQAEHGPDSPAWLISTSEKLANDVISIMDKKIQNLPETSKKAAELAWKDYGEIILCNSDEEAARVSDIYAAEHLEVHTSNNDWFSKRLKNYGSLFVGEETTVTFGDKCSGTNHILPTKGAAHYTGGLSVHKFMKIVTTQRMTREANKSVAQVAARISRLEGMEAHARSGDIRLKKYFPDENFDVSPVE

SEQ ID NO: 84454 - protein, 213 aa, Unknown
  Bacterial polypetide isolated from the Sargasso Sea
PRKTMFIADDTVDGELCATDLLGQAEHGYNSPAVLITNSKNLAESTLLEIERILQILPTKETASISWRDYGAVILCDSYEEMLDKANEIASEHVQVMTKKDDWFLENMKSYGALFLGPRTNVANGDKVIGTNHTLPTKKAGRYTGGLWVGKFIKTHTYQKVLTDEAATLIGEYGSRLSYLEGFLGHAEQCNIRLRRYGGRNIEYAKAAKKIKN

SEQ ID NO: 84455 - protein, 342 aa, Unknown
  Bacterial polypetide isolated from the Sargasso Sea
MRLPLPWLLCLTGGALALLLVGSLATGPMALSFGESLRALFAGQGSGIEAHKLLIVQEIRLPRTLLCIAVGGILGLCGAVMQGLFRNPLADPGIIGVSGGAALGAALAIVLLAPLGQQWQSLLGIGLLPLLAFLGGALTTTLVYLLGTREGGTSVTVMLLAGVAVTALSGAVIGLLTYLADDQMLRNLSLWQMGSLAAGKPVDVALALLTLVALLLLFLRDANPLNALLLGEGEARHLGIQVQSLKRRLILLTAAGVGVAVAVAGMIGFVGLVVPHLVRLLAGPNHVRLLPLSALLGAALLLGADMLARTLLAPAEMPVGIITALLGAPFFIWLLVKGRRTL

SEQ ID NO: 84456 - protein, 198 aa, Unknown
  Bacterial polypetide isolated from the Sargasso Sea
MKILDSKLRNFNKKLDDLLLRRKTKVQTSSVSVIKIINDVKKNGDKALLKYEKKFNQNRVIKPSFSQIKQSINSLDPKVKNAIDLAYSRIYKFHSLQKFKNISYIDKLKNKLEYKYLPIESVAIYVPGSSASYPSSVLMNAIPAIVAGVKRIIMINPGYKGKQNAAVLYAAKKCKIKEIYSIGGPSAIAAVAYGTKKN

SEQ ID NO: 84457 - protein, 308 aa, Unknown
  Bacterial polypetide isolated from the Sargasso Sea
MAINYLKKSPKTSSTDDTKTREIVENILKDIEKTKEEGCIELSKKFDKYEGEVVVTREKIEQIKKNLDPKTKDDIQFSHERVRKFAEAQLKNYGQDFEVELSDGLFAGQKLIPVNTAGCYVPAGRYAHIASAVMSVTTAKVAGVKNIIVCSSPKPGVGVHPAIVYTADLCGADVIMNLGGVQAIAAMTYGLFGNAPADMLVGPGNQFVAESKRILFGKVGIDLFAGPTEIAVIADETADPELVAFDLVGQAEHGYNSPAWLFTTSKSLAEYVMKRVPELIADLPDLPRENSGAAWRDYGEVILCDTDE

SEQ ID NO: 84458 - protein, 260 aa, Unknown
  Bacterial polypetide isolated from the Sargasso Sea
MAIEYLKKGLNEKQRIEDNDKVKKIVEETLSKIESEGDKHIRELSQKFDNYSPDSFRLNEDQINQLISEVSDDDKEDIKFAQKQVRTFAEAQLKTLNELEVETHPGVILGHKNIPVQAVGCYVPAGKFPMVASAHMSVVTASVAKVPRIVATTPPFKGKPNPAVVTAMKMGGAHEIYVLGGMQGVGAMAIGTETIKPVDMLVGPGNAFVAEAKRQLYGRVGIDLFAGPTETMVIADETVDGEICATDLLGQAEHGYNSPA

SEQ ID NO: 84459 - protein, 309 aa, Unknown
  Bacterial polypetide isolated from the Sargasso Sea
MAIKFLKKSPKTSSTDDLKTREIVQNLLNDLEKSREEGCKELTKKFDKYDGEIIVSKERIEEIKKKLDDKTKDDIKFSYDRVRKFAEAQLKNYGQDFEVELSNGLYAGQKLIPVNTAGCYVPGGRYAHIASAVMSVTTAKVAGVKNIIACSPPKEGIGAHPSIIYTADLCGADVILNLGGVPAIAAMTYGMFGNAPADILVGPGNQFVAEAKRILFGKVGIDLFAGPTEIAVIADETADPEIVAVDLVGQAEHGYNSPAWLYTTSKKLAEDVMKRVPELIAELPELPRTSAEAAWRDYGEVILCDTNEE

SEQ ID NO: 84460 - protein, 170 aa, Unknown
  Bacterial polypetide isolated from the Sargasso Sea
EHDINAQCILISKNKELIDKVQKELEIQLQSLPRRKIALGSLKKNGLLIFANSDKKISNIINIIAPEHLELSVDKYKSILKNVKNAGSICTGKYSAMAVTDYCAGSNHTLPTHSSAKFFSGLSVFDFFKRISYINLSKKGIETIGEKVINLATYEGLDGHAKSVKLRIGE

SEQ ID NO: 84461 - protein, 205 aa, Unknown
  Bacterial polypetide isolated from the Sargasso Sea
MVIADETVDGELCATDLLGQAEHGYDSPAILLTTSKKLADETLKEVKRLLTILPTAETAGASWRDYGEVILCDSYDEMLSVANDIASEHVQVMTDRDDWFLENMTSYGALFLGARTNVSNGDKVIGTNHTLPTKKAGRYTGGLWVGKFLKTHSYQRILTDEAATMIAEYGSRLCILEGFIGHAEQCNLRARRYGGKNISYGKAAE

SEQ ID NO: 84462 - protein, 104 aa, Unknown
  Bacterial polypetide isolated from the Sargasso Sea
HLELAIDNARDFLKYIVNAGAVFLGRNTPEALGDYVAGPSHVLPTSRSAKFSSGLSVFDFLKKISLVEFTKEGIEEIGNSAMTIADNEGLDGHSRSIEYRLTKK

SEQ ID NO: 84463 - protein, 372 aa, Unknown
  Bacterial polypetide isolated from the Sargasso Sea
KEKIEEAIKKVDQKTKDDVQFAHERIKKFAEHQLKSMNNNFEVELSKGLFAGQRLVPVDTAGCYIPGGRYAHISSATMAITPAKVAGVKTIICASPPKDKNGAHPGIIYAANLCGADVILNLGGIAAIGSMAYGCFGNPPVDFLVGAGNQYVSEAKRIVYGKVGIDQFAGPTEIAIIADKSADKEIVAVDLVGQLEHGYNSPGWLFTTDKSLADFTMKRVPELISELPELAKVNAEAAWKDYGEVILCDSNEDMAKVSDKYASEHLEVHAENLDWWLKRLRNYGSLFLGEETTVAYGDKCSGTNHILPTKGGGRYTGGLFVGKFIKTLTFQRMTKESTEVVGAAAARLGRAEGMEAHARTADIRLKKYGYLK

SEQ ID NO: 84464 - protein, 251 aa, Unknown
  Bacterial polypetide isolated from the Sargasso Sea
MKILMGKKATQDYLNKIRTNSYSSISSDGNGYFSKTYELEQYIGKIIELTKKKGDDFLVEISSKIDGVPFGGIKVQKNILDESVSQISNKEKKVILNTIERVKLFQSKTLSKSWFDEEKGYGEYVRPIESVGCYIPSGSAPLISTIIMTVVPAKIAGVKRIAVSSPTPGNQNPNKYLLATAKLCGVDEFYTYGGPQAITAMAYGTETVPRVDLICGPGNIFVMNAKKQVYGVVGVDGIFGPTETLIICDKS

SEQ ID NO: 84465 - protein, 270 aa, Unknown
  Bacterial polypetide isolated from the Sargasso Sea
MAITYLKKSPKTSSTDDNKTTGIVQDLLKNIETTKEQGCIDLTKKFDKYDGDIIVSKDKIEEIKKTLDQKTKDDIQFSFERVRKFAEAQLKNYGQDFEVELSDGLYAGQKLVPVNTAGCYIPGGRYAHIASAVMSVTTAKVAGVKNIIACSPPKEGVGAHPTIVYTADLCGADVILNLGGVPAIAAMTNGLFKNPPADIIVGPGNQFVAEAKRILYGKVGIDLFAGPTEIGIIADAKADPEIVAVDLVGQAEHGYNSPCWLYTTSKELAE

SEQ ID NO: 84466 - protein, 428 aa, Unknown
  Bacterial polypetide isolated from the Sargasso Sea
MATKYIKKASKTPETDDHKTQAAVQDILNDIAKRKEVAIKELNKKFDKYDGEVIVSKEKIEEAIKKVDQKTKDDVKFAHERIRKFAEHQLKSMNNDFEVELSKGLFAGQRLIPVDTAGCYIPGGRYAHISSAVMAITPAKVAGVKTIICASPPKDKDGANPGIIFAANHCGADVIMNLGGVAAIGSMTHGCFKNPPVDFLVGAGNQYVAEAKRIVYGKVGIDQFAGPTEIAIIADKTADKEIVAVDLVGQMEHGYNSPAWLFTTDKELADFTMKRVPELINELPELAKVNATAAWKDYGEVILCDTNEEMAEVSDKYASEHLEVHAEKLDWWLKRLRNYGSLFLGEETTVAYGDKCSGTNHILPTKGGGRYTGGLFVGKFIKTLTFQRMTKDATKVVGATAARLGRAEGMEAHARTADIRLRKYGFSN

SEQ ID NO: 84467 - protein, 278 aa, Unknown
  Bacterial polypetide isolated from the Sargasso Sea
MAINYLKKSPKTSSTDDTKTREIVENILKDIEKTKEEGCIELSKKFDKYEGEVVVTREKIEQIKKNLDPKTKDDIQFSHERVRKFAEAQLKNYGQDFEVELSDGLFAGQKLIPVNTAGCYVPAGRYAHIASAVMSVTTAKVAGVKNIIVCSSPKPGVGVHPAIVYTADLCGADVIMNLGGVQAIAAMTYGLFGNAPADMLVGPGNQFVAESKRILFGKVGIDLFAGPTEIAVIADETADPELVAFDLVGQAEHGYNSPAWLFTTSKSLAEYVMKECQN

SEQ ID NO: 84468 - protein, 150 aa, Unknown
  Bacterial polypetide isolated from the Sargasso Sea
MIADLPDLPRENSGAAWRDYGEVILCDTDEEMAKISDEYAPEHLEIQTKNLQWFHDRLKNYGSLFIGEETTVAYGDKCSGTNHILPTKGAGKYTGGLFVGKFIKTLSFQRMTKESTKEVGAACARISRYEGMEAHARTGDVRLRKYGFSN

SEQ ID NO: 84469 - protein, 115 aa, Unknown
  Bacterial polypetide isolated from the Sargasso Sea
SDEYAPEHLEIQTKNLQWFHDRLKNYGSLFIGEETTVAYGDKCSGTNHILPTKGAGKYTGGLFVGKFIKTLSFQRMTKESTKEVGAACARISRYEGMEAHARTGDVRLRKYGFQN

SEQ ID NO: 84470 - protein, 190 aa, Unknown
  Bacterial polypetide isolated from the Sargasso Sea
VIANNNSNPTWIAYDVLAQGEHDPNAKTYVLSKSKNILIKVKNELKRIMEETKFKNVDQSIKNNCNLILAKSQKEIYDISNFIAPEHLHIHEKFNKNILKNIKNAGSVFLGEKSPVALGDYTIGTNHVLPTDQTAKFSSGLGVEDYTKKTVFIDPRKKTLKKIANHTINLARQEGLEAHALSVEIRKIKS

SEQ ID NO: 84471 - protein, 167 aa, Unknown
  Bacterial polypetide isolated from the Sargasso Sea
MQNKRNLFYRGPSAIAAVSYGTKKIKKVHKIVGPGNTYVAAAKKEVFGIVGIEGMTAGPSEVTVVCDKFSNPEWVASDLIGQAEHDILAQCILISKDKNLLDKVKIEITKQLKEIPRASVARKSLINNGILMYISSEAKIISVVNKIAPEHLELNIKNYKSLVQKIK

SEQ ID NO: 84472 - protein, 204 aa, Unknown
  Bacterial polypetide isolated from the Sargasso Sea
MKILNSKIKNFDKLLDNLLLQRKKKIQSNSVSVTNIVKDVKKNGDKALLKYEKRFNQNNVIIPSSKQIKKSINSLDKKVKKAIDTAYNRIYKFHSLQKFKNISYKDKLKNKLEYKYLPLESVAIYVPGSTASYPSSVLMNAIPAIVAGVRRIVMINPGFKGKQNPAVLYAAKKCKIKEIYSIGGPSAIAAVSYGTKKIKKVHKI

SEQ ID NO: 84473 - protein, 264 aa, Unknown
  Bacterial polypetide isolated from the Sargasso Sea
MAITYLKKSPKTSSTDDTKTREIVENILKDIETSKEEGCKELSKKFDKYEGDVIVSKEKIEEIKKNLDQNTKDDIQFSHERVRKFAEAQLKNYGQDFEVELSDGLFAGQKLIPVNTAGCYVPAGRYAHIASAVMSVTTAKVAGVKNILVCSSPKPGVGVHPSIVYTADLCGADVIMNLGGVQAIAAMTNGLFGNAPADILVGPGNQFVAEAKRILFGKVGIDLFAGPTEIAVIADETADPEMVAYDLVGQAEHGYNSPAWLFTK

SEQ ID NO: 84474 - protein, 306 aa, Unknown
  Bacterial polypetide isolated from the Sargasso Sea
MINYLKQGKSDADVAEADAKVRATVEGILEAIAKRGDDAVKELALKFDGYAPDDFRLSEAEIAGALAKVSADDIDDIKFAQAQVRNFAEKQKECLKDLEVETLPGVILGHKNIPVNAVGCYVPGGKYPMVASAHMSVVTAKVAGVKRIMASAPPQDGEPHPAIVAAMHLAGADEILVLGGIQAVGAMALGTETIAGVDMLVGPGNMFVAEAKRQLFGRVGIDLFAGPTETLVIADESVDGEICAVDLLGQAEHGPTSPAALLTTSRKLAEDTMVEVERQLGILPTADIAREAWNEYGSVIVCDTVD

SEQ ID NO: 84475 - protein, 418 aa, Unknown
  Bacterial polypetide isolated from the Sargasso Sea
MIKIFNFKKNNNLRKLEGFLDKRRSGKNVDTSIVKKILAEVKKDKLIAVLKYEKKFSNNNKIYPSKLEIRKSIKSLDVNLKKAIDVAFDRILRFHKLQKNKNIKYIDKYKNKIEHIYVPLNSIGIYVPANLPSTLMMNAIPAMIAGVKNIVLANPRLSGSINPAVMYVAKKCKIKKIISVGGAQAIGSLAYIQKVDKIFGPGNDFVARAKREVFGDVGIEGMIAGPSEITVVADKLLDMSKVITSMIAQSEHGINSQSILVTKNEKLIKNINKKINIYLKKIPRKKIVIQSLKKNGLLILAKNNQQIVNIINRISPEHLELLSKDYKKLLSNIYNVGSIGLGIYSPVAASDYNVGTNHTLGTLGSARFASGLNLNDFYKKISRFTLSKKGIEVIGKQAITLAEYENLYAHALSIKSRL

SEQ ID NO: 84476 - protein, 640 aa, Unknown
  Bacterial polypetide isolated from the Sargasso Sea
MAKVIGIDLGTTNSCVSVMEGDQAKVIENSEGKRTTPSVVAYGEEIKVGDSAKNQAVTNAENTLYAIKRLIGRKHSDDVVKKDSGMVAYKIISADNGDAWVEAEGKKLAPQQVSAEILKKMKKTAEDYLGQEVKEAVITVPAYFNDSQRQATKDAGKIAGLEVKRIINEPTAAALAYGLDKGKGDQKIAVYDLGGGTFDVSIIEIAEVDGEHQFEVLSTNGDTFLGGEDFDIALIEYLADEFKKESGLDLHNDSAALQRLKEAAEKAKIELSSNQQSEINLPYITADTSGAKHFVHKLTRAKLESLVEELVNKTIEPTKIALKDAGLKTSDVDEVILVGGQTRMPLVQEKVKEFFGKEARKDVNPDEAVSVGAAIQGAVLAGDVTDVLLLDVTPLTLGIETMGGVMTPLIDKNTTIPTNKSQVFSTAEDNQTAVTVHVLQGERKQAAENKTLGQFNLTDIPASPRGMPQIEVSFDLDANGILNVSAKDKATGKEQSIEIKASSGLSDDEIEQMVKDAEAHAEDDKKFEELVQARNLGENLVHSCKKTLEEAKDKVEDAEKETIEKGIEELEEALKSDDKVLIDEKVKSLSEASAPLAQRLYEEESQKQADSSEDDDSKNDSEVVDADFEEVKEEKEQQNS

SEQ ID NO: 84477 - protein, 215 aa, Unknown
  Bacterial polypetide isolated from the Sargasso Sea
MINILDCKNLNYLDKLKAILNKRRFARKINTNIASQIVNEIKKNKQKALLKYEKKLSKNDKIKPTAKEIKKSIKTLDPKIKKAIDFAYSRILKFHSHQKVKNIKFVDNYNNKIEYKYYPIESVGIYVPANLPSTLLMNAIPAKKIAKVKRIVLASPRQNGKLNPAIMYAAKKCGISEIICAGGSQAIASLAYIQKVNKIVGPGNDYVARAKREVL

SEQ ID NO: 84478 - protein, 288 aa, Unknown
  Bacterial polypetide isolated from the Sargasso Sea
KIINAGSVFCGSFSPESFGDYASGSNHTLPTSGNAKTYSGLSVKDFGKTITFQYASPEGFLNLAPTVEKMAEAEKLDAHKNAVSIRENLALKEVESLNRIAFINRNTNETNVLLNLNLDGTGNYNINTGLNYFDHMLEQFSKHGKFDISLNCDGDTYIDEHHTIEDVAITLGEGFKQAIGDRLNLERYASSEDLVMDETRAQVSIDLTSRSYLKMKTPQLREFVGDFPTEMFKHFFISFVNTLGFTCHINVSGKNSHHIVEATFKSFTRALNTALKVTNESSSTKGLL

SEQ ID NO: 84479 - protein, 200 aa, Unknown
  Bacterial polypetide isolated from the Sargasso Sea
GIAGPSEILVLADKKTNINEISTSLVGQSEHGTESQCILVTKHKQIINKVQKSVLDNLKNIPRKKIAFKSLKRHGLIVLCKNDNQIIEVVNEVAPEHLELNVSNYKKYISRIVNAGSICIGKYTPMAVTDYNSGSQHTLPTLGSSKFSSGLNVNDFYKKISYVNLSKKGVAKIGRFAIHMSDFEELKAHSKSIRSRIRSK

SEQ ID NO: 84480 - protein, 203 aa, Unknown
  Bacterial polypetide isolated from the Sargasso Sea
MKILNSKSKNFDKLLENLLLQRKKKIQSDSVSVTNIIKDVKKNGDKALLKYEKRFNQNKIIIPSSIQIKKSINSLDKKVKKAIDTAYNRIYKFHSLQKFKNISYTDKLKNKLEYKYVPLESVAIYVPGSTASYPSSVLMNAIPAIVAGVKRIVMINPGYKGKQNPAVLYAAKKCKIKEIYSIGGPLLLQQYLMGLKKLRKFIK

SEQ ID NO: 84481 - protein, 932 aa, Unknown
  Bacterial polypetide isolated from the Sargasso Sea
MTFVSQKSVLIYIIILSFCNAQSYQNESAHGLGDYNVPFFKSGTYRPNVQPPDEFLGFTFGSRPVHHYEVIDYFNYLDNLLDNINLTEYGYTYEGKPLVYLMISSKKNMANIDNIKKSISLLADPRKIKDAKSAQNIIKNTPAIAWMAYSIHGDELSSTDAAVQLAYQLAAGTDQATKKLLKELVISIDPTENPDGRERYLQQLLQWRGEVVNSDANSLDHSGFWPYGRGNHYLFDLNRDWFATVHPETKGRVSAILDWNPQFLVDSHEMGSMDTYLFNPPRAPYNPYMPKTIFKWWDKIAKDQAAAFDAYGWSYYTGDWNEEVYPGYGSSWGIYIGLVGILYEQSGADGSIVKKEDGTITTYRETVHHQFISSMANLQTIANQKEELLSDYYKNRKKAVSTKNAGKAFIYSSELNKTRLNELAETIKRQKIEVYSNKNDIKLPKVINSSGKTITRKNIPAGSLIIPLDQPLNILIQNILSFDIRLDTKSMEKERKKLLKGQGSTLYDVTAWSLSHAYGTESYYTEVMPKISLEPFQAVYKKGQLKGKNPKYGWAIKSDDDQFYHLLGRLLENSVKVWCAKEAFNIEGEFFPSGSIVIRNNSNKTMKISFIKELASEYGINIFAINTALATDGPDLGSSNFTMLIEPRIAIISGPPTSTYSFGATWHLIDYKMKSRASLINAMNFAWQDLSKYNVLILPNGGRMKKTLGDNGINKLKDWIDDGGTLISYSNSAAFLSDSSVSISSVRLRRQSLNKLDTYAYDLSVLKEAENLSIDSIALWEGGNIYDSQEIIENDKNIEKIKEMDLLGRKFRPQGAILKVNMDKEHWLSVGCRDFIPVLYNTGNVFMAKKPVNVAARLADKKDIRLGGLLWPEAKSRIAESAWATQERRGKGQIILFATEPHFRGYFKASERVLLNAIYLGPGMGTSHSVSW

SEQ ID NO: 84482 - protein, 351 aa, Unknown
  Bacterial polypetide isolated from the Sargasso Sea
AHERIRKFAEHQLKSMNNDFEVELSKGLFAGQRLIPVDTAGCYIPGGRYAHISSAVMAITPAKVAGVKTIICASPPKDKEGANPGIIFAANHCGADVIMNLGGVAAIGSLTHGCFDNPPVDFLVGAGNQYVAEAKRIVYGKVGIDQFAGPTEIAIIADKTADKEIVAVDLVGQMEHGYNSPAWLFTTDKELTDFTMKRVPELINELPELAKVNATAAWKDYGEVILCDTNEEMAEVSDKYASEHLEVHAENLNWWLKRLRNYGSLFLGEETTVAYGDKCSGTNHILPTKGGGRYTGGLFVGKFIKTLTFQRMTKDATKVVGATAARLGRAEGMEAHARTADIRLRKYGFSN

SEQ ID NO: 84483 - protein, 342 aa, Unknown
  Bacterial polypetide isolated from the Sargasso Sea
SKKFDKYEGEVVVTREKIEQIKKNLDPKTKDDIQFSHERVRKFAEAQLKNYGQDFEVELSDGLFAGQKLIPVNTAGCYVPAGRYAHIASAVMSVTTAKVAGVKNIIVCSSPKPGVGVHPAIVYTADLCGADVIMNLGGVQAIAAMTYGLFGNAPADMLVGPGNQFVAESKRILFGKVGIDLFAGPTEIAVIADETADPELVAFDLVGQAEHGYNSPAWLFTTSKSLAEYVMKRVPELIADLPDLPRENSGAAWRDYGEVILCDTDEEMAKISDEYAPEHLEIQTKNLQWFHDRLKNYGSLFIGEETTVAYGDKCSGTNHILPTKGAGKYTGGLFVGKFIKTL

SEQ ID NO: 84484 - protein, 364 aa, Unknown
  Bacterial polypetide isolated from the Sargasso Sea
DEGIKDISRKFDNYEGDVIVSKEKIEEVIKSLDQKVKDDVQFSYDRVRSFAEHQLKHLNNDFEVELSPGLFAGQKLIPVNSVGCYVPGGRYNNIASAVMSITTAKVAGVKNVIAASPPKDENGANPIIIYTANLCGADVIMNIGGIGAIGAFAYGCFGNPEVDMIVGPGNQYVAEAKRILYGKVGIDLFAGPTEIGIIADHTADKEMIAVDLVGQAEHGPNSPAWLYSTDQKLCDYVIQRVPELIAALPETSKNNADAAWRDYGEVILCDTNEELCEISDQYAPEHLEVQAENLDWWLEKLKNYGSLFLGEETTVAYRDKCSGTNHILPTKGAAKYTGGLFVGKFIKTVTFQRMSKESNKEVGA

SEQ ID NO: 84485 - protein, 173 aa, Unknown
  Bacterial polypetide isolated from the Sargasso Sea
AQAEHDSNAQSILITDNKEFAKKVINSIKELSKKTLKKKIIEQSLKNNGLIILVNKIENCEDLINFIAPEHLHIQIKSYKKLFSKVNNAGAIFLGEYSCEAFGDYIVGTNHILPTSGAAKFSSGLGVLDFMKRNSVVKINSKSYNFLKEDTENMANIEGLDAHKLSVKIRQKK

SEQ ID NO: 84486 - protein, 257 aa, Unknown
  Bacterial polypetide isolated from the Sargasso Sea
GVQGVASMTYGLFGLPQANILVGPGNQFVAEAKRILFGRVGIDMIAGPTDSLILADETADPFIVATDLVSQAEHGYNSPVWLVTDNETLANNVMNLVPKLIDDLPETNRENATAAWRDYAEVIVCENREEMAACSDEYAPEHLTVQADDLDWWLERLTCYGSLFLGEETTVSYGDKAAGTNHVLPTSRAANYTGGLSVHKYMKIVTYQRATREGSKSIAEATARISRLEGMEGHARAADVRLAKFFPNEEFDLTANG

SEQ ID NO: 84487 - protein, 355 aa, Unknown
  Bacterial polypetide isolated from the Sargasso Sea
LKDIEKTKEEGCKQLGIKFDKYDGEIIVSKEKIEDIKKNLDQKTKDDIQFSHERVRKFAEAQLKNYGQDFEVELSEGLYAGQKLIPVNTAGCYVPAGRYAHIASAVMSVTTAKVAGVKNIIVCSSPKPNVGVHPSIVYTADLCGADVIMNLGGVQAIAAMTNGLFGNAPADILVGPGNQFVAEAKRILFGKVGIDLFAGPTEIAIIADETADPEIVAVDLVGQAEHGYNSPAWLFTKSKKLAEEVMKRVPELIEDLPDLPKQSAGAAWKDYGEVILCDTDEEMAKISDEYAPEHLEVQTKNLKWFHDRLKNYGSLFIGEETTVAYGDKCSGTNHILPTKGAGRYTGGLFVGKFIK

SEQ ID NO: 84488 - protein, 296 aa, Unknown
  Bacterial polypetide isolated from the Sargasso Sea
CMSVTTAKVAGVKNIIACSPPKEGVGANPSVIYTANLCGADKILNLGGVPAIAAMTYGMFGNEPANMLVGPGNQFVAEAKRILFGKVGIDLFAGPTEIAIIADETADPEIVAVDLVGQAEHGYNSPAWLYTTSKKLADEVMKRVPELISELPELPRTSAEAAWRDYGEVILCENDEDMAKISDEYAPEHLEVQTKNDKWFHERLKNYGSLFIGEETTVAYGDKCSGTNHILPTKGAGKYTGGLFVGKFIKTLSFQRMTKESTKEVGSAAARISRYEGMEAHARTGDVRLRKYGFSN

SEQ ID NO: 84489 - protein, 154 aa, Unknown
  Bacterial polypetide isolated from the Sargasso Sea
MAEAETKIINIKDRNFKNKLNGLMRADQKNQSNLYNIVFNIIQKIQKLGDSALIEFVNKFDSKKINKIEELFIPKDVLKNAYNSLKKEEKQALNIAAKRIKKFHTHQIPIDLKYKDNMEVKLGLKHSPIVSAGFYVPGGKAIYPSSVLMNAIPA

SEQ ID NO: 84490 - protein, 336 aa, Unknown
  Bacterial polypetide isolated from the Sargasso Sea
KFKLTESEIDAAMQKVSARDMDDIKFAQQQIKNFAEAQRASMTDLEIETMPGVILGHRNIPVQSVGCYVPGGKFPMVASAHMSVLTASVAGVPRIIASAPPVNGEPHPAIVAAMHMGGAHEIYAIGGIQAVGAMAIGTETIDPVHMLVGPGNAFVAEAKRQLYGRVGIDLFAGPTETMVIADETVDAELCATDLLGQAEHGYNSPAAMITCSEKLARETLIEIERILKILPTSETASASWENYGDMVLCDTHEEMLSVANDMAYEHVQIMTDRDDWYLENMHSYGALFLGPRTNVANGDKVIGTNHTLPTKKAGRYTGGLWVGKFLKTHSYQRIET

SEQ ID NO: 84491 - protein, 199 aa, Unknown
  Bacterial polypetide isolated from the Sargasso Sea
AIIADKNADPEIVAVDLVGQAEHGYNSPAWLFTTSKELADKVIKRVPELIAELPELPRTSSEAAWRDYGEVVLCDTDEEMATISDQYAPEHLEVQTNNLDWFHKRLKNYGSLFIGEETTVAYGDKCSGTNHILPTKGAGRYTGGLFVGKFIKTLSFQRMTKESTELVGAAAARLSRYEGMEAHARTGDARLRKYGYSNK

SEQ ID NO: 84492 - protein, 99 aa, Unknown
  Bacterial polypetide isolated from the Sargasso Sea
EPENLAKNISNAGAIFLGHWTPEAVGDYIAGPNHVLPTARSARFSSGLSVMDFLKRTTLTKVSRDALLKIGPSAVTLANSEGLECHGLSISERMKSNSE

SEQ ID NO: 84493 - protein, 289 aa, Unknown
  Bacterial polypetide isolated from the Sargasso Sea
MKILNSKSKKFDNLLENLLLQRKKKIQSDSVSVTNIIKDVKKNGDKALLKYEKRFNQNNIIIPSSKQIKKSINSLDKKVKKAIDTAYNRIYKFHSLQKFKNISYTDKLKNKLEYKYVPLESVAIYVPGSAASYPSSVLMNAVPAIVAGVKRIVMINPSYKGKQNPAVLYAAKKCKIKEIYSIGGPSAIAAVSYGTKKIKKVHKIVGPGNAYVAAAKKEVFGVVGIEGMTAGPSEVTVVCDKFSNPEWVASDLIGQAEHDILAQCILISKDKNLIDKVKIEITKQLKEIP

SEQ ID NO: 84494 - protein, 208 aa, Unknown
  Bacterial polypetide isolated from the Sargasso Sea
MKILDSKIKNFDKSLDFLLLKRKQKIQFNSISVLNIINDVKKNGDKALIKYEKKFNKNKIISPTNKEISKSIKSLDENVKRAIDIAYNRIYKFHSLQKFKNISYTDRLKNKLEYKYIPIDSVAIYVPGSKVSYPSTVLMNAIPAIIAGVKRIAMINPGYKGKQNPAVLYAARKCKIKEIYSIGGPSAIAAMAYGTKKIKNVNKIVGPG

SEQ ID NO: 84495 - protein, 269 aa, Unknown
  Bacterial polypetide isolated from the Sargasso Sea
HKGKQNPAVLYAAKKCKIKEIYSIGGPSAIAAVSYGTKKIKKVHKIVGPGNAYVAAAKKEVFGVVGIEGMTAGPSEVTVVCDKFSNPEWVASDLIGQAEHDILAQCILISKDKDLLDKVKIEITKQLKEIPRASVARRSLINNGILMYVSSDAKIISVINKIAPEHLELNIKNYKSLVPKIKNSGSICLGKYAVMAMTDYNVGSNHVLPTNGSAKYSSGISVNEFYKRISYINLSKKGIESLGPSVITLANYEGLVGHAQSVVKRIRRK

SEQ ID NO: 84496 - protein, 279 aa, Unknown
  Bacterial polypetide isolated from the Sargasso Sea
TCAPPYKGKPADAIVAAQSMGGADAIYVIGGVQAVAAMALGTESIPAVDMLVGPGNAYVAEAKRQLYGRVGIDLFAGPTETLVIADETVDGEMCATDLLGQAEHGPTSPAILLTNSENLAKQTIEEVDRQLNTLSTSDTAAPAWRDYGQVIVADSYEEMVEIANDLAFEHVQVMTDRDDWFLENMSNYGSLFLGPRTNVSYGDKVIGTNHTLPTLKAARYTGGLWVGKYIKTCTYQKVLTDEATVKIGEYCSRLCELEGFAGHQEQADLRVRRYRKEAA

SEQ ID NO: 84497 - protein, 281 aa, Unknown
  Bacterial polypetide isolated from the Sargasso Sea
IACSPPKENIGAHPSIIYTADLCGADVILNLGGVPAIAAMTYGLFGNAPADILVGPGNQFVAEAKRILFGKVGIDLFAGPTEIGIIADETADPEIVAVDLVGQAEHGYNSPAWLYTTSQKLADAVLKRVPELIEELPEVPRLSAEAAWRDYGEVILCDTNEEMVKVSDDYAPEHLELQTKNLKWFHERLKNYGSLFIGEETTVAYGDKCSGTNHILPTKGAGKYTGGLFVGKFIKTLSFQRMTKESTKEVGAAAARISRYEGMEAHARTGDVRLRKYGYSN

SEQ ID NO: 84498 - protein, 311 aa, Unknown
  Bacterial polypetide isolated from the Sargasso Sea
GCYVPAGRYAHIASAVMSVTTAKVAGVKNIIVCSSPKPNIGVHPSIVYTADLCGANVIMNLGGVQAIAAMTNGLFGNAPADILVGPGNQFVAEAKRILFGKVGIDLFAGPTEIAIIADETADPEIVAYDLVGQAEHGYNSPAWLFTKSKKLADEVIKRVPELIADLPELPKQSAGDAWRDFGEVILCDTDEEMAKISDEYAPEHLEVQTKNLKWFHDRLKNYGSLFIGEETTVAYGDKCSGTNHILPTKGAGRYTGGLFVGKFIKTLSFQRMTKESTKEVGAAAARISRYEGMEAHARTGDVRLRKVRLLK

SEQ ID NO: 84499 - protein, 237 aa, Unknown
  Bacterial polypetide isolated from the Sargasso Sea
FNNPPADIIVGPGNQFVAEAKRILFGKVGIDLFAGPTEIGIIADANADPEIVAVDLVGQAEHGYNSPCWLYTTSKKLAENVMKRVPELIAELPEVPRQSADAAWRDYGEVILCDTDEEMVKVSDEYAPEHLEIQTENLKWFHERLTNYGSLFVGEETTVAYGDKCSGTNHILPTKGAGKYTGGLFVGKFIKTLSFQRMTKDSTKLVGAAAARISRYEGMEAHARTGDVRLRKYGFSN

SEQ ID NO: 84500 - protein, 214 aa, Unknown
  Bacterial polypetide isolated from the Sargasso Sea
MNNFLSTNSKNFDNQLNYFLSLRKKNSDVKLIVVRKILREIKKKKDSSLIKYEKKFNKLKKLKSNQLYFSQNEINKSLKNLSKKTKKDIDLAYSRILSFHKNQKINNFSLIDKFKNQLSYRTKPIQSIGVYVPGGKASYPSSVLMNCIPAIVAGVPKVFMTVPSLNRKINPAILYAAKKCKVKKIFKIGGAQAVAAFTYGTKTVNKVDKIIGPG

SEQ ID NO: 84501 - protein, 156 aa, Unknown
  Bacterial polypetide isolated from the Sargasso Sea
MIKILEIKSKKYQKKLEYYLNLRRKKSKFKTIAVRKIIEDIRNNNDNSLIKYEKKFNKIKNINKKNLLFSNVEIKKNIKLLQPNVKKSIDLAFKRILNFHKNQKFKSFKIRDKYKNTFSYRSKPIEKIGVYVPGGTASYPSSVLMNCIPALVAGVK

SEQ ID NO: 84502 - protein, 187 aa, Unknown
  Bacterial polypetide isolated from the Sargasso Sea
IVAYDLVGQAEHGYNSPAWLFTKSKKLAEEVMKRVPELINDLPELPRQSAGDAWRDFGEVILCDNDDEIVKVSDEYAPEHLEVQTKNLKWFHEKLKNYGSLFIGEETTVAYGDKCSGTNHILPTKGAGRYTGGLFVGKFIKTLSFQRMTKESTKEVGAAAARISRYEGMEAHARTGDVRLRKYGFSN

SEQ ID NO: 84503 - protein, 132 aa, Unknown
  Bacterial polypetide isolated from the Sargasso Sea
SSSWYDFGAIILVENLNQAIELINIKAPEHLQLILKNAQKVIKEIKNAGAIFVGPYTPEAVGDYIAGPNHVLPTNGTAKFSSGLGVIDFYKRTTIVNFNKNSLNELGKHVITLAEAEGLEAHARSISIRIDK

SEQ ID NO: 84504 - protein, 68 aa, Unknown
  Bacterial polypetide isolated from the Sargasso Sea
GPNHVLPTSGSAKFSSGLSVNDFLKRHSLIEITKSGIERLGPSVISLAQHENLDGHANSVKIRIKKDK

SEQ ID NO: 84505 - protein, 74 aa, Unknown
  Bacterial polypetide isolated from the Sargasso Sea
MGDYIAGPNHVLPTSGSAKFSSGLSVNDFLKRHSLIKITKSGIERLGPLVINLAKHENLEGHANSIKIRLKKGF

SEQ ID NO: 84506 - protein, 165 aa, Unknown
  Bacterial polypetide isolated from the Sargasso Sea
MKTCPISRLDISEPDFEAAFGRLLISPAEADADLAQTVTQIVAAIVQEGDAALVRYTNELDRRAVEEAQALRVSSDAIEQALSDLNPEVSSALTRAAARIRGFHERQRTESWQYEDEEGNLLGQRVSPLDCVGVYVPGGRASYPSSVLMNAIPAKVACVERVVMV

SEQ ID NO: 84507 - protein, 314 aa, Unknown
  Bacterial polypetide isolated from the Sargasso Sea
EAQLKNYGKDFEVELSKGLYAGQKLIPVNTAGCYIPGGRYAHIASAVMSVTTAKVAGVKNIIACSPPKESVGAHPAIIYTANLCGADVILNLGGVPAIAAMTYGMFNNAPADILVGPGNQFVAEAKRILFGKVGIDLFAGPTEIAIIADETADPEIVAFDLVGQAEHGYNSPAWLYTTSKKLADAVIKRVPELISELPELPKSSAEAAWKDYGEVILCDTDEEMAKISDEYAPEHLEVQTKNLKWFHDRLKNYGSLFIGEETTVAYGDKCSGTNHILPTKGAGKYTGGLFVGKFIKTLSFQRMTKESTKEVGSA

SEQ ID NO: 84508 - protein, 281 aa, Unknown
  Bacterial polypetide isolated from the Sargasso Sea
NTKDDIQFSHERVRKFAEAQLKNYGQDFEVELSKGLYAGQKLIPVNTAGCYVPAGRYAHIASAVMSVTTAKVAGVKNIIVCSSPKPGVGVHPSIVYTSDLCGADVIMNLGGVQAIAAMTNGLFGNAPADILVGPGNQFVAEAKRLLFGKVGIDLFAGPTEIAVIADDTADAELVAFDLVGQAEHGYNSPAWLFTNSKKLADYVMKRVPELIADLPELPRENSEAAWRDYGEVILCDTDEEIAKVSDEYAPEHLEVQTKNLKWFHDRLKNYGSLFIGEETTV

SEQ ID NO: 84509 - protein, 213 aa, Unknown
  Bacterial polypetide isolated from the Sargasso Sea
YGKVGIDLFAGPTEIGIIADHTADKEMIAVDLVGQAEHGPNSPAWLYSTDQKLCDYVIQRVPELIAALPETSRNNAGAAWRDYGEVILCDTNEELCEISDQYAPEHLEVQAENLNWWLEKLKNYGSLFLGEETTVAYGDKCSGTNHILPTKGAAKYTGGLFVGKFIKTVTFQRMSKESNKEVGAAAARISRLEGMEAHARTGDARLRKYGFQN

SEQ ID NO: 84510 - protein, 203 aa, Unknown
  Bacterial polypetide isolated from the Sargasso Sea
LGGVQAIAAMTNGLFGNAPADILVGPGNQFVAEAKRILFGKVGIDLFAGPTEIAVIADETADAEIVAFDLVGQAEHGYNSPAWLFTTSKKLAEEVMKRVPELIADLPELPKQSAGDAWRDFGEVILCETDEEMAKISDEYAPEHLEVQTKNLKWFHERLKNYGSLFIGEETTVAYGDKCSGTNHILPTKGAGRYTGGLFVGKF

SEQ ID NO: 84511 - protein, 222 aa, Unknown
  Bacterial polypetide isolated from the Sargasso Sea
MKKILNFDSKGFSEKLNDYISNNRSTNLDVSEKVKIILESIICEGDKALSELTFKYDNYDIMKEGICVDKKDIDVAYRECDKELVDAIEKAADRISSFHERQLPNNISYKDDSNVQLSSRWTPLDSVGLYVPGGKASYPSSVIMTAIPAKTAKVPEVSMCVPCPKGYLNPSILVAAKVCGVEKIYKIGGAQAIAAMAYGTNTVKKVNKIFGPGNAWVAEAKR

SEQ ID NO: 84512 - protein, 152 aa, Unknown
  Bacterial polypetide isolated from the Sargasso Sea
MNKIINTSNSGFQQEFENLVNTNRSDDKDVKDVVVKIINDVRTKGDDALIEYTNQLDRNELSKSNFILDETTINTQTDGLSEKICKAIQTAADRVRIYHEKQLPQDLSFNDDLKSTLGYMWKPLETAGIYVPGGTASYPSTVLMNAIPAMVA

SEQ ID NO: 84513 - protein, 246 aa, Unknown
  Bacterial polypetide isolated from the Sargasso Sea
MKILNSTNKKFNNSLNKLLLLRKKKVQSSSISVTSIVRDVKKNGDKALLKYEKRFNQNRTIVPTSNQINNSIKSLDQKVKKAIDTAYDRIYKFHSFQKFKNISFIDKFKNKLEYKYLPIDSVAIYVPGSSASYPSSVLMNAVPAIVAGVKRLIMINPGFKGKQNPAVLYAARKCKIKEIYSIGGPSAVAAAAYGTKKIKKVDKIVGPGNAYVAAAKKEVFGDVGIEGMTAGPSEVTIVCDKFSNPE

SEQ ID NO: 84514 - protein, 166 aa, Unknown
  Bacterial polypetide isolated from the Sargasso Sea
NFQSILITNNKNFIKKINGNLNSELNKIPRKLIAKKSLFKNGLILITSNNKQIVDSINEIAPEHLELNLNNYKKLINKIKNAGSICIGRYSAMAVTDYNVGTNHVLPTFGSAKFSSGLNVSEFYKKTSYIKLSKKGIEVIGKKAITLAEYEGLFGHAQSIKSRIRR

SEQ ID NO: 84515 - protein, 287 aa, Unknown
  Bacterial polypetide isolated from the Sargasso Sea
QKLVPVNTAGCYVPGGRYAHIASAVMSVTTAKVAGVKNIIACSPPKEGVGAHPAIVYTANLCGADVILNLGGVPAIAAMTYGMFGNSPADILVGPGNQFVAEAKRILFGKVGIDLFAGPTEIAVIADETADPEIVAVDLVGQAEHGYNSPAWLFTTSKKVADEVIKRMPELIADLPEVPRISAEAAWKDYGEVILCDTNEEMATISDEYAPEHLEVQTKNLKWFHDRLKNYGSLFIGEETTVAYGDKCSGTNHILPTKGAGKYTGGLFVGKFIKTLSFQRMTKESTK

SEQ ID NO: 84516 - protein, 194 aa, Unknown
  Bacterial polypetide isolated from the Sargasso Sea
IYSIGGPSAIAAAAYGTKSIKPVNKIVGPGNSYVASAKKEVFGDIGIESMTAGPSEVLVVCDNKSNPEWLASDLIAQAEHDSLAQCILISKDKNILKKTKNQILKQLKDISRSSVAKKSLMMNGILIYENSENKIVEIINKIGPEHLELNIKNYKSLVPKIKNAGSICLGKYAVMAMTDYGVPGTNHVLPTNMT

SEQ ID NO: 84517 - protein, 252 aa, Unknown
  Bacterial polypetide isolated from the Sargasso Sea
YPSSAIMSVITAAEAGVERIVVVSPPDSNGKIDPMTITVAQNCGAEIYKMGGAQAIAALAYGTKSVPKVDKIVGPGGKFVSIAKAIVSEETSIDMIAGPTELGIIADISSNPELIAYDLISQAEHSNDTMCFVITTSKNLAKQIQNSLEKIIPDINRNSIVKQSITKNGFIAICKNQNAIIELANKIAPEHMELMVKNGKALSKKITGPGLVLVGSNTPSSASDYLLGTNHILPTSGFGRVRGGLSVLDFLK

SEQ ID NO: 84518 - protein, 222 aa, Unknown
  Bacterial polypetide isolated from the Sargasso Sea
MKIITSSQNIEWRKSVSIKDELNTAIEFDNLLKKQSFKGLQKINKQLNQKNIKKLKVTKKEIVNAGKLVTDDEKFALYEAIKNISYVSKSQLKDISNSIEPINGLTIWDKFIPIKSVGLYVPGGTAPLVSSFLMQVIPAITAGCKDIIVCTPPDKNGKVYPAILWLAEQLNVSNIYKIGGAQAILSMANGYLGIPKVNKIFGPGNSYVAEAKKYVSNKVAID

SEQ ID NO: 84519 - protein, 227 aa, Unknown
  Bacterial polypetide isolated from the Sargasso Sea
MIKLFGPGNLYVAKAKKEVFGDVGIEGMVAGPSEITVVADKDSEINSVITSLIGQAEHDINSQSILISKNLKLLKEVNKLIKENLKKIHREKIAKKSLKKNGLLIHATNDQNIIEIINLIAPEHLELNILKPKKYLNKIVNAGSICVGKFSAMAVTDYNAGTNHVLPTMGSARFSSGLNVTDFYKKISYINLSKKGIEVIGKKAITLAEYENLEGHAQSIKSRIRSS

SEQ ID NO: 84520 - protein, 253 aa, Unknown
  Bacterial polypetide isolated from the Sargasso Sea
MNLGGVQAIAAMTYGLFGNAPADMLVGPGNQFVAESKRILFGKVGIDLFAGPTEIAVIADETADPELVAFDLVGQAEHGYNSPAWLFTTSKSLAEYVMKRVPELIADLPDLPRENSGAAWRDYGEVILCDTDEEMAKISDEYAPEHLEIQTKNLQWFHDRLKNYGSLFIGEETTVAYGDKCSGTNHILPTKGAGKYTGGLFVGKFIKTLSFQRMTKESTKEVGAACARISRYEGMEAHARTGDVRLRKYGFSN

SEQ ID NO: 84521 - protein, 139 aa, Unknown
  Bacterial polypetide isolated from the Sargasso Sea
MQSFLGRRKLRQSSQSTLVKKIISDVRKNGDKALIKYEKKFSSKKSNSNKIKFSKNEINKISKTINKKLKFSIDLAFKRIKLFHSKQKFSSFKYKDQFDNLLSYNYSPIESVGVYVPGGTASYPSTVLMNCIPALVAGV

SEQ ID NO: 84522 - protein, 223 aa, Unknown
  Bacterial polypetide isolated from the Sargasso Sea
SICCRVKKNFIGKVGIDLLLGPTEIAVIADETADPELVAFDLVGQAEHGYNSPAWLFTTSKSLAEYVMKRVPELIADLPDLPRENSGAAWRDYGEVILCDTDEEMAKISDEYAPEHLEIQTKNLQWFHDRLKNYGSLFIGEETTVAYGDKCSGTNHILPTKGAGKYTGGLFVGKFIKTLSFQRMTKESTKEVGAACARISRYEGMEAHARTGDVRLRKYGFSN

SEQ ID NO: 84523 - protein, 221 aa, Unknown
  Bacterial polypetide isolated from the Sargasso Sea
VAESKRILFGKVGIDLFAGPTEIAVIADETADPELVAFDLVGQAEHGYNSPAWLFTTSKSLAEYVMKRVPELIADLPDLPRENSGAAWRDYGEVILCDTDEEMAKISDEYAPEHLEIQTKNLQWFHDRLKNYGSLFIGEETTVAYGDKCSGTNHILPTKGAGKYTGGLFVGKFIKTLSFQRMTKESTKEVGAACARISRYEGMEAHARTGDVRLRKYGFQN

SEQ ID NO: 84524 - protein, 207 aa, Unknown
  Bacterial polypetide isolated from the Sargasso Sea
GDVGIDMVAGPSEVSIVADKYSNPEWIASDLIAQAEHDTFSQSILITNSKDLIKSVNFCLKSQLINLPKKHIATKSLKKFGLAIYANKLSSIVESVNIISPEHLEINYRHYRDIIKNLKNAGSIFIGKFSPEAMGDYIAGPNHVLPTSGSAKFSSGLSVSDFLKRHSLIKITKTGIERLGPSVINLAEHENLRGHANSIKMRLKKDN

SEQ ID NO: 84525 - protein, 221 aa, Unknown
  Bacterial polypetide isolated from the Sargasso Sea
MLKQKEFYFGKVGIDLFAGPTEIAVIADETADPEMVAYDLVGQAEHGYNSPAWLFTKSKKVADYVMQRVPELIEDLPDLPRENSGAAWRDYGEVILCDTDEEIAKVSDEYAPEHLEVQTKNLQWYHDRLKNYGSLFIGEETTVAYGDKCSGTNHILPTKGAGRYTGGLFVGKFIKTLSFQRMTKESTKEVGAACARISRYEGMEAHARTGDVRLRKYGFSN

SEQ ID NO: 84526 - protein, 225 aa, Unknown
  Bacterial polypetide isolated from the Sargasso Sea
MKIINNNKKEAIEELKRISTRTNSENNNNINTIVEEILNDVKISGDKAVEKYTKKFDGFDPNPMQVSADQIKNAWDEIDNNLKRSLEVAHKRIQKFHEKEIPQSFTIKGEYGDVVQRKWRPVKNAGIYIPGGRAAYPSTVLMNAIPAKVAGVEEIIMVSPGNKEGEINKAVLAAAHLSGINKVFRIGGAQAIGALAFGTTQITKVDVISGPGNIFVTTAKKLIYG

SEQ ID NO: 84527 - protein, 287 aa, Unknown
  Bacterial polypetide isolated from the Sargasso Sea
VAGVKKIITCAPPYEGRPADAIVTAQHLGGANDIFVIGGVQAVAAMALGTESIPAVDMLVGPGNAYVAEAKRQLYGRVGIDLFAGPTETLVIADETVDGEMCAVDLLGQAEHGPTSPAVLLTNSMKLAKNTLEEVERQLKTLSTRDTAGPAWQNYGQIIVADSYDEMLEIGNQLAFEHVQVMTKKDDWFLENMVNYGALFLGPRTNVSFGDKVIGTNHTLPTLRAARYTGGLWVGKFLKTCTYQKVLSNEASVTVGEYCSRLCKLEGFAGHQEQADLRVRRYKVKAA

SEQ ID NO: 84528 - protein, 151 aa, Unknown
  Bacterial polypetide isolated from the Sargasso Sea
MLKFLNSNQKNFQKKLEFILDSRKIKQRDQSNKIKKILLNVKNKGDKAVISYEKKFSKIRLKSKKIKFSKNEISKISRAVDKKLKNSIDLAFKRIKFFHSKQKFSSFKYKDRFRNEVSYKYSAIDKIGVYVPGGTASYPSTVLMNCIPAMV

SEQ ID NO: 84529 - protein, 295 aa, Unknown
  Bacterial polypetide isolated from the Sargasso Sea
KLFKRFFNDIEKRREESIKEITKKFDKYEGEIVVSKEKIEEAIKKVDQKTKDDVQFAYERIKKFAEHQLKSMNNEFEVELSKGLFAGQRLIPISTAGCYIPGGRYAHISSATMAITPAKVAGVKTIICASPPKDENGAHPGIIYAANLCGADIILNLGGIAAIGSMTYGCFGNPAVDFLVGAGNQYVSEAKRIVYGQVGIDQFAGPTEIAVIADKSADKEIVAVDIVGQAEHGYNSPGWLFTTDKSLAEYVMKRIPELIKELPELPRTSAEAAWRDYGEVILCDTNEEMAKVSDK

SEQ ID NO: 84530 - protein, 267 aa, Unknown
  Bacterial polypetide isolated from the Sargasso Sea
RKFENKKATLNNLEISQKTLKEAYNSISNDSKKALKLAYKRIHYYHSKQKKLSYSFRDQIDSKFYIQWNPIENVGLYIPGGLASYPSTVLMTVIPAKIAKVPNIMICVPSQNGETSKLTLAAAYMCGVNKVYNVGGAQAIAAFAFGTKLIKKADKVFGPGNQYVAEAKKQLFGFIGIDLPAGPSEVLVIANNKSNPLWIAYDVLAQGEHDPNSKTYVIAKNKNILLKVKNELQRIMKVTKLKNVDRSIRNNCFLITVKSQKEILKLQ

SEQ ID NO: 84531 - protein, 314 aa, Unknown
  Bacterial polypetide isolated from the Sargasso Sea
KLVPVNTAGCYVPGGRYAHIASAVMSVTTAKVAGVKNVIACSPPKAGVGAHPTIVYTADLCGADVIMNLGGVPAIAAMTNGLFKNEPADIIVGPGNQFVAEAKRILFGKIGIDLFAGPTEIAIIADETADPEIVAVDLVGQAEHGYNSPAWLYTTSQDLADKVMKRVPELIADLPELPRTSAEAAWRDYGEVVLCDTDEEMASVSDEYAPEHLEVQTKNLKWFHDRLKNYGSLFIGEETTVAYGDKCSGTNHILPTKGAGRYTGGLFVGKFIKTLSFQRMTKESTELVGAAAARLSRYERMEAHARTGDVRLKK

SEQ ID NO: 84532 - protein, 224 aa, Unknown
  Bacterial polypetide isolated from the Sargasso Sea
NQFVAEAKRILYGKVGIDLFAGPTEIGIIADAKADPEIVAVDLVGQAEHGYNSPCWLYTTSKELAEKVMKRVPELIAELPEIPRTSAEAAWRDYGEVILCDTDEEIVKISDEYAPEHLEVQTENLKWFHERLTNYGSLFVGEETTVAYGDKCSGTNHILPTKGAGRYTGGLFVGKFIKTLSFQRMTKESTELVGAAAARISRYEGMEAHARTGDVRLKKYGYSN

SEQ ID NO: 84533 - protein, 102 aa, Unknown
  Bacterial polypetide isolated from the Sargasso Sea
LELNIKNYNIIKNKINNVGSIFLGKYSPEAVGDYLAGPNHVLPTTGTAKFSSGLSVYDFLKRISYINLSKKGIENLGPSVITLSEFEGLKGHSNSVKLRIKK

SEQ ID NO: 84534 - protein, 130 aa, Unknown
  Bacterial polypetide isolated from the Sargasso Sea
NRGIFIHVDSIEQAAEVSNDIAPEHLEISIDTPESIVPMITNAGAIFLGRYSAEALGDYCAGPSHVLPTSGTSRFFSALGVCDFQKRSSIISCSQKGASKLAETASILARNENLQAHAVSAEFRLHEKLN

SEQ ID NO: 84535 - protein, 216 aa, Unknown
  Bacterial polypetide isolated from the Sargasso Sea
MLGVKNIVACSPPKEGVGAHPTIVYTADLCGADVILNLGGVPAIAAMTNGLFNNPPADIIVGPGNQFVAEAKRILFGKVGIDLFAGPTEIGIIADAKADPEIVAVDLVGQAEHGYNSPCWLYTTSKELAEKVMKRVPELIAELPEVPRQSADAAWRDYGEVILCDTDEEMVKISDEYAPEHLEVQTENLKWFHERLTNYGSLFVGEETTVAYGDKC

SEQ ID NO: 84536 - protein, 227 aa, Unknown
  Bacterial polypetide isolated from the Sargasso Sea
VPGIAAMTNGLFKNPPADILVGPGNQFVAEAKRILFGKVGIDLFAGPTEIAVIADDKADAEMVAVDLVGQAEHGYNSPAWLYTTSKRLAEEVMKRVPELIAELPEVPRTSAEAAWRDYGEVILCDTDEEMATVSDEYAPEHLEVQTQNLEWFHKRLKNYGSLFIGEETTVAYGDKCSGTNHILPTKGAGRYTGGLFVGKFIKTLSFQRMTKESTKSVGAACARISRY

SEQ ID NO: 84537 - protein, 234 aa, Unknown
  Bacterial polypetide isolated from the Sargasso Sea
IFDKLLDNLLLQRKKKIQLNSVSVSKIIEDVKKNGDKALLKYEKRFNQNNIIIPTPKQIKKSINSLDKKVKKAIDTAYNRIYKFHSLQKFKNISYTDKLKNKLEYKYLPLESVAIYVPGSTASYPSSVLMNAIPAIVAGVKRIAMINPGHKGKQNPAVLYAAKKCKIKEIYSIGGPSAIAAVSYGTKKIKKVHKIVGPGNAYVAAAKKEVFGVVGIEGMTAGPSEVTIVCDKFS

SEQ ID NO: 84538 - protein, 176 aa, Unknown
  Bacterial polypetide isolated from the Sargasso Sea
DLMAQAEHDENAQSILITDNKNFATKVINSITKIKKDLSKKKIIEKSLKNNGIIVVVDNLDIAADIINFVAPEHLHIHILDNKKLLSYINNAGGIFLGEYSVEAFGDYIVGTNHVLPTSGAAKFSSGLGVLDFMKRSSVVEMNKKSFYALSEDTQKMSGLEGLDGHKLSVKIRQKK

SEQ ID NO: 84539 - protein, 240 aa, Unknown
  Bacterial polypetide isolated from the Sargasso Sea
MELFGNAPADILVGPGNQFVAEAKRILFGKVGIDLFAGPTEIAVIADETADAEIVAFDLVGQAEHGYNSPAWLFTTSKKLAEEVMKRVPELIADLPELPKQSAGDAWRDFGEVILCDTDEEMAKISDEYAPEHLEVQTKNLKWFHERLKNYGSLFIGEETTVAYGDKCSGTNHILPTKGAGRYTGGLFVGKFIKTLSFQRMTKESTKEVGAAAARISRYEGMEAHARTGDVRLRKYGFSN

SEQ ID NO: 84540 - protein, 262 aa, Unknown
  Bacterial polypetide isolated from the Sargasso Sea
MKILNSKTKNFDKNLDYLLFKRRKSIKSEKVSVTNIINDVKKNGDKALIKYEKKFNQNSTIIPSALKISKLIKSLNPKVKKAIDTAYNRIYKFHSLQKFKNISYTDQFKNKLEYKYLPLESVAIYVPGSLVSYPSSVLMNAIPAIVAGVKRIVMINPGFKGNQNPAVLYAARKCKIKEIYSIGGPSAIAAVSYGTKKIKRVDKIVGPGNSYVAAAKKEVFGDVGIEGMIAGPSEITIVCDKFSNPEWTASDLIGQAEHILKH

SEQ ID NO: 84541 - protein, 286 aa, Unknown
  Bacterial polypetide isolated from the Sargasso Sea
DKIEEIKKNLDQKTKDDIQFSHERVRKFAEAQLKNYGQDFEVELSDGLYAGQKLIPVNTAGCYVPAGRYAHIASAVMSVTTAKVAGVKNIIVCSSPKPEIGVHPSIIYTADLCGANVIMNLGGVQAIAAMTNGLFGNAPADILVGPGNQFVAEAKRILFGKVGIDLFAGPTEIAIIADETADPEIVAYDLVGQAEHGYNSPAWLFTKSKKLADEVMKRVPELIADLPELPKQSAGDAWRDFGEVILCDTDEEMAKISDEYAPEHLEVQTKNLKWFHERLKNYGSLF

SEQ ID NO: 84542 - protein, 320 aa, Unknown
  Bacterial polypetide isolated from the Sargasso Sea
KTKDDIKFSYDRVRKFAEAQLKNYGQDFEVELSKGLYAGQKLIPVNTAGCYVPGGRYAHIASAVMSVTTAKVAGVKNIIACSPPKEGVGAHPAIIYTANLCGADAILNLGGVPAIAAMTYGMFGNSPADILVGPGNQFVAEAKRILYGKVGIDLFAGPTEIAVIADETADSEIVAFDLVGQAEHGYNSPAWLFTTSKKLAEEVMKRVPELIADLPELPRISSEAAWRDYGEVILCENEEEMAKVSDEYAPEHLEIQTKNDKWFHDRLKNYGSLFIGEETTVAYGDKCSGTNHILPTKGAGKYTGGLFVGKFIKTLSFKED

SEQ ID NO: 84543 - protein, 247 aa, Unknown
  Bacterial polypetide isolated from the Sargasso Sea
MKTLNSKSKNFDKLLENLLLQRKKKIQSDSVSVTNIIKDVKKNGDKALLKYEKRFNQNNIIIPSSKQIKKSINSLDKKVKKAIDTAYNRIYKFHSLQKFKNITYTDKLKNKLEYKYVPLESVAIYVPGSTASYPSSVLMNAIPAIVAGVKRIVMINPGHKGKQNPAVLYAAKKCKIKEIYSIGGPSAIAAVSYGTKKIKKVHKIVGPGNAYVAAAKKEVFGVVGIEGMTAGPSEVTVVCDKFSNPEW

SEQ ID NO: 84544 - protein, 231 aa, Unknown
  Bacterial polypetide isolated from the Sargasso Sea
RYYCGPGNQFVAEAKRILYGKVGIDLFAGPTEIGIIADDKADPEIVAVDLVGQAEHGYNSPCWLYTTSKELAEKVMKRVPELIAELPDVPRTSAGAAWRDYGEVILCDTDEELVKISDEYAPEHLEVQTENLKWFHERLTNYGSLFVGEETTVAYGDKCSGTNHILPTKGAGRYTGGLFVGKFIKTLSFQRMTKDSTKLVGAAAARISRYEGMEAHARTGDVRLRKYGFSN

SEQ ID NO: 84545 - protein, 205 aa, Unknown
  Bacterial polypetide isolated from the Sargasso Sea
MSKFKTRYINYTDKKFKKKFENLINDERKSNNKINLTVTKILKEIFEKGDDCLNHYVGKFDKIKVKKIKDLYIPKDILQKSYDELKTEQKKALNIAADRIKKFHKHQIPKNFSYKDDLKVNLGLTHSPIGSAGFYVPGGKAIYPSSVLMNAIPALVAGVERRVLVSPISDINQSSIVLAAAHVAKVTEFIRMGGAHAVAALAYGT

SEQ ID NO: 84546 - protein, 300 aa, Unknown
  Bacterial polypetide isolated from the Sargasso Sea
FCLCCWGSRIVATTPPFKGKPNPAVVSAMKMGGAHEIYVLGGMQGVGAMAIGTETIKPVDMLVGPGNAFVAEAKRQLYGKVGIDLFAGPTETMVIADETVDGEICATDLLGQAEHGYNSPAVMITNSRKLAEETFKEIDRILEILPTKETASTSWRDYGEMILCDNYEEMLSKANEIASEHVQVMTKKDDWFLEKMTSYGALFLGARTNVANGDKVIGTNHTLPTKKAGRYTGGLWVGKFIKTHTYQKITTDEAATLIGEYGSRLSHLEGFIGHAEQCNVRVRRYGKKNVGYGKPAGEKI

SEQ ID NO: 84547 - protein, 198 aa, Unknown
  Bacterial polypetide isolated from the Sargasso Sea
MKIIKNKKEAFEELKRISSRTNSDNNYKITAIVEEILQEVKISGDIAVEKYTKNFDGFDPNPMQVSADQIKNAWDEIDNNLKQSLVAASKRIQKFHEKEIPQSFTIKGEYGDIVQRRWRPVKNAGIYIPGGRAAYPSTVLMNAIPAKVAGVEEIIMVSPGNKKGEINKTVLAAAHLSGINKVFRIGGAQAIGALALAQ

SEQ ID NO: 84548 - protein, 68 aa, Unknown
  Bacterial polypetide isolated from the Sargasso Sea
ARARTTWLPTSGTARFSSPLGVYDFQKRSSLIGFTPEGADRMGRVASVLARGEGLTAHARSAEYRIKD

SEQ ID NO: 84549 - protein, 254 aa, Unknown
  Bacterial polypetide isolated from the Sargasso Sea
AQLKNYGQDFEVELSNGLYAGQKLVPVNTAGCYIPGGRYAHIASAVMSVTTAKVAGVKNIIACSPPKEGVGAHPTIAYTADLCGADVILNLGGVPAIAAMTNGLFKNPPADIIVGPGNQFVAEAKRILFGKVGIDLFAGPTEIGIIADAKADPEIVAVDLVGQAEHGYNSPCWLYTTSKELAEKVMKRVPELIAELPEVPKTNADAAWRDYGEVILCDTNEELVKISDEYAPEHLEVQTENLKWFHERLTNYGS

SEQ ID NO: 84550 - protein, 235 aa, Unknown
  Bacterial polypetide isolated from the Sargasso Sea
IPAVDMLVGPGNAYVAEAKRQLYGRVGIDLFAGPTETLVIADETVDGEMCAVDLLGQAEHGPTSPAVLLTNSMKLAKNTLEEVERQLKTLSTRDTAGPAWQNYGQIIVADSYDEMLEIGNELAFEHVQVMTKKDDWFLENMVNYGALFLGPRTNVSYGDKVIGTNHTLPTLRAARYTGGLWVGKFLKTCTYQKVLSDEASVTVGEYCSRLCKLEGFAGHQEQADLRIRRYNVKAA

SEQ ID NO: 84551 - protein, 269 aa, Unknown
  Bacterial polypetide isolated from the Sargasso Sea
NENKKSLKLAYKRIFYYHSKQKKTSYSFKDQLDSKFYVEWKPIENVGLYIPGGLASYPSTVLMTAIPAKIAEVPNIMICVPSQNGQTSKLTLAAAYLCGVNVVYNVGGAQAIAALAFGTKIIKKADKVFGPGNQYVAEAKKQLFGVIGIDLPAGPSEVLVIANNNSNPNWIAYDVLAQGEHDPNAKTYVLSKSKNILIKVKNELKRIMEETKFKNVDQSIKNNCNLILAKSQKEIYEISNFIAPEHLHIHEKFNKNILKNIKNAGSVFL

SEQ ID NO: 84552 - protein, 276 aa, Unknown
  Bacterial polypetide isolated from the Sargasso Sea
PKPGIGVHPSIVYTADLCGADVIMNLGGVQAIAAMTNGLFGNAPADILVGPGNQFVAEAKRILFGKVGIDLFAGPTEIAVIADETADPEMVAYDLVGQAEHGYNSPAWLFTKSKKVAEYVMQRVPELIADLPDLPRENSGAAWRDYGEVILCDTDEEIAKVSDEYAPEHLEVQTKNLQWFHDRLKNYGSLFIGEETTVAYGDKCSGTNHILPTKGAGRYTGGLFVGKFIKTLSFQRMSKAATKEVGAACARISRYEGMEAHARTGDVRLRKYGFSN

SEQ ID NO: 84553 - protein, 214 aa, Unknown
  Bacterial polypetide isolated from the Sargasso Sea
LFGKVGIDLFAGPTEIAVIADDTADPEMVAYDLVGQAEHGYNSPAWLFTKSKKVADYVIQRVPELIADLPDLPRENSGAAWRDYGEVILCDTDEEIAKVSDEYAPEHLEVQTKNLQWYHDRLKNYGSLFIGEETTVAYGDKCSGTNHILPTKGAGRYTGGLFVGKFIKTLSFQRMSKAATKEVGAACARISRYEGMEAHARTGDVRLRKYGFSN

SEQ ID NO: 84554 - protein, 234 aa, Unknown
  Bacterial polypetide isolated from the Sargasso Sea
SLAYIQKVNKIIGPGNDYVARAKKEIFGDVGMEGMIAGPSEITIVADKDTSLKEVITSMISQAEHDVNSQSILITNNLDLIQALKKLLKKELNKIPRKEIAKRSLLKNGLIIRIYNDKQIIESINEIAPEHLELNIKNYKKLISKIKNAGSIMLGKYSPMSASDYAIGPSHCLPTLGSAKFSSGLNVDEFYKKTSYIKLSKKGIEVIGKKAITLAEYEGLIGHAQSIKSRIRRS

SEQ ID NO: 84555 - protein, 190 aa, Unknown
  Bacterial polypetide isolated from the Sargasso Sea
WADKNTDLNQIITSLVSQAEHDPNSQCILITKDKKIIKNVINGVKKLVNNLPRKKIASIALNKNGLIILAKNDKQIISIINEVAPEHLEINVNNYKKYYKKILNAGSICNGKYTPMSASDYTVGTNHVLPTSGSSKFSSGLNTNEFIKKISVVTLSKLGVEKIGNPAITLSKFEQLYGHAQSIKSRIRRK

SEQ ID NO: 84556 - protein, 286 aa, Unknown
  Bacterial polypetide isolated from the Sargasso Sea
LSKKFDKYEGEVIVTREKIEQIKKNLDPKTKDDIQFSHERVRKFAEAQLKNYGQDFEVELSDGLFAGQKLIPVNTAGCYVPAGRYAHIASAVMSVTTAKVAGVKNIIVCSSPKPGVGVHPAIVYTADLCGADVIMNLGGVQAIAAMTYGLFGNAPADMLVGPGNQFVAESKRILFGKVGIDLFAGPTEIAVIADETADPELVAFDLVGQAEHGYNSPAWLFTTSKSLAEYVMKRVPELIADLPDLPRENSGAAWRDYGEIILCDTDEEMAKISDEYAPEHLEIQTK

SEQ ID NO: 84557 - protein, 286 aa, Unknown
  Bacterial polypetide isolated from the Sargasso Sea
KYPMVASAHMSIVTAGVAGVNRIIAASPPFNGAPNPAVVTAMHLAGADEIYCLGGIQAVGAMALGTETIPPIDMLVGPGNAFVAEAKRQLFGRVGIDLFAGPTETLVIADDTVDAEICATDLLGQAEHGPTSPAILVTNSEALAQETINEVNRQLKVLPTAAIAEEAWRDYGQVILCETEAEMVEVSNEIACEHVQVMTKNPDYFLENMTNFGALFLGPETNVSYGDKVIGTNHTLPTQKAARYTGGLWVGKFLKTCTYQRITSKEASALIGEYCSRLCEMKGFRA

SEQ ID NO: 84558 - protein, 318 aa, Unknown
  Bacterial polypetide isolated from the Sargasso Sea
AGQKLIPVNTAGCYVPAGRYAHIASAVMSVTTAKVAGVKNIIVCSSPKPGVGVHPAIVYTADLCGADVIMNLGGVQAIAAMTYGLFGNAPADMLVGPGNQFVAESKRILFGKVGIDLFAGPTEIAVIADETADPELVAFDLVGQAEHGYNSPAWLFTTSKSLAEYVMKRVPELIADLPDLPRENSGAAWRDYGEVILCDTDEEMAKISDEYAPEHLEIQTKNLQWFHDRLKNYGSLFIGEETTVAYGDKCSGTNHILPTKGAGKYTGGLFVGKFIKTLSFQRMTKESTKEVGAACARISRYEGMEAHARTGDVRLRKY

SEQ ID NO: 84559 - protein, 286 aa, Unknown
  Bacterial polypetide isolated from the Sargasso Sea
SKERIEEIKKTLDQKTKDDVQFSYDRVRKFAEAQLKNYGQDFEVELSDGLFAGQKLVPVNTAGCYVPGGRYAHIASAVMSVTTAKVAGVKNVIACSPPKEGVGAHPTIIYTADLCGADVILNLGGVPAIAAMTNGLFNNPPADIIVGPGNQFVAEAKRILFGKVGIDLFAGPTEIGIIADAKADPEIVAVDLVGQAEHGYNSPCWLYTTSKELAEKVMKRVPELIAELPEVPRQNADAAWRDYGEVILCDTDEEMVKVSDDYAPEHLEVQTENLQWFHERLTNYGS

SEQ ID NO: 84560 - protein, 206 aa, Unknown
  Bacterial polypetide isolated from the Sargasso Sea
LFAGPTEIAVIADDKADEELVAVDLVGQAEHGYNSPAWLYTTSKRIAEYVIKRVPELIAELPDLPRENAGAAWRDYGEVILCDTDEEMATISDEYAPEHLEVQTQNLEWFHKRLKNYGSLFIGEETTVAYGDKCSGTNHILPTKGAARYTGGLFVGKFIKTLSFQRMTKKSTKEVGAACARISRYEGMEAHARTGDARLRKYGFSN

SEQ ID NO: 84561 - protein, 317 aa, Unknown
  Bacterial polypetide isolated from the Sargasso Sea
NFDKVLDALLMQRKNKVHSNSVSVIGIIKDVKKNGDKALLKYEKRFNRNNVIVPSANQISKSIKSLDKKVKNAIDLAYTRIHKFHSLQKFKNISYTDKLKNKLEYKYLPIESVAIYVPGSTASYPSSVLMNAIPAIVAGVKRVIMINPGYKGNQNPAVLYAARKCKIKEIYSIGGPSAIAAAAYGTKRIKKVNKIVGPGNAFVAAAKKEVFGDVGIEGMTAGPSEVTIICDKFSNPEWVASDLIGQAEHDNLAQCILISKDKNIVEKVKIEIFKQLKEIPRQSVAKKSLISNGILMHITSNKKITDVVNKLHPNTWS

SEQ ID NO: 84562 - protein, 227 aa, Unknown
  Bacterial polypetide isolated from the Sargasso Sea
LCGADVILNLGGVPAIAAMTNGLFNNPPADIIVGPGNQFVAEAKRILFGKVGIDLFAGPTEIAVIADKNADPEIVAVDLVGQAEHGYNSPAWLFTTSKDLAEKVMKRVPELIAELPELPRTSAEAAWRDYGEVVLCDTNEEMVKVSDEYAPEHLEVQTENLKWFHEKLTNYGSLFVGEETTVAYGDKCSGTNHILPTKGAGRYTGGLFVGKFIKTLSFQRMTKESTK

SEQ ID NO: 84563 - protein, 303 aa, Unknown
  Bacterial polypetide isolated from the Sargasso Sea
MGAKNFQKKFDKYEGDVIVSKEKIEEIKKNLDQKTKDDIQFSHERVRKFAEAQLKNYGQDFEVELSDGLFAGQKLIPVNTAGCYVPAGRYAHIASAVMSVTTAKVAGVKNILVCSSPKPNVGVHPSIVYTADLCGADVIMNLGGVQAIAAMTNGLFGNAPADILVGPGNQFVAEAKRILFGKVGIDLFAGPTEIAVIADETADPEMVAYDLVGQAEHGYNSPAWLFTTSKKVADYVMQRVPELIADLPDLPKQNSEAAWRDYGEVILCDNDEEMAKISDEYAPEHLEVQTKNLKWFHQKIKKL

SEQ ID NO: 84564 - protein, 215 aa, Unknown
  Bacterial polypetide isolated from the Sargasso Sea
ILYGKVGIDLFAGPTEIGIIADAKADSEIVAVDLVGQAEHGYNSPCWLYTTSKELAEKVMKRVPELIAELPEVPRTSAEAAWRDYGEVILCDTDEEIVKISDEYAPEHLEVQTENLKWFHERLTNYGSLFVGEETTVAYGDKCSGTNHILPTKGAGRYTGGLFVGKFIKTLSFQRMTKESTELVGAAAARISRYEGMEAHARTGDVRLRKYGYSN

SEQ ID NO: 84565 - protein, 211 aa, Unknown
  Bacterial polypetide isolated from the Sargasso Sea
MIKILQVGNVDSFVEARRQKTSQKDRKIVQSILDDVRKNGDSAVKKYEQKFNGKKTTQLRLNKQEVKNAKITDAEFSALQLSAIRLSKSQRILNKSLIQSIKKIPDISFVPIPSVGCYIPGGQARYPSSAIMSVITAAEAGVKKIVVVSPPNSDGKIDPMTITVAQNCGAEIYKVGGAQAIAALAYGTKSIPKVDKIVGPGGKFVSIAKAM

SEQ ID NO: 84566 - protein, 253 aa, Unknown
  Bacterial polypetide isolated from the Sargasso Sea
SVIKYEKKFSGFKKLNKKNIYFSKSEIAKNIKSLDAKTKESIDISYNRILSFHKNQKFKNFKILDKYKNSLSYRSLPLDRIGIYVPGGIASYPSSVLMNCIPAIVAGVKEIIMTVPSINGRVNPGVIYAAKKCKVKKIYKIGGAQAIGALAYGTETIDSVDKIVGPGSEYVALAKKEVFGEVGIDIFAGPSEVTVIADRHSNPDWVAADLIAQAEHDKMSQSILITESKNLIVKVKESINKQLKFLPKKKILF

SEQ ID NO: 84567 - protein, 311 aa, Unknown
  Bacterial polypetide isolated from the Sargasso Sea
KKFDKYEGEIIVSKEKIEEIKNNLDQKTKDDIKFSYDRVRKFAEAQLKNYGNNFEVELSKGLYAGQTLIPVNTAGCYVPAGRYAHIASAVMSVTTAKVAGVKNIIVCSSPKPDIGAHPKIIYTADLCGADVILNLGGVQAIAAMTYGFFGNEPADILVGPGNQYVAEAKRILFGKVGIDLFAGPTEIAVIADKNADPEIVAYDLVGQAEHGYNSPAWLFTTDKTLAEKVMNRVPELIKDLPELPRTNAGDAWRDYGEVILCDTNEEMAKISDEYAPEHLEVQTDNLEWWLKKLKNYGSLFLGEETTVAYGD

SEQ ID NO: 84568 - protein, 230 aa, Unknown
  Bacterial polypetide isolated from the Sargasso Sea
GLFGNAPADILVGPGNQFVAEAKRILFGKVGIDLFAGPTEIAIIADETADPEIVAVDLVGQAEHGYNSPAWLYTTSKELAEKVMKRVPELIAELPELPRTNAEAAWRDYGEVVLCDTDEEMAKISDEYAPEHLEVQTKNLDWFHNRLKNYGSLFVGEETTVAYGDKCSGTNHILPTKGAGRYTGGLFVGKFIKTLSFQRMTKESTELVGAAAARLSRYEGMEAHARTGDV

SEQ ID NO: 84569 - protein, 290 aa, Unknown
  Bacterial polypetide isolated from the Sargasso Sea
AEAQLKNYGQDFEVELSPGLFAGQKLIPVNTAGCYIPGGRYAHIASAVMSVTTAKVAGVKNIIACSPPKKGVGAHPAIIYTANLCGADVILNLGGVPGIAAMTNGLFKNPPADILVGPGNQFVAEAKRILFGKVGIDLFAGPTEIAVIADDKADTEIVAVDLVGQAEHGYNSPAWLYTTSKRVADEVMKRVPELIAELPEIPRKSAEAAWRDYGEVILCDTDEEMAKISDEYAPEHLEVQTENLEWFHKRLKNYGSLFIGEETTVAYGDKCSGTIIFCLLKELVDILVDY

SEQ ID NO: 84570 - protein, 280 aa, Unknown
  Bacterial polypetide isolated from the Sargasso Sea
MLLGFQELLLLHQPFKGKPNPAVVTAMKMGGAHEIYVLGGMQGVGAMAIGTETIKPVDMLVGPGNAFVAEAKRQLYGKVGIDLFAGPTETMVIADETVDGEICATDLLGQAEHGYNSPAVMITNSRKLAEETFKEIDRILEILPTKETASTSWRDYGEIILCDTYEEMLSKANEIASEHVQVMTKKDDWFLENMTSYGALFLGARTNVANGDKVIGTNHTLPTKKAGRYTGGLWVGKFIKTHTYQKITTDEAATLIGEYGSRLSHLERFIGHAEQCNVRV

SEQ ID NO: 84571 - protein, 184 aa, Unknown
  Bacterial polypetide isolated from the Sargasso Sea
MKIINNKKDAIHELKRISSRTNSENNKNINAIVEEILQEVKIYGDIAVEKYTRKFDGFNPKPMKVSDDDLKGAWDEIDSNLKHSLEIAHKRIKKFHEKEMPSSFTLKGEHGDVVQRRWRPVKKAGIYIPGGRAAYPSTVLMNAIPAKVAGVEEILMVSPGNKEGTINKTVLAAAHLSGINKVFR

SEQ ID NO: 84572 - protein, 265 aa, Unknown
  Bacterial polypetide isolated from the Sargasso Sea
KFHSLQKNRDIKYKDKYNNRIEYKNIPLRSVGIYVPTNLPSTLLMCAIPAKIAKVKKIVVANSRQDGKLNPAIMYASKKCGVSEIITCGGAQAIGYLAYISKVDKIVGPGSDYVAKAKQLVSGMVGTESMNAGPSEILILADKNTDINQIGTSMVGQSEHGFESQSILITKDKQIINKVQKNIVFNLQNIPRKKIASKSLKKHGLIVLCQNDNQIVDVINEIAPEHLELNITNYKKYLKKIYNAGSICIGPYTPMAVTDYTSGSN

SEQ ID NO: 84573 - protein, 197 aa, Unknown
  Bacterial polypetide isolated from the Sargasso Sea
MLKIINFNKLHSTKKLETILSSRKTRQKTESKQVKKILLNVKKHGDKAVINYEKKFSNFNIRSKIIKFSNVEINKISNGINKKLKKSIDLAYRRIKQFHSKQKFFSFKFKDRYKNELAYKYTPIEKVGVYVPGGTASYPSTVLMNCIPAIVAGVKNIYLTTPVLCNPINPGVIYAAKKCGVKEIYKTGGAHSIAALT

SEQ ID NO: 84574 - protein, 186 aa, Unknown
  Bacterial polypetide isolated from the Sargasso Sea
STNFMEVITSMIGQAEHDMNSQCILITKNQNLIKSVKKFLAKDFSSIPRKKIAKKSLTKNGLIVKVYNDKQIIDSINEIAPEHLELNLANYKKLIKKIYNVGSVCIGKYSAMAVSDYNVGTNHVLPTLGSAKFSSGLNVGEFYKKISYIKLSKKGIEVIGKKAITLAEYEGLIGHAQSIKSRIRRS

SEQ ID NO: 84575 - protein, 266 aa, Unknown
  Bacterial polypetide isolated from the Sargasso Sea
QNAAVLYAARKCRIKEIYSIGGPSAIAAVAYGTKSIKPVNKIVGPGNSYVASAKKEVFGDIGIESMTAGPSEVLVVCDNKSNPEWLASDLIAQAEHDSLAQCILISKDKNILEKTKYEIFKQLKDISRSSIAKKSLMTNGILIYENSENKIVEIINKVGPEHLELNIKNYKSFVPKIKNAGSICLGKYAVMAMTDYGVPGTNHVLPTNMTSKYSSGLSVSEFIKKISYINLSKKSIEKLGPSVITLAANEGLDGHAKSIKKRLGEL

SEQ ID NO: 84576 - protein, 186 aa, Unknown
  Bacterial polypetide isolated from the Sargasso Sea
KTNLNEVTTSMIGQAEHDINSQCILITKDSNLIKKFKKDLISKIKKIPRQNIAKKSIKNNGLILKVYNDNQIINAINEIAPEHLEINVSNYKKYKDKIFNAGSICIGKYSPMALSDYAVGTNHVLPTNSSAKFSSGLSVSEFYKKISLITLSKKGVEKIGKYATHLAEYEKLKGHALSIKSRIDKE

SEQ ID NO: 84577 - protein, 304 aa, Unknown
  Bacterial polypetide isolated from the Sargasso Sea
EIKKNLDQKTKDDIKFSYDRVRKFAEAQLKNYGQDFEVELSKGLYAGQKLIPVNTAGCYVPGGRYAHIASAVMSVTTAKVAGVKNIIACSPPKEGVGAHPAIIYTADLCGADVILNLGGVPAIAAMTYGMFGNSPADILVGPGNQFVAEAKRILFGKVGIDLFAGPTEIAVIADETADPEIVAVDLVGQAEHGYNSPAWLFTTSNKVAEDVIKRMPELIAELPEVPRMSAEAAWKDYGEVILCDTDEEMATISDEYAPEHLEVQTKNLKWFHDRLKNYGSLFIGEETTVAYGDKCSGTNHILPT

SEQ ID NO: 84578 - protein, 295 aa, Unknown
  Bacterial polypetide isolated from the Sargasso Sea
MKILNSKSKNFDKLLENLLLQRKKKIQSDSVSVTNIIEDVKKNGDKALLKYEKRFNQNNTIIPSSKQIKKSINSLDKKVKKAIDTAYNRIYKFHSLQKFKNISYTDKFNNKLEYKYVPLESVAIYVPGSTASYPSSVLMNAIPAIVAGVKRIVMINPGYKGEQNPAVLYAAKKCKIKEIYSIGGPSAIAAVSYGTKKIKKVHKIVGPGNSYVAAAKKEVFGVVGIEGMTAGPSEVTVVCDKFSNPEWVASDLIGQAEHDILAQCILISKDKNLLDKVKIEITKQLKGIPRASVQE

SEQ ID NO: 84579 - protein, 234 aa, Unknown
  Bacterial polypetide isolated from the Sargasso Sea
MIKIIDCSKKNYFQKLISFLDKRRIGEDNNLKIVSRILKDLKKYKIKGLIKYERKFSNNSNIKPSLKKINSSIKTLDPKVKAAIDIAYSRIFKFHSLQKMKNISYTDKFQNRLQYKYKPIDSVGIYVPANLPSTLLMNGIPAKIAGVKRIILANPKVNGKLNSAVLYAAKKIGIKEIYSMGGAQAIGSMAYIQKVNKIVGPGNIFVTQAKKQVFGDVGIEGMIAGPSEITILAD

SEQ ID NO: 84580 - protein, 274 aa, Unknown
  Bacterial polypetide isolated from the Sargasso Sea
EIKNSLDQKTKDDIQFSHERVRKFAEAQLKNYGQDFEVELSEGLYAGQKLIPVNTAGCYVPAGRYAHIASAVMSVTTAKVAGVKNIIVCSSPKPQLGVHPSIVYTADLCGADVIMNLGGVQAIAAMTNGLFGNAPADILVGPGNQFVAEAKRLLFGKVGIDLFAGPTEIAVIADDTADAELVAFDLVGQAEHGYNSPAWLFTTSKKLADYVIQRVPELIADLPELPRENSKAAWRDYGEVILCDTDEEIAKVSDEYAPEHLEVQTKNLKWFHDR

SEQ ID NO: 84581 - protein, 91 aa, Unknown
  Bacterial polypetide isolated from the Sargasso Sea
GAIFLGKWTPEAVGDYLAGPNHTLPTSGNSRFSGSLGVETFMKNTSIIEFNEESLKVNSLDIINLAKSEGLHSHANSVRIRFGDQLALEGE

SEQ ID NO: 84582 - protein, 208 aa, Unknown
  Bacterial polypetide isolated from the Sargasso Sea
IDLFAGPTEIAIIADETADPEIVAFDLVGQAEHGYNSPVWLFTTNEKLANKVIKLMPKLISDLPELPRISAEASWRDYGEVILCDNNDELVSISDEYAPEHLEIQTINNEWFHKKLKNYGSLFIGEETTVAYGDKCSGTNHILPTKGAGKYTGGLFVGKFIKTLSFQRMTKESTKEVGAAAARISRYEGMEAHARTGDVRLRKYGYSN

SEQ ID NO: 84583 - protein, 209 aa, Unknown
  Bacterial polypetide isolated from the Sargasso Sea
MKILNSNSKNFDKSFDNLLSKRKKKLKASSVSVTKIINDVKKNGDKALLKYERKFNKNNIIVPSVKQINKSIKSLDKKVKKAIDDAYNRIYKFHSLQKFKNISYKDKYKNKIDYKYLPLESVAIYVPGSTASYPSTVLMNAIPAIVAKVKRIVMINPGYKGNQNPAVLYAAKICGIKEIYSIGGPSAISAVTYGTKKIKPVNKIVGPGN

SEQ ID NO: 84584 - protein, 272 aa, Unknown
  Bacterial polypetide isolated from the Sargasso Sea
MLLQRKKKIQSDSVSVTKIINDVKKNGDKALLKYEKRFNQNNIIIPSPKQIKKSISSLDKKVKKAIDKAYNRIYKFHSLQKFKNISYTDKLKNKLEYKYVPLDSVAIYVPGSTASYPSSVLMNAIPAIVAGVKRIVMINPGYKGKQNPAVLYAAKKCKIKEIYSIGGPSAIAAASYGTKKIKKVHKIVGPGNAYVAAAKKEVFGVVGIEGMIAGPSEVTIVCDKFSNPEWVASDLIGQAEHDILAQCILISKDKNLIDKVKTEINKQLKEIP

SEQ ID NO: 84585 - protein, 236 aa, Unknown
  Bacterial polypetide isolated from the Sargasso Sea
MKTYKYPNKESWKELCSRAELNQKDLNSTVRSILDNVKANGDQALIDYTMQFDQLKLDTLQVSEEAIKQAAETIAPVLKKAIRAAYENIYCFHKAQQIKEQIIQTSPGVKCWRKAVAIERVGLYIPGGEAPLFSTILMLGIPALLAGCNEIILCSPAKNKQALDPAILYTAKLIGIEKIYTVGGAQAIAAMAYGTASIPKVYKIFGPGNQFVTKAKELLQQEGVAIDLPAGPSELL

SEQ ID NO: 84586 - protein, 255 aa, Unknown
  Bacterial polypetide isolated from the Sargasso Sea
MKFLNTNNKLFYKELDFILKKRSYNSTTKVDKEVYQIIKQVKFHGDKALFKYAKKFDKSSINKKNILLSKEFLKSYKNKIDDEILKAFRIAIHNITNFHKKQMPKSFQIKKHGVKTSAKWTPIQSVGLYIPGGLASYPSSLIMNVIPAKVSGVKRIVLMTPSKSNKINPYILALIDELKISEVYQIGGAHSIAALAFGTESIKPVNKIFGPGNAYVASAKKQVFGDVGIDLIAGPSEIVVVADSKNDPKWVASDL

SEQ ID NO: 84587 - protein, 259 aa, Unknown
  Bacterial polypetide isolated from the Sargasso Sea
CYIPGGRYAHIASAVMSVTTAKVAGVKNIIACSPPKEAIGAHPAIVYTANLCGADVILNLGGVPGIAAMTNGLFNNPPADILVGPGNQYVAEAKRILFGKVGIDLFAGPTEIAIIADDKADAEIVAVDLVGQAEHGYNSPAWLYTTSKRLADEVLKRVPELIAELPEIPRTSAEAAWRDYGEVILCNTDEEMATISDEYAPEHLEVHTENLDWFHKRLKNYGSLFIGEETTVAYGDKCSGTNHILPTKGAGRYTGGLFV

SEQ ID NO: 84588 - protein, 201 aa, Unknown
  Bacterial polypetide isolated from the Sargasso Sea
MSVTTAKVAGVKNIIACSPPKKKTGAHPAIIYTANLCGADKILNLGGVAAIAAMTYGMFGNAPADILVGPGNQFVAEAKRILFGKVGIDLFAGPTEIAVIGDETADPEIVAVDLVGQAEHGYNSPAWLFTTSKKLADDVIKRVPELISELPEMPRNSAEAAWRDYGEVILCDTDEEMASISDEYAPEHLEVQTKNLKWFHN

SEQ ID NO: 84589 - protein, 302 aa, Unknown
  Bacterial polypetide isolated from the Sargasso Sea
DQINKSLDQKTKDDIQFSYERVRKFAEAQLKNYGQDFEVELSKGLYAGQKLVPVNTAGCYIPGGRYAHIASAVMSVTTAKVASVKNIIACSPPKEKIGAHPAIIYTANLCGADVILNLGGVPAIAAMTYGLFGNEPADILVGPGNQFVAEAKRILFGKVGIDLFAGPTEIAIIADETADPEIVAVDLVGQAEHGYNSPAWLYTTSKKLAEIVMKRVPELISKLPELPRTSAEAAWKDYGEVILCDSDEEMAKISDEYAPEHLEVQTKNLKWFHDRLKNMALYLLVKELQLPMEINAQELIIF

SEQ ID NO: 84590 - protein, 170 aa, Unknown
  Bacterial polypetide isolated from the Sargasso Sea
MIKTLKSREKNFEKILNSFLKLRRGYSSKKITVVKKIINDVEMHGDKSVIKYEKKFNNLKTLKSNNLTFTKPEIKKSIKFLDRKVKNSIDLAYSRIFNFHKNQKFHKFKKKDKINNSFYYRSKPVEKVGVYVPGGKASYPSSVLMNCIPASIAGVNEIFMTVPSFDGGIN

SEQ ID NO: 84591 - protein, 275 aa, Unknown
  Bacterial polypetide isolated from the Sargasso Sea
AAAPPQKGAPSAAIVTAMALGGADEIYCLGGVQAVAAMALGTETIDSVDMIVGPGNAYVAEAKRQLFGRVGIDLLAGPTETLVIADDSVDGELCAADLLGQAEHGPTSAAILLTDSEQLAKDTLMEIDRQLGILPTADIAGVAWRDYGQAIVCDNTEEMVKIADEIASEHVQVMTKNPDFFLNNMTNYGALFLGPETNVSYGDKVIGTNHTLPTKKAARYTGGLWVGKFIKTCTYQKITEEASLHIGQYCSRLCDLEGFMGHKEQADIRVRRYGN

SEQ ID NO: 84592 - protein, 255 aa, Unknown
  Bacterial polypetide isolated from the Sargasso Sea
IKKTINSLDKKVKKAIDTAYNRIYKFHSLQKFKNITYTDKLKNKLEYKYVPLESVAIYVPGSTASYPSSVLMNAIPAIVAGVKRIVMINPGHKGKQNPAVLYAAKKCKIKEIYSIGGPSAIAAVSYGTKKIKKVHKIVGPGNAYVAAAKKEVFGVVGIEGMTAGPSEVTVVCDKFSNPEWVASDLIGQAEHDILAQCILISKDKDLLDKVKIEITKQLKEIPRASVARRSLINNGILMYISSDAKIISVVNKIAP

SEQ ID NO: 84593 - protein, 287 aa, Unknown
  Bacterial polypetide isolated from the Sargasso Sea
LISSLLMQLIPAKIAECKNIVICTPPNKEGKVAEEILWIAKRYNISKVYKVGGSQAIFAMAYGNTLIPKVEKIFGPGNQYVNLAKQIVTDEVDIDLPAGPSEVMVVSNSEEDYDIIAADLLSQLEHGTDSKAFLLSNNIKLINKVQKAVQDQARKLTRKKILQKSLDNLLLIKTKSKKDTIKLINECAPEHLILFDDNYSSLLPFIENAGSIFCGKYSPESFGDYASGTNHVLPTNGKATTKSGLGIKDFGKQISVQTSTSEGFQNLSETVLNLSKAEKLDAHTNAV

SEQ ID NO: 84594 - protein, 73 aa, Unknown
  Bacterial polypetide isolated from the Sargasso Sea
LGDYIAGPNHVLPTSGTAKFSSGLSVYDFLKRQSVIKISKRGIERLGPSVITLSKYENLHGHANSVKVRLKQR

SEQ ID NO: 84595 - protein, 327 aa, Unknown
  Bacterial polypetide isolated from the Sargasso Sea
KSPKTPSTDDSKTNEIVKGLLKEIEISKEEACINLTKKFDKYDGEIIVSKERIEQIDKELDQKTKDDIQFSHERVKKFAEAQLKNYGQDFEVELSPGLYAGQKLIPVNTAGCYIPGGRYAHIASAVMSVTTAKVAGVKNIIACSPPKEGVGAHPAIIYTANLCGADVILNLGGVPGIAAMTNGLFKNPPADILVGPGNQFVAEAKRILFGKVGIDLFAGPTEIAVIADDEADAEMVAVDLVGQAEHGYNSPAWLYTTSQRVADEVMKRVPELIAELPELPRKSAEAAWRDYGEVILCDTDEEMATISDEYAPEHLEVQTKNLDWFHK

SEQ ID NO: 84596 - protein, 112 aa, Unknown
  Bacterial polypetide isolated from the Sargasso Sea
VINEIAPEHLEINVGNYKKYKDKIVNAGSICIGKYSPMALSDYAVGTNHVLPTNASAKFSSGLSLSEFYKKISLITLSKKGVEKIGEYATHLAEYEELKGHALSIKSRINKE

SEQ ID NO: 84597 - protein, 139 aa, Unknown
  Bacterial polypetide isolated from the Sargasso Sea
MFSSKDKKFQENFSKFLSMRRDKNHAVSSVVSNIIGQIRKEGDSALIKYTREFDGFDLVKNGFYFEKNEIDKSEKLVSKNDKEALKIAIDRINLFHQHQYPKDVSWTDSIGVNLGWVWKPINKVGVYVPGGTASYPSFG

SEQ ID NO: 84598 - protein, 278 aa, Unknown
  Bacterial polypetide isolated from the Sargasso Sea
MTIKYLKKAIKNPSTDDTKTRTVVQNILNDIEKKREEAIKELTKKFDKFDGEIVLSKEKIEEAIKKVDQKTKDDVQFAHERIKKFAEHQLKSMNNEFEVELSKGLFAGQRLIPVNTAGCYIPGGRYAHISSATMAITPAKVAGVNTIICASPPKDKNGAHPGIIYAANLCGADVILNLGGIAAIASMAYGCFNNPEVDFLVGAGNQYVAEAKRILFGKVGIDLFAGPTEIAIIADKHADKEIVAADIVGQAEHGYNSPGWVFTTDKILADYIIKKNSR

SEQ ID NO: 84599 - protein, 132 aa, Unknown
  Bacterial polypetide isolated from the Sargasso Sea
MLKRREKSNGKTKVIKKIINDIRKNGDKALLKYEKKFSNNFNIVSRKNDFSSEIKFLSSKVKKAIDFSFNRISNFHSRQKVKNIFYKDRFNNRLNYKFVPISSVGIYVPGGTASFPSTVLMSAIPARIAGVK

SEQ ID NO: 84600 - protein, 204 aa, Unknown
  Bacterial polypetide isolated from the Sargasso Sea
MDDLTKFLDRRRSSKKPENKLISKILNDIKKNNIKALLKYEKKFSKNSQIKPSIKEINKAIKFLDPKIKRAIDFAYKRIHNFHIMQKTRNIFFKDNLNNKIEYKYVPIQSVGIYVPANLPSTLLMNAIPAKIAGVKKIILANPKNNGKLNPAVLYAAKKLGINEIYSIGGAQAIGSLAYIQKVNKIVGPGNIFVAGAKRQVLEM

SEQ ID NO: 84601 - protein, 306 aa, Unknown
  Bacterial polypetide isolated from the Sargasso Sea
PGGKFPMVASAHMSVVTAKVAGVKEIITCAPPYQGKPADAIVAAQSMGGADAIYVIGGVQAVAAMALGTESISAVDMLVGPGNAYVAEAKRQLYGRVGIDLFAGPTETLVIADETVDGEMCATDLLGQAEHGPTSPAILLTNSENLAKQTMEEVDRQLNTLSTSDTAAPAWRDYGQVIVADSYDEMVEIANDLAFEHVQVMTDRDDWFLENMSNYGSLFLGPRTNVSYGDKVIGTNHTLPTLKAARYTGGLWVGKYIKTCTYQKVLTDEATVKIGEYCSRLCELEGFAGHQEQADLRVRRYRKEAA

SEQ ID NO: 84602 - protein, 244 aa, Unknown
  Bacterial polypetide isolated from the Sargasso Sea
ETITPAHMLVGPGNAYVAEAKRQLFGTVGIDLFAGPTETMVIADDTVDAELCATDLLGQAEHGYNSPAVLVTNSKKLAKNTLTEIDRILKILPTAETARKSWEDYGEVILCENYEEMLKISDEIASEHVQVMTDRDDWFLEKMKSYGALFLGPRTNVANGDKVIGTNHTLPTKKAGRYTGGLWVGKFLKTHSYQKILTDEAASMIGEKCSRLCMLEGFVGHAEQANVRVRRYGKKNVGYGMAAE

SEQ ID NO: 84603 - protein, 301 aa, Unknown
  Bacterial polypetide isolated from the Sargasso Sea
GCKELTKKFDKYEGDIIVSKERIEEINKSIDQKTKDDVKFAHDRVRKFAEAQLKNYGNDFEIELSKGLYAGQKLVPVNTAGCYIPGGRFAHIASAVMSVTTAKVAGVKNIIACSPPKPNVGAHPTIIYTANLCGADVIMNLGGIPAIAAMTYGLFKNAPADMLVGPGNQFVAEAKRILFGRVGIDLFAGPTEIAIIADENADPEIVAVDLVGQAEHGYNSPAWLYTTSKDLADKVLKRVPELIKELPELPRKSAEAAWKDYGEVILCDTDEEMVQISDEYAPEHLEVQTKNLDWFHKRLKN

SEQ ID NO: 84604 - protein, 235 aa, Unknown
  Bacterial polypetide isolated from the Sargasso Sea
NAPADMLVGPGNQFVAEAKRILFGRVGIDLFAGPTEIAIIADKNADPEIVAVDLVGQAEHGYNSPAWLYTTSKDLADKVLKRVPELIKELPELPRKSAEAAWKDYGEIILCDTDEEMVQISDEYAPEHLEVQTKNLDWFHKRLKNYGSLFIGEETTVAYGDKCSGTNHILPTKGAGKYTGGLFVGKFIKTLSFQRMTKESTREVGAAAARLSRYEGMEAHARTGDVRLRKYGFSN

SEQ ID NO: 84605 - protein, 214 aa, Unknown
  Bacterial polypetide isolated from the Sargasso Sea
KAKKEVFGNVGIEGMIAGPSEITIVADKKSETKSVITSLIGQAEHDVNSQCIIISKDFTVLKKIKNLIKKSLKNLPRKKIVTKSLKTNGLLIHAKNDKNIIDLINLIAPEHLELNIAKPKKYLNKIVNAGSICLGKFSAMAVTDYNAGTNHVLPTMGSARFSSGLNVSDFCKKISYINLSKKGIEVIGKQAITLAEYENLEGHAQSIKSRIRRK

SEQ ID NO: 84606 - protein, 95 aa, Unknown
  Bacterial polypetide isolated from the Sargasso Sea
SKKILAGIENAGAIFLGKWTPEAVGDYLAGPNHTLPTSGNSRFSGSLGVETFMKNTSIIEFNEESLKVNSLDIINLAKSEGLHSHANSVEIRFED

SEQ ID NO: 84607 - protein, 207 aa, Unknown
  Bacterial polypetide isolated from the Sargasso Sea
MLNIESPRSFKVSKIEIKKAGKNLSDEIKASILEAAGNIEKICQIEKSKLIYDVIETTKGIKIWKEFRPIGTVGLYVPGGETPLISSLLMQLIPAKIAECKNIVICTPPNKEGKIAEEILWIAKKYNISKVYKVGGSQAIFAMAYGNTLIPKVEKIFGPGNQYVNLAKQIVTDEVDIDLPAGPSEVMVVSNSEKDKDIIAADLLSQL

SEQ ID NO: 84608 - protein, 242 aa, Unknown
  Bacterial polypetide isolated from the Sargasso Sea
PQANILVGPGDQFVAEAKRILFGRVGIDMIAGPTDSLILADETADPFIVATDLVSQAEHGYNSPVWLVTDNETLANNVMNLVPKLIDDLPETNRENATAAWRDYAEVIVCGNREEMASCSDEYAPEHLTVQADDLDWWLERLTCYGSLFLGEETTVSYGDKAAGTNHVLPTSRAANYTGGLSVHKYMKIVTYQRATREGSKSIAEATARISRLEGMEGHARAADVRLAKFFPNEEFDLTANG

SEQ ID NO: 84609 - protein, 305 aa, Unknown
  Bacterial polypetide isolated from the Sargasso Sea
IQRDATYLAGRYAHIASAVMSVTTAKVAGVKNILVCSSPKPDIGVHPSIIYTADLCGADVIMNLGGVQAIAAMTNGLFGNAPADILVGPGNQFVAEAKRILFGKVGIDLFAGPTEIAVIADETADAEIVAFDLVGQAEHGYNSPAWLFTTSKKLAEEVMKRVPELIADLPELPKQSAGDAWRDFGEVILCDTDEEIAKISDEYAPEHLEVQTKNLKWFHERLKNYGSLFIGEETTVAYGDKCSGTNHILPTKGAGRYTGGLFVGKFIKTLSFQRMTKESTKEVGAAAARISRYEGMEAHARTGDV

SEQ ID NO: 84610 - protein, 163 aa, Unknown
  Bacterial polypetide isolated from the Sargasso Sea
ILVTKDKNLTKKVLTEVKKILSNLPRKIIASKSLKKNGLFVLVQNDKQIIETINEIAPEHLELNVKNFKKYENKIKNAGSICNGPNTPMSASDYTVGTNHVLPTAGSSKFSSGLNLNEFTKKISIVTLSKLGVEKIANPAITLSEFEQLHGHTQSIKSRIRRN

SEQ ID NO: 84611 - protein, 213 aa, Unknown
  Bacterial polypetide isolated from the Sargasso Sea
MKILNSKSKNFDKLLENLLLQRKKKIQSDSVSVTNIIKDVKKNGDKALLKYEKRFNQNNIIIPSTKQIKKSINSLDKKVKKAIDKAYNRIYKFHSLQKFKNISYTDKLKNKLEYKYVPLESVAIYVPGSTASYPSSVLMNAIPAIVAGVKRIVMINPGHKGKQNPAVLYAAKKCKIKEIYSIGGPSAIAAVSYGTKKIKKVHKIVGPGNTYVA

SEQ ID NO: 84612 - protein, 147 aa, Unknown
  Bacterial polypetide isolated from the Sargasso Sea
KKAIDFAYNRILKYHSLQKIKNILYKDKLKNNLQYKSVPINKVGIYVPANLPSTLLMNAIPARIAGVKKIILANPRLNKKLNPAVIYAAKKLGIKEIYSIGGAQAIASLAYIQKVDKIVGPGNIYVAKAKKEVFGDVGIEGMVAGPS

SEQ ID NO: 84613 - protein, 185 aa, Unknown
  Bacterial polypetide isolated from the Sargasso Sea
SDPKIISADLIAQSEHDKSAQSILITTDQALAEAVEKEVLSQLKSLPRKEIASVSWDKNGKIIVVRDLKEAFDISNQLAPEHLELAIDNARDFLKYIVNAGAVFIGRNTPEALGDYVAGPSHVLPTSRSAKFSSGLSVFDFLKKISLVEFTKEGIEEIGNSAMTIADNEGLDGHSRSIEYRLTKK

SEQ ID NO: 84614 - protein, 171 aa, Unknown
  Bacterial polypetide isolated from the Sargasso Sea
MLKLLNYSKKNSSNNLEKILNKRKSFQKTNISKVKNIISKVKKKGDSAVIKYEKKFSKVKFKGKVGEIIFSKKEINTIAKKTDIRIKRSIDLAFNRIKKFHSKQTILPFIYKDKYKNVMSYKYSAIDKVGVYVPGGTASYPSTVLMNCIPAIVAGVKNIYLSTPALNNKIN

SEQ ID NO: 84615 - protein, 171 aa, Unknown
  Bacterial polypetide isolated from the Sargasso Sea
MLKTFNYNKNGASKMLEVFLNKRKSTQKNIASSVYKIIQEVKKNGDKAVLNYERKYSKIKTKSNKIFFSNKEINQIAKKTDIKIKKAIDLAFSRIKKFHLKQKVSNFKFKDKYNNELSYKYSSIEKVGVYVPGGTANYPSTVLMNCIPAIVAGVKNIYLTTPCWTRRLILR

SEQ ID NO: 84616 - protein, 261 aa, Unknown
  Bacterial polypetide isolated from the Sargasso Sea
AGRYAHIASAVMSVTTAKVAGVKNIIVCSSPKPGIGVHPAIVYTADLCGADVVMNLGGVQAIAAMTNGLFGNAPADILVGPGNQFVAEAKRLLFGKVGIDLFAGPTEIAVIADDTADAELVAFDLVGQAEHGYNSPAWLFTNSKKLADYVMKRVPELIADLPELPRENSEAAWRDYGEVILCDTDEEIAKVSDEYAPEHLEVQTKNLKWFHDRLKNYGSLFIGEETTVAYGDKCSGTNHILPTKGAAKYTGGLFVGKFIKT

SEQ ID NO: 84617 - protein, 276 aa, Unknown
  Bacterial polypetide isolated from the Sargasso Sea
DQKTKDDIQFSYDRVRTFAEAQLKNYGQDFEVELSPGLFAGQKLIPVNTAGCYIPGGRYAHIASAVMSVTTAKVAGVKNVIACSPPKEGVGAHPAIIYTADLCGADVILNLGGVPGIAAMTNGLFNNPPADILVGPGNQFVAEAKRILFGKVGIDLFAGPTEIAVIADDKADAEMVAVDLVGQAEHGYNSPAWLYTTSKRVADEVMKRVPELIADLPELPRTSAEAAWRDYGEVILCDTDEEMAAISDKYAPEHLEVQTENLRWFHKRLKNYGSLF

SEQ ID NO: 84618 - protein, 93 aa, Unknown
  Bacterial polypetide isolated from the Sargasso Sea
MNGVKNAGSIFVGKFSPEAIGDYIAGPNHVLPTSGSARFSSGLSVNDFLKRQSLIKITKTGIERLGSSVINLAKHENLEGHANSVKLRLKKEN

SEQ ID NO: 84619 - protein, 241 aa, Unknown
  Bacterial polypetide isolated from the Sargasso Sea
MINFRELNSENTEFSASFTSFLSKRTLVTKEVRNTVGDIISQIRNNGDEALKSFTKEYDNFEAEEFIVSEKEINTILKYFDKSLIKSFEFSFDRLINYQSTCFDSLNLDGPKGEITRKFRTIDSVGMYIPGGKASYPSTVLMGSAPALACGVKQISIASPALNGFLNPMVIAAAKVVGVDKIYKIGGAQAIAALALGTEQISKVEKIIGPGNVYVAEAKKQLFGEVGIDSIAGPSEIVVLA

SEQ ID NO: 84620 - protein, 277 aa, Unknown
  Bacterial polypetide isolated from the Sargasso Sea
PPKPNVGAHPTIVYTANLCGADVIMNLGGIPAIAAMTYGLFKNAPADMLVGPGNQFVAEAKRILFGRVGIDLFAGPTEIAIIADENADPEIVAVDLVGQAEHGYNSPAWLYTTSKDLADKVLKRVPELIKELPELPRKSAEAAWKDYGEVILCDTDEEMVQISDEYAPEHLEVQTKNLDWFHKRLKNYGSLFIGEETTVAYGDKCSGTNHILPTKGAGRYTGGLFVGKFIKTLSFQRMTKESTKEVGAAAARLSRYEGMEAHARTGDVRLRKYGFSN

SEQ ID NO: 84621 - protein, 138 aa, Unknown
  Bacterial polypetide isolated from the Sargasso Sea
MLKFFNTNQQSFLKKLDTILSKRKLEQKKRSVNIKKILLDVKNQGDKAIIKYELKFSKIKSKSKRLRFTKDEINKISKSINKNLKKSIDLAYVRIKRFHSKQKFTSFRFIDNYKNNLSYKHSPIDKVGVYVPGGTASY

SEQ ID NO: 84622 - protein, 303 aa, Unknown
  Bacterial polypetide isolated from the Sargasso Sea
MVASAHMSVLTASVAGVPRIIASAPPVNGEPHPAIVAAMKLGGAHEIYVLGGIQAVAAMAIGSESIKPVDMLVGPGNAFVAEAKRQLFGRVGIDLFAGPTETMVIADNSVDAEICATDLLGQAEHGYNSPACLITNSKKLAEDTISEIERLLKILPTSETARASWDNYGDIILCSTHEEMLKVANDMAYEHVQIMTDRDDWYLKNMHSYGALFLGPRTNVANGDKVIGTNHTLPTKKAGKYTGGLWVGKFIKTHSYQRIITDEAASFIGEYGSRLCMLEGFVGHAEQCNVRVRRYGGKNVPYG

SEQ ID NO: 84623 - protein, 250 aa, Unknown
  Bacterial polypetide isolated from the Sargasso Sea
MKILNSTNKNFSNSLNKLLSLRKKKVQSSSISVTSIVRDVKKNGDKALLKYEKRFNQNRTIVPTSNQINNSIKSLDQKVKKAIDIAYDRIYKFHSLQKFKNISFIDKFKNKLEYKYLPIDSVAIYVPGSSASYPSSVLMNAVPAIVAGVKRLIMINPGFKGKQNPAVLYAARKCKIKEIYSIGGPSAVAAAAYGTKKIKKVDKIVGPGNAYVAAAKKEVFGDVGIEGMTAGPSEVTIVCDKYSNSEWVAS

SEQ ID NO: 84624 - protein, 238 aa, Unknown
  Bacterial polypetide isolated from the Sargasso Sea
AVSYGTKKIKKVHKIVGPGNTYVAAAKKEVFGVVGIEGMTAGPSEVTVVCDKFSNPEWVASDLIGQAEHDILAQCILISKDKNLLDKVKIEITKQLKEIPRASVARRSLINYGILMYISSDDKIISVVNKIAPEHLELNIKNYKSLVPKIKNSGSICLGKYAVMAMTDYNVGSNHVLPTNGSAKYSSGISVNEFYKRISCINLSKKGIESLGPSVITLANYEGLVGHAQSVVKRIRRK

SEQ ID NO: 84625 - protein, 113 aa, Unknown
  Bacterial polypetide isolated from the Sargasso Sea
CADIINKIAPEHLQIAIDRPKSFSQKITNAGAIFIGRYTPEAIGDYIAGPNHVLPTSRSARYSSGLSTQDYMRRTSLIEVKRNSFSDIGQAAIKIAKSEGLDAHALSLELRNK

SEQ ID NO: 84626 - protein, 193 aa, Unknown
  Bacterial polypetide isolated from the Sargasso Sea
ETADSEMVAFDLVGQAEHGYNSPAWLFTTSKKLAEEVIKRVPELIADLPDLPKENAGAAWRDYGEVILCDSDEEMATISDQYAPEHLEVQTKNLKWFHDRLKNYGSLFIGEETTVAYGDKCSGTNHILPTKGAARYTGGLFVGKFIKTLSFQRMTKASTKEVGAAAARISRYEGMEAHARTGDVRLRKYGFSN

SEQ ID NO: 84627 - protein, 243 aa, Unknown
  Bacterial polypetide isolated from the Sargasso Sea
IYAANLCGADIILNLGGIAAIGSMTYGCFGNPPVDFLVGAGNQYVSEAKRIVYGQVGIDQFAGPTEIAIIADKSADKEIVAVDIVGQAEHGYNSPGWLFTTDKSLADYVMKRIPELIKELPELPRTSAEAAWRDYGEVILCDSKEEMATISDKYAAEHLEVHAENLDWWLKRLKNYGSLFLGEETTVAYGDKCSGTNHILPTKGGGRYTGGLFVGKFIKTLTFQRMTKEANKVVGAAAARLGR

SEQ ID NO: 84628 - protein, 218 aa, Unknown
  Bacterial polypetide isolated from the Sargasso Sea
MATWIKEAITEEQRDEAQKQVRDTVEKLLENIDKRGDTAVRELSKRFDNWSPDEFRLSEKEIQSCIDRLDGQTIEDIRFAQEQIRNFAQIQRDSMKDVEEETLPGVILGHRNIPTNRVGSYVPGGKFPMVASAHMSVVTAKVAGVKEIITCAPPYEGRPADAIVAAQHLGGADDIFVIGGVQAVAAMALGTESIPAVDMLVGPGNAYVAEAKRQLYEE

SEQ ID NO: 84629 - protein, 311 aa, Unknown
  Bacterial polypetide isolated from the Sargasso Sea
DLDPKTKDDIQFSHERVRKFAEAQLKNYGQDFEVELSDGLFAGQKLIPVNTAGCYVPAGRYAHIASAVMSVTTAKVAGVKNIIVCSSPKPGVGVHPAIVYTADLCGADVIMNLGGVQAIAAMTYGLFGNAPADMLVGPGNQFVAESKRILFGKVGIDLFAGPTEIAVIADETADPELVAFDLVGQAEHGYNSPAWLFTTSKSLAEYVMKRVPELIKDLPDLPRENSGAAWRDYGEVILCDTDEEMAKISDEYAPEHLEIQTKNLQWFHDRLKNYGSLFIGEETTVAYGDKCSGTNHILPTKGAGKYTGGLF

SEQ ID NO: 84630 - protein, 102 aa, Unknown
  Bacterial polypetide isolated from the Sargasso Sea
LEILTMDPKKILEGIENAGAIFLGKWTPEAVGDYLAGPNHTLPTSGNSRFSGSLGVETFMKNTSIIEFNEESLKVNRLDIINLAKSEGLHSHAKSVEIRFED

SEQ ID NO: 84631 - protein, 217 aa, Unknown
  Bacterial polypetide isolated from the Sargasso Sea
KRILFGKVGIDLFAGPTEIAIIADETADPEIVAYDLVGQAEHGYNSPAWLFTKSKKLADEVIKRVPELIADLPELPKQSAGDAWRDFGEVVLCDTDEEMAKISDDYAPEHLEVQTKNLKWFHERLKNYGSLFIGEETTVAYGDKCSGTNHILPTKGAGRYTGGLFVGKFIKTLSFQRMTKESTKEVGAAAARISRYEGMEAHARTGDVRLRKYGFSN

SEQ ID NO: 84632 - protein, 181 aa, Unknown
  Bacterial polypetide isolated from the Sargasso Sea
AAELLAQCEHDPHASVIAISPNKNVLQTIQKACHDQFSTLKRKEIITQAINNSLLLHVDSPEQGLDAMNDIASEHLVLLIDNPDTLRRQIKHAGSIFCGPYTPVALGDYAAGPNHVLPTGRAARFASPLSVMDFMKFSSHLTYSKDALTTIQQDIKTMTDIEHLDAHYHSVSIRLKNNTST

SEQ ID NO: 84633 - protein, 252 aa, Unknown
  Bacterial polypetide isolated from the Sargasso Sea
QMKVKKSLKLAYKRIFYYHSKQKKISYSFKDQLDSKFYIEWKPIENVGLYIPGGLASYPSTVLMTAIPAKIADVPNIMICVPSQNGQTSQLTLAAAYLCGVNVVYNVGGAQAIAALAFGTKIIKKADKVFGPGNQYVAEAKKQLFGVIGIDLPAGPSEVLVIANNNSNPTWIAYDVLAQGEHDPNAKTYVLSKSKNILIKVKNELKRIMLETKFKNVDKSIKNNCNLILAKSQKEIYEISNFIAPRTSSYSR

SEQ ID NO: 84634 - protein, 257 aa, Unknown
  Bacterial polypetide isolated from the Sargasso Sea
MKVLDSSKKNFDKLLDNLLMQRKRKVQSSSVSVTNIIKDVKKNGDKALLKYEKKFNKNSVIKPSSNQIQKSIQSLNSIVKKSIDTAYNRIYKFHSLQKFKNISYTDKFKNKLEYKYLPLESVAIYVPGSTASYPSSVLMNAIPAIVAGVKRIVMINPGYKGKQNPAVLYAAKKCKIKEIYSIGGPSAIAGVSYGTKKIKKVDKIVGPGNAYVAAAKKEVFGDVGIEGMTAGPSEVTIVCDKYSNPEWVASDLIGQAE

SEQ ID NO: 84635 - protein, 295 aa, Unknown
  Bacterial polypetide isolated from the Sargasso Sea
YECNTAKVAGVKNILVCSSPKPGVGVHPTIVYTADLCGADVIMNLGGVQAIAAMTNGLFGNAPADILVGPGNQFVAEAKRILFGKVGIDLFAGPTEIAIIADETADPEIVAVDLVGQAEHGYNSPAWLYTTSKDLAEKVMKRVPELIAELPELPRTNAEAAWRDYGEVVLCDTDEEMATISDEYAPEHLEVQTKNLDWFHKRLKNYGSLFVGEETTVAYGDKCSGTNHILPTKGAGRYTGGLFVGKFIKTLSFQRMTKESTELVGAAAARLSRYEGMEAHARTGDVRLKKYGYSN

SEQ ID NO: 84636 - protein, 188 aa, Unknown
  Bacterial polypetide isolated from the Sargasso Sea
MNKIDLKNKVAIVTGGVQGFGLAVVERFLNSGANVAIFENDKKLLDEFQTINDVYKIQTDVSSADSVEIAVNETIKEFGRIDILVNNAGIAGPNHKTWEYPNNDWQKVIDIDLTGVFYCCKYVVPQMIKNNYGRIVNVASIAGKEGNPNAMPYSAAKAGVIAITKSLGKELADKNIAVNCITPAAAKT

SEQ ID NO: 84637 - protein, 159 aa, Unknown
  Bacterial polypetide isolated from the Sargasso Sea
MKIINKKKEAIEELKRISTRTNSENNNKINRIVEEIIQEVKISGDIAVEKYTKKFDGFDPNPMQVSANDLKDAWDEIDNNLKRSLVVAHERIQKFHEKEIPQSFTIKGEYGDIVQRRWRPVKNAGIYIPGGRAAYPSTVLMNAIPAKVAGVEEIIWYLL

SEQ ID NO: 84638 - protein, 287 aa, Unknown
  Bacterial polypetide isolated from the Sargasso Sea
MLELNIIACSPPKENIGAHLSIIYTADLCGADVILNLGGVPAIAAMTYGLFGNAPADILVGPGNQFVAEAKRILFGKVGIDLFAGPTEIGIIADETADPEIVAVDLVGQAEHGYNSPAWLYTTSQKLADAVMKRVPELIEELPEVPRLSAEAAWRDYGEVILCDTNEEMVKVSDDYAPEHLELQTKNLKWFHEKLKNYGSLFIGEETTVAYGDKCSGTNHILPTKGAGKYTGGLFVGKFIKTLSFQRMTKESTKEVGAAAARISRYEGMEAHARTGDVRLRKYGYSN

SEQ ID NO: 84639 - protein, 266 aa, Unknown
  Bacterial polypetide isolated from the Sargasso Sea
MDNSPRNSDISNQAVLDGIFQIFGKKMSVSEVCLEILNDIDKNGDFALKKLCEKLDGSKLENFQVSETLINRSLDQISPEIINSMKVASERIKDFQMNIMPSSWFNKEKGLGEIVRPIEKVLCYVPGGLTPLISTVLMTAIPAKIAGVKELIVTSPIKNNMNENPYILAACKISGVDKVFNIGGAQAIAAFALGTESIPKVDLICGPGNIFVTEMKKKIFGKVGIDGLFGPTETMIIADENANPELCAADLIAQAEHDQLAFPVLV

SEQ ID NO: 84640 - protein, 212 aa, Unknown
  Bacterial polypetide isolated from the Sargasso Sea
KKEVFGDVGIEAMVAGPSEITVVADKNTNVKEVLTSLVGQAEHDTNSQCILLVNSKNFIKSLKKDLNNELNKIPRKDIAKKSLLKNGLIIRVYNSKQIIDSINEIAPEHLELNLKNYKKLINKIKNVGSICIGKYSAMAVTDYNAGTNHILPTLGSAKFSSGLNVGEFYKKTSYIKLSKKGIEVIGKKAITLAEYEGLIGHAQSIKSRIRRS

SEQ ID NO: 84641 - protein, 216 aa, Unknown
  Bacterial polypetide isolated from the Sargasso Sea
VAGAKRQVFGDVGIEGMIAGPSEITILADSKTNLNEVTTSMIGQAEHDSNSQCILITKDLNLIKKFKKDLELKLKQIPRQSIATKSIKSNGLILKVYNDRQIIDAINEIAPEHLEINVGNYKKYKDKIVNAGSICIGKYSPMALSDYAVGTNHVLPTNASAKFSSGLSLSEFYKKISLITLSKKGVEKIGEYATHLAEYEELKGHALSIKSRINKE

SEQ ID NO: 84642 - protein, 319 aa, Unknown
  Bacterial polypetide isolated from the Sargasso Sea
KLIPVNTAGCTSPAGRYAHIASAVMSVTTAKVAGVKNILVCSSPKPKVGVHPSIIYTADLCGADVIMNLGGVQAIAAMTNGLFGNAPADILVGPGNQFVAEAKRILFGKVGIDLFAGPTEIAIIADETADPEIVAYDLVGQAEHGYNSPAWLFTKSKKLADEVIKRVPELIADLPELPKQSAGDAWRDFGEVVLCDTDEEMAKISDDYAPEHLEVQTKNLKWFHERLKNYGSLFIGEETTVAYGDKCSGTNHILPTKRAGRYTGGLFVGKFIKTLSFQRMTKESTKEVGAAAARISRYEGMEAHARTGDVRLRKYGFSN

SEQ ID NO: 84643 - protein, 281 aa, Unknown
  Bacterial polypetide isolated from the Sargasso Sea
LVCSSPKTGVGVHPTIVYTADLCGADVIMNLGGVQAIAAMTNGLFGNAPADILVGPGNQFVAEAKRILFGKVGIDLFAGPTEIAIIADETADSEIVAVDLVGQAEHGYNSPAWLYTTSKELAEKVMKRVPELIAELPELPRTNAEAAWRDYGEVVLCDTDEEMAKISDEYAPEHLEVQTKNLDWFHNRLKNYGSLFVGEETTVAYGDKCSGTNHILPTKGAGRYTGGLFVGKFIKTLSFQRMTKESTELVGAAAARLSRYEGMEAHARTGDVRLRKYGYQN

SEQ ID NO: 84644 - protein, 246 aa, Unknown
  Bacterial polypetide isolated from the Sargasso Sea
SSIDFAYNRIMKFHMLQKKNLKNIYYLDKYKNKLQYNLVPIQTVGIYVPANLPSSLLMNAIPAKVSNVKKIILATPKLDPAVMYAAKKVGIKEIYFMGGAQAIASLAYIQNVDKIVGPGNKFVAEAKRQISGKIVGTESMFAGPSEICVVADKYTNINQIATSLVSQAEHDPNSQCILLTKDKKILPQVNLAIKKIIKSLPRKRIASRSLNNHGINIIIKNDREIINTINLIAPKHLEINVKNYKK

SEQ ID NO: 84645 - protein, 158 aa, Unknown
  Bacterial polypetide isolated from the Sargasso Sea
RDQAENVKNRLQELVPTLPRREIMKESFSSRSALIVCDSKEECFDAVNEMAPEHLELLTEDPFQDLHRIRNAGAIFVGPNTPEAVGDYFAGPNHTLPTSGCAKFASPLGVQDFTKSSSVLAYSEQRLQREGSAIIRLAEEEKLYAHAESIRVRMKTTE

SEQ ID NO: 84646 - protein, 270 aa, Unknown
  Bacterial polypetide isolated from the Sargasso Sea
MIGQHQNDLLFAALYKLGLEEIYGFGGAQSIGALSFGTESISRVDKIVGPGGLYVTAAKRKMFGFVGIDSIAGPTELVIFADSGAPIDWLVLDFLSQAEHDPSAQSILVSQDREYIEKFVSRVYEVFPRLSRQEIIGQSLEARCAAIQVNCDEQAIEIVNLIAPEHLQLCVERPEQYLDQIMNAGAIFCGNYSTESFGDYLAGPSHVLPTFGSARFSSPLGVYDFVKKSSVIGISQEGATLLSEPASIIADSEGLEAHALASRIRGLDFD

SEQ ID NO: 84647 - protein, 77 aa, Unknown
  Bacterial polypetide isolated from the Sargasso Sea
PWSPEAVGDYLAGPNHTLPTCAAARFSSALSVETFMRHTSMIQFNRAALDATASAVCELAESEGLHSHAESVRKRLS

SEQ ID NO: 84648 - protein, 281 aa, Unknown
  Bacterial polypetide isolated from the Sargasso Sea
VCSSPKPDVGVHLSIVYTADLCGANVIMNLGGVQAIAAMTNGLFGNAPADILVGPGNQFVAEAKRILFGKVGIDLFAGPTEIAIIADETADPEIVAYDLVGQAEHGYNSPAWLFTKSKKLAEEVIKRVPELIADLPELPRQSAGDAWRDFGEVILCDTDEEMAKISDEYAPEHLEVQTKNLKWFHERLKNYGSLFIGEETTVAYGDKCSGTNHILPTKGAGRYTGGLFVGKFIKTLSFQRMTKESTKEVGAAAARISRYEGMEAHARTGDVRLRKYGFSNK

SEQ ID NO: 84649 - protein, 255 aa, Unknown
  Bacterial polypetide isolated from the Sargasso Sea
MLNLLRYKDENFHIRVAEIINSRKNFDEDITNQVNDIIFDIKNNGDISLFKYMSKYDNVECSAENICYNQEDILSAKKNCTQESIEAVKLAKNRIEAFHKYQLPEDSIYEDQEEVSIKTKWIPLDSAGIYIPGGTASYPSSVLMGVIPAQVAGIKKISATVPCPNNQIDPLVLATLDLCGIEKIYKIGGAQAIAALTWGTESVESVDIIIGPGNKWVAEAKKQALSNINIDMLAGPSEILILADENNRADWIAAD

SEQ ID NO: 84650 - protein, 235 aa, Unknown
  Bacterial polypetide isolated from the Sargasso Sea
NAPADMLVGPGNQFVAESKRILFGKVGIDLFAGPTEIAVIADETADPELVAFDLVGQAEHGYNSPAWLFTTSKSLAEYVMKRVPELIADLPDLPRENSGAAWRDYGEVILCDTDEEMAKISDEYAPEHLEIQTKNLQWFHDRLKNYGSLFIGEETTVAYGDKCSGTNHILPTKGAGKYTGGLFVGKFIKTLSFQRMTKESTKEVGAACARISRYEGMEAHARTGDVRLRKYGFSN

SEQ ID NO: 84651 - protein, 292 aa, Unknown
  Bacterial polypetide isolated from the Sargasso Sea
AITPAKVAGVKTIICASPPKDKDGAHPGIIYAANYCGADVIMNLGGVAAIGSLTYGCFGNPPVDFLVGAGNQYVAEAKRIVYGKVGIDQFAGPTEIAIIADKSADKEIVAADIVGQAEHGYNSPGWLFTTDKSLADYVMKRIPELIKDLPELPRKSAEAAWKDYGEVILCDSNEEMAKISDKYASEHLEVHAENLDWWLKRLRNYGSLFLGEETTVAYGDKCSGTNHILPTKGGGRYTGGLFVGKFIKTLTFQRMTKEATKLVGSAAARLGRAEGMEAHARTADIRLKKYGY

SEQ ID NO: 84652 - protein, 188 aa, Unknown
  Bacterial polypetide isolated from the Sargasso Sea
MKQIKVNKNIYKELGAVLNRNNNLNTEDLYKKVKNIISNVKNNGDNALVKYSKKFDRVLLDKKKLKLDIKSFKTISKIDKNILKSFKKAIKNIERFHRKQLPKDIIQNKNDIMLKSQWKPIDSVGLYVPGGKAFYPSSLLMNVIPAKIAGVKRIVCVTPPAKEPNPYLLTLLKELKINETYFVGGAHG

SEQ ID NO: 84653 - protein, 187 aa, Unknown
  Bacterial polypetide isolated from the Sargasso Sea
NNKNNPHWVASDLIAQAEHDENAQSILITDDKIFATKVLNSIKKIKKDLPKKKIIEKSFKNNGIIVLVDNIELASKIINFIAPEHLHIHISDYAKLLSKINNAGGIFLGEYSVEAFGDYIVGTNHVLPTSGAAKFSSGLGVLDFMKRSSVVEMNKKSFHTLSDDTQKMSGLEGLDGHKLSVKIRQKK

SEQ ID NO: 84654 - protein, 169 aa, Unknown
  Bacterial polypetide isolated from the Sargasso Sea
MIKEINCNKKNYLDILTKFLDHRRSGKKPENKIISKILNDIKKNKIKALIKYEKKFSKNTQIKPSINEINNAIKFLDPNIKKAIDFAYKRILNFHNAQKTKNIFYKDNLNNKIEYKYVPIQSVGVYVPANLPSTLLMNAIPAKIAGVKKIVLANPKNNGKLNPASFICS

SEQ ID NO: 84655 - protein, 211 aa, Unknown
  Bacterial polypetide isolated from the Sargasso Sea
VGAMALGTDTISPVDMLVGPGNAFVAEAKRQLFGEVGIDLFAGPTETMVIADKTVDAELCATDLLGQAEHGYNSPAILITNDENLAKNTIEEIERILTILPTAETASISWKDYGEVILCDTYEEMLEVANNISSEHVQVMTSKDDWFLDNMHSYGALFLGPRTNVSNGDKVIGTNHTLPTKRAGRYTGGLWVGKFLKTHSYQKITSDEAGR

SEQ ID NO: 84656 - protein, 228 aa, Unknown
  Bacterial polypetide isolated from the Sargasso Sea
EIINSRKNFDEDITNQVNDIILDIKNNGDIGLFKYMSKYDNVECTAENICYNEEDIFSAKKNCTQESIEAIKLAKNRIEAFHKHQLPEDSVYKDQEEVSIKTRWIPLDSAGIYIPGGTASYPSSVLMGVIPAQVAGIKKISATVPCPNNQIDPLVLATLDLCGIEKIYKIGGAQAIAALTWGTESVDSVDIIIGPGNKWVAEAKKQALSNINIDMLAGPSEILILADE

SEQ ID NO: 84657 - protein, 203 aa, Unknown
  Bacterial polypetide isolated from the Sargasso Sea
MQVKIYKGYKSFSKSINVVENTEVSSTVHEILTNVRKCGDAALREYTKQFDKVIPDSWLVPESALEEALDNLEDDLFLVLQQAADNIMLFHERQKTDSHLDFSSDGSVLGWKVSPVDSAGIYIPGGRAAYPSTLLMNAIPAQIAEVQRIAVVSPPGPSGLPHPLVMATAAFMGLEELYAVGGAQSIAALAYGTESIEKVIKIT

SEQ ID NO: 84658 - protein, 222 aa, Unknown
  Bacterial polypetide isolated from the Sargasso Sea
MKILKSKSRNFNKQLDDLLLRRKTKLKTSSVSVIKIINDVKKNGDKALLKYEKKFNQNRVIKPSFSQIKKSINSLDLKVKNAIDLAYSRIYKFHSLQKFENISYTDKLKNKLEYKYLPIESVAIYVPGSSASYPSSVLMNAIPAIVAGVKRIIMINPGYKGKQNPAVLYAAQKCKIKEIYSIGGPSAIAAVAYGTKKINRVNKIVGPGNKYVAAAKKEVLEM

SEQ ID NO: 84659 - protein, 303 aa, Unknown
  Bacterial polypetide isolated from the Sargasso Sea
KEKIEEAIKKVDQKTKDDVQFAYERIRKFAEHQLKSMNNEFEVELSKGLFAGQRLIPISTAGCYIPGGRYAHISSATMAITPAKVAGVNTIICASPPKDVNGAHPGIIYAANLCGADIILNLGGVAAIGSMTYGCFGNPPVDFLVGAGNQYVSEAKRIVYGQVGIDQFAGPTEIAIIADKSADKEIVAVDIVGQAEHGYNSPGWLFTNDKSLADYVIKRIPELINELPELPKTSAEAAWRDYGEVILCDSNEEMAAISDKYAAEHLEVHAENLEWWLKRLKNYGSLFLGEETTVAYGDKCSGT

SEQ ID NO: 84660 - protein, 220 aa, Unknown
  Bacterial polypetide isolated from the Sargasso Sea
PPFKGKPNSAVVSAMKMGGAHEIYVLGGMQGVGAMAIGTETIKPVDMLVGPGNAFVAEAKRQLYGKVGIDLFAGPTETMVIADETVDGEICATDLLGQAEHGYNSPAVMITNSRKLAEETFKEIDRILEILPTKETASISWRDYGEMILCDTYEEMLSKANEIASEHVQVMTNKDDWFLENMTSYGALFLGARTNVANGDKVIGTNHTLPTKKAGRYTGG

SEQ ID NO: 84661 - protein, 310 aa, Unknown
  Bacterial polypetide isolated from the Sargasso Sea
CYVPAGRYAHIASAVMSVTTAKVAGVKNIIVCSSPKPIIGVHPTIIYTADLCGANVILNLGGVQAIAAMTNGLFGNTPADILVGPGNQFVAEAKRILFGKVGIDLFAGPTEIAIIADEKADPEIVAVDLVGQAEHGYNSPAWLFTTSENLAEEVIKRVPKLISELPELPKTNAEAAWKDYGEVVLCDTDEEMATISDEYAPEHLEVQTKNLDWFHKRLKNYGSLFVGEETTVAYGDKCSGTNHILPTKGAGKYTGGLFVGKFIKTLSFQRMTKESTELVGAAAARLSRYEGMEAHARTGDIRLKKYGYSK

SEQ ID NO: 84662 - protein, 278 aa, Unknown
  Bacterial polypetide isolated from the Sargasso Sea
MIKTLDIKTKNFEKTLISFLNLRRGYSSEKVAVVKKIINNVEKYGDRSLIKYEKKFNNIKILKRNNLFFSNQEIERNIKFLNQEVKDSIDLAFSRIFSFHKNQKFHSFKKRDKINNTFYYRSKPVEKVGIYVPGGKASYPSSVLMNCIPALIAGVSEIFMTVPSFNGRINPGVLYAAKKCKVKKIFKLSGAQAVAAFAFGTKTVPKVNKIVGPGNEYVALAKKEVSGITGIDMFAGPSEVTVVADKYSKPEWVSADLIAQSEHDEMSQSILVTNSRKL

SEQ ID NO: 84663 - protein, 428 aa, Unknown
  Bacterial polypetide isolated from the Sargasso Sea
MSIKYLKKSPKTSSTDDLKTREIVQNLLNDLEESREEGCKELTKKFDNYVGDILVSKSKIEEISKKLSQKNKDDIKFSYDRVRKFAEAQLKNYGQDFEVELSKGLYAGQKLVPVNTAGCYIPGGRYAHIASAVMSVTTAKVAGVKNIIACSPPKENIGAHPAIVYTANLCGADVILNLGGVPAIAAMTYGMFGNSEADILVGPGNQFVAEAKRILFGKVGIDLFAGPTEIGIIADESADPEIVAYDLVGQAEHGYNSPAWLFTTSEKLANDVMKIVPQLIEDLPELPRTSAEAAWKDYGEVVLCNTDEEMAKISDEYAPEHLELQTKNDKWFHNKLKNYGSLFIGEETTVAYGDKCSGTNHILPTKGAGKYTGGLFVGKFIKTLSFQRMTKESTKEVGAAAARISRYEGMEAHARTGDIRLRKYGYSN

SEQ ID NO: 84664 - protein, 285 aa, Unknown
  Bacterial polypetide isolated from the Sargasso Sea
VKNIIVCSSPKPNIGVHPSIIYTADLCGADVIMNLGGVQAIAAMTNGLFGNAPADILVGPGNQFVAEAKRILFGKVGIDLFAGPTEIAVIADETADSEMVAFDLVGQAEHGYNSPAWLFTTSKKLAEEVIKRVPELIADLPDLPRENAGAAWKDYGEVILCETDEEMATISDEYAPEHLEVQTKNLQWFHDRLKNYGSLFIGEETTVAYGDKCSGTNHILPTKGAGRYTGGLFVGKFIKTLSFQRMTKESTKEVGAAAARISRYEGMEAHARTGDVRLRKYGFSN

SEQ ID NO: 84665 - protein, 437 aa, Unknown
  Bacterial polypetide isolated from the Sargasso Sea
MAIEYLKKATKKPTTGEDQTRDTVSGILKDIEEVGEKKAIEYGIKLDGWDGDIIVSKDAIEESATKVTQQLKDDLQFAFDRVYGFARKQMESIQEFEVELSPGLWAGQKLIPMNTAGCYVPGGRYAHVASAIMSIATAKAAGVENIVACSTPKKEHGGIHPAILYTMNLCGADHILAMGGVQGIAAMAFGLFTESRADILVGPGNKYVAEAKRMLFGRVGIDLFAGPTEILIIADETADPEIVAVDLVGQAEHGIDSPAWLITTNRDFANKVMDRMQPLIEALPDVQREAANNAWRDFGEVVLCDTDEEAAKVSDQYAPEHLEVQTKNLDWYTNQLKNYGSLFIGEETTVAFGDKCSGTNHILPTKEAGRYTGGLSVHKFIKIVTTQRATEEANRDVAAITARISRLEGMEAHARTGDIRLAKYFPDETFNLQANES

SEQ ID NO: 84666 - protein, 428 aa, Unknown
  Bacterial polypetide isolated from the Sargasso Sea
MAINYLKKSPKTSSTDDTKTREIVENILKDIEKTKEEGCIELSKKFDKYEGEVVVTREKIEQIKKNLDPKTKDDIQFSHERVRKFAEAQLKNYGQDFEVELSDGLFAGQKLIPVNTAGCYVPAGRYAHIASAVMSVTTAKVAGVKNIIVCSSPKPGVGVHPAIVYTADLCGADVIMNLGGVQAIAAMTYGLFGNAPADMLVGPGNQFVAESKRILFGKVGIDLFAGPTEIAVIADETADPELVAFDLVGQAEHGYNSPAWLFTKSKKLAEYVMQRVPELIADLPDLPRENSGAAWRDYGEVILCDTDEELAKISDEYAPEHLEIQTKNLQWFHDRLKNYGSLFIGEETTVAYGDKCSGTNHILPTKGAGKYTGGLFVGKFIKTLSFQRMTKESTKEVGAACARISRYEGMEAHARTGDVRLRKYGFQN

SEQ ID NO: 84667 - protein, 322 aa, Unknown
  Bacterial polypetide isolated from the Sargasso Sea
MKYLKKSPKQPSTDDFKTREIVQKLLNELEKSREDGCKELTKKFDKYDGEIIVSKEKIEEIKKSLNQKTKDDIQFSYERVRKFAEAQLKNYGQDFEVELSKGLYAGQKLVPINTAGCYIPGGRYAHIASAVMSVTTAKVAGVKNIIACSPPKEGVGANPSVIYTADLCGADKILNLGGVPAIAAMTYGMFGNEPADMLVGPGNQFVAEAKRILFGKVGIDLFAGPTEIAIIADDTADPEIVAVDLVGQAEHGYNSPAWLFTTSKKLADQVLKRVPELISELPELPKTSAEAAWKDYGEVVLCDNNEEILKISDEYAPEHLEV

SEQ ID NO: 84668 - protein, 423 aa, Unknown
  Bacterial polypetide isolated from the Sargasso Sea
MKKSPKTSSTDDTKTREIVENILKDIEKTKEEGCIELSKKFDKYEGEVIVTREKIEQIKRNLDPKTKDDIQFSHERVRKFAEAQLKNYGQDFEVELSDGLFAGQKLIPVNTAGCYVPAGRYAHIASAVMSVTTAKVAGVKNIIVCSSPKPGVGVHPAIVYTADLCGADVIMNLGGVQAIAAMTYGLFGNAPADMLVGPGNQFVAESKRILFGKVGIDLFAGPTEIAVIADETADPELVAFDLVGQAEHGYNSPAWLFTTSKSLAEYVMKRVPELIADLPDLPRENSGAAWRDYGEVILCDTDEEMAKISDEYAPEHLEIQTKNLQWFHDRLKNYGSLFIGEETTVAYGDKCSGTNHILPTKGAGKYTGGLFVGKFIKTLSFQRMTKESTKEVGAACARISRYEGMEAHARTGDVRLRKYGFQN

SEQ ID NO: 84669 - protein, 388 aa, Unknown
  Bacterial polypetide isolated from the Sargasso Sea
MTIKYLKKAIKTPSTDDSKTRTTVQNILNDIEKRREEGIKEITKKFDNYDGEIILSKEKIEEAIKKVDQKTKDDVQFAHERIRKFAEHQLKSMNNEFEIELSKGLFAGQRLIPVNTAGCYIPGGRYAHISSATMAITPAKVAGVKTIICASPPKDKDGAHPGIIYAANLCGADVILNLGGIAAIASMAYGCFNNPEVDFLVGAGNQYVAEAKRILFGKVGIDLFAGPTEIAIIADKSADKEIVAADIVGQAEHGYNSPGWVFTTDKTLADYIMKRIPELIAELPEGPRSSAEPAWRDYGEVVLCDTDEDMAIISDKYAAEHLEVHAKNLNWWLKRLKNYGSLFLGEETTVAYGDKCSGPNHILPTKGAGKYTGGLYVGKFIKCLTFSR

SEQ ID NO: 84670 - protein, 318 aa, Unknown
  Bacterial polypetide isolated from the Sargasso Sea
MTIKYLKKASKTASTDDTKTKDIVQKLLRELEKSKEDGCKELTKKFDKYDGEIVVSKEKIEEINKNLDQKTKDDIKFSYDRVRKFAEAQLANYGKDFEVELSDGLYAGQKLVPVNTAGCYIPGGRYAHIASAVMSVTTAKVAGVKNIIACSPPKEGVGAHPSIVYTANLCGADIILNLGGVPAIAAMTYGMFGNAPADILVGPGNQFVAEAKRILFGTVGIDLFAGPTEIGIIADETADPEIVAVDLVGQAEHGYNSPCWLYTTSQKLADEVMKRVPELIEKLPEVPRLSAEAAWRDYGEVILCDTDEEMVKVSDDYA

SEQ ID NO: 84671 - protein, 378 aa, Unknown
  Bacterial polypetide isolated from the Sargasso Sea
MAINVLKKSKTEIEKAAEDAKVREVVEATLGEIEKNGDAAVRELSKKFDNYSPNKFKLTKSEIDAAMHNVSARDMDDIKFAQLQIKNFAEAQRASMTDIEIETMPGVILGHRNIPVQSVGCYVPGGKFPMVASAHMSVLTASVAGVPRIIASAPPVNGEPHPAIVAAMHLGGAHEIYVIGGIQAVGAMAIGTETIDPVHMLVGPGNAFVAEAKRQLYGRVGIDLFAGPTETMVIADETVDAELCATDLLGQAEHGYNSPAAMITCSEKLARETLIEIERILEILPTSETASASWENYGDMILCDTHEEMLSVANDMAYEHVQIMTDRDDWYLENMHSYGALFLGPRTNVANGDKVIGTNHTLPTKKAGRYTGGLWVGK

SEQ ID NO: 84672 - protein, 342 aa, Unknown
  Bacterial polypetide isolated from the Sargasso Sea
SMQDIEIETMPGVILGHKNIPVQSVGCYVPGGKFPMVASAHMSIVTANVAKVPRIIASTPPFQGKPNPAVIAAMHLGGAHEIYILGGIQAVGAMALGTDTISPVDMLVGPGNAFVAEAKRQLFGEVGIDLFAGPTETMVIADKTVDAELCATDLLGQAEHGYNSPAILITNDEKLAKNTIEEIERILTILPTAETASISWKDYGEVILCDTYEEMLEVANNISSEHVQVMTSKDDWFLDNMHSYGALFLGPRTNVSNGDKVIGTNHTLPTKRAGRYTGGLWVGKFLKTHSYQKITSDEAAVKIGKYCSRLSMLESFVGHAEQANIRIRRYGGQNIPYGKAAE

SEQ ID NO: 84673 - protein, 341 aa, Unknown
  Bacterial polypetide isolated from the Sargasso Sea
MSITYLKKANKTASTDDTKTREIVENLLSELEKTKEDGCKNLTKKFDKYDGEIIVSKEKIEEIKKNIDQKTKDDIKFSYDRVRKFAEAQLKNYGQNFEVELSEGLFAGQSLIPINTAGCYVPAGRYAHIASAVMSITTAKVAGVKNIICCSSPKPETGAHPKIIYTADLCGADVILNLGGVQAIAAMAFGFFGNAPADILVGPGNQFVAEAKRILFGKVGIDLFAGPTEIAIIADKTADPEIVAYDLVGQAEHGYNSPAWLYTTDKSLAEKVMKRVPELIADLPELPKTNAEAAWRDYGEVILCETNEEMAKISDEYAPEHLEVQTDNLDWWLKRLKNYGS

SEQ ID NO: 84674 - protein, 428 aa, Unknown
  Bacterial polypetide isolated from the Sargasso Sea
MAITYLKKSPKTSSTDDTKTREIVENILKDIETSKEEGCKELSKKFDKYEGDVIVSKEKIEEIKKNLDQKTKDDIQFSHERVRKFAEAQLKNYGQDFEVELSDGLFAGQKLIPVNTAGCYVPAGRYAHIASAVMSVTTAKVAGVKNILVCSSPKPGVGVHPSIVYTADLCGADVIMNLGGVQAIAAMTNGLFGNAPADILVGPGNQFVAEAKRILFGKVGIDLFAGPTEIAVIADETADPEMVAYDLVGQAEHGYNSPAWLFTKSKKVADYVMERVPELIADLPDLPRENSGAAWRDYGEVILCDTDEEIAKVSDEYAPEHLEVQTKNLQWYHDRLKNYGSLFIGEETTVAYGDKCSGTNHILPTKGAGRYTGGLFVGKFIKTLSFQRMSKAATKEVGAACARISRYEGMEAHARTGDVRLRKYGFQN

SEQ ID NO: 84675 - protein, 440 aa, Unknown
  Bacterial polypetide isolated from the Sargasso Sea
MEKINIYKYSRLSQSEILNLCKRAESNLSDYFEIVDEIIKNVEENKENALVEYSKKLDNVKSGLREFKVSEEEFSRAHDLIDEGMKEALIFCSANVKKFHEAQMPKKEWMIEMHPGVLAGEKNLPIESVALYVPRGKGSFPSVAMMTSIPAVIAGVKTPVIFTPPEEDGTVDCATLVAAEIAGVNNVFKIGGAQAVAAAAFGTETIPKCLKIVGPGSPWVAAAKSRLSHVIDTGTPAGPSEAIVFADQSANGKLVALDLLIEAEHGSDSSAYLISNSNNVIQEAKDFIPQCFQNMTKERVKYATDVLCGRRGGIIQVDNTDQALDFINLYAPEHLQIHSKNPDQYLDNIKNAGEIMLGEFSPMSIANFSLGPNNVIPTNAWAKTKSPLSVHDFIKSTSIGKIDNKGFAKLSPYARKFAEHEGFDAHANAVSQMRLDALKK

SEQ ID NO: 84676 - protein, 419 aa, Unknown
  Bacterial polypetide isolated from the Sargasso Sea
MAIEYLKKGLDEKQRIEDNDKVKKIVEETLRKIESEGDEHIRELSQKFDNYSPDSFRLSEEQINQLMSEVSDHDKEDIKFAQKQVRSFAEAQLKTLSELEVETHPGVILGHKNIPVQAVGCYVPAGKFPMVASAHMSVVTASVAGVPRIVATTPPFKGKPNPAVVTAMKMGGAHEIYVLGGMQGVGAMAIGTETIKPVDMLVGPGNAFVAEAKRQLYGRVGIDLFAGPTETMVIADETVDGEICATDLLGQAEHGYNSPAVMITNSRKLADETFKEIDRILEILPTKETANTSWRDYGEIILCDTYEEMLSKANEIASEHVQVMTKKDDWFLENMTSYGALFLGARTNVANGDKVIGTNHTLPTKKAGRYTGGLWVGKFIKTHTYQKITTDEAATLIGEYGSRLSHLEGFIGHAEQCNV

SEQ ID NO: 84677 - protein, 232 aa, Unknown
  Bacterial polypetide isolated from the Sargasso Sea
MKFLNINNKSFYKELDFILKKRSHNNSTKVDNEVYQIIQQVKSHGDKALFKYAKKFDKSSINKKNILLSKEVLQSYKNKIDDDILTAFRIAIHNITNFHKKQMPKSFQIKKHGVKTNSKWSPIQSVGLYIPGGIASYPSSLIMNVIPAKVSGVKRIVLMTPAKSNKINPYVLALIDELKLNEVYQIGGAHSIAALAFGTESIKPVNKIFGPGNAYVASAKKQVFGDVGIDLI

SEQ ID NO: 84678 - protein, 423 aa, Unknown
  Bacterial polypetide isolated from the Sargasso Sea
MAIKYLKKSPKTSSTDDTKTREIVENILKDIEVKKEEGCKELGKKFDKYDGEIIVSKEKIEEIKKNLDQKTKDDIQFSHERVRKFAEAQLKNYGQDFEVELSEGLYAGQKLIPVNTAGCYVPAGRYAHIASAVMSVTTAKVAGVKNILVCSSPKPKIGVHPSIIYTADLCGADVIMNLGGVQAIAAMTNGLFGNAPADILVGPGNQFVAEAKRILFGKVGIDLFAGPTEIAVIADETADPEIVAFDLVGQAEHGYNSPAWLFTTSKKLAEEVIKRVPELIADLPELPKQSAGDAWRDFGEVILCDNDEEMAKISDEYAPEHLEVQTKNLKWFHERLKNYGSLFIGEETTVAYGDKCSGTNHILPTKGAGRYTGGLFVGKFIKTLSFQRMTKESTKEVGAAAARISRYEGMEAHARTGDVRLRK

SEQ ID NO: 84679 - protein, 340 aa, Unknown
  Bacterial polypetide isolated from the Sargasso Sea
IKKLWAKILKLNFQTVYSAGQKLIPVNTAGCYVPAGRYAHIASAVMSVTTAKVAGVKNILVCSSPKPNVGVHPSIVYTADLCGANVIMNLGGVQAIAAMTNGLFGNAPADILVGPGNQFVAEAKRILFGKVGIDLFAGPTEIAIIADETADSEIVAYDLVGQAEHGYNSPAWLFTKSKKLAEEVIKRVPELIADLPELPKQSAGDAWRDFGEVILCDTDEEMAKISDEYAPEHLEVQTKNLKWFHDRLKNYGSLFIGEETTVAYGDKCSGTNHILPTKGAGRYTGGLFVGKFIKTLSFQRMTKESTKEVGAAAARISRYEGMEAHARTGDVRLRKYGFSN

SEQ ID NO: 84680 - protein, 229 aa, Unknown
  Bacterial polypetide isolated from the Sargasso Sea
LVGPGNQFVAEAKRILFGKVGIDLFAGPTEIGIIADDTADPEIVAVDLVGQAEHGYNSPAWLYTTSQKLADAVMKRVPELIDELPEVPRLSAEAAWRDYGEVILCDTNEEMVKVSDDYAPEHLELQTKDLKWFHEKLKNYGSLFIGEETTVAYGDKCSGTNHILPTKGAGKYTGGLFVGKFIKTLSFQRMTKESTKEVGAAAARISRYEGMEAHARTGDVRLRKYGYSN

SEQ ID NO: 84681 - protein, 240 aa, Unknown
  Bacterial polypetide isolated from the Sargasso Sea
MQQLLMEQKKIDRVNKIVGPGNKYVAAAKKEVFGDVGVEGMIAGPSEVTVVGDRFSNPGWIASDLIGQAEHDELAQCILISKSKDLIIQTKQEISKQLKKIPRTAIARKSLSNNGILIKVNSDKQITDIVNKIAPEHLELNVKNYKSFISRIKNAGSICLGKYAVMAMTDYNAGSNHILPTNGSAKFSSGISVNEFYKRISYINLSKKGIEKLGPSVITLANYEGLAAHAQSVKKRIRRK

SEQ ID NO: 84682 - protein, 428 aa, Unknown
  Bacterial polypetide isolated from the Sargasso Sea
MAIQYLKKSPKTSSTDDTKTREIVENILKDIEKTKEEGCKELSKKFDKFEGDVIVSKEKIEEIKKSLDQKTKDDVQFSHERVRKFAEAQLKNYGQDFEVELSEGLYAGQRLIPVNTAGCYVPAGRYAHIASAVMSVTTAKVAGVKNILVCSSPKPGVGVHPTIVYTADLCGADVIMNLGGVQAIAAMTNGLFGNAPADILVGPGNQFVAEAKRILFGKVGIDLFAGPTEIAIIADETADPEIVAVDLVGQAEHGYNSPAWLYTTSKELAEKVMKRVPELIAELPELPRTNAEAAWRDYGEVVLCDTDEEMATISDEYAPEHLEVQTKNLDWFHNRLKNYGSLFVGEETTVAYGDKCSGTNHILPTKGAGRYTGGLFVGKFIKTLSFQRMTKESTELVGAAAARLSRYEGMEAHARTGDVRLKKYGYTG

SEQ ID NO: 84683 - protein, 337 aa, Unknown
  Bacterial polypetide isolated from the Sargasso Sea
NYGQDFEVELSNGLFAGQKLIPVNTAGCYVPAGRYAHIASAVMSVTTAKVAGVKNILVCSSPKPNIGVHPSIVYTADLCGADVIMNLGGVQAIAAMTNGLFGNAPADILVGPGNQFVAEAKRILFGKVGIDLFAGPTEIAVIADETADPEMVAYDLVGQAEHGYNSPAWLFTTSKKVADYVMQRVPELIADLPELPKQNSEAAWRDYGEVILCDTDEEMAKISDEYAPEHLEVQTKNLEWFHQRLKNYGSLFIGEETTVAYGDKCSGTNHILPTKGAGRYTGGLFVGKFIKTLSFQRMTKESTKEVGAACARISRYEGMEAHARTGDVRLRKYGFSN

SEQ ID NO: 84684 - protein, 407 aa, Unknown
  Bacterial polypetide isolated from the Sargasso Sea
MKKAQLTPKSNASEVHETVKNILTDIEAGGDEKAKEYASKFDQYKGSIILTDEEIEVASELVPAKLKKDIEFAHDNVKRFAEKQKETLKNTEIEIHPGFVTGQKVIPVDAAGCYVPGGRYSHIASAIMTVTTAKVAGCKFITACSPPKPNIGVAPAIVYAAHICGADKIMAMGGVQGVASMTYGLFGLPQANILVGPGNQFVAEAKRILFGRVGIDMIAGPTDSLILADETADPFIVATDLVSQAEHGYNSPVWLVTDNEALASKVMNLVPNLIDDLPETNRDNAAAAWRDYAEVIVCDNREEMAACSDEYAPEHLTVQADDLDWWLERLTCYGSLFLGEETTVSYGDKAAGTNHVLPTSRAANYTGGLSVHKYMKIVTYQRATREGSKSIAEATARISRLGGNGRS

SEQ ID NO: 84685 - protein, 245 aa, Unknown
  Bacterial polypetide isolated from the Sargasso Sea
FSMGGAQAIASLAFIQKVNKVVGPGNKYVAEAKRQLSGKIIGTETMYAGASEICVLADKDSDISQVATSLVSQAEHDPDSQCILVTKDKNLIKKTLIEVKKILSDLPRKIIASRSLKKNGLFILVKNDKQIVEIINEIAPEHLELNVKNFKKYENKIKNAGSICNGPNTPMSASDYTVGTNHVLPTFGSSKFSSGLNLNEFTKKISIVTLSKLGVEKIGNPAITLSEFEQLLGHTQSIKSRIRRN

SEQ ID NO: 84686 - protein, 420 aa, Unknown
  Bacterial polypetide isolated from the Sargasso Sea
MDFDKLLNNLLSKRKNKLRSDYISVKNIIKDVRKNGDKALLKYEKRFNKNKTIIPNTKKIKASIKSLDQKVKKAIDAAYNRIYKFHSLQKFKDVSYIDRYENKVKYRYVPLESVAIYVPGSKVSYPSSVLMSAIPAIVAGVKRIVMINPGYKGRQNAAVLYAARKCKIKEIYSIGGPSAIAAAAYGTKSIKPVNKIVGPGNSYVASAKKEVFGDIGIESMTAGPSEVLVVCDNKSNPEWLASDLIAQAEHDSLAQCILISKDKNILKKTKSEITNQLKNISRSSIAKKSLMTNGILIYENSENRIAEIINKVGPEHLELNIKNYKSLIPKIKNAGSICLGKYAVMAMTDYGVPGTNHVLPTNMTSKYSSGLSVSEFIKKISYINLSKKGIETLGPSVITLATNEGLDGHAKSIKKRLGEL

SEQ ID NO: 84687 - protein, 428 aa, Unknown
  Bacterial polypetide isolated from the Sargasso Sea
MAITYLKKSPKTSSTDDTKTREIVENILKDIEKTKEEGCIELSKKFDKYEGEVIVTREKIEEIKKNLDPKTKDDIQFSHERVRKFAEAQLKNYGQDFEVELSDGLYAGQKLIPVNTAGCYVPAGRYAHIASAVMSVTTAKVAGVKNIIVCSSPKPGVGVHPAIVYTADLCGADVIMNLGGVQAIAAMTYGLFGNAPADMLVGPGNQFVAESKRILFGKVGIDLFAGPTEIAVIADDTADPELVAFDLVGQAEHGYNSPAWLFTTSKKLADYVMQRVPELIADLPDLPRENSGAAWRDYGEVILCDTDEEMAKISDEYAPEHLEIQTKNLQWFHDRLKNYGSLFIGEETTVAYGDKCSGTNHILPTKGAGKYTGGLFVGKFIKTLSFQRMTKESTKEVGAACARISRYEGMEAHARTGDVRLRKYGFSN

SEQ ID NO: 84688 - protein, 314 aa, Unknown
  Bacterial polypetide isolated from the Sargasso Sea
NTAGCYIPGGRYAHIASAVMSVTTAKVAGVKNIIACSPPKEEVGAHPTIVYTADLCGADVILNLGGVPAIAAMTNGLFKNPPADIIVGPGNQFVAEAKRILYGKVGIDLFAGPTEIGIIADAKADPEIVAVDLVGQAEHGYNSPCWLYTTSKELAEKVMKRVPELIAELPEVPRTSAEAAWRDYGEVILCDTDEEIVKISDEYAPEHLEVQTENLEWFHERLTNYGSLFVGEETTVAYGDKCSGTNHILPTKGAGRYTGGLFVGKFIKTLSFQRMTKESTKLVGAAAARISRYEGMEAHARTGDVRLRKYGFSN

SEQ ID NO: 84689 - protein, 418 aa, Unknown
  Bacterial polypetide isolated from the Sargasso Sea
MTIKYLKKAIKTPSTDDNKTRAAVQSILDDIEKRREEGIKEITKKFDKYDGEIIVSKEKIEEAIKKVDQKTKDDVQFAHERIKKFAEHQLKSMNNEFEVELSKGLFAGQRLIPVNTAGCYIPGGRYAHISSATMAVTPAKVAGVNTIICASPPKDKNGAHPGIIYAANLCGADIILNLGGVAAIGAMTYGCFGNPPVDFLVGAGNQYVAEAKRIVYGQVGIDQFAGPTEIAIIADKSADKEIVAADIVGQAEHGYNSPGWLFTTDKSLADYVMKRIPELINELPELPKTSAEAAWRDYGEVILCDSNEEMAKISDKYASEHLEVHAENLDWWLKRLKNYGSLFLGEETTVAYGDKCSGTNHILPTKGGGRYTGGLFVGKFIKTLTFQRMTKEANKIVGATAARLGRAEGMEAHARTGD

SEQ ID NO: 84690 - protein, 422 aa, Unknown
  Bacterial polypetide isolated from the Sargasso Sea
KKSPKTSSTDDTKTTEIVNILLKEIENSKEDACINLTKKFDKYDGEIIVSKERIEKIKKELDQKTKDDIQFSHERVRKFAEAQLKNYGQDFEVELSPGLFAGQKLIPVNTAGCYIPGGRYAHIASAVMSVTTAKVAGVKNIIACSPPKEGVGAHPAIVYTADLCGADVILNLGGVPGIAAMTNGLFKNPPADILVGPGNQFVAEAKRILFGKVGIDLFAGPTEIAVIADDKADAEMVAVDLVGQAEHGYNSPAWLYTTSKRLAEEVLKRVPELIAELPEVPRTSAEAAWRDYGEVILCDTDEEMATISDEYAPEHLEVQTQNLEWFHKRLKNYGSLFIGEETTVAYGDKCSGTNHILPTKGAGRYTGGLFVGKFIKTLSFQRMTKESTKSVGAACARISRYEGMEAHARTGDARLRKYGFSN

SEQ ID NO: 84691 - protein, 440 aa, Unknown
  Bacterial polypetide isolated from the Sargasso Sea
MTIQYLKKGIAEQERSAENDKVKNIVEETLKKIEQQGDQYVRELSEKFDNYSPTSFRLIDSEIQNLISKVSEDDIEDIKFAQKQIRQFAEAQLATLKELEVETLPGVILGHKNIPVQSVGCYVPAGKFPMVASAHMSVVTASVADVPRIVATTSPFQSKPNPAVIAAMHLGGAHEIYVLGGMQGIGAMAIGTETIKPVDMLVGPGNAYVAEAKRQLFGKVGIDLFAGPTETMVIADDTVDGELCATDLLGQAEHGYNSPAVLITNSKNLAESTLLEIERILQILPTKETASISWRDYGAVILCDSYEEMLDKANEIASEHVQVMTKKDDWFLENMKSYGALFLGPRTNVANGDKVIGTNHTLPTKKAGRYTGGLWVGKFIKTHTYQKVLTDEAATLIGEYGSRLSYLEGFLGHAEQCNIRLRRYGGRNIEYAKAAKKIKN

SEQ ID NO: 84692 - protein, 168 aa, Unknown
  Bacterial polypetide isolated from the Sargasso Sea
MKKIINTSNSGFSQEFENLVNTNRSDDKDVKDVVANIINDVRTNGDDALIKYTNQLDRNELSKSNFILDETAINNQTDGLSEKICEAIQTAADRVRAYHEKQLPQDLSFNDDLKSTLGYMWKPLETAGIYVPGGTASYPSTVLMNSIPAMVAGVKDIVMATPLTDGQI

SEQ ID NO: 84693 - protein, 226 aa, Unknown
  Bacterial polypetide isolated from the Sargasso Sea
MNKIDLKDKVAIVTGGVQGFGLAVVERFLNSDANVVIWENDKKLLDKFQTISNVHKIQTDVSNAESVEAAVNETINKCGRIDILVNNAGIAGPNHKTWEYPNEDWQKVIDIDLTGVFYCCKYVVPQMIKNNYGRIVNVASIAGKEGNPNAMPYSAAKAGVMAITKSLGKELADKNIAVNCITPAAAKTRIFDQISQEHIDYMLSKIPRNRFLKVEELASMVAWLVS

SEQ ID NO: 84694 - protein, 416 aa, Unknown
  Bacterial polypetide isolated from the Sargasso Sea
MKILSDVESTLEYIKELRKSTYSNILTSGNGFFEKDYSVEEYVKKIMDMTKLNGDDFLFELSSKLDDEQFGNLQISEKELKNSVDRISKEERNILENTISRIENFQKKTLIKNWFDEKNGYGEYIKPIKSVGCYIPGGTAPLISTVLHTVIPAKVAGVKQISIASPATGIEMPNNMLLAAAYLSGVDNFYTYGGPQAIISMAVGTKKVSKVDMICGPGNIFVMTAKKLVYGEVGLDGIFGPTETMIVADSSSNIEYVVGDLMAQAEHDVLALPMMATNSLEFAKDIQFFYKNKLNSMKRKHIIEKSMNRGFISVLQDEKEIIELVNQVAPEHLSIASEKLINISEKIDSAGSIFLGEISSEVLADYVAGPSHVMPTNGSARYSSSLSSRTFQKSIPVLAIDKKTFKEICNDAENFA

SEQ ID NO: 84695 - protein, 429 aa, Unknown
  Bacterial polypetide isolated from the Sargasso Sea
MLEIRELEKNQENFESKFSSFLISRNKISNEISVIVNKIINEVREDGDQALRKITKRLDDFDCPTFQVTETEINTALKSFDKELLHSFEFAFEQLLEYQTSCFNSLDLKNSNEQITRKFRVLDSVGMYVPGGKASYPSTVLMGAAPAIACGVEEISLSSPTQHGVLNPATLAAAKVTGIKKIYKLGGAQAIAALALGTKQVDKVDKIIGPGNVYVAEAKKQLFGEVGIDSIAGPSEIVILCNETSDPETVAWDLMAQAEHDSDASSILISTSEELISEVKSLIAKNIDTLSRSKIITESLVSNGLIVKIDKLSEAEKLVNQLIPEHLHIAFEQRFEEEENLKAGLILKGKDSAVSLSDYVLGPSHILPTSSSARFSSPLSVEDFLVSFSYVSLDRNNNPDIFDKYIKHTSNIARAEGLTAHAIAAEKRK

SEQ ID NO: 84696 - protein, 383 aa, Unknown
  Bacterial polypetide isolated from the Sargasso Sea
MTITYLKKSPKTSSTDDTKTTGIVQDLLKDLDNTKEQGCIDLTKKFDKYDGEIVVSKERIEEIKKSLDQKTKDDIQFSFDRVRKFAEAQLKNYGQDFEVELSDGLYAGQKLIPVNTAGCYIPGGRYAHIASAVMSVTTAKVAGVKNIIACSPPKEGVGAHPTIVYTADLCGADVILNLGGVPAIAAMTNGLFNNPPADIIVGPGNQFVAEAKRILFGKVGIDLFAGPTEIGIIADAKADPEIVAVDLVGQAEHGYNSPCWLYTTSKELAEKVIKRVPELIAELPEVPRQSADAAWRDYGEVILCDTDEEMVKISDEYAPEHLEVQTKNLKWFHERLTNYGSLFVGEETTVAYGDKCSGTNHILPTKGAGRYTGGLFVGKFIKT

SEQ ID NO: 84697 - protein, 249 aa, Unknown
  Bacterial polypetide isolated from the Sargasso Sea
GVQAIAAMTNGLFGNAPADILVGPGNQFVAEAKRILFGKVGIDLFAGPTEIAVIADETADPEMVAYDLVGQAEHGYNSPAWLFTKSKKVADYVMQRVPELIADLPDLPRENSGAAWRDYGEVILCDTDEEIAKVSDEYAPEHLEVQTKNLKWYHDRLKNYGSLFIGEETTVAYGDKCSGTNHILPTKGAGRYTGGLFVGKFIKTLSFQRMSKAATKEVGAACARISRYEGMEAHARTGDVRLRKYGFSN

SEQ ID NO: 84698 - protein, 280 aa, Unknown
  Bacterial polypetide isolated from the Sargasso Sea
AKLAKVRRIILSTPKIDGKLNAGVLYAAKKVGIKEIISCGGAQAIACLAFIYKCNKIVGPGNKYVAEAKRILSGKIVGTEAGFNGPSEICVLADKYSNINQVASSLISQAEHDVDSQCILVTKDKNLIKKVNKKIIELIKNLPRRKIAMQSLKKNGIIVKVKTDKQIIDILNCISTEHLELLVKNYNKYTKKIYNAGSILNGEYSPMCASDFTVGTNHVLPTSGSAKFSSGLNINDFVKKISIVTLTKIGVAKIANQAITLSEFEGLRGHTQSIKSRIRR

SEQ ID NO: 84699 - protein, 277 aa, Unknown
  Bacterial polypetide isolated from the Sargasso Sea
SPKPEIGVHPSIVYTADLCGADVIMNLGGVQAIAAMTNGLFGNAPADILVGPGNQYVAEAKRILFGKVGIDLFAGPTEIAVIADETADPEMVAYDLVGQAEHGYNSPAWLFTTSKKIADYVMKRVPELIADLPKLPRENSEAAWKNYGEVILCDTDEEIAKISDEYAPEHLEVQTKNLNWFHKRLKNYGSLFIGEETTVAYGDKCSGTNHILPTKGAGKYTGGLFVGKFIKTLSFQRMTKESTKEVGAAAARISRYEGMEAHARTGDVRLRKYGFSN

SEQ ID NO: 84700 - protein, 422 aa, Unknown
  Bacterial polypetide isolated from the Sargasso Sea
MIKIFDCKNPNYLSKLRLVLEKRRHGNKINTDHVIKIVKDIKINKQKALIKYEKKFSKNSKIKPSKKEINNSIKSLDPKIKNAIDFAFSRILKFHSLQKINNIKYTDKLNNKIEYKYIPIQSVGIYVPHNLPSTLLMNAILAKKIVGVKRVVLANPRLNGKLNPAVMYAAKKCGISEIINASGSQAIASLAYIQKVNKIVGPGNDFVARAKKQVFGDVGIEGMVAGPSEITVVADKNTNLKEVLTSLIGQAEHDPNSQCILVSNNKNFIKSFQKNLKNELNKIPRKNIAKKSLLRNGLIIRVYNNKQIVDSINEIAPEHLELNLKNYKKLINKIINVGSVCIGKYSAMAVTDYNVGTNHILPTLGSAKFSSGLNVSEFYKKISYIKLSKKGIEVIGKKAITLAEYEGLIGHAQSIKSRIRRS

SEQ ID NO: 84701 - protein, 250 aa, Unknown
  Bacterial polypetide isolated from the Sargasso Sea
EIYSFGGPSAIAAVAYGTKKIKKVNKIVGPGNAYVTAAKKEVFGDVGIEGMIAGPSEVTIVCDKFSNPEWIASDLIGQAEHDLLAQCILISKDKRFIKKVKIEIFKQLKEIPRNFIAKKSLINNGILIHISSDKKITDVINKIAPEHLELNVKNYKSLVKKINNAGSICLGKYAVMAMTDYNVGSNHVLPTNGSAKYSSGISVNEFYKRISYVNLSKKGIESLGPSVITLANYEGLAGHAYSVKKRIRRK

SEQ ID NO: 84702 - protein, 332 aa, Unknown
  Bacterial polypetide isolated from the Sargasso Sea
MVLFSGHKNIPVQSVGCYVPGGKFPMVASAHMSVLTASVAGVPRIVASAPPVNGQPHPAIVAAMKLGGAHEIYVLGGIQAVAAMALGTETIKPVHMLVGPGNAFVAEAKRQLFGRVGIDLFAGPTETMVIADETVDGEMCATDLLGQAEHGYNSPACLITNSKKLAQDTLNEIDRILKILPTSETAKVSWEDYGDIILCDDHLEMLSVANEMAYEHVQVMTERDEWYLENMHSYGALFLGPRTNVANGDKVIGTNHTLPTKKAGRYTGGLWVGKFLKTHSYQKIKTDDAAVKIGEYGHRLCMLEGLVGHAEQCNLRVRRYGGKNIPFGSAAE

SEQ ID NO: 84703 - protein, 188 aa, Unknown
  Bacterial polypetide isolated from the Sargasso Sea
DKDTNVNQVVTSLVSQAEHDSNSQCILVTKDKKIINNVKKGILISLKNLPRKKIAASSIKKNGLIVKANNDKQIIDVINEIAPEHLELNVKNYTKYSKKIFNSGSICNGRYTPMSVSDYTVGTNHVLPTLGSSKFSSGLNINEFIKRISVVTLTKLGVEKIGNPAITLSEFEQLDGHAQSIKSRIRRN

SEQ ID NO: 84704 - protein, 425 aa, Unknown
  Bacterial polypetide isolated from the Sargasso Sea
KYLKKAVKTASTDDTKTRDIVQNLLSELEKSKEDGCKELTKKFDKFDGEIVVSKEKINEINKSLNQKTKDDIQFSYERVRKFAEAQLKNYGQDFEVELSKGLYAGQKLVPVNTAGCYIPGGRYAHIASAVMSVTTAKVAGVKNIIACSPPKEKMGAHPAIIYTANLCGADVILNLGGVPAIAAMTYGLFGNEPADILVGPGNQFVAEAKRILFGKVGIDLFAGPTEIAIIADETADPEIVAVDLVGQAEHGYNSPAWLYTTSKKLAEQVMKRVPELISELPELPRTSAEAAWKDYGEVILCDTDEEMAKISDEYAPEHLEVQTKNLKWFHDRLKNYGSLFIGEETTVAYGDKCSGTNHILPTKGAGKYTGGLFVGKFIKTLSFQRMTKESTKEVGAAAARISRYEGMEAHARTGDVRLRKYGYSN

SEQ ID NO: 84705 - protein, 379 aa, Unknown
  Bacterial polypetide isolated from the Sargasso Sea
KVMLLVSQEKIEKVIKSLDQKVKDDVQFSYDRVRSFAEHQLKHLNNDFEVELSPGLFAGQKLIPVNSVGCYVPGGRYNNIASAVMSITTAKVAGVKNVIAASPPKDENGANPIIIYTANLCGADVIMNCGGIGAIGAFAYGCFGNPEVDMIVGPGNQYVAEAKRILYGKVGIDLFAGPTEIGIIADHTADKEMIAVDLVGQAEHGPNSPAWLYTTDKELCDYVMKRVPELIAELPETSKNNADAAWRDYGEVVLCDTNEELCQVSDEYAPEHLEVQAEHLDWWLDKLKNYGSLFLGEETTVAYGDKCSGTNHILPTKGAAKYTGGLFVGKFIKTVTFQRMTKESNKEVGAAAARISRLEGMEAHARTGDARLRKYGFQN

SEQ ID NO: 84706 - protein, 253 aa, Unknown
  Bacterial polypetide isolated from the Sargasso Sea
MNIGGIGAIGAFAYGCFGNPEVDMIVGPGNQYVAEAKRILYGKVGIDLFAGPTEIGIIADHTADKEMIAVDLVGQAEHGPNSPAWLYSTDKKLCDYVMKRVPELIAELPETSKNNAEAAWRDYGEVILCDTNEELCEISDQYAPEHLEVQTENLDWWLEKLKNYGSLFLGEETTVAYGDKCSGTNHILPTKGAAKYTGGLFVGKFIKTVTFQRMTKESNKEVGAAAARISRLEGMEAHARTGDARLRKYGFQN

SEQ ID NO: 84707 - protein, 428 aa, Unknown
  Bacterial polypetide isolated from the Sargasso Sea
MAKWLKQAISKQDKDEAQQQVRETVEKLLADIETRGDTAVRELSKRFDNWEPEKFKLSEEQIQECINRLDTRTLDDIRFAQDQIRNFAQLQRDSMKDVEEETLPGVILGHRHIPMNRVGSYVPGGKFPMVASAHMSVVTAKVAGVKDIITCAPPYQGKPADAIVAAQSMGGADGIYVIGGVQAVAAMALGTESIPAVDMLVGPGNAYVAEAKRQLYGRVGIDLFAGPTETLVIADKTVDGEMCATDLLGQAEHGPTSPAILLTNSEILAKQTMEEVDRQLNTLSTSDTAAPAWRDYGQVIVADSYDEMVEIANDLAFEHVQVMTDRDDWFLENMSNYGSLFLGPRTNVSYGDKVIGTNHTLPTLKAARYTGGLWVGKYIKTCTYQKLLTDEATVKIGEYCSRLCELEGFAGHQEQADLRVRRYRKEAA

SEQ ID NO: 84708 - protein, 170 aa, Unknown
  Bacterial polypetide isolated from the Sargasso Sea
MIEKIINPPREKWKKINTRPNYSSQLIDNKVKKIFMSVKKNGDKALFRYAEKYEGVKLKKLNVKQENIQNSKNLISEDLKNSIKIAKKNIEKFHRSQKSKSDHIIIEKGIECWLEKRPIEKVGLYIPGGSAPLFSTILMLAIPAKIVGCDEIIICSPPNREGKIPAVILY

SEQ ID NO: 84709 - protein, 183 aa, Unknown
  Bacterial polypetide isolated from the Sargasso Sea
MIKILNTKSKDFKKKFNYYLNIRRKYSSSKISVVKKIVNDVKKNKDKSLIKYEKKFNNIKSLNVNKLFYSKNEIEKSVKTLDKKIKNSIDIAFNRIFYFHKNQKFKSFKLKDNFNNSLSYRSKPINKIGVYVPGGRASYPSSVLMNCIPALIAGVKEIYMTVPSINKKINPGVLYAAKKLKLK

SEQ ID NO: 84710 - protein, 428 aa, Unknown
  Bacterial polypetide isolated from the Sargasso Sea
MTITYLKKSPKTSSTDDTKTTGIVQDLLKDLDNTKEQGCIDLTKKFDKYNGEIVVSKERIEEIKKSLDQKTKDDIQFSFDRVRKFAEAQLKNYGQDFEVELSDGLFAGQKLIPVNTAGCYIPGGRYAHIASAVMSVTTAKVAGVKNIVACSPPKEGVGAHPTIVYTADLCGADVILNLGGVPAIAAMTNGLFNNPPADIIVGPGNQFVAEAKRILFGKVGIDLFAGPTEIGIIADAKADPEIVAVDLVGQAEHGYNSPCWLYTTSKELAEKVMKRVPELIAELPEVPRQSADAAWRDYGEVILCDTDEEMVKISDEYAPEHLEVQTENLKWFHERLTNYGSLFVGEETTVAYGDKCSGTNHILPTKGAGRYTGGLFVGKFIKTLSFQRMTKNSTELVGAAAARISRYEGMEAHARTGDVRLKKYGFSK

SEQ ID NO: 84711 - protein, 307 aa, Unknown
  Bacterial polypetide isolated from the Sargasso Sea
MVASAHMSVLTASVAGVPRIIASAPPVNGEPHPAIVAAMHLGGAHEIYVMGGIQAVGAMALGTETIDPVHMLVGPGNAFVAEAKRQLYGRVGIDLFAGPTETMVIADETVDAELCATDLLGQAEHGYNSPAAMITCSERLARETLVEIERILEILPTSETASASWENYGDMILCDTHEEMLSVANDMAYEHVQIMTDRDDWYLENMHSYGALFLGPRTNVANGDKVIGTNHTLPTKKAGRYTGGLWVGKFLKTHSYQRIETDEAAKLVGEYGSRLCMLEGFVGHAEQCNVRVRRYGGKNVPYGAAAE

SEQ ID NO: 84712 - protein, 295 aa, Unknown
  Bacterial polypetide isolated from the Sargasso Sea
MASWLKEGITEVEREEADAQVKATVEDILSDIKSRGDEALLEYSQKFDNWKPAKFRLSREEIDECYSRVTEQNIEDIKFAQAQIRKFAEIQKAALQDVEEETFPGVILGHKNIPVNSVGCYVPGGKYPMVASAHMSVVTAKVAGVKRIIACAPPYEGEPAAAIIVAQDLAGADEIYCIGGVQAMGAMALGTEQIASVDMLVGPGNAYVAEAKRQLFGKVGIDLLAGPTETLLIADDTVDGELCAADLLGQAEHGPTSPAILVTNSKKLGEETIKEVDRQLETLATASVASEAWER

SEQ ID NO: 84713 - protein, 197 aa, Unknown
  Bacterial polypetide isolated from the Sargasso Sea
VIADETADPEIVAFDLVGQAEHGYNSPAWLFTTSQKLADEVMKRVPELIADLPELPRTSSEAAWRDYGEVILCDTDEEMASISDEYAPEHLEVQTKKDKWFHERLKNYGSLFIGEETTVAYGDKCSGTNHILPTKGAGKYTGGLFVGKFIKTLSFQRMTKESTKEVGAAAARISRYEGMEAHARTGDVRLRKYGYSN

SEQ ID NO: 84714 - protein, 158 aa, Unknown
  Bacterial polypetide isolated from the Sargasso Sea
NHNLIKSVKKFLAKDFSSIPRKKMQKKSLTKNGLIVKVYNDKQIIDSINEIAPEHLELNLKNYKKLIKKIYNVGSVCVGKYSAMAVTDYSVGTNHVLPTLGSAKFSSGLNVGEFYKKISYIKLSKKGIEVIGKKAITLAEYEGLIGHAQSIKSRIRRS

SEQ ID NO: 84715 - protein, 111 aa, Unknown
  Bacterial polypetide isolated from the Sargasso Sea
FPCSNGILNTLTIAAAKVAGIETIYRIGGAQAIAALAIGTNQISKVDKIIGPGNIFVAEAKKQLFGEVGIDSIAGPSEILILADSSSNPETIAWDLMSSILNTHLGCICVF

SEQ ID NO: 84716 - protein, 295 aa, Unknown
  Bacterial polypetide isolated from the Sargasso Sea
MSVTTAKVAGVKNIIACSPPKEGVGAHPTIVYTADLCGADVILNLGGVPAIAAMTNGLFKNPPADIIVGPGNQFVAEAKRILYGKVGIDLFAGPTEIGIIADAKADPEIVAVDLVGQAEHGYNSPCWLYTTSKELAEKVMKRVPELIAELPEVPRTSAEAAWRDYGEVILCDTDEEIVKISDEYAPEHLEVQTENLKWFHERLTNYGSLFVGEETTVAYGDKCSGTNHILPTKGAGRYTGGLFVGKFIKTLSFQRMTKESTELVGAAAARISRYEGMEAHARTGDVRLKKYGYSS

SEQ ID NO: 84717 - protein, 236 aa, Unknown
  Bacterial polypetide isolated from the Sargasso Sea
MAIKYLKKAIKTPSSDDNKTRTTVQNILNDIDKRREESIKEITKKFDKYEGEIIVSKEKIEEATKKVDQKTKDDVQFAYERIKKFAEHQLKSMNNEFEVELSKGLFAGQRLIPVSSAGCYIPGGRYAHISSATMAITPAKVAGVKTIICASPPKDKNGAHPGIIYAANLCGADIILNLGGIAAIGSMTYGCFGNPPVDFLVGAGNQYVSEAKRIVYGQVGIDQFAGPTEIAIIADK

SEQ ID NO: 84718 - protein, 440 aa, Unknown
  Bacterial polypetide isolated from the Sargasso Sea
MAIEYLKKGLDEKQRIEDNDKVKKIVEKTLGKIESEGDKHIRELSQKFDNYSPDSFRLSEDQINQLMSEVSDDDKEDIKFAQKQVRSFAEAQLKTLSELEVETHPGVILGHKNIPVQAVGCYVPAGKFPMVASAHMSVVTASVAGVPRIVATTPPFKGKPNPAVVTAMKMGGAHEIYVLGGMQGVGAMAIGTETIKPVDMLVGPGNAFVAEAKRQLYGKVGIDLFAGPTETMVIADETVDGEICATDLLGQAEHGYNSPAVMITNSRKLAEETFKEIDRILEILPTKETASTSWRDYGEIILCDTYEEMLSKANEIASEHVQVMTKKDDWFLENITSYGALFLGARTNVANGDKVIGTNHTLPTKKAGRYTGGLWVGKFIKTHTYQKIMTDEAATLIGEYGSRLSHLEGFIGHAEQCNVRVRRYGGLNIEYGKPASKLKN

SEQ ID NO: 84719 - protein, 422 aa, Unknown
  Bacterial polypetide isolated from the Sargasso Sea
MIKILDCKNSNYLSSLKKILNKRRFGNKTNTDVVIKIINDVKKNKQKALLKYEKKFSKNNKIKPKKREINNSINSLDPKIKKAIDFAYSRILKFHSLQKIKNIKYIDKQMNKIEYRYIPIESVGIYVPSNLPSTLLMNAILAKKIVGVKRVVLANPRLNGKLNPAVMYAARKCGITEIISAGGGQAIASLAYIQKVNKIIGPGNDYVARAKKEVFGDVGIEGMMAGPSEITIVADKNTNLKEVLTSLIGQAEHDINSQCILIVNNVNFIKSLKKSLNKELNKIPRKVIAKKSLLKNGLIIKVYNNNQIINSINEIAPEHLELNLKNYKKIINKIYNAGSICIGKYSAMAVTDYNVGTNHILPTLGSAKFSSGLNVGEFYKKISYIKLSKKGVEVIGKKAITLAEYEGLIGHAQSIKSRIRRS

SEQ ID NO: 84720 - protein, 428 aa, Unknown
  Bacterial polypetide isolated from the Sargasso Sea
MTIEYLKKSPKTSSTDDTKTRQIVENILKDIEKTKEDGCKELSKKFDKYEGEVIVSKEKIEEIKKNLDQKTKDDIQFSHDRVRKFAEAQLKNYGQDFEVELSEGLYAGQKLIPVNTAGCYVPAGRYAHIASAVMSVTTAKVAGVKNIIVCSSPKPNVGVHPSIVYTADLCGADVIMNLGGVQAIAAMTNGLFGNAPADILVGPGNQFVAEAKRILFGKVGIDLFAGPTEIAVIADDSADAELVAFDLVGQAEHGYNSPAWLFTTSRKLAEYVMKRVPELIADLPELPRENSEAAWRDYGEVILCDTDEEIAKISDEYAPEHLEVQTKNLKWFHERLKNYGSLFIGEETTVAYGDKCSGTNHILPTKGAGRYTGGLFVGKFIKTLSFQRMTKASTKEVGAACARISRYEGMEAHARTGDVRLRKYGFSN

SEQ ID NO: 84721 - protein, 327 aa, Unknown
  Bacterial polypetide isolated from the Sargasso Sea
MAITYLKKSPKTSSTDDTKTTGIVQDLLKDIENTKEQGCIDLTKKFDKYDGEIVVSKERIEGIKKKLDQKTKDDIQFSHERVRKFAEAQLKNYGQDFEVELSKGLYAGQKLVPVNTAGCYIPGGRYAHIASAVMSVTTAKVAGVKNIIACSPPKESVGAHPTIVYTADLCGADVILNLGGVPAIAAMTNGLFKNPPADIIVGPGNQFVAEAKRILFGKVGIDLFAGPTEIGIIADAKADPEIVAVDLVGQAEHGYNSPCWLYTTSKELAEKVMKRVPELIAELPEVPRTNADAAWRDYGEVILCDTDEEMVKISDKYAPEHLEVQTE

SEQ ID NO: 84722 - protein, 234 aa, Unknown
  Bacterial polypetide isolated from the Sargasso Sea
MLKIINCKNKNYSILLKNLLERRKYKMNLDTEIVPKILRDIRKYKFKALLKYENKFSNNSEIKPNIIKIRKSIKSLDPKIKKAIDFAYKRIYSFHKKQKFKNIFYRDNLNNKLEYKFVPIQSVGIYVPSNLPSTLLMNAIPAKIAGVKRIVLANPKLNGKLNSAVLYAAKKIGIKEIYTIGGAQAIGSLTYIQKVNKIIGPGNAYVARAKKEVFGDVGIEGMIAGPSEISVLAD

SEQ ID NO: 84723 - protein, 261 aa, Unknown
  Bacterial polypetide isolated from the Sargasso Sea
MAITYIKKAEKTAFTGEDETRTKVSSILKDLEKTKDQGVKDILKKFDNYEGDIIVSKEKIEEINKTLDQKIKDDIQFSHERVRKFAEHQLENLGKDSEVELSPGLIAGQKLIPVNTVGCYVPGGRYNNIASAIMSVTTAKVAGVKNVIATSPPKDSNGANPIIIYTANLCGADVIMNIGGIGAIGALAYGCFGNPEVDMIVGPGNKFVAESKRILFGKVGIDLFAGPTEIGIIADHTADKEIIAYDLVGQAEHGPDSPAWL

SEQ ID NO: 84724 - protein, 406 aa, Unknown
  Bacterial polypetide isolated from the Sargasso Sea
DVFGEPLSPRQVVEKICEDVKREGLAAVLDYTKRIDHANVTAETFRVPLETLEKAHQSVAPEFLAAIRRVRQRVEHFQKKILPSDVCVPLDGGGSLRQRYLPLDRVGVCVPGGAAAYPSTLLMTVVPAQVAGVPEIVVVAPPTKFGSENEHVLATCHELGVSTVLRVGGAQAVAAMAYGVESLQRVDIVVGPGNLFVALAKEFVYGDVAIDSIAGPSEIVVVADEDGNPETISADMLAQAEHSPGSAILLTACESLADAVASVLSRRLETLERADLTRDSLDRFGAIVITRNNEESAQLADELAAEHLSIDTRDPEETLKTIRHAGAAFLGPFSPVAAGDYAAGPSHVLPTGGTARFAAGLSANHFLRSGSVLALTEADLAEMADDIQLLAETEGLTAHRRSVETR

SEQ ID NO: 84725 - protein, 183 aa, Unknown
  Bacterial polypetide isolated from the Sargasso Sea
YVASDFLSQTEHGPDSQVILVTTNKQIIKPILKEINRQIPFLKRKDFIKQSIQNSKIIYFDLKEKAVNYINDYAPEHYIICSKDEDYFIENVKNAGSVFIGNYSCESIGDYASGTNHTLPTNGYAKQYSGVNLDSFLKKISFQKVTAEGIKKIGPAVEIMSIAEGLDAHKNSVTIRLNDLKNE

SEQ ID NO: 84726 - protein, 77 aa, Unknown
  Bacterial polypetide isolated from the Sargasso Sea
FGDYIAGPNHVLPTARTARFSSGISTIDYMRRTSLIKCDSGALNEIAPSAIKIAENEGLDAHALSMKIRMNNFKNEK

SEQ ID NO: 84727 - protein, 290 aa, Unknown
  Bacterial polypetide isolated from the Sargasso Sea
AKVAGVKNIIACSPPKENIGAHPSIIYTADLCGADVILNLGGVPAIAAMTYGLFGNAPADILVGPGNQFVAEAKRILFGKVGIDLFAGPTEIGIIADETADPEIVAVDLVGQAEHGYNSPAWLYTTSQKLADAVMKRVPELIEELPEVPRLSAEAAWRDYGEVILCDTNEEMVKVSDDYAPEHLELQTKNLKWFHEKLKNYGSLFIGEETTVAYGDKCSGTNHILPTKGAGKYTGGLFVGKFIKTLSFQRMTKESTKEVGATAARISRYEGMEAHARTGDVRLRKYGYSN

SEQ ID NO: 84728 - protein, 332 aa, Unknown
  Bacterial polypetide isolated from the Sargasso Sea
FEVELSKGLFAGQTLVPVNTAGCYVPAGRYAHIASAVMSITTAKVAGVKNIICCSSPKPNVGAHPKIVYTADLCGADVILNLGGVQAIAAMAFGFFKNAPADILVGPGNQYVAEAKRILFGKVGIDLFAGPTEIAIIADKNADPEIVAYDLVGQAEHGYNSPAWLFTTDKNLANAVMKRVPELIQDLPEFPRSNAEAAWRDYGEVVLCDNNEEMVKISDQYAPEHLEVQTENLDWWLKKLKNYGSLFLGEETTVAYGDKCSGTNHILPTKGAGRYTGGLFVGKFIKTLSFQRMTKESTELVGAAAARLSRYEGMEAHARTGDIRLKKYGFKN

SEQ ID NO: 84729 - protein, 196 aa, Unknown
  Bacterial polypetide isolated from the Sargasso Sea
MIKTLKLREKNFEKILNSFLTLRRGYSSKKITVVKKILNDVEMHGDKSLIKYEKKFNNLKTLKSKNLSFTKSEIKKSIKFLDRKVKNSIDLAYSRIFNFHKNQKFHKFKKKDKINNSFYYRSKPVEKVGVYVPGGKASYPSSVLMNCIPASIAGVNEIFMTVPSVDGGLNPGVLYAAKKCGVKKIFKLGGAQAIAA

SEQ ID NO: 84730 - protein, 256 aa, Unknown
  Bacterial polypetide isolated from the Sargasso Sea
GIQAVGAMALGTETIKPVDMLVGPGNAFVAEAKRQLFGIVGIDLFAGPTETMIIADETVDAELCATDLLGQAEHGYNSPAVLITNSHKLAEETLLEIDRILKILPTSETASISWTDYGEVIVCDTYEEMLETSEKKAFEHVQVMTDRDDWFLEKMTCYGALFLGPRTNVSNGDKVIGTNHTLPTKKAGRYTGGLWVGKFLKTHSYQKILTDEAATIVAEKCSRLCMLEGFVGHAEQANIRARRYGGKNIDYGKGAD

SEQ ID NO: 84731 - protein, 365 aa, Unknown
  Bacterial polypetide isolated from the Sargasso Sea
MTIKYLKKASKTASTDDTKTKDIVQNLLKELEKSKEEGCKELTKKFDKYDGEIIVSKEKIEEINKNLDQKTKDDIKFSYDRVRKFAEAQLANYGKDFEVELSNGLYAGQKLVPVNTAGCYIPGGRYAHIASAVMSVTTAKVAGVKNIIACSPPKEGIGAHPSIIYTANLCGADVILNLGGVPAIAAMTYGMFGNAPADILVGPGNQFVAEAKRILFGKVGIDLFAGPTEIGIIADETADPEIVAVDLVGQAEHGYNSPCWLYTTSQKLADEVMKRVPELIEKLPEVPRLSAEAAWRDYGEVILCDTDEEMVKVSDDYAPEHLEIQTKNLEWFHKRLKNYGSLFIGEETTVAYGDKCSGTNHILPT

SEQ ID NO: 84732 - protein, 428 aa, Unknown
  Bacterial polypetide isolated from the Sargasso Sea
MAITYLKKSPKTSSTDDTKTREIVENILKDIERTKEEGCIELSKKFDKYEGEVIVTREKIEQIKKNLDPKTKDDIQFSHERVRKFAEAQLKNYGQDFEVELSDGLFAGQKLIPVNTAGCYVPAGRYAHIASAVMSVTTAKVAGVKNIIVCSSPKTGVGVHPAIVYTADLCGADVIMNLGGVQAIAAMTYGLFGNAPADMLVGPGNQFVAESKRILFGKVGIDLFAGPTEIAVIADETADPELVAFDLVGQAEHGYNSPAWLFTKSKKLAEYVIQRVPELIEDLPDLPRENSGAAWRDYGEVILCDTDEELAKISDEYAPEHLEIQTKNLQWFHDRLKNYGSLFIGEETTVAYGDKCSGTNHILPTKGAGKYTGGLFVGKFIKTLSFQRMTKESTKEVGAACARISRYEGMEAHARTGDVRLRKYGFQN

SEQ ID NO: 84733 - protein, 428 aa, Unknown
  Bacterial polypetide isolated from the Sargasso Sea
MAIKYLKKAPKTASTDDAKTREIVHTLLKDLETSKEAGCKELTKKFDKYEGDIIVSKERIEEINKSIDQKTKDDVKFAHDRVRKFAEAQLKNYGNDFEIELSKGLYAGQKLVPVNTAGCYIPGGRFAHIASAVMSVTTAKVAGVKNIIACSPPKPNVGAHPTIIYTANLCGADVIMNLGGIPAIAAMTYGLFKNAPADMLVGPGNQFVAEAKRILFGRIGIDLFAGPTEIAIIADENADPEIVAVDLVGQAEHGYNSPAWLYTTSKDLADKVLKRVPELIKELPELPRKSAEAAWKDYGEVILCDTDEEMVQISDEYAPEHLELQTKNLDWFHKRLKNYGSLFIGEETTVAYGDKCSGTNHILPTKGAGKYTGGLFVGKFIKTLSFQRMTKESTKEVGAAAARLSRYEGMEAHARTGDVRLRKYGFSN

SEQ ID NO: 84734 - protein, 209 aa, Unknown
  Bacterial polypetide isolated from the Sargasso Sea
KVGIDLFAGPTEIGIIADENADPEIVAVDLVGQAEHGYNSPAWLWTTSKELAEKVIKRVPELIADLPELPRTNAEAAWRDYGEVVLCDTDEEMATISDEYAPEHLEVQTKNLDWFHKRLKNYGSLFIGEETTVAYGDKCSGTNHILPTKGAGRYTGGLFVGKFIKTLSFQRMTKESTELVGAAAARLSRYEGMEAHARTGDVRLKKYGY

SEQ ID NO: 84735 - protein, 253 aa, Unknown
  Bacterial polypetide isolated from the Sargasso Sea
MNLGGVQAIAAMTYGLFGNAPADMLVGPGNQFVAESKRILFGKVGIDLFAGPTEIAVIADDTADPELVAFDLVGQAEHGYNSPAWLFTTSKKLAEYVMQRVPELIADLPDLPRENSGAAWRDYGEVILCDTDEEMAKISDEYAPEHLEIQTKNLQWFHDRLKNYGSLFIGEETTVAYGDKCSGTNHILPTKGAGKYTGGLFVGKFIKTLSFQRMTKESTKEVGAACARISRYEGMEAHARTGDVRLRKYGFQN

SEQ ID NO: 84736 - protein, 210 aa, Unknown
  Bacterial polypetide isolated from the Sargasso Sea
MIKILQVGNVDSFVEARRQKTSQKDRKIVQSILDDVRNNGDSAVKKYEQKFNGKKTIQLRVNKQEIKNAKITDAEFSALQSSAIRLSKTQRTLNKSLIQSVKKIPDISFVPIPSVGCYIPGGQARYPSSAIMSVITAAEAGVKKIVVVSPPNSDGKIDPMTITVAQNCGAKIYKVGGAQAIAALAYGTKSIPKVDKIVGPGGKFVSIAKA

SEQ ID NO: 84737 - protein, 188 aa, Unknown
  Bacterial polypetide isolated from the Sargasso Sea
MEAKLFDNYQDYLAQLPSTVTEDISSKVSEILEEVRNHGDSALKKLTYRFDGIELDSIRVQPEDLQSALKELDPELRKVLEQAAENIRTFHQRQKTESQLEFSDDGTMLGWKISPLDSVGIYVPGGRAIYPSTLLMNVIPAQVAGVSRIAMVSPPDTTGLPANLVRASAALLGVDELYSLGGAQAIAA

SEQ ID NO: 84738 - protein, 354 aa, Unknown
  Bacterial polypetide isolated from the Sargasso Sea
MTIKYLKKSPKTSSTDDTKTREIVENILKDIEEKKEEGCKELGKKFDKYDGEIIVSKEKIEDIKNNLDQKTKDDIQFSHERVRKFAEAQLKNYGQDFEVELSDGLYAGQKLIPVNTAGCYVPAGRYAHIASAVMSVTTAKVAGVKNILVCSSPKPDIGVHPSIIYTADLCGADVIMNLGGVQAIAAMTNGLFGNAPADILVGPGNQFVAEAKRILFGKVGIDLFAGPTEIAVIADETADPEIVAFDLVGQAEHGYNSPAWLFTTSKKLAEEVMKRVPELIADLPELPKQSAGDAWRDFGEVILCDTDEEMAKISDEYAPEHLEVQTKNLKWFHDRLKNYGSLFIGEETTVAYGD

SEQ ID NO: 84739 - protein, 298 aa, Unknown
  Bacterial polypetide isolated from the Sargasso Sea
KILNTKSNKFEKELNYYLNLRKNFSVSKLKIVKKIIKDIRNNKDSSLKKYEKKFNGLKKLNSNKLLFSKNEISKYIKNLDPNVKKAIDIAYNRILKFHKKQKFKSYKLKDKYKNILSYRFEPIEKVGVYVPGGRSSYPSSVLMNCIPAKIAGVRKIFMTVPALKGKVNPGVLYAAKKCGVKKIYKLGGAQAIAALAYGTKSVVKVDKIFGPGNEYVALAKKEVFGTVGIDILAGPSEVTVIADRYSNPSWVASDLIAQAEHDEMSQSILVTDNENLILNVKKFINLQLKFLPKRKIAY

SEQ ID NO: 84740 - protein, 228 aa, Unknown
  Bacterial polypetide isolated from the Sargasso Sea
MKVKIFKGFKDFSKSIDVDENNDVSGIVQEILKKVHKCGDAALREYTEKFDKATPDTWLVPENALEEALDNLGKDLLLVLQQAADNIMFFHERQKTNSQLDFSSDGSVLGWKVTPVDSAGIYVPGGRAAYPSTLLMNAIPAQIAEVPRIAIVSPPGSSGLPHPLVMATAAFMGLKELYAVGGVQSIAALAYGTESIEKVVKITGPGNAYVVEAKRQLYGIVGIDSLAG

SEQ ID NO: 84741 - protein, 319 aa, Unknown
  Bacterial polypetide isolated from the Sargasso Sea
LNFHSLQKIKNIKYVDNYNNKIEYKYVPISKLGLYCPANLPSTLLMNAIPAKIAGVKKIVLANPRSNGKLNAAVMYAAKKIGIKEIYTVGGAQAIASLAYIQKVNKIVGPGNVYVARAKKEVFGEVGIEGMIAGPSEITIVADKNTNLEEVVTSMIGQAEHDINSQCILITKDINLINNFIKNIFIKLKNLPRKNIAGKSLKNYGLIVHAQNDKQIIDTINEIAPEHLELNISNFKKYLNKIYNSGSICMGRYSPMALTDYNVGTNHVLPTFGSAKFSSGLNLNDFYKKISYITLSKKGVEKIGEYATHLAEHEELEGH

SEQ ID NO: 84742 - protein, 258 aa, Unknown
  Bacterial polypetide isolated from the Sargasso Sea
ATLDLCGIEKIYKIGGAQAIAALTWGTESVDSVDIIIGPGNKWVAEAKKQALSKINIDMLAGPSEILILADKNNRADWVAADLLSQAEHDISAQAILITDSENLLENVNNELVNQTENLKRKDIVKKSIAENGYGILVSDIEDAIEIINNIAPEHLSILCKENSQIENKITNAGVIFSDEWTPESMGDYIIGPSHILPTNGMAKRQSGLSVYNFLRRQSTISSSKKTINTLGPSAMLLADCEGLDAHANSIKIRIKDS

SEQ ID NO: 84743 - protein, 271 aa, Unknown
  Bacterial polypetide isolated from the Sargasso Sea
MTLRLNTTDQSFNGSFKKLIENDRNTSQDVSKIVASILEKVKCDGDKALVELTNKYDSNSFTLEQLKLSEENINELDSRCEVDIKKSMEIASKRITEYHKRQLPTDQLYTDETGTTLGYQWKPIERVGIYVPGGTASYPSTVLMNAIPAIVAGVKDIVMVTPARNGELNPSTLYAAKLLNINEVYQIGGAQAIGALAFGTDTINKVDKIVGPGNAYVAEAKKQVFGSVGIDMFAGPSEIVIVADESNNPKVTAADLLSQAEHDNSAQKYFD

SEQ ID NO: 84744 - protein, 339 aa, Unknown
  Bacterial polypetide isolated from the Sargasso Sea
RYKDENFHIRIAEIINSRKNFDEDITNQVNDIIFDIKNNGDISLFKYMSKYDNVECSAENICYSKEDISSAKKNCTQESIEAIKLAKNRIEAFHKHQLPEDSIYEDQEEVSIKTKWIPLGSAGIYIPGGTASYPSSVLMGIIPAQVAGIKKISATVPCPNNQIDPLVLATLDLCGIEKIYKIGGAQAIAALTWGTESVDSVDIIIGPGNKWVAEAKKQALSNINIDMLAGPSEILILADENNRADWVAADLLSQAEHDISAQAILVTDSESLLEDVNIELVNQTENLERKDIVKKSIAENGYGILVSNIKDAIEIINNIAPEHLSILCKENDQIENKST

SEQ ID NO: 84745 - protein, 193 aa, Unknown
  Bacterial polypetide isolated from the Sargasso Sea
SIIADKYSNPSWIAADLIAQAEHDIYAQSILISNNKNLINSVNKNLKSQLNDLPKKNIAAKSIKNFGIAIYARNIKKISEVINIIAPEHLEINFLNSTEIIKRIKNVGSIFIGKFSPEAMGDYIAGPNHVLPTSGSAKFSSGLSVNDFLKRHSLIKITKTGIERLGPSVINLSQHEKLEGHARSIKMRLKKEF

SEQ ID NO: 84746 - protein, 336 aa, Unknown
  Bacterial polypetide isolated from the Sargasso Sea
FCKNIIKDVKKNGDKALLKYEKRFNQNNIIIPSTKQIKKSINSLDKKVKKAIDTAYNRIYKFHSLQKFKNISYTDKLKNKLEYKYVPLESVAIYVPGSTASYPSSVLMNAIPAIVAGVKRIVMINPGYKGKQNPAVLYAAKKCKIKEIYSIGGPSAIAAVSYGTKKIKKVHKIVGPGNAYVAAAKKEVFGVVGIEGMTAGPSEVTVVCDKFSNPEWVASDLIGQAEHDILAQCILISKDKDLLDKVKIEITKQLKEIPRASVARRSLINNGILMYVSSDAKIISVINKIAPEHLELNIKNYKSLVPKIKNSGSICLGKYAVMAMTDYNVGSNPCVA

SEQ ID NO: 84747 - protein, 166 aa, Unknown
  Bacterial polypetide isolated from the Sargasso Sea
MVKQLNFQDKDFYIQLDDILSTSSGKGTSVEKKVFSIIEDVKNNGDNALIKYNKDFDNCFLSSKELIVSEEEIIKAKKNVSQKIIDALKKARDRIFSYHKSQLPEDNFYYDKLGIGLGHRWTPISSVGIYVPGGTAVYPSSVLMNSIPAKVANVSRIVMTVPAPNG

SEQ ID NO: 84748 - protein, 232 aa, Unknown
  Bacterial polypetide isolated from the Sargasso Sea
MIKILNCNKKNYLNNLVNFLDKRRSKKNDQSKIIVKIVKDVKKNKFKALIKYEKKFSKNKDIKPSLRKINLAIKSLDPKIKKSINFAYKRIYNFHLKQKSKNINYVDGLNNKIDYKYVPIQSVGIYVPANLPSTLLMNAIPAKIAGVKKIVLATPKNKGQLNPAVLYAAKKLGITEIYSMGGAQAIASLAYIQKVNKIVGPGNIYVANAKKEVLGDVGVEGMFAGPSEITVL

SEQ ID NO: 84749 - protein, 249 aa, Unknown
  Bacterial polypetide isolated from the Sargasso Sea
HKYLIVLKKLYKNISSFHKQQLPKNIVFTNNGAKLKSVWKPIDSVGLYVPGGKAFYPSSLIMNAVPAIIAGVKRIVCITPPTKSINPYFIKLIKELGIKETYFIGGAQAISALTFGTQTIKPVNKIFGPGNAYVAEAKKQLYGKVGIDLLAGPSEIIVVAENKNNPDWVASDLIAQAEHDENAQSILITDDKNFATKVLNSIKKIKKDLPKKKIIEKSLRNNGIIALVDNIEFAAEIINFIAPEHLHIH

SEQ ID NO: 84750 - protein, 268 aa, Unknown
  Bacterial polypetide isolated from the Sargasso Sea
GNLNPYLAALIKYLGIKEVYNIGGAQAIAALTYGTETINPVDKIFGPGNAYVTSAKKQVFGKVGIDLIAGPSEITVIADEKNNPDWVAADIIAQAEHDERSQAILITNSEKFSSKVLVSIKKKIKKLPKKNIIEKSLKNYGAIIIINKFKNVSKIVNLISPEHLHLHTKLVKEEFEKINNAGLIFIGEYSAEPFGDYIIGTNHILPTSGSARFSSGISTLDFMKRTSFVKMNKKSATELEKYVNHMTSIENLDGHKLSVKVRKKNSNN

SEQ ID NO: 84751 - protein, 257 aa, Unknown
  Bacterial polypetide isolated from the Sargasso Sea
AAKKCGVKKIFKLGGAQAIAAFAFGTKVVPKVDKIVGPGNEYVALAKKEVSGIAGIDMFAGPSEVTVVADKYSKPEWVSADLIAQSEHDEMSQSILVTNSKDLILKVNKSIKKQLKFLPKRIIATKSLNNFGLAILLNNLKEAGKVVNIIAPEHLQIYTKNPDILLNSINNAGSIFLGPYSPEALGDYIAGPNHVLPTSGTAKFSSGLSVYDFLKRQSVIKISKRGIERLGPSVITLSKYENLHGHANSVKVRLKKR

SEQ ID NO: 84752 - protein, 235 aa, Unknown
  Bacterial polypetide isolated from the Sargasso Sea
GSFAYIQKVNKIVGPGNIFVAGAKRQVFGDVGIEGMIAGPSEITILADSKTDLNEVTTSMIGQAEHDSNSQCILITKNSNLINKFKKDLELKLKDLPRKNIASKSIKSNGLILKVYNDRQIIDAINEIAPEHLEINVSNYKKYKDKIFNAGSICIGKYSPMALSDYAVGTNHVLPTNSSAKFSSGLGLSEFYKKISLITLSKKGVEKIGEYATHLAEYEELKGHALSIKSRINKE

SEQ ID NO: 84753 - protein, 266 aa, Unknown
  Bacterial polypetide isolated from the Sargasso Sea
VECSAENICYNQEDISSAKKNCTQESIEAIKLAKNRIEAFHKHQLPADSIYEDQEEVSIKTKWIPLDSAGIYIPGGTASYPSSVLMGVIPAQVAGIKKISATVPCPNNQIDPLVLATLDLCGIEKIYKIGGAQAIAALTWGTESVESVDIIIGPGNKWVAEAKKQALSNINIDMLAGPSEILILADENNRADWIAADLLSQAEHDISAQAILVTDSENLLENVNKELVSQTKSLKRKDIAKRSIVENGYGILVSNINDAIEIINNI

SEQ ID NO: 84754 - protein, 248 aa, Unknown
  Bacterial polypetide isolated from the Sargasso Sea
QKNGGVKKIYKIGGAHFIAAFTYGTKNFVKVDKIVGPGNIFVATAKKEVFGDVGIDMVAGPSEVSIVGDINSDPNLIAADLIAQAEHDIYAQSILITNNQRLIKSVNKCLKKQLKNLPKKKIAAKSLKNFGLAIYTSKKKKICEIVNIIAPEHLELHTTFNNEIIKSVKNVGSIFIGKFSPEAIGDYIAGPNHVLPTSGSARFSSGLSVNDFLKRHSLIKITKTGIERLGASVINLAKHENLDGHANS

SEQ ID NO: 84755 - protein, 282 aa, Unknown
  Bacterial polypetide isolated from the Sargasso Sea
MIKVINCNKKNYLFNLTKFLDLRRFEKRIESKIISKILKDIKKNKNKSLLNYEKKFSKNSQIKPSIKQINKAIKSLDPTVKRAIDFTYKRILKFHNLQKTKDIFYKDNLNNKIEYKYVPIQSVGIYVPANLPSTLLMNAIPAKIAGVKRIVLANPKNKGKLNPAVLYAAKKVGIKEIYSMGGAQAIGSLTYIQKVNKIVGPGNIFVAGAKRQVFGDVGIEGMIAGPSEITVLADSKTNLNQVTTSMIGQAEHDPNSQCILITKNSNLIKKFKKDLELKLKDI

SEQ ID NO: 84756 - protein, 72 aa, Unknown
  Bacterial polypetide isolated from the Sargasso Sea
AMGDYLAGPNHVLPTSGTAKFSSGLSAYDFLKRQSIIKISKSGIERLGSSVINLAEYENLHGHANSIKIRIK

SEQ ID NO: 84757 - protein, 173 aa, Unknown
  Bacterial polypetide isolated from the Sargasso Sea
AEHDELSQSILITESKELIHKVKRFINYQINFLPKKKTISHSLKNFGLIIFVKNIREATGVVNKISPEHLQICTKKPESYLKLINNAGSIFIGSFSPEAMGDYIAGPNHVLPTSGTARFSSGLSVIDFLKRQSVIKISKSGIERLGPSVINLANYENLHGHASSVRMRIKGKN

SEQ ID NO: 84758 - protein, 269 aa, Unknown
  Bacterial polypetide isolated from the Sargasso Sea
ISKTIDKKLKDSIDIAFKRIKQFHSKQKIKSFKYHDEFKNELSYNYSPIQNVGVYVPGGTASYPSTVLMNCIPALVAGVENIYLTTPALGSDVNPAIIYAAKKCGVKEIYKTGGAHSIAALTYGTRTFKKVDKIVGPGNAFVALAKKEVFGEVGIDMVAGPSEVSIIADKYSKPDWIASDLIAQAEHDIFAQSILITDSKDLINSVNVSLKTQLIDLPKKNIASKSIGNYGLAIYASSQNKIAEIVNTIAPEHLEINFKKYNKIIKKIK

SEQ ID NO: 84759 - protein, 233 aa, Unknown
  Bacterial polypetide isolated from the Sargasso Sea
LGTKTIKKVDKIFGPGNAYVASAKKQFFGTVGIDMIAGPSEVLVVADSKNNPDHIAIDLLAQAEHDELAQSILITDDKNFSDKVIKSINNFLKNLERRKIAMSSWNNFGAVIICDDLNKSVELINKIAPEHLEIAVEKPKKFLKKIRNAGAIFLGRFTPEAVGDYVAGPNHVLPTDRTARFSSGLNLLDYLKRSSVVECNKRNLSRIGKDAINLAYEEGLQAHALSIECRIIK

SEQ ID NO: 84760 - protein, 240 aa, Unknown
  Bacterial polypetide isolated from the Sargasso Sea
VAALAYGTDSIRSVDKIVGPGNAYVAAAKRQVYGTVGIDSIAGPSEILVIADSSNDPAWIAADLLSQAEHDEAAQAILITDDAVFADAVDKAVETTLATLERAAVAGQSWQDNGAIITVASMDDMPTLANRIAAEHLELAVREPRSWLGRIRHAGAVFLGRYTPEAIGDYVAGPNHVLPTARTSKFSSGLGVVDFMKRTTTVECDASSFASIAPAGVELANAEGLGGHALSMTIRMNARS

SEQ ID NO: 84761 - protein, 192 aa, Unknown
  Bacterial polypetide isolated from the Sargasso Sea
VVADRTADPDLVAADLIAQAEHDIYAQSILITNDKDLIKLVNKSIKQQLEKLPKKNIAKQSLKNFGLAILANNRKKIIEIVNTIAPEHLELCLRNNDQIIKGIKNAGSIFVGKYSPEAIGDYLAGPNHVLPTSGSARFSSGLSVSDFLKRHSTIKITKTGIERLGSSVINLAMHESLDGHANSVKMRLKKEN

SEQ ID NO: 84762 - protein, 211 aa, Unknown
  Bacterial polypetide isolated from the Sargasso Sea
MIIKNIIYNDKNFFNQLKKFLEKRKIDQNQNSSIVKKIIIDVKKDKDNAILKYEKKFNKNSQIKISGFKYSNNEIKKLIKNLDNRTKKSIDISFNRIKKFHSKQILKTFSFRDNHNIKLSYRSSPIDRVGVYVPGGTANYPSTVLMNCIPALVAGVKNIYLTTPTDKKNTNPAVIYAATKCGVKEIYKIGGAQAIAAFAFGTKKFCKLIRL

SEQ ID NO: 84763 - protein, 305 aa, Unknown
  Bacterial polypetide isolated from the Sargasso Sea
RIINFHSLQKLKNISYTDKFKNKLEYKYLPLESVAIYVPGSLVSYPSSVLMNAIPAIVAGVKRIIMINPGFKGNQNPAVLYAARKCKIKEIYSIGGPSAVAAVSYGTKKIKKVDKIVGPGNSYVAAAKKEVFGDVGIEGMTAGPSEITIVCDKFSNPEWAASDLIGQAEHDPQAQCILISKDKNLIYKVQLEISKQLKSIPRESVAKKSLKRNGILMHVAKESKIINIVNKIAPEHLELNVKNYRSFVSRIKNSGSICLGKYAVMAMTDYNIGSNHILPTNGSAKYSSGISVNEFYKRISYINLS

SEQ ID NO: 84764 - protein, 208 aa, Unknown
  Bacterial polypetide isolated from the Sargasso Sea
KEVFGDVGIDMFAGPSEVTVIADRYSKPDWVAADLIAQAEHDKMSQSILVTDSKDIIFKVKKFIDAQLRFLPKKKIVLSSFKNFGIAILTKNVRETSEVINKISPEHLEIYTKKPETYLKFVKNAGSIFLGAYSPEAMGDYLAGPNHVLPTSGTAKFSSGLSVYDFLKRQSVIKITKSGIERLGPLVINLAKYENLQGHANSVKIRIK

SEQ ID NO: 84765 - protein, 224 aa, Unknown
  Bacterial polypetide isolated from the Sargasso Sea
  misc_feature (2)..(2): Xaa can be any naturally occurring amino acid
MXGPGNIFVAQAKKQVFGDVGIEGMIAGPSEITILADKKTNVDEVITSMIGQAEHDVNAQCILITKDKNLINEVQKNIFKINIKIPRKNISYKSLKKNGLIIFAKTDIQITEVINEIAPEHLELNISNYKKYLNKINNAGSICIGKYSPMAVTDYNSGTNHVLPTLASSKFSSGLNLDEFYKKISHIKLSKKGVEVIGKSATHLAEYEQLFGHALSIRSRMRRK

SEQ ID NO: 84766 - protein, 165 aa, Unknown
  Bacterial polypetide isolated from the Sargasso Sea
QSILVTDSKDMILKVKNFLEIQLKFLPKRKIASSSLGKFGFAILVRNSQEVSKVVNKISPEHLEIYTKKPDIYLKSINNVGSIFLGAYSPEAVGDYLAGPNHVLPTSGTAKFSSGLSVYDFLKRQSVIRMTKRGIERLGPSVITLSKYENLQGHANSIKVRIKRR

SEQ ID NO: 84767 - protein, 149 aa, Unknown
  Bacterial polypetide isolated from the Sargasso Sea
YLVKQLKFLPKKKIASISLGKFGLAILVRNSREVSEITNIIAPEHLQIYTKKPDRYLKSIENAGSIFLGAYSPEAVGDYIAGPNHVLPTSGTAKFSSGLSVLDFLKRQSVIKISKRGIEKLGPSVVTLSKYENLYGHANSVKLRLKERE

SEQ ID NO: 84768 - protein, 216 aa, Unknown
  Bacterial polypetide isolated from the Sargasso Sea
EFVSLAKKEVFGEVGIDMFAGPSEVTIVADKYSNPKWIAADLIAQAEHDELSQSILVTESKELIYKVKKFINSQTKILPKRKIISSSLKNFGLVVLAKNKQKIASVINKISPEHLEICTKKPESYLKLINNAGSIFLGSFSPEAMGDYLAGPNHVLPTSGTARFSSGLSVLDFLKRQSVIKISKSGIERLGPSVINLANYENLHGHASSVRMRLKR

SEQ ID NO: 84769 - protein, 166 aa, Unknown
  Bacterial polypetide isolated from the Sargasso Sea
DAQSILVSPDADFLDRVAESIAKLLPSMERAEIIRTSLEGRGALIQVADMEQAIEVANRIAPEHLELSVADPEAWLPEIRHAGAIFMGRYTAEALGDYVAGPNHVLPTSGTARFSSPLGVYDFQKRSSIIFCSPDGASELGKSASVLARGESLTAHARSAEYRIKP

SEQ ID NO: 84770 - protein, 256 aa, Unknown
  Bacterial polypetide isolated from the Sargasso Sea
MLRELKIKETYFAGGAQGIAALALGTKTIKAVNKIFGPGNAFVAEAKKQLFGTVGIDLIAGPSEIIVVADKKNNPKWVAADLMAQAEHDINAQSILITDNLTFAKEVLKNIEYLNKNMLKKKTISRSLNCNGLILLVNNFKNCADIINFIAPEHLHLHIKSYKRILPKISNAGGIFLGEYSAEAFGDYIVGTNHILPTSGAAKFSSGLGVLDFMKRSSIVQMNSKSFQDLSNDTKNMASIEGLEAHKMSVTIRQKK

SEQ ID NO: 84771 - protein, 109 aa, Unknown
  Bacterial polypetide isolated from the Sargasso Sea
NQFAPEHLEILTKDSKKILEGIENAGAIFLGKWTPEAVGDYLAGPNHTLPTSGNSRFSGSLGVETFMKNTSVIEFNEESLKVNSLDIINLAKSEGLHSHANSVQIRFED

SEQ ID NO: 84772 - protein, 199 aa, Unknown
  Bacterial polypetide isolated from the Sargasso Sea
MPVFLNFDDPQFDQHFDEILNSERDANRDVNSVVSDILADVKRRGDEALIQLTDRFDKIKLTKEELSFSKKEINELSAEVKSNERKALDLAASRIKVFHEKQKPEDVIWIDDIGVELGWRWTPLDAVGIYVPGGLASYPSSVLMNAIPAKVAGVKRVAMVVPTPHGKINPAVLYAAKLSGIDEIYRIGGAQAIAALAYG

SEQ ID NO: 84773 - protein, 251 aa, Unknown
  Bacterial polypetide isolated from the Sargasso Sea
GIKETYFVGGAQAISALTYGTETIKPVNKIFGPGNAYVAEAKKQIYGKVGIDLLAGPSEIIIVANNKNDPDWVASDLIAQAEHDENAQSILITDNKNFSSKVINSITKIKKDLPKKKIIEKSLNNNGVIILVDNIEHAAKIINFIAPEHLHLHISNYKKLLSKINNAGGIFLGEYSVEAFGDYIVGTNHVLPTSGAAKFSSGLGVLDFMKRNSVVEMSQKSFNALSEDTQKMSGLEGLDGHKLSVKIRQKK

SEQ ID NO: 84774 - protein, 140 aa, Unknown
  Bacterial polypetide isolated from the Sargasso Sea
MNYIPGGTASYPVSVLMGVIPAQVLGIKKISATVPCPNNQIDPLVLATLDLCGIEKIYKIGGAQAIAALTWGTESVDSVDIIIGPGNKWVAEAKKQALSNINIDMLAGPSEILILADENNRADWVAADLLSQAEHEFRSG

SEQ ID NO: 84775 - protein, 312 aa, Unknown
  Bacterial polypetide isolated from the Sargasso Sea
KSQWKPIESVGLYVPGGKAFYPSSLIMNAIPAKIAGVKRIVCVTPPTLELNPYFLALLNELNIKETYFVGGAQAIAALTYGTKTIKPVNKIFGPGNAFVAEAKKQLFGKVGIDLIAGPSEIVVVANHENNPQWVAADLMAQAEHDANAQSILITDNLKYAKLVLQEIKKLYPLSKNKKIIEKSLTNNGLIIIVKNIEESANIINFIAPEHLHIQIKNYKYLLNNINNAGGIFIGDYSTEAFGDYIAGTNHVLPTSGAAKFSSGLGVLDFMKRSSVVEINFKSFNQLKEDTENMASIEGLDAHKLSVKIRQNK

SEQ ID NO: 84776 - protein, 193 aa, Unknown
  Bacterial polypetide isolated from the Sargasso Sea
REVLVIADHTAKPEQVAADLLAQGEHDPLASSVLITNSHQLADVIGTTISEQLEMHPRRDICEASLRDWGLVVVCDDLESCAQLSDSFAPEHLELLVERPEALADRIEHAGAIFLGPWSPEAVGDYLAGPNHTLPTCAAARFSGALSVETFMRHSSMIQFNRAALEATASAVCELAESEGLHSHAESVRKRLS

SEQ ID NO: 84777 - protein, 236 aa, Unknown
  Bacterial polypetide isolated from the Sargasso Sea
MGTESIEAVDKIVGPGNSFVAAAKRKLFGQVGIDSVAGPSEVLIIADNDQNPSWIAADLLAQAEHDENAKSILITDSLNFAKTVESEVNKLLVNLRDNGTTKKSWFKNGVIIVVNDINDSIEIANRIAAEHLQICTNDPGLILNNIVNAGAIFLGEHTPEVFGDYILGSNHVLPTSRAARFSSSLSVLDFMKRTSISKMSLAASKYLGAAAKTLATSETLNAHAISASLRISSKDE

SEQ ID NO: 84778 - protein, 178 aa, Unknown
  Bacterial polypetide isolated from the Sargasso Sea
MITWSSLSVNEKKQALARPAMANSQQLKQTVGDIIARVEKEGDEAVLDYTRKFDCPDLTSLVLSQENIDALAAKVTPEVASAIDTAFNNIKMFHEAQMPSDIALTTTPGVKCELRFTALDAVGLYIPGGSAPLPSTVLMLGVPALVAGCENKLLCTPPNKEQLIAPEIAYAARKCGID

SEQ ID NO: 84779 - protein, 228 aa, Unknown
  Bacterial polypetide isolated from the Sargasso Sea
PVDKIVGPGNIYVATAKKFVFGKVGIDAFAGPSEILVVADSKGNAEWTAIDLLSQSEHDKGSRAILICDSSDFADKVEEKIKFHLSGISRSEIAVKSWGDNGLIIIVDNINNVGPIIDRIAPEHLQLSIENPKELLSKFTNAGSIFLGRNTPEALGDYIAGPNHVLPTSRTSRFTSGLSVLDFLKRSSIIESSNKSLNALSEDILAIAECEGLSAHALSVSIRLNDKT

SEQ ID NO: 84780 - protein, 301 aa, Unknown
  Bacterial polypetide isolated from the Sargasso Sea
MKIINNKEYAIQELKRIATRTDSENNNKINAIVEEILQEVKNYGDMAVEKYTRKFDGFNPDPMQVSKEELKDAWNEIDSNLKSSLELAYNRVKKFHEKEIPSSFTLKGEHGDTVQRRWLPVKNAGIYIPGGRAAYPSTVLMNAIPATVAGVEEIIMVSPGNREGKINKTVLAAAHLSGINKVFRIGGAQAIGALAFGTNQINKVDVITGPGNIYVTTAKKLIYGSTGIDSLAGPSEILIIADETAKSTLIASDLLAQAEHDPLASSILLTTSNKQAKEVLGEIYKKIDNHPRKEICLDSIK

SEQ ID NO: 84781 - protein, 283 aa, Unknown
  Bacterial polypetide isolated from the Sargasso Sea
IFSLKRNAINSTIRKIRESQEISYKNVNKTVASIIDDVKKFGDKAIFKLTKQYDNFDLNLQNLKVKRSLITNSSTTLNSDLKKSIKKAIQRVSFYQKKKLPRSFLFKDNLGNKLGWSVSPLDSVGIYVPGGTASYPSSLIMTAVLARVAGVKKISIVTPPSQHGLNKAVLFVADCLKIDNIYQVGGAQAIAALAYGTKTIEKVNKIVGPGNIFVATAKKQVFGDVGIDMVAGPSEVLIIGDKSSSSEIIAADLLAQAEHDINASSILVTTSKTLAQKVLADVK

SEQ ID NO: 84782 - protein, 310 aa, Unknown
  Bacterial polypetide isolated from the Sargasso Sea
KIEYKYLPIQSIGIYVPANLPSTLMMNAIPAKIAGVKRIVLANPKNNGKLNSAVLYAAKKLGINEIYSMGGAQAIGSLAYIQKVNKIVGPGNIFVAGAKRQVFGDVGIEGMIAGPSEITILADSKTNLNEVTTSMIGQAEHDSNSQCILITKDLNLIKKFKKDLELKLKDLPRKNIASKSIKNNGLILKVYNDRQIIDAINEIAPEHLEINVGNYKKYKDKIVNAGSICIGKYSPMALSDYAVGTNHVLPTNASAKFSSGLSLSEFYKKISLITLSKKGVEKIGEYATHLAEYEELKGHALSIKSRINKE

SEQ ID NO: 84783 - protein, 253 aa, Unknown
  Bacterial polypetide isolated from the Sargasso Sea
MKYIKLRGAQAIAALAIGTDSIKKVDKICGPGNAYVASAKKQLFGSVGIDMIAGPSEILVLADRKNNPKQIAIDLLSQAEHDELAQSILITDNEVFAYKVKKNIINELKTLERRKIAKKSWEKFGSIIIVKKISDAIQLINEISPEHLELAIKDARKLSKKINNAGSIFIGRNTPEAIGDYIAGPNHILPTDRTAKFSSGLNVLDFLKRISLVECDLESLKKIGPNAILLAKEEGLGAHALSISSRIDKDSKN

SEQ ID NO: 84784 - protein, 269 aa, Unknown
  Bacterial polypetide isolated from the Sargasso Sea
AKIHPAILYAASVVGVDKLYKVGGAQAIAAMTFGTETIPQVHKIFGPGNQYVTAAKQLAIKYGLAIDMPAGPSEVAVYADHSAIPAFVAADLLSQAEHGVDSQVLLVADTQEVVKAVREELNLQLKDLPRQEIARKALEHSISIVLTDQQNAIDLLNDYGAEHLILSVQDPHKISAKIKNAGSVFLGNLTPESAGDYASGTNHTLPTNGYAKMYSGVSLDSYVKMITYQELTEEGIRNLGPIVEKMAAAEQLEAHKNAVTLRLKSVSDV

SEQ ID NO: 84785 - protein, 232 aa, Unknown
  Bacterial polypetide isolated from the Sargasso Sea
TKTINKVDKIVGPGNEYVALAKKEVSGVSGIDIFAGPSEVTVVADKNSNPEWISADLIAQSEHDEMSQSILVTESKDLINKVQYCINRQLKFLPKKKIASISLSKFGLAILVRNSSEVSQTINMIAPEHLQIYTKKPNKYLKSIDNAGSIFLGAYSPEAVGDYLAGPNHVLPTSGTAKFSSGLSVFDFLKRQSVIKISKRGIEKLGPSVVTLSKYENLHGHANSVKFRIKER

SEQ ID NO: 84786 - protein, 304 aa, Unknown
  Bacterial polypetide isolated from the Sargasso Sea
KNFFYQDNLGNKLFYKYVPIESIGIYVPANLPSTLLMNAIPAKIAKVKRIVLANPKLNGKLNPAVLYVAKKIGIKEIYSMGGAQAIASLAYIQKVNKIIGPGNIYVSKAKREIFGEVGIESMIAGPSEITIVADRKTSFNEVITSLIGQAEHDKNSQCILITKDTKLISKINKNIFKYLKKLPRKKIIYQSLNNNGLLIKVKNEKQIIEIINEIAPEHLELNIKSYKKYLNKITNAGSVCLGNFSAMAVSDYNVGTNHVLPTYGSAKFSSGLNLSEFYKKISFINLSKKGIEVIGEKAITLAEY

SEQ ID NO: 84787 - protein, 300 aa, Unknown
  Bacterial polypetide isolated from the Sargasso Sea
SVGIYVPANLPSTLLMNAIPAKIAGVKRIVIANPKNNGKLNPAVLYVAKKLGIKEIYSIGGAQAIGSLAYIQKVNKIVGPGNIYVASAKKEVFGDVGIEGMIAGPSEITVLADGKTKLNEVTTSMIGQAEHDINAQCILITKDTNLIKKFKIDLLRKLKDLPRKSIAYKSIKNNGLIIKVNNDKQIIDIINEIAPEHLELNVVNYKKYVDKIINAGSICIGKYSPMALSDYAVGTNHVLPTNSSSKFSSGLSLSEFYKKISYIKLSKKGVEVIGKSATHLAEYEQMFGHALSIRSRMRRN

SEQ ID NO: 84788 - protein, 288 aa, Unknown
  Bacterial polypetide isolated from the Sargasso Sea
LKDILLNGDRALLKYTKKYDNYDAKKIKNLKVSQKEINNSFKIISKEDLSAIKFAAKNIYKFSNLQKIKDWKYSDSIGITFGQKCSPIEKVGIYVPGGSASYPSSVLMNAIPAKVAGVDNIVMVTPATNGEINPAVLVAAKVAGVNSIYKIGGAQAIAALAFGTKIIPKVFKVVGPGNNFVATAKKTLFGQIGIDSFAGPSEIMIVADSTANVDWLTADIFAQSEHDNQAQSILVTNSQELIKKVSKNIEKKIQNMKRKRIIKHSLENYGLMIKTKSISESKKIINLV

SEQ ID NO: 84789 - protein, 303 aa, Unknown
  Bacterial polypetide isolated from the Sargasso Sea
IIIPNSKQIKQSINSLDKKVKKAIDTAYNRIYKFHSLQKFKNIAYTDKLKNKLEYKYVPLESVAIYVPGSTASYPSSVLMNAIPAIVAGVKRIVMINPGHKGKQNPAVLYAAKKCKIKEIYSIGGPSAIAAVSYGTKKIKKVHKIVGPGNAYVAAAKKEVFGVVGIEGMTAGPSEVTVVCDKFSNPEWVASDLIGQAEHDILAQCILISKDKNLLDKVKIEITKQLKEIPRASVARRSLINNGILMYISSDVKIISVVNKIAPEHLELNIKNYKSLVPKIKNSGSICLGKYAVMAMTDYNVDQ

SEQ ID NO: 84790 - protein, 304 aa, Unknown
  Bacterial polypetide isolated from the Sargasso Sea
DDVSIKTKWLPLDSAGIYIPGGTASYPSSVLMGVIPAQVAGVKKIYATVPCPNNEIDPLVLATLDLCGIEEIYKIGGAQAIAALTWGTETVQNVDIIIGPGNKWVAEAKKQALSNINIDMLAGPSEILILADKDNRADWVAADLLSQAEHDISAQAILITDCENFLENVNEELLIQTEALKRKDIVKKSIADNGYGILVKNIQDAIGIINNIAPEHLSLLCKENEYIEKKITSAGVIFSNEWTPESMGDYIIGPSHVLPTNGMAKRQSGLSVFNFLRRQSTISSTKKTINKLGPSAILLAECEG

SEQ ID NO: 84791 - protein, 291 aa, Unknown
  Bacterial polypetide isolated from the Sargasso Sea
KFHTKQKILSFKFKDKYKNELSYKYSAIDKVGVYVPGGTASYPSTVLMNCIPAIVAGVKNIFLTTPCLDSKINPAIVYAALKCGVKEIYKTGGPHSIAALAYGTKTFEKVDKIVGPGNKFVAQAKKEIFGEVGIDMIAGPSEVSIVADSSANPDFIAADLIAQAEHDTNAQSILITNNKNLIRLVNISLKYQIKKLPKKNIASKSLKNFGLAVLAYNKKDILKAINTIAPEHLEVCTNMNNEIIKGVKNAGSIFIGKFSPEAVGDYIAGPNHVLPTSGSARFSSGLSVNDF

SEQ ID NO: 84792 - protein, 304 aa, Unknown
  Bacterial polypetide isolated from the Sargasso Sea
IYVPGSTVSYPSSVLMNAIPAMVAGVERIIMINPGYKGKQNPAVLYAAKRCKIKEIYSIGGPSAIAAAAYGTKTIKSVDKIVGPGNVYVAAAKKEVFGDVGIEGMTAGPSEVTIVCDKYSNPVWIASDLIGQAEHDPLAQCILISKNKSLISKVKLEIFKQLKKIPRNSIAKRSLTNNGILMHIASDKKIIETVNQIAPEHLELNIKNYKSFISRIYNAGSICLGKYAVMAMTDYNVGSNHVLPTNGSAKFSSGISVNEFYKRISYINLSKKGIESLGPSVITLANYEGLVGHANSVKKRIGRK

SEQ ID NO: 84793 - protein, 253 aa, Unknown
  Bacterial polypetide isolated from the Sargasso Sea
DLCQVDKICRMGGAHAIAALAYGTKNIPAVDKIVGPGNIYVTLAKKSVYGDVGIDNIAGPSEVVIVADRTNNPDWIAMDLFSQAEHDELAQPILISSNSQVLKNVQDSIEKLIPTMLRKEIISRSINNRGIFIKTKNNREICKIVNDIAPEHLELMSKDYKTLLKTIHNAGAIFLGEYSPEVFGDYCAGPNHVLPTSGSARFSSPLGVEDFQKKSSLINVSKKTALELSKISISMALSEGLQAHALSAKLRGK

SEQ ID NO: 84794 - protein, 323 aa, Unknown
  Bacterial polypetide isolated from the Sargasso Sea
ITEFHKPQIPKDIDYTDDCGVRLGSRWRPIESVGLYVPGGTAAYPSSVLMNSIPAQVAGVERIVMVVPAPEGYLNPSVLTAAGLSGVNEIYRIGGAQAIASLAYGTETIASVNKIVGPGNAYVAAAKKQVFGVVGIDMIAGPSEITVVADSNNDPIWIAADLLSQAEHDESSQAILITDNKSFAHSVELAVLEHLNNLPRSIVARSSWERNGAIILVPEIESAIPTINLIAPEHLELACDQCEFIADRVINAGAIFLGAHTPEAIGDYIAGTNHVLPTGRTSRFSSGLGVLDFMKRTSLVSCSPSSLQMIGPEAVTLANAEGL

SEQ ID NO: 84795 - protein, 220 aa, Unknown
  Bacterial polypetide isolated from the Sargasso Sea
MSVSQPAVAPLRIVRDPEQAQTELQRLSSRTAQTQQSEARQRVDAILAAVFDRGDAAIADFTEQFDGFRPLPMAVPQEALEQAWTTLPTNLRDALELAHRRITDFHQRQRPADLAVTGPHGEQLGRRWRPVQRAGLYVPGGRAAYPSTVLMNAVPARVAGVKELVICSPAGRDGKVNPVVLAAAHLAGVKTVFRLGGAQAIAAMAYGSESVPKVDVISGP

SEQ ID NO: 84796 - protein, 235 aa, Unknown
  Bacterial polypetide isolated from the Sargasso Sea
MASKINSSNPNFYELFEKLLARRATRVEDATKVSADIIEKVRKRGDEALIKLTKELDGLDLISTGLIVDSDEIDEAINRITTDQYDALKFAADRITAFHLKQMPDNFEYLDETEVKMGMRWSSVDSVGLYVPGGTASYPSSVLMNAIPAKVAGVPRRVIAVPQTCGSINPLVLAAAKLANVQEVYRVGGAQAIAALAYGTETISPVDKIVGPGNAFVAAAKKLVYGVVGIDSIAG

SEQ ID NO: 84797 - protein, 244 aa, Unknown
  Bacterial polypetide isolated from the Sargasso Sea
MKTCPISRLDISEPDFEAAFGRLLISPAEADADLAQTVTQIVAAIVQEGDAALVRYTNELDRRAVEEAQALRVSSDAIEQALSDLNPEVSSALTRAAARIRGFHERQRTESWQYEDEEGNLLGQRVSPLDCVGVYVPGGRASYPSSVLMNAIPAKVACVERVVMVAPAPDGEINPAVLAAAALADVDEVYTVGGAQAVAALAYGTATIPRVDKIVGPGNRFVAEAKRQVFGRVGIDMVAGPSEI

SEQ ID NO: 84798 - protein, 290 aa, Unknown
  Bacterial polypetide isolated from the Sargasso Sea
MIKVINCNKKNYLNNLIKFLDLRRSGKRIENKTISNILKDIKKNKNKSLLKYEKKFSKNSQIKPSIKQINKAIKSLDPTIKRAIDFAYKRILKFHNLQKTKDIFYKDNLNNKIEYKYVPIQSVGIYVPANLPSTLLMNAIPAKIAGVKRIVLANPKNNGKLNPAVLYAAKKLGINEIYSMGGAQAIGSLAYIQKVNKIVGPGNIFVAGAKRQVFGDVGIEGMIAGPSEITILADSKTSLNEVTTSMIGQAEHDSNSQCILITKDLNLIKKFKKELELKLKQIPRQSIATK

SEQ ID NO: 84799 - protein, 319 aa, Unknown
  Bacterial polypetide isolated from the Sargasso Sea
LGQMVRPWEIAGIYVPGGKASYPSSVLMNAIPAKVAGVKQIVMCSPFPEGQTRPHVLVAADLAGVTEIYKIGGAQAVAAMAFGTDTIPRVDKIVGPGNIFVALAKRLVFGIVDIDMIAGPSEILIVADHSANPSYVAADLLSQAEHDEAAVPILVTPDEVLAEDVQKELEKQVKVLSKKDIAETSLRNNCCLLVTESLQDAIDMANKIAPEHLELALEKPKEWATKIQNAGAIFLGHYTPEAMGDYLAGPNHVLPTSGTARFSSPLGVYDFIKRTSLISYTREALQNCGKTVQLLAEMEDLGGHKNSVKLRLDRPEKKS

SEQ ID NO: 84800 - protein, 292 aa, Unknown
  Bacterial polypetide isolated from the Sargasso Sea
NLPSTLLMNAVPAKIAGVKRIVLANPKNNGKLNPAVLYAAKKLGINEIYSMGGAQAIGSLAYIQKVNKIVGPGNIFVAGAKRQVFGDVGIEGMIAGPSEITILADSKTDLNEVTTSMIGQAEHDSNSQCILITKDLNLIKKFKKDLELKLKQIPRQSIATKSIKSNGLILKVYNDRQIIDAINEIAPEHLEINVSNYKKYKDKIFNAGSICIGKYSPMALSDYAVGTNHVLPTNSSAKFSSGLSLSEFYKKISLITLSKKGVEKIGEYATHLAEYEELKGHALSIKSRINKK

SEQ ID NO: 84801 - protein, 245 aa, Unknown
  Bacterial polypetide isolated from the Sargasso Sea
DLPNAQKLPGVDVETLPGVRCQQVTRPIASVGLYIPGGSAPLFSTVLMLATPARIAGCQQVVLCSPPPIADEILYAAQLCGVRTIFNVGGAQAIAALAFGTESVAKVDKIFGPGNAFVTEAKRQVSQRLDGAAIDMPAGPSEVLVIADSGATPDFVASDLLSQAEHGPDSQVILLTPDAAMGQQVARAVERQLAELPRAETAREALSASRIIVARDLAQCVEISNQYGPEHLIIQTRNARELVDS

SEQ ID NO: 84802 - protein, 258 aa, Unknown
  Bacterial polypetide isolated from the Sargasso Sea
FYPSSLIMNAVPAIIAGVKRIVCITPPTESINPYFIKLIKELGIKETYFVGGAQAISALTFGTQSIKPVNKIFGPGNAYVAEAKKQLYGKVGIDLLAGPSEIIVVADNDNNPDWVASDLIAQAEHDENAQSILITDNKDFATKVLSSIKKIKKDLSKKEIIEKSLNNNGIIALVDNMEFASEIINFFAPEHLHIHISNNKKLLSNINNAGGIFLGEYSVEAFGDYIVGTNHVLPTSGAAKFSSGLGVLDFMKRSSVVE

SEQ ID NO: 84803 - protein, 302 aa, Unknown
  Bacterial polypetide isolated from the Sargasso Sea
KFHSLQKVKNIKYLDKFKNRIEYKYVPIQKVGIYVPSNLPSTLLMNVIPAKIAGVKKIVIANPILNGNLNSAVMYAAKKCGVNEIITCGGAQAIASLAYIQEVNKIFGPGNNYVAKAKQLVFGDVGVEGMIAGPSEICVVADDRTDLNEITTSLLGQSEHDKNSQSILITKYKDIIYKVQNDIKININKLSRKKIISKSLKNHGLLILCKNDNQIIDVINEIAPEHLELNISNYKKYLDKICNAGSICIGKYSPMAVTDYTVGTNHTLPTLGSAKFSSGLNLSEFYKKISYITLSKKGVKKL

SEQ ID NO: 84804 - protein, 248 aa, Unknown
  Bacterial polypetide isolated from the Sargasso Sea
IKEIYCMGGAQAIASLAYIQNVNKIVGPGNIYVAGAKREVFGDVGIEGMIAGPSEITVVADAKTNLNEVITSLIAQAEHDVNSQSILITKDKNLINNLIKNIPDSLKYLTRKKIAFKSLKNNGLIIYAKNDKQIVEAINEISPEHLELNVINYKKYLDKIYNAGSICIGKYSPMAVTDYNSGTNHVLPTMGSAKFSSGLSVSEFYKKISHIKLSKKGVEKIGEYATHLAEYEELNGHAQSIKSRLRRK

SEQ ID NO: 84805 - protein, 232 aa, Unknown
  Bacterial polypetide isolated from the Sargasso Sea
GTKSILPVNKIVGPGNAYVAEAKRQVFGQVGIDSIAGPSEVLIICDETANPDHVAIDLLSQAEHDELAQSILITTSKEIAIKVKLSVEKFLMEISRSKIASSSWYNFGAIILVENLNQAIELINIKAPEHLQLILKNAQKVIKKIKNAGAIFVGPYTPEAVGDYIAGPNHVLPTNGTAKFSSGLGVIDFYKRTTIVNFNKNSLNELGKHVITLAEAEGLEAHARSISIRNDK

SEQ ID NO: 84806 - protein, 128 aa, Unknown
  Bacterial polypetide isolated from the Sargasso Sea
KIGGLIVICDNYEACIELSNNFAPEHLEILTEDSKKILSGIQNAGAIFLGKWTPEAVGDYLAGPNHTLPTSGNSRFSGSLGVETFMKNTSIIEFNEESLKVNSLDIINLAKSEGLHSHANSVKIRFKD

SEQ ID NO: 84807 - protein, 135 aa, Unknown
  Bacterial polypetide isolated from the Sargasso Sea
CVSSIKNYGLAIYANNLNKIIEAVNTIAPEHLEIEFKNYRNMIKKIKNAGSIFIGRFSPEAMGDYIAGPNHVLPTSGSAKFSSGLSVNDFLKRHSLIKITKSGIERLGPSVINLAEHENLEGHANSIKIRLKKGY

SEQ ID NO: 84808 - protein, 286 aa, Unknown
  Bacterial polypetide isolated from the Sargasso Sea
VAGVPNIYLTTPSLDLKINPAVVYAAKKCGVKKIYKTGGAHSIAAFTYGTKNFEKVDKIVGPGNAFVAFAKKEVFGDVGIDMVAGPSEVSIVGDKYSDPNLIAADLIAQAEHDIYAQSILITDNEKLINSVNKSLKQQLINLPKKKIAIQSLKNFGLAIFTNKRNKISEIINAIAPEHLELCTSFNNKIIKDVKNAGSIFIGKFSPEAIGDYLAGPNHVLPTSGSARFSSGLSVNDFLKRHSLIKITKTGIERLGASVINLANYENLDGHANSVKLRLKKFNNKKG

SEQ ID NO: 84809 - protein, 226 aa, Unknown
  Bacterial polypetide isolated from the Sargasso Sea
PVNKIFGPGNAYVAAAKKQVFGKVGIDLVAGPSEIVVVADNDNNPEWVASDLMAQAEHDENSQSILITNSKVFSEKVLDRIENLKKGLSKKDIINTSLRKHGLIILIDDLNLSSDIINKIGPEHLHLQSSEKEEILKKVNNAGGIFLGSYSTEAFGDYVAGTNHVLPTSGAAKFSSGLGVIDFMKKSSIVEINKTSFNTLSKHVENIADVENLDAHKLSVTIRQTK

SEQ ID NO: 84810 - protein, 241 aa, Unknown
  Bacterial polypetide isolated from the Sargasso Sea
KQKVKNLKFKDNLKNLIEYKFSPIESVGIYVPANLPSTLLMNAIPAKLANVKRIVLANPKLNGKLNSAMLYAAKKLNIHEIYSMGGAQAIGSLAYIQKVNKIVGPGNDYVARAKREVFGDVGIEGMIAGPSEITIVADKKTNFKEVITSMIGQAEHDANSQCILITNNLNIIQSLKKFLNKEINKIPRKMIVRKSLLKNGLIIRTYNDKQTINSINEIAPEHLELNIKNYKKLVKKINNVG

SEQ ID NO: 84811 - protein, 234 aa, Unknown
  Bacterial polypetide isolated from the Sargasso Sea
SLAYIYQVDKITGPGNDYVAKAKQLVFGDVGTEGMIAGPSEICIIADKKTKLNEITTSMLGQSEHDENSQSILVTKFKDLIYKVQNDIKININNLSRKKIIYKSLKNHGLIVLCKNDKQIIDVVNEIAPEHLELNISNYSKYISKIYNAGSICIGKNSPMALTDYNVGSNHTLPTLGSAKFSSGLNLNEFYKKISYITLSKKGVEKIGESAIHLANYERLTAHILSIKSRMRRK

SEQ ID NO: 84812 - protein, 189 aa, Unknown
  Bacterial polypetide isolated from the Sargasso Sea
GIYVPANLPSTLLMNAIPAKIAGVKRIILANPKLKGKLNAAVLYAAKKIGIKEIYSIGGAQAIGSLAYIQKVNKIVGPGNIYVAKAKKEVFGDVGIEGMIAGPSEITVVADKKTNINEVITSIIGQAEHDVNSQSILITKDRNLINKFRKNILNNIKILPRKKIIEKSLKKNGLAIYAKNDKQVIDAIN

SEQ ID NO: 84813 - protein, 288 aa, Unknown
  Bacterial polypetide isolated from the Sargasso Sea
YVPGGKAAYPSSVLMNVIPAQVAGVQEIIMVVPTPDGERNDLVLASAAILGVNKIFSIGGAQAIAALAFGTKLIPKVDKIVGPGNMFVAAAKRQVFGFVGIDMIAGPSEVVIIADENANADWVAMDLLAQAEHDEEASAILISPNANIIKSVEKSIEKFLPQMERAEIIQASLNNNGLIIKTKDFAQAVEIVNIIAPEHLELAVINPEILLEDIKHAGAIFMGNYSAESIGDYCAGPNHVLPTSHTARFSSPLGVYDFQKKTSLIKCDGNSVSEIARVASILAHGEGL

SEQ ID NO: 84814 - protein, 280 aa, Unknown
  Bacterial polypetide isolated from the Sargasso Sea
MKENDLRITRISTIEIDFKSRLKACLKREMLDNEEIYQKVTSVLEGVRQHGDIAVLEYTNKFDNFSVESFQDLVVTPNQLEDSLKRIPESQRNALEHAANRIQKYHERQVTSSWQYEDEDGSVLGQKVTPLERVGIYVPGGKANYPSSMLMLAIPARVAGVKDIIAAVPTRYDTKNDLIFAAAKVAGVNQVLTMGGAQAIGALAYGTETLEKVDKIAGPGNVYVNVAKRMVFGQVGIDMVAGPSELTVIYDGTTDPDWIAADLFSQAEHDEFAQSILISP

SEQ ID NO: 84815 - protein, 201 aa, Unknown
  Bacterial polypetide isolated from the Sargasso Sea
MKIINNKQKALQELRRISQRTTSGDNKKINSIVENILQEVKFHGDIAVEKYTKKFDGFYPKPMQVSTRDLKTAWEETDQHLKQSLEIAYQRIKKFHEKEIPESFTIKGEYGDYVQRRWMPVKNAGLYIPGGRAAYPSTVLMNAIPAKVAGVKEISMVSPGNKKGEINTTVLAAAYLSGVDKVFRIGGAQAIGALAFGTKQI

SEQ ID NO: 84816 - protein, 167 aa, Unknown
  Bacterial polypetide isolated from the Sargasso Sea
MSFNTLIDWNSCSPEQQRELLMRPAISASESISRTVDEILENVKNNGDRALREYSAKFDKTEVGALRVTEEEIQQASSRLSDELKQAMQAAVRNIDAFHTAQILPPVDIETQPGVRCQQVTRPIASVGLYIPGGSAPLFSTVLMLATPARIAGCKKVVLCSPPPIAD

SEQ ID NO: 84817 - protein, 321 aa, Unknown
  Bacterial polypetide isolated from the Sargasso Sea
SLIARLDSSAPDFDAAFARLLVSPAESDSALAETVSSIIAAVAVEGDAALLRFTNQFDSRALSDPANFKVSPSALISALQAIDPGVREALEHAAARIRDFHERQLGQSWQYRDDTGSLLGQRVSAMDRVGLYVPGGRASYPSSVLMNAIPAKVAGVSQVIMVVPAPSDEISPVVLAAAQLAGVDCVFTIGGAQAIGALAYGTGTVPRVDKIVGPGNRFVAEAKRQVFGRVGIDMIAGPSEILIIADGSVKPEWVAMDLFAQAEHDEYAQAVLISPDAVYLDAVAACIADLLPSLARREIVSAALKNRGALVKVPDLDAAAS

SEQ ID NO: 84818 - protein, 269 aa, Unknown
  Bacterial polypetide isolated from the Sargasso Sea
FKKKFKDLIYDERKSNDKINITVTKILNQILENGDDGLNYCVNKFDKINVKQIKELFIPKDILKKAYDGLKKEHKKALNIAANRIKKFHKQQIPKNFRYRDNLKINLALTHSPINSAGFYVPGGKAIYPSSVLMNAIPALVAGVERRVLVSPISDLNKSSIVLAAAHVAKVTEFVRMGGAHAVAALAYGTKTISPVDKIVGPGNAYVAEAKRQVFGKVGIDSIAGPSEVLIVCDETANPDHVAIDLLSQAEHDELAQSILITTSKEIAT

SEQ ID NO: 84819 - protein, 280 aa, Unknown
  Bacterial polypetide isolated from the Sargasso Sea
FASLNLEDTDNEITRKFRVIESVGIYVPGGKASYPSTVLMGAAPAIACGVRDISITSPAQNGISNTLTIAAAKVAGIETIYRIGGAQAIAALAIGTDQITKVDKIIGPGNIFVAEAKKQLFGEVGIDSIAGPSEILILADSSSNPETIAWDLMAQSEHDSDASSVLISDSEDIIANVKEIISTEIDSLERCSIIKESISSNGLIIKIDNFSEAKQLVNKIAPEHLHLAFDHVNYRDENSLIAGLILKGENSANSFSDYVLGPSHILPTNSSSRFSSPLSV

SEQ ID NO: 84820 - protein, 258 aa, Unknown
  Bacterial polypetide isolated from the Sargasso Sea
NGDKAVLGYEKKFSKIKTKSNKIFFSSKEVNKLSKKIDKKLKKAIDLAFNRIKKFHLKQKFSSFKFKDKYKNELSYRYSSIEKVGVYVPGGTASYPSTVLMNCIPAIVAGVKNIYLATPSLDSKINPAIVYAAKKCGVKKIYKTGGAQTIAALAYGTKKFEKVDKIVGPGNTFVACAKKEVFGDVGIDMVAGPSEVSIVADKTADPDLVAADLIAQAEHDIYAQSILITDNKNLISLVNLSLKKQLKKLPKKSIASQS

SEQ ID NO: 84821 - protein, 267 aa, Unknown
  Bacterial polypetide isolated from the Sargasso Sea
NDLVFSKSEINKIIKRLDTKTKNSINVAFKRIYNFHKNQKFKDFKVLDKFKNSLTYRSMPIEKVGVYVPGGIANYPSSVLMNCIPAIVAGVKQIYLTVPCMGKKINPGVLYAARKCKVKKIYKLGGAQAIAAFAYGTQTINKVDKIVGPGNEYVALAKKEVFGQVGIDMFAGPSEVTIIADKYSNPDWIAADLIAQAEHDEMSQSILITDNQKIIIKVKKALGSQIKFLPKKRIAAKSLRKYGIAVLAKNSNEISNITNKIAPEHLQ

SEQ ID NO: 84822 - protein, 183 aa, Unknown
  Bacterial polypetide isolated from the Sargasso Sea
QSTHIASDLLAQAEHDPLASAILLTTSENQAKEVLKELYKKIDDHPRKEICMQSIQNWGLIVICQNYESCIELSNNFAPEHLEILTFDSKKILEGIDNAGAIFLGKWTPEAVGDYIAGPNHTLPTSGNARFSGSLGVETFMKNTSIIEFNEESLKVNSLDIINLARSEGLHSHANSVQIRFED

SEQ ID NO: 84823 - protein, 153 aa, Unknown
  Bacterial polypetide isolated from the Sargasso Sea
LVNLRLKAQIKNLPKKYIASKSIKNYGLAIYAKNNERILDVINIIAPEHLEIDCKNHNKLIKKIKNAGSIFIGKFSPEAMGDYVAGPNHVLPTSGSAKFSSGLSVNDFLKRHSLIKITKSGIERLGPSVINLAMHENLEGHANSIKVRLKKGI

SEQ ID NO: 84824 - protein, 114 aa, Unknown
  Bacterial polypetide isolated from the Sargasso Sea
GVELSNKFAPEHLEILTKDSKKILAGIENAGAIFLGKWTPEAVGDYLAGPNHTLPTSGNSRFSGSLGVETFMKNTSIIEFNEESLKVNSVDIINLAKSEGLHSHANSVEIRFED

SEQ ID NO: 84825 - protein, 248 aa, Unknown
  Bacterial polypetide isolated from the Sargasso Sea
SAENVQEYYSKQLHGDFEITQDGMKIKSRAVPVTKAGCYVPGGRAAYPSTVIMTAVPAKMAGVDHVVIAVPPDENGEIPKSVLAAAAISGVEKIHPIGGAQAIAALAYGTEEVDPVDVIVGPGNIYVSLAKQEVSSTVRVPSSFAGPSEVVVMADETAEPDLVAMDLVVQAEHGPNGLSWLITWKEEIAARVQAEIEKILVASRRKEEIESTLSNSGYCVLVEGPDQALIVSEAVAPEHLQLMIQESE

SEQ ID NO: 84826 - protein, 281 aa, Unknown
  Bacterial polypetide isolated from the Sargasso Sea
YKDDDGNELGQRITPLDRVGVYVPGGKAAYPSSVLMNVIPAQVAGVKEIVMVVPTPEGERSDLVLAAAEILGVTKIFSIGGAQAIAALAFGTDLIPKVDKIVGPGNIFVAAAKREVFGFVGIDMIAGPSEVVIVADKNANVDWVAMDLLAQAEHDEEATAILISPDKSFIDRVEKSIIKFLPDMERASIIKASLKKNGIMIKTEDFKQAINIVNILAPEHLELAVTNPEELLSGVKHAGAIFMGSYSAESLGDYCAGPNHVLPTGRTARFSSPLGVYDFQK

SEQ ID NO: 84827 - protein, 221 aa, Unknown
  Bacterial polypetide isolated from the Sargasso Sea
GVKELILVTPTPSGKVNPLVLLAANMVGINKIFKIGGAQAIAALAFGTSSVPVVDKIAGPGNSFVTEAKRQVFGKTGIDMIAGPSEVLIIADEKNRSDWIAIDLMSQAEHDENSRAVLVTTSTELAKAVKGEVEKILGKLERRDIAQKSWHNFGAIIVVKSLDEACLLSNKIAPEHLQLFVQNPLSILKKITNAGSVFLGAFSPEAIGDYIGGTNHILPTA

SEQ ID NO: 84828 - protein, 203 aa, Unknown
  Bacterial polypetide isolated from the Sargasso Sea
IDMVAGPSEVSIIADKNSNANWIASDLIAQAEHDILAQSILISNNRNLIKSVKLSIKSQLKDLPKKNIASKSIKNFGLAIYASNSKKISEIVNLIAPEHLEISFSKSKDLIKKIKNAGSIFIGKFSPEAMGDYIAGPNHVLPTSGSAKFSSGLSVNDFLKRHSLIKITKTGIERLGPSVINLSQHENLEGHARSVKIRLKKDL

SEQ ID NO: 84829 - protein, 280 aa, Unknown
  Bacterial polypetide isolated from the Sargasso Sea
IKIKREKSEDVNASVSKILEAVKSRGDDALVEFTKSYDDFDINPAKMRIAEDDIDIAVKSCSASEIEALNLAADRIKDYHKKQMPEDLQYIDAMGVTLGYRWSPVNSVGIYVPGGMGAYPSSVLMNAIPAKIAGVKRLVMVVPTPKGNINSLVLAAAKIAGVDDIFRIGGAQAVAALAYGTDSVPAVDKIVGPGNVYVATAKKQVFGVVGIDMFAGPSEVLVVADAENDPNWIASDLLAQAEHDASAQAILITDDEGFANSVDIRLQEIAKNLSRSDTAL

SEQ ID NO: 84830 - protein, 290 aa, Unknown
  Bacterial polypetide isolated from the Sargasso Sea
DISNGAKNISNELFDALKVSSKRIYEFAKRTMPSSWFDPVTGLGESVVPMQKVGLYVPGGTATYPSTVLMSSMIAKAVGVPEIILCTPPKINGMPDDSILAAAQIAGIDKVYCIGGAQAIAAMAYGTQTIPKVDKICGPGNIFVTLAKKKVFGEVGIDGLFGPTETVVIADEIARPEFCAADMLAQAEHDELAFPVLITTSENILNNVEIELNRQLENLDRNQIAKESINNNCALILVDNVEMCVELSNLIAPEHVCLNIQNPNDWVKQIINAGAIFVGDYSAEVMGDYI

SEQ ID NO: 84831 - protein, 224 aa, Unknown
  Bacterial polypetide isolated from the Sargasso Sea
MALKINSSDPNFYELFERLLGRRATRVEDATKVSADIIGKVRKSGDEALIKLTKELDGIDLTSTGLIIDGDEIDEAINKINIDQYDALKFAADRITAFHLKQMPDSFEYLDEAEVKMGMRWSSVDSVGLYVPGGTASYPSSVLMNAIPAKVAGVPRRVIAVPQTRGSINPLVLAAAKLADVQEVYRVGGAQAIAALAYGTETISPVDKIVGPGNAFVAAAKKLV

SEQ ID NO: 84832 - protein, 220 aa, Unknown
  Bacterial polypetide isolated from the Sargasso Sea
MNKRKRSQKNQTSKVSKIINNVRKNGDKAVLNYEIKFSKIKKKTNKIFFTNKEINAISKKIDKKIKKAIDLAYNRIKKFHSSQKFSSFKIKDKYKNELSYKYLSLEKVGVYVPGGTASYPSTVLMNCIPAIVAGVKNIYLATPALDSKINPAIVYAAKKCGVKKIYKTGGAHSIAAFAYGTKNFEKVDKIVGPGNAFVACAKKEVFGDVGIDMVAGPSEV

SEQ ID NO: 84833 - protein, 316 aa, Unknown
  Bacterial polypetide isolated from the Sargasso Sea
KTKNSINIAFKRIYNFHKNQKFQDFKVLDNFKNSLSYRSMPIEKVGVYVPGGIANYPSSVLMNCIPAIVAGVKQIYVTVPCVGKKINPGVLYAAQKCKVKKIYKLGGAQAIAAFAYGTQTINKVDKIVGPGNEYVALAKKEVFGQVGIDMFAGPSEVTIIADKYSNPDWIAADLIAQAEHDEMSQSILITDSKKIIIKVKTALRSQIKSLPKKKIAAKSLKKYGIAVLAKNSNEISNITNKIAPEHLEILTSNPQKYLKKINNAGSVFLGKYSPEAMGDYIAGPNHVLPTSGTAKFSSGLSAYDFLKRQSIIKISK

SEQ ID NO: 84834 - protein, 275 aa, Unknown
  Bacterial polypetide isolated from the Sargasso Sea
MTKFLDLRRSGKRIENKTISNILKDIKKNKNKSLLKYEKKFSKNSQIKPSVNQINKAIKSLDPTIKRAIDFAYKRILKFHNLQKMEDILYKDNLNNKIEYKYVPIQSVGIYVPANLPSTLLMNAIPAKIAGVKRIVLANPKNNGKLNPAVLYAAKKLGIREIYSMGGAQAIGSLAYIQKVNKIVGPGNIFVAGAKRQVFGDVGIEGMIAGPSEITILADSKTNLNEVTTSMIGQAEHDSNSQCILITKNSNLINKFKKDLELKLKDLPRKNIASK

SEQ ID NO: 84835 - protein, 156 aa, Unknown
  Bacterial polypetide isolated from the Sargasso Sea
KNFIDRVEKSIIKFLPEMERANIIEASLKKNGIMIKIEDFKQAINIVNILAPEHLELAVTNPEELLSGVKHAGAIFMGSYSAESLGDYCAGPNHVLPTGRTARFSSPLGVYDFQKKTSLIKCRNGSVSNIAEVASILARGEGLTAHARSAEFRNDS

SEQ ID NO: 84836 - protein, 252 aa, Unknown
  Bacterial polypetide isolated from the Sargasso Sea
GIKKIYCMGGSQAVAAMAYGTESVAPVNKIVGPGNIYVAEAKRQVSGLVGIDMFAGPSEIVVISDQNSDPKIISADLIAQSEHDKGAQSILITTDQALAEAVEKEVPSQLESLPRKEIASVSWDKNGKIIVVRDLKEAFDISNQLAPEHLELAIDNARDFLKYIVNAGAVFLGRNTPEALGDYVAGPSHVLPTSRSAKFSSGLSVFDFLKKISLVEFTKEGIEEIGNSAMTIAENEGLDGHSRSIEYRLSKK

SEQ ID NO: 84837 - protein, 307 aa, Unknown
  Bacterial polypetide isolated from the Sargasso Sea
INKTLDQKIKDDIQFSHERVRKFAEHQLENLGKDSEVELSPGLIAGQKLIPVNTVGCYVPGGRYNNIASAIMSVTTAKVAGVKNVIATSPPKDSNGANPIIIYTANLCGADVIMNIGGIGAIGALAYGCFGNPEVDMIVGPGNKFVAESKRILFGKVGIDLFAGPTEIGIIADHTADKEIIAYDLVGQAEHGPDSPAWLYTTDKSLCDYVMKRVPEIIQELPEHNRNNADAAWKDYGEVIMCDTKEEMMKVSDEYAPEHLEVQAEDLDWYLKNLKNYGSLFLGEETTVAYGDKCSGPNHILPTKGAG

SEQ ID NO: 84838 - protein, 226 aa, Unknown
  Bacterial polypetide isolated from the Sargasso Sea
MDKRRSGKAVDTSIVPKILKDIKINGRKALLKYEKKFSKNTEIVPSKDKVKKAINKLEPKIKKSIDLAYNRIFKFHSLQKPKNIKYVDDFKNKLEYKHVPLQSVGIYVPANLPSTLLMNAVPAKISGVKRIVLANPKLNGKLNPAVLYAAKKVGIKEIYSMGGAQAIASLAYIQKVNKIVGPGNIYVARSKREVFGDVGTEGMVAGPSEICVLADSKTDLNQVITS

SEQ ID NO: 84839 - protein, 260 aa, Unknown
  Bacterial polypetide isolated from the Sargasso Sea
KQNSAVLYAARKCKINEIYSIGGPPAIAAAAYGTKKIKKVNKIVGPGNAFVVAAKKEVFGDVGIEGMIAGPSEIAIVCDKFSNPEWVASDLIGQAEHDNFAQCILISKYKQLIEKVKTEIFKQLKKIPRASIAKKSLMSNGILMHISSDKKIIDIINKIAPEHLELNVKNYKSFIPKIKNSGSICLGKYAVMAMTDYNVGSNHVLPTNGSAKYSSGISVNEFYKRISYINLSKKGIESLGPSVITLANYEGLVGHAQSVK

SEQ ID NO: 84840 - protein, 276 aa, Unknown
  Bacterial polypetide isolated from the Sargasso Sea
MPRIAGVERIVLANPKLNGKLNPAVLYAAKKVGINEIYSMGGAQAIASLAYIQKVNKIVGPGNIFVAAAKKELFGQVGIESMVAGPSEITILADYKTRIEDVLTSMIGQAEHDENSQCILISKDLKLIKKFQKKIKEKIKKLPRRSIAYKSLKNNGLTIFAKKNSDIINSINEIAPEHLEINISKPNKIINKVINVGSICIGKYSPMAVTDYNAGTNHVLPTFGSAKFASGLNVNEFYKKISYITLSKKGVEKIGESATHLAEYEELYGHALSIRS

SEQ ID NO: 84841 - protein, 277 aa, Unknown
  Bacterial polypetide isolated from the Sargasso Sea
IKKFHLKQKFSNFKFKDKYNNELSYKYSSIGKVGVYVPGGTASYPSTVLMNCIPAIVAGVKNIYLTTPSIDSKINPAVVYAAKKCGVKKIYKTGGAHSIAALTYGTKNFEKVDKIVGPGNAFVAFAKKEVFGDVGIDMVAGPSEVSIVGDKNSDPKLIAADLIAQAEHDIYAQSILITDNKKLISAVNKSLKQQLVNLPKKKIAIQSLKKFGLAIYTNKRNKISEIINTIAPEHLELCTSFNNRLIKEVKNAGSIFIGKFSPKAIGDYLAGPNHVCL

SEQ ID NO: 84842 - protein, 252 aa, Unknown
  Bacterial polypetide isolated from the Sargasso Sea
MLLRRKIKVQINSVSVIKIINDIKKNGDKALLKYEKKFNQNRTIAPSLNRISTSIKSLDPKVKKAIDLAYSRIHKFHSLQKFKNISYVDKFKNRLEYKYLPIESVAVYVPGSSASYPSSVLMNAIPAIVAGVKRIVMINPGYQGKQNAAVLYAAKKCKIKEIYSIGGPSAIAAVTYGTRKINKVSKIVGPGNMYVAAAKKEVFGDVGVEGMTAGPSEITVVGDRFSNPVWIASDLVGQAEHDELAQCILISK

SEQ ID NO: 84843 - protein, 268 aa, Unknown
  Bacterial polypetide isolated from the Sargasso Sea
GHINDLTIAAAKIVGIDKIARLGGAQAIAAFSFGTKTIPKVDKIVGPGNAYVAEAKRQLFGNVGIDSIAGPSEIVILANETSSPEIVAWDLMAQAEHDEDASTILISTSDKITEEIKEIIESELPNLERAEIIKSSMNSNGLIIQIEDLKQSIELINRLAPEHLHLAFDNKQIDTKEIIAGIILEGEDSAVSFSDYVLGPSHILPTNSSARFSSPLSVEDFIVSSSKVILNSERNKDSYNELVENTSIIARAEGLTAHAISAEKRRKD

SEQ ID NO: 84844 - protein, 268 aa, Unknown
  Bacterial polypetide isolated from the Sargasso Sea
MHSKKESLPSLLNRSRSISVKLNTVHGLQKAEGVLTRFDPLDIGSLPESIVQRTHELFGPNTSPQDSVLKILADVRDKGDEAVFHYAELLDDTSLKSAEVSLKDLELARESLSDHLVQSLHLAAERIEHFHKSTLPENWVDYQSGLGELIRPLERVGLYAPGGTAAYPSTVLMTAIPARVAGVKEIILTTPKRGEQPINPAVLVAAEIAGVDKVYQIGGVQAIGALAYGTESIRKVDKICGPGNIFVAYAKKIVQGQVDIDGIFGPTE

SEQ ID NO: 84845 - protein, 256 aa, Unknown
  Bacterial polypetide isolated from the Sargasso Sea
MDELGIHEVYQVGGAQAIAALTFGTPTINPVNKIFGPGNAYVASAKKQVFGKVGIDLVAGPSEIIVVADAQNNAEWVASDLIAQAEHDENAQSILITNSKAFADKVLDKIENLKNLLSKKDIISLSLKKNGIGIIMDDLNDSYKIINKIGPEHLHLQSSEKQNILKKINNAGGIFIGSYSAEVFGDYIVGTNHVLPTSGAAKFSSGLGVIDFMKKSSIVEMNKNSFETFSKHVENIANVEKLDAHKLSVRIRQTKK

SEQ ID NO: 84846 - protein, 308 aa, Unknown
  Bacterial polypetide isolated from the Sargasso Sea
LDLAIDESELRSAFEEIPKKDSDALVQAANRIEKYHRAQKQGDFQITDDSGNNLGQVVTALDRVGVYVPGGQAAYPSSVLMTVIPATVAGVSEIAVAVPTPQGRRNSHVLAALHITGVREVYSIGGAQAVAAMAYGTETIRKVDKIVGPGGAIVAAAKRLVYGPVGVDMIAGPSEVLIIADPTANPDWVALDLFSQAEHGENSQSILLCPDENFLRLVEESMERHIDSLSRKNIIVKSLETRGAFVLTKDLEEAVTISNIIAPEHLQLAVAKPRKLMRQVRHAGAIFLGVRTPEVLGDYSAGPSHVLP

SEQ ID NO: 84847 - protein, 311 aa, Unknown
  Bacterial polypetide isolated from the Sargasso Sea
DQGNVLGQLVRGMERAGIYVPGGKAAYPSTVIMTAIPARVAGVREIIACVPAPRGVCNKTVLAAAHLCGVDRVFSIGGAQAIAALAFGTKLVPKVDKIVGPGNLYVAKAKEKLFGRVGIDMIAGPSEVVIVADDTVDPLWVVQDMFAQAEHDELAQAIVVSASQSVIDNVRQTIEEKIKDEQRRGIIEDALKDRGALIKVRDLKEALKVVNLLSPEHLQLSIKDAAGFAKNVENAGAVFVGASTTEAVGDYAAGPSHVLPTNGTARFSSPLGVYDFQTRTSVIECSKEGSKSLNRTASIIALEEGLFSHSK

SEQ ID NO: 84848 - protein, 296 aa, Unknown
  Bacterial polypetide isolated from the Sargasso Sea
YEYGMQYSAIDTVGLYVPGGRALYPSSVVMNAVPAAIAGVSHLVVATPPQKNGLIAPEVLVASAECGVHTIIKAGGAQVIFAMAHGTEQIPNVDKIVGPGNAYVDRAKQMVYGIIDIDKPAGPSEVLVYVTDKKYAAYAAAELLAQCEHDPSASGSVLSTDKSTLEEVNSEIALQLSTLKRSDIIKKALKNSSLFYVETEEDAIKAINTIATEHLCLLVDNSKELLAQIKHAGAIFCGPYTPVALGDYIAGPNHVLPTARAARFASPLSVTDFMKFSTVLECSKGHLQRLQEDVKT

SEQ ID NO: 84849 - protein, 249 aa, Unknown
  Bacterial polypetide isolated from the Sargasso Sea
AYSRIYKFHSLQKFKNISYTDKFKNKLEYKYLPLESVAIYVPGSLVSYPSSVLMNAIPAIVAGVKRIVMINPGFKGNQNPAVLYAARKCKIKEIYSIGGPSAIAAVSYGTKKIKRVDKIVGPGNSYVAAAKKEVFGDVGIEGMTAGPSEITIVCDKFSNPEWTASDLIGQAEHDPQAQCVLISKDKKLISKVQMEISKQLKSIPRESVAKKSLKRNGILMYVANDNKIINIVNKIAPEHLELNVKNYKS

SEQ ID NO: 84850 - protein, 224 aa, Unknown
  Bacterial polypetide isolated from the Sargasso Sea
SGPGNAFVAAAKRRVFGQVGIDMIAGPSEILVIADADNDPDWIAVDLLSQAEHDESAQSILITTDRAFGEAVAGAVDKRLETLERRKIAGKSWADFGAVITVRNVEEAVALSDRIAPEHLEIACADAQDIADTIRHAGAIFIGAWTPEAIGDYVGGPNHVLPTARSARFSSGLSVLDFMKRTTLARMTPDALAAIGPAAETLAISEGLEAHGLSVRARLERLNT

SEQ ID NO: 84851 - protein, 258 aa, Unknown
  Bacterial polypetide isolated from the Sargasso Sea
YASSSMGIEKILRVGGAQAIAALAFGTESIEKVNKITGPGNKYVAEAKRQVFGRVGIDSVAGPSEVLLICDKSMPEKIAAIDLLAQAEHDENAQSILITNDKEYALRVENEIENYLKNLKRKEVARRSWENFGAMVIVPDFKKSIEVSNLIAPEHLQLCFENAEIYLNSITNAGSVFLGYWSPEAMGDYITGSNHVLPTNGTAKFSSSLSVFDFMKRVAFTKVNENGFKKLGPSVVRLADSEGLQAHSLSVSERLKNL

SEQ ID NO: 84852 - protein, 242 aa, Unknown
  Bacterial polypetide isolated from the Sargasso Sea
MGGAQAIASLAYIQKVNKIIGPGNIFVAAAKKELFGQVGIESMIAGPSEITILADNKTKIEDVLTSMIGQAEHDENSQCILISKDLKLIKEFQKKIKDKIKKIPRRSIAFKSLKNNGLVILAKKNSDIINSINEIAPEHLEINISKPDKIINKVINVGSVCIGKFSPMAVTDYNAGTNHVLPTFGSAKFASGLNVNEFYKKISYITLSKKGVEKIGESATYLAEYEELYGHALSIRSRMRRK

SEQ ID NO: 84853 - protein, 233 aa, Unknown
  Bacterial polypetide isolated from the Sargasso Sea
YKDDDGNELGQRITPLDRVGVYVPGGKAAYPSSVLMNVIPAQVAGVKEIVMVVPTPEGERSDLVLAAAEILGVTKIFSIGGAQAIAALAFGTDLIPKVDKIVGPGNIFVAAAKREVFGFVGIDMIAGPSEVVIVADKNANVDWVAMDLLAQAEHDEEATAILISPDKSFIDRVEKSIIKFLPDMERASIIEASLKKNGIMIKTEDFKQAINIVNILAPEHLELAVTNPEELLS

SEQ ID NO: 84854 - protein, 257 aa, Unknown
  Bacterial polypetide isolated from the Sargasso Sea
MSIVTAKVAGVKEIIACTPPTKGKPHFPTITAMALAGANEIYLLGGVQAVTAMAKGTETIKSVDMLVGPGNAYVAEAKRELYGSVGIDLFAGPTEILVIADESADKEMVATDLLGQAEHGPTSPAILLTTSSKLAKSIDEEIELQLKTLSTASVAGLAWKDYGEIILVDTEEELVEKANEIASEHVEVLTHNPDYFLKNLINYGSLFLGHETNVAYGDKVIGTNHTLPTKKAAKYTGGLWVGKFIKTVTYQKCTPQA

SEQ ID NO: 84855 - protein, 258 aa, Unknown
  Bacterial polypetide isolated from the Sargasso Sea
FHDRQKADSQLDFSSDGSVLGWKVTPVDSAGIYIPGGRATYPSTLLMNVIPAQIAEVPRIALVSPPGPSGLPHPLVMATAAFLGLEELYAVGGAQSIAALAYGTESIQKVVKITGPGNAYVAEAKRQVYGTVGIESFAGPSEIMIVCDREDIPVDYLARDMLSQAEHDPDAGAFLVTTSDKQSKKVADRIKKLVPKLPRKGIIEASFKNRSAIILVKDLEEIFEMVNELAPEHLEVLTKEPFNDLYRIRNAGAIFLGP

SEQ ID NO: 84856 - protein, 274 aa, Unknown
  Bacterial polypetide isolated from the Sargasso Sea
IKRFHKKQFPQNYKIHKNGLKTESTWKPIDSVGLYIPGGKAIYPSSLIMNAVPAKVAGVKRIVVVTPPQSGKINPYILALLKELAIDEIYQVGGAHAIAALAYGTESIKPVNKIFGPGNAYVTSAKKQVFGKVGIDLIAGPSEIVVVADKNNNPEWVASDLIAQAEHDVNAQSILITDDKDFSNLVLFNLKKLSKEIKNNYIVNKSLNNFGIIILTNNLDNSHKIINHIAPEHLHLQNKNKKKLLKKITNAGAIFIGEYATEVFGDYIVGTNHV

SEQ ID NO: 84857 - protein, 263 aa, Unknown
  Bacterial polypetide isolated from the Sargasso Sea
MIKILNIRKSNYLTQINGLLKKRQNNTTSKIVIVKKIIDQIKRNGDKALIKYEKKFSKNSQIIPSKNIIKKSIRSLDPKVKKSIDIAYSRILKFHSKQKIQNINYKDKLNNKFQYKHLPINSIGVYVPGGNASFPSTVLMNTIPAKIAGVKRIVLVNPKIQGQQNPGVLYAAKKVGIKEIYSIGGAQAIAALAYGTKKIKKVNKIVGPGNIFVSTAKKEVFGDVGIDMIAGPSEITVVADKHSNPDWIAADLLAQAEHDLNSQ

SEQ ID NO: 84858 - protein, 257 aa, Unknown
  Bacterial polypetide isolated from the Sargasso Sea
IPAKVAGVKRIVMVVPAPNGKINPLVLFAADLVGIEEIYRVGGAQAIAALAYGTKEINKVEKIVGPGNTFVSSAKRNVYGHVGIDTVAGPSEVLIVSDSISNPSWIAADILAQAEHDIDAQSILICDSEDFANKVEEYVYKHLEKINNFSLAKKSWENNGIIIINNNNTLDTIKTIDLIAPEHLELSISNPLELVKDISNSGAIFLGRYTPEAIGDYLAGPSHVLPTSRSSRFDSGLSVFSFLKRSSLIECNKKVFN

SEQ ID NO: 84859 - protein, 280 aa, Unknown
  Bacterial polypetide isolated from the Sargasso Sea
VAGVKKIYATVPCPNNEIDPIVLATFDICGIEKIYKIGGAQAIAALTWGTETVQNVDIIIGPGNKWVAEAKKQALSNINIDMLAGPSEILILADKDNRADWVAADLLSQAEHDISAQAILITDCENFLEDVNKELLIQTEALKRKDIVKKSISDNGYGILVKNIQDAIGIINDIAPEHLSLLCKENEYIEKKITSAGVIFSDEWTPESMGDYIIGPSHVLPTNGMAKRQSGLSVFNFLRRQSTISSTKKTIKKLGPSAILLADCEGLDAHANSIKIRIKD

SEQ ID NO: 84860 - protein, 229 aa, Unknown
  Bacterial polypetide isolated from the Sargasso Sea
MILRLNANGKNFQKELVKKINKRSVFSNKDYNVAKKIVLDVKKNGDKAVLKYEFRFNKNKRINSNYSSISKIIKSLNPNVKKSIDFAYQRILKFHKKQKSKDIKFSDNLNNKIDYKYKPLNSVGIYIPGGNASFPSTVLMNAIPAMLAGVKRIVIANPVRDKNQSAAVLYAAKKCGVKEIYRIGGAQAIAALAYGTKTIQRVDKIVGPGNIYVAAAKKIVFGEVGIDMI

SEQ ID NO: 84861 - protein, 305 aa, Unknown
  Bacterial polypetide isolated from the Sargasso Sea
RNIKINGKIVKKIIQEIKLNGDSAIVKYEKKYNKNTEIKINKNKILKNIKTLDPKIKKAIDFSYNRIFKFHSKQKIQNYNYKDKLNNKIDYKYIPLDSVGIYIPGGNASFPSTLLMSGIPAKIAGVKRIVMVNPKLKGKLSSGVLYAAKKIGISEIYSIGGVQAIASLAYGTKKIKKVNKIIGPGNIFVSTAKKEVFGDVGIDMIAGPSEITVVADKFSNPEWVASDLLAQAEHDLNSQCILISKDKKIIEMVKNSILNQLKVLPRKDIAKKSLQQNSIFIHATTDKEILYTINTIAPRTFRIKC

SEQ ID NO: 84862 - protein, 220 aa, Unknown
  Bacterial polypetide isolated from the Sargasso Sea
MKIKTLNTSQANFDKKLRDHLSFEQGNYESVEKTVNKILKKIRESGDSGLRLLVEKYDKTFYKKISDAIVTKEEISDAYSLTPNKIISSLRKAMRNIKTFSKQQKLESWSIKVKGSKLGEKVTPINSVGIYVPGGKASYPSTVLMNAIPAQVAGVKNITMVCPPVAGKLNPLVLIAADLCGVNKFINLVVHMLLALLLLVLKLSNQLINLFGQGNIYVAT

SEQ ID NO: 84863 - protein, 273 aa, Unknown
  Bacterial polypetide isolated from the Sargasso Sea
KYLPIESVAIYVPGSSASYPSSVLMNAIPAMVAGVKRIIMINPGHKGKQNPAVLYAAKKCKIKEIYSIGGPSAIAAVAYGTKKINRVNKIVGPGNMYVAAAKKEVFGDVGVEGMIAGPSEVTVVGDRFSNPIWIASDLIGQAEHDELAQCILISKSRDLIIQTRSEISKQLKKIPRTAIARKSLFYNGILIQVSTDKEIIDIVNRIAPEHLELNIRNFRSFIPKIKNAGSICLGKYAVMAMTDYNVGSNHILPTNGSAKFSSGISVNEFIKRF

SEQ ID NO: 84864 - protein, 291 aa, Unknown
  Bacterial polypetide isolated from the Sargasso Sea
ISYTDKLKNKLEYKYVPLDSVAIYVPGSTASYPSSVLMNAIPAIVAGVKRIVMINPGYKGKQNPAVLYAAKKCKIKEIYSIGGPSAIAAVSYGTKKIKKVNKIVGPGNAYVAAAKKEVFGDVGIEGMTAGPSEVTIVCDKFSNPEWVASDLIGQAEHDILAQCILITKDKNMLDKVKNEITKQLKKIPRASVARRSLINNGILMYISSENKIISVINKIAPEHLELNIKNYKSLVPKIKNSGSICLGKYAVMAMTDYNVGSNHVLPTNGSAKYSSGISVNEFYKRISYINL

SEQ ID NO: 84865 - protein, 123 aa, Unknown
  Bacterial polypetide isolated from the Sargasso Sea
IVICENYDSCIELSNDFAPEHLEILTFDPKKILEGIDNAGAIFLGHWTPEAVGDYLAGPNHTLPTSGNSRFSGSLGVETFMKNTSIIEFTEESLRVNSLDIINLAKSEGLHSHAHSVQIRFQD

SEQ ID NO: 84866 - protein, 242 aa, Unknown
  Bacterial polypetide isolated from the Sargasso Sea
KEKFALYEAIKNITFVSKSQLKTINNTIEPINGLSIWERYVPINSVGLYVPGGTAPLVSSFLMQVIPAITAGCKEIVICTPPQQNGKIHPAILWLAEQLEVDNVFKIGGAQAILSLANGYLGIPKVDKIFGPGNTYVAEAKKYVSNKVAIDLYAGPSEVMVVTNEDKNISLAAVDALSQLEHGIDSCAFVLSKSKTILKKVAEEIKKLSKELSRSDQIEPAIENISLIKCNSDDDIINMINS

SEQ ID NO: 84867 - protein, 286 aa, Unknown
  Bacterial polypetide isolated from the Sargasso Sea
SFKDKYKNIFSYRSRPINKVGVYVPGGTASYPSSVLMNCIPAIVAGVKEIFMTVPALNGKMNSGVLYAAKKCKVKKIYKLGGAQAIAAFAYGTETVSKVDKIVGPGNEYVNLAKKEVFGQAGIDMYAGPSEVTIIADKFSNPSWVAADMIAQAEHDKKSQSILVSQSKELIYKVKESINIQLKNLPKKNIAANSLKNFGIAILSSDSREIADIVNQISPEHLQIYSKNPKNYLKNINNSGSIFLGGYSPEAMGDYLAGPNHVLPTSGTANFSSGLSVYDFLKKTVK

SEQ ID NO: 84868 - protein, 321 aa, Unknown
  Bacterial polypetide isolated from the Sargasso Sea
NNFLVTSEEFKTALKDCSKEYINSIHLAANRIKKYQTKILPKSIYFKDNIGIKMGCIWSAISSCGLYVPGGKAIYPSSVLMNAIPAKIAGVKRVVITTPANNNKISPEILVAAHVAGVNEVYKIGGVQAVAALAFGTESIKKVDKIAGPGNSFVAEAKKQVYGHVGIDSIAGPSEILIIADKHSNAKWIAIDLLSQAEHDEEARAILVTDDNKLIKNVDFYIKYFLKKISRKNIAIKSIKNNGLAILINDIKYSHLIANYIAPEHLQIMSKNKKSLLKKITNAGAMFVGNYSPEALGDYVAGPSHVLPTSGNARFESGCQF

SEQ ID NO: 84869 - protein, 293 aa, Unknown
  Bacterial polypetide isolated from the Sargasso Sea
EKKFSKNSQIKPSIKQINKAIKSLDPKIKRAIDFAYKRILKFHSLQKTKDIFYKDNLNNIIEYKYLPIRSVGIYVPANLPSTLLMNAIPAKIAGVKRIVLANPKNNGKLNPAVLYAAKKLGINEIYSMGGAQAIGSLAYIQKVNKIVGPGNIYVAGAKREVFGDVGIEGMIAGPSEITILADSKTNLNEVTTSMIGQAEHDSNSQCILITKNSNLINKFKKDLEFKLKDLPRKTIASKSIKNNGLILKVYNDRQIIDAINEIAPEHLEINVSNYKKYKDKIFNAGSICVGKYS

SEQ ID NO: 84870 - protein, 182 aa, Unknown
  Bacterial polypetide isolated from the Sargasso Sea
MDSADLIAQSEHDEMSQSILVSDSKYLIDKVQYYLIKQLKFLPKKKIASISLGKFGLAILVRNAREVSEITNIIAPEHLQIYTKKPDRYLKSIDNAGSIFLGAYSPEAVGDYIAGPNHVLPTSGTAKFSSGLSVLDFLKRQSIIKISKRGIEKLGPSVVTLSKYENLYGHANSVKLRLKERE

SEQ ID NO: 84871 - protein, 125 aa, Unknown
  Bacterial polypetide isolated from the Sargasso Sea
GLIVICKNYESCIELSNKFAPEHLEILALNSNKILEGIENAGAIFLGKWTPEAVGDYLAGPNHTLPTSGNSRFSGSLGVETFMKNTSIIEFNEESLKVNSLDIINLAKSEGLHSHASSVQIRFED

SEQ ID NO: 84872 - protein, 207 aa, Unknown
  Bacterial polypetide isolated from the Sargasso Sea
MTERERVEVMRRPRVDFTSILDVVRPIVEAVETRGDDAVREYTQRFDGVELDATTVRVEDLPEPVLDDDVKKAFDVAYENIAAFHAAQARTGDVDVTTMPGVRCRRVSRPIGAVGLYVPGGTAVLPSTALMLAVPAKIAGCERVVLATPPRKDGSIVPEVLYVAKKAGVTHILKAGGAQAIAAMGFGTETCPKVDKLFGPGNQFVTA

SEQ ID NO: 84873 - protein, 257 aa, Unknown
  Bacterial polypetide isolated from the Sargasso Sea
AAKKCNIKEIYSIGGAQAIAALAYGTKKILKVNKIVGPGNLYVTAAKKEVFGDVGIDMVAGPSEITVVGDKFSNADWISSDLIAQAEHDELSQSILISKDKNLINKVQNSLINQLKSLPRKLIASKSLNKNGILIYTNSDKKLVEIVNRLAPEHLELNLRNYKKIVNKIRNAGSIFLGKYSTEAFGDYLAGTNHVLPTSGSAKFSSGLSVYDFYKRISYINLSKKGIETLGPSVITLANFEGLEGHARSVKLRIGRK

SEQ ID NO: 84874 - protein, 172 aa, Unknown
  Bacterial polypetide isolated from the Sargasso Sea
AEHDLDAGAFLVTTSENQAKKVAERIKKLVPKLPRKEIIEASFSNRSAIILAKNLEEIFEIINEFAPEHLEILTKKPFEDLYKIRNAGAIFLGPNTPEPVGDYFAGPNHTLPTSACAKFSSPLGVQDFVKTSSVISYSAERLKNQGEQIIRFAEEEELFSHAAAIQTRLDNF

SEQ ID NO: 84875 - protein, 222 aa, Unknown
  Bacterial polypetide isolated from the Sargasso Sea
NCTQESIEAIKLAKNRIEAFHKDQLPEDSIYKDQEEVSIKTRWIPLDSAGIYIPGGTASYPSSVLMGVIPAQVAGIKKISATVPCPNNQIDPLVLATLDLCGIEKIYKIGGAQAIAALTWGTESVDGVDIIIGPGNKWVAEAKKQALSNINIDMLAGPSEILILADENNRADWVAADLLSQAEHDISAQAILITDSENLLENVNNELVNQTENLERKDIVNK

SEQ ID NO: 84876 - protein, 238 aa, Unknown
  Bacterial polypetide isolated from the Sargasso Sea
LLNVRINGDHAVEKYTKKFDGFNPKPMQVSANELKSAWDETDDHLKKSLEIAYQRIKKFHEKEIPISFTIEGEHGDSVQRRWRPVTSAGLYIPGGRAAYPSTVLMNAIPAKVAGVKEILMVSPGDTKGQINKTVLAAAYLSEIDKVFRIGGAQAIGALAFGTDQIKKVDVISGPGNIFVTTAKKMIYGFTGIDSLAGPSEILIIADKTANSSQIAADLLAQAEHDPLPSSILLTTSKR

SEQ ID NO: 84877 - protein, 261 aa, Unknown
  Bacterial polypetide isolated from the Sargasso Sea
INPYFIKLIKELGINETYFVGGAQAISALTFGTQTIEPVNKIFGPGNAYVAEAKKQLYGKVGIDLLAGPSEIIVVANNNNNPDWVASDLIAQAEHDENAQSILITDSKDFVTNVLSSIKKIKKDLSKKKIIEKSLNNNGIIALVDNIELASEIINFVAPEHLHIHISNNKKLLSKINNAGGIFLGEYSVEAFGDYIVGTNHVLPTSGAAKFSSGLGVLDFMKRTSVVKMNKKSFNALSKDTQKRSGLEGLDGHKLSVKIDK

SEQ ID NO: 84878 - protein, 178 aa, Unknown
  Bacterial polypetide isolated from the Sargasso Sea
IAADLIAQAEHDNFSQSILISNNKKQIKAVNLSIIKQLKNLPKKKIASYSLRNFGYSILSKNWKRTIEIINEIAPEHLELAIKNYGKILKKIENAGSIFVGKYSPEAMGDYLAGPNHVLPTTGSAKFSSGLSVFDFLKRQSLIKISKSGIERLGPYVINLANYEKLEGHARSVKKRIG

SEQ ID NO: 84879 - protein, 267 aa, Unknown
  Bacterial polypetide isolated from the Sargasso Sea
YVPANLPSTLLMNAIPANFAGVKRIVLANPKLDGKLNPAVLYAAKKVGINEIYSMGGAQAIASLAFIQKVNKIVGPGNIFVATAKKELFGRVGMEAMIAGPSEITVLADKKTDIEDVLTSMIGQAEHDENSQCILISKDINLIKDFQKKVKNKMKSLPRRLIAYKSLKNNGLAILVKNNSDIIYAVNEIAPEHLEVNISKSQTILKKIINVGSVCIGKYSPMAVTDYNAGTNHVLPTFGSAKFSSGLNIDEFYKKISYITLSKKGVE

SEQ ID NO: 84880 - protein, 244 aa, Unknown
  Bacterial polypetide isolated from the Sargasso Sea
PGSTASYPSSVLMNAIPAIVAGVKRIVMINPGYKGKQNPAVLYAAKKCKIKEIYSIGGPSAIAAVSYGTKKIKKVHKIVGPGNAYVAAAKKEVFGVVGIEGMTAGPSEVTVVCDKFSNPEWVASDLIGQAEHDILAQCILISKDKDLLDKVKIEITKQLKEIPRASVARRSLINNGILMYISSDAKITSVINKIAPEHLELNIKNYKSLVPKIKNSGSICLGKYAVMAMTDYNVGSNHVLPTNG

SEQ ID NO: 84881 - protein, 275 aa, Unknown
  Bacterial polypetide isolated from the Sargasso Sea
NTKLSSIWKPMDSVGLYVPGGNAVYPSSLIMSVVPAQIAGVKRIVCATPPSNNFNPYIAFLLDELNINEVYQVGGAQAIAALTYGTQTIKSVSKIFGPGNAYVTAAKKQVFGKVGIDLVAGPSEIIVVADEENNPEWVASDIMAQAEHDENAQSILITNSKTFANKVLEQIENLKNTLSKRKIVEISLKKNGLIVIMDDLKLSYNIINKIAPEHLHLQSKEKEIIFKNINNAGGIFLGDYSTEAFGDYVAGTNHILPTSGAAKFSSGLGVIDFMK

SEQ ID NO: 84882 - protein, 277 aa, Unknown
  Bacterial polypetide isolated from the Sargasso Sea
MIKYEKKYSNNSNIITQKKDLNYGARILSPKVKRAIDFSFNRIFKFHSKQKVKNIKYKDKLNNNLYYKYIPIESVGVYVPGGTASFPSTVLMNVIPAIIAGVKRIVIVNPKIDGKHSPAVLYAAKKTGINEIYSIGGAQAVAALAYGTKKIKKVDKIIGPGNIFVSNAKKKLFGEVGIDMIAGPSEITILADKFANPEWVSADLIAQAEHDINSQCILISKDINFIKKVNFLIKKQLIHLPRSNIASKSLKLNGILINAKDDNQIINIINDIAPEHL

SEQ ID NO: 84883 - protein, 272 aa, Unknown
  Bacterial polypetide isolated from the Sargasso Sea
NVVKRIVNDVRKYGDRSLIKYEKKFNNLTALSVKKLFFSKSEIQKNIKDLDVSVKNSIDISFKRISTFHKNQKFKNFKLKDNYNNYLSYRSKPLDKVGVYVPGGRASYPSSVLMNCVPAIIAGVKNIYMTVPSTNGNVNPGVLYAAKKCKVKKIYKLGGAQAIAAFSLGTKTVEKVDKIVGPGNEYVALAKKEVSGISGIDMFAGPSEVTIVADKNSNPEWISADLIAQSEHDEMSQSILVSESKNLILSVQKFLVKHLRFLPKKKIASKSL

SEQ ID NO: 84884 - protein, 277 aa, Unknown
  Bacterial polypetide isolated from the Sargasso Sea
SSKQIKKSINSLIKKVKKAIDTAYKRIYKFHSLQKFKNISYTDKLKNKLEYKYVPLESVAVYVPGSTASYPSSVLMNAIPAIVAGVKRIVMINPGYKGKQNPGVLYAAKKCKIKEIYSIGGPSAIAAVSYGTKKIKKVHKIVGPGNAYVAAAKKEVFGVVGIEGMTAGPSEVTVVCDKFSNPEWVASDLIGQAEHDILAQCILISKDKNFLDKVKIEITKQLKEIPRASVARRSLINNGILMYISSDSKIISVVNNIAPEHLELNIKNYKSLIPKIK

SEQ ID NO: 84885 - protein, 260 aa, Unknown
  Bacterial polypetide isolated from the Sargasso Sea
KNKFWKDEKGVKLGFRWTPINSIGIYVPGGLASYPSSVLMNAIPAKVAGVGNITMVTPTPLGKINPLVLYAAKIAGVDKIIKIGGAQAIAALAYGTESIDAVDKIVGPGNSFVASAKRKVFGQVGIDSVAGPSEVLIISDSDQNPSWIAADLLAQAEHDEKAKSILITDSIYFAKAVKLEVEKLLRNLKDNIIASKSWSENGKIIVVNQLKDSINLANTIAAEHLQICIKKPELLLDKIVNAGAIFLGENTPEVFGDYIL

SEQ ID NO: 84886 - protein, 304 aa, Unknown
  Bacterial polypetide isolated from the Sargasso Sea
VGLYVPGGRAAYPSSVLMSAIPAKIAGCDRIVMVSPPTGGSIPPAVLVAADIAGVSEIYQVGGAQAVFALAHGTQSIQAVDKIVGPGNKYVTAAKQMVYGCVDIDKPAGPSEVCVAIDSIDYAAYAAAECLAQLEHDPDASAIVITTSPDIAAAVNNHAIEQLKILKRQDIINQSKEHAVIVVVESDQELLESINQVASEHLVLLVDEPNSLRSQVRHAGSIFCGPYSPVSLGDYYAGPNHVLPTARSARFASPLGVMDFMKYSSYLEYSKQALENAQSDIQALTLAEGFDAHYQAVAVRFNDG

SEQ ID NO: 84887 - protein, 221 aa, Unknown
  Bacterial polypetide isolated from the Sargasso Sea
MTFRANTQTPGFDDQLEAFLAQKRESATDVSGVVLSIIGRIRAEGDKALFDVTKELDGNDIDADTIRVSRSEIEEALGACKSETLDALVLAADRIRAFHEKQVPCNLEYTDDAGVKLGYRWSPVQAAGLYVPGGTAAYPSSVLMNALPAKVAGVGRLAMVVPASGGELNPYILAAAHIAGVSEIYRIGGAQAVAALAYGTESVAPVNVIVGPGNIYVATSE

SEQ ID NO: 84888 - protein, 300 aa, Unknown
  Bacterial polypetide isolated from the Sargasso Sea
MNDIKKGNDSSIIKYEKKFNRLKNLRKKDLCFSSSEIKKNINLLNERTKKDINLAYNRILNFHKNQKIRTFSTTDKFKNRFSYRTVPIEKIGVYVPGGKASYPSSVLMNCIPAIVAGVPEIFMTVPSLNKKINPGILYAAKKCGVKKIYKLGGAQAIAAFAYGTETVQKVDKVVGPGNQYVSLAKKEVFGEVGIDMFAGPSEVTVIADKYSNPKWIAADLIAQAEHDELSQSILVTNNKELIYKVNKFLSFQIALLPKYKIIKSSLKNFGLAIFAKNMRDVANVVNKIAPEHLEICTKKP

SEQ ID NO: 84889 - protein, 240 aa, Unknown
  Bacterial polypetide isolated from the Sargasso Sea
MPVFLNFDDPQFDQLFDEILNSDRDANWDVNSLVSDILADVKGRGDEALIQLTDRFDKIKLKKEELSFSKKEIDELSAKIKSNERKALDLAASRIKVFHEKQKPEDVIWSDDIGVELGWRWTPIDAVGIYVPGGLASYPSSVLMNAIPAKVAGVKRVAMVVPTPHGKINPAVLYAAKVSGIDEIYRIGGAQAIAALAYGTSSISPVDKITGPGNSYVAAAKRQVFGKVGIDMIAGPSEVW

SEQ ID NO: 84890 - protein, 288 aa, Unknown
  Bacterial polypetide isolated from the Sargasso Sea
PGGEAGHTVAAVEAAGCYAPGGRYPLPSTVLMTAVTARVAGCERVVVASPKPSVVTLAAAYVAEADVLLPIGGAHAIAALAYGAGELLEPCDAVVGPGSMWVTAAKSLVAGRVAIDMLAGPSECLVIADEMAKPDVVAKDLLAQAEHDPAALPALICLSESFAAAVDAAISEQLKTLATAEIASAALQNGYAVVVGSIAEAAAISDRLAVEHVELHVENAMELGRSLKHYGGLFVGGGAAEVLGDYGAGPNHTLPTGGTARSTGGLCVLTFMRVRTWMRVDDKNAAKV

SEQ ID NO: 84891 - protein, 135 aa, Unknown
  Bacterial polypetide isolated from the Sargasso Sea
EICMQSITNWGLIAVCKNYESCMKLSNQFAPEHLEIITVNPKEILKGIENAGAIFLGKWTPEAVGDYLAGPNHTLPTSGNSRFSGSLGVETFMKNTSIIEFNERSLKVNSADIINLANSEGLHSHANSVQIRFED

SEQ ID NO: 84892 - protein, 221 aa, Unknown
  Bacterial polypetide isolated from the Sargasso Sea
KDNLNNKIEYKYVPIQSIGIYVPANLPSTLLMNAIPAKIAGVKRIVLANPKNNGKLNPAVLYAAKKLGINEIYSMGGAQAIGSLAYIQKVNKIVGPGNIFVAGAKRQVFGDVGIEGMIAGPSEITILADSKTNLNEVTTSMIGQAEHDSNSQCILITKDLNLIKKFKKDLELKLKQIPRQSIATKSIKSNGLILKVYNDRQIIDAINEIAPEHLEINGWQL

SEQ ID NO: 84893 - protein, 246 aa, Unknown
  Bacterial polypetide isolated from the Sargasso Sea
TASGGAQAIAAMAWGSETIPAVDVITGPGNLYVTLAKKAVYGRVGIDSLAGPSEVLIIADDTADAELVAADLLAQAEHDPMAAAILLTTSDRLLQEVPGQLQQQLLDHPRKEVTEASIRDWGLIVHCSDLDQAAELSDCFAPEHLELLVADPRSLAERIQQAGAIFIGSHSPEAAGDYLAGPNHTLPTSGTARFSGALSVETFMRHTSLINFNREALEATGAAIMTLAASEGLHSHRESVRRRLQR

SEQ ID NO: 84894 - protein, 169 aa, Unknown
  Bacterial polypetide isolated from the Sargasso Sea
ELSQSILVTNSKELIFKVRKILNYQINFLPKKKIISSSLKNFGLAIYAKNAKEISSIVDKISPEHLEICTKNPQMYLKLINNAGSIFLGSLSPEAMGDYLAGPNHVLPTSGTARFSSGLSVFDFLKRQSVIKISKSGIERLGPSVINLANYENLHGHANSVKIRLKGKN

SEQ ID NO: 84895 - protein, 273 aa, Unknown
  Bacterial polypetide isolated from the Sargasso Sea
PSTGKINKAIRTLDPKIKKSIDFAYERIFKFHTKQKIKDIKYIDNFKNKLEYKHVPIQSVGVYVPANLPSTLLMNAVPAKISGVKRIVLANPKLNGMLNPAVLYAAKKVGIKEIYSMGGAQAIASLAYIQKVNKIVGPGNIYVARSKREVFGDVGTEAMVAGPSEITVLADRNTNLNEVTTSIIGQAEHDINSQCILITKDTNLIKKFKIDLISKLKKLPRKNIASKSLKKNGLILKVKNDKQIVNVINEIAPEHLELNVKNYKKYKNKILNA

SEQ ID NO: 84896 - protein, 271 aa, Unknown
  Bacterial polypetide isolated from the Sargasso Sea
HKRQIPKNDFFKDKHGILLGGLWNPIESVGLYVPGGTAAYPSSLIMNAVPAIVAGVKRIVITVPAINGVLNPVILACANLLGIKEIYKIGGAQAIAALAMGTKKIRKVDKIVGPGNAYVATAKKKLFGLVGIDMIAGPSEILIIADKKNNPEHIAIDLLSQAEHDKLAQSILITDDESFAKKVIQNIKILLKKIDRKDIASESWNNYGVVIISKTIQSSISLANQIAPEHLELAIDNSKKYLKEIKNAGAIFLGKYTPEAIGDYVAGPNHV

SEQ ID NO: 84897 - protein, 214 aa, Unknown
  Bacterial polypetide isolated from the Sargasso Sea
MVKTEKDLDLWVAEYIKNSKGFLSTIDTKVAKIIKDVRNRGDEAIIELSRKFDHVDLKESNFYFTDAEITKAELEVPRKEREALELALSRIKSYHEKQLPKDKFWRDELGVELGFRWSPLSSIGIYVPGGIASYPSSVLMNAVPAKVAGVKSITMATPTPSGRINPLVLFAARMAGVDKIIRVGGAQAIAALAYGTKNINPVDKIVGPGNAYVA

SEQ ID NO: 84898 - protein, 268 aa, Unknown
  Bacterial polypetide isolated from the Sargasso Sea
FDGFNPDPMQVSTEELKNAWSEIDSNLKVSLEVAHKRIKKFHEKEIPLSFTIKGEHGDSVQRRWRPVKNAGIYIPGGRAAYPSTVLMNAIPAKVAGVEEILMVSPGNTEGKINKTVLAAAYLSGINKVFRIGGAQAIGALAFGTNQIRKVDVITGPGNIYVTTAKKLIYGSTGIDSLAGPSEILIIADETAQSSHIASDLLAQAEHDPLASSILLTTSKSQAKEVLEELYEKIDDHPRKEICMQSIRNWGLIVVCENHESCIELSNNF

SEQ ID NO: 84899 - protein, 245 aa, Unknown
  Bacterial polypetide isolated from the Sargasso Sea
IKKNLKLLNSRTRKDIDLAYNRILNFHKNQKIKTFSLTDKYKNRFAYRTKPIEKVGVYVPGGKASYPSSVLMNCIPAIVAGVKEIFMTVPSLNKKINPGILYAAKKCGVKKIYKLGGAQAIGAFAYGTETVFKVDKVVGPGNEFVSLAKKEVFGDVGIDMFAGPSEVTVIADKYSNPKWIAADLIAQAEHDELSQSILVTDSKELIFKVKKLINFQKNLLPKKRIISSSLNNFGLAIFANNRKKC

SEQ ID NO: 84900 - protein, 205 aa, Unknown
  Bacterial polypetide isolated from the Sargasso Sea
MPKRLNFCEPGFESQFSALLSEKRETETDVNDGAAAILDDVRSRGDRAVCEATAKYDRFDISPDEMTFSPDQIAQAQAQCDPETLQALELAAARIHAFHSKQRPDDFDETDAAGLRLGYRWTAVGAAGLYVPGGTAAYPSSVLMNAIPAKVAGVERLVMVSPTPDGVVNPLVLAAAKISGINEVYRIGGAQAIGALAYGTATIAP

SEQ ID NO: 84901 - protein, 283 aa, Unknown
  Bacterial polypetide isolated from the Sargasso Sea
LVAGVQRIVLLNPSYRGIQDPAVLYAARKCKINEIYSIGGPPAIAALAYGTKKIKKVDKIVGPGNAYVAAAKKEVFGDVGIEGMTAGPSEILIVSDKSSNPEWIASDLIGQAEHDELAQCILISKEKKIIEKVKIEILKQLKKIPRARVAKKSLLNNGILIYANSDRKILEIINKIAPEHLELNIKNYKPYLTKIKNSGSICLGKYAIMAMTDYNVGSNHILPTNSTARYSSGISVNEFYKRISYINLSKKGIESLGPSVITLANYEGLVGHALSVKKRIRRK

SEQ ID NO: 84902 - protein, 210 aa, Unknown
  Bacterial polypetide isolated from the Sargasso Sea
MKILKHNDIKLKSFLRRSKVLNDDSIYKKVKEIIFNVKKNGDKALIKYAKQYDKIDIDKKEFKLNLRSQKINSKLDKEILNSFKIAIKNITKFHKKQLPINIDQNENNINLQSVWKPIDSVGLYVPGGNAFYPSSLIMNVIPAKIAGVKRIVCVTPPCKEINPYLIALLKELKIKETYFVGGAQAIAALALGTKTIKPVNKIFGPGNAYV

SEQ ID NO: 84903 - protein, 280 aa, Unknown
  Bacterial polypetide isolated from the Sargasso Sea
QQIFNSFKKAIKNISSFHKKQLPKNIIFNNKSATLKSVWKPIDSVGLYVPGGKAFYPSSLIMNAVPAIIAGVKRIVCITPPNKSINPYFIKLIKELGIKETYFIGGAQAITALTFGTQTIKPVNKIFGPGNAYVAEAKKQLYGKVGIDLLAGPSEIIVVANNKNNPDWVASDLIAQAEHDENAQSILITDDKNFATKVLNSIKKIKKDLPKKKIIEKSFKNNGIIVLVDNIELAVEIINFIAPEHLHLHISNYKKLLPKINNAGGIFLGEYSVEAFGDYM

SEQ ID NO: 84904 - protein, 230 aa, Unknown
  Bacterial polypetide isolated from the Sargasso Sea
NLFLPVNKIVGPGNAFVAEAKRQVFGQVGIDSIAGPSEVLIVCDETANPDHVAIDLLSQAEHDELAQSILITTSKEIATKVKLLVEKHLMEISRSKIASSSWYDFGAIILVENLNQAIELINIKAPEHLQLILKNAKKVIKEIKNAGAIFVGPYTPEAVGDYIAGPNHVLPTNGTAKFSSGLGVIDFYKRTTIVNFNKNSLNELGKHVITLAEAEGLDAHARSISMRVDK

SEQ ID NO: 84905 - protein, 270 aa, Unknown
  Bacterial polypetide isolated from the Sargasso Sea
VLANPKLNGKLNPAVLYAAKKVGIKEIYSMGGAQAIASLAYIQKVNKIVGPGNIFVAAAKKELFGQVGIESMVAGPSEITILADKNTKIEDVLTSMIGQAEHDKNSQCILISKDLKLIKEFQKEIKEKIKKLPRRSIAFQSLKNNGLAILAKKNSDIINSINEIAPEHLEINISKPDKIINKIINVGSVCIGKYSPMAVTDYNAGTNHVLPTFGSAKFASGLNVNEFYKKISYITLSKKGVEKIGESATHLAEYEELYGHALSIRSRMRR

SEQ ID NO: 84906 - protein, 269 aa, Unknown
  Bacterial polypetide isolated from the Sargasso Sea
EGDAALVRYTNELDRRTVEDAQALRVSSDAIDLALSDLNPEVSSALTLAAARIRGFHERQRTESWQYEDEEGNLLGQRVSALDCVGIYVPGGRASYPSSVLMNAIPAKVAGVERVVMVAPAPDGEINPAVLAAAALAGVDEVYTVGGAQAVAALAYGTATIPRVDKIVGPGNRFVAEAKRQVFGRVGIDMVAGPSEILILADGSVDPEWVTTDLFAQAEHDEYAQAVLISPESDYLDGVEACIARLLPTLSRRDIVTAALKNRGALIKV

SEQ ID NO: 84907 - protein, 251 aa, Unknown
  Bacterial polypetide isolated from the Sargasso Sea
MCGVNKIYKFGGAHAIAALAFGTETIKPVDKIVGPGNIYVATAKKKVYGTVGIDSFAGPSEVLIIADQNACPELVAIDMFAQAEHDELAQAILMTSSKKLINSVNLKINSLIKEQSRKEIIEKSLSTRGLFIKVKNIKEIISIANEIAPEHLEIFGYQDIKLETKIDNAGAIFIGKNSPEVFGDYCAGPNHVLPTSGSAKYASPLGVYDFLKRTSLMKISQAHSRELSSTASLLADCEGLSAHSKSAKLRK

SEQ ID NO: 84908 - protein, 346 aa, Unknown
  Bacterial polypetide isolated from the Sargasso Sea
MSTRNKSFDNQLSYYLDLRKKNSSSKLLVVRKILGDIKKNKDASLIRYEKKLNGIKKLNKKNLFFSKFEIKKSLKLLNKKTKRDIDLAYNRILSFHKNQKIKTFSITDKFKNKFTYRTKPIEKIGVYVPGGKASYPSSVLMNCIPAILAGVSEIYMTVPSLNKKINSGVLYAATKCKVKKIYKFGGVQAIGAFAYGTDSVEKVDKIVGPGNEFVSLAKKEVFGEVGIDMFAGPSEVTVIADKYSNPKWVAADLIAQAEHDELSQSILVTDSKELISKVKEIINLQIKFLPKKRIISSSLSNFGLAVLAKNMRDIVRVINRISPEHLEICTKRPEGYLKLVNNAGSI

SEQ ID NO: 84909 - protein, 420 aa, Unknown
  Bacterial polypetide isolated from the Sargasso Sea
EQARQELARLASRNVSSSQQQARSLVDGILEDVCQRGDAAVAEYTERFDRFRPVPIAVPKDDLGRAWQELPENLRDALDLAHRRIQEFHQRQRPQDIAVTGVHGEKLGRRWRPVERAGLYVPGGRAAYPSTVLMNAVPAKVAGVNDIVICSPAGPDGQVNPVVLAAAHLSGVRTVMRIGGAQAVAAMAYGTESVPKVDVISGPGNLYVTLAKQAVYGQVGIDSLAGPSEVLVIADQSAVPSQVAADLLAQAEHDPLAAAILITTNAALAETIGDEIARQLEGHPRREICEASLGNWGLVVVCDDLETCARLSDGFAPEHLELLVERPEPLADRIHHAGAIFLGPWSPEAVGDYLAGPNHTLPTCGAARFSGALSVETFMRHTSLIGFNKAALEATASAVQELAVSEGLHSHADSVRRRLS

SEQ ID NO: 84910 - protein, 276 aa, Unknown
  Bacterial polypetide isolated from the Sargasso Sea
MPVFLNFDDPEFDQHFDEILNSERDASRDVNSAVSNILVDVKKRGDEALIQLTDRFDKIKLTKEELSFSKKEIDELSAKIKSNERKALDLAASRIKVFHEKQKPEDVIWIDDIGVELGWRWTPLDAVGIYVPGGLASYPSSVLMNAIPAKVAGVKRVAMVVPTPHGKINPAVLYAAKVSGIDEIYRIGGAQAIAALAYGTPSISPVDKITGPGNSYVAAAKRQVFGKVGIDMIAGPSEVLVIADENNDPEWIALDLLSQAEHDKSAQSILITTSQN

SEQ ID NO: 84911 - protein, 388 aa, Unknown
  Bacterial polypetide isolated from the Sargasso Sea
MQSNPLRLADQLQQSLIAGLSDELKTAIQIAYRNIHSFHAAQLPQNIRIETQPGVVCELNYSALDQVGLYVPGGSAPLPSTVLMLGVPAQLAGCRRVVLVTPPGQPSAGDIAAEIVYAASLCGITEIYTLGGAQAVAALAYGTETIGKVDKIFGPGNRFVTEAKQQVSQDARGAAIDMPAGPSEVLVIADDNANPVFVAADLLSQAEHGPDSQVVLVSPSEALLVNTISELKRQTTLLPRAEIAQKALANSRLILTPDLATAAQVSNQYAPEHLIIQTSDDQGLLNKLTNAASIFVGPYTPESAGDYASGTNHVLPTYGYSRNHSSLSLADFYRRYTVQTLTAAGMRDLGPTIVKLAKAEGLDAHANAVSFRLAELELAAQISEGNPS

SEQ ID NO: 84912 - protein, 312 aa, Unknown
  Bacterial polypetide isolated from the Sargasso Sea
MKIINNKTEAIEELKRISTRTNSENNNKINTIVEEILQEVKISGDKAVEKYTKKFDGFDPNPMQVNADQIKNAWDEIDNNLKRSLEEAHKRIQKFHEKEIPQSFTIKGEHGDIVQRRWKPVKNAGIYIPGGRAAYPSTVLMNAIPAKVAGVEEIIMVSPGNKEGEINKTVLAAAHLSGINKVFRIGGAQAIGALAFGTNQINKVDVISGPGNIYVTTAKKLIYGSTGIDSLAGPSEILIIADETAQSTHIASDLLAQAEHDPLASSILLTTSKNQAKEVLEELYKKIDDHPRKEICMQSIKNWGSIVICESF

SEQ ID NO: 84913 - protein, 362 aa, Unknown
  Bacterial polypetide isolated from the Sargasso Sea
MIKIDSKKKGFFKKLEVILNRRRKLDTTNSKIVSKIISDVKKNKTKALLKYEIKFSKNNKITLPNKIINNSVKRLSREIKNSIDFAYGRIIKFHILQRKNLKNISYKDKFKNKLEYNIVPIQSVGIYVPANLPSSLLMNAIPAKVSNVKKIILATPKPDPAVMYAAKKLGIKEIYFMGGAQAIASLAYIQNVDKIVGPGNKFVAEAKRQISGKIVGTESMFAGPSEICVVADKFTNINQIATSLVSQAEHDPNSQCILVTKDKSILPKVNLAIKKIIKKLPRKKVATKSLKNHGLVIIVKNDNEIVNTINSIAPEHLEINVKNFKKYVNKIYNVGSICNGKFTPMSLSDYTVGTNHILPTRE

SEQ ID NO: 84914 - protein, 401 aa, Unknown
  Bacterial polypetide isolated from the Sargasso Sea
MDKRRSGKAVDTSIVPKILKDIKINGRKALLKYEKKFSKNTEIVPSKDKVNKAINTLEPKIKKSIDLAYNRIFKFHSLQKPKNIKYVDNFKNKLEYKHVPLRSVGIYVPANLPSTLLMNAVPAKISGVKRIVLANPKLNGKLNPAVLYAARKVGINEIYSMGGAQAIASLAYIQKVNKIVGPGNIYVARSKREVFGDVGTEGMVAGPSEICVLADSKTDLNQVITSMIGQAEHDVNSQCILITKDKKLANKFNIEIKESIKKVQRKRVVLKSLKNNGLIMLAQSDKQIIEAINEVAPEHLEINVSNNKKYLNQIHNAGSIMIGKYSPMAVSDYNVGSNHVLPTLGSAKFSSGLNLSEFYKKISHITLTKKGIEKLGESATHLAEYEELDNHAQSIKSRMRR

SEQ ID NO: 84915 - protein, 357 aa, Unknown
  Bacterial polypetide isolated from the Sargasso Sea
MEVKIFKGFKTFSKSIDVDENNDVSGIVQEIIKKVRKSGDTALREYTEQFDKATPDSWLVPETVLEEALDNLGKDLLVVLKQAADNIMFFHERQKTNSQLDFSSDGSVLGWKVTPVDSAGIYIPGGRAAYPSTLLMNAIPAQIAEVPRIAIVSPPGSSGLPHPLVMATAAFLGLKELYAVGGVQSIAALAYGTESIEKVVKITGPGNAYVVEAKRQLYGIVGIDSLAGPSEIMIVSDREDIPIDYLVRDMLSQAEHDPDAGAFLVTTSENQAKKVAERIKNLVPKLPRKEIIEASFSKRSAIVLAKDLEEIFEIINEIAPEHLEILTKKPFEDLYKIRNAGAIFLGPNTPEPVGDYF

SEQ ID NO: 84916 - protein, 217 aa, Unknown
  Bacterial polypetide isolated from the Sargasso Sea
MKKIINTSEKDFDSQFTELLNIDRNISENVEEVVRNIVQDIKSNGDSSLVENTNKFDKNNLSIKEIAVSEDEIDTLVKDLSPKLIDAIDLAYSRIETYHQKQIPSDLSYEDETGAKLGYIWNPISSVGIYVPGGTASYPSTVLMNAVPAKVAGVEDITMVSPSTDSKINPSILYAAKKVGINKIYRIGGAQAIAALAYGTETIKTVDKIVGPGNIYV

SEQ ID NO: 84917 - protein, 273 aa, Unknown
  Bacterial polypetide isolated from the Sargasso Sea
CVTPPSNNLNPYIAFLLDELNISEVYQIGGAQAIAALTYGTQTIKPVSKIFGPGNAYVASAKKQVFGKVGIDLVAGPSEIIVVADEENNPEWVASDIMAQAEHDENAQSILITNSNTFATKVLEHIENLKKNLSKKTVVEISLKKNGLIVIMDDLKLSYQIINKIAPEHLHLQSKEKEIIFKNVNNAGGIFIGDYSTEAFGDYVAGTNHILPTSGAAKFSSGLSVTDFMKKSSVVEINKLSYENLSKHVENISDVENLDAHKLSVTIRQTKQN

SEQ ID NO: 84918 - protein, 290 aa, Unknown
  Bacterial polypetide isolated from the Sargasso Sea
MAAGPAIASQVKDLYLTSPCIGGHINDLTVAAAKVAGIKNIAKLGGAQSIAAFSFGTESIPKVDKIVGPGNAYVAEAKRQLFGKVGIDSIAGPSEIVVLANETSSPELVAWDLMAQAEHDEDASSILISNSNEIIREVKEIIKNECSNLERAMIVKSSLKNNGLIVKIDNLKQAIDLINRLAPEHLHLAFEDHEIDINDLVAGIILEGTDSAVSLSDYVLGPSHILPTNSSARFSSPLSVEDFLISSSKVAIKSESNKDLYKTLAEKTSLIARAEGLTAHAISVEKRKKD

SEQ ID NO: 84919 - protein, 424 aa, Unknown
  Bacterial polypetide isolated from the Sargasso Sea
MDAISAAVIERTEAVFGKGVSPAQSVVKIIEEVRQKGDEAVLKYARMFDDPDITSTSYDMSLLDQAESSISKELWDSLSLAAERIEEFHSKTMPNMETETSRGVSEIVKPLQKIGVYVPGGTAAYPSTVLMTVIPAKVAGCESVCMVTPKLAGRDMNPVVLAAAKIAGVDNVYQIGGVPSIAALAYGTETIPQVDKICGPGNVLVAYAKKLVQGQVDIDGIFGPTETIVIADKTASPEFCAADMIAQAEHDPMATAILITDDAGLIETVENALDDQLEQHARGEMAKQALLSRGKVVLVENLAEGIEIANSIAPEHLCLMVENTAYWKTQVRNAGGLFLGEYSPEVMGDYVAGPSHVMPTGGTARFSSALSVHHFLKTMPVVELSSKEFERLAPDAVNIAQAEGLTAHSNALSIRLKTVSNNSG

SEQ ID NO: 84920 - protein, 396 aa, Unknown
  Bacterial polypetide isolated from the Sargasso Sea
LMNIKKNGDTSLIKYEKKFSGIRKLNKKDLFFSKSELKKELKKLNKKIKKDIDLAYKRILNFHKNQKVKTFSLTDKFNNKLTYRTNPIEKIGVYVPGGKASYPSSVLMNCIPAIVAGVPEIFMTVPSLNKKINPGILYAAKKCKVKKIYKLGGAQAIAALAYGTQTIQKVNKIVGPGNEFVSLAKKEVFGEVGIDMFAGPSEVTVIADKYSNPKWIAADLIAQAEHDELAQSILVTNNKEIIYKVSKFINFQINFLPKKKIISNSIKNFGLAIFAKNNKEIASIVNKISPEHLEICTKKPESYLKTINNAGSIFLGSFSPEAMGDYLAGPNHVLPTSGTARFSSGLSVLDFLKRQSVIKISKSGIERLGPSVINLANYENLHGHASSVRMRIKGKN

SEQ ID NO: 84921 - protein, 394 aa, Unknown
  Bacterial polypetide isolated from the Sargasso Sea
MKIIKFNKNFYNQFKTKIEKRNSLSSKSIQEDVKKIIYDVKKNGDKSLIKYAAKFDKVKISRQDLSLDLSKIKIQSKVEPQIFNSFKKAIKNISSFHKKQLPKNIIYTNNGATLKSVWKPIDSVGLYVPGGRAFYPSSLIMNAVPAIMAGVKRIVCITPPTKSINPYFIKLIRELGIKETYFVGGAQAISALTFGTQTIKPVNKIFGPGNAYVAQAKKQLYGKVGIDLLAGPSEIIVVANNNNNPDWVASDLIAQAEHDENAQAILITDSKDFATKVLTSIKKIKKDLSKKKIIEKSLNNNGIIALVDNIELASEIINFVAPEHLHIHISNNKKLLSNINNAGGIFLGEYSVEAFGDYIVGTNHVLPTSGAAKFSSGLGVLDFMKRSSVVDMNK

SEQ ID NO: 84922 - protein, 241 aa, Unknown
  Bacterial polypetide isolated from the Sargasso Sea
AIAAAAYGTNKIKKVDKIVGPGNIYVAAAKKQVFGDVGIEGMTAGPSEVTVVCDKFSNPAWVASDLIGQAEHDKLAQCILISKDKKIIEKVKTEISKQLEEIPRSSIAKKSLIENGILVFINSDKKVIEVVNKIAPEHLELNVKNYKSLVSKIKNAGSICSGKFAVMAMTDYNVGSNHVLPTNGSARYSSGISVNEFYKRISYVNLSKKGIESLGPSVITLANYEGLAAHALSVKKRIRRK

SEQ ID NO: 84923 - protein, 366 aa, Unknown
  Bacterial polypetide isolated from the Sargasso Sea
INKTLDQKIKDDIQFSHERVRKFAEHQLENLGKDSEVELSPGLIAGQKLIPVNTVGCYVPGGRYNNIASAIMSVTTAKVAGVNNVIATSPPKDSNGANPIIIYTANLCGADVIMNIGGIGAIGALAYGCFGNPEVDMIVGPGNKFVAESKRILFGKVGIDLFAGPTEIGIIADHTADKEIIAYDLVGQAEHGPDSPAWLYTTDKSLCDYVMKRVPEIIQELPEHNRNNADAAWRDYGEVIMCDTKEEMMKVSDEYAPEHLEVQAENLDWYLKNLKNYGSLFLGEETTVAYGDKCSGPNHILPTKGAGKYTGGLYVGKFIKTVTYQKMSKESNKEVGAAAARISRYEGMEAHARTGDVRLRKYGFSN

SEQ ID NO: 84924 - protein, 211 aa, Unknown
  Bacterial polypetide isolated from the Sargasso Sea
QKKQLYGKVGIDLLAGPSEIIVVANNNNNPDWVASDLIAQAEHDENAQSILITDSKDFVTKVLSSIKKIKKDLSKKKIIEKSLNNNGIIALVDNIELASEIINFVAPEHLHIHISNNKKLLSNINNAGGIFLGEYSVEAFGDYIVGTNHVLPTSGAAKFSSGLGVLDFMKRTSVVEMNKKSFNALSEDTEKMSGLEGLDGHKLSVKIRQKK

SEQ ID NO: 84925 - protein, 431 aa, Unknown
  Bacterial polypetide isolated from the Sargasso Sea
MLNLLRYKDENFHIRIAEIINSRKNFDEDITNQVNDIIFDIKNNGDISLFKYMSNYDNVECSAENICYNQEDILSAKKNCTQESIEAIKLAKNRIEAFHKHQLPEDSIYEDQEEVSIKTKWIPLDSAGIYIPGGTASYPSSVLMGVIPAQVAGIKKISATVPCPNNQIDPLVLATLDLCGIEKIYKIGGAQAIAALTWGTESVESVDIIIGPGNKWVAEAKKQALSNINIDMLAGPSEILILADENNRADWIAADLLSQAEHDISAQAILVTDSENLLENVNKELVSQTKSLKRKDIAKRSIAENGYGILVSNINDAIEIINNIAPEHLSILCKENNQIENKITNAGVIFADEWTPESMGDYIIGPSHILPTNGMAKRQSGLSVYNFLRRQSTISSSKKTINTLGPSAMLLADCEGLDAHANSIKIRIKDS

SEQ ID NO: 84926 - protein, 421 aa, Unknown
  Bacterial polypetide isolated from the Sargasso Sea
MDEFYRQQANRKLNFNEISGEVDAIISSIKKDKDSALLSYTNEFDNNQLSQEDIKLDKNMLSKSIENISKELLSSLKYAHDRILAYHKKLKPENLSYTDQIDIKIEQRWTPVESVGVYVPGGKAIYPSSVLMNVIPALVAGVRRIVMVTPSMNGILNNSILAAASICNVKEVYNIGGAQAIAALAYGTDQIDKVDMIVGPGNSYVAAAKKQVFGDVGIDMVAGPSEVMVVADSDMDLEWVVEDLFAQAEHDDNAQSILVTKDIDFAKRVLERINQRLEDLDDGATLKNSWTRYGCIIICETNKEIIKFINEIAPEHLQLCTPDARDLSEQVKNAGAIFIGKYTPEAAGDYVVGTNHVLPTMQTARFSSGLSVQSFMKRTSIVECDKSNFNEIAPSAIRIAEQEGLISHANSLRARLNRKDD

SEQ ID NO: 84927 - protein, 259 aa, Unknown
  Bacterial polypetide isolated from the Sargasso Sea
MYAAKKCGVKKIFKLGGAQAIAAFAFGTKVVPKVDKIVGPGNEYVALAKKEVSGISGIDMFAGPSEVTVVADKFSKPEWVSADLIAQSEHDEMSQSILVTNSKDLILKVNKSIKKQLKFLPKRMIASKSLKNFGLAILLNNLKEAGKVVNIIAPEHLQIYTKNPDIFLNSINNAGSIFLGPYSPEALGDYIAGPNHVLPTSGTAKFSSGLSVYDFLKRQSVIKISKRGIERLGPSVITLSKYENLYGHANSIKVRLKKR

SEQ ID NO: 84928 - protein, 431 aa, Unknown
  Bacterial polypetide isolated from the Sargasso Sea
MTKIINSVDQNFENDFNNLLTMNRSSDSDVTQTVAAIIDDIRKNGDEALLKYTHQFDKNSLDINNILLGEDEIERQSRDVPSDLCDALKVSMDRVRTYHEKQLPNDLVYEDNLNSKLGYVWRPVESVGIYVPGGTASYPSTVIMNTIPAVVAGVEDITMVTPMTNTAISSSVLYAAKICGIKKIYCIGGAQAVAALAYGTKTIKSVNKIVGPGNIYVAEAKRQVSGFIGIDMFAGPSEVVIIADEKNDPKIVAADLIAQAEHDQSAQSILLTTDQKLGDAVNKEVENQIDSLPRKDIAASSWKNNGKIIITQNLEEAVLLSNKLAPEHLELLVDNPEDILKRIKNAGAVFMGRNTPEALGDYLAGPSHVLPTSRSAKFSSGLSVFDFLKKISLVEFSKEGIEQVGDSAIKIADNEGLDGHSRSIEYRLTKK

SEQ ID NO: 84929 - protein, 428 aa, Unknown
  Bacterial polypetide isolated from the Sargasso Sea
MKIINNKKEAIEELKRISTRTNSENNNKINRIVEEIIQEVKISGDIAVEKYTKKFDGFYPNPMQVSANQIKNAWDEIDNNLKRSLMVAHERIQKFHEKEIPQSFTIKGEYGDIVQRRWRPVKNAGIYIPGGRAAYPSTVLMNAIPAKVAGVEEIIMVSPGNKEGEINKTVLAAAYLSGINKVFRIGGAQAIGALAFGTSQINKVDVISGPGNIYVTTAKKLIYGSTGIDSLAGPSEILIIADETAQSTHIASDLLAQAEHDPLASSILLTTSKNQAKEVLEELYKKIDDHPRKEICMQSIKNWGLIVICENYESCVELSNNFAPEHLEILTIDSKKILASIENAGAIFLGKWTPEAVGDYLAGPNHTLPTSGNSRFSGSLGVETFMKNTSIIEFNEESLKVNSLDIINLAKSEGLHSHANSVEIRFED

SEQ ID NO: 84930 - protein, 416 aa, Unknown
  Bacterial polypetide isolated from the Sargasso Sea
MIKIDSKTSNYYKKLKTILDRRRKLDTANFTKVSRIIADIKKQKKKALIKYEIKYSKNARITLPKKIINKSVKNLNREIKSSIDFAYNRIMKFHMLQKKNLKNIYYLDKYKNKLQYNLVPIQTVGIYVPANLPSSLLMNAIPAKVSNVKKIILATPKLDPAVMYAAKKVGIKEIYFMGGAQAIASLAYIQNVDKIVGPGNKFVAEAKRQISGKIVGTESMFAGPSEICVVADKFTDINQIATSLVSQAEHDPNSQCILLTKDKKILPKVNLAIKKIIKSLPRKRIANRSLKNHGINIIIKNDKEIINTINLIAPEHLEINVKNYKKYLNKIYNVGSICNGKYTPMSLSDYTVGTNHILPTSGSAKFSSGLSINEFIKKISIVTLSKLGVEKIGNQAIKLSEYEKLFAHTQSIKSRM

SEQ ID NO: 84931 - protein, 421 aa, Unknown
  Bacterial polypetide isolated from the Sargasso Sea
MIKEINCKNSNFKKKLKNFLEKRRSGKTINTSIVLKIIKDIKKNKLKALIKYEKKFSKNTKIKPSKKEINQSIKNLDPKIKKAIDFAYSRIFKFHSMQRAKNIKYVDQYKNQIEYKHIPIQKVGVYVPANLPSTLLMNVIPAKLAGVKRVVVANPLVNGRLNAAVMYAAKKCNVNEVITCGGAQAIGSLAYIQKVNKITGPGNDYVAKAKQLVFGDVGVEGMIAGPSEICILADNKTEINEITTSILGQSEHDENSQSILITKYKDLITKVKKDIKVKLKKLPRKKIISKSLNNHGLLVLCQSDNQIIDLINEIAPEHLELNISNAKKYINKIFNAGSICIGKYSPMAVTDYNAGSNHTLPTLGSAKFSSGLNLSEFYKKISYINLSKKGVEKIGESAIHLANYEGLTAHMLSIKSRMRRK

SEQ ID NO: 84932 - protein, 387 aa, Unknown
  Bacterial polypetide isolated from the Sargasso Sea
MDKTAQQALLERPLQQESDSLKQTVKDIIRAVRSEGDTALLRFSREFDKLQSNPLRLSDEQQQSLIASLSDELKTAIEIAYRNIRTFHAAQLPENIRIETQPGVVCELNYSALDQVGLYVPGGSAPLPSTVLMLGVPAQLAGCRRVVLVTPPGQPEAGDIAAEIVYAASLCGITEIYTLGGAQAVAALAYGTETIGKVDKIFGPGNRFVTEAKQQVSQDARGAAIDMPAGPSEVLVIADDNANPVFVAADLLSQAEHGPDSQVVLVSPSEALLVNTISELKRQTALLPRAEIAQKALSNSRLILTPDLATAALVSNQYAPEHLIIQTSDDQTLLGKLTNAASIFVGPYTPESAGDYASGTNHVLPTYGYSRNHSSLSLADFYRRYTV

SEQ ID NO: 84933 - protein, 194 aa, Unknown
  Bacterial polypetide isolated from the Sargasso Sea
PSEVLVIADHTAKPEQVAADLLAQAEHDPLASSVLITTSYQLADVIGTTISEQLETHPRRDICEASLRDWGLVVVCDDLESCAQLSDSFAPEHLELLVERPEALADRIQHAGAIFLGPWSPEAVGDYLAGPNHTLPTCAAARFSGALSVETFMRHSSMIQFNRTALEATASAVCELAESEGLHSHAESVRKRLS

SEQ ID NO: 84934 - protein, 421 aa, Unknown
  Bacterial polypetide isolated from the Sargasso Sea
MIKTIDCKSSNYLNKLKAILEKRRSGNNVNTDIVKKIVKDIKKNKLKALKKYEKKFSNNTQLKISKKKIIKSIKKLDPKVKKAIDFAYNRILKFHKTQKVKNLKYKDSLGNSIEYKFLPIESVGIYVPANLPSTLLMNAIPAKIANVKRIILANPKINGELNPAILYAAKKLNIGIIYSMGGAQAIASLAYIQKVNKIVGPGNDYVARAKKEVFGDVGIEGMVAGPSEITVVADQNTNFNAVITSMIGQAEHDVNSQCILITKNKNLIKLFKKLLDNELKKIPRKDIAKKSILKNGLIIKTYNNKQIIDVINEIAPEHLELNIKDYKKLINKINNAGSICIGKYSAMAVTDYNVGTNHILPTLGSAKFSSGLNVSEFYKKTSYIKLSKKGIEVIGKKAITLAEYEGLIGHAQSIKSRIRRS

SEQ ID NO: 84935 - protein, 238 aa, Unknown
  Bacterial polypetide isolated from the Sargasso Sea
MQKLVKFLDNRRLGINFNTSIVPKILKDIKKNKLKALLKYEKKFSKNLEIIPSVNNINKSIKSLDPKIKRSIDFAYNRIYKFHSKQKIKDILYKDKYKNKLEYKSIPLQSVGIYVPANLPSTLLMNAIPAKIAGVKRIILANPKLNGNLNPAVLYAAKKIGIKEIYSIGGAQAIGSLAYIQKVNKIIGPGNIYVARAKKELFGEVGIEGMVAGPSEITIVADKRNNLDEVLTSNDRTS

SEQ ID NO: 84936 - protein, 317 aa, Unknown
  Bacterial polypetide isolated from the Sargasso Sea
MSCLFKFGDTDKEITRKFRVIESVGIYVPGGKASYPSTVLMGAAPAIASGVSDISISSPAQKGILNTLTIAAAKVAGIETIYRIGGAQAIAALAIGTDQISKVDKIIGPGNIFVAEAKKQLFGEVGIDSIAGPSEILILADSSSNPETIAWDLMAQSEHDSDASGILISDSEEIIANVKEIISIEIDSLERCSIIKESISSNGLIIKIDNFSEAKQLVNKIAPEHLHISFDHMNYKDENFLIAGLILKGENSANSFSDYILGPSHILPTNSSSRFSSPLSVEDFLVSYSYISLDREKNIKQSNEYIDHTSKIAKAEG

SEQ ID NO: 84937 - protein, 374 aa, Unknown
  Bacterial polypetide isolated from the Sargasso Sea
KYNKNSIIFPSPSKISKSISSLDKKVKRSIDIAYNRIYKFHSLQKFKNISYKDKFNNKLDYKYLPLDSVAIYVPGSTASYPSSVLMNAIPAIVAGVKRIVMINPGHKGKQDSAVLYAARKCKIKEIYAIGGPSAIAAVAYGTKKIKKVNKIVGPGNIYVAAAKKEVFGDVGIEGMTAGPSEIMIVCDKFSNPAWVASDLVGQAEHDPLAQCILISKEMKLIEKVKIEVFNQLKKIPRNSIAEKSIINNGVLIHTSSDKKILDIINKVAPEHLELNVKNYKSFLSKINNAGSICLGKYAVMAMTDYNIGTNHVLPTNGSAKYSSGISVNEFYKRISYINLSKKGIETLGPSVITLANYEGLTGHANSVKKRIRRT

SEQ ID NO: 84938 - protein, 255 aa, Unknown
  Bacterial polypetide isolated from the Sargasso Sea
VAADLCKVDSIFKMGGAHSIAALAYGTPTIPKVDKIVGPGNLFVSTAKKFVFGDVGIDNIAGPSEIVIVADKKNNPDMIAIDLFSQAEHDELAQPILISKSHLLIESVFNSMKKLLPRMSRKKIIMESIKNRGLFIKTNSDSETVNIVNTIAPEHLELMYHDKKFLKQIRNAGAIFLGENSPEVFGDYCAGPNHVLPTSGSARFSSPLGVYDFLKRSSVIKISKKDANVLSKISSVLADAEGLQAHSLSAKIRGK

SEQ ID NO: 84939 - protein, 359 aa, Unknown
  Bacterial polypetide isolated from the Sargasso Sea
MKIINNKKEAIQELKRISTRTDLENNNKINAVVEEILQEVKTYGDIAVEKYTRKFDGFNPNPMQVSTNDLKDAWDEIDNSLKRSLEVAHKRIKKFHEKEIPSSFTIEGKHGDKVQRRWRPVKNAGIYIPGGRAAYPSTVLMNAIPAKVAGVPEIIMVSPGNTEGIINKTVLAAAHLSGINKVFRIGGAQAIGALAFGTNQIDKVDVISGPGNIYVTTAKKLIYGSTGIDSLAGPSEILIIADETAQSKHIASDLLAQAEHDPLASSILLTTSKNQAKQVLEELYKEIEGHPRKEICMQSIENWGLIVICENHESCIELSNNFAPEHLEILAFDPKKILEGIENAGAIFLGKWTPEAVGD

SEQ ID NO: 84940 - protein, 388 aa, Unknown
  Bacterial polypetide isolated from the Sargasso Sea
KKNGDKALLKYEKKFNKNNVIVPTTKQINKSIKSLDKKVKQSIDDAYNRIYKFHSLQKFQNISYTDKFKNKIEYKYSPLDSVAIYVPGSTASYPSSVLMNAIPAIVAKVKRIIMINPGYKGKQNPAVLYAAKKCKIKEIYSIGGPSAIAAVAYGTKKISPVNKVIGPGNQFVAAAKKEVSGDIGIEAMTAGPSEVLIVADKNSNPEWIASDLLGQAEHGELSQCILISKNKNILEETKKEVLKQLKELPRSSIAKKSLMMNGILIQVNSDKKIIEITNKIGPEHLELNVKNFKYFTDKIKNSGSVCLGKYAVMAMTDYGVPGSNHVLPTNTTSKFSSGLNVSEFMKKISYITLSKKGIDKLGPSAITLANYEGLHGHAQSIIKRIRRK

SEQ ID NO: 84941 - protein, 359 aa, Unknown
  Bacterial polypetide isolated from the Sargasso Sea
ILIQQKKIVSKESIDAITLAKNRIEAFHKHQLPEDSIYKDNDDVSIKTKWLPLDSAGIYIPGGTASYPSSVLMGVIPAQVAGVKKIYATVPCPNNEIDPLVLATLDLCGIEEIYKIGGAQAIAALTWGTETVQNVDIIIGPGNKWVAEAKKQALSSINIDMLAGPSEILILADKDNRADWVAADLLSQAEHDISAQAILITDCENFLEDVNKELVVQTEVLKRKDIVKKSIADNGYGILVKNIKDAIGIINDIAPEHLSLLCKENEYIEKKITNAGVIFSDEWTPESMGDYIIGPSHVLPTNGMAKRQSGLSVFNFLRRQSTISSSKKTINNLGPSAILLADCEGLDAHANSIKIRIKD

SEQ ID NO: 84942 - protein, 163 aa, Unknown
  Bacterial polypetide isolated from the Sargasso Sea
SILVSPDADFLDRVAESIAKLLPTMERAEIIRTSLEGRGALIQVADMAQAIIVANRIAPEHLELSVADPEAWLPEIRHAGAIFMGRYTAEALGDYVAGPNHVLPTSGTARFSSPLGVYDFQKRSSIIFCSPDGASELGKSASVLARGESLTAHARSAEYRIKP

SEQ ID NO: 84943 - protein, 433 aa, Unknown
  Bacterial polypetide isolated from the Sargasso Sea
MDILTWAALSVDEQKAALQRSPLIGDSGLEQSVRAIVDAVASRGDAALKEFNQKFDGFNSANIDSLRLSESEISAASARVSTELKAAIAQAMANIDVFHSAQQFRPIDIETQAGVRCELRSEPIEKVGLYIPGGSAPLISTVLMLALPAKIAGCEKRVLVSPPPINDAIVYAANACGITEIYQVGGAQAIAALAFGTETIPSVDKIFGPGNRYVTEAKRLVSQDGRCTVSIDMPAGPSEVLVIADSDANAQFIAADLLSQAEHGPDSQVILVTDSEPLAQAINQALESQLAALPRQEIAATALNSSRTILVKDMQEAAQVSNSYGPEHLIIQTRFPRDVLKHIRAAGSVFLGAYTPESVGDYASGTNHVLPTYGYSRAVSSLSLADFSRRFTVQELSAKGLLGLGQAVMTLASNELLDAHKNAVAIRLASLKD

SEQ ID NO: 84944 - protein, 422 aa, Unknown
  Bacterial polypetide isolated from the Sargasso Sea
MIKILDCKNPNYLSRLKLILNKRRFKSKINTDIVIKIVKDIKKNKQKALLKYEKKFSKNTKIKPTKNEITKSIKSLDPKTKNAIDFAYSRILKFHSLQKTKNIKYVDKLNNKIEYRYIPIQSVGIYVPSNLPSTLLMNAILAKKIVGVKRVVLANPRLNGKLNPAVMYAAKKCGISEIISAGGSQAIASLAYIQKVNKIVGPGNDYVARAKKEVFGDVGIEGMVAGPSEITVVADKNTNLKEVLTSLIGQAEHDTNSQCILIVNNQDFIKSLKKVLKQELNKIPRKNIAKKSLIKNGLILRVYNNTQIIDSINEIAPEHLELNLKNYKKLVNKIKNTGSICIGKYSAMAATDYNVGTNHVLPTLGSAKFSSGLNVGEFYKKISYIKLSKKGIEVIGKKAITLAEYEGLIGHAQSIKSRIRRS

SEQ ID NO: 84945 - protein, 433 aa, Unknown
  Bacterial polypetide isolated from the Sargasso Sea
MDILTWAALSADEQKDALQRSPLIGDSGLEQSVRAIVDAVASRGDAALKEFNQKFDGFNSANIDSLRLSESEISAASARVSAELKAAIAQAMANIDVFHSAQQFRPIDIETQAGVRCELRSEPIEKVGLYIPGGSAPLISTVMMLALPAKIAGCEKRVLVSPPPINDAIVYAANACGITEIYQVGGAQAIAALAFGTESIPNVDKIFGPGNRYVTEAKRLVSQDGRCTVSIDMPAGPSEVLVIADSDANSAFIAADLLSQAEHGPDSQVILVTDSEPLAQTVNQALASQLAALPRQEIAATALKGSRTILVKDMQEAALVSNRYGPEHLIIQTRFPRDVLKHIRAAGSVFLGAYTPESVGDYASGTNHVLPTYGYSRAVSSLSLADFSRRFTVQELSAKGLLGLGQAVMTLASNELLDAHKNAVAIRLASLKD

SEQ ID NO: 84946 - protein, 342 aa, Unknown
  Bacterial polypetide isolated from the Sargasso Sea
AHNIDQAQFELRKITERTSGTVQDEAIKVVDDILKNVRERGDEALTEYTSRFDGFLTEKFQVSSDLILKAWEETPRELQDSLLLAKKRIEKFHSLQVPKNITYTGPNGETLGRRWSPVEKAGIYIPGGRAAYPSTVLMNAIPAYVAGVNQIIMVSPANSQGEINQTVLAAAHITGINKIFRLGGAQAICALASGTESIPKVDVITGPGNIYVTLAKKKVYGKVGIDSLAGPSEILIIADQSAKLEHVASDMLAQSEHDPLASAILITTNTKLAEKLPAEIERQLINHPRLKICQESISNWGLIVLCDDLETCAQLSDTFAPEHLELLVEDPKKLSESINNAG

SEQ ID NO: 84947 - protein, 355 aa, Unknown
  Bacterial polypetide isolated from the Sargasso Sea
MESRRSGKNIDTTIVKRILKDVKLNKNKALLKYEKKFSNNNSIKIKNNELKNSIKSLNEKIKQSIDLAYDRIFNFHKKQQRKNIFYKDKYNNKLAYKYVPLQSVGIYVPANLPSTLLMNSIPAKIAGVKRIVLANPKLNGKLNPAVLYAAQKVGIKEIYSMGGAQAIASLAYIQKVNKIVGPGNIFVAAAKKELFGQVGIESMVAGPSEITVLADNKTDIEDVLTSMIGQAEHDENSQCILISKDLKLIKEFQNKIKEKIKKLPRRSIAFQSLKNNGLSILAKKDSDVINSINEIAPEHLEINISKPNKIINKIINVGSVCIGKYSPMAVTDYNAGTNHVLPTFGSAKFASGLNV

SEQ ID NO: 84948 - protein, 333 aa, Unknown
  Bacterial polypetide isolated from the Sargasso Sea
KRILKFHSLQKTTDIFYKDNLNNKIEYKYLPIQSVGIYVPANLPSTLLMNAIPAKIAGVKRIVLANPKNNGKLNPAVLYAAKKLGINEIYSMGGAQAIGSLAYIQKVNKIVGPGNIFVAGAKRQVFGDVGIEGMIAGPSEITILADSKTNLNEVTTSMIGQAEHDSNSQCILITKNSNLINKFKKDLELKLKQIPRQSIATKSIKRNGLILKVYNDRQIIDAINEIAPEHLEINVGNYEKYKDKIVNAGSICIGKYSPMALSDYAVGTNHVLPTNASAKFSSGLSLSEFYKKISLITLSKKGVEKIGEYATHLAEYEELKGHALSIKSRINKE

SEQ ID NO: 84949 - protein, 226 aa, Unknown
  Bacterial polypetide isolated from the Sargasso Sea
MDKRRSGKAVDTSIVPKILKDIKINGRKALLKYEKKFSKNTEIVPSKDKVNKAINTLEPKIKKSIDLAYNRIFKFHSLQKPKNIKYVDNFKNKLEYKHVPLQSVGIYVPANLPSTLLMNAVPAKISGVKRIVLANPKLNGKLNPAVLYAAKKVGIKEIYSMGGAQAIASLAYIQKVSKIVGPGNIYVARSKREVFGDVGTEGMVAGPSEICVLADGKTDLNQVITS

SEQ ID NO: 84950 - protein, 251 aa, Unknown
  Bacterial polypetide isolated from the Sargasso Sea
VKEIYKIGGAHSIAAFAYGTKTFKKVDKIVGPGNAYVAAAKKEVFGDVGIDIVAGPSEVSVVADKYANPNWVASDLIAQAEHDVYAQSILISNNLELIKNVKICLKDQLKNLPKRKIASKSLKSFGLVIHVKNKKKILKIINQIAPEHLQLYVKDLKSYTNGISNAGSVFLGKFSPEAIGDYLAGPNHVLPTSGSARFSSGLGVSDFLKRHSIIKISKSGIERLGSSVINLAQHENLQGHANSVKIRLKRE

SEQ ID NO: 84951 - protein, 348 aa, Unknown
  Bacterial polypetide isolated from the Sargasso Sea
MKVLNYSSINFWNELDNHLSLREIETSSRIEADVKSIIADIKKNGDDKIIQYAKDFDNITIKTDDIKLQDLKKFYSFDNLNKDTVESFRLAIKNVTKFHEKQLPQDYEIENMDTKLKSVWKPIDSVGLYIPGGNAVYPSSLIMSVVPAQIAGVKRIVCVTPPSNDFNPYIAFLLDELNISEVFQVGGAQAIAALSYGTQTIKPVNKIFGPGNAFVAAAKKQVFGKVGIDLVAGPSEIIVVADEKNNPKWVASDLMAQAEHDENAQSILITNSKIFADQVLEQIQNLINKVSKKQIINLSLKKNGLIVVMDDLLLSYKIINKIAPEHLHLQSSEKQNILKNVNNAGGIF

SEQ ID NO: 84952 - protein, 431 aa, Unknown
  Bacterial polypetide isolated from the Sargasso Sea
MLNLLRYKDENFHIRITEIINSRKNFDEDITNQVNDIILDIKNNGDMSLFKYMSKYDNVECSAENICYNEEDISSAKKNCTKESIEAIKLAKNRIEAFHKHQLPEDSIYEDQEEVSIKTKWIPLDSAGIYIPGGTASYPSSVLMGVIPAQVAGIKKISATVPCPNNQIDPLVLATLDLCGIKKIYKIGGAQAIAALTWGTESVDSVDIIIGPGNKWVAEAKKQALSNINIDMLAGPSEILILADKNNRADWIAADLLSQAEHDISAQAILVTDSENLLENVNNELVNQTEKLERKNIVKKSIAENGYGILVSDIEDAIEIINNIAPEHLSILCKENDQIENKITNAGVIFSDEWTPESMGDYIIGPSHILPTNGMAKRQSGLSVYNFLRRQSTISSSKKTINTLGPSAMLLADCEGLDAHSNSIKIRIKDS

SEQ ID NO: 84953 - protein, 433 aa, Unknown
  Bacterial polypetide isolated from the Sargasso Sea
MKLETIKWKELTEDEKIASLKRPVIESIEEQESVITEIFNEVKSNGDQAIKRYTKMYDGVEIDNLLMSDKEITSAFDRVPNTLIQSIENAIENVKTFHEKTFQSDTNKVEVRTGVNCQIIKRPIENVGLYIPAGNNPLPSTAIMLGVPSSLAMNKESIVVSPPNDSGVVNDSIVVAAKLSGIGRICKVGGAQSIAALAYGTESIPQVDKIFGPGNSWVTKAKQMISLLNLPVSIDMPAGPTEVLIISDGNTNPEFIAYDLLSQAEHGVDSQVILISQNDSFLKKVAIEIDKAISKIRTQEIAKISMKNSKLIFVDDIQEAINISNYYAPEHLIINCKNAEKLVQKISSAGSVFLGEWSPESAGDYCSGTNHVLPTAGFARSYSGLSVDSFCKSISVQSLTKKGLEMIGDDIINLAMAEGLEAHAKAVEVRIKK

SEQ ID NO: 84954 - protein, 127 aa, Unknown
  Bacterial polypetide isolated from the Sargasso Sea
NWGLIVICENYESCVELSNNFAPEHLEILTMDSKKILAGIENAGAIFLGKWTPEAVGDYLAGPNHTLPTSGNSRFSGSLGVETFMKNTSIIEFNEESLKVNSLDIINLAKSEGLHSHANSVQIRFDD

SEQ ID NO: 84955 - protein, 163 aa, Unknown
  Bacterial polypetide isolated from the Sargasso Sea
MLCPDDAFIARVRDAINELLPTMPRQDVIRASLEGRGALIKVRDMAEACAIANDIAPEHLEISALEPHQWGQLIRHAGAIFLGRYTSESLGDYCAGPNHVLPTSRTARFSSPLGVYDFFKRSSVIEVSAEGAQTLGEIAAELAYGEGLQAHARSAEYRMRQGG

SEQ ID NO: 84956 - protein, 232 aa, Unknown
  Bacterial polypetide isolated from the Sargasso Sea
MITWSSLSVNEKKQALARPAMANSQQLKQTVGDIIARVEKEGDEAVLDYTRKFDCPDLPSLVLSQENIDALAAKVTPEVASAIDTAFNNIKMFHEAQMPSDIALTTTPGVKCELRFTALDAVGLYIPGGSAPLPSTVLMLGVPALVAGCENKLLCTPPNKEQLIAPEIAYAARKCGIDKIFLCGGAQAIAAMALGTETIPQVDKIFGPGNSFVTEAKQQVSQRADGAAIDMP

SEQ ID NO: 84957 - protein, 623 aa, Unknown
  Bacterial polypetide isolated from the Sargasso Sea
MKLINRSKSKLPINWKSSTINSKDIENTAFRYRDLIINNGTKAFNIINDELKLPNIKSFKVRAAEINKSENSVSDDLKKAILDSSNNIKLICEEERKNLSSSSIETTKGITLWKEFRSIETVGLYVPGGSAPLISSFLMQLIPAKVAGCKNIVVCTPPLKSGSIAPEILWIAKLFGIESIYKVGGAQAIFAMAYGTTVIPKVDKIFGPGNSYVNIAKKICSEDVAIDLPAGPSEVMVVSDDETKAGLVAADVLSQLEHDAASKAFVLSNNLNLLKKIKKEINIQLSSLSRKSILEKSLLNLQLIKTRSMVDSICMINECAPEHLILLDDDYSKFLSGIYNAGSIFCGSLSPESFGDYSSGSNHVLPTNGMAKVFSGLGVKDFGKQINVQTASSEGFLNLKDTVITMANAESLDAHARAVEIREKLAVTKSRSRISSEIRKTNETSIYINLNLDGTGQYNIDTGLKYLDHLLEQFSKHGSIDLNISCLGDLEIDEHHTIEDIAITLGSTINKALQERKGISRYASSEILVMDEVKCNVSIDLCTRRFLNFKCSDLRERVGDFPTEMFEHFFISLINSAAFTCHIDTIGSNSHHLLEATFKTFARCLRSAIVIESNQTSSTKGLM

SEQ ID NO: 84958 - protein, 441 aa, Unknown
  Bacterial polypetide isolated from the Sargasso Sea
MQTLIWKTLSPAQQADVLTRPALSDEADIGAVVREIIAAVRSRGDEALRELSQRFERAPRQQLQVSDAEIEAACARLDDDIKDAIEAAIANIRTFHAAQVQPVVRVETQPGVVCELRTQPISRVGLYVPGGSAPLPSTVMMLAIPARLAGCREVVLCTPSPASDEILFAARACGVEKVFAIGGAQAIAAMAYGTQSIPKVDKIFGPGNAYVTEAKGQVSRDWRGAAIDMPAGPSEVLVIADESANPAFVAADLLSQAEHGPDSQVVLVTTSPLLADAINGEIKRQLAKLTRRDIAAQALGSSLVILCDDLTEACTISNAYAPEHLIVQTRAPRDLLDQLENAGSIFLGAWTPESVGDYASGTNHTLPTYGYARTCSSLGLADYQRRYTVQELSERGIQGLGPIVERIAQAEGLDGHKNAVTLRLNALAATSQQTAQQKDLS

SEQ ID NO: 84959 - protein, 430 aa, Unknown
  Bacterial polypetide isolated from the Sargasso Sea
MFKSELDISRKGFESDLSNFLTLKQSVDEEVVASVTKILKEVSSRGDSALIELTKKFDDYMLENFFLSQDEINASFKNVNKEVVTALEVAFENIIQFHSKCRDSLNLEPIDSEISRTFRPIRSALLYVPGGKASYPSSVLMAAGPAIACQVKDLFLTTPSINGVVNDLTVAAAKIAGIEKVAKLGGAQAIAAFSYGTESIPKVDKIVGPGNAYVAEAKRQLFGTVGIDSIAGPSEIIVLANETSSPEIVAWDLMAQAEHDQDASSILICNSNEVIKEIKQIIANELPKLERAKIIKSSLTNNGLIIKIESLEQSIEIINRFSPEHLHLAFDGNEIDPNDLIAGIVLLGSDSAVSFSDYVLGPSHILPTNGSSRFSSPLSVEDFIVSSTKVNMQIQTEKITFNELIDNTSLIARAEGLTAHAIAVEKRKKH

SEQ ID NO: 84960 - protein, 431 aa, Unknown
  Bacterial polypetide isolated from the Sargasso Sea
MKIFSLKRNAINSTIRQIRKSQEISYKNVNKTVASIIDDVKKLGDKAIFKLTKQYDNFNLNLQNLKVKRSLISDSSTKLNSDLKKSIKKAIQRVSSYQKKKLPKSFLYKDNLGNKLGWSVSPLDSVGIYVPGGTASYPSSLIMTAVLAKVAGVKKISIVTPPSQDGVNKAVLFVADCLKIENIYQVGGAQAIAALAYGTKTIEKVNKIVGPGNIFVANAKKQVFGDVGIDMVAGPSEVLIIGDKSASSEIIAADLLAQAEHDVNASSILVTTSKILAQKVLADVKKLTKESPRKNIISKSLRNNGKIFLMNSLESCIDFSNSFAPEHLELLVNSPERLLNKICNAGSIFLGKNSAEAFGDYIAGPSHVLPTGGSASFSSPLSSLDFIKYSSVTKISDKGLRLLGKNVEVMAESESLFAHKNSISLRLRNKK

SEQ ID NO: 84961 - protein, 346 aa, Unknown
  Bacterial polypetide isolated from the Sargasso Sea
SAEINQSIKKLNPKIKSSIDFAYKRIFDFHKKQKIKNIRYFDKYRNLIQYKNVPLNSVGIYVPANLPSSLLMNAIPAKIAKVKRVVLANPRVNGKLNPAVMYAARKLGIKEILSIGGAQAIASLCYIQNVDKIIGPGNNFVSQAKLSLFGDVGTESMIAGPSEICVIADKNTNINEISTSLVGQAEHDENSQCILITKDKLLIKKVINKINILLKRIPRKLIALKSLRRNGLIIYVSKDSKIPKIVNLISPEHLEINVVRPNKYLKKIFNVGSICVGKYSAMAASDYTVGTNHVLPTSGSAKFSSGLNVGEFYKKISQIKLSKKGIEVIGKKAINLAEYENFTWTC

SEQ ID NO: 84962 - protein, 438 aa, Unknown
  Bacterial polypetide isolated from the Sargasso Sea
MSITIRKLDSTSEGFGAELRALLAFEASEDAAIEQSVAQILADVKSRGDAAVLEYTNRFDRLNATSVAALELPQDALQTALDGLAPKARAALEAAAARVRAYHEKQKIECGTHSWQYTESDGTVLGQKITPLDRVGLYVPGGKAAYPSSVLMNAIPARVAGVGEIVMVVPTPDGVKNDLVLAAALLGGVDRVFTIGGAQAVGALAYGTATVPAVDKICGPGNAYVASAKRRVFGTVGIDMIAGPSEILVLCDGTTDPNWVAMDLFSQAEHDELAQSILLCPDGAFLERVEKAIDELLPSMPRRDVIRASLEGRGALIKVRDMAEACRIANDIAPEHLEISALEPQQWGQQIRHAGAIFLGRYTSESLGDYCAGPNHVLPTSRTARFSSPLGVYDFIKRSSVIEVSAEGAQTLGEIASELAYGEGLQAHAKSAEFRMKN

SEQ ID NO: 84963 - protein, 327 aa, Unknown
  Bacterial polypetide isolated from the Sargasso Sea
HIKQKNKNILYKDGLNNKIEYKYVPIQSVGIYVPANLPSTLLMNAIPAKIAGVKRIVLANPKNNGKLNPAVLYAAKKLGINEIYYMGGAQAIGSLAYIQKVNKIVGPGNIFVAGAKRQVFGDVGIEGMIAGPSEITILADGKTNLNEVTTSMIGQAEHDINSQCILITKDSNLIKKFKKDLISKLKKIPRQSIATKSIKNNGLIIKVNNDKQIINVINEIAPEHLELNVSNYKKYKDKIFNAGSICIGKYSPMALSDYAVGTNHVLPTNSSAKFSSGLSLSEFYKKISLITLSKKGVEKIGEYAKHLAEYEELKGHALSIKSRIRRR

SEQ ID NO: 84964 - protein, 251 aa, Unknown
  Bacterial polypetide isolated from the Sargasso Sea
MKIIKFNKNFYNQLQTIIEKRNSLSSKSIQVDVKKIINDVKKNGDKSLIKYAAKFDKVKISKNDLSLDLSKIKIQSKVDPQIFNSFKKAIKNISSFHKQQLPKNIVFTNNGATLKSVWKPIDSVGLYVPGGKAFYPSSLIMNAVPAIIAGVKRVVCVTPPTKSINPYFIKLIKELGIKETYFIGGAQAISALTFGTQTIKPVNKIFGPGNAYVAEAKKQLYGKVGIDLLAGPSEIIVVANNKNNPDWVASD

SEQ ID NO: 84965 - protein, 72 aa, Unknown
  Bacterial polypetide isolated from the Sargasso Sea
GDYLAGPNHVLPTSGTAKFSSGLSVYDFQKRQSVIKMTKTGIERLGPSVITLSKYENLHGHANSVKSRIKRG

SEQ ID NO: 84966 - protein, 433 aa, Unknown
  Bacterial polypetide isolated from the Sargasso Sea
MKLEIIKWNDLTEDEKITSIQRPTLNSLKGQDSTITQIFKDVRADGDEALKKFTSIYDGVKIDDFLMSEKEIESAFSRVPRDLIQSIENAIENVKTFHEKNFENDLNPVEVKSGINCQIIKRPIEKVGLYIPAGNNPLPSTAIMLGVPSSLARNKQSVVVSPPNDLGVVNDAVTVAAKLSGIGKIFKVGGAQSIAALALGTESIPRVDKIFGPGNSWVTRAKQMISSLNLPVSIDMPAGPTEVMIISDGNTNPEFIAYDLLSQAEHGIDSQVILISQNDSFLKDVAIEIDIAMSKISTREIAEISMKNSMLILTDNIDEALSISNDYAPEHLIINCKNAEELLPGIQSAGSIFLGEWSPESAGDYCSGTNHVLPTAGFARSYSGLSVDSFCKSISVQSLSKEGLESIGDDIINLAMAEGLEAHARAVEVRIKK

SEQ ID NO: 84967 - protein, 421 aa, Unknown
  Bacterial polypetide isolated from the Sargasso Sea
MIKVINCNKKNYLNNLTKFLDLRRSEKRIENKTISNILKDIKKNKNKSLFKYEKKFSKNSQIKPSIKQINKAIKSLDPKIKRAIDFAYKRILKFHNLQKTKDIFYKDNLNNKIEYKYVPIQSVGIYVPANLPSTLLMNAIPAKIVGVKRIVLANPKNNGKLNPAVLYAAKKLGIKEIYSMGGAQAIGSLTYIQKVNKIVGPGNIFVAGAKRQVFGDVGIEGMIAGPSEITVLADSKTNLNQITTSIIGQAEHDANSQCILITKNSNLIEKFKKDLELKLKDIPRKSIASKSIKNNGLILKVNSDRQIIDAINEIAPEHLEINVSNYKKYKDKIFNAGSICIGKYSPMALSDYAVGTNHVLPTNSSAKFSSGLSLSEFYKKISLITLSKKGVEKIGEYATHLAEYEELKGHALSIKSRINKE

SEQ ID NO: 84968 - protein, 427 aa, Unknown
  Bacterial polypetide isolated from the Sargasso Sea
MKILNSTNKNFSNSLNKLLSLRKKKVQSSSISVTSIVRDVKKNGDKALLKYEKRFNQNRTIVPTSNQINNSIKSLDQKVKKAIDIAYDRIYKFHSLQKFKNISFIDKFKNKLEYKYLPIDSVAIYVPGSSASYPSSVLMNAVPAIVAGVKRLIMINPGFKGKQNPAVLYAARKCKIKEIYSIGGPSAVAAAAYGTKKIKKVDKIVGPGNAYVAAAKKEVFGDVGIEGMTAGPSEVTIVCDKFSNPEWVASDLIGQAEHDNLAQCILISKDKKLLEKVKIELIKQLKKIPRVSVARKSLNSNGILMYVNSDKKIIEIVNKIAPEHLELNIQNYKSYVSKIRNAGSICLGKYAVMAMTDYNVGSNHVLPTNGSAKYSSGISVNEFYKRISYINLSKKGIESLGPSVITLANYEGLVGHAQSVIKRIRRK

SEQ ID NO: 84969 - protein, 386 aa, Unknown
  Bacterial polypetide isolated from the Sargasso Sea
KNGDKALLKYEKKFNKNSVIKPNSNQIQKSIQSLNSIVKKSIDTAYNRIYKFHSLQKFKNISYTDKFKNKLEYKYLPLDSVAVYVPGSTASYPSSVLMNAIPAIVAGVKRIVMINPGYKGKQNPAVLYAAKKCKIKEIYSIGGPSAIAAVSYGTKKIKKVDKIVGPGNAYVAAAKKEVFGDVGIEGMTAGPSEVTIVCDKHSNPEWVASDLIGQAEHDDLAQCILISKDKNLLNKVKTEIIKQLKEIPRESIAKRSLQNNGILMHVNSDKKIINIVNKIAPEHLELNVKNFKSIVSKIKNSGSICLGKYAVMAMTDYNVGSNHVLPTNGSAKYSSGISVNEFYKRISYINLSKKGIESLGPSVITLANYEGLVGHAQSVLKRIRRK

SEQ ID NO: 84970 - protein, 112 aa, Unknown
  Bacterial polypetide isolated from the Sargasso Sea
SIDLINSIAPEHLEIAINNPNKFLKRIKNAGSIFLGRYTPEAIGDYVAGPNHVLPTGGTAKFSSGLGVADFMKRSTFIECKKNNLFLLREYASILASLEGLEAHKISMDIRK

SEQ ID NO: 84971 - protein, 209 aa, Unknown
  Bacterial polypetide isolated from the Sargasso Sea
KQLYGKVGIDLLAGPSEIIVVANNNNNPDWVASDLIAQAEHDENAQSILITDSKDFATKVLSSIKKIKKDLSKNKIIEKSLNNNGIIALVDNIELATEIINFVAPEHLHIHISNNKKLLSNINNAGGIFLGEYSVEAFGDYIVGTNHVLPTSGAAKFSSGLGVLDFMKRTSVVEMNKKSFNALSEDTQKMSGLEGLDGHKLSVKIRQKK

SEQ ID NO: 84972 - protein, 316 aa, Unknown
  Bacterial polypetide isolated from the Sargasso Sea
MINILSSKSKSFKQQLLRYLDSRKPNNESKIRVVKKIISEVKKEKDQSLLKYEKKFSNLKKLNKKDLFFTKSEMDKIIKRLDIKTKNSINIAFKRIYKFHKNQKFKDFKVLDNYKNSLSYRSMPLEKVGVYVPGGVANYPSSVLMNCIPAIVAGVKKIYLTAPCIGKKINPGVIYAAKKCKVKEIYKLGGAQAIAAFAYGTQTVKKVDKIVGPGNEYVALAKKEVFGEVGIDMFAGPSEVTIIADKYSNPDWIAADLLAQAEHDEMSQSILITDNKKIIIKVKKALGSQIKFLPKKRIATKSLKKFGIAVLAKNSN

SEQ ID NO: 84973 - protein, 185 aa, Unknown
  Bacterial polypetide isolated from the Sargasso Sea
MSESRSLAFPLRCVRDPQQAEAELQRLTRRTQTSQQRDVQDRVDAILKAVRERGDAAVCDFTERFDGFRPDPVAVPKHQLEQAWKALPENLRDALELAHRRISEFHQRQRPEDIQMEGAHGEQLGRRWRPVQRAGLYVPGGRAAYPSTVLMNAVPARVAGVEQVVICSPAGSDGQVNPVVLAAAH

SEQ ID NO: 84974 - protein, 114 aa, Unknown
  Bacterial polypetide isolated from the Sargasso Sea
FEIVNELAPEHLEVLTKDPFDDLHRIRNAGAIFLGPNTPEPVGDYFAGPNHTLPTSGCAKFSSPLGVQDFVKTSSIISYSAERLRSQGEQIIRFAEEEELFSHAAAIKARMDFI

SEQ ID NO: 84975 - protein, 342 aa, Unknown
  Bacterial polypetide isolated from the Sargasso Sea
KLANIVLKHFTNINYLEDSIYKDNDDVSIKTKWLPLDSAGIYIPGGTASYPSSVLMGVIPAQVAGVKKIYATVPCPNNEIDPLVLATLDLCGIEEIYKIGGAQAIAALTWGTETVQNVDIIIGPGNKWVAEAKKQALSNINIDMLAGPSEILILADKDNRADWVAADLLSQAEHDISAQAILITDCENFLESVNKELLIQTEALKRKDIVKKSIADNGYGILVKNIQDAIGIINDIAPEHLSLLCKENEYIEKKITSAGVIFSDEWTPESMGDYIIGPSHVLPTNGMAKRQSGLSVFNFLRRQSTISSTKKTINKLGPSAILLAECEGLDAHANSIKIRIKD

SEQ ID NO: 84976 - protein, 381 aa, Unknown
  Bacterial polypetide isolated from the Sargasso Sea
MKIINDKKEAIEELKRISTRTNSDNNNRINKIVEEILQEVKFYGDIAVEKYTKKFDGFDPFPMQVKRDEIKNAWDELDKNLKHSLVAAHKRIQKFHEKEIPQSFTIKGEYGDTVQRRWRPVKNAGIYIPGGRAAYPSTVLMNAIPAKVAGVKEITMVSPGNREGKINKTVLAAAHLSGINKVFRIGGAQAIGALAFGTNQINKVDVITGPGNIYVTTAKKLIYGSTGIDSLAGPSEILIIADETAQSSHIASDLLAQAEHDPLASSILLTTSKNQAKEVLEKVHLKIDHHPRKEICMQSIKNWGLIVICENFESCIELSNTFAPEHLEILALDTKKILNGIDNAGAIFLGKWTPEAVGDYLAGPNHTLPTSGNSRFSGSLG

SEQ ID NO: 84977 - protein, 460 aa, Unknown
  Bacterial polypetide isolated from the Sargasso Sea
MTLVAAPARLSTTAATFEADFAARLHWSADTDAAIEQRVADILADVQKRGDAAVLEYTARFDGLSAPNMAALELTQADFKAAFDAIPQAQRDALQAAAKRVRSYHEAQKKASGESWSYRDEDGTLLGQKVTPLDRVGIYVPGGKAAYPSSLLMNAIPAHVAGVQEIIMVVPTPVRGSLATGGTGEGTSTKGERNELVLAAAYVAGVTRAFTIGGAQAVAALAYGTETVPKVDKITGPGNAYVASAKKRVFGTVGIDMIAGPSEILVLADGTTPPDWVAMDLFSQAEHDELAQSILLCPDAAYLDAVQREIDRLLPTMPRAEIIAKSLTGRGALILTKDMEEACAISNRIAPEHLEVSSTDPHRWEPLLRHAGAIFLGAYTSESLGDYCAGPNHVLPTSGTARFSSPLGVYDFQKRSSLIEVSEAGAQVLGTIAAELAYGEGLQAHAQAAEMRLTTPVKPR

SEQ ID NO: 84978 - protein, 238 aa, Unknown
  Bacterial polypetide isolated from the Sargasso Sea
DSVPQVDKIFGPGNSFVTEAKQQVSQRADGAAIDMPAGPSEVLVLADEFANPEFVAADLLSQAEHGPDSQAILVSNSATLIEEAKAAVERQLATLSRAEIARPAMENARYILADSIEQAIEASNAYAAEHLIVQIENARDYLPKIKYAGSIFLGPWSPESAGDYASGTNHVLPTYGYAKNYSSLGLLDFMRRYTIQELSADGMRNLGPAIMALAAAEGLDAHEQAVALRMQALKQGDA

SEQ ID NO: 84979 - protein, 141 aa, Unknown
  Bacterial polypetide isolated from the Sargasso Sea
MADHPRREICEASLRDWGLVVVCEDLESCARLSDSFAPEHLELLVERPEPLADRIQNAGAIFLGPWSPEAVGDYLAGPNHTLPTCGAARFSGALSVETFMHHTSLIGFNRAALEATGSAVQELATSEGLHSHAESVRRRLS

SEQ ID NO: 84980 - protein, 407 aa, Unknown
  Bacterial polypetide isolated from the Sargasso Sea
MSLREEETSSKIDDDVKSIIKDIKQYGDDKVIKFAKDFDQIILKKNEIKLTNLKQFYSLEKLNKETVESFRLAIQNVRKFHDKQYPNDFEISNMDAKLRSVWKPMDSVGLYVPGGNAVYPSSLIMSVVPAQIAGVERIVCVTPPSNNLNPYIAFLLDELSITEVYQIGGAQAIAALTFGTETIKPVSKIFGPGNAYVASAKKQVFGKVGIDLVAGPSEIIVVADEENNPEWVASDIMAQAEHDENAQSILITNSNTFAKKVLEHIEDLKETLSKKTTVEISLKKNGLIVIMDNLELSYKIINKIAPEHLHLQSKEKEIIFKNVNNAGGIFIGDYSTEAFGDYVVGTNHILPTSGAAKFSSGLSVIDFMKKSSVVEINKLSYKNLSKHVENISDVENLDAHKLSVTIR

SEQ ID NO: 84981 - protein, 426 aa, Unknown
  Bacterial polypetide isolated from the Sargasso Sea
MEVKLFENYQDYLAQLPSTVTEDTSSKVSEILEEVRNHGDSALKKLTFRFDGIDLDSIRVQPEDLQSALQELDPELRKVLEQATENIRTFHQRQKTESQLEFSDDGTMLGWKISPLDSVGIYVPGGRAIYPSTLLMNVIPAQVAGVSRIAMVSPPDTTGLPASLVRASAALLGVDELYSLGGAQAVAALAWGTETVPAVVKITGPGNAFVAEAKRQVFGKVGIDSFAGPSEIMIVCDREETPVEYLVRDLLSQAEHDPEAGAILATTSRDQALNVKNRLQELVPTLPRREIIEESFASRSALIVCDSKEECFDAVNEMAPEHLELLTEDPYQDLHRVRNAGAIFVGPNTPEAVGDYFAGPNHTLPTSGCAKFASPLGVQDFTKSSSVLAYSEERLQREGSAIIRFAEEEKLYAHAESIRVRMKTTE

SEQ ID NO: 84982 - protein, 433 aa, Unknown
  Bacterial polypetide isolated from the Sargasso Sea
MKLINRSKSNSSINWKSNIIDSQDIEQTALRYKELVLKNGTKAFNEINEELNLPKIKSFKVRKSEINKAENLITDDLKQAILNSANNIKIICENEKKSLVSSSIETTKGISIWREFRPIESVGIYVPGGTAPLISSFLMQLIPASIAGCKNIIVCTPPSSSGSIAPEILWIAKIFGISSIYKVGGSQAIFAMAYGTTIIPKVDKIFGPGNAYVNAAKKMCSEDVAIDLPAGPSEVMVVSNDISKVNLIAADVLSQLEHDSAARAFVLSKNLNLLSNVKKEIKKQLASLSRQNILKESLSNLMLVKYKSFNDCINLINECAPEHLILLDDDYALPLARINNAGSIFCGSLSPESFGDYSSGTNHVLPTNGMAKVYSGLGIRDFGKQISVQTASSEGFLNIKDTVISMANAENLDGHAKAVKIRENLANQNTRSR

SEQ ID NO: 84983 - protein, 360 aa, Unknown
  Bacterial polypetide isolated from the Sargasso Sea
MFKSELDISSKRFESDLSNFLTLKQSVDEEVVASVTKILKEVSSRGDSALIEFTKKFDDHMLENFFLSQDEINASFKNINKEVITALEVAFENIIQFHSKCRDSLNLEPIDSEISRTFRPIRSALLYVPGGKASYPSSVLMAAGPAIASQVKDLFLSTPSIDGVVNDLTVAAAKIAGIEKVAKLGGAQAIAAFSYGTESIPKVDKIVGPGNAYVAEAKRQLFGTVGIDSIAGPSEIIVLANETSSPEIVAWDLMAQAEHDQDASSILICNSNEVIEEIKQIIENELPKLERAKIIKSSFTNNGLIIKVESLEQSIEIINRFSPEHLHLAFDGNEIDADDLIAGIVLLGSDSAVSFSDYVL

SEQ ID NO: 84984 - protein, 428 aa, Unknown
  Bacterial polypetide isolated from the Sargasso Sea
MIKILNIKNRNFKKKLDESLSKRRNKIQSSNISVKKIIQDVKKNGDKSILKYEKRFNKNKFILPNKKTNNKNISGLDSKIKKAINLAYERILKFHSLQKFNNISYQDKLKNKLNYKYLPINSVGIYVPGSSVSYPSTVLMNAIPAIVAGVKRIVMLNPGKKGILDPAVLYAAKKCNISEIYSIGGPAAIAGLAFGTKKIKKVDKIVGPGNIYVTSAKKEVFGEVGIEGMIAGPSEVTVVADKYSNPEWVASDLIGQAEHDELAQCILITKSDALLNNVNECLTAQLKNLPRSKTAKKSLSTNGILIKVNTDKDIISIVNKIAPEHLELNIKNHKKISNKIINAGSVCLGKYSVMAMTDYNIGSNHILPTNSSSRFSSGVSVNDFYKRISYINLSKKGIETLGPSVITLANYEGLVGHAESVKLRIRRK

SEQ ID NO: 84985 - protein, 303 aa, Unknown
  Bacterial polypetide isolated from the Sargasso Sea
AAYPSTVLMNAIPAKVAGVQEIIMVSPGNTEGKINKTVLAAAHLSGINKVFRIGGAQAIGALAYGTNQIDKVDVISGPGNIYVTTAKKLIYGSTGIDSLAGPSEILIIADETAQSTHIASDLLAQAEHDPLASSILLTTSKDQAKEVLEEIYKKIDNHPRKEICMQSIKNWGLIVICENHESCIELSNNFAPEHLEILAFNPKKILGDIDNAGAIFLGKWTPEAVGDYLAGPNHTLPTSGNSRFSGSLGVETFMKNTSIIEFNEESLKVNSLDIINLAKSEGLHSHANSVEIRFKDYPTFEGV

SEQ ID NO: 84986 - protein, 246 aa, Unknown
  Bacterial polypetide isolated from the Sargasso Sea
YCVGGAQAIAALAYGTESIPAVDVITGPGNLYVTLAKKTVYGRVGIDSLAGPSEVLVIADDRASAELVAADLLAQAEHDPLAAAILLTTSPRLAQEVPEAISAQLEDHPRREVTEASIRDWGLIVLCDSLEQAAQLSDSFAPEHLELLVQEPAALAERIQQAGAIFLGEHTPEAAGDYLAGPNHTLPTSGTARFAGALSVETFMRHTSLINFNKQALEATGAAIMELAAHEGLHSHRESVRRRLQS

SEQ ID NO: 84987 - protein, 90 aa, Unknown
  Bacterial polypetide isolated from the Sargasso Sea
IKHAGAIFLGCYTPEAIGDYVAGPNHVLPTDRTARFSSGLSVFDFIKRTTFVKCDLQGLKKIGPPAITLAQAEGLPAHAESIKVRLNSSG

SEQ ID NO: 84988 - protein, 313 aa, Unknown
  Bacterial polypetide isolated from the Sargasso Sea
MTKKIKSRDPNFYDAFKILLGARATSLSDATRVSADIIKKVRKNGDKALIKLTKKFDGLDLTTKDLVVDLNEIDEATSKISPDEYDSLRFAADRITSFHLRQMPEKFEYVDDAGIKMGMSWSPIDSVGLYVPGGTASYPSSVLMNAIPARVAGVPRRVIVVPQTRNVINPLVLVAARLSGVEEIYRVGGAQAIAALAYGTETITSVDKIVGPGNSFVAAAKKLVYGAVGIDSIAGPSEILIVADSMNDPKWIAYDLLAQAEHDQLARSILITDNENFAEKVLTSVENILSSLQRSEIARASWGNQGAVIIVDS

SEQ ID NO: 84989 - protein, 102 aa, Unknown
  Bacterial polypetide isolated from the Sargasso Sea
MKKYIVIGNPIEHSLSPKLHNYWIKENNIDAVYDKKRIDHSELENIIFEVKEGKISGINVTVPFKKAAIPFLDELSNEANKTQSVNTIYLNNGKIIGHNTDV

SEQ ID NO: 84990 - protein, 238 aa, Unknown
  Bacterial polypetide isolated from the Sargasso Sea
MKKYLVIGNPINHSLSPELHNYWIKQNKISAVYEKRLIDIQDIESILADLKNDKISGINVTVPFKKAIIPYLDKLSSTAKETASVNTIYKSNNQLCGDNTDIDGFRYSLERMKFNVKGKKALVIGAGGVAPSIISALNIMGATQINLINRTKKKAEDLKKQFPFLEIFDWGETIVSDIIINATSIGLQNDDKINLDYSKIGTNRLYYDVIYNPTKTNFLKQGEKFDKQVENGKFMFIY

SEQ ID NO: 84991 - protein, 75 aa, Unknown
  Bacterial polypetide isolated from the Sargasso Sea
MKKYLVIGNPIEHSLSPKLHNYWFEKNNIDANYDRRKTDKSEIQEIVNEIKDNKLDGINVTVPFKAECHSLFRYA

SEQ ID NO: 84992 - protein, 116 aa, Unknown
  Bacterial polypetide isolated from the Sargasso Sea
MKKYIVIGNPIDHSLSPELHNYWIKKNNISAVYEKKRLEEDNLKKIISEVKTEKISGINVTVPFKKTVIPFLDELSTEANETQSVNTIFLRNGKTIGHNTDAAGFELSIKYSKYDS

SEQ ID NO: 84993 - protein, 202 aa, Unknown
  Bacterial polypetide isolated from the Sargasso Sea
MKNFLVIGNPIDHSLSPKLHNYWFKKNNIQAVYEKKLINKENIKNIFNKIKKRELNGINVTVPFKKSVIPFVEKLTPEANKSNSVNTIYLEDNKIIGHNTDIAGFELSIRHTKYEIKNKKIFILGAGGVVSSIILGLKNMGCSKIFISNRTTQKAKDLKNYFNDLEIIEWGKVPEFDMIINATSLGLKKNDEIKLNYKEIGS

SEQ ID NO: 84994 - protein, 254 aa, Unknown
  Bacterial polypetide isolated from the Sargasso Sea
MKKFFVIGNPINHSLSPELHNFWIKKNKINAVYDKIKLEESELKDFINKLRNEEIHGINVTVPFKNKVIKYLDKLSLEVETTDSVNTIYKSGNDIIGHNTDVAGFELGLRHSKINVLHKSILILGAGGVVPSIIYSLLSMGCKKIFLSNRTIEKAENIKKKFEEVEVLKWKEIPDFDIVINATSVGLKGESLDLDFNTKDKVFYDVIYNPKETQFLKRARENGNRIENGKLMFIYQANQSFSIWNNVIPKIDEE

SEQ ID NO: 84995 - protein, 263 aa, Unknown
  Bacterial polypetide isolated from the Sargasso Sea
MKKFLVIGNPIEHSLSPKLHNYWIKSNNLKAVYDKKKLDISELENLIKEVKEKKIDGINVTVPFKNSVIPFLDKLSNEAQKTQSVNTIYLKDGMVIGHNTDIEGFELAIKHSNYDIVGKNILILGAGGVSPSIIVALNNMNVKKIFISNRTQSKAENLKKTFNEIETIRWGTIPDFDMIINATSLGLKNDENIILDYSKISPEKFFYDVIYNPAETNFLKSAKKNGNKIENGKKMFIFQAQASFKIWNNLEPKVDDKVMELLN

SEQ ID NO: 84996 - protein, 87 aa, Unknown
  Bacterial polypetide isolated from the Sargasso Sea
MKKFLVIGNPIEHSLSPKLHNYWIKKNSLDAIYGKLETYDNDLSELCKSIKNGDLDGLNVTVPFKKSIIPHLDILSRNALRTQSVNT

SEQ ID NO: 84997 - protein, 264 aa, Unknown
  Bacterial polypetide isolated from the Sargasso Sea
MKKYLVIGNPIEHSLSPKLHNYWFEKNNINANYGKKKINKSEIQDVISEVRDNKLHGINVTVPFKNDVIPFLDTLTEESQITKSVNTIYIHDKKLVGHNTDIIGFELSLRETQFSLKNKTIFILGAGGVVPSIIYALEKLEVSKITVSNRTKQKALDLKKIFSNINVVDWGDQPEFDMIINATSLGLNKEDDIGLNFNNINKENFFYDVIYNPKKTNFLKTGKSLGCKVSNGKMMFIYQAFEAFRLWHKVKPEINEDLKIFLDS

SEQ ID NO: 84998 - protein, 136 aa, Unknown
  Bacterial polypetide isolated from the Sargasso Sea
MKKFLVIGNPIDHSLSPKLHNHWLKENNIDAVYEKLLLTESDIKEIVSEIRNNKIQGANVTVPFKISVKPFMDELSPLAKQTGSINTIYKKNNKIIGDNTDVGGFENAIKHIGYNVSGKKAFILGAGWRCTFNYFC

SEQ ID NO: 84999 - protein, 250 aa, Unknown
  Bacterial polypetide isolated from the Sargasso Sea
MKSTTHIFGCIADPIDHVKAPTLYSKVFLERKINAIMIPVHVNEKNLGEVINSLKKIKNFRGLTVTIPHKVNVLKYCDELEDTADQTGAVNWIKFNNNKVIGNNFDGIGFVRGLLNKNYIINDKRVSIFGAGGAGMAISFALQSYNLKELKIINRDQNKLNKLIKRLKNHFPKTTLIGENFLNYDISKSDIIINATSVGMKSDTTIPFKVLNTKQNSLIAEIIMEPELTFLLKEAKKLNKKIHLGKYMLE

SEQ ID NO: 85000 - protein, 136 aa, Unknown
  Bacterial polypetide isolated from the Sargasso Sea
RLLEQKTKEIIIVNRTISRAKDLEKKFGKKNCVRAYSYNDLPNHSFDIIINGTSLSLSAEIPPISKTNINENTFCYDLMYSDKETAFTKWAIENGALKATDGLGMLVEQAAESFMFWHGTKPDTMPIIKVLRDSNT

SEQ ID NO: 85001 - protein, 95 aa, Unknown
  Bacterial polypetide isolated from the Sargasso Sea
MKKYFVIGNPINHSLSPKLHNHWLEQNNINAVYEKIKLEENEIENFIHKIKNQEINGCNVTVPFKKTVIPFLDKLSLEAEQAQSVNTICFNNGDL

SEQ ID NO: 85002 - protein, 264 aa, Unknown
  Bacterial polypetide isolated from the Sargasso Sea
MNKYLVIGNPIDHSLSPALHNHWLKENNINATYDKIKLEDHEIKNFIQNIKEQKVAGCNVTVPFKKTVIPFLDKLSPEADQTQSVNTITFDNGVLVGHNTDIAGFDAAIKKLNFSLKRKRVLILGAGGVVSSIILALKNMQVQEITISNRTREKAESLRVLFNNLKVLEWGKLIDFDMVINATSLGLNNEKINLDFTSLGKNKLFYDVIYNPHETHFLKLGKQSGNMTENGKTMFVYQALEAFKLWHKIEPKINQETLKILDND

SEQ ID NO: 85003 - protein, 264 aa, Unknown
  Bacterial polypetide isolated from the Sargasso Sea
MKKYFVIGNPINHSLSPKLHNYWLKENNINAIYDKKKIEEKNLQTIISEVKEKKIDGINVTVPFKKAVIPFLDKLSMEAEQTQSVNTIILKDNNLEGHNTDIAGFAKAIKNLNFNLEGKKVFILGAGGVVPSIIFALNKINVSKIIISNRTKKKAEDLKLQFHSLEILDWGDITDFDVIINATSLGLNKETINLDFSKFGNNKLFYDVIYNPIETNFLSEGKKLGNKTENGKLMFVYQAFEAFKLWHGIEPIISREVLDILKND

SEQ ID NO: 85004 - protein, 189 aa, Unknown
  Bacterial polypetide isolated from the Sargasso Sea
MKKYLVIGNPIEHSLSPKLHNHWFKKNKIDAIYDRKKLDENEIKNVISEVKEEKLSGINVTVPFKKVVIPFLDELSPEANETQSVNTIYLQSGKLIGHNTDIAGFELAIKHSKYDINNKEIFILGAGGVVPSIIYALRKMKVSKITISNRTKEKAEDLKNLFKDIEIVGWGEIINFDMIINATSVGLKN

SEQ ID NO: 85005 - protein, 227 aa, Unknown
  Bacterial polypetide isolated from the Sargasso Sea
MVIGNPIEHSLSPLLHNFWIKKYGISAIYEKKVLEKNDIEKTLNDIRENKIEGINVTVPFKKEVIPFLDHLSDTAQKSQSVNTIFKRQNKLVGDNTDVYGFSQAIKLTNFNLKNKKALILGAGGVVPSIILALKNMGILEIVLSNRTKAKAEDLEKSFPFLKVINWGETIKSDLIINATSIGIKKNEQIKLDYTKLDGQLFYDVIYNPPETKFLEQAKKIGKKIENG

SEQ ID NO: 85006 - protein, 146 aa, Unknown
  Bacterial polypetide isolated from the Sargasso Sea
MKKYLVIGNPIEHSLSPKLHNHWIQKNNIDGVYEKKQIKESDIREIILEVKNDRINGINVTVPFKKSVIPFLDELTPLANEAQSVNTIYKQNNKVIGHNTDVGGFELALRHINYDVKNKKVFILGAGGVVPSIILALKKMNVEKII

SEQ ID NO: 85007 - protein, 215 aa, Unknown
  Bacterial polypetide isolated from the Sargasso Sea
MRKYLVIGNPIDHSLSPKLQNWWLKENKIDATYDKIKLENHEIKNFLQAIKEQKIAGCNVTVPFKKTVIPFLDKLSPEAEQTQSVNTIIFENGDLVGHNTDIVGFGTAIKRLNFSLKGKKVLILGAGGVVPSIIFALKNMHVEEIIISNRTREKAENLRVLFNNIKILEWGNLTDFHMVINATSLGLNNEKINLNFLSSGNDKLFYDVIYNPPRN

SEQ ID NO: 85008 - protein, 167 aa, Unknown
  Bacterial polypetide isolated from the Sargasso Sea
MKKYLVIGNPIEHSLSPILHNYWIKKNKIDAVYEKKLILENELEKIIFKIRSGELNGINVTVPFKNKVVRFMDDLTKEAKESMSVNTIYLKDKKIVGHNTDIAGFELGIRSYGYDIKKKNIFIFGAGGVVPSIIIALKRMQASKIFLYNRTHYKSEMIKKNFNDIEI

SEQ ID NO: 85009 - protein, 268 aa, Unknown
  Bacterial polypetide isolated from the Sargasso Sea
MTTKIKKYFVIGNPIDHSLSPKLQNYWLKENNINAFYDKIKLNEDDLENFIKDIKHQKITGCNVTVPFKQAVIPFLDKLSPEALQTRSVNTIIFNDGSLVGHNTDISGFTKAIQSVGFNLRGKKVLILGAGGVVPSIIFSLNKMGVSEISVSNRTRQKAENLKMLFNNLKTIEWGNIEYFDMIINATSLGLNNEKINLDFSKAGKDKLFYDVIYNPAETNFLKNAKKNGNLAENGKLMFVYQALEAFKLWHEVEPKISDEIFKLLEND

SEQ ID NO: 85010 - protein, 93 aa, Unknown
  Bacterial polypetide isolated from the Sargasso Sea
MKKYFVIGNPIDHSLSPKLHNHWFKENKIDAVYEKIKIDENDLETIIAKIKEKQINGINVTVPFKKTVIPYLDKLSLEAKQTQSVNTIILDHG

SEQ ID NO: 85011 - protein, 248 aa, Unknown
  Bacterial polypetide isolated from the Sargasso Sea
RYEINGFYIPIDVRPQDLIKSIEALVLLGFRGVNVTIPHKVAILSIADTATDRASMIGAANTLYFNKEGKVTADNTDGYGFKQNIKSYDPLWEARTGPAVVFGAGGAAKAVIHALLSEGVPSVRILNRTRIKAEMIAEHLGNRVEVIDWYAIKEALNGATTIINTTSLGMVGQPSFKPDLSNASPEARVIDLVYNPVDTEFLKGARQQGLKTIDGLGMLLYQAEPGFTNWFNVTPSVDEKLRAIFLND

SEQ ID NO: 85012 - protein, 237 aa, Unknown
  Bacterial polypetide isolated from the Sargasso Sea
MKKFLVIGNPIEHSLSPKLHNYWIKKNNLDAIYGKLETYDNDLSELCKSIKNGDLEGLNVTVPFKKSIIPHLDILSSNALRTQSVNTISLNKGNLIGDNTDINGFELSIRKLNYDVSDKTVLILGAGGVVSSIIFSLLRMKASKIFLSNRTKKKAENLKNLFNEINVVEWGDLPEFDMVVNATTLGLSKVDKFGIDFSQAGQNKLFYDVIYAPFQTEFSEAGNAEGNSIENGLNMFL

SEQ ID NO: 85013 - protein, 117 aa, Unknown
  Bacterial polypetide isolated from the Sargasso Sea
MKKFLVIGNPIEHSLSPKLHNYWIKKHSLDAIYGKLETHDNDLSELCKSIKKGDLDGLNVTVPFKKSIIPYLDILSSNALRTQSVNTISLNKGHLIGDNTDINGFELSIRKLNYDVS

SEQ ID NO: 85014 - protein, 198 aa, Unknown
  Bacterial polypetide isolated from the Sargasso Sea
MKKYFVIGNPIDHSFSPKVHNFWIKQNNLKAIYEKIKLEENEIQSFISEIKEQKIAGCNVTVPFKKKVIPFLDQLSLEAEKTQSVNTIVYDNGNLIGHNTDIVGFEKAIKNLNFNINLKRVLILGAGGVVPSIVFALNNMGVKEITITNRTKEKAENLKKLFDNLKVEDWGNLPDFDVIINATSLGLNNEIMNLEFSN

SEQ ID NO: 85015 - protein, 260 aa, Unknown
  Bacterial polypetide isolated from the Sargasso Sea
YLVIGNPIKHSLSPKLHNYWIKKYNIDAVYEKKKINGDDIADLISEVKKKNIHGINVTVPFKKAVIPYLDLLSFESEQTQSVNTIYLDDNKVIGHNTDIEGFKLSIEDTKLEMANKKVFILGAGGVVPSIIFALNKMKIAEIIISNRTKDRAKKLQELFKNIRIIDWGKIPNFDVIINATSLGLNNDDEIGLDTSKLGKNKFFYDVIYKPNETNFLKIGKKLGNKIENGKLMFVYQALASFKIWHEIQPEINNKVIKILD

SEQ ID NO: 85016 - protein, 255 aa, Unknown
  Bacterial polypetide isolated from the Sargasso Sea
MKKFFVIGNPIEHSLSPKLHNYWIKSNNLKAVYDKKKLEISELENLIKEVKEKKIDGINVTVPFKNSVIPFLDKLSNEAQKTQSVNTIHLKDGMVIGHNTDIEGFELAIKHTNYDIIGKNVLILGAGGVSPSIIVALNNMNVKKILISNRTHSKAENLKKIFNEIEIIKWGTFTDFDMIVNATSLGLKKDENIDLDYSKIGSKKFFYDVIYNPSETNFLRSAKKNGNKIENGKRMFIYQAQASFKIWNNLEPKSR

SEQ ID NO: 85017 - protein, 168 aa, Unknown
  Bacterial polypetide isolated from the Sargasso Sea
  misc_feature (164)..(164): Xaa can be any naturally occurring amino acid
MKKYIVIGNPIEHSLSPKLHNYWIKKNNIKATYEKKKINEKDIEFLVSSIKKEEITGVNVTVPFKKKIIPFMDKLSPEANESQSVNTIYSQNGKLIGHNTDISGFELGIKYSKYDVKNKIVFILGAGGVVSSIIIALKKMGAAKIIISNRTKSKAEDLKSFFNXLEIV

SEQ ID NO: 85018 - protein, 166 aa, Unknown
  Bacterial polypetide isolated from the Sargasso Sea
MKKNKAIVIGQSVSKSLSPTIFNYWFSKYKIKGKYEYLEIQKNKLEKKIFTKLINMKIKGFNVTIPHKESIMPYLDFVDSHSKKIGAVNCVTIKRKKLHGSNTDWVGYYKTINKITKKQERVRNQAIVVGYGGASKAIVYALLKLKYKKIHIFNRTLNKMKNIKNK

SEQ ID NO: 85019 - protein, 72 aa, Unknown
  Bacterial polypetide isolated from the Sargasso Sea
MKKYLVIGNPINHSLSPKLHNYWIKQNKINANYEKKKLSNNELKELILDVKKGKINGVNVTVPFKNEIIPYL

SEQ ID NO: 85020 - protein, 250 aa, Unknown
  Bacterial polypetide isolated from the Sargasso Sea
PDIHISFASQFQLERYSYKKIQSTENDFEKDINDFFKTGGVGLNVTVPFKGLAYNLCDKLDQSAAQCKSVNTIMVDSGKLIGYSTDGRGLIDDFLDKKITLKDSKILIIGAGGSAASIVSSVLLHGNIKEISIHNRTKSNALKLLDLFETNRLLVHEDGDEYDIVINTTPISMNVDDIILPPELIINKPICYDLFYDKKKTLFQKWAEKNEPKANFDGLGMLIHQAKHSFKIWNNLSPDIDGLEELLRRN

SEQ ID NO: 85021 - protein, 85 aa, Unknown
  Bacterial polypetide isolated from the Sargasso Sea
MKKYLVIGNPIEHSLSPKLHNYWFKKKNINAIYDKKLLNESDIENIISKVKKEEIHGLNVTVPFKKSVIPFLDELTSEANESKSV

SEQ ID NO: 85022 - protein, 207 aa, Unknown
  Bacterial polypetide isolated from the Sargasso Sea
MKKYLVIGNPIEHSLSPEIHNYWLKKNNINAVYEKRKLNGDDIIELIDEIKSDKISGVNVTVPFKRDVIPFLDDLSKEANITQSVNTIFFKNNKITGHNTDIAGFQISLKDTEFNLNNKKVLILGSGGVVPSIIYALEKSGVSQITICNRTKSKAIELKKTFSNLKIVEWGMVPEFDMIINATSLGLDKNDKIDLNFTNINKNKFFY

SEQ ID NO: 85023 - protein, 134 aa, Unknown
  Bacterial polypetide isolated from the Sargasso Sea
MRKYLVIGNPIEHSLSPLLHNFWIKKYNLNAFYEKQLLEKKDIEKILSDIRISKIQGINVTVPFKNTVIPFLDQLSDTAQKTQSVNTIFKRQNKLVGDNTDVYGFSEAVKLTNFNPANKSALILGAGGVVPSIL

SEQ ID NO: 85024 - protein, 142 aa, Unknown
  Bacterial polypetide isolated from the Sargasso Sea
MKRFLVIGNPIEHSLSPKIHNHWLKENNIEAIYDKKKLNENELKSIISQVKDEKINGINVTVPFKKVVIPFLDKLSPEPKDTQSVNTIYLQNGNVIGHNTDIAGFELAIKYAKFDLNNKKIFVLRAGGVAPSIIYALKKMKV

SEQ ID NO: 85025 - protein, 249 aa, Unknown
  Bacterial polypetide isolated from the Sargasso Sea
LKLHRISGTYEILEVDDAGLDRLFCDKVHLYRGLNVTIPHKVRVFDYMDEVSDSARVIGAINCITVENKKLVGHNTDADGFMNGLASFNRDLDFSNMNVLVIGAGGASRAVIYSFLMKSTGQVTVTNRSSDRLASLEKVFNDKIRYMDWQKLNDSVSQFNLIINCTSQGMKGKNDFTLDFSSMQQGLSVIDLVYNPLETKLLIDAKSCGCQILNGVPMLLNQAALSWKLWLNISPDISDDIIQFVEDKI

SEQ ID NO: 85026 - protein, 242 aa, Unknown
  Bacterial polypetide isolated from the Sargasso Sea
MKKYLVIGNPIEHSLSPMLHNYWIKQSDIKAVYEKKLLEEKDLKNIVNDIKNDKISGINVTVPFKKSIIPFLDKLSIEARRTQSVNTVSKINNEIYGHNTDARGFDHSLNQLNYKAKGKKAFVLGAGGVTSSIIWALEGLGISKIFISNRTKQKAEEIKKLFPKIEILDWGKKPKEFDMVVNTTSVGLNNNEEIAIDFSDCKEKLFYDVIYNPSQTKFLLKAGKDFRNETKKRLGMFIYQAR

SEQ ID NO: 85027 - protein, 138 aa, Unknown
  Bacterial polypetide isolated from the Sargasso Sea
MKKYIVIGNPIDHSLSPKLHNYWLKENNINAIYDKKKIDEKDLQTIISQVKEKKINGINVTVPFKKSVIQYLDKLSPEAEQTQSVNTIILSNNDLVGYNTDISGFTKAIKDLNFNIQGKKIFILGAGGVVPSIIFALN

SEQ ID NO: 85028 - protein, 71 aa, Unknown
  Bacterial polypetide isolated from the Sargasso Sea
MNSYFVIGNPIDHSLSPLLHNYWFKKYKIQSEYKKKKLEENDLKDFTNDIRSNHSIKGANVTVPFKKKNNT

SEQ ID NO: 85029 - protein, 223 aa, Unknown
  Bacterial polypetide isolated from the Sargasso Sea
MKKYLVIGNPINHSLSPELHNHWIKQNGLDAIYEKRKLDNNDLENLILDIKKGKIKGVNVTVPFKNTIIPFLDDLSTEAKKTHSVNTIHLKNKKVVGHNTDITGFETAIQNINFDFKKKKIFILGAGGVVPSIIYASVKMGSSEIMISNRTERKAMEIKNIFNNIKLVKWGEIPDFDVVINATSLGLNQDDKINLDFTKVGKNKLFYDVIYNPSETNFLNLGK

SEQ ID NO: 85030 - protein, 203 aa, Unknown
  Bacterial polypetide isolated from the Sargasso Sea
MKKYLVIGNPIEHSLSPTLHNHWIKENNINAIYDKKCLKENDIKEIIKDVKNEKINGVNVTVPFKKVVIPFIDELTPMANEVKSVNTIFKKNNKVIGDNTDIEGFANSLKHINYIVKNKRVFILGAGGVAPSIILALKRLEASKIVLSNRTKEKADNLKKIYTDLEIVDWGQIPKFDMIINATSLGLKKDDEIKLNYADIGPQ

SEQ ID NO: 85031 - protein, 264 aa, Unknown
  Bacterial polypetide isolated from the Sargasso Sea
MHKEANYIRIAGVIGDPINHTRSPLIHNYWIKKNNINCFYIPLRVESSDLENKLKYIRELGFSGLNVTIPHKEKIITLADEIMESAKLIGAANTIYFKNGKTIVDNTDTYGFYQSILKNFPKYNFKKEKVLIFGSGGAARAVTSVFLKEKAFEISIINRNREKAERVRDDLSSRIKIYDWKDYSKALRDVSTVVNTTSLGNLGSEKFSIDLKGVRENGIAIDLVYNPLKTSFMKKAEKENLKVINGLDMLIYQAKKGFQQWFKK

SEQ ID NO: 85032 - protein, 95 aa, Unknown
  Bacterial polypetide isolated from the Sargasso Sea
MTKKAFAVIGNPISHSLSPVLHNYWFKKYNINANYVSMNLEEKNIFEIIKKIKNKELNGLNVTLPYKQKVIPHLDELVNDAKSTNSVNTIYLDEQ

SEQ ID NO: 85033 - protein, 112 aa, Unknown
  Bacterial polypetide isolated from the Sargasso Sea
MKKYIVIGNPINHSLSPKLHNYWFKENNIKAIYEKCLLDEANIKSVIEQIKKKKIFGINVTVPFKKKIIPCLQKLTKEASISNSVNTVYLENDLIVGHNTDIAGFELAIRHS

SEQ ID NO: 85034 - protein, 258 aa, Unknown
  Bacterial polypetide isolated from the Sargasso Sea
MKKYLVIGNPIKHSLSPRLHNHWFKQNNIDAVYEKKQIKESAIEGIISQMRNGEIEGINVTVPFKKSVIPFLDELEISRKVPSVNTIYKKKDKIIGTNTDVHGFKLALLQTKYNFKGRKILILGAGGVAPSIIFALEQLEVAVIMLSNRTKEKAENLKKLFPQLELVKWGDIKDFDVIINATSLGLKESDKIPINYDQIDAGKFFYDLIYNPKKTNFLLEAEKRGHKIENGKMMFVYQAQEAFRLWTVAPNQRVGLLP

SEQ ID NO: 85035 - protein, 206 aa, Unknown
  Bacterial polypetide isolated from the Sargasso Sea
MKQFAVIGSPISHSLSPNLHEEIFRQLNVNASYSRVDILPENLGNFFLNNELDGFNVTIPHKISIMNHLRDLDITAEKISAVNCVHNNIGYNTDWIGFLHAMNLNNVKLENKNCLIIGAGGAAYATAYALIHCKVRSISITNRSKDSRTNLMNWINNQFDNKNGFKPNVIINCTPLGMWPNLNAIPTDQYINESDIAIETIYNPKK

SEQ ID NO: 85036 - protein, 29 aa, Unknown
  Bacterial polypetide isolated from the Sargasso Sea
MKKFFVIGNPISHSLSPELHNFWIKKNKI

SEQ ID NO: 85037 - protein, 257 aa, Unknown
  Bacterial polypetide isolated from the Sargasso Sea
MKKYLVIGNPIDHSMSPLLHNYWIEKNKIKAVYDKKLINKDDIQKIILELRLEKLHGVNVTVPFKNEVVSFMDTLTKEAEETKSVNTIYLKNNRIVGHNTDIAGFELAIRSCGYNVQKKNIFIFGAGGVVPSIIVALKRMGASRIFIYNRTVTKSENIKKFFKNIEIIEKDNIPENVDMLINASSLGINKTDKVNLQYDKIGKNKFYYDVIYNPPETNFLKSAKKLGNKTENGKKMFIYQAHQAFAIWHNILPKIDE

SEQ ID NO: 85038 - protein, 194 aa, Unknown
  Bacterial polypetide isolated from the Sargasso Sea
MKKFLVIGNPIEHSLSPKLHNYWIKKNNLDAIYGKLETYDNDLSELCKSIKNGDLEGLNVTVPFKKSIIPHLDILSSNALRTQSVNTISLNKGNLIGDNTDINGFELSIRKLNYDVSDKTVLILGAGGVVSSIIFSLLRMKASKIFLSNRTKKKAENLKNLFNEINVVEWGDLPEFDMVVNATTLGLSKVDKFG

SEQ ID NO: 85039 - protein, 89 aa, Unknown
  Bacterial polypetide isolated from the Sargasso Sea
MLGIMQPFMAIEFSIGGAVRGAGDTKSPLIITLIGLVLVRVPLAFIFYGLGLPIEWIYATLIADYFLKGMLLAYRYKSRRWMKVLKMDN

SEQ ID NO: 85040 - protein, 124 aa, Unknown
  Bacterial polypetide isolated from the Sargasso Sea
MKKYLVIGNPIDHSLSPKLHNYWLKENNIDAIYDKKKLDKNDLKTIISEVKEEKINGINVTVPFKKEVIPFLDKLSLEAKDTQSVNTIYLQNGITIGHNTDIAGFDLAIKYAKYDLANKKIFIL

SEQ ID NO: 85041 - protein, 262 aa, Unknown
  Bacterial polypetide isolated from the Sargasso Sea
MKKYLVIGNPIDHSLSPLLHNFWIRKHGIDAIYEKKLLKQNDIETIISEMRKKKIQGINVTVPFKKDVIPFLDKLSETAKRTQSVNTIFEEQDKLVGDNTDVFGFSEAIKSTNFNLKNKKALILGAGGVVPSLVLALKNLGILEIILSNRTKAKAEDLKKNFPFLKVINWGEKIKSDLIINATSIGIKQNEEIKFDYSNLNGQLFYDVIYNPSETKFLENAKKSGKKIENGKNMFIYQAMKAFEIWHGVRPEINQEISELIK

SEQ ID NO: 85042 - protein, 172 aa, Unknown
  Bacterial polypetide isolated from the Sargasso Sea
MKKYLVIGNPIEHSLSPKLHNYWLKENNIEAIYDKKKLDEKDLQSIISEVKEEKINGINVTVPFKKAVIPFLDELSPEAKDTQSVNTIYFQNGITIGHNTDIAGFELAIKHAKFDISGKKIFVLGAGGVAPSILFSLKKMKASKIILSNRTKEKAENLKNLFEGLEIVDWGE

SEQ ID NO: 85043 - protein, 186 aa, Unknown
  Bacterial polypetide isolated from the Sargasso Sea
MRKYLVIGNPIEHSLSPLLHNFWIKKYNINAFYEKQLLEKNDVEKFLSDVRANKFHGINVTVPFKNTVIPFLDQLSDTAQKTQSVNTIFKKQNKLVGDNTDVYGFSEAIKLTNFNPTNKKALILGAGGVVPSVLLALKNMGFNQITLSNRTKEKAINLKKSFPFIKVINWGETVKSDLIINATSVG

SEQ ID NO: 85044 - protein, 224 aa, Unknown
  Bacterial polypetide isolated from the Sargasso Sea
MDEARPRLAAVLGNPISHSKSPRMHNYWLKQNKVNGYYIPIKVELEDFEQTIRALVNMGFSGVNVTIPHKLSALKIADKSSSTAQYIGAANTLTFTKENKIYADNTDAYGFINNIKFKYPDWTPKKGISVVLGAGGASRAVIAALLSEGSEKIIILNRTIEKAEALKKDYDNKITVEPWKNINEVVASSSNIINTTSLGMNDETFVAITPKLYLKKLLFQTWFT

SEQ ID NO: 85045 - protein, 137 aa, Unknown
  Bacterial polypetide isolated from the Sargasso Sea
MKKYLVIGNPIDHSLSPKLHNFWFKKNNIKAIYEKKQIDEDEIEEIIAELKKEKINGINVTVPFKRSVIPFIDELSSEAKKTQSVNTIYKKNNKILGHNTDISGFELAIRKKGYILNGKTIFILGAGGVVPSIILSL

SEQ ID NO: 85046 - protein, 226 aa, Unknown
  Bacterial polypetide isolated from the Sargasso Sea
MKKYLVIGNPIEHSLSPLLHNFWLKKHGIKAIYEKQLVEKNDIEKIINDMRESKIQGINVTVPFKKVVIPFLDQLSDTAKKTQSVNTIFKKQNKLVGDNTDVHGFSEAIKLTNFNLTNKKALILGAGGVVPSIILALKSMGTSEIILSNRTKEKADDLKKSFPFLKVISWGETIKSDLIINATSIGIKQNEEIKLDHSKLDGQLFYDVIYNPPKTKFLENAKKSGK

SEQ ID NO: 85047 - protein, 229 aa, Unknown
  Bacterial polypetide isolated from the Sargasso Sea
MKKYIVIGNPIEHSLSPKLHNYWFEKNNINANYGKKKIDKSEIQKIISEIKDNSLDGANVTVPFKSDVIPFLDMLSEESEITQSVNTIYMHDKKLVGHNTDIKGFELSLKGAQFELKNKSIFILGAGGVVPSIIYALEKLGVSKITVSNRTKQKAENLKKTFLNVSVVDWGDQPEFDMIINATSLGLNIEDKIDLNFNKMNKEKLFYDVIYNPKETNFLRAGKNLGCQV

SEQ ID NO: 85048 - protein, 233 aa, Unknown
  Bacterial polypetide isolated from the Sargasso Sea
MTLFVIGKPINHSLSPLIHNFWIKKHQIDLEYKKMEVDKDTLPSLIEKVRSREITGLNVTLPYKKDIIMYIDEISYSAKDIGAVNTIFLKKNKVYGDNTDGIGFTRSLEKQTEFNFKNKSIYILGAGGASYGIISELIKKKIQTIYIANRTKQKTIQLINYFKSKDQDLNLKFADWEDLSPGSDVDLIINTTSFGMMENEFLEINIDNLKDTLILVDIIYNPKRDRSYLNFQE

SEQ ID NO: 85049 - protein, 93 aa, Unknown
  Bacterial polypetide isolated from the Sargasso Sea
MKKYLVIGNPINHSLSPELHNHWIKQNGLDAIYEKRKLDNNDLENLILDIKKGNIKGVNVTVPFKNTIIPFLDDLSIEAKKTHSVNTIHLKNK

SEQ ID NO: 85050 - protein, 81 aa, Unknown
  Bacterial polypetide isolated from the Sargasso Sea
MKKYLVIGNPIEHSLSPILHNYWIKENEINAIYEKKKLEEHELDDLILNIKNKKIDGINITVPFKKKIIPYLDKLSDEASK

SEQ ID NO: 85051 - protein, 66 aa, Unknown
  Bacterial polypetide isolated from the Sargasso Sea
MKKFFVIGNPIDHSLSPELHNFWIKKNKINAVYDKIKLEESDLKDFINKLRNDEIHGINVTVPFKN

SEQ ID NO: 85052 - protein, 260 aa, Unknown
  Bacterial polypetide isolated from the Sargasso Sea
SVAANTSVFAQESGLVISYGKHLVSPESFNEAIDFLVDSGHVGFNVTVPFKEDAYKRVDTSDDIASEAQAVNTIRVDCEGQLHGFNTDGLGLTRDLVHRHGISVGNSDILILGAGGATRGVIGPLLDEKPNSLTVTNRSREKGEDLMRRFSKRYPHSNLYFRDMKELDGSYDLVINATSIGLSGAFDLLGENVVMGKICYDLSYGSGASFATWARSVGAATSVDGLGMLVEQAAESFLIWHGHRPDTDHLYEQLRAKIDD

SEQ ID NO: 85053 - protein, 180 aa, Unknown
  Bacterial polypetide isolated from the Sargasso Sea
MKKYLVIGNPIKHSLSPKLHNYWIKENNIDAIYDKKQLNESDIERIIKEVKNEKISGINVTVPFKKSVISFLDELTPLAKEAQSVNTIFKKNNKVIGDNTDIGGFEQSLKNINYSVKNRKVFIIGAGGVAPSIILALKRLGAAKINLTNRTKEKAEDLKKNYPNLEIVNWGKNTDFDMII

SEQ ID NO: 85054 - protein, 108 aa, Unknown
  Bacterial polypetide isolated from the Sargasso Sea
MKKYLVIGNPIEHSLSPKLHNYWIKENNINAVYDKKKLEKNDIKAIINELKNENINGLNVTVPFKKYIIPYLDELTPLAKEAHSVNTIFKNKNKIIGDNTDIAGFVKG

SEQ ID NO: 85055 - protein, 92 aa, Unknown
  Bacterial polypetide isolated from the Sargasso Sea
MKKYFVIGNPIDHSLSPKLHNYWFKENKIDAVYDKKKIVENDLKIIISEFKEKKINGINVTVPFKKKIIPYLDKLSPEAEQTQSVNTITLNN

SEQ ID NO: 85056 - protein, 186 aa, Unknown
  Bacterial polypetide isolated from the Sargasso Sea
MKKFFVIGNPIEHSLSPKLHNYWIKSNNLKAVYDKKKLDISELDNLIKEVREKKIDGINVTVPFKNSVIPFLDKLSNEAQKTQSVNTIYLRDGMVIGHNTDIEGFELAIKHTNYDIVGKKVLILGAGGVSPSIIVALNNMSAKKIFISNRTQSKAENLKKTFNEIEIIKWGIIPDFDMIVNATSLG

SEQ ID NO: 85057 - protein, 123 aa, Unknown
  Bacterial polypetide isolated from the Sargasso Sea
MRKYLVIGNPIEHSLSPLLHNFWIKKHNINALYKKQLLEKKDVEKILSDVRASKLHGINVTVPFKNTVIPFLDQLSDTAQKTQSVNTIFKSQNKLVGDNTDVYGFSEAIKLTNFNPVKKNALI

SEQ ID NO: 85058 - protein, 87 aa, Unknown
  Bacterial polypetide isolated from the Sargasso Sea
MKKYLVIGNPINHSLSPELHNHWIKQNGLDAIYEKRKLDNNDLENLILDIKKGKIKGVNVTVPFKNTIIPFLDDLSTEAKKTHSVNT

SEQ ID NO: 85059 - protein, 312 aa, Unknown
  Bacterial polypetide isolated from the Sargasso Sea
LFGLDEESRKLSITYTQILVGFTPVFAISMVLGTAQRAAGDAKTPLYIGLVTNVVNIVLLIGLVEGRYGMPEMGVVGAALAAGLAFTFNSVLVLGLWFGKKLAVSVGKAGSMTYDRLKQLITISYPAGLESFIFQFGMLSFFWIVALYGTDAVAAYNIGVNVLMLSFTVGNGFAIAGATLTGQHLGASDPDKAYDSGFKAARLTMLSMGSLGILLAIFSRELAGFFINDIDVINKTVVFVWMLGIMQPFMAIEFSIGGAVRGAGDTKSPLIITLIGLVLVRVPLAYLFYNLGLPIEWILCTLIAEYFLKECC

SEQ ID NO: 85060 - protein, 214 aa, Unknown
  Bacterial polypetide isolated from the Sargasso Sea
MKKYFVIGNPIDHSLSPKLHNHWFKQNNINALYDKKKVSETDLERIIAEVKTGKVDGINVTVPFKKSVIPFLDELTSLADKTQSVNTIFKKENKVIGDNTDVEGFERGLKHINYDVKNKKVFILGAGGVVPSIILALKNQGTSKIILSNRTETKARDLKKIYPNLEIIGWGENTNFDMIINATSLGLKSDDQIQLDFSKTGSNKLFYDVIYNPP

SEQ ID NO: 85061 - protein, 186 aa, Unknown
  Bacterial polypetide isolated from the Sargasso Sea
MKKFLVIGNPINHSLSPKLHNFWIKKYNLDAIYGKLETHKSDLEELCKNLKQGQLNGLNVTVPFKKEIIPYINVLSGHALRTKSVNTISVENGNLIGHNTDIDGFELSIKKLNYDVTNKTIIILGAGGVVPSIIYALKRMNASKIFVSNRTKSKADELKDLFNGLMILDWGDLVDFDMIINATSIG

SEQ ID NO: 85062 - protein, 108 aa, Unknown
  Bacterial polypetide isolated from the Sargasso Sea
MDRYVVFGNPIGHSKSPLIHRLFAAQTGEQLHYSTMLAPLEDFTACAREFFQHGRGANVTVPFKEEAYRLANTLTERAQRAGAVNTLSKLADGTLLGDNTDGAGLVRD

SEQ ID NO: 85063 - protein, 222 aa, Unknown
  Bacterial polypetide isolated from the Sargasso Sea
MKKYVVIGNPIEHSMSPKLQNYWIKKNKLNAQYDKMKLDENEIESVIEQLKNGSISGINVTVPFKKSVIPFTDELTSVSQETNSVNIVYKKDEKIIGDNTDVFGFQKALKLTNFDISEKKAFILGAGGVAPSIIHALKSMGVSDIVVSNRTIERADILKKKYPFIKIIKWGDTPNADIVINATSLGLRKGENLKIDYGKIGPQKLFYDVIYNPEKNNFLFKA

SEQ ID NO: 85064 - protein, 150 aa, Unknown
  Bacterial polypetide isolated from the Sargasso Sea
MKKYFVIGNPINHSLSPKLHNYWLKENNIDAVYEKMELSENDIEGIISEIKNEKINGINVTVPFKKSVIPFLDQLTPLAREAQSVNTVLKKDNKIIGDNTDIGGFEQGLKHINYSIKNKKVFILGAGGVASSIIIALKRLGVSKIILSNR

SEQ ID NO: 85065 - protein, 167 aa, Unknown
  Bacterial polypetide isolated from the Sargasso Sea
MKKYLVIGNPIDHTLSPKLHNYWIKKNSISAVYDKEKFNHNNLKTLILRIKDKQISGVNVTVPFKKEVIPYLDELTPEAKGTQSVNTIYLSDNKIVGHNTDIEGFELAIKKTNYNLKEKEILILGAGGVVSSIIYALIKMKASKITLSNRTKNKAENMKILFKNFII

SEQ ID NO: 85066 - protein, 282 aa, Unknown
  Bacterial polypetide isolated from the Sargasso Sea
MVLCFEVALNKYLVLGNPIDHSLSPQIHQFFAQESGLVISYGKHLVPPESFNEAIDFLVDSGHVGFNITVPFKEDAYKRVDTSDDIASEAQAVNTIRVDGEGQLHGFNTDGIGLTRDLVHRHGISVCNSDILILGAGGATRGVIGPLLDEKPNSLAVTNRSKEKGEDLVHRFSRRYPHSNLYFRDMKELDGSYDLVINATSIGLSGAFDLLGENVVMGKICYDLSYGSGASFATWARSVGAATSVDGLGMLVEQAAESFLIWHGHRPDTDDLYEQLRAKIDD

SEQ ID NO: 85067 - protein, 264 aa, Unknown
  Bacterial polypetide isolated from the Sargasso Sea
MKNYSVIGNPIDHSLSPKLHNTWLKTNNINAFYDKQKLEGKEIENFIQKIKQQEIAGANVTVPFKKKVIPFLDKLSFEAEKTQSVNTIVFENNNLVGHNTDVIGFTRAITDLNFNIKGSKIFILGAGGVVPSIIFALNKMGVSQITISNRTKEKAENLKIKFNNLKIIDWGTIQDFDMIINATSLGLNKEEINLDFTRIGNGKLFYDVIYNPSETNFLKEGRKLGNKVENGKLMFLYQAFEAFKLWHGIEPQINENIMRLLEND

SEQ ID NO: 85068 - protein, 265 aa, Unknown
  Bacterial polypetide isolated from the Sargasso Sea
MKKYLVIGNPIEHSLSPKLHNYWIKENNLNASYEKKLIEKSEIKGIIDDLKNNKISGVNVTVPFKAQVIPFLNKLTPVSQETGSVNTIYKLNDEVVGDNTDVDGFCAALKKTQYNFKSKKAFILGAGGVAPSIICGLKKMGISNISLSNRTRKKAEILKKRFTDLKLVNWGETSNADIIINATSLGLKENDEIKLDYSTIGSNKLFYDVIYNPPETKFLLNAKKLNNKIENGKLMFIYQAQLAFKIWHNVLPKIDDNTLNLMDHD

SEQ ID NO: 85069 - protein, 274 aa, Unknown
  Bacterial polypetide isolated from the Sargasso Sea
MIKKYGVIGDPIEHSLSPIIHKEFSNHFGIQLQYEKYLVKDNQLSDFINQSKSSFWAGLNLTIPHKIKAIDYVDELDLSAIEAGAINTIHFYDGKSKGYNTDGSGLIYDLKNNLNIKIQNKKILIIGAGGAVKGILSKLILECPDDIYIYNRTKNKIKEIQENYLKKFKINEINNLCNSEINFDLIINAIPSSFIQGLDNFIDYSVLNKSTVFYDLSYGSISGNFKAWCKSKNVTYHDGLGMLIEQAADSFLIWEGKRPQITDRIKKIITDSYL

SEQ ID NO: 85070 - protein, 263 aa, Unknown
  Bacterial polypetide isolated from the Sargasso Sea
MKKYLVIGNPINHSLSPKLHNFWIKQNRIDAIYDKAKLNLDQVENLISQVKSKRINGINVTVPFKNTIIPYVDQLSTEAEKTKSVNTIYLNNDKVIGHNTDIDGFEKAINKINFKVSDKRIFILGAGGVVPSIIYALNKMGAFNIFISNRTKAKAQMVKDIFNNLSILDWGDVPEFDVIINATSLGLNKNDNIELDLSSTGKNKLFFDVIYNPNETNFLKNGKKLGNKCENGKFMFIYQAFSAFKLWHNIEPTINSETIKLLE

SEQ ID NO: 85071 - protein, 263 aa, Unknown
  Bacterial polypetide isolated from the Sargasso Sea
MRKYGVIGDPINHSLSPLLHGEIYSQIGMPISYNKQLIKNSELSSFVLDNKLQSYNVTIPHKESILDFLDSLDSVAVEIGAVNCVMNKKGFNTDWLGFIKAMAFNKVEIKDKNCLIIGAGGVQKAICYALIKSKSKSIDVINRSRRRKKELVRWISSYGIKNNKKEMPDIIINCTPIGMWPNTENLPININKIHTNQIIVDTIYNPIETEWIKLSRKKGAFTIGGLDMFIFQGIASAEIWENKNITNSLKLNQIKKVLKLELC

SEQ ID NO: 85072 - protein, 267 aa, Unknown
  Bacterial polypetide isolated from the Sargasso Sea
MSKFLVIGNPIEHSLSPPIHNYWFKKYNFVNHSYEKKKVNEEDLEKIVDALRKNELKGINVTVPFKQKIIPYLDGLDYKAKKTQSVNTLLKKDNKVFGYNTDSVGFCATLSKKYNHETAGNYKFFIIGAGGVTSSIIDGIGEANKIYVTNRTKGRAEELKKKFPQIEIINWGTKPPICDVIINTTSVGLTKDENLKIDFTNYLNNKHALFYDLIYNPKETNFLKNAKLRGNKIMNGQMMFLYQAQASFQLWTDVNPEINDEIIKILE

SEQ ID NO: 85073 - protein, 189 aa, Unknown
  Bacterial polypetide isolated from the Sargasso Sea
MKKYLVIGNPIDHSLSPKLHNYWIKKNKIDAIYEKKLLVKDDLEKIISKLKLGEINGINVTVPFKNTVISYVDELSVEAKKTQSVNTIYCENNKTIGHNTDIAGFELGLRHFKYNVIGKKVLILGAGGVVPSIIFALKKMKVSHIVLSNRTKSKAENIKKIFPEIEIIDWGKTGEFQYDYKCNKYRFEK

SEQ ID NO: 85074 - protein, 264 aa, Unknown
  Bacterial polypetide isolated from the Sargasso Sea
MKKYLVIGNPIDHSLSPKLHNYWFEKNNIDANYDKRKIIKSEIQEVISEIKDNKLDGINVTVPFKNEVIPFLDMLSEESKITQSVNTISIHDKKLVGHNTDIKGFELSLNETQFNPQNKTVFILGAGGVVPSIIYALEKLGVSKIIVSNRTKHKAENLKKNFSNISVVDWGDQPEFDLIINATSLGLSKGDNIELNFKNINNEKLFYDVIYNPKETNFLKTGKSLGCKVSNGKMMFIYQAFEAFKLWHKVQPEINEDLKNFLDI

SEQ ID NO: 85075 - protein, 235 aa, Unknown
  Bacterial polypetide isolated from the Sargasso Sea
MKKFFVIGNPIEHSLSPKLHNYWIKSNYLKAFYDKKKIDISELENLIKEVREKKIDGINVTVPFKNSVIPFLDKLTNEAQKTQSVNTIYLRDGMTIGHNTDIEGFELAIKDTNYDIVGKKVLILGAGGVAPSIIVALNNMNVEKIFISNRTQSKVENLKKTFHKIEIVKWGTMPNFDMIVNATSLGLQKDDNIPIDYSKFDSDKFFYDVIYNPSETNFLKAAKKNGNKTENGKKM

SEQ ID NO: 85076 - protein, 264 aa, Unknown
  Bacterial polypetide isolated from the Sargasso Sea
MKKFLVIGNPIEHSLSPKLHNYWIKKHSLDAIYGKLETYDNDLSELCKSIKKGDLDGLNVTVPFKKSIIPHLDILSSNALRTQSVNTISLNKGHLIGDNTDINGFELSIRKLNYDVSDKTVLILGAGGVVPSIIFTLLRMKASKILLSNRTKEKANNLKEFFKEINIIDWGDLPKFDMIINATTLGLNKVDKFGIDFSKVGQNKLFYDVIYSPFQTEFSEAGNAKGNVIENGLNMFLFQGQQAFNIWHNVEPEINKELIEFLKN

SEQ ID NO: 85077 - protein, 160 aa, Unknown
  Bacterial polypetide isolated from the Sargasso Sea
MIKKFFVIGNPIEHSFSPKLHNYWINQNNIKAIYDKKKLDIDNLENIILEIKDKKISGINVTVPFKKAVIPYLDKLSPDADQTQSVNTIILDNNNLVGHNTDIAGFARAIKDLNFKMEGKKILILGAGGVVPSIIFALRKMNALEIIISNRTKQKAENLK

SEQ ID NO: 85078 - protein, 212 aa, Unknown
  Bacterial polypetide isolated from the Sargasso Sea
MKKFCVIGNPIDHSLSPKLHNFWFKKNKIEAIYEKKLLEEKEIPKLIDSIRKSEINGVNVTVPFKNSVIPFLDSLSSEAKKTNSVNTICIEEDKIIGHNTDIAGFELALRYINYDVKRKKALIIGAGGVSTSIILALKNMGCENINLTNRTFEKAEKIKETFNDITVQKWGDVPEFDIAINATSVGLNKENFDLDLNKFGNNKFFYDVIYNP

SEQ ID NO: 85079 - protein, 230 aa, Unknown
  Bacterial polypetide isolated from the Sargasso Sea
MKKFLVIGNPIEHSLSPKLHNYWIKKNNLDAIYGKLEAFENDLSELCKSIKKGDLEGLNVTVPFKKSIIPHLDILSSDALRTQSVNTISLNKGHLVGDNTDIYGFELSVRKLNYDVSDKTVLILGAGGVVPSIILSLLRMKVSKIFLSNRTKKKADNLKNIFDEINVVEWGELPNFDMIINATTLGLNKVDKFGIDFFQAGQNKLFYDVIYAPFQTEFSDAGNAKGNSIE

SEQ ID NO: 85080 - protein, 297 aa, Unknown
  Bacterial polypetide isolated from the Sargasso Sea
MIKAAVIGNPIKHSRSPLIHNHWLRKSGINGSYEALFAENEVEFINLIKKLRVSGYSGFNITVPFKKIASEIVDERINNETSYCNKDLPAINTIKIENDKLVGYNTDYYGFSSVLFNNFKSMESVKNIIILGAGGAAKSILYGLSETFKDSKDTKSIKVTILNRTLSKADELSQALKNIDSPFKFYLGSLGEFEDNIPNCDLLINSTSLGMEGIKVNLDISLENSKKDLFVYDIVYTPLQTQLLLSAKKFNRSFTNGLGMLINQAAPAFCLFYNYNNLDSLLKDTALYEKLEKDIGV

SEQ ID NO: 85081 - protein, 265 aa, Unknown
  Bacterial polypetide isolated from the Sargasso Sea
MKNFLVIGNPIDHSLSPKLHNYWFKKNNIQAVYEKKLINKENIENIFNKIKKRELNGINVTVPFKKSVIPFVEKLTPEANKSNSVNTIYLEDNKIIGHNTDIAGFELSIRHIKYEIKNKKIFILGAGGVVSSIILGLKNMGCSKIFISNRTTQKAKDLKNYFNDLEIIEWGKVPEFDMIINATSLGLKKNDEIKLNYKEIGSNKFFYDVIYNPIQTSFLKKAKEFGNRTENGKMMFIYQAHQAFTIWNNVMPKIDDEVIKLLEND

SEQ ID NO: 85082 - protein, 264 aa, Unknown
  Bacterial polypetide isolated from the Sargasso Sea
MKKYLVIGNPINHSLSPELHNHWIKQNGLDAIYEKRKLDNNDLENLILDIKKGNIKGVNVTVPFKNTIIPFLDDLSIEAKKTHSVNTIHLKNKKVVGHNTDITGFETAIQNINFDFKKKKIFILGAGGVVPSIIYASVKMGSSEIMISNRTERKAIEIKNIFNNIKLVKWGEIPDFDVVINATSLGLNQDDKINLDFTKVGKNKLFYDVIYNPSETNFLSLGKKLGNKYENGKLMFIYQAFSAFKLWHGIEPSINEETIKILDR

SEQ ID NO: 85083 - protein, 261 aa, Unknown
  Bacterial polypetide isolated from the Sargasso Sea
MPEMGVVGAALAAGLAFTFNSVLVLGLWFGKKLAVSIGKAGSMTYDRLKQLITISYPAGLESFIFQFGMLSFFWIVALYGTDAVAAYNIGVNVLMLSFTVGNGFAIAGATLTGQHLGASDPDKAYDSGFKAARLTMLSMGSLGILLAIFSRELAGFFINDIDVINKTVVFVWMLGIMQPFMAIEFSIGGAVRGAGDTKSPLIITLIGLVLVRVPLAYLFYNLGLPIEWIYATLIADYFLKGMLLAYRYKSRRWMKVLKIDN

SEQ ID NO: 85084 - protein, 264 aa, Unknown
  Bacterial polypetide isolated from the Sargasso Sea
MKQFAVIGSPISHSLSPNLHEEIFRQLNVNASYSRVDILPENLGNFFLNNELDGFNVTIPHKISIMKHLSNLDTTAEKISAVNCVHNNIGYNTDWIGFLHAMNLNNVKLENKDCLIIGAGGAAYATAYALIHCKARSISITNRSEDSRTNLMNWINNQFDNKNGFNPNVIINCTPLGMWPNLNAIPTDQYINESDIAIETIYNPEETTWLKNCKKRGAKTISGLDMFIGQAIASIEIWLNISIEKKINIKMIKNILKAELCLQE

SEQ ID NO: 85085 - protein, 263 aa, Unknown
  Bacterial polypetide isolated from the Sargasso Sea
MKKYLVIGNPIDHSLSPQLHNHWIKVNKIDAVYEKKKINQNEIKDLIRNVKDKKISGINVTVPFKQEVITYLDELTDQAQKTQSVNTIYLGTNGVVGHNTDVDGFKSSLKDEYDPKNKNILILGAGGVVPSIIFALKNMRAQSITISNRTREKAEYLKKSFENIKIVDWGQIPNFDMIINATSVGLNVEDEINLDFSKTNNKFFYDVIYNPTETNFLKAGKKFGNKIINGKLMFIYQAYYAFEIWHKLLPKVDEEVLKLLEND

SEQ ID NO: 85086 - protein, 144 aa, Unknown
  Bacterial polypetide isolated from the Sargasso Sea
MKKYLVIGNPIEHSLSPQLHNHWIKIQKINAIYEKRKLNKNEIKDLIGDIKNQKINGINVTVPFKQEVIPYLDELTEQAKKTKSVNTIYLGTNGITGHNTDIEGFEESLRYAKYNVKDKDVLILGGGGVVPSIIFALKNMKAQN

SEQ ID NO: 85087 - protein, 264 aa, Unknown
  Bacterial polypetide isolated from the Sargasso Sea
MKKFLVIGNPIEHSLSPKLHNYWIKKNNLDAIYGKLETYDNDLSELCKSIKNGDLEGLNVTVPFKKSIIPHLDILSSNALRTQSVNTISLNKGHLIGDNTDINGFELSIRKLNYDVSDKTVLILGAGGVVPSIIFSLLRMKASKILLSNRTKEKANNLNNFFKEINIIDWGDLPEFDMIINATTLGLNKDDKFGLDFSQISNNKLFYDVIYSPFQTEFSEAGNAKGNVIENGLNMFLFQGQQAFNIWHNVEPEINKELIEFLKK

SEQ ID NO: 85088 - protein, 261 aa, Unknown
  Bacterial polypetide isolated from the Sargasso Sea
MKKYFVIGNPIDHSLSPKLHNHWFKQNNINALYDKKKVSETDLERIIAEVKTGKVDGINVTVPFKKSVIPFLDELTSLADKTQSVNTIFKKENKVIGDNTDVEGFERGLKHINYDVKNKKVFILGAGGVVPSIILALKNQGTSKIILSNRTETKARDLKKIYPDLEIIGWGENTNFDMIINATSLGLKSDDQIQLDFSKTGSDKLFYDVIYNPYRTNFLLKGVELGNKIENGKMMFIYQAQLAFKIWHNILPKIDNKLLDE

SEQ ID NO: 85089 - protein, 187 aa, Unknown
  Bacterial polypetide isolated from the Sargasso Sea
MKKFLVIGNPIEHSLSPKLHNHWFKKSNIDATYEKKLIDGKDISKIILEMRENKIQGINVTVPFKKKVIEFLDQMTAEAKESQSVNMIYMNKDKVIGHNTDISGFELSLRHIKYDVDKKKVLILGAGGVVSSLIIALKKMNPSKIILTNRTRAKAEKIKETFEDVEIEEWGKLPDFDFIINATSLGL

SEQ ID NO: 85090 - protein, 124 aa, Unknown
  Bacterial polypetide isolated from the Sargasso Sea
MKKFLVIGNPIEHSLSPKLHNYWIKENNLDAIYAKLETYDNDLPELCKSIKKGDLGGLNVTVPFKKSIIPHLDILSSNALRTQSVNTISLNKGHLIGDNTDINGFELSIRKLNYDVSDKTVLIL

SEQ ID NO: 85091 - protein, 286 aa, Unknown
  Bacterial polypetide isolated from the Sargasso Sea
MISSKTSFIALIGNPVSHSLSPIMQNAALQHLGLDLIYIAVPCKDEDLELILNSFKKINCIGLNVTIPHKEKVFNLCSEISPIANKLKAINTLKLNSEKEWSATNTDVEGFIYPLKNLNLAKKKSIVLGSGGAARSVIQGLINLNLSTISVISRNKSSLDELIKNFDNQIQLQGLLHSDDQAQNLIEEADLVVNTTPVGMKQAKYEMNVLPYGESFWRSLHSKTIVYDLIYNPAPTHLLKFSAKKGCMTINGLQMLVAQGLKSLSFWTNGLEVPFNVMNDALKNHL

SEQ ID NO: 85092 - protein, 262 aa, Unknown
  Bacterial polypetide isolated from the Sargasso Sea
MKKYFVIGNPIDHSLSPKLHNFWLKKNKIEAIYEKKLLEEREIPKLIERIRKSEINGVNVTVPFKNSVIPFLDSLSSEAKKTNSVNTICTEEDKIIGHNTDIAGFELALRYINYDVKGKKALIIGAGGVSPSIILALKNMGCENIYLTNRTFEKAEKIKKTFNDITVQKWGDIPEFDIAINATSVGLNKENFDLDLNKFGTNKFFYDVIYNPSETNFLKEAKVNGNKTENGRMMFIYQAHQSFALWNKLLPKIDEETIDILK

SEQ ID NO: 85093 - protein, 188 aa, Unknown
  Bacterial polypetide isolated from the Sargasso Sea
MKKYLVIGNPIDHSLSPKLQNWWLKENNIDATYDKIKLEVHEIKNFIQEIKEQKIAGCNVTVPFKKTVIPFLDRLSPEAEQTQSVNTITYHNGDLVGHNTDIAGFDSAIKNLDFNLEGKKVLILGAGGVVPSIIFALQKMNVQEITISNRTKEKAENLRILFNNIKILEWGDLNDFHIVINATSLGLN

SEQ ID NO: 85094 - protein, 264 aa, Unknown
  Bacterial polypetide isolated from the Sargasso Sea
MKKYFVIGNPIDHSLSPKLQNWWLKENNIDATYDKIKLEAHEIKNFIQEIKEQRIAGCNVTVPFKKTVIPFLDKLSPEAEQTQSVNTITFDNGDLVGHNTDIAGFDSAIRKLNFSVNGKKVLILGAGGVVPSIIFALKNMNVQEITISNRTKEKAENLRVLFKDLKILEWGNLTDFHMVINATSLGLNNEKINLNFSSSGNDKLFYDVIYNPQETQFLKMGKQLGYKTENGRTMFVYQALEAFKLWHMIEPKVNKDTFKLLDYD

SEQ ID NO: 85095 - protein, 277 aa, Unknown
  Bacterial polypetide isolated from the Sargasso Sea
MTDRYAVIGNPIGHTKSPLIHGLFAQETQQDMSYTAIEGPLEPHDAFAATVRAFIAAGGKGMNVTAPFKLKAFAMADERSERAALAGAANALSFSDGRIVAENFDGVGLVRDIEVNLNLPMAGRRVLILGAGGAVRGALLPFLAAQPAELVVANRDIAKVRALVEQVASSGPLAACGYADLEAMGQFDLVVNATSASLTGDLPPVPPSVFSPAGSAYELAYGKRLTPFLRLARNAGVLGIADGVGMLVEQAAEAFDWWRGVRPQTRAVIDRLTVPLD

SEQ ID NO: 85096 - protein, 262 aa, Unknown
  Bacterial polypetide isolated from the Sargasso Sea
MKKFCVIGNPIDHSLSPKLHNFWFKKNKINATYEKKLLKDEEIPKLVNSLRKTEINGVNVTVPFKNSIIPFLDDLSPEAKKTNSVNTLLKEGDKIIGHNTDIAGFELAIRYINYDVKRKKAFIIGAGGVSPSIIFALKNMGCEDISLTNRNLEKAEKIKETFKDITIENWGNIPEFDLVINATSVGLKNENLNLDFNKTGNNKFFYDVIYNPNETNFLKSAKQRGNKIENGRMMFIYQAHQSFALWNKVLPKIDQETIEILK

SEQ ID NO: 85097 - protein, 266 aa, Unknown
  Bacterial polypetide isolated from the Sargasso Sea
MKKKYLVIGNPIEHSLSPKLHNHWLKEKNIDAVYDKKKLDEKDLQSIVSEVKEEKIDGINVTVPFKKAVIPFLDELSLEARETQSVNTIYLQNGITIGHNTDIAGFELAIKYAKYEVAGKKIFLLGAGGVSPSIIYSLKKMKASKITLTNRTKEKAENLKKLFKDIEIVDWGERIDFDMIINATSIGLKKNEDGLNFDYSANGPNKFFYDVIYNPRETLFLKRAKLFGNRAENGKMMFIYQAHQAFTIWHKLMPEINDETIKLLDQ

SEQ ID NO: 85098 - protein, 270 aa, Unknown
  Bacterial polypetide isolated from the Sargasso Sea
MLKTFAVIGDPIDHSLSPTIHNAAYRELGIECTYIAYKVDKGELATGIESLKKIKIAGFNVTIPHKIEMMRYLDNVDETCKKIGAVNTVLNDDGILRGFNTDMDGFLEPIKRKEIQIKNSKIFLLGAGGASRAIIAGFQKEGAYNIVIANRTKENGDELARFSNEIGLDATSVQLDAMNELNSKFDFIVNASSLGLKGEKNIIPSSLMDEQTTVYDIVYKPLKTDLINTAKENNCEIIYGYEMLLGQAIRSFEIWLDQKAPYEAMKRSIL

SEQ ID NO: 85099 - protein, 263 aa, Unknown
  Bacterial polypetide isolated from the Sargasso Sea
MKKYLVIGNPINHSLSPELHNHWIKENSIDATYSKKKMSENEFENLISEVRQHVINGVNVTVPFKNTIIPYMDKLTDEAKRTQSVNTIYQKDNEIIGHNTDIEGFENSIKKINFNFNNKKIFILGAGGVVPSIVYASMKMGSSEILISNRTKEKTQKIKNTFNNIKLVNWGEIPDFDVIINATSLGLNQNDEINLDFANVGKNKLFYDVIYNPSETKFLKVGKKLGNKCVNGKLMFIYQAFSAFKLWHGIEPLINEETMKLLD

SEQ ID NO: 85100 - protein, 250 aa, Unknown
  Bacterial polypetide isolated from the Sargasso Sea
AVAPERLQQAIEGLAAMGCRGLSVTIPHKEQVQPLLSSVDAVARELGAVNCLIPDGHGGWRGTNTDWSGFLTPLEGRLSPSGQALILGSGGVVRAVLRSCCELGIQQVVLRGRNRSKLEALAQDVSAWAPPLLLSSADEPLEPLLESSTLVVNGTPLGMAEMRDQTPLNPEQLARLPESAVVYDVVYTPRPTLLLKLAAERGLSVIDGLEMLVQQGAAALKLWTGLEQVPVEAMRQAAALALEPGAMDHG

SEQ ID NO: 85101 - protein, 264 aa, Unknown
  Bacterial polypetide isolated from the Sargasso Sea
MKKFLVIGNPINHSLSPKLHNYWINQNNIDADYQKRELDNNDLENLILKIKNKEISGVNVTVPFKKDIISYLDKLSPEAEGTQSVNTICLEDNNIVGYNTDIRGFELAIKDAKFNLTDKNILILGAGGVVPSIIFGLNKMKVSKITLCNRTKEKAENLKNFFKNLSIVNWGEVPDFDMVINATSIGLNNEDFINLDFSKIEKGKFFYDVIYNPKETNFLKIAKKLGNKTENGMKMFIHQAAETFKIWHGIVPEINKEVSNFLDK

SEQ ID NO: 85102 - protein, 248 aa, Unknown
  Bacterial polypetide isolated from the Sargasso Sea
MPSVTTPALDRYAVFGNPIGHSKSPFIHGQFASLTQQTLSYEAILAPIDGFEASLRTFFQAGGKGANVTVPFKEQAFALCDSLSAEATLAGAVNTLSLLADGTIYGDNTDGLGLVADLVRHLGSLQHKRVLLVGAGGAARGCILPLLKAEVGQLIITNRTQSKAQALVDIFSQVQEGRYSDKLQALSMPELSGEFDLVINSTSASLAGELPPLPQSIISNKTACYDMMYGAKPTAFNQWALQQGAAQV

SEQ ID NO: 85103 - protein, 180 aa, Unknown
  Bacterial polypetide isolated from the Sargasso Sea
MKKFFVIGNPISHSLSPELHNFWIKKNKINAVYDKIKLEESELKDFINKIRNEEIHGINVTVPFKNKVIKYLDKLSLEVETTDSVNTIYKSGNELIGHNTDVAGFELGLRHSKINVLHKSILILGAGGVVPSIIYSLLSMGCKKIFLSNRTIEKAQNIKKKFNEIEVVKWKKIPDFDIVI

SEQ ID NO: 85104 - protein, 171 aa, Unknown
  Bacterial polypetide isolated from the Sargasso Sea
MKKYLVIGNPISHSLSPKLHNHWFKINKIDAIYEKKQIKESDIKEIISNLRNEKIHGVNVTVPFKQSVIPFMDELSLEAKEVNSVNTIYKEKNKIIGHNTDIVGFELAIRAKGYDIKNKNIFILGAGGVVPSIISSLKKLKVKKIILSNRTRKRAENLKKIFTTLEVVDWG

SEQ ID NO: 85105 - protein, 163 aa, Unknown
  Bacterial polypetide isolated from the Sargasso Sea
MKKYFVIGNPISHSLSPKLHNFWIKTNNINALYSKLKLEENEIENFIKYIKEEKIAGANVTVPFKKTVIPYLDKLSEEAKQTQSVNTIIRQDNILIGHNTDIVGFTKAIESLNFDMKDKKIFVLGAGGVVPSIIFSLNKLEVSEVIISNRTKKKADNLKKYFN

SEQ ID NO: 85106 - protein, 88 aa, Unknown
  Bacterial polypetide isolated from the Sargasso Sea
MKKYFVIGNPISHSLSPKLHNFWFRKHNLNAKYEKLLLEKDNLNKIVQKVKTGEISGLNVTVPFKPVDNPFFRKIKSSSTKYTISQYS

SEQ ID NO: 85107 - protein, 203 aa, Unknown
  Bacterial polypetide isolated from the Sargasso Sea
MTDLYAVVGNPISHSKSPDIQNAFAEQTGEDLFYKTLLAPLDDFEGEVRRFIEHGGSGLNVTVPFKENAYRLANELTARAKRAEAVNTLKKMPDGTLLADNTDGAGLVRDLMINHSVVLEGKRILILGAGGAVRGVLQPLLEQQPAGVVIANRTESKAQTLAKDFADLGRVSACGFTDIDGSFDLIINGTSASLAGEMPPIPV

SEQ ID NO: 85108 - protein, 257 aa, Unknown
  Bacterial polypetide isolated from the Sargasso Sea
MKKYLVIGNPIDHSLSPKLHNYWIKKNNIDAIYEKKKIYSEEIKNIISELKDNLIHGINVTVPFKKIVIPYMNQLSPEAESTQSVNTIYLNDGKIIGHNTDIAGFELSIKKIKYDAAGKKVLILGAGGVVPSIIIALYRMKVSKITISNRTKEKAENLKNLFKNLEIVDWGDITDFDIIINATSIGLNKNEKINLDFSKIENNKLFYDVIYNPNETNFLKMGQSLGNKIENGKMMFIYQAHQAFTVWHKLMPEINEE

SEQ ID NO: 85109 - protein, 150 aa, Unknown
  Bacterial polypetide isolated from the Sargasso Sea
MYKDKLELKIAGVIGDPIKHTRSPLIHQYWINKNRINCFYIPLKVKSFELEKKLFYIKELNFSGLNVTIPHKENILNFVDEIKDSVKVIGAANTIYFKNGKIIADNTDTYGFFQSLIKNFPNYNFKKEKVLIIGAGGASRAVTSVFLGQN

SEQ ID NO: 85110 - protein, 171 aa, Unknown
  Bacterial polypetide isolated from the Sargasso Sea
MAFIKNRVKQLFHGEPVDRYAVFGNPVGHSKSPLIHSWFAKQTAQTLSYEAILAPVDAFADSWFSFVAAGGRGGNVTVPFKEQAYQLAEQLSERALQAGAVNTLYIDKAGVLCGDNTDGLGLVADLTRLGAQLQDAAILILGAGGACRGVVGPLLAAGAKHIHIANRTAAK

SEQ ID NO: 85111 - protein, 189 aa, Unknown
  Bacterial polypetide isolated from the Sargasso Sea
MKKFLVIGNPISHSLSPELHNYWIKQNRIDAIYRKKKINDFELESIILDVKKHIITGVNVTVPFKKTIIPYLDELSEESKITQSVNTIYLQNKKVIGHNTDIEGFENAIKKINFNFENKKVFILGAGGVVPSIIYASIKMGSSEIIISNRTENKALEIKNIFNNIKLVKWGEMPDFDVIINATSLGLNR

SEQ ID NO: 85112 - protein, 289 aa, Unknown
  Bacterial polypetide isolated from the Sargasso Sea
MPSVTTPVLDRYAVFGNPIGHSKSPFIHGQFAALTQQSLSYEAILAPIDGFEASLRAFFQAGGKGANVTVPFKEQAFALCDRLSAEATLAGAVNTLSLLADGTIYGDNTDGLGLVADLIRHLGSLQHKRVLLVGAGGAARGCILPLLKAEVGQLVITNRTQSKAQALVEIFSQVQQGRYRDTLLSMPMPELSGEFDLVINSTSASLAGELPPLPQSIIGSKTACYDMMYGAKPTAFNQWAVQQGAAQVIDGLGMLVGQAAKSFALWRGVEPDTSGVLKLLRDKLQADAQ

SEQ ID NO: 85113 - protein, 287 aa, Unknown
  Bacterial polypetide isolated from the Sargasso Sea
MAFIKNRVKQLFHGEPVDRYAVFGNPIGHSKSPLIHSWFAKQTAQALSYEAILAPVHAFADSWFSFVAAGGRGGNVTVPFKEQAYQLAEQLSERAFQAGAVNTLYIDKAGVLCGDNTDGLGLVADLTRLGALLQDAAILVLGAGGACRGVVGPLLAAGVKHIHIANRTAAKAEAIAGLFDNRVTASGYDEVPAEKWSLVINATSSGLEQQRPALAEQHLKHCTLAYDMLYGKEPTAFLIWCQQQGVPHCADGLGMLVSQAAESFAIWRGVKPDVTPVLQQLTAMVKA

SEQ ID NO: 85114 - protein, 277 aa, Unknown
  Bacterial polypetide isolated from the Sargasso Sea
MDEARPRLAAVLGNPISHSKSPRMHNYWLKKNKLNGYYIPIKVELEDFEQTIRALVNMGFSGVNVTIPHKLSALKIADKSSSTAQYIGAANTLTFTKENKIYADNTDAYGFINNIKSKYPDWNPKKGTSVVLGAGGASRAVIAALLSEGSEKIIVLNRTIEKAEALKKDYDNNITVESWKNLNEVAASSSNIINTTSLGMNDETFIAINPKAIPETALVSDLVYTPLETNLLKIAKDRGSRTVDGLGMLIHQGIPGFEAWFGQKPLVTEELRKILTK

SEQ ID NO: 85115 - protein, 289 aa, Unknown
  Bacterial polypetide isolated from the Sargasso Sea
MPSVTTPALDRYAVFGNPIGHSKSPFIHGQFASLTQQPLSYEAILAPMDGFEASLRAFFQAGGKGVNVTVPFKEQAFALCDSLSAEATLAGAVNTLSLLADGTIYGDNTDGLGLVADLVRHLGSLQHKRVLLVGAGGAARGCILPLLKAEVGQLIITNRTQSKAQALVDIFSQVQEGRYSDKLQAMSMSELSGEFDLVINSTSASLAGELPPLPQSIIGNKTACYDMMYGAKPTAFNQWALQQGAAQVIDGLGMLVGQAAKSFALWRGVEPDTSGVLKLLRDKLQADAQ

SEQ ID NO: 85116 - protein, 287 aa, Unknown
  Bacterial polypetide isolated from the Sargasso Sea
MSADQLHDRYAVIGNPVGHSKSPFIHGRFAAQTGEPIEYGPLLAPVDAFVPHVRAFIEAGGRGMNVTVPFKLDAHAFADTLSPRAAAAGAVNTLKFDASGVYGDNTDGFGLVRDIEVNLGVSLKGARILLLGAGGAARGVVLPMLERAPHTLTIVNRTAAKADALVDQFAQAARDAACHLSGGSARAIEAGAYDVIVNATAGSLDASLPECDDRAFGSGTLAYDMMYGAHPTVFMEHARKFGARAADGLGMLVEQAAESFYVWRGVRPDGAPVLAELRALLTAPSHA

SEQ ID NO: 85117 - protein, 289 aa, Unknown
  Bacterial polypetide isolated from the Sargasso Sea
MTAVASSTSGADRYVVFGNPVAHSKSPFIHAQFAAQTGEPVEYTHRLAPVDGFEAAVRAFVAEGGRGANVTVPFKLDAHALADTLSPRAAAAGAVNTLRIDADGRIHGDNTDGVGLVRDIEANLGVSLAGARILLLGAGGAARGVVLPLLDRAPLSITIVNRTASKAEALVGQFMQAAHDAGCTLAGGGPDVVRAEPYDVVINATAGSLDAALPECDAAAFGAGTLAYDMMYGAQPTVFMQHAAALGARTADGLGMLVEQAAESFFIWRGVRPDGAPVLAALRQALAAS

SEQ ID NO: 85118 - protein, 140 aa, Unknown
  Bacterial polypetide isolated from the Sargasso Sea
MKKYLVIGNPISHSLSPQLHNYWIKKNNIQAIYEKRLVSQNDIEKIVSEIRSKKLHGINVTVPFKTKAVSFVDTLTKEADETKSVNTIYLKEDKIIGHNTDIDGFELGIRSYGYDIKKKNIFIFGAGGVVPSILVALRMM

SEQ ID NO: 85119 - protein, 273 aa, Unknown
  Bacterial polypetide isolated from the Sargasso Sea
MDRYLVFGHPVRHSKSPFIHTLFARQTQQELEYGLAEPAVEEFATSLRDFFAQGGKGCNVTVPFKEQAFALVDRLSPRARRAGAVNTIKLTDDGVLLGDNTDGAGLVADLKAHGVALAGSRILLLGAGGAARGALAPLLAEQPEALVIANRTHARAEQLAAEFRDLGAVSAQTYEQLGGHFDLIINSTSASLQGELPPLPPALIHADIAIYDMMYGATDTPFIAWAKGQGARQTVDGLGMLVEQAAEAFTVWRGIRPGTKQVLRELKRNLGTL

SEQ ID NO: 85120 - protein, 271 aa, Unknown
  Bacterial polypetide isolated from the Sargasso Sea
MKKYAVFGNPIEHSMSPLIHEYFAENLGIKLTYDAILGTVGKFELEAKNFLKMGGKGFNVTLPFKQEAYNLAETKSEIAEITGSVNTISLKDGLIHGDNTDGSGFIKDIKNNIGFDIENKKILLLGAGGAAMGILPNILYERPLELKIYNRTREKAEKLCNKFLDIGKLDYVEISDLEKYKFDIIINSTSAGISNEDFYLPKKFFNNDSICYDLSYGAASNSFRSWAKQNKLIFYDGIGMLLEQAADSFYIWELKRPLITNELKSILLEKL

SEQ ID NO: 85121 - protein, 254 aa, Unknown
  Bacterial polypetide isolated from the Sargasso Sea
AAGVDACYVPFLVKDIKSFLKNPLFGREDFVGFSVTIPHKEDALEACAEVDPVAKQIGAVNTLVRQPDGSLKGYNTDYAAAIDAIEDAMERKTGTPARASLEGKTVVVIGAGGAGRALAFGAKFKGANVVIANRSIDRARALAEACGGVAVTLEDLANGGVKGDVLANTTSVGMQPNVDDTPAPASALQGYSVVFDAVYTPLETRLLREAKEAGCEIASGLDMFVGQAARQFELFTGKQAQVELMRETVLSSIK

SEQ ID NO: 85122 - protein, 235 aa, Unknown
  Bacterial polypetide isolated from the Sargasso Sea
MTAFFNAGGKGANVTVPFKEQAFALCDSLSPEAKLAGAVNTLSLLADGTIRGDNTDGLGLVADLIANLGSLQGKRVLLIGAGGAARGCILPLLNAGIAQLTISNRTHTKAQLLVDIFTSVDNGAFANRVTAVEMNELVGEFDIIINSTSASLAGELPPVPAHIITPQTVCYDMMYGASVTAFNQWALSQGAAKVIDGLGMLVGQAAKSFTLWRGVEPDTQVVLTLLRDKLKAEPK

SEQ ID NO: 85123 - protein, 168 aa, Unknown
  Bacterial polypetide isolated from the Sargasso Sea
MIGKLSGPTADYSEYAAALSEMAAQLVEDGIDKVASGSEEGVRLVVKALISSGVAMSIAGTSRPASGGEHKFSHWLDANCDSPALHGEQCGLGSIVTMYLHGGDWEKIRDTLEAVNAPTNAKSLNIDDEMVLSAFTNSKDIRPQRVTILDKSTKEQIREAVLATGVIS

SEQ ID NO: 85124 - protein, 224 aa, Unknown
  Bacterial polypetide isolated from the Sargasso Sea
GIASPFVSVRGDKPHSLVATAPLGVFVDLDIIKKAPRKLLASGCGDLMAKVTAVHDWELGRDKVGEYYGRYSANLASMSAEILIESAENFSKKNIDVRVIVEALISAGVASCIAGSSRPCSGAEHLFSHAIDHLEFGIGLHGEKCGIGSIMIAKLQGQNWKEIVKTLKKSGAPTTAKEIGLKPKILAKAMVMAQSLRPERYTILKEIKMTEKDALKLAKSTGVL

SEQ ID NO: 85125 - protein, 142 aa, Unknown
  Bacterial polypetide isolated from the Sargasso Sea
LIESAENFSKNKIDVLVIVEALISAGVASCIAGSSRPCSGAEHLFSHAIDHLEFGIGLHGEKCGIGSIMIAKLQGQNWKEIVKTLKKSGAPTTAKEIGLKPTILAKALVMAQSLRPERYTILKEVKMTEKDALKLAKSTGVL

SEQ ID NO: 85126 - protein, 247 aa, Unknown
  Bacterial polypetide isolated from the Sargasso Sea
MELPRQIVVGEKNIDQVGDFLKSLSNPKKVSIISGKNVKKIIGKQIDQSLKDAKIRAIWHLAKSNQVKETEEIQKKVKAAKSDIIIGLGGGRSVDIAKLSAFNLKKPFVSIPTSASHDGIASPFVSVRSDKPHSLVATAPLGVFVDLDIIKKAPKKLLASGCGDLMAKVTAVHDWELGRDKVGEYYGRYSANLASMSAEILIESAGNFSKKGIDVRVIVEALISAGVASCIAGSSRPCSGAEHLFHM

SEQ ID NO: 85127 - protein, 223 aa, Unknown
  Bacterial polypetide isolated from the Sargasso Sea
CKAPFVSVRGDKPHSLVATAPLGVFVDLDIIKKAPRKLLASGCGDLMAKVTAVHDWELGRDKVGEYYGRYSANLASMSAEILIESAENFSKKNIDVRVIVEALISAGVASCIAGSSRPCSGAEHLFSHAIDHLEFGIGLHGEKCGIGSIMIAKLQGQNWKEIVKTLKKSGAPTTAKEIGLKPKTLAKAMVMAQSLRPERYTILKEVKMTEKDALKLAKSTGVL

SEQ ID NO: 85128 - protein, 227 aa, Unknown
  Bacterial polypetide isolated from the Sargasso Sea
KSDIIIGLGGGRSVDIAKLCAFNLKKPFVSIPTSASHDGIASPFVSVRGDKPHSLVATAPLGVFVDLDIIKKAPRKLLASGCGDLMAKVTAVHDWELGRDKVGEYYGRYSANLASMSAEILIESAENFSKKNIDVRVIVEALISAGVASCIAGSSRPCSGAEHLFSHAIDHLEFGIGLHGEKCGIGSIMIAKLQGQNWKEIVKTLKKSGAPTTAKEIGLKPKILAKA

SEQ ID NO: 85129 - protein, 241 aa, Unknown
  Bacterial polypetide isolated from the Sargasso Sea
GDFLKSLSNPKKVSIISGKNVKKIIGKQIDQSLKDSKIRAIWHLAKSNQVKETEEIQKKVKAAKSDIIIGLGGGRSVDIAKLSAFNLKKPFVSIPTSASHDGIASPFVSVRSDKPHSLVATAPLGVFVDLDIIKKAPKKLLASGCGDLMAKVTAVHDWELGRDKVGEYYGRYSANLASMSAEILIESAGNFSKKGVDVRVIVEALISAGVASCIAGSSRPCSGAEHLFSHAVDHLKFGTGL

SEQ ID NO: 85130 - protein, 174 aa, Unknown
  Bacterial polypetide isolated from the Sargasso Sea
STHCSLKDALKKVKKRQIVDVGKIFSKSLQAMGFENPRIAVAALNPHCGEGGLFGSEETKEIIPAIKELSSLGMDITGPVSPDVVFSMNRDGIFDGVIAMYHDQGHIAGKMIGFNFSKNGTVVRAVNVTLGLPIIRTSVEHGTGFEIAGKGIASEMSMVDALVLASNMVNAKKS

SEQ ID NO: 85131 - protein, 274 aa, Unknown
  Bacterial polypetide isolated from the Sargasso Sea
PLILICNKKILEKEIKKYKFFKKIEPINLIKILNKKIRKKNIYLIDIKKSSSKDYIHKCFKVAFYIIKLGLTNKLINGPINKSKTLKRKYPGMTEYVSKSFNQKKFAMLIYNNKLSVSPVTTHLPLKMVAKKITKKLIIEKIMIINTFYNQKLGFKPKIGVVGLNPHCESLSKFNEDTKIILPAINSLKKKNIQVNGPYPSDTIFLKNNRKKFDVIVGMYHDQVLTPIKTLFEYDAINITMGLPFLRVTPDHGPNEMMVGKNKSNPISLIKALV

SEQ ID NO: 85132 - protein, 247 aa, Unknown
  Bacterial polypetide isolated from the Sargasso Sea
TQLGKRNYSNAGAILQSIDMAIDFAKQKVISGIVTNPINKEVIAKKLRRFKGHTEYLAKKDKKSNEMMFLLNKKMKVTPITTHVALKDVAKKINKKNITKSILNVNQTLKKDFEVRKPKIAVSGLNPHSGDGGILGKEEIIEIIPAINACKKKGINVSGPYPADSLFRDSNIKKFDSFICMYHDQALIPIKVIDFHNTINYTAGLSFVRTSPDHGTGLDIAKKFVASCDSLLAAIGMATAIAKNRGL

SEQ ID NO: 85133 - protein, 189 aa, Unknown
  Bacterial polypetide isolated from the Sargasso Sea
MGLTEYISKKTKSKNQVMLIYNDKLSVSPLTTHLPLKLVAKNITKKKIINNISQIRKFYNNFLYKKPKIAILGLNPHCETVDSFSEEKKIIIPAINYLKKDKINVDGPFSADTFFLKKNINKYDVVVGMYHDQVLTPIKTLFNFNAINITLGLPFLRISPDHGPNNKMLGKNRSDPSSIFCAMRFIKKI

SEQ ID NO: 85134 - protein, 189 aa, Unknown
  Bacterial polypetide isolated from the Sargasso Sea
ELEHEGYCCELNTNGGLWTSRVTSHIPLKDVASLITEEGILDAVKMAHQTLLDAGIAVPRIGVAALNPHAGDGGNFGTEEGDIIEPAVKQVQQLGIKADGPHPADTIFVRAQRDEFDAVVTMYHDQGQIAIKLMWFDHGVTVLGGLPVPVTTPAHGTAFDIAGKGKANPDALKAAWKVLQNMVSSRLAS

SEQ ID NO: 85135 - protein, 53 aa, Unknown
  Bacterial polypetide isolated from the Sargasso Sea
DRAVNITLGLRIIRTSPDHGTAFQLAPKMEANPSSMIESIKMALKMTSSSSFV

SEQ ID NO: 85136 - protein, 122 aa, Unknown
  Bacterial polypetide isolated from the Sargasso Sea
GENGMLGNEEIGIIHPVIEGFKNNGDLVMGTFPADGFFGSGQFKNFDAVLAMYHDQGLIPFKTLSGGEGVNFTAGIPRIRTSPAHGTAYSLAGKNIADPSAMRNAIYTAVDLAKNKLPATEE

SEQ ID NO: 85137 - protein, 210 aa, Unknown
  Bacterial polypetide isolated from the Sargasso Sea
KNLTNKLVNGPINKAKTLKRKYLGVTEYISHSFKQKKFAMLIYNENLSVCPITTHLPLSQISKKINQKLIKEKIVTVNNFYKKFLGFKPKIGVTGLNPHCESVLNFNEDEKIILPAIKSLKKKIKVQGPFPADTIFLSNNRKKFDVIIGMYHDQVLTPIKTLFEYDAINITLGLPFLRITPDHGPNEKMIGKNKSNPVSLIKAINFLDRR

SEQ ID NO: 85138 - protein, 174 aa, Unknown
  Bacterial polypetide isolated from the Sargasso Sea
TCMLIFNKKLSVCPVTTHLPLKLVAKQINRKNIENKIILIQKFYKENLKKIPRIGILGLNPHCESILDYNEDEKIIKPVVLKMRKIGYKINGPLSADTIFLKNNRKNYDVIIGMYHDQVLTPIKTLFEYDAINITLGLPFLRISPDHGPNEKMMGKNLSNPLSLIKAIQFLDKH

SEQ ID NO: 85139 - protein, 200 aa, Unknown
  Bacterial polypetide isolated from the Sargasso Sea
SKKTFLNKKYSGITEYLSQKTNSRDEVMLIYNNKLSVSPLSTHIPIKNVTRQVKKDRIVKNVINIDNFYKNILKKESKVAVLGLNPHCETTDKFSEEDKIIKPSINYLKKRGLNISGPFSADTFFIKKNLSKYNVVLGMYHDQVLTPMKTLFNFDAINITLGLPFIRISPDHGPNSEMAGKNKSDPSSFFCAMEFAEKIR

SEQ ID NO: 85140 - protein, 72 aa, Unknown
  Bacterial polypetide isolated from the Sargasso Sea
KLKQTDAYLAMYHDLALPVLKALSFGEAVNITLGIPIVRTSVDHGTALDIAGKMKPSLGSIKQAIKSAEIQL

SEQ ID NO: 85141 - protein, 285 aa, Unknown
  Bacterial polypetide isolated from the Sargasso Sea
MKNKNIIIVAGEPYSVFFEIFFKTFKKKKIQNIKNPIILIGSKKILLKQMLRLNYNFKINELLFKDINKIKINNKKINILNVNFNYNKTFDKISSKSNVYINNCCNLAMKIIKEKAVKVLINGPIEKKFFLKKKYPGMTEYFAAKVKKTNEEVMLIYNKNLAVSPITTHLPLKKIFKKISKKRIILQVKKINEFYKKYLKKEVNIALTGLNPHCETLDKYSEEEKILSPAIKTLKKNNIKISGPFSADTIFLKKNYEQYDVIVGMYHDQVLAPLKTLYGFSAINI

SEQ ID NO: 85142 - protein, 220 aa, Unknown
  Bacterial polypetide isolated from the Sargasso Sea
KVISGIVTNPINKEVIAKKLMRFKGHTEYLAKKDKKSNELMFLLNKKMKVIPVTTHIALKDVAKKINKKNITKSILNVDQTLKKDFGVRKPKIAVSGLNPHSGDGGILGKEEILKIIPAINECRKKGINVSGPYPADSLFRNSNIKKFDSFICMYHDQALIPIKVVDFDNTVNYTAGLSFVRTSPDHGTGLDIATKFVASCDSLLTAIGMALNIAKNRGL

SEQ ID NO: 85143 - protein, 140 aa, Unknown
  Bacterial polypetide isolated from the Sargasso Sea
NNELKSKWKIKNLKICVLGLNPHAGENGFLGTEEMEIISPLIKKLIKEGLNLSGPESADTAFVPNNLKKFDAFLAMFHDQGLPVLKALGFGDSINITLGLPFTRISVDHGTAYEIADKFCANEASAMESLKTALDITQSK

SEQ ID NO: 85144 - protein, 249 aa, Unknown
  Bacterial polypetide isolated from the Sargasso Sea
MFLSQLKKLNRKLNFKTIDKNYLKYEKLEKKTYLIDVKYNFKKPFEKISKKSKKYISNCFKESIDLLNIGLSNILINGPVSKKHFLENKYPGVTEYIFKKSKKKLSKYPVMLIFNKKLSVSPLTTHIPLKDVYKKINQNIIINNVKTINDFYRRKLNVKPKIALIGLNPHCETNSKFNEELLIHKPAIRKLKKIKIDIKGPFPADTFFFKSNIKNYNSVIGMYHDQILTPFKTIFGFNASNITLGLPFI

SEQ ID NO: 85145 - protein, 255 aa, Unknown
  Bacterial polypetide isolated from the Sargasso Sea
MKKIIYSPGEPSGIGPDLIIKLSSSKLWEDLNIPIVSIGDSKLFIDRAALLKKKIKIVELESLNEVSKNTKGLLQIIKVTKCSNIRPGKLSKSNAQYVLDNLTYSIKQTMQNEGTALVTGPLSKENIISIDKLFTGHTEYIKKITKSKDVLMMLASDQLRVALSTTHIPLKNVSRTITKELIINKVKILNEDLKNKFNIKKPNIKVLGLNPHAGENGKIGKEEQDHIKPAIRELRKKKINVSMPISADTAFSRKS

SEQ ID NO: 85146 - protein, 251 aa, Unknown
  Bacterial polypetide isolated from the Sargasso Sea
NNHINLINIKYNPKKAFENISNKSNSYIKKSFDKALEIIKLDVSNKLINGPISKKNFLNKKYLGISEYLAKKSKSKKIAMLIYNNNLSVCPITTHLPLKMVPKKITKKTIYEKIILINNFYKKYRGFKPKIAILGLNPHCESISKFNEDEKVLKPAIKHLVKLKYKVSGPFPADTIFLKNNRKKFNVIVGMYHDQVLTPLKTLYEYDAINITLGLPFIRISPDHGPNIKMVGKNISNPLSLINAITFMDKN

SEQ ID NO: 85147 - protein, 237 aa, Unknown
  Bacterial polypetide isolated from the Sargasso Sea
MKKIIYSPGEPSGIGPDLIIKLSSSKLWEDLKIPIVSIGDQKLFVDRAALLKKKIKIVEIESLNELSKNTIGVIQIIKVTKCSNTRPGKLYKSNAQYVLDNLTYSIKQTMQNEETALVTGPLSKENIISIDKLFTGHTEYIKKITKSKDVLMMLASDQLRVALSTTHIPLKNVSRTITKELIINKVKILNEDLKNKFNIKKPNIKVLGLNPHAGENGKIGKEEQVHIKPAIRELRKK

SEQ ID NO: 85148 - protein, 93 aa, Unknown
  Bacterial polypetide isolated from the Sargasso Sea
GPVPPDTCWLGAAQAWNDSEHLEQGCDGYLALYHDQGLIPVKVLAFDQAVNTTLGLPFLRTSPDHGTGFDRAGQGSARGASMLAAIDTALELG

SEQ ID NO: 85149 - protein, 275 aa, Unknown
  Bacterial polypetide isolated from the Sargasso Sea
MGDPAGIGGDILLAAWTQRREATLPPFFAIDAPERLSALADLLGLDIPIRTISSPDETKSVFPDALPVLPQPLVIPAEPGSLDGRNAPSVIASLKRALAYTLSGDAAGIVTNPIHKQMLYSEGFEHPGHTEFLAEATGGTPVMMLSCPGLRVVPVTIHIPLADVPDQLTSELIVSRGRTLAAALEHDFGLAHPRIAVAALNPHAGENGALGLEEEQIIAPAVQMLRDVGINATGPFPADTMFHAEARRGYDAVLAMYHDQALIPLKPLISTMGST

SEQ ID NO: 85150 - protein, 175 aa, Unknown
  Bacterial polypetide isolated from the Sargasso Sea
NTCMLIYNKNLSVCPVTTHLPLKLVTKKINKQNILNKVLLIQKFYKKFLNKNPKIAILGLNPHCESILNYNEDDKIIKPIVLKLNKKGYKIVGPISADTAFLKKNRKKYDVIIGMYHDQVLTPLKTLFEYDAINITLGLPFLRISPDHGPNENMLGKNKSNPLSLMRAISFLDKN

SEQ ID NO: 85151 - protein, 212 aa, Unknown
  Bacterial polypetide isolated from the Sargasso Sea
MKPLIGITMGDPAGVGPELIVKLLKNKSFDFSKFIIFGSSKVLDYEFRKYNVRIPIKNFSTISSVDTSKEFILNFEPKKSEFNFEIGKINPNCGKFAYEAILNAIEFANRGLIKAIVTCPINKESLKLASVELIGHTEILSKKSKSNDVFMLMVNDELKVILCTIHVPLLKAVLSLDEKLILKTIIAANKACYNFGIKSPRIGVAGLNPHAG

SEQ ID NO: 85152 - protein, 69 aa, Unknown
  Bacterial polypetide isolated from the Sargasso Sea
RTDAYLGMYHDQVLPVLKALSFGSSINITLGVPIIRTSVDHGVALDIAGTNKSDASSLKLAIKTAKKLI

SEQ ID NO: 85153 - protein, 265 aa, Unknown
  Bacterial polypetide isolated from the Sargasso Sea
NFKLLKNQMSYFNVDLPLKEVSHFNNYDERCINVHPINKKEIKLSYGKLTTEGGIYSKDSLFAAVKALKNKKIDALVTGPINKKNIQSDDFRFKGHTDFLDNEFQGESLMFMVSNEIKVALLTEHIPLSRVKDHLNKNLIEFRIREVFKSLFNDFGIKRPKIAVLSIDPHVGDQGVIGNDDQNLLKPVLEKLKAESYNVKGPFASDSFFGSKLYKNFDAIVATYHDQGLIPFKTLTFGKGVNFTAGLDIVRTSPDHGTAYDISGK

SEQ ID NO: 85154 - protein, 275 aa, Unknown
  Bacterial polypetide isolated from the Sargasso Sea
MKKLKIKRKIKVLNLKNLRKYKLNNNNINIIDINYNQRQPFEKISSKSNHYIENSFKTALSILKNKISNKLVNGPISKKHFLKKNFLGVTEYLAKKTKIKSFAMLIYNKKLSVCPITTHLPIKLVPKNLNIKTIKNKIILINNFYKDFFKRKPRIAVTGLNPHCESVLNKNEDFTIIRPAILALKSKRYDVKGPFSADTIFLKKNRREYDVIVGMYHDQVLSPIKTLYEYSAVNITLGLPFIRISPDHGPNEKMVGKNLSNPLSLIEAITFLDKK

SEQ ID NO: 85155 - protein, 314 aa, Unknown
  Bacterial polypetide isolated from the Sargasso Sea
IYAGIIVVPMPDTFNTKKIDRLRAVMASTEAKLLIINEQQASRISDANTFEGDTATLVVEYEKQACNRASCRMNPQTVAYLQFTSGSTSTPKGAVITHQNLTHQTRLLADSFAQTEDSVFVNWLPMYHDQGLVSGLLLPASLGATSILMSPLAFAQKPIRWLQAVSKYKATTSGGPNFGFAQLANLPLSAKDKFDLSNWTTAFCGAEPIRMQIVNKFIDKYKAHHFQPCSFVPAYGMAESTLVVTRNKPLPKERAHALDLKLTSAHWRISEPPVSCGTAQSGMDVQIVDPETEKVLPEGKIGEIWLSGPSMAKG

SEQ ID NO: 85156 - protein, 207 aa, Unknown
  Bacterial polypetide isolated from the Sargasso Sea
AGMTFEDELGYIRNLLGLSTRASEFNVVDKMWNARVTSHVPLKEVSDLIDIKKILDSIIMSDKTLKEAGFLRPRIAVAALNPHAGDGGAIGREEIEVIKPAIEKAQALQISVNGPFPSDTMYLKIRDGEFDCGVSMYHDQGQIAIKLLGFDKGVTVLGGLPIPITTPAHGTAFDIVSTNKANVQPTLNAFKMVAEMVRNRWQTDYTN

SEQ ID NO: 85157 - protein, 76 aa, Unknown
  Bacterial polypetide isolated from the Sargasso Sea
FSRKSLKEADAYLGMYHDQVLPVLKTLSFGNSINITLGIPIIRTSVDHGIALDIAGTNKSDPSSLILAVKTAKKLI

SEQ ID NO: 85158 - protein, 224 aa, Unknown
  Bacterial polypetide isolated from the Sargasso Sea
MIKKPIVVSLGDPSGIGPEVFLKAIFETQLKDYRDLINIVSSKKVIEKISCELKYNEIDSLNITDVDLGSDFILGKPDKKNASYVIECLNKAAEFAYKEKISLVTGPINKKIVSSQIANFSGHTEFLREKFGSEDVLMLLANNSLKIGVATTHVALKEVPQMITKELIIRKCRLLNQGLKNIYELDSPKIAILGLNPHAGEEGSYGKEEIESIKPAITDLKSEG

SEQ ID NO: 85159 - protein, 222 aa, Unknown
  Bacterial polypetide isolated from the Sargasso Sea
LVLGHKLCLQKKIGGIINCSINKKNIFKKKNFGVTEFLAKKNNIYNSEVMMIYNKKLSVVPLTTHIKINEISKLLKKKLIINKINTLNKVYFKYFKKKPRIAILGLNPHNYELKKNSEEVKIILPAIKSLKKKFKVSGPYPSDTIFFKENLKKFDVIFGMYHDQVLAPFKALFGFDAVNITLGLPYIRMSPDHGVAMDKKKLNISNPKSLNRCIEIISKLSK

SEQ ID NO: 85160 - protein, 211 aa, Unknown
  Bacterial polypetide isolated from the Sargasso Sea
MKKNLARGIINGPISKKYFLNKKYLGITEYLAKKTNSETVMLIYNNKFSVSPLTTHLPLKNVANNINKEKIYNNVKKINSFYIKYRKKKPTFAILGLNPHCETSSKFSEEIKIIIPAIKKLKKNKIKINGPFSADTFFSKKNIKKFDVVIGMYHDQVLTPMKTLFNFDAINLTIGLPFFRVSPDHGPNESMVGKNKSDFLSLLRCIEFLKN

SEQ ID NO: 85161 - protein, 199 aa, Unknown
  Bacterial polypetide isolated from the Sargasso Sea
LKNIFLNKKFPGITEFIANEFSREKVGMLIYNKSLSVCPLTTHLPIKLIPKKITKKLIIEKITLINAFYKSLFNKKPKIGVVGLNPHCESISKINEDDKVIRPAIKQIYNKSIKVSGPYPADTIFLKTNRKKFDVIVGMYHDQVLTPIKTLFEYDAVNITMGLPFLRVSPDHGPNEKMVGKNQSNPLSLIRSIKFLDNK

SEQ ID NO: 85162 - protein, 171 aa, Unknown
  Bacterial polypetide isolated from the Sargasso Sea
LIYNNRLSVCPVTTHLPLKVVSKKINQKNIIEKIKLVSDFYKNNLKLKPKIGILGLNPHCESIDKFNEDEKIIKPIIKKMRKNRYSISGPHPADTIFLKNNRKNFDVIIGMYHDQVLTPIKTLYEYDAINITLGLPFIRISPDHGPNERMMGKNLSNPLSLIQAIRFLDKN

SEQ ID NO: 85163 - protein, 275 aa, Unknown
  Bacterial polypetide isolated from the Sargasso Sea
HKQMKKLKFNLNLKEIYNLKEAKIEKLNILNVNYNNKKVFSKISSDSKKYISDCFKIALKLIKNNKKIALINGPISKKHFLKKEYLGITEYISKKVKTKNQVMLIYNDELSVSPVTTHLPLKFVTKNITKKKIINNVKQIKKFYLTFLGKKPKIAILGLNPHCETIDNISEEKKIIIPSIISLKKIDINIEGPFSADTFFLKKNVDRYDVVIGMYHDQVLTPIKTLYNFNAINITLGLPFIRISPDHGPNYEMLGKNKSDPSSIFCAMRFINKIR

SEQ ID NO: 85164 - protein, 271 aa, Unknown
  Bacterial polypetide isolated from the Sargasso Sea
NGIGPEIILKTFSDPKILNDFIIIIYTPIEIISFYIENYKFSITHKLIKSISEAKKGRINIFSINSAPFKVSPGNSNFQSGAVALKSLTIATNDVIKKHTDCIVTGPIDKKTIQSNNFTFKGHTEFLTRMSKREISLMIMVDSSLRIGLVTNHIAINKISNAINSDQLLIKIKLICDSLQNDFKISKPRIALLGLNPHSGDQGLIGKEELKVIIPTLNKANNNEFNIFGPFSADGFFSSRNYKNYDGILAMYHDQGLIPFKLLSNNNGVNF

SEQ ID NO: 85165 - protein, 263 aa, Unknown
  Bacterial polypetide isolated from the Sargasso Sea
MNYKPILVVAGEPNSIFLEIYFKSFNKYRLRNPLILIASYKLLKLQMKKLKVDKKVNIIDISNIKNYKLNNKSINLINVNFDQKIAFKKISSKSNKYIKDCFDIAFKLIKEKYSYKLINGPISKKSFLNNKVLGLTEFISNKFSIKKNAMLIYNKKLSVCPLTTHLPLKMVSKNVNKKIIEEKVYLINQFYKKYLNIKPRIGILGLNPHCESIDSYNEDEKITKPAIKYLKKLGYRASGPFPADTIFLKNNRRNFDVIIGMYH

SEQ ID NO: 85166 - protein, 171 aa, Unknown
  Bacterial polypetide isolated from the Sargasso Sea
MLIYNKKLSVCPVTTHLPLKLVAKKITKKKIREKIVIINDFYKKFLGFKPRIAVIGLNPHCESILKFNEDVKIIHPVIKSLKNKINVKGPFSADTIFLKNNRKKFDIIIGMYHDQVLTPIKTIFEYDAINITIGLPFLRVTPDHGPNEKMIGKNISNPISLIRSLEFLDKR

SEQ ID NO: 85167 - protein, 133 aa, Unknown
  Bacterial polypetide isolated from the Sargasso Sea
VKPKIAVLSINPHIGDNGVIGTEDQKLLTPAINELNKNDNIIFGPFSADTFFCNNYAKYDAILAIYHDQGLIPFKTISFGEGVNYSAGLSIIRTSPDHGTGFDIAGKSIADPSSFAHALKLALDIYELRNKIL

SEQ ID NO: 85168 - protein, 295 aa, Unknown
  Bacterial polypetide isolated from the Sargasso Sea
MAISKKIILISAGDPASIATEITIKAIFSRKLNENVIPIIITDPDTVTYYKYSCYDENFRINIITDKQKFSDYKKDFFNIIPIKIFEKVKAGRPSIENVPFTINSIKTCLELEKNTIASAIVTNPINKYIMYKHGFKFSGHTDFLASFSDKRKTPVMMLVGKNIKTVPLTVHVPISKVSNLISKELILKTLTIVNNDLKSFFGIQKPKIMLTGLNPHSGENGEIGLEENKIIIPTIKEVQENKGVLLTGPIPADTAFTFEQRKKYDVVICMYHDQALIPIKTLDFFSSVNVTLGL

SEQ ID NO: 85169 - protein, 253 aa, Unknown
  Bacterial polypetide isolated from the Sargasso Sea
MKKIIYSPGEPSGIGPDLIIKLSSSNLWEDLKIPVVSIGDPKLFLDRAALLKKKIRIIGLESLSQVSKNSKGLIQIIKVTKCSNTRPGKLYKSNAQYVLDNLTYSIKQTMQNEGTALVTGPLSKENIISIDKLFTGHTEYIKKITKSKDVLMMLASDQLRVALATTHIPLKNVSRTITKKLIINKVKILNEDLKNKFNIKNPNIKVLGLNPHAGENGKIGKEEQDHIKPAVRELRKKKINVSMPISADTAFSR

SEQ ID NO: 85170 - protein, 208 aa, Unknown
  Bacterial polypetide isolated from the Sargasso Sea
FTYKLINGPINKSKTLKKKYLGITEYISKKFNRKKFAMLIYNEKLSVSPITTHLPLKLVTKEISKRTIKEKVNIINDFYKKFLKFKPKIGIVGLNPHCESIHNFNEDQKILLPAIKSLRKKINVKGPFPADTIFLNKNRKNFDVIIGMYHDQVLAPIKTLFEYNAINITLGLPFIRISPDHGPNKNMIGKNKSSPISLIKALSFLDKR

SEQ ID NO: 85171 - protein, 138 aa, Unknown
  Bacterial polypetide isolated from the Sargasso Sea
IRSLHKNYIKYFKKKPRIAVLGLNPHNLEFKKNSEEVKTILPVINILKKNYKIFGPYSSDTIFLKENLKNFDVIVGMYHDQVLAPFKALFEFDAVNITLGLPYIRMSPDHGVAKDKIKLKVSNPQSLNRCIDEMSRLT

SEQ ID NO: 85172 - protein, 172 aa, Unknown
  Bacterial polypetide isolated from the Sargasso Sea
MLIYNKSLSVSPITTHLPLKFVSRKINKKNIIYKIKLISNFYKNFFKFKPRIAILGLNPHCESIDNFNEDEKIIKPTIKILKKKGYKISGPFSADTIFIKKNRLKFDVIVGMYHDQVLTPLKTLYEYDAINITLGLPFIRISPDHGPNEQFLGKNVSNPLSLIKAISFLDKN

SEQ ID NO: 85173 - protein, 312 aa, Unknown
  Bacterial polypetide isolated from the Sargasso Sea
MTWVIKLCSLNFWGNLKLPIVCIADSKLILDRAKVLGIKINIDELKDINNAKRNKKNTLQIFFVSVCKDTQPGKLKKINASYVIENLDFAINYSKNNKRTALVTGPISKENVIHKYKNFTGHTERIKEKTDSKSVLMMLASSKLKVALATTHVPLKDVPKKITKKLLMTKIQILHEELKNKFNIKNPKIKMLGLNPHSGENGKIGKEEKSILIPTAKYLRGKNINVSLPISADTAFTKKNLMSTDAYFGMYHDQVLPVLKALSFGKSFNITLGTSIIRTSVDHGVALDIAGSKKSDESSLKEAIKMAAKLIK

SEQ ID NO: 85174 - protein, 240 aa, Unknown
  Bacterial polypetide isolated from the Sargasso Sea
MLEKPIAITPGEPAGIGTEITLKAWKDKSCPPFFLIDDAERVATRAKKANLDVPIKIINSPEQTLECFINALPILSHKFPVHCKPGKPEELNAPAVIEAIEIAVNYAKTDLVSAIVTNPIQKEILTKEKFQYPGHTEFLAALCGNEVEPVMLLASNELLVVPVTIHEPLANVTKILNESLLKRTILIANSALKTDFSINSPRLCVSGLNPHAGENGTIGLEEEQIIKPVIESLKNCGLRI

SEQ ID NO: 85175 - protein, 219 aa, Unknown
  Bacterial polypetide isolated from the Sargasso Sea
MKKIIYSPGEPSGIGPDLIIKLSSSKLWEDLKIPIVSIGDPKLFIDRAALLKKKIKIIELESLNEVSKNTKGLIQIIKVTKCFNTRPGKLSKSNAQYVLNNLTYSIEQTMQNEGTALVTGPLSKENIISIDKLFTGHTEYIKKITNSKDVLMMLASDQLRVALATTHIPLKNVSRTIRKELIINKVKILNEDLKNKFNIKKPNIKVLGLNPHAGENGKI

SEQ ID NO: 85176 - protein, 332 aa, Unknown
  Bacterial polypetide isolated from the Sargasso Sea
MSYSKLGLLLGDPSGIGPELCPKLLEERSGRESNRVVLIGEPSLFENGKKIAGIELEAPLVQNIREIPDGGIGMLQGPELQMDGVRVGEASEICGRYALDSFRRASALCKSGELDGFCFAPMNKESLRLGGNTHEDDLRFVADELEHEGYCCELNTTGGLWTSRVTSHIPLKDVASLITEEGILDAVKMAHQTLLDAGISVPRIGVAALNPHAGDGGNFGTEEGDIIEPAVKKVQQLGIKADGPHPADTIFVRAQRGEFDAVVTMYHDQGQIAMKLMGFDHGVTVLGGLPVPVTTPAHGTAFDIAGKGKANPDALKAAWKVLQNMVSSRLAS

SEQ ID NO: 85177 - protein, 169 aa, Unknown
  Bacterial polypetide isolated from the Sargasso Sea
MTEHIALKDVVHNITVEKTTKKLKILYKVLNEDFGILKPKIAVLSINPHIGDKGLIGTEDQKLLIPAINELNQKENIISGPFSADTFFCNNYVKYDAILAVYHDQGLIPFKTISFGDGVNYSAGLPIIRTSPDHGTGFDIAGKSIADPSSFKQALKLALDIYKVRNKLV

SEQ ID NO: 85178 - protein, 321 aa, Unknown
  Bacterial polypetide isolated from the Sargasso Sea
MKIKPILLVPGEPKSVFLEIFFKSIKNIKYKSPLILICSKKDLENQIKKFKINRKIRVLNIKNIKNIKIDNKKINLININFKNSNNQKIKIKLQNKYINECFNIAFKIIKNGYTYKFINGPINKKTFLKKKFLGITEYIASKFGVKDTGMLIYNNKISVCPLTTHLPLKLVSKKISKKLIKNRIKMIDDFFKKELNIVPKIGVTGLNPHCESINKFNEDEKIVVPAVKSFINKKIKVKGPFSADTIFLKANRNKFNIILGMYHDQVLAPLKTLFEYNAINITMGLPFLRLSPDHGPNEKMFGQNKSNPQSLIQALKFLDKK

SEQ ID NO: 85179 - protein, 336 aa, Unknown
  Bacterial polypetide isolated from the Sargasso Sea
MVNPRKIRSAISIGDPNGIGIEIILKSLSKEEVLDKIIPIVFGSYNLIMNQAQALGQDVSMLHPISEINNAKEKRINILNVFDNCDYKFGVLDKAVSDFGILSLELAINAVKNKQADVLVTAPINKNAAYSQSFKFSGQTDYLSSFFNSEALMLMVSNSLKIALTTDHIPLKEVHSVLSKDLIKRKIEILNKALQEDFKILNPKIAVLAINPHAGDNGVIGNDDNSLTIPVINELNSNNYSIEGPFPSDTFFSNERYKKYDAVLAAYHDQGLIPFKTINFGKGVNFSAGLPIIRTSPDHGTAYDIAGKGLADPTSFIKATEIASNIYFARNNLISK

SEQ ID NO: 85180 - protein, 100 aa, Unknown
  Bacterial polypetide isolated from the Sargasso Sea
TVQQFGIKADGPHPADTVFVRAQRGEFDAVVTMYHDQGQIAMKLMGFDHGVTVLGGLPIPVTTPAHGTAFDIAGKGKANPDALKAAWKVLQNMVSSRLAS

SEQ ID NO: 85181 - protein, 171 aa, Unknown
  Bacterial polypetide isolated from the Sargasso Sea
MLIYNKKLSVCPVTTHLPLKLVAKKITKDKIKEKIVIVDSFYKKFLGIKPRIAVLGLNPHCESILKFNEDNEIIHPVIRSFNDKINVKGPFPADTIFLKNNRKKFDVIVGMYHDQVLTPIKTIFEYDAINITIGLPFLRVTPDHGPNQKMIGKNISNPISLMRSLKFLDKR

SEQ ID NO: 85182 - protein, 223 aa, Unknown
  Bacterial polypetide isolated from the Sargasso Sea
MNNNYQPIVITCGDPAGVGPEVAVSAWKALRDEIPLCILIDPSFVPQNINIKTLDHSPRASDIERNSLTVIRHKFVEHRVPGEPNPKNAGATIKVIERGVQFVKNGECSAICTMPISKSILKNGANFPFPGHTEYLAHLDGTDSYGMMLINKYLRVVPATIHIPVKDITKYLNAELIEKTIKTTHRELTSRFSIPNPSIWISGLNPHAGEEGTLEMKSKIYNT

SEQ ID NO: 85183 - protein, 333 aa, Unknown
  Bacterial polypetide isolated from the Sargasso Sea
MSKNFYPLIGFSSGDPNGIGLEVLLKSLSDSTLCNEFKPVVFVNHKLIESQNEFFKTNCQIIQINNIEEASPGVINVLSINDKKFDQKFGESNQLGGEFSRDSLFCAAKYLSEKKIDALVTAPINKNNIQSEDFNFKGHTDFLDSCFQGDSLMFMVSDDIKVALLTEHIPINNIVEKITPALIEKRTKIIEHSLKKDFNIKNPKIAVLSINPHVGDNGVIGDEDDNILIPSIKKIYKSGVDIEGPFASDSFFGSDAYKKYDAIIASYHDQGLIPFKTLTFGKGVNYTAGLNVVRTSPDHGTAYNISGKNKANESSFKSAIVTALNILKNRGKI

SEQ ID NO: 85184 - protein, 75 aa, Unknown
  Bacterial polypetide isolated from the Sargasso Sea
MKVLKETDAYLGMYHDQVLPVLKALSFGDSINITLGVPIIRTSVDHGIALDIAGSNKSNTSSLELAIKTAKKLIK

SEQ ID NO: 85185 - protein, 212 aa, Unknown
  Bacterial polypetide isolated from the Sargasso Sea
MSTPIKIAITPGEPAGIGPDLIIKLAQEAWQAQLVVFADGEMLKARASALGLPLTLIDYDATNPQIQDAGSLFIKQIDKSVDVTPGELDSENGLYVVETLRQACQANMDGDFDAVVTGPVHKGIINKAGVSFSGHTEFFAYQSNTIDVVMLLATEGLNVALATTHIPLEYVAKAITRERLHKVIHIINTDLKLKFGVKEPHILCVWLEPSRG

SEQ ID NO: 85186 - protein, 140 aa, Unknown
  Bacterial polypetide isolated from the Sargasso Sea
MSKPIKIAITPGEPAGIGPDLIIKLAQEAWQAQLVVFADGDMLKDRAATLGLPLTLIDYDENNPQVQAAGSLFIKQIDKSVKVTAGELDSENGLYVVETLRQACQANMDGDFDAVVTGPVHKGIINKAGVSFSGHTEFFA

SEQ ID NO: 85187 - protein, 241 aa, Unknown
  Bacterial polypetide isolated from the Sargasso Sea
NINKTISSIDHVVNFAKKKIISCIVTNPVEKNIIKKKKKKFDGHTFYIAKLLNVKKPVMLLTSPKISVVPITQHLSLKKAIKAINKNLIITTTKITNKYIKKIFDKKKPKIAISSLNPHSGDGGIFGDEEKKIIIPAIKKIKEKKIDINGPFPANTIFNPKFSKNFDVIICMYHDQATIPIKTIDFDNGVNVTLGIPIVRTSPDHGTALDIAGKGIASEKSLYSSIKKAQYIAKKRKLWIQ

SEQ ID NO: 85188 - protein, 323 aa, Unknown
  Bacterial polypetide isolated from the Sargasso Sea
ITIGDINGIGIEILIKTWQEKKIKNFILLTNINILNKLLKRRKIKLKLNLVNYKKNKFIYNKEKFNIFSYSANSLEDNTYKSLKYGYNLCKSKKCIGVITLPLRKDLIKNKINKNFIGHTEYFQKKDKKNNVNMILFHKKIIISPLTTHIEVKKISKVISKKTYLFNQIYNLNKTLKLDFNIKKPKLVISGLNPHAGENGEIGTEEIQIIHPVIKKLQKKDVNINGTFSADSLLIKENIDKFDCFIFIYHDQALIPFKFISQFSGVNYTGNLNIIRTSPDHGTAYNLLGSNKISNKSFINSYKLINKIYNNRIINGKTKKIIK

SEQ ID NO: 85189 - protein, 293 aa, Unknown
  Bacterial polypetide isolated from the Sargasso Sea
MSELYAVTSGDPAGIGPDISLKIALREDSHQFVVFGNMDLLRERAEMHAMDIKFIEFDEATSDSQIQKNTLLVKNFNLNQSVQPGVMDSKNGSYTLSMIDDAVKGCMDGRFTGCITGPVNKESIAKSGYEFSGHTEYIGKLCNQTPVMTFISDHMKIALLTTHLPIKDVPGQITLQGIMDVVKIIHADLVNYFGIKNPKIGITGLNPHAGENGHIGKEEEEIFLPALKSLNDSGIHVDGPYAADTILLNDTGHDLIISIFHDQLLPLFKHANPHLSTNVTMGLKIIRTSVDHG

SEQ ID NO: 85190 - protein, 85 aa, Unknown
  Bacterial polypetide isolated from the Sargasso Sea
MLYQQIQRFNSNQLKETDAYLAMYHDQALPVLKALSFGKAVNITLGTPLVRTSVDHGTALDIAGKIKPNLGSIKEAIMLAEMQLQ

SEQ ID NO: 85191 - protein, 292 aa, Unknown
  Bacterial polypetide isolated from the Sargasso Sea
RYKTNLMTKIAVSSGDPAGIGPDICIKAFGQKKSLAYKPVIFGNIDLLKERADEIKIKVDVKEYSGEDSNSLTHESLWVVDRPMSSEVKSGSPEPSTAKYIMSIFKESVKKTISKEFNAVVTCPINKELMNEGGVSFTGHTEELASLGNTKDVVMMLANEKIKIALATTHLPLSEVPSHINEDLLINSISIINQSLKNHWKLENPIIKVLGLNPHAGDGGYLGREEKDIIGPTLDKLREQGLEIIGPVSADTAFVKLDKTEKADAFLAMFHDQGLPVIKTMGFGETVNITLG

SEQ ID NO: 85192 - protein, 230 aa, Unknown
  Bacterial polypetide isolated from the Sargasso Sea
MSAAKTTAPVAMTCGEPAGVGPELAVAAWQSLGAILPFFWIGDPRHLPAGTALSLMDDPSETPAAAAHGLPVLPHEFSGDARRGSADPANAQGVIDVIARAVDLTRSGAASAICTAPIHKKALKDGAGFAYPGHTEYLAALADRDRVVMMLASPQLRVVPVTIHIAIEDVPVALNPALLTDTILITHAALRRDFGIARPRLAVAGLNPHAGEGGAMGMEEIEMITPTLDA

SEQ ID NO: 85193 - protein, 221 aa, Unknown
  Bacterial polypetide isolated from the Sargasso Sea
MNFQNRNKKLKVVISVGDESGIGPEIILKALCSYEIPDNIDFTLVGSKKNLFNTYNHLKSLGLEKLANPNSLKIYDLEISSSDNDPKSSYGNSSFYYLTKAIEIVKQYPNSALVTGPICKKSWSLAGHNFSGQTEVLAKSCGVKNVGMLFTAKSPITGWRFNTLLATTHISLSEVPKKLNTDLIHSKLDLFKKFCSTYIHKPTLKVAGLNPHAGEEGLLGH

SEQ ID NO: 85194 - protein, 149 aa, Unknown
  Bacterial polypetide isolated from the Sargasso Sea
RQLIIDKVKILNKDLKEKFNINNPNIKILGLNPHAGENGKIGLEEINEIGPAIKILKNNNINVSGPISADTAFSMKVLKETDAYLGMYHDQVLPVLKALSFGDSINITLGIPIIRTSVDHGVALDIAGSNKSNTSSLELAIKTAKKLIK

SEQ ID NO: 85195 - protein, 173 aa, Unknown
  Bacterial polypetide isolated from the Sargasso Sea
MSKNASSRLLVTSGEPAGIGPDLIIKLQQMDHNYNLTVIGDPDLLKKRAELLSIPIDIEIISEKNTSNEIIDNKSLKVLPVKLNTDSKPGVLDVRNVDYVIKMIKMSCQYCLENNFDALITTPVQKSIINDAGIKFSGHTEYMAKEYNVDLPVMLLDCEGFRVALVTTHMPLT

SEQ ID NO: 85196 - protein, 115 aa, Unknown
  Bacterial polypetide isolated from the Sargasso Sea
AGHLGQEEQDVIIPVIARLSDEGLVLKGPLPADTAFTQQNLQTLDVVVAMFHDQGLPVIKHAGFGDVVNITLGLPFVRTSVDHGTALDLAGTGKAQVASLSQALNVATQLSSGFF

SEQ ID NO: 85197 - protein, 254 aa, Unknown
  Bacterial polypetide isolated from the Sargasso Sea
MNFQNTHNKLKIVISVGDESGIGPEIILKALSSSEIPKNIDLKLVGSKENLQKTYKHLKSLGLQNIANPDDLQIHDIKISSIDNNSKSSFGNSSFYYLVKAIEIVKNNPNTALVTGPICKKSWSLAGHHFSGQTEVLANACGIKNFGMLFTAKSPITGWRFNTLLTTTHIALSEVPKRLNVELIHSKLDLFKAFCSKYIEKPTLKVAGLNPHAGEEGLLGNEEKDWLNNALITWHEKNKDIKLLGPLPPDSCWN

SEQ ID NO: 85198 - protein, 84 aa, Unknown
  Bacterial polypetide isolated from the Sargasso Sea
MPLSADTAFNKNLLDETDAYFAMYHDQGLPVLKALSFGDSINITLGVPIVRTSVDHGVALDIAGKGIANNSSLKNAFYAADNLI

SEQ ID NO: 85199 - protein, 90 aa, Unknown
  Bacterial polypetide isolated from the Sargasso Sea
SNVDISMPLSADTAFNKNLLDETDAYFAMYHDQGLPVLKALSFGDSINITLGVPIIRTSVDHGVALDIAGKGIANNSSLKNAFYAADNLI

SEQ ID NO: 85200 - protein, 105 aa, Unknown
  Bacterial polypetide isolated from the Sargasso Sea
QIIPAINLLKKIGYSISGPISGDIIFRNAHLGMYDLVIANYHDQGHIPVKLLYFDQSVNVTLGVPFIRTSVDHGTAFDIAYKNKAKAINLLVSIFYAHRMSNKNS

SEQ ID NO: 85201 - protein, 248 aa, Unknown
  Bacterial polypetide isolated from the Sargasso Sea
MNFKNTNNTFKIILSVGDESGIGPEIILKALCSDEIPENIEFLLVGSRKNLQNTYTHLRSLGLENLANPDNLQIHDLKIPSSDNESKLSYGNSSFYYLTKAIEIVKQYPNSALVTGPICKKSWSLAGHYFSGQTEVLAKSCGVKNVGMLFTAKSPITGWRFNTLLATTHIALCEVPNRLNKQLIHSKLDLFKEFCSTYTEKPNLRVAGLNPHAGEEGILGHEEKDWLNNALIAWQKKNRDIKLMGPLS

SEQ ID NO: 85202 - protein, 264 aa, Unknown
  Bacterial polypetide isolated from the Sargasso Sea
VLPVKLKVKNKPGFMNPKNASFVIESIRAAANGCLSGDFSAMVTGPISKSILNKGGFKISGHTEFLAEICKSKSIMMLMNDRLKVTLQTIHVPLAKVPKEITKNKIIEKIKIINRDLMCKFGYKKPKILLCGLNPHAGEDGLLGNEEIKVLKPAVVSLRKMGIKIDGPVPADTAFIKKLISQYDVVHTMYHDQGLPVIKYDNFSRTTNVTLGLPITRVSVDHGTATDLVGTGNVDISSFVQALKVARDISNKCIIKKDMVSISL

SEQ ID NO: 85203 - protein, 269 aa, Unknown
  Bacterial polypetide isolated from the Sargasso Sea
MNYKNSNNAFKIVLSVGDESGVGPEIILKALSSNEIKGNIEFILVGSKKNLQNTYMHLKSLGLENLANPKTLQIHDLKISSSDSESKSSYGDSSFHYLKKAIEIVKQYPNSALVTGPICKKSWSLAGHNYSGQTEVIAESCGVKNFGMLFTAKSPITGWRFNTLLATTHIALCEVPKRLNTKLIHSKLDLFKKFCITYSEKPTLKVAGLNPHAGEEGILGNEERDWLNDSLTAWYEKNRDIRLLGPLSPDSCWHSSAKAWTNKDAEKHD

SEQ ID NO: 85204 - protein, 239 aa, Unknown
  Bacterial polypetide isolated from the Sargasso Sea
MSSHVFISPGDPAGIGPEITLKSLKNLNETHKFVIAGDIQYFENLSASLKLGFKFIPYGGSKTTSSSKLIEVINIPLQENPVLGSSSVNNAKYILEVLSTCAEHCMDNTKNILVTGPINKETISASGTDFTGHTEFLAEHAKIVSPLMLMANEKIKIGLATTHVPIKKVSESITEDLIYNKLKVLCLGLKRLLKKENLKICVLGLNPHAGEGGYIGTEESTTIIKGIKKFDQREVTVDG

SEQ ID NO: 85205 - protein, 160 aa, Unknown
  Bacterial polypetide isolated from the Sargasso Sea
SNAITENIVEQKIKALETCLINDFQIKKPKIAVLAVNPHSGDNGVIGNEDQSIITPVVNNFKGSLSSVYGPFSADTFFANENYKKYDGIIASYHDQGLIPFKTISFGKGVNFTAGLPIVRTSPDHGTGFDIAGKGIADYTSFTNAIKLGIQVFKLRNNLD

SEQ ID NO: 85206 - protein, 222 aa, Unknown
  Bacterial polypetide isolated from the Sargasso Sea
SLCFKVAFKLIKKGLSKKLINGPINKSKTFKGKYLGVTEYVAKNFKQKNCAMLIYNEKLSVCPVTTHLPLKSVTKKITKKLIREKIEIIDHFFKKFLNFKPKIGIVGLNPHCESIFQFNEDTKIISPVVNSMKKKYWVRGPIPADTIFLKNNRKKFNVIIGMYHDQVLTPIKTIYEYDAINITIGLPFLRVTPDHGPNESMVGKNISDPRSLIKAISFLDKK

SEQ ID NO: 85207 - protein, 232 aa, Unknown
  Bacterial polypetide isolated from the Sargasso Sea
MPKESEIKIGFTMGDPNGIGPEVLIRALNYLHPFNEWEPLIFGDLEIIKEINKAVGTSFSYKPIPNNHDQNFKDLNDSFCIPVIDLPVRKNRNWKLGLCSSWGGESAFNFFRHALLWANKNTIDAIVTAPLSKEALFSAGYNFPGHTEIISHFCNGARSVMMLSVDNLKASMVTLHMSLRQALDSLTPKLILEVIEITDSGLKKMGIQKPKLGIAGLNPHAGENGLFGDEEN

SEQ ID NO: 85208 - protein, 163 aa, Unknown
  Bacterial polypetide isolated from the Sargasso Sea
FIEAARYVTKDNISSKIALIHNTLSGWGMIAPKIAVAALNPHGGEGGLLGREEIEEIGPAIMESRDEGYDVTGPIPSDSVFYRSIDGEFDVVLALYHDQGHIAIKVHNFHESITATLGIPFVRTSVDHGTAFDIAGTGKAKEEGLESAIRAANLIIDGKLDQF

SEQ ID NO: 85209 - protein, 132 aa, Unknown
  Bacterial polypetide isolated from the Sargasso Sea
LKNPKILVCGLNPHAGEDGILGNEEIDIIRPAIQSLKKMGINIDGPVPADTAFISKYKNKYDVIHTMYHDQGLPVIKYDNFSKTTNVTLGLPIIRVSVDHGTATDLVGTGNVDISSFIQALKIARDISKSAS

SEQ ID NO: 85210 - protein, 162 aa, Unknown
  Bacterial polypetide isolated from the Sargasso Sea
KIISNKNFLFNQIYNLNKSLQLDFKIKKPKLIISGLNPHAGENGKLGIEEKKFINPVIENLKKKGVNIIGPFSADSLLIKQNIDKFDCFIFIYHDQALIPFKFISQFSGVNYTGNLNIIRTSPDHGTAYNLVGTNKVSNKSFINSYKLINKIYNNRMINGKT

SEQ ID NO: 85211 - protein, 233 aa, Unknown
  Bacterial polypetide isolated from the Sargasso Sea
KKYSKKSNTFIKKSFELAFKIIKENNISNFINGPISKQYFLKKEFLGITEYISEKFFTNNTCMLIFNKRLSVCPITTHLPLKLVSKKISKDNIIKKVSLINNFYEKRFKFKPRIAILGLNPHCETIHNYNEDKKIIKPSIKTLKKKFNVSGPYPADTIFLKNNRKNFDVVVGMYHDQVLTPLKTLYEYDAINITLGLPFIRISPDHGPNETMLGKNLSNPLSLLKAIKFLDKN

SEQ ID NO: 85212 - protein, 249 aa, Unknown
  Bacterial polypetide isolated from the Sargasso Sea
FKKSYDQNVPAIIESLNLSIKLAKQKKVAGIVTLPIMKKTLIINGFKYPGHTEYLGKVSNKRPLMIMLNKKLKVATLTTHIPISQVPKKITKSNLEKTIKVYIKSLKLDFGLSDPKVVVSSLNPHNGEAGKIGNEEIKIIKPTIDKFIKLGNKVNGPKSADTMFHKEALKNIDANLCMFHDQALIPIKSSDFYGSINFTAGLPFIRTSPDHGTAFDIAGENKANSSSLTNAIKYINLIYNQRIKNEKKI

SEQ ID NO: 85213 - protein, 53 aa, Unknown
  Bacterial polypetide isolated from the Sargasso Sea
SSVNLTIGLSFIRTSPDHGTAFDIAGKNLANPTSTIEAIKLAWHLSKKEKKNQ

SEQ ID NO: 85214 - protein, 63 aa, Unknown
  Bacterial polypetide isolated from the Sargasso Sea
PMKVIALNYSVNTTIGLPFIRTSPDHGTGFDIAGKGIAQSQSMIEAIKAAVEMTNNSRLLNAH

SEQ ID NO: 85215 - protein, 223 aa, Unknown
  Bacterial polypetide isolated from the Sargasso Sea
MQNESEIKIGFTIGDPNGIGPEVLIRALHYLYPFNKWQPLIFGDLEIIKEINKAVGTSFSYKPIPNNHDIPLEEINDSSCIPVIDIPVKKNREWKLGLCSSWGGESAFKFFHNAILWANKKSIDAIVTSPLSKEALFSAGYNFTGHTEIISHYSNGARSVMMLSVDDLRASMVTLHMSLRQALDSITSELILEVIEITNHGLKRMGIQNPKLGIAGLNPHAGE

SEQ ID NO: 85216 - protein, 194 aa, Unknown
  Bacterial polypetide isolated from the Sargasso Sea
EIISHYSNKARSVMMLLVDNLRASMVTLHMPLRQALDSLTPELILEVIEITDSGLKKMGINSPKLAIPGINPHAGENGLFGDEEKKIILPALDLARKKSLHCEGPFPPDTIFLEHQKGKFDAVVALYHDQALIPLKLYGFDRAVNITLGLPIIRTSPDHGTAFKLAPKMQANPNSMIESIKMAIKMASSSCSFV

SEQ ID NO: 85217 - protein, 232 aa, Unknown
  Bacterial polypetide isolated from the Sargasso Sea
MPSSPSQPIAITYGDPAGVGPDLVLSLLDTFSDAPMVIIGDRQVLSERAQQLGLTVALSDWQPGDLLPVGSLPVWHTPAGAPVIAGQPDPATAAGTVTMLTRAAQGCLKGTFSAMVTAPVAKNVICNGADPAFTGHTEFLAEQAGVNQVVMMLTASPGGQPLRVALATTHLPLSQVPAAITPDSLMRTLTILRDDLISKYRITEPRIMVLGLNPHAGEEGHLGREELDVIIP

SEQ ID NO: 85218 - protein, 262 aa, Unknown
  Bacterial polypetide isolated from the Sargasso Sea
PEVCLHLLQNTDLARRCVPIVFGDRAVLEQAAEQCGLTKPTAYIDGLAEAEGPCVLDLSAIALSDFETGTINAATGRAGYTYVEDAINAALSGQVAAVTTAPLNKEALRAAGVPFPGHTEIFAELTHAQRACMLQYSNEVRCVFVTTHVPYAEVPRLLTKERILDTLELGAQAMRRIGCIDGNEPKIGVLGLNPHAGEHGLFGNEEETIISPAIELARERGFDVEGPIPPDTAFLPAKRRATDVFVCLYHDQGHIPLKALCF

SEQ ID NO: 85219 - protein, 235 aa, Unknown
  Bacterial polypetide isolated from the Sargasso Sea
FNLNQSIQPGVMDSKNGFYTLSMIDDAVKGCMDGRFTGCITGPVNKESIAKSGYEFSGHTEYIGKLCNQTPVMTFISDHMKIALLTTHLPIKDVPSQITLQGIIDIVKIIHADLVNYFGIKNPKIGITGLNPHAGENGHIGREEEEIFLPALKSLNDSGIHVDGPYAADTILLNDTGHDLIISIFHDQLLPLFKHANPHLSTNVTMGLKIIRTSVDHGVAFDKVGTPDINHQSLY

SEQ ID NO: 85220 - protein, 49 aa, Unknown
  Bacterial polypetide isolated from the Sargasso Sea
GLPFIRTSPDHGTAFDIAGENKANSTSLANAIKYINLIYSQRIKNEKKI

SEQ ID NO: 85221 - protein, 121 aa, Unknown
  Bacterial polypetide isolated from the Sargasso Sea
LNPHAGEHGLFGAEEEAVIIPAINAARAKGFDVEGPIPPDTAFLPNKRKETDLFVCMYHDQGHIPLKALCFDKAVNTTLGLPIVRTSVDHGTALDIAGQGRANPNSLFEAVKLALKFIKNK

SEQ ID NO: 85222 - protein, 262 aa, Unknown
  Bacterial polypetide isolated from the Sargasso Sea
MSELYAVTSGDPAGIGPDISLKIALREDSHQFVVFGNMNLLRERAEMHAMDIKFIEFDEVTSDSQIQKNTLLVKNFNLNESIQPGVMDSKNGSYTLSMIDDAVKGCMDGRFTGCITGPVNKESIAKSGYEFSGHTEYIGKLCNQTPVMTFISDHMKIALLTTHLPIKDVPGQITLQGIMDVVKIIHADLVNYFGIKNPKIAITGLNPHAGENGHIGREEEEIFLPALKSLNDSGIHVDGPYAADTILLNDTGHDLIISIFHD

SEQ ID NO: 85223 - protein, 208 aa, Unknown
  Bacterial polypetide isolated from the Sargasso Sea
MPPLVLTTGEPAGVGPELTVQLLQRPLPSPLVIAGDPDLLLERAALLSLPLARKGDALVAPGGEAVLLPVALGATSIPGSLDVANAAYVIEMLAGATDGCLNGEFSGMVTAPVQKSTLIEAGNDFVGHTEFLAQRAGVTTPVMMLATDALRVALVTIHLPLSEVPRAVTQDGLEAVLRVVDSDLRARFGIAAPVIGVCGLNPHAGEAG

SEQ ID NO: 85224 - protein, 184 aa, Unknown
  Bacterial polypetide isolated from the Sargasso Sea
YISKEFKVVNSAMLIYNKELAVCPITTHLPLKSVAKTINKKLIIDKIKVINKFYKIKLYKKPKIGVLGLNPHCESIDKFNEDEKIIKPAIKFLKNKKYDISGPYPADTIFMKKNRKKFDVIIGMYHDQVLTPLKSLYEYDAINITVGLPFIRISPDHGPNETMMGKNISNPLSLIKAIKFLDKN

SEQ ID NO: 85225 - protein, 82 aa, Unknown
  Bacterial polypetide isolated from the Sargasso Sea
ALRIRFFFRPMKWQYDMVVAMYHDQGHIPLKLLGFYDGVNITAGLPFIRTSADHGTAFDIAWTGKAKSESMAISIKLAMQLA

SEQ ID NO: 85226 - protein, 221 aa, Unknown
  Bacterial polypetide isolated from the Sargasso Sea
MIKIAVSSGDPAGIGPDICIKAFGQKKPYDFFPVIFGDKEILKSRAENLGINVDIKTYEGKEKLSNDSLWIANQPCDINVNPGKPDPDCANFIISIFKQAVKRTLSKEFKAIVTCPINKEVINKGGIKFTGHTEELAKLSNTDSVVMLLVNENLKVALATTHLPLKEVPSKITKDLINKTLLIIDRDLKNKWKIKNPSIKVLGLNPHAGDGGFIGLEDQGN

SEQ ID NO: 85227 - protein, 313 aa, Unknown
  Bacterial polypetide isolated from the Sargasso Sea
ECCFPIVIGDLKVLKLHAQKMGIRNRLRAIDSSEILKLRNEKLNFSPVIDLKNVKMSEKMFGKVRSSFGKASAEYIEVGVELVKARSCDAIVTGPIHKEAFNSAGYMFPGHTEFITSLVGGEKPVMMFCHPKLKIAHVSTHCSLKDALKKVKKRQIIHVGKVFSDSLQYMGFKNPRIGVAALNPHCGEGGLFGSEEIKEIVPAVNQLKTLGIDITGPISPDVVFSMNRDSVFDGVIAMYHDQGHIPGKMIGFNFKKKGAVVHAVNVTLGLPIIRTSVEHGTGFEIAGKGIASEMSMVDALLLASKMVRAKKNS

SEQ ID NO: 85228 - protein, 289 aa, Unknown
  Bacterial polypetide isolated from the Sargasso Sea
GESNITRNHIFITDPKLLLDSSKKLKIRIKINLLKAVTSKTLSGLGIINVYPLKLRAENKPGHMSPKNASFVIDTIQTAAEGCMRGDFDAMVTGPISKSILNAGGYKISGHTEFLAKLCKSKSIMMLMNNRLKVTLQTIHIPLKKITMEITKNKIIETVRIVNEDLKTKFGYTKPKILICGINPHAGEDGLLGREEIDIIIPAVKSLKKMGIEIDGPVPADTAFIKKFVNKYDVIHSMYHDQGLPVIKFDDFSKTTNVTLGLPIIRVSVDHGTAVELVGTGKADISSFI

SEQ ID NO: 85229 - protein, 240 aa, Unknown
  Bacterial polypetide isolated from the Sargasso Sea
MNPSNASFVINTIKTAAKGCLNHNFHSMVTGPISKSILNRGGFKISGHTELLAKLCKSKSIMMLMNDKLKVTLQTIHIPLNKVSKQITKKNIIEKIKIINHDLINKFGLIKPRILVCGLNPHAGEEGILGSEEINIIKPAIEALKKQGVNIDGPVPADTAFISKYISKYDVIHTMYHDQGLPVIKYDDFSKTTNVTLGLPIIRVSVDHGTATDLVGTGNVDISSFIQALKVARDISKSAS

SEQ ID NO: 85230 - protein, 173 aa, Unknown
  Bacterial polypetide isolated from the Sargasso Sea
KVVHLSTHKSLIEAARYVKKDVLIEKLLMVHKTLEYWGLYRPVIGVAALNPHGGEGGLLGREELDEIGPAIMELNKMGVDSRGPYPADSIFYRAIDGEFDVVLALYHDQGHIAIKVHNFHESTTATLGIPFIRTSVDHGTAFDIAGKGVADSSGLLAAIASAEALINRDLRSL

SEQ ID NO: 85231 - protein, 215 aa, Unknown
  Bacterial polypetide isolated from the Sargasso Sea
MNFNYKNNTFKVVISIGDESGIGPEIILKALFSKEIPEDIEYLLVGSKKNLQNTYTHLRSLGLKNIANPNNLEIHDLEISESTNTSKSSYGHTSFKYLIEAIEIVKQYPNSALVTGPICKKSWSLAGHDFSGQTEVLAKSCEVKNVGMLFTAKSPITGWRFNTLLATTHVALCEVPKLLTKELIHSKLDLLKKFCSTYINNPTLKVAGLNPHAGE

SEQ ID NO: 85232 - protein, 57 aa, Unknown
  Bacterial polypetide isolated from the Sargasso Sea
FTYSVNTTIGLPFIRTSPDHGTGFDIAGKGIAESHSMIEAIKTAIEMTNNSRLLYTH

SEQ ID NO: 85233 - protein, 180 aa, Unknown
  Bacterial polypetide isolated from the Sargasso Sea
MISEEIKIALLTDHIPLKDVSNAINKDIVEQKIKALETSLIEDFQIKKPKIAVMAVNPHAGDNGLIGNEDKSIITPAINSFSIAQSSVSGPFSADTFFANENYKKYDGIIASYHDQGLIPFKTISFGKGVNFTAGLPIVRTSPDHGTGFDIAGKGIADHTSFTNAIKLGLQVFKLRNKLD

SEQ ID NO: 85234 - protein, 99 aa, Unknown
  Bacterial polypetide isolated from the Sargasso Sea
NTCCKELIASNVDVSMPLSADTAFNKNLLDETDAYFAMYHDQGLPVLKALSFGDSINITLGVPIVRTSVDHGVALDIAGKGIANNSSLKNAFYAADNLI

SEQ ID NO: 85235 - protein, 248 aa, Unknown
  Bacterial polypetide isolated from the Sargasso Sea
MKTIIYSPGDPAGIGPDLFLSLLNEDFFRFIKANVVCIGDQKLFASRAKELGYSFEISTFTDINDVNEKVGCLEIMKCPDISSGRLNSINSEYVIKNLDFGIDACMKSKGLGLVTGPISKENIVEGGYSFSGHTERIMENTNSDDVLMLLASERLKVALATTHMPLNKVSESITTDLIINKVKILNQELKSKFNIEKPKISLLGLNPHAGEGGKLGKEEIEIIIPAVKELIASNVDVSMPLSADTAFN

SEQ ID NO: 85236 - protein, 258 aa, Unknown
  Bacterial polypetide isolated from the Sargasso Sea
KYLPIFPIEIDKKTVLGSPNIKNSKKILESIDKAVRFVKNGEASSMVTNPVSKEVINKINKSFKGHTEYLAKKDKQKIFCMMMINNKIKNVPLTTHLPLRKVSKHISEKLIIQTSQLINRTLKKDFGIANPKIVITGLNPHCGDKGLLGNEENKIIIPAIKKCKAKKIRIHGPISADSAFIKSNLQLYDAFLCMYHDQALIAAKVIDFENTVNFTAGLSYVRTSPDHGTGYEIARKFIANETSLISAINTSILIASNK

SEQ ID NO: 85237 - protein, 284 aa, Unknown
  Bacterial polypetide isolated from the Sargasso Sea
LSNFSLFHECNFIIYSSIDLIKKQKKHFQIDTPSIIKIDSEEDVLDTHINIKEVFSNSQFNFGESDKELSELGILSLKEATKAIKDKNIDILVTAPINKDLSFSESFKYTGHTDFLKSYFRTSPLMLMISKELKIALLTDHIPIKDVSNAINKDLVEQKIKALETSLIKDFQIKKPKIAVLAVNPHAGDNGVIGNEDHSIITPAINSFKGTTSSINGPFSADTFFVNENYKKYDGVIASYHDQGLIPFKTISFGKGVNFTAGLPVVRTSPDHGTGFDIAGKGIG

SEQ ID NO: 85238 - protein, 250 aa, Unknown
  Bacterial polypetide isolated from the Sargasso Sea
MTKIAVSSGDPAGIGPDICIKAFGQKKLLAYKPVIFGNIDLLKERAEEIKIKVDIKEYSGEDSNSLTNESLWVVNRPIGSEVKSGNPEPNTAKYIMSIFKDSVKKTISKEFNAVVTCPINKELMNKGGVSFTGHTEELASLGNTKDVVMMLANEKIKIALATTHLPLSEVPSHINENLLINTISIINQSLKNHWKLKNPIIKVLGLNPHAGDGGYLGREEKNIICPTLDKLREQGLEIIGPVSADTAFVS

SEQ ID NO: 85239 - protein, 197 aa, Unknown
  Bacterial polypetide isolated from the Sargasso Sea
YNFPGHTEIISHYSNKARSVMMLSVDDLRASIVTLHMPLRQALDSLTPELILEVIEITNSGLKKMGINSPKLAIPGINPHAGENGLFGDEEKKIILPALDLARKKSLHCEGPFPPDTIFLEHQKGNFDAVVALYHDQALIPLKLYGFDRAVNITLGLPIIRTSPDHGTAFKLAPKMQANPNSMIESIKMALKMASSS

SEQ ID NO: 85240 - protein, 311 aa, Unknown
  Bacterial polypetide isolated from the Sargasso Sea
MGDPSGIGTEITIKSWKSKKIKTPFFVIHDPLYVEKIIKKMGVKVKIKIIDHPKDALKCFKNYLPVFAIKIDKKTKLGFPNKKNSRSILESINKAVYFVKNGDATSMVTNPISKEIINKIQKNFKGHTEYLAKKDKQKSFCMMMINSKIKAVPLTTHLPLKKVSQNISEKLILETSQLIHKTLKKDFKKGNPKIAITGLNPHSGDKGVIGDEEKKIIIPAIKKCKKRKIRLNGPISADSAFISSNLKTYDAFLCMYHDQALIAAKVIDFENTVNYTAGLSYVRTSPDHGTGYDISKKFICNESSLISAINA

SEQ ID NO: 85241 - protein, 272 aa, Unknown
  Bacterial polypetide isolated from the Sargasso Sea
KIHKQDSTDNVKKNHAGVIQLITVSRCQNTNAGKLDTNNAKYVLNNLNFSIKQTLFDKEAALVTGPISKENIISIDKSFMGHTEYIKKITKSKDVLMMLASDQLKVALATTHIPLRDVTKAITKDLIINKVKILHQELKNKFNIKNPNIKVLGLNPHAGESGKIGSEEENHIKPAINLLKKRKINVSMPISADTAFSQKLMKETDAYLGMYHDQVLPVLKTLSFGNSINVTLGVPIIRTSVDHGVALDIAGTNKSDSSSLLLAIKTAKRLIK

SEQ ID NO: 85242 - protein, 271 aa, Unknown
  Bacterial polypetide isolated from the Sargasso Sea
MKKIIYSPGEPAGIGPDLIIKIAFDKEWENLRIPILVIGDPELFIHRSKLLKKKIKIISIKSIKELQSNKKGILQVIKIRECKNKSIGKISKSNAKYVLDNLDFAIEKAVLNKDTALVTGPLSKENIISIKKDFSGHTEYIQKVTKSSDVLMMLVSEKLKVALATTHIPIKDVSKKITKKLIMNKINILNNDLKDKFHINNPTIKVLGLNPHAGENGKIGDEELKIITPAIKEMRKKNINVSFPISADTAFSSKSLKETDAYLGMYHDQSL

SEQ ID NO: 85243 - protein, 326 aa, Unknown
  Bacterial polypetide isolated from the Sargasso Sea
MKKIIYSPGEPSGIGPDLIIKLSSSNLWEDLKIPIVSIGDPKLFIDRAALLKKKIKIIELESLNQVSKNCKGLIQIIKVTKCSNTKPGKLYKSNAQYVLDNLTYSIKQTMQNEGTALVTGPLSKENIISIDKLFTGHTEYIKKITKSKDVLMMLASDQLRVALATTHIPLKNVSRTITKELIINKVKILNEDLKNKFNVKKPNIKVLGLNPHAGENGKIGKEEQDHIKPATRELRKKKINVSMPISADTAFSRKSLKEADAYLGMYHDQVLPVLKTLSFGNSINITLGIPIIRTSVDHGIALDIAGTNKSDPSSLILAVKTAKKLI

SEQ ID NO: 85244 - protein, 299 aa, Unknown
  Bacterial polypetide isolated from the Sargasso Sea
MSYKVPILTIGDKKLFEQRAKVLKKKIKIIEIKDPSKIAPNKAKTLQVYKVIDCVDVKPGKLNNANAEYVIRNLNFAIKECLKSDKSALVTGPISKENVMTLNKRFVGHTEHIKKVTKSNDVLMMLASDKLRVALATTHIPLKKVPEFINQNLIINKTQILNDDLKSKFKIKKPKIKILGLNPHAGENGKIGSEEKNILIPAIKKLRKKKIDVSYPISADTAFSKKSLKETDAYLGMYHDQVLPVLKALSFGNSINISLGIPIIRTSVDHGVALDVAGTNNSDISSLKLAIKTAKTLIK

SEQ ID NO: 85245 - protein, 311 aa, Unknown
  Bacterial polypetide isolated from the Sargasso Sea
MIKNQIVVSLGEPSGIGPEVFLKAIFETSLKEQLELITVVASKKVIQNVSQELNYHKINSLKIIEVNLDSEFILGKPNTKNAPYVIECLNKATDLAHKEKISLVTGPINKKVIANTISGFSGHTEFLKEKFDCEDVLMLLANNSLKVGVATTHVALKDVPKMISKDLIIRKCKLLKKGLKDIYGLEAPKIAVLGLNPHAGEDGSFGIEEIDSINPAIADLKKEGLDIVGPLAADTAFINGNYDAYLSMYHDQALPVLKTLDFHHSVNITLGLPFHRISVDHGTAEDIAPKFIADYTSMFEALKLAGNGNIT

SEQ ID NO: 85246 - protein, 315 aa, Unknown
  Bacterial polypetide isolated from the Sargasso Sea
MSIKPLVIGVTMGDPAGIGPEITTALLAERVYEKEVRAVLIGCAKMVEEAARRKGLDVSVRRHEVLKRNELRSGAIDVYDPEVFDAALVQPGGISKEAGEASMLYNRQGAELAMAEEIDGLVTSPVTKASAKMAGYDYPGQAEYFAELAGGVPFSTILIWQNFKAALFTTHTPLIDACRAVTKDNLLKKIRYLHQNRFALGLPNLRLAVAALNPHAGEFGTMGREEKDEIEPAISIAQSEGISVDGPFPVNALISPPYNGRDYDLTLALYHDQVVSRMNMNETTTLTFGLPFIRTSVGHGSALDIAGNDVLIMVR

SEQ ID NO: 85247 - protein, 62 aa, Unknown
  Bacterial polypetide isolated from the Sargasso Sea
LIPLKLYGFDRAVNITLGLPIIRTSPDHGTAFQLAPKMEANPSSMIESIKMALKMASSSGSL

SEQ ID NO: 85248 - protein, 232 aa, Unknown
  Bacterial polypetide isolated from the Sargasso Sea
MNLPQSKKNLPVLALTMGDPNGIGAEVMLKALDQLSPIRNWKPLIFGDFKVLEKVRDKLGLDLDLLKKDPEIAHEIQQEMENQIPVLDLGEHSNEWQPGICSRWGGESAFRFLNTAIQWTQQGSTDAIVTAPLNKEALKKSGHDYPGHTDILAEVTGHPRAWMMLECEKLRAVMVTLHMSMKNVLEQLSPSMIHETIEVTDQALKRMGFDRPRIGVAGLNPHAGENGMFGDE

SEQ ID NO: 85249 - protein, 225 aa, Unknown
  Bacterial polypetide isolated from the Sargasso Sea
MKKIIYSPGEPAGIGPDLIIKLASNKALENFKIPLLVVGDPNLFLARSKLLKKKIKIINIDSITELKNNKKGALQVISVCKCKNTSPGKIHRSNAKYVLDNLNYAIKETISDRDTALVTGPLSKESIISIKKDFSGHTEHIQKLTKSNDVLMMLASDKLKVALATTHIPIKDVSNKITKKLIINKIKILNEELKDKFKINKPNIKVLGLNPHAGENGKIGNEELK

SEQ ID NO: 85250 - protein, 207 aa, Unknown
  Bacterial polypetide isolated from the Sargasso Sea
INSGHAFSGHTEYIGNLCNQTPVMSFVSDQMRIALLTTHLPLKDVPSQITSKRIIDIVNTIHSDLKNYFGIKKPKIGIVGLNPHAGENGHIGKEEEEVFRPALNALNESGIDINGPFAADTILLNETGHDLIISIFHDQLLPLFKYAKPHLTTNVTMGLKIIRTSVDHGVAFDKVGMPDINHQSLYHALDTAKSMANSYEKTKSYKS

SEQ ID NO: 85251 - protein, 311 aa, Unknown
  Bacterial polypetide isolated from the Sargasso Sea
MIKNPIVVSLGDPSGIGPEVFLKAIFKTELKNCLDLINIVSSKKVIEKISHELQYNEIDSLNIINIDLDSDFILGKPDKKNASYVIECLDKAADFAYKEKISLVTGPINKKIVSSQIAGFSGHTEFLKEKFDSKDVLMLLANNSLKIGVATTHVALKEVPQMITKELIIKKCRLLNQGLKSIYEIDNPKIAVLGLNPHAGEEGSYGKEEIESIKPAIADLKSEGLDLIGPISADTAFISRGFDAYLSMYHDQALPVLKTLDFHHSVNITLGLPFNRVSVDHGTAEDIAPKFIADYTSMLEAIKLAGNGNIA

SEQ ID NO: 85252 - protein, 331 aa, Unknown
  Bacterial polypetide isolated from the Sargasso Sea
MSELYAVTSGDPAGIGPDISLKIALREDSHQFVVFGNMNLLRERAEMHAMDIKFIEFDEATSDSQIQKNTLLVKNFNLNESIQPGVIDSKNGSYTLSMIDDAVKGCMDGRFTGCITGPVNKESIAKSGYEFSGHTEYIGRLCNQTPVMTFISDHMKIALLTTHLPIKDVPGQITLQGIMDVVKIIRADLVNYFGIKNPKIAITGLNPHAGENGHIGREEEEIFLPALKSLNDSGIHVDGPYAADTILLNDTGHDLIISIFHDQLLPLFKHANPHLSTNVTMGLKIIRTSVDHGVAFDKVGTPDINHQSLYHALDTAKSMANSYEKTKSNQS

SEQ ID NO: 85253 - protein, 213 aa, Unknown
  Bacterial polypetide isolated from the Sargasso Sea
MKKTLIINGFNYPGHTEYLGKVSNKRPLMIMLNKKLKVATLTTHIPITQVPKKITKSNLEKTIKIYIESLKLDFGLTDPKVAVSSLNPHNGEEGKIGNEEIKVIKPTIDKFKKQGNKINGPKSADTMFHKEALKNIDANLCMFHDQALIPIKSSDFYGSINFTAGLPFIRTSPDHGTAFDIAGENKANNSSLTNAIRYVNLIYNQRINNEKKL

SEQ ID NO: 85254 - protein, 58 aa, Unknown
  Bacterial polypetide isolated from the Sargasso Sea
PVLKSQGFGKSVNITLGLPYIRTSVDHGTALDLAGTGKADIGSFVCALNKAIELSSKN

SEQ ID NO: 85255 - protein, 243 aa, Unknown
  Bacterial polypetide isolated from the Sargasso Sea
FKNGSYTLSMIDDAVKGCMDGRFTGCITGPVNKESIAKSGYEFSGHTEYIGKLCNQTPVMTFISDHMKIALLTTHLPIKDVPGQITLQGIMDVVKIIHADLVNYFGIKNPKIGITGLNPHAGENGHIGREEEEIFLPALKSLNDSGIHVDGPYAADTILLNDTGHDLIISIFHDQLLPLFKHANPHLSTNVTMGLKIIRTSVDHGVAFDKVGTPDINHQSLYHALDTAKSMANSYEKTKSNQS

SEQ ID NO: 85256 - protein, 326 aa, Unknown
  Bacterial polypetide isolated from the Sargasso Sea
MKKIIYSPGEPSGIGPDLIIKLSSSKLWENLKIPIVSIGDPKLFIDRAALLKKKIKIIELDSLNKVSKNSKGLIQIIKVTKCSNTSPGKLSKSNAQYVLDNLTYSIKQTMQNEGTALVTGPLSKENIISIDKLFTGHTEYIKKITKSNDVLMMLASDQLRVALATTHIPLKNVSRTITKKLIINKVKILNEDLINMFKIKKPNIKVLGLNPHAGENGKIGKEEQDHIKPAIKELRKKNINVSMPISADTAFSKKSLKEADAYLGMYHDQVLPVLKTLSFGNSINITLGIPIIRTSVDHGIALDIAGTNKSDPSSLILAVKTAKKLI

SEQ ID NO: 85257 - protein, 153 aa, Unknown
  Bacterial polypetide isolated from the Sargasso Sea
SRTISKKLIINKVKILNEDLKNKFNIKNPNIKVLGLNPHAGENGKIGKEEQDHIKPAVRELRKKKINVSMPISADTAFSRKSLKEADAYLGMYHDQVLPVLKTLSFGNSINITLGIPIIRTSVDHGIALDIAGTNKSDPSSLILAIKTAKKLI

SEQ ID NO: 85258 - protein, 332 aa, Unknown
  Bacterial polypetide isolated from the Sargasso Sea
MPLRKKPPIAVSMGEPGGINIEIISQCVKKKLPDFFLISDPKWVEKCLKQLNLNIKVNILDNIDSCIKGHLNILPIKCKVKYGFKKSYEQNFPAIIESLDLAIKLAQRKKVSGIVTLPILKKTLTINGNHYPGHTEYLGKKSNKKPLMIMLNKALKVATLTTHIPISQVPNKITKSNLEKTIRVYIKSLNRDFGLTDPILAISALNPHNGEDGKIGNEEIKIITPVIEKLKKQGNKIYGPKSADTMFHKDALKNVDANLCMFHDQALIPVKSFDFYGSINYTAGLSFVRTSPDHGTAFDIAGENKANNSSLINAINYAQMIYNQRSEYDKKL

SEQ ID NO: 85259 - protein, 313 aa, Unknown
  Bacterial polypetide isolated from the Sargasso Sea
MKKPNVGITIGDYNGIGPEVTLKALKNNKILRSCNIFLITDKEIIDSLKIPIDTKVNLHLRKNKIILKHGNPTIHSGRASLDYISQGIDLIKNNKIDCLVTAPISKTAISLAGSKFKGHTDLLQKAFKRNEVVMTFFSKKFNVSLATIHIPVKRISNSLTKELIINQVKIINDFLKVFLKSKNPRIGICGLNPHASEDGNIGDEDLTIIRPAVKFLQDSKIDIKGPLPADTIFVKSTRNKFDIIHAIYHDQGLVPFKMIAFDTGVNVTLNLPFVRTSPDHGTGYDIAGMNKASSSSMEEAILLAVKIYKSFQL

SEQ ID NO: 85260 - protein, 331 aa, Unknown
  Bacterial polypetide isolated from the Sargasso Sea
MSELYAVTSGDPAGIGPDISLKIALRDDSHQFVVLGNIKLLRERAEMHAMDVKFIEFDESILDSQIQKNTLLVKDFKLNHTVQPGVMDSKNGSYVLSMIDYAVKGCLDGRFSGCITGPVNKEAIINSGYAFTGHTEYIGQLCNQTPVMSFVSDQMKIALLTTHLPFKEVSTHITSNGIIDVVSIIHSDLVNYFGIENPNIGIVGLNPHAGENGHIGKEEEDIFLPALSTLNESGIDINGPFAADTILLGDIEYDLILSIFHDQLLPLFKYANPHLSTNVTMGLKIIRTSVDHGVAYDKVGMPDINHQSLYHALDTAKSMANSYEKTKSAQS

SEQ ID NO: 85261 - protein, 326 aa, Unknown
  Bacterial polypetide isolated from the Sargasso Sea
MSSHVFISPGDPAGIGPEITLKSLKNLNETQKFVIAGDIQYLENLSTSLKLGFEFIPYGVSKTTSSSKLIEVINIPLQEKPVLGSSSVNNAKYILEVLSTCAEHCMDNTNNILVTGPINKETISASGTDFSGHTEFLAEHAKIVSPLMLMANEKIKIGLATTHIPIKKVSESITEDLIYKKLKVLCFGLKRLLKKENLKICVLGLNPHAGEGGYIGTEESTTILEGIKKFDQREVTVDGPISADTAFSEKNLSHYDAFLAMFHDQGMIPAKILGFGQTLNITFGLPYLRISVDHGTALDIADDMNADFSSMKLALKTALASLDEKK

SEQ ID NO: 85262 - protein, 321 aa, Unknown
  Bacterial polypetide isolated from the Sargasso Sea
MKTILYSPGDPAGIGTDLFLELVNNKFFDTLQARIVCLADPHLLQARASMLGFDNDFQKLCAWHMLPESQDCIESCPDTTAGKLNPQNASYIMQVLNFGIQQCMEHSDFALVTGPISKENIIEGGISFSGHTEYIQEQTKSADVLMLLASERIRVALATTHIPLRKVADHISQELIVSKVTILFEELQQKFGIVNPQITVLGLNPHAGEGGKLGTEEQDIIIPAIQTLQQQGITVKGPLSADTAFSKDLLDSTDAYLAMFHDQGLPVLKTLSFGDSINITLGVPIIRTSVDHGVALDIVGQRVANPSSLKNAFIIANELLG

SEQ ID NO: 85263 - protein, 212 aa, Unknown
  Bacterial polypetide isolated from the Sargasso Sea
TGPVHKGIINKAGVSFSGHTEFFAYQSNTIDVVMLLATEGLNVALATTHIPLEYVAKAITRERLHKVIHIINTDLKLKFGVKEPHIYVCGLNPHAGEDGHIGTEEIHTIIPALNELREEGLKITGPLPADTIFQPKYLENADVVLAMYHDQGLPVLKYKGFGASVNITLGLPFVRTSVDHGTALDLAGTGEADAGSFRKALEKAIELAHHQQ

SEQ ID NO: 85264 - protein, 108 aa, Unknown
  Bacterial polypetide isolated from the Sargasso Sea
GKEEQEVIIPVIEKLKMKGLDLKGPVPADTAFNKNTLQGIDAVLAMYHDQGLPVVKYAGFGSAVNITLGLPIIRTSVDHGTAYELAGTGMSDYSSMISAVECALKMAD

SEQ ID NO: 85265 - protein, 238 aa, Unknown
  Bacterial polypetide isolated from the Sargasso Sea
VGNQHLNIFKTPYWWANKKKIDAIVTAPLSKEALFSAGYNFEGHTEIISHFSNGARSVMMLSVDNLRASMVTLHMSLRQALDSLTSELILEVIEITDYGLKRMGIQNPKLGIAGLNPHAGENGLFGDEENKIIIPALDLARKKNLLCEGPFPPDTIFLEHQKGMFDAVVALYHDQALIPLKLYGFDRAVNITLGLPIIRTSPDHGTAFQLAPKMVANPSSMIESIKMALKMVSSSSSV

SEQ ID NO: 85266 - protein, 179 aa, Unknown
  Bacterial polypetide isolated from the Sargasso Sea
VNKYLRVVPATIHIPIKDITKYLTAELIEKTIKTTHQELNSRFSISNPSIWISGLNPHAGEAGTIGDEEQKIIIPVIRKLQSEGYNLIGPISADTMFYGKKRRRFDAAICMYHDQALIPIKTLDFHSSVNLTIGLSFIRTSPDHGTAFDIAGKNLANPTSTIEAIKLAWNLSKKERKDQ

SEQ ID NO: 85267 - protein, 181 aa, Unknown
  Bacterial polypetide isolated from the Sargasso Sea
STSVMMLMNSYMKVALHTTHVPLQNVTKHITFESLKKTINIINSDLKKKFRIKKPKILVTGLNPHAGEDGMLGKQDSEVIAPAIADMKKNKILVDGPVPADTAFLKKYIENYDIILTMYHDQGLPVIKFNNFKKTVNVTLGLPITRVSVDHGTALDLVGTGNIDISSFIQAIRVAKFISNA

SEQ ID NO: 85268 - protein, 69 aa, Unknown
  Bacterial polypetide isolated from the Sargasso Sea
MYHDQGHIPFKLIGFYDGINISAGLPFIRTSVDHGTAFDIAWKGVAKEESLVKAILLASELSTKQMELT

SEQ ID NO: 85269 - protein, 112 aa, Unknown
  Bacterial polypetide isolated from the Sargasso Sea
NTIAPAIEDAKQQGILTSGPYSPDTIFLRHQAGEFDAVVAMYHDQALVPLKLMGFGKSVNITLGLPLIRTSVDHGTAFDRAATFHSDSSSMEAAIQSALRLCRNSIVAGDSN

SEQ ID NO: 85270 - protein, 174 aa, Unknown
  Bacterial polypetide isolated from the Sargasso Sea
LGYVEVAQHLTTERIVAVLRLTNTALRTIRGTVPRLLVCGLNPHAGEHGLFGNAEEEKIITPAVEQARQQGLDVNGPVPADTAFTPQSRERFDAMVCMYHDQGHIPIKMIAFDRAVNITLGLSTIRTSVDHGTAFDIAWKGTADPGSLFQAVHLATQLAKKKLSEAKNRQTEQT

SEQ ID NO: 85271 - protein, 87 aa, Unknown
  Bacterial polypetide isolated from the Sargasso Sea
SGPHSADTAFINNNQIKPDIVLAMYHDQGLPVIKTIGFGKITNVTLGLPFIRTSVDHGTAYDMAGSIQADESSLIEAAKIAASIAIN

SEQ ID NO: 85272 - protein, 323 aa, Unknown
  Bacterial polypetide isolated from the Sargasso Sea
MTKLRWVLTTGEPAGVGPELTVQLLQRPLPSPLVIAGDPDLLLERAALLSLPLARKGDALVAPGGEAVLLPVALGAPSIPGSLDVANAAYVIEMLAGATDGCLNGEFSGMVTAPVQKSTLIEAGNDFVGHTEFLAQRAGVATPVMMLATDALRVALVTIHLPLGEVPRAVTQDSLEAVLRVVDSDLRARFGIAAPVIGVCGLNPHAGEAGHLGQEEQDVIIPVMAKLSDEGLVLKGPLPADTAFTQQNLQTLDVVVAMFHDQGLPVIKHAGFGDVVNITLGLPFVRTSVDHGTALDLAGTGKAEVASLSRALDVAIQLSSDHF

SEQ ID NO: 85273 - protein, 219 aa, Unknown
  Bacterial polypetide isolated from the Sargasso Sea
KKIHALCTAPISKISLHKAGYSYPGHTEILADLTSSEEVSLMLMTPKLNVAHVTTHIGLIDAIEKIDEGLVFRTIKRGRQVIQKIIGKEPKIGVCAINPHAGENEAFGRGEEKNKIIPAIKKCLALDWYVEGPLAADSLFYTASRGDFDLVVAMYHDQGHGPVKVLGIEHGVNVTIGLPIIRTSVDHGTAFDIAGKGIANEKNLLNAIKKAVLLIDKGN

SEQ ID NO: 85274 - protein, 264 aa, Unknown
  Bacterial polypetide isolated from the Sargasso Sea
LQVISRIAPLPDTIASGQISADAGRGAYEYLCHAIDDALSGNLRAIVTAPLHKEAMQLGGANFPGHTEILAQRTRTEHYAMMLANNELKVILVTIHIPLSQVSTSITLARELQTIRLAHQACLHAGVEHPRVAVAGVNPHAGENGRFGKEENEVLTPAIEQAQREGINVSGPYPGDTIFMRARRGEFDIVVAQYHDQGLIPVKYLGVDEGVNVTVGLPFIRTSVDHGTAFDIAGKGVADPNSLRAAFSLAISMTPPGASERKPQ

SEQ ID NO: 85275 - protein, 92 aa, Unknown
  Bacterial polypetide isolated from the Sargasso Sea
MDSSAKAWNDKNAETHDGILAMYHDQGLIPMKVIALNYSVNTTIGLPFIRTSPDHGTGFDIAGKGIAQSQSMIEAIKTAVEMTNNSRLLNTH

SEQ ID NO: 85276 - protein, 198 aa, Unknown
  Bacterial polypetide isolated from the Sargasso Sea
HTDFLGSLSLKKKNPVMMLVANELKTLPLTVHVPLKKVTQLITKELIKTKIKIAVDDLKTFFDIKKPSIIVTGLNPHAGENGNLGDEEIKIIKPAIDELKKLTDISIKGPISADIAFSSEKRCHYDLAVCMYHDQALIPIKTLDFHNGVNVTLGLDFIRTSPDHGTAFDIAGKNLASPESLISAINLAYEMSTNKNNA

SEQ ID NO: 85277 - protein, 263 aa, Unknown
  Bacterial polypetide isolated from the Sargasso Sea
MGFWDFGEQSNEWQPGTCSRWGGESAFRFLNTAIQWTRQGRADAIVTAPLNKEALKKAGHDYPGHTDILAEVTGHPRAWMMLKCEKLRAVMVTLHMSMKSVLEQLSPSMILETIEVTDQALKRMGFGRPRIGVAGLNPHAGENGMFGDEETKTIAPAIEDAKLQGILALGPYSPDTIFLRHQAGEFDAVVAMYHDQALVPLKLMGFGKSVNITLGLPLIRTSVDHGTAFDRAANFNSDSSSMEAAIQSALRLCRNSIVAGDAN

SEQ ID NO: 85278 - protein, 275 aa, Unknown
  Bacterial polypetide isolated from the Sargasso Sea
SYIQINEIKDFKKIKPNKKKSIQVFNAFKCLDTTPSKLNPKNSKYVLEILDQSIKWCLQNQSFGLVTGPINKANIIDGGHSFSGHTERLMKKTKSKDVLMMLASSKMRVCLVTTHIPINQVAQNINKKLLMRKIIILNDELKNKFKIKNPKIFTLGLNPHAGENGHIGDEETRIINPCIKEAQSMGINISAPMAADTAFSKKNLKTYDAFLAMYHDQALPVIKSMSFGKIVNVSLGLPIVRTSVDHGTALELSGTGNIKLDSLKEAFTVASKMIG

SEQ ID NO: 85279 - protein, 120 aa, Unknown
  Bacterial polypetide isolated from the Sargasso Sea
GLLGDEEYVHIAPAVEDARSLGIDATGPVPADTVFNQNIDGMYDVCIAMYHDQGHIPIKVHDWKRSVSVNLGLPFIRTSVDHGTAFDIAGKGIADHISMMESINTAVSLVSDSKLPGISG

SEQ ID NO: 85280 - protein, 226 aa, Unknown
  Bacterial polypetide isolated from the Sargasso Sea
MQKSWALAGHYFSGQTEVLAKSCGVKNVGMLFTAKSPLTGWRFNTLLATTHIALCEVPKMLNTKLIHAKLDLLKEFCITYNKKPTFKVAGLNPHAGEEGILGNEEKDWLVNALISWNEKNKEIKLLGPLSPDSCWNSSAKAWRQKDVEKHDGILAMYHDQGLIPMKVIALNYSVNTTIGLPFIRTSPDHGTGFDIAGKGIAQSQSMIEAIKAAIELTKNSRLLNAH

SEQ ID NO: 85281 - protein, 184 aa, Unknown
  Bacterial polypetide isolated from the Sargasso Sea
FNTLLATTHIALSEVPKKLTTELIHSKLDLFKDFCNTYTDKPNLKVAGLNPHAGEEGILGCEEKDWLSDALLTWNEKNRDIELLGPLSPDSCWNSSVKAWNDKNAEKHDGILAMYHDQGLIPMKVIALNYSVNTTIGLPFVRTSPDHGTGFDIAGKGIAQSQSMIEAIKAAVEMTNNSRLLNTH

SEQ ID NO: 85282 - protein, 268 aa, Unknown
  Bacterial polypetide isolated from the Sargasso Sea
TGEPAGIGPDITVAALLHLARQTSSRYADVQWHVIGDAALLQARADAIGQGDFWRVASTALTIVERPLGAPVRAGVLDAANGRYVLDLLDVAIDGCLRDAADGARYDAMVTAPVQKSTINDAGVPFTGHTEYLAERSHTPRVVMMLAGPQPAHNNAMLRVALATTHLPLREVPDAITPAVLDETLDIVQRDLRARFGLSAPRILVTGLNPHAGESGHLGREEIEVIEPAIARALDRGINARGPYPADTLFQPRLLADADCVLAMYHDQ

SEQ ID NO: 85283 - protein, 196 aa, Unknown
  Bacterial polypetide isolated from the Sargasso Sea
KSFQGHTEWIKKYTHSKEVVMLLAAKNIKVALATTHIPLSEVSKNIQKFKLVEVIKILNFGLKSNFKIKNPSIKVLGLNPHAGENGKIGKEELLKINPAVKICREMGINVSYARSADTAFNSDQLKETDAYLAMYHDQALPVLKALSFGKAVNITLGTPIVRTSVDHGTALEIAGKIKPNLGSIKEAIKLAEMQLQ

SEQ ID NO: 85284 - protein, 159 aa, Unknown
  Bacterial polypetide isolated from the Sargasso Sea
LSPSMILETIEVTDQALKRMGFDLPKIGVAGLNPHAGENGMFGDEEMNTISPAIEEAKQQDILASGPYSPDTIFLRHQAGEFDAVVAMYHDQALVPLKLMGFGKSVNITLGLPLIRTSVDHGTAFDRAAIFSSDSSSMEAAIQSALRLCRNSIVAGDSN

SEQ ID NO: 85285 - protein, 213 aa, Unknown
  Bacterial polypetide isolated from the Sargasso Sea
INKYTMHKSGFNFEGHTDFLASLSVQKKDPVMMLVTNGLRTVPLTIHVPLKKVYKLITKELIQTKIKIAVNDLKTFFNIKEPRIIVTGLNPHAGENGDFGDEEIEVIKPAIDELKKINNINIIGPISADTAFSLDKRKQYDLAVCMYHDQALIPIKTLNFYNGVNVTLGLDFIRTSPDHGTGFDIAGKNIANPESLISAINLAYEMSINKKHA

SEQ ID NO: 85286 - protein, 172 aa, Unknown
  Bacterial polypetide isolated from the Sargasso Sea
LRVALVTTHLPLREIADAITAERVERVTRILHSDLQHKFGIAQPRILVCGLNPHAGEGGHLGHEEIDIIEPTLERLRQEGMDLRGPLPADTLFTPKYLEHCDAVLAMYHDQGLPVLKYKGFGAAVNVTLGLPIIRTSVDHGTALDLAGSGKIDTGSLHVALETAYQMAETRI

SEQ ID NO: 85287 - protein, 278 aa, Unknown
  Bacterial polypetide isolated from the Sargasso Sea
ANPKNFKIHDVEISSLDNDPKSSYGNSSFQYLTKAIEIVKQYPNSALVTGPICKKSWSLAGHYFSGQTEVLAKACGVKNVGMLFTAKSPITGWRFNTLLATTHISLSEVPKKLTTELIHSKLDLFKDFCNTYTDKTTLKVAGLNPHAGEEGLLGHEEKDWLNDALITWNEKNKDIRLFGPLSPDSCWNSSVKAWNDKNAEKHDGILAMYHDQGLIPMKVIALNYSVNTTIGLPFIRTSPDHGTGFDIAGKGIAQSQSMIEAIKAAVEMTNNSRLLNTH

SEQ ID NO: 85288 - protein, 125 aa, Unknown
  Bacterial polypetide isolated from the Sargasso Sea
HAGENGMFGDEEMNTIFPAIEEAKQQGVLTSGPYSPDTIFLRHQAGEFDAVVAMYHDQALVPLKLIGFGKSVNITLGLPLIRTSVDHGTAFDRAATFNSDSSSMEAAIQSALRLSRNSIVAGDAN

SEQ ID NO: 85289 - protein, 118 aa, Unknown
  Bacterial polypetide isolated from the Sargasso Sea
GDGGYIGREDKEVITPVIEHLRAKGMNLVGPISADTAYLKNEDEQVDAYLAMYHDQGLPVIKSSEFGNSVNVTLGLPFIRTSVDHGTAYDMAGKKEVDETSLLEASYLAFKLANQKTV

SEQ ID NO: 85290 - protein, 298 aa, Unknown
  Bacterial polypetide isolated from the Sargasso Sea
LKKNLLNTYSHLKTLGLEKLANPNSLKIYDLEISLSDNDPKSSYGNSSFYYLTKAIELVKQYRNSALVTGPICKKSWSLAGHYFSGQTEVLAKSCGVKNVGMLFTAKSPITGWRFNTLLATTHIALCEVPKQLNTKLIHSKLDLLKDFCSTYIDKPTLKVAGLNPHAGEEGILGSEEKDWLNAALIAWNEKNKDIKLLGPLSPDSCWNSSIKAWNDKNAEKHNGILAMYHDQGLIPMKVIALNYSVNTTIGLPFIRTSPDHGTGFDIAGKGIAESHSMIEAIKAAAEMTNNSRLLNAH

SEQ ID NO: 85291 - protein, 60 aa, Unknown
  Bacterial polypetide isolated from the Sargasso Sea
SFGTGVNVTLGLPFIRTSPDHGTAFDIAGSDEADPTSMIKALTLAHRLAKNRFDTPPADV

SEQ ID NO: 85292 - protein, 279 aa, Unknown
  Bacterial polypetide isolated from the Sargasso Sea
QGLTSIADPSQLSIDDHPLETSVVPGEPTTAGAAAGFRWLTRAVERVQQGQGRALITAPIAKHLWHAAGHHYPGQTERLAELAGSRHCSMLFTAIAPHGTWRLNTLLATTHLPFSQITAALTPDLVEHKLNVLLEFCRRFRSDPHLVVAGLNPHAGEAGRLGEEETTWLTPLLERWRQQHPSVHLEGPVPPDTCWLNAARAWNQPEASGPDGYLALYHDQGLIPVKLLAFDAAVNTTLELPFLRTSPDHGTGFDIAGRGTARPDSMIAALQAAWNLTGF

SEQ ID NO: 85293 - protein, 126 aa, Unknown
  Bacterial polypetide isolated from the Sargasso Sea
LGNEEKDWLNDSLITWNEKNRDIKLLGPISPDSCWNSSAKAWRQKDAEKHDGILAMYHDQGLIPIKVIALNFSVNTTIGLPFIRTSPDHGTGFDIAGKGIAQSQSMIEAIKTAIEMNKNSRLLNTH

SEQ ID NO: 85294 - protein, 283 aa, Unknown
  Bacterial polypetide isolated from the Sargasso Sea
FQVRSKLINKRIKIRELKSLDASVKNKKGVLQLYKVSNCVDLSPKKLNARNAKYVIDHLDFGIKYCNANKKVGLVTGPIQKSNIIDAGYKFSGHTEWIKKKTGSSDVLMMLASEKLRVALTTTHLPLKEVYKEIKKSKVLKKIMILDSSLKSQLKIKKPHITVLGLNPHAGESGHLGTEEIKYIQPAIKEAKKKGINVNGPLAADTAFNKETLKLTDAYLSMYHDQGLPVLKALSFGDAVNITLGTPIIRTSVDHGTALELAGTNNVSTKSLVVALKQADHML

SEQ ID NO: 85295 - protein, 256 aa, Unknown
  Bacterial polypetide isolated from the Sargasso Sea
MDNNKYSNENFIKGKNSVEAGKASHEWVEIATDLAIENKVDAICTAPINKESWQMASFKDIGHQEIFKRKSKSNYVATMLVSGKLRCMHLSTHLSLSKACEYVTTENVERAIRLTQKHFLEWGFSNPKIGVAALNPHASDGGLIGDTEEKEILPAIINCKNDGINASGPHPADSIFYDAINDKHDVVVVMYHDQGHIPIKVYGFEQSISVNLGLPFIRTSVDHGTAFDIAGENIADPTSMIEAITLANNLAYKSKL

SEQ ID NO: 85296 - protein, 115 aa, Unknown
  Bacterial polypetide isolated from the Sargasso Sea
ALITWNEKNKDIRLFGPLSPDSCWNSSVRAWNDKNAEKHDGILAMYHDQGLIPMKVIALNYSVNTTIGLPFIRTSPDHGTGFDIAGKGIAQSQSMIEAIKAAVEMTNNSRLLNTH

SEQ ID NO: 85297 - protein, 272 aa, Unknown
  Bacterial polypetide isolated from the Sargasso Sea
KIHDLEISSLDNDPKSSNGNSSYQYLTKAIELVKQYPNSALVTGPICKKSWSLAGHYFSGQTEVLAKACGVKNVGMLFTAKSPITGWRFNTLLATTHISLSEVPKKLTTELIHSKLDLFKDFCHTYSDKPTLKVAGLNPHAGEEGLLGHEEKDWLNDALITWNEKNKDIRLFGPLSPDSCWNSSVRAWNDKNAEKHDGILAMYHDQGLIPMKVIALNYSVNTTIGLPFIRTSPDHGTGFDIAGKGIAQSQSMIEAIKAAVEMTNNSRLLNTH

SEQ ID NO: 85298 - protein, 195 aa, Unknown
  Bacterial polypetide isolated from the Sargasso Sea
TEELAQLSNTQQVVMMLVNEKIKVALASTHLPIKEVPSFLNEELLKEIILITNESLKKNWGIADPLIKVLGLNPHAGDGGHIGKEEQEFITPAINNLKNKGLNITGPLSADTAFVEKNSEKADVFIAMFHDQGLPVIKALGFGETVNITLGLPFIRTSVDHGTAYDISGTGAADESSLLAAIEVAKTMSKKRNNA

SEQ ID NO: 85299 - protein, 270 aa, Unknown
  Bacterial polypetide isolated from the Sargasso Sea
PHGWPSQPASANCLYVWDTPLDAPVIAGQLDARNGHYVLETLTRAGNGCLDGSFAGMITAPVHKGVINEAGIPFSGHTEFLAELTRTEQVVMMLATHGLRVALVTTHLPLKDVAAAITAERLERVTRILHHDLVSKFGITQPRILVCGLNPHAGEGGHLGREEIEIIEPVLTRLRDEGLDLIGPLPADTLFTPKNLEFCDAVLAMYHDQGLPVLKYKGFGAAVNVTLGLPIVRTSVDHGTALDLAGSGKIDTGSLRVALETAYQMVGSQS

SEQ ID NO: 85300 - protein, 260 aa, Unknown
  Bacterial polypetide isolated from the Sargasso Sea
INDINEKVGCLKIMKCPDISSGRLNSINSEYVIKNLDFGIDACLKSKDIGLVTGPISKENIVEGGYSFSGHTERIMEKTNSDDVLMLLASERLKVALATTHMPLNKVSESITTALIINKVKILNQELKSKFNIEKPKISLLGLNPHAGEGGKLGKEEIEIIIPAVKELKASNVDVSMPLSADTAFNKNLLDETDAYFAMYHDQGLPVLKALSFGDSINITLGVPIIRTSVDHGVALDIAGNGIANNSSLKNAFYAADNLI

SEQ ID NO: 85301 - protein, 326 aa, Unknown
  Bacterial polypetide isolated from the Sargasso Sea
MDNYDKVIAVTAGDPAGIGPDICLELSSHVWSNKIIVLTDPSVLKERAKNLKKNINITEWDPKKINTGRLSEDSLFVWPHYFKSEVLCGHPNSENSETVLSSLNSAIDGCKKKIFKGMVTAPVNKAVINQAGYQFTGHTEFIANNTDTKTPVMMLATGKFRVALATTHIPLNQVSTSINKEKIINIVEIIHNDLKKYFNIQNPKIFVCGLNPHAGENGYLGNEEKLIIEPAIKYLKEKGFSVEGPASADTIFLNDKKADIFLAMYHDQGLPILKYKGFGNAVNVTLGLPFVRTSVDHGTAYDIAGTGKADARSLISAIEMAFQMVD

SEQ ID NO: 85302 - protein, 328 aa, Unknown
  Bacterial polypetide isolated from the Sargasso Sea
MKRLLYSHGEPAGIGIDLILHLSKSKFWEQMKFPLVCIVDKALLKSRSKILNLKINFVEIESLDKAKRNKLAAVQFIQISKCKDLSPGSLNPKNAKYVLDNLNFGIAESLKNKKVGLVTGPIQKSNIINGGFKNFQGHTEWIKKKTKSKDVVMLLSSKKIKVALATTHIPLIEVSKNIQKSKLVNTIKILHASLKSKFQIKHPSITVLGLNPHAGENGKMGEEEIKKINPAVQICKDIGIDASYAISADTAFTASKLKHTDAYLGMYHDQVLPVLKTLSFGEAINITLGTPIIRTSVDHGTALDLAGNSKPNLGSIKEAISVAAIQLK

SEQ ID NO: 85303 - protein, 203 aa, Unknown
  Bacterial polypetide isolated from the Sargasso Sea
IINDAGIDFSGHTEYLAGLCKVKRSVMMLATDDLRVALATTHIPLSEVPNAITKSLLRDVIRILHGDLQKRFYITKPTILISGLNPHAGESGHLGREEIEVIQPVLTEFQKQGMNLIGPLPADTLFSSSSFGKADAVLSMYHDQGLPVLKFKGFGKATNITLGLPIIRTSVDHGTALDKAGTGEVDIGSLYQAIAAAKAMIKK

SEQ ID NO: 85304 - protein, 322 aa, Unknown
  Bacterial polypetide isolated from the Sargasso Sea
MINKKIIVSLGDPAGIGPEIFLKALSKINSKEIFERIIVVSSLSVLDFVNSHLKLGFRFNELFNIKDTKPNKINFINVQNCPNYKVGKSDENNADYVIDCINIASDLAFDNKLNLVTGPINKSVISSKVKNFQGHTEYLKNKFSCNDVLMLLANDQLKIGVATTHIPLNEVSNSVTEKLLINKITLLEKGLRELFNIQNPLIGVLGLNPHAGEKGEYGQEDKNIIQPTVRKLSNKFNLIGPLPADTAFVSSKCDGYLSMYHDQALPVIKTLDFHGTVNITVGLPFMRVSVDHGTAEDIASDFKADPSSMIKSIKIALNENKA

SEQ ID NO: 85305 - protein, 165 aa, Unknown
  Bacterial polypetide isolated from the Sargasso Sea
STHLIHTKLDLFAKFCKTYVNKPILKVAGLNPHAGEEGILGSEEKDWITNAVTSWGNQNKGVQVSGPISPDTCWNSSSKAWRDKAAPSHDGILAMYHDQGLIPIKVIALNYSVNTTIGLPFIRTSPDHGTGFDIAGKGLAQSQSMVEAIKAAFDLTKDSRLFNAH

SEQ ID NO: 85306 - protein, 323 aa, Unknown
  Bacterial polypetide isolated from the Sargasso Sea
MKKIVVTLGEPAGIGPDLGVLLSQKKLSKNIIFIADPLLIYQSADRLNKKIDINVMHNSSSKTYSNKNLINLLPVKLNVKNKPGMMNYKNSEYVINSIRLAANLCLEKEASAMVTGPISKSILNKAGYKISGHTEFLADICKKKSLMLLMNKKIKVALHTTHLPIQSVTKEITKTKLKKTISLLNEEMKTKFAISKPKILVTGLNPHAGEDGLLGLQDSKIIAPVIKDFQKKNVCVDGPVAADTAFLRKNIAKYDVILTMYHDQGLPVIKFDNFKTTVNVTLGLPIVRVSVDHGTALDLVGTGKIDTSSFEQAIKVAKKLCHA

SEQ ID NO: 85307 - protein, 170 aa, Unknown
  Bacterial polypetide isolated from the Sargasso Sea
TDHIPLNNVASNVSVKNLNLKIQKVLKSLREDFRVQKPKVAILSLNPHSGDGGIIGDEDDLFIKPVINELKKKNISITGPFAADSFFGSKKYKTFDAILAIYHDQGLIPFKTLSFGSGVNFTAGINIVRTSPDHGTAFDIAGKGIANSNSFRKAILESVKILKSRHNYSS

SEQ ID NO: 85308 - protein, 322 aa, Unknown
  Bacterial polypetide isolated from the Sargasso Sea
MKTIIYSPGDPAGIGPDLFLSLLDEDFFRFIKANVVCVGDKNLFASRAKELGYSFEISTFTDINDVNEKVGCLEIMKCPDISSGRLNSINSEYVIKNLDFGIDACMKSKGLGLVTGPISKENIVEGGYPFSGHTERIMEKTNSDDVLMLLASERLKVALATTHMPLNKVSESITTDLIINKVKILNQELKTKFNIKKPKISLLGLNPHAGEGGKLGKEEIEIIIPAVKKLIASNVDVSMPLSADTAFNKNLLDKTDAYFAMYHDQGLPVLKALSFGDSINITLGVPIVRTSVDHGVALDIAGKGIANNSSLKNAFYAADNLI

SEQ ID NO: 85309 - protein, 329 aa, Unknown
  Bacterial polypetide isolated from the Sargasso Sea
MTKPALQIAITTGEPAGVGPELTVQALRDAAQRWPDAHFTVLGDAALLDARAAAVGADRATLAGSGPVSVAHHALAVPVQAGKLDAVNGPYVLGLLDAAIDGALAGRYDAIVTAPLQKSTINDAGVPFTGHTEYLAERTHTPRVVMMLAGTGHKPLRVALATTHLPLKDVSAALTIDGLVETLAIIDRDLRRDFGLAAPRILVTGLNPHAGENGYLGREEIDVIAPALARANAQGIDARGPYPADTLFQPRHLADADCVLAMFHDQGLPVLKYATFGEGINVTLGLPIIRTSVDHGTALDLAGTGRADPGSMIAALDTAVTMARHRRTA

SEQ ID NO: 85310 - protein, 321 aa, Unknown
  Bacterial polypetide isolated from the Sargasso Sea
MPPLILTTGEPAGVGPELTVQLLQRPLPSPLVIAGDPDLLLERAALLSLPLARKGNALVAPGGETALLPVALGAPSIPGNLDVANAAYVIEILAAATDGCLNGTFSGMVTAPVQKSTLIDAGNDFVGHTEFLAQRAGVTTPVMMLVTDEMRVALVTIHLALSEVPRAVTQDSLEAVLRVVDSDLRMRFGISAPVIGVCGLNPHAGEAGHLGREERDVIIPVIAKLCDEGLVLKGPLPADTAFTQQNLQTLDVVVAMFHDQGLPVIKHAGFGDVVNITLGLPFVRTSVDHGTALDLAGTGKAEVVSLSRALDMAIRLSGDHF

SEQ ID NO: 85311 - protein, 333 aa, Unknown
  Bacterial polypetide isolated from the Sargasso Sea
MKNFETPLAITMGDPSGIGPEIILKSVVETKLNNFLIFGDSLVFDSLIKSLGLPLTINKISELSEAVFEEDYINLFETSKLNHLPHYGKISKECGKVSFDAIMKSIELAKQGKVSGIVTAPISKKALNLAHINYPGHTEILAGYSNNKAVSMMLLNKHIKTVLVTLHCSMKQALDRITIQNELDAIINANLGCKLFGIEKPVIAVAALNPHAGENGLFGNEEKNIIEPAIKLAQDMGINAIGPFPGDTVFMNAKNGKYDIVVSQYHDQGLIPIKYEGIDEGVNVTIGIDFLRTSPDHGTAFDIAGKNIASAKSFINSIYTIKAMQKVGKSPLK

SEQ ID NO: 85312 - protein, 328 aa, Unknown
  Bacterial polypetide isolated from the Sargasso Sea
MTTKRIAVTPGEPAGIGPDLVVQLAQQAWPAELVVCADPELLASRAKRLGLHVTFRPYLPDQAPKPQAAGTLTIAPFKLVTEAVCGQLDEQNSTYVVETLRYAGEKNMSGEFDAVVTGPVHKGIINQAGISFSGHTEFFAHQANCPDVVMMLATQGLQVALVTTHIPLAYVAKAITRQRLHHIIKILHADLISKFAIASPKIYVCGLNPHAGEDGHLGREEIDVIIPALNELREEYQMNIVGPLPADTLFQPKYLQDADVVLAMYHDQGLPVLKSQGFGKSVNITLGLPYIRTSVDHGTALDLAGTGKADIGSFVCALNKAIELSSKN

SEQ ID NO: 85313 - protein, 572 aa, Unknown
  Bacterial polypetide isolated from the Sargasso Sea
ETADDLHRVARASATLRGVFWVGSAGLAGDLMCALNLADAVQLATPAQHTPGQPVLTVVGSMSSMSHAQIERLKTEAGSALVAFEVDTRTLLAEPPTEANANLPRKVSAALQQGRHVVVSLSQSDRSSVADGLLFARRLAALLAPTLPFAGSVIATGGETARALLSAAGIGQLRIVEEIESGVPLLHADHNGRRFYVVTKAGGFGHPGTLHVAWRKLAGVQRLALPIEATLKGLTTMTYRPVIGITMGDAAGVGPEIVMKALAHASVYEQCRPLVIGDAARLRDAGQRAGVALEVRSIESPADAGFECGVVDCIDLDLIPADLPYGKLSAIAGDAAYQYIARTVKLTSAGELDAICTAPLNKEALHAGGHIFPGHTEMLAHLTGIDEVSMMLVAPKLRVIHVTTHIGLLDAIRRIEPGLVQRTIERAHETLVRAGIDNPRIGVCGINPHAGENGLFGYGEEEEKIIPAVQVLQARGWDVEGPLPADTLFFRAGRGDFDVVVAMYHDQGHGPVKVMGLEAGVNVTVGLPVIRTSVDHGTAFDIAGKGIADERSMLEALKQALDLATRHSEQEA

SEQ ID NO: 85314 - protein, 313 aa, Unknown
  Bacterial polypetide isolated from the Sargasso Sea
ALIHSEIYEWCNPVIIGNAASLRETVKMLDIDMSINHISETDIEMSRVNPNAASVIDIGNLNYEDVTIGEINPGCGKAAMEWVSHAGRLAMRGAIGGIATAPLNKEAASLAGYEAIGHMELLQELTGSKTVATMLIAKNLRVVHLTTHRSLRVACDYVKKDRILDYLRITDENFKKWGFENPRIGVAALNPHGSDGGLLGDEENDEILPAVTQAKAEGMTVEGPIPADIIFHQAINDQYDAVLCMYHDQGHIPVKVYGFEESITANLGLPFVRTSVDHGTAFDIAGKGIADPLSMIEAIKLASTLISGSRLSS

SEQ ID NO: 85315 - protein, 330 aa, Unknown
  Bacterial polypetide isolated from the Sargasso Sea
SVGDESGVGPEIILKALGSHEMPKNIDFILVGSKKNLQSTYIHLKSLGLKNLANPNNLEIHDLKISSSDNESKVSYGNSSFYYLTKAIEIVKKYPNSALVTGPICKKSWSLAGHYFAGQTEVLAKLCRAKNIGMLFTAKSPITGWRFNTLLATTHIALCEVPKRLNTKLIHSKLDLFKEFCNNYSEKPTLKVAGLNPHAGEEGILGNEERDWLNDALIAWNEKNKDIRLIGPLSPDSCWNSSAKAWRHKDAEKHDGILAMYHDQGLIPMKVIALNYSVNTTIGLPFIRTSPDHGTGFDIAGKGIAQSQSMIEAIKTAIEMTKNSRLLNTH

SEQ ID NO: 85316 - protein, 327 aa, Unknown
  Bacterial polypetide isolated from the Sargasso Sea
MKKIIYSPGEPAGIGPDIIIKLCCSNSWEKYKSSIVSIGDPELFIRRAKLLKKKLKIVEANSLEDLKKNKKNILQIIKVSECKNYQAGELSANNAKYVIDNLDYAIDQTLNIDKVALVTGPISKENITSIIKNFSGHTEYIMKNTKSKDVLMMLASPKLKVALATTHVPLKKVSKMIKKELIVNKIKILNNELKNKFNIKKPKIRILGLNPHAGENGKIGTEELDHIKPAVRILKKNNIDVSYPISADTAFSIGLLKDTDAYLGMYHDQVLPVLKALSFGNSINITLGIPIIRTSVDHGVALDVAGTSKSNTSSLDLAIKTAIRLTK

SEQ ID NO: 85317 - protein, 333 aa, Unknown
  Bacterial polypetide isolated from the Sargasso Sea
MPKKPLIAVTLGDPSGVGPEVVVKALANAEVHESANVFVIGAVEPVRQAIEQVGLDVATCSVTNIPEDESDPGCISVLESTPSTDMNFPMGMISEESARASHEWVETATQLALAGRVDAISTAPVNKEAWRLAGFADKGHQEVFQRITQAEYVATMLVSGDLRCMHLSTHLSVSQAADYVTEANVLRALELTQQYFLKWGFTSPRIGVAALNPHASDGGLIGTTEDDEITPAIDRAKTLGINAIGPVPADTVFNQAIDGLYDVVLVMYHDQGHIPIKVYGFENSITVNLGIPFIRTSVDHGTAFDIAGKNKAQAVSMVEAISLATSLSLGSWT

SEQ ID NO: 85318 - protein, 250 aa, Unknown
  Bacterial polypetide isolated from the Sargasso Sea
MFYTVIAEKCDKYTLGNPSSDNASYILSNLEAASKFANDNNANLVTGPINKSVISSVLSNFSGHTDFLKKQFLCEEVLMVLSNSKLRVGLVTTHIPHAKVHESISVDKIVKKGILFANGLKQNFGISHPKICVLSLNPHSGEQGLIGDEEIEIISPAVDMLCNKNVNAFGPLPADTAFLRNEFDGFLSMYHDQGLPVVKTVDFHRTINSTLGLPFLRTSVDHGTAEDIADKLIANHQSMLEAIKVAGNVH

SEQ ID NO: 85319 - protein, 324 aa, Unknown
  Bacterial polypetide isolated from the Sargasso Sea
MIKIAVSSGDPAGVGPDICIKAFGQKKSYNFVPVIFGDQDILKSRANRLGIKANIQTYKENAELSNEALWVVDQPCGTSITPGKPDPDCANFTISIFEQAVEKTISSEFDAVVTCPINKEIINKGGIQFTGHTDELAKIANIDNVVMMLANEELKVALATTHLPLREVPNRITQDHIEKTLLIINKDLKEKWNIKNPFIKILGLNPHAGDGGFIGSEDKTILMPVIEKLNSEGMNLSGPHSADTAFINKKEQDKVDVILAMYHDQGLPVIKTIGFGTVTNISLGLPFIRTSVDHGTAYDLAGSIEVDESSLIEATKVAAKLSRS

SEQ ID NO: 85320 - protein, 328 aa, Unknown
  Bacterial polypetide isolated from the Sargasso Sea
MTTKRIAVTPGEPAGIGPDLVVQLAQQAWPAELVVCADPELLASRAKRLGLSVTFRPYLPEQPPKPQEAGTLTIAPFKLVTDAVCGQLDEQNSAYVVETLRYAGEKNMSGEFDAVVTGPVHKGIINQAGISFSGHTEFFAHQANCPDVVMMLATQGLQVALVTTHIPLAYVAKAITRQRLHHIIKILHADLISKFAIASPKIYVCGLNPHAGEDGHLGREEIDVIIPALNELREEYQMNIVGPLPADTLFQPKYLQDADVVLAMYHDQGLPVLKSQGFGKSVNITLGLPYIRTSVDHGTALDLAGTGKADIGSFVCALNKAIELSSKN

SEQ ID NO: 85321 - protein, 344 aa, Unknown
  Bacterial polypetide isolated from the Sargasso Sea
MNFQNTNKPSKVVLSVGDESGIGPEIILKALYSNEIPENIEYILVGSKKNLQNTYENLRSLGLENLANPKNLKIQDIEICPSNNDPKSSYGDSSFQYLKKAIEIVKQYPNAALVTGPICKKSWSLAGHYFSGQTEVLAKSCSVKNVGMLFTAKSPITGWRFNTLLATTHIALSEVPKKLTKELIHSKLDLFKDFCITYTDKPTLKVAGLNPHAGEEGILGHEEKDWLNDALITWNEKNRDIELLGPLSPDSCWNTSVKAWNDKNSEKHDGILAMYHDQGLIPMKVIALNYSVNTTIGLPFIRTSPDHGTGFDIAGKGVAQSQSMIEAIKSAVEMTNNSRLLNTH

SEQ ID NO: 85322 - protein, 327 aa, Unknown
  Bacterial polypetide isolated from the Sargasso Sea
MKKIIYSPGEPAGIGPDLIIKLAASKKWIDFKVPIVSIGDPKLFLDRADLLGKKIKINEVDSIDEVKTNQRNSMQVINITKCNKTAAGKIYKSNAHYVLNNLDYAIKQTLHNKKTGLVTGPLNKEMIISIDKKFTGHTEYIQKITKSDGVLMMLASEQLRVALATTHIPIKNVAKTITKELIINKVKILNNDLKTKFNIKDPNIKILGLNPHAGENGKIGTEELLHIKPALKDLRKKKINVSMPLSADTAFSKKNLKETDAFLGMYHDQVLPVLKALSFGNSINITLGVPIIRTSVDHGVALDIAGTKNSDTSSLELAIKTAKKLIK

SEQ ID NO: 85323 - protein, 335 aa, Unknown
  Bacterial polypetide isolated from the Sargasso Sea
MNNNNKTKIAMTLGDPSGIGPEVVAKSIQHLSNKGDELPFIIGDTNTVNDAFSNLDTDIQVKKIKNVSEIGSESKSIFVLDNEKYSDKNFIKGENSVDAGIASHEWVEIATDLAIQNKVDAICTAPINKESWQLAKFKDIGHQEIFKRKSNSNYVATMLVSGKLRCMHLSTHLSLSKACDYVTTENVERAIRLTQKHFVEWGFPKPRIGVAALNPHASDGGLIGNTEQEEILPAIINCKKDGFNVTGPHPADSVFYDAINDKYDVVVVMYHDQGHIPIKVYGFEQSISVNLGIPFIRTSVDHGTAFDIAGKNIADPTSMIEAITLANSLAYDSEL

SEQ ID NO: 85324 - protein, 228 aa, Unknown
  Bacterial polypetide isolated from the Sargasso Sea
RQACQANMDGDFDAVVTGPVHKGIINKAGVSFSGHTEFFAYQSNTIDVVMLLATEGLNVALATTHIPLEYVAKAITRERLHKVIHIINTDLKLKFGVKEPHIYVCGLNPHAGEDGHIGTEEIHTIIPALDELREEGLKITGPLPADTIFQPKYLENADVVLAMYHDQGLPVLKYKGFGASVNITLGLPFVRTSVDHGTALDLAGTGEADAGSFRKALEKAIELAHHQQ

SEQ ID NO: 85325 - protein, 333 aa, Unknown
  Bacterial polypetide isolated from the Sargasso Sea
MTKIAVSSGDPAGIGPDICIKAFGNKKILSYKPIVFGNIDLFIERAKQINQEIDIREYKGEEEDSISNDFLWMVDMPIGVDISSSKPNPKSAEYIINIFEESVNKTISKEFDAIVTCPINKEIINEGGIPFTGHTEELAKLGKTNKVVMMLANQKIKVALASTHIPLNEVSDFINKGHIEEVVEIIHTSLRDYWNANDPLIKVLGINPHAGDGGYIGKEEKEVISPALQNLKEKGIYTIGPISADTAFIEKDGTKKADAFLAMFHDQGLPVIKTMGFGETVNITLGLPFIRTSVDHGTAYDKAGLGSADESSLIAAMEMAFSMSKKNLKDATS

SEQ ID NO: 85326 - protein, 328 aa, Unknown
  Bacterial polypetide isolated from the Sargasso Sea
MSNKNRPVVITCGDPAGVGPEVAVSAWKALKDEIPLCIIIDPDFLPENINIKILDRAPLLSDVEKNVLTVIRHKFAEPRVPGKPNPKNAEAIIRAVERAVHFIKNGQCSAICTMPISKSILKNGTDFPFPGHTEYLAHLDGKNTYGMMLVNKYLRVVPATIHIPVKDITKYLTAELIEKTIKTTHQELTSKFSILNPCIWISGLNPHAGEAGTIGDEEQKFIIPVIKKLQSEGYNLRGPISADTMFYGKKRRRFDAAVCMYHDQALIPIKTLDFHTSVNLTIGLSFIRTSPDHGTAFDIAGKNLANPTSTIEAIKLAWNLSKKEQRDR

SEQ ID NO: 85327 - protein, 322 aa, Unknown
  Bacterial polypetide isolated from the Sargasso Sea
MKTIIYSPGDPAGIGPDLFLSLLNEDFFRFIKANVVCIGDQKLFASRAKELGYSFEVSTFTDINDVNEKVGCLEIMRCPDISSGRLNSINSEYVIKNLDFGIDACMKSKGIGLVTGPISKENIVEGGYSFSGHTERIMEKTNSDDVLMLLASERLKVALATTHMPLNKVSESITTDLIINKVKILNQELKSKFNIEKPKISLLGLNPHAGEGGKLGKEEIEIIIPAVKELKASNVDVSMPLSADTAFNKNLLDETDAYFAMYHDQGLPVLKALSFGDSINITLGVPIIRTSVDHGVALDIAGKGIANNSSLKNAFYAADNLI

SEQ ID NO: 85328 - protein, 322 aa, Unknown
  Bacterial polypetide isolated from the Sargasso Sea
MKTIIYSPGDPAGIGPDLFLSLLNEDFFRFIKANVVCIGDQKLFASRAKELGYSFKINTFSDINDINEKVGYLEIIECPDISSGNLNPINSEYVIKNLDFGIDACTKSKYTGLVTGPISKENVVEGGYSFSGHTERIMERTGSDDVLMLLASERLKVALATTHMPLNKVSESITKELIINKVKILNQELKSKFNIEKPKISLLGLNPHAGEGGKLGKEEIEIIIPAVKELKASNIDVSMPLSADTAFNKNLLDETDAYFAMYHDQGLPVLKALSFGDSINITLGVPIVRTSVDHGVALDIAGKGIANNSSLKNAFYAADNLI

SEQ ID NO: 85329 - protein, 327 aa, Unknown
  Bacterial polypetide isolated from the Sargasso Sea
MKKIIYSPGEPAGIGPDLIIQLAASKAWENFKIPIITIGDPVLFIERAKKLKKKVKVLELDSLNNIQKNNRSLIQVLKVSKCINTSAGKLSKINAKYVLDVLDYSIKETIKDKKSALVTGPLNKETIISINKKFTGHTEYIHKITKSDDVLMMLASNKLRVALATTHIPLKNVPRKITKSLIVKKVKILDKDLRNKFKIKNPKIKILGLNPHAGENGKIGKEELEHIKPAVKELKKQNINVSMPISADTAFSQKVLNETDAYLGMYHDQVLPVLKALSFGNSINITLGVPIIRTSVDHGVALDIAGTNKSNTSSLSLAIKTAKKLIK

SEQ ID NO: 85330 - protein, 152 aa, Unknown
  Bacterial polypetide isolated from the Sargasso Sea
KNIRKSKFVEIIKILHLGLKTKFKIKHPAITVLGLNPHAGEDGKMGSEEIKIINPAVQICRDMGINASYAISADTAFNNKKLNTTDAYLAMYHDQALPVLKALSFGEAVNITLGTSIVRTSVDHGTALDIAGKIKPNLGSIKEAIKSAEIQL

SEQ ID NO: 85331 - protein, 328 aa, Unknown
  Bacterial polypetide isolated from the Sargasso Sea
MKQLLYSPGEPAGIGVDSILRLSKLKFWKEMNASLVCIADLELLRSRAKVLNLKLRFKEIKSLNKAEQNKKGTIQFFQIAKCIDCTPGRLNPENAQYIIQNLNFGIDQALKNKNIGLVTGPIQKSNIIEGGFKSFQGHTEWIKKHTKSKEVVMLLAAKNIKVALATTHIPLAEVSKNIQKLKLVEIIKIINSGLKSNFKIKNPSIKVLGLNPHAGENGKIGKEELLKINPAVKICRETGINVSYARSADTAFNSDQLKETDAYLAMYHDQALPVLKALSFGKAVNITLGTPLVRTSVDHGTALEIAGKIKPNLGSIKEAIKLAEIQLQ

SEQ ID NO: 85332 - protein, 316 aa, Unknown
  Bacterial polypetide isolated from the Sargasso Sea
WRSRSRHWASSRLPASLQPVLVGCRRSLMATHARLLQQGITAVADPDQLIIDDQPLEVSVQPGQPTTAGAAACFRWLTHSVACVQQGHGRALVTAPIAKHLWHAAGHHYPGQTERLAELAGSQQSSMLFTAVAPHGTWRLNTLLTTTHLPFSQITAALTPELVEHKLNVLLNFCQRFRPDPHLVVAGLNPHAGEAGRLGQEEDTWLSPLLKRWRQEHPSVRLDGPIPPDTCWLSAAQAWKQPDGSGPDGYLALYHDQGLIPVKLLAFDAAVNTTLELPFLRTSPDHGTGFDIAGQGLARPDSMIAALQAAWDLTAA

SEQ ID NO: 85333 - protein, 336 aa, Unknown
  Bacterial polypetide isolated from the Sargasso Sea
MTSAAQPTSLPLQIAITTGEPAGVGPELTAQALAGAAAHWPHAQFTVLGDADLLADRARAVGVDWAALLAQGKRVRVQHRPLGAPSLAGKLDAANGRYVLDLLDCAIDGAVAGTFDAIVTAPLQKSTINDAGVPFTGHTEYLAERTHTPRVVMMLAGTGKRPLRVALATTHLPLKDVSAALTVDGIVETLRIVDHDLRHHFGLPAPRILVTGLNPHAGENGYLGREEIEVISPALKLANEQGIDAPGPYPADTLFQPRYLEQADCVLAMFHDQGLPVLKYATFGEGINITLGLPIIRTSVDHGTALDLAGTGRADAGSLIAAIDAAVSMAQHRRAG

SEQ ID NO: 85334 - protein, 329 aa, Unknown
  Bacterial polypetide isolated from the Sargasso Sea
MTIAVTSGDPSGIGPEIVQKSWIYLKNNPSNEFFWIGDPLHLPDKSIPWQPIVHPNEVSQNFSSALPVLVHKFAHPLKIGCHQPENANDIIKVIKKAVRLVKDNEAAALCTSPINKDVLNSGTQFPFLGHTEFLAYLDNIEHPVMMLASPKLKVVPATIHIPIKEVSNRLSIEGLTKTIKITNDAMKDKFGLAQPVIAVSGLNPHAGENGKLGLEEKEIIIPAIRNLKDSINIIGPLSADTLFHSTARAKYDVAITMYHDQALIPLKTIGFEEGVNITLGISFVRTSPDHGTAFDLAGQNLADETSIINAIKMAASLSRKQQNGKTSPA

SEQ ID NO: 85335 - protein, 248 aa, Unknown
  Bacterial polypetide isolated from the Sargasso Sea
YLKKAIEIVKQYPNSALVTGPICKKSWSLAGHHFSGQTEVLAKSCGVKNFGMLFTAKSPITGWRFNTLLATTHIALREVPKKLTTQLVHSKLDLLKNFCNTYIDKPILKVAGLNPHAGEEGILGNEEKDWLNSALIAWNKKNRDIQLFGPLSPDSCWNSSAKAWLNKDAERHDGILAMYHDQGLIPMKVIALNYSVNTTIGLPFIRTSPDHGTGFDIAGRGIAQCQSMIEAIKAAIEMNKNSRLLNTH

SEQ ID NO: 85336 - protein, 92 aa, Unknown
  Bacterial polypetide isolated from the Sargasso Sea
DGPLPADTLFAGFSSESADAIFVMYHDQGLPVLKYASFGEAVNVTLGLPFIRTSVDHGTALDIAGSGTVDLGSTKAAIHLAEHLSGFSHGEN

SEQ ID NO: 85337 - protein, 302 aa, Unknown
  Bacterial polypetide isolated from the Sargasso Sea
QLIVCANAEVLQQRAAALNLPLQLLPYVPEQPAQQQQAGTLTCVDFAVEAPVVTGQLNEANGRYVVDTLRYVGEKAMSGEFDAIVTGPVHKGIINKAGIPFSGHTEYFAHLSNTPYVVMMLATEGLRVALATTHIPLAYVAKAITKERLHKVITVLHHDLRHKFAIESPVIYVCGLNPHAGEDGHLGREEIDIISPALEELRLQGMDLVGPLPADTLFQAKYLEHADAVLAMYHDQGLPVLKHKGFGRSVNISLGLPLIRTSVDHGTALDLAGTGKADPGSLFHALEQAIYLAQRAKLSHDR

SEQ ID NO: 85338 - protein, 198 aa, Unknown
  Bacterial polypetide isolated from the Sargasso Sea
NVIHSKITNYGVGRFNTLLATTHIALCDVPKKLTKELIHSKLDLFKDFCSKYIEKPTLKVAGLNPHAGEEGILGSEEKDWLNDALIDWNNKNREIKLLGPLSPDSCWNSSVKAWSDRDAEKHDGILAMYHDQGLIPMKVIALNYSVNTTLGLPFIRTSPDHGTGFDIAGKGIAQSQSMVEAIKAAIEMTNNSRLLNTH

SEQ ID NO: 85339 - protein, 65 aa, Unknown
  Bacterial polypetide isolated from the Sargasso Sea
IEIRDKSKQLAIIDIALANKEREIPEYIQLDEKNKKLKFVRIPKFDEVPYPIVMEPNLVIEYYSR

SEQ ID NO: 85340 - protein, 320 aa, Unknown
  Bacterial polypetide isolated from the Sargasso Sea
FIITDNNIFKKVKKKFLKKKIKILNNFNSIKDIKKTDITIAAIPGISGLEPTIKMISKSKKVLLANKESIICGWQLIKKEAKKNKTLLVPVDSEHYSILKLLENKNIKDIKKIYITASGGPFLDYKINQLKKVTPQEALKHPKWKMGKKISIDSSTLMNKIFELVEAQKLFDIPISKLDILIHPNSLIHAIIKLNNGLSIFIYHETTMKIPLANAIFDGKLNIEDFHKNKKERNIEFENLRFEKVNPKIFPTISLKKIANQYPSTPIILNSCNEVLVDQFLRENIPFLSIYKIIMTILKDRNFKKYAIRNPKNITEIYKI

SEQ ID NO: 85341 - protein, 286 aa, Unknown
  Bacterial polypetide isolated from the Sargasso Sea
LDGLYPTYKIIKHTKNLAIANKESIICAWNLINKELVKNKTRFIPVDSEHFSIWYALKDNSNTTIEKIYLTASGGPLLNIPNYKFDNLKIEKVLKHPNWRMGKKISVDSSTMMNKVFEIIEAKKIFNLDYNKLSILIHPKSYLHAIIKFNNGMIKIIAHDTTMEIPIFNTLYGDSGKKYKSEKLNLKKLNNLHLRVINNKKFPLINLIKNLPKNNSLFETVIVSANDELVNLFLKKRIKYSEISYNLLKIINMIEFKKMKKINPKKISDILNLNFYVRNKIINTLK

SEQ ID NO: 85342 - protein, 311 aa, Unknown
  Bacterial polypetide isolated from the Sargasso Sea
KKQISKYKPSNIYIECKKAREKFKHYNIKYKFNIIEKKSELNDFVSSDKNDILIASSSGINSIDTVIAALKKKKKICVASKEIFLLYGKEIMKISKKFNNKIIPIDSEHSGVFQLLESNKVEDVKKVYISASGGPFYGRKIKDLSKIKKQDALNHPTWKMGDKITIDSATLMNKGIEIIEAATIFNISSDKICPIIDKKSKIHSIVEFIDGNYLFCASINDMRIPISYALNYPDKINFKSKKIPNFLETLSLSEINEKDHKAFRLVRYALKKGGSTIAVLNAANNIAVNEFLEGRIKFVDILNVVEKVIKN

SEQ ID NO: 85343 - protein, 150 aa, Unknown
  Bacterial polypetide isolated from the Sargasso Sea
QKLKAYYGNINERQFRNIYKKAVMLKGDTGENLIGLLERRLDAVIYRAKFATTIFSARQLINHGHVKVNGKKVNIGSYLVREEDSIEIRDKSKQLAIIDIALANKERETPEYIQMDEKNKKLKFVRIPKFDEVPYPIVMEPNLVIEYYSR

SEQ ID NO: 85344 - protein, 270 aa, Unknown
  Bacterial polypetide isolated from the Sargasso Sea
ESLICGWNLLHAKIKKYNTKFIPVDSEHFSILSLIKNVSEDIEKIYITASGGPFLNKKAKDLKKIKPEAAIRHPNWRMGKKISIDSATMINKVFELIEAKKIFNLNLNQFEILLHPDSYVHAIVKFKNGLTKILIHDTNMKIPIFNSIYFNEKKPYKSNSLNFTKINNFNFKKVNPKQFTVVNILKNFKQVQNSLYETVLVSANDELVNLFLKKKISFSDISKKLIMIINLKEFTKLKSIKPLNFKQIFKLNKHVRLKTQSLCVRSQHNV

SEQ ID NO: 85345 - protein, 165 aa, Unknown
  Bacterial polypetide isolated from the Sargasso Sea
MTKRISILGSTGSIGVSTLGVVDQFQNQFDIVYLSTFQNCKLIIEQAKKYRPKAVVIVNDSNIENVKKELVKDNIDVLVGREGLLEISKRDDIDLVMNGLVGSAGMEPTINALNSGVDVALSNKESMVMAGDLINKIMNEKGAKIYPVDSEHSAIWQCLVGENIQ

SEQ ID NO: 85346 - protein, 281 aa, Unknown
  Bacterial polypetide isolated from the Sargasso Sea
MKINIFGSTGIIGKKVLKIIDHSSRKIDVNLLTANSNLKSILSQIKKFKPKYVHLNNEKKLNELKKYIDKKTKILDKNDLSDYLSSSKSDFTILAISGYNSLNFFDEIVNNTKNLGIVSKEAIVSGGHLFKKNSYFKKTNIYPLDSEHFSLYTHLNLDEKNKENIKNILITASGGPFYKYHHNNLKNITFEKAIKHPKWKMGYKNSIDSATLVNKCLEVIEAHYLFNIPYEKINILIHPEAIVHSIIQYNNLISNMILFKNDMSIPIYNFLYKSQSNLYDY

SEQ ID NO: 85347 - protein, 232 aa, Unknown
  Bacterial polypetide isolated from the Sargasso Sea
SEHFSLLNNRFNNKNIKKIFITASGGPFYFKKKINLKKVNLKNVLSHPKWKMGINNSIDSSNFINKILEIFELSIIYEIDIKKIDFLISPEAYIHSIVIYKDNIVNINCFENNMLIPMIKPLEQIHTIIPLHNKSNFLDLKMLRLEKFNDNRFKLYKYFKLLKTFNTNKQISFMILNNIAHKKYLSGDIEYNDIVDYIMSNLKNTNSLISLNSINKRIMFIKSIEKKYEITN

SEQ ID NO: 85348 - protein, 205 aa, Unknown
  Bacterial polypetide isolated from the Sargasso Sea
MTKRLNSKHKVDRRLKVNLWGRPKSPFNTRAYPPGQHGQTKSTKPSDYGIQLQAKQKLKSYYGNMNERQFRNIYKKAIMKKGDTAENLIGLLERRLDAVIYRSKLSNTMFSSRQLINHGHVRVNSKKVNISSYQVKEEDTIEIRDKSKQLALIDIALANKERDVPEYLQLDEKNKKVKFVRIPKFEEVPYPVTMEPNLVIEYYSR

SEQ ID NO: 85349 - protein, 174 aa, Unknown
  Bacterial polypetide isolated from the Sargasso Sea
YGPGQHGQTKTSKPSDYGIQLQAKQKLKAYYGNINERQFRNIYKKAVMLKGDTGENLIGLLERRLDAVIYRAKFATTIFSARQLINHGHVKVNGKKVNIGSYLVREEDSIEIRDKSKQLAIIDIALANKERETPEYIQMDEKNKKLKFVRVPKFEEVPYPIVMEPNLVIEYYSR

SEQ ID NO: 85350 - protein, 106 aa, Unknown
  Bacterial polypetide isolated from the Sargasso Sea
IYRAKFATTIFSARQLINHGHVKVNGKKVNISSYLVKEEDTIEIRDKSKQLAIIDIALANKERETPEYIQLDEKNKKLKFVRVPKFEEVPYPIIMEPNLVIEYYSR

SEQ ID NO: 85351 - protein, 161 aa, Unknown
  Bacterial polypetide isolated from the Sargasso Sea
MNKKKINIFGVTGSIGKSTLQVLREEKTKDKYQPFVFSANENVDQLVKDCLEFKPRHAVIANESKYNSLKKGLSGTNIQPYSGKEALLELASERVNWSMSAIIGFAGVEVALRCAEFSDVLALANKEALVCAGTLLLSKISYHQNKLIPVDSEHSAIYQCL

SEQ ID NO: 85352 - protein, 241 aa, Unknown
  Bacterial polypetide isolated from the Sargasso Sea
MNLSPKILIIGSTGELGSKLIKFCNSNKIKIHAITGYKNKRKLKIQKEKLHIKNSFLLSNHQEKLNFIEFLNKTKIDIVYFLDFGYESIIYADIFLLNNKNSYLAIANKEMILAGGNLLKKKILKSKNNLIPLDSEHFSLFNFNFKNEYIKKIFITASGGPFYFKKKINLNKVNLKQVLLHPKWKMGINNSIDSSNFINKILEMYELSIIFDIDLKKISFLVSPEAYVHSIIINNDNTVNI

SEQ ID NO: 85353 - protein, 135 aa, Unknown
  Bacterial polypetide isolated from the Sargasso Sea
RNIYKKASMLKGDTSENLIGLLERRLDSVIYRAKFATTIFSARQLINHGHVRVNGKKVNIASYSVREEDTIEIKDKSKQLAIIDIALANKERETPEYIQMDEKNKKFKFVRIPKFEEVPYPVIMEPNLVIEYYSR

SEQ ID NO: 85354 - protein, 164 aa, Unknown
  Bacterial polypetide isolated from the Sargasso Sea
SSKPSDYGIQLQAKQKLKCYYGNINERQFRNIYKKAIMKKGDTAENLIGLLERRLDAVIYRSKLSNTIFSSRQLINHGHVRVNGKKVNISSYQVKEEDSIEIRDKSKQLALIDIALANKEREVPEYLQLDEKNKKVKFVRIPKFEEVPYPVVMEPNLVIEYYSR

SEQ ID NO: 85355 - protein, 118 aa, Unknown
  Bacterial polypetide isolated from the Sargasso Sea
LIGLLERRLDAVIYRAKFATTIFSARQLINHGHVKVNGKKVNISSYMVKEEDAIEIRDKSKQLAIIDIALANKEREIPEYIQLDEKNKKFKFVRVPKFEEVPYPIVMEPNLVIEYYSR

SEQ ID NO: 85356 - protein, 100 aa, Unknown
  Bacterial polypetide isolated from the Sargasso Sea
ATTIFSARQLINHGHVKVNGKKVNIGSYLVKEEDSIEIRDKSKQLAVIDIALANKERETPEYIQMDEKNKKLKFVRTPKFDEVPYPIVMEPNLVIEYYSR

SEQ ID NO: 85357 - protein, 94 aa, Unknown
  Bacterial polypetide isolated from the Sargasso Sea
SRQLINHGHVRVNGKKVNISSYQVKEEDSIEIREKSKQLALIDIALANKEREVPEYLQLDEKNKKVKFVRIPKFEEVPYPVVMEPNLVVEYYSR

SEQ ID NO: 85358 - protein, 190 aa, Unknown
  Bacterial polypetide isolated from the Sargasso Sea
KLTYGGRPKSPFNSRAYPPGQHGAAKSSKPSDYGIQLQAKQKLKSYYGNINERQFRNLYRKAIMKKGDTAENLIGLLERRLDAVVYRAKLSTTIFSARQLINHGHIRVNGKKVNISSYQLKAEETVEIRDKSKQLAFIDIALANKEREVPEYLQVDEKNKKVKFVRIPKFEEVPYPIVMEPNLVVEYYSR

SEQ ID NO: 85359 - protein, 273 aa, Unknown
  Bacterial polypetide isolated from the Sargasso Sea
RQAKFFKVKNLIITNENSYNKIKKDRFSKKINIYNNFNNFRKIFKKKVDYTMSSISGIQGLKPTIEVIRFTSKIAIANKESIICGWDLIQKELKKNKTEFIPVDSEHFSIWYALKDINKELIEKIYITASGGPFLNKPLNKLKNVSLKQAIKHPNWKMGKKISIDSATMMNKVFEIIEAKKIFNLSYKKLSILVHPKSYVHAIIKFKNGLTKIVAHDTNMKIPIFNSLYSSNNFMNSKKLNLKILNNLEFKEINYKRFSVIKILNKLPENSSL

SEQ ID NO: 85360 - protein, 205 aa, Unknown
  Bacterial polypetide isolated from the Sargasso Sea
MTKRLNSKHKVDRRLKVNLWGRPKSPFNTRAYGPGQHGQTKTSKPSDYGIQLQAKQKLKSYYGNINERQFRNIYKKAVMLKGDTGENLIGLLERRLDAVIYRAKFATTIFSARQLINHGHVKVNGKKVNIGSYLVREEDSIEIRDKSKQLAIIDIALANKERETPEYIQMDEKNKKLKFVRVPKFEEVPYPIVMEPNLVIEYYSR

SEQ ID NO: 85361 - protein, 74 aa, Unknown
  Bacterial polypetide isolated from the Sargasso Sea
SYQVKEEDTMKIRDKSKQLALIDIALANKEREVPEYLQLDEKNKKVKFVRVPKFEEVPYPVVMEPNLVIEYYSR

SEQ ID NO: 85362 - protein, 115 aa, Unknown
  Bacterial polypetide isolated from the Sargasso Sea
LLERRLDAVIYRSKLSNTIFSSRQLINHGHVRVNGKKVNISSYQVKEEDSIEIRDKSKQLALIDIALANKEREVPEYLQLDEKNKKVKFVRIPKFEEVPYPVVMEPNLVIEYYSR

SEQ ID NO: 85363 - protein, 28 aa, Unknown
  Bacterial polypetide isolated from the Sargasso Sea
LLKEHKVSEIKKIYITASGGPFLKNKSF

SEQ ID NO: 85364 - protein, 239 aa, Unknown
  Bacterial polypetide isolated from the Sargasso Sea
MPDSVHLWFLENIIIYSLIFVFILNFVTPLRRESKLLSKLLSKPGGIFLFSLPIILEGHLVETVGWWYGNDYSLYLDTLHGFFLGAIWFLLGIILTSQGEAFWESNKVNWKIHTVIAFSLYIYRFLNEFEGIDNRIIAFESFNFIFLVLGLGATYLNKESSQLDYYKTAIFPVYIVHFPIQYALMFYFGGWNINPWLKYLIFLFLICFLSLTFYHAIKNVRILRPLFGLRNKPKKEIDG

SEQ ID NO: 85365 - protein, 75 aa, Unknown
  Bacterial polypetide isolated from the Sargasso Sea
SSYQVKEEDTVEIRDKSKQLPLIDIALANKEREVPEYIQLDEKNKKVKFVRVPKFEEVPYPVVMEPNLVIEYYSR

SEQ ID NO: 85366 - protein, 83 aa, Unknown
  Bacterial polypetide isolated from the Sargasso Sea
VNGKKVNIGSYLVKEEDSIEIRDKSKQLAIIDIALANKERETPEYIQMDEKNKKLKFVRVPKFEEVPYPVIMEPNLVIEYYSR

SEQ ID NO: 85367 - protein, 118 aa, Unknown
  Bacterial polypetide isolated from the Sargasso Sea
LIGLLERRLDAVIYRAKFATTIFSARQLINHGHVRVNGKKVNIGSYLVKEEDSIEIRDKSKQLAIIDIALANKERETPEYIQMDEKNKKFKFVRTPKFEEVPYPIVMEPNLVIEYYSR

SEQ ID NO: 85368 - protein, 289 aa, Unknown
  Bacterial polypetide isolated from the Sargasso Sea
KPKFIIINDSDSYKKFVRVNKNNCKVFNTYKDISKLKKKIDYTISAISGFDGLEPTLEIIPFSKTIAIANKESLICGWNLIKKKIVKHQTNFIPIDSEHFSIWSLLKGTNSKIEKIYITASGGPFFKKNIKHMKNIKPNQAIKHPKWNMGKKISIDSATMINKVFELIEAKNIFDIDLRNLKILIHPDSYVHAIVKFQNGITKLLIHDTDMKVPIFNSIYQNEKKKLTSNSLDISKLNNLKFETVKTNQFQSIKILKLFKNVNNSLYETVLISANDELVSLFLQNKIGF

SEQ ID NO: 85369 - protein, 143 aa, Unknown
  Bacterial polypetide isolated from the Sargasso Sea
MKKKIAILGSTGSIGKTSLDIFKKDLKKFQIILLSANSNYSSIIKQIKIFKPKYFIVNNFFVFKKVINNNKIGNTKIYNKFSDLNYNNIKFDITISAIVGIAGLEPTIKFTKISKKILLANKESIICGWHLLNNARKKNKSNI

SEQ ID NO: 85370 - protein, 114 aa, Unknown
  Bacterial polypetide isolated from the Sargasso Sea
LERRLDAVIYRSKLSNTIFSSRQLINHGHIRVNGKKVNISSYQVREEDSIEIRDKSKQLALIDIALANKEREVPEYLQLDEKNKKVKFVRVPKFEEVPYPVVMEPNLVIEYYSR

SEQ ID NO: 85371 - protein, 57 aa, Unknown
  Bacterial polypetide isolated from the Sargasso Sea
MVPFLEGIALGASLIIAIGPQNAFVIQQGILHQHVFLAAFVCTLVDVVLIIVGAAGL

SEQ ID NO: 85372 - protein, 166 aa, Unknown
  Bacterial polypetide isolated from the Sargasso Sea
MTKRLNSKHKVDRRLKVNLWGRPKSPFNTRAYPPGQHGQTKSSKPSDYGIQLQAKQKLKCYYGNMNERQFRNMYKRAIMKKGDTAENLIGLLERRLDAVIYRSKLSNTIFSSRQLINHGHVRVNGKKVNISSYQVKEEDSVEIRDKSKQLALIDIALANKEREVPE

SEQ ID NO: 85373 - protein, 270 aa, Unknown
  Bacterial polypetide isolated from the Sargasso Sea
IICGWKFIEKNLKKNNTNFIPIDSEHFSIWSLIKEENKKNIKKIYITASGGPFLKKKINNLKNIKPKSALNHPNWKMGKKISIDSATMMNKIFEVIEAKKIFNLGIDKFNIIIHPKSYIHAIVNFKNGLIKILVHDTNMEIPIINSINYNKEIFEYNNKDINFNKLNGINFLNPDIKKYPSLKLLKLIPKKFSYFETILITLNDELVKNYLKNKISYFSIIKILMKMIKTPYFCKFYHYSPNSINDIKSMVGKVKSYLNIYLKKYENYSE

SEQ ID NO: 85374 - protein, 234 aa, Unknown
  Bacterial polypetide isolated from the Sargasso Sea
LDSEHFSLYNSNMKNNKVQKIYITASGGPFYFNKKINLSTVSKSRVLSHPKWKMGKNNLIDSSNFINKILEIYELSYIYKIPLSKIDFLISKEAYIHSIIHYKDSTLTINAFHNDMIITLIKPLSFFYKIKSATLKQNYFNVDNLIVEKPQDARFTFFKYKNKLLKLSHSEQIKLMIINNSAHKLYLSNKLKYNDIIDYIMKNIMNNSKNIRFKNFDSILKFISVNNDYYKANV

SEQ ID NO: 85375 - protein, 205 aa, Unknown
  Bacterial polypetide isolated from the Sargasso Sea
MTKRLNSKHKVDRRLKVNLWGRPKSPFNTRAYPPGQHGQSKSSKPSDYGIQLQAKQKLKCYYGNMNERQFRNMYKRAIMKKGDTAENLIGLLERRLDAVIYRSKLSNTIFSSRQLINHGHVRVNGKKVNISSYQVKEEDSIEIRDKSKQLALIDIALANKEREVPEYLQLDEKNKKVKFVRIPKFEEVPYPVVMEPNLVIEYYSR

SEQ ID NO: 85376 - protein, 144 aa, Unknown
  Bacterial polypetide isolated from the Sargasso Sea
MKKKIAILGSTGSIGTTSLEIFKKDLKKFEIILLSAQSNYFLINKQIKKYKPKYFIIKDTKVFKKIKEKYKRKKIKIHNKFSDLNLKNKKFDITISAIVGIAGLEPTIKFTSISKKILLANKETIICGWHILEKICKKTKTSVS

SEQ ID NO: 85377 - protein, 248 aa, Unknown
  Bacterial polypetide isolated from the Sargasso Sea
LYLVDSEHFSIWSVIKDLNSSAVENIIITASGGPFFNNKNNSIKVTPKLASSHPNWKMGAKISVDSSTLMNKVFEVIEAKKIFNIELKRFKILIHPKSYVHAIVKLKNGLIKIIAHDTDMKIPIFNSLYFDENKHIKTKKINIKFLNNLKLTEVNKKQFPLINLLKKIPKNNTLFETLLVSINDRLVDLFLNKKISYDQISKNIISQINSKSFSKFKRKKLNNLAQIEKLNNFVRLKTKALSVISSKK

SEQ ID NO: 85378 - protein, 89 aa, Unknown
  Bacterial polypetide isolated from the Sargasso Sea
MKYITVLGSTGSIGTQTLEIASEQPDKFKAVALSAGRNINLLTEQVKTHNPEVVAIEDESLIEDLKDNINNLDLDDAPLVLGGKQGINA

SEQ ID NO: 85379 - protein, 202 aa, Unknown
  Bacterial polypetide isolated from the Sargasso Sea
RLNSKHKVDRRLRVNLWGRPKSPFNTRAYPPGQHGQSKTSKPSDYGIQLQAKQKLKSYYGNMNERQFRNMYRRAIMKKGDTAENLIGLLERRLDAVIYRAKLSNTIFSSRQLINHGHVKVNGKKVNISSYQVKEEDSIEIKDKSKQLAIVDIALANKERDVPEYIQVDEKNKKVKFVRVPKFEEVPYPVTMEPNLVIEYYSR

SEQ ID NO: 85380 - protein, 300 aa, Unknown
  Bacterial polypetide isolated from the Sargasso Sea
APEGSGAGYFPMYNRNKRSVALDLKHPKGRDVALQLIQSADIVLENFRTGTMAKLGLDYESLKADHSGLIYCSLKGFLSGPYENRVALDEVTQMMGGLAYMTGLPDRPLRAGSSVIDITGGMFGVIAILSALHRRRETGEGSHVTSALFETTAFLVGQHMAQQAVSGDAPPPMSVRQSAWAIYDIFELDSGERLFVGIVSDTLWQRFCEEFELSDWAADTALDSNAGRVAARETLLPAIRELFAPLSLLELSERLDRAGLPFAPINTPGDLFDDPHLTASGGLLPVHLTEGDHAGEQTTL

SEQ ID NO: 85381 - protein, 130 aa, Unknown
  Bacterial polypetide isolated from the Sargasso Sea
KAIMKKGDTAENLIGLLERRLDAVIYRSKLSNTIFSSRQLINHGHVRVNGKKVNIASYQVKEEDSVEIRDKSKQLALIDIALANKEREVPEYLQLDEKNKKVKFVRIPKFEEVPYPVVMEPNLVIEYYSR

SEQ ID NO: 85382 - protein, 314 aa, Unknown
  Bacterial polypetide isolated from the Sargasso Sea
KYSFKLSDPKNVNKFQLFLKNNKINLIYFLDFGYKSLLYADIFLNKNTKSQIAIANKEMIIAGGETLINKISYTKNILVPLDSEHFSLSKSYIKDENIQKVFITASGGPFYFNKNINLNKVKLNNVLKHPKWKMGINNSIDSSNFVNKILEIFELSIIYKIDLKKIDFLVSKEAYVHSLILNKDNIVNINCFNNDMLISLISPLLKYYPNIELTTKKSYLKNELFKIEKFHDKRFKISNYLNTLKNLTTNKQILFMILNNIAQKKYLSEEIKYNEIIEFIMKNLNKHNKFVKFKSIKDRLKFIDYIESKYDFLS

SEQ ID NO: 85383 - protein, 205 aa, Unknown
  Bacterial polypetide isolated from the Sargasso Sea
MTKRLNSKHKVDRRLKVNLWGRPKSPFNTRAYGPGQHGQTKTSKPSDYGIQLQAKQKLKAYYGNINERQFRNIYKKAVMLKGDTGENLIGLLERRLDAVIYRAKFATTIFSARQLINHGHVRVNGKKVNIGSYLVKEEDSIEIRDKSKQLAIIDIALANKERDTPEYIQMDEKNKKLKFVRVPKFEEVPYPVIMEPNLVIEYYSR

SEQ ID NO: 85384 - protein, 190 aa, Unknown
  Bacterial polypetide isolated from the Sargasso Sea
GSKISVDSATLMNKVFEVIEAQRIFNININKFKIYIHPKSYVHAVIKFNNGLTKILVHDTSMTIPIFNIIYDKTDKSIITKKIDFSIINNLNFQEPNKIKFPSLKLLNKFSSKISLYDTVLVAANDELVYLFLKGQIKFTEISIILKKILELKEFSKYKQIIPTNYEQIYKLSRYVRLKTFSLSVLSQKC

SEQ ID NO: 85385 - protein, 164 aa, Unknown
  Bacterial polypetide isolated from the Sargasso Sea
SAKPSDYGIQLNAKQKLKSYYGNMNERQFRNVYKKAIMKKGDTAENLIGLLERRLDAVIYRSKLSNTIFSSRQLINHGHVRVNGKKVNIASYQVREEDSIEIRDKSKQLALIDIALANKEREVPEYLQLDEKNKKVKFVRVPKFEEVPYPVVMEPNLVIEYYSR

SEQ ID NO: 85386 - protein, 205 aa, Unknown
  Bacterial polypetide isolated from the Sargasso Sea
MTKRLNSKHKVDRRLKVNLWGRPKSPFNTRAYPPGQHGQTKSQKPSDYGIQLQAKQKLKSYYGNMNERQFRNMYKKAIMKKGDTAENLIGLLERRLDAVIYRSKLSNTIFSSRQLINHGHVRVNGKKVNIASFQVKEEDTIEIRDKSKSLALIDIALANKEREVPEYLQLDEKNKKVKFVRVPAFEEVPYPVVMEPNLVIEYYSR

SEQ ID NO: 85387 - protein, 194 aa, Unknown
  Bacterial polypetide isolated from the Sargasso Sea
PTIDAIKVSKSVAIANKEAIICGWQIISKLLKKYKTKIIPVDSEHFSIMELTKNVTNNEIEEIIITASGGPFLKKPFYKLRKIKPEQAIKHPNWKMGKKISVDSANMMNKVFEIVEASKLFQFDKSKYKIMIHPQSYVHSIIRFKNGLIKMVLYNSDMKIPISNTLYDKSENLINTVNINFKNLNNLNFSKSKY

SEQ ID NO: 85388 - protein, 205 aa, Unknown
  Bacterial polypetide isolated from the Sargasso Sea
MTKRLNSKHKVDRRLKVNLWGRPKSPFNTRAYPPGQHGQTKAGKPSDYGIQLQAKQKLKSYYGNMNERQFRNVYKKAIMKKGDTAENLIGLLERRLDAVIYRSKLSNTIFSSRQLINHGHVKVNGKKVNIASYQVKEEDTIEIRDKSKQLALVDIALANKEREVPEYLQLDEKNKKVKFVRVPSFEEVPYPVVMEPNLVIEYYSR

SEQ ID NO: 85389 - protein, 65 aa, Unknown
  Bacterial polypetide isolated from the Sargasso Sea
MKYITVLGSTGSIGTQTLEIASEQPDKFKAIALSAGKNINLLTEQVKTHKPEIVAIEDENLIEDL

SEQ ID NO: 85390 - protein, 255 aa, Unknown
  Bacterial polypetide isolated from the Sargasso Sea
NKIRILNEKELTHYLNNSQSDFSILAISGYQSLYFLKPIILNTKNLGIVNKECIVSAGHLIDKLVKKSNIKIFPLDSEHFSLKKYFDNKKPEFKKIFITASGGPFYKKKWKDIKLSNYKEAVNHPKWKMGYKNSIDSATLANKCLELIEAHYLFKIPFSKLDILIHPQALVHSVIEFNNYTAELNYFYHNMDIPLINFLNLYNKESSFLNFTHKKYDFNKNLILEFNTPNSKLFPILSIFNKIDKKNPREFIKFN

SEQ ID NO: 85391 - protein, 81 aa, Unknown
  Bacterial polypetide isolated from the Sargasso Sea
EKKLILRSYLVKEEDSIEIRDKSKQLAIVDIALANKERETPEYIQMDEKNKKLKFIRTPKFDEVPYPIVMEPNLVIEYYSR

SEQ ID NO: 85392 - protein, 200 aa, Unknown
  Bacterial polypetide isolated from the Sargasso Sea
MTKRTNSKHKVDRRLRVNLWGRPKSPFNTRAYPPGQHGQTKAAKPSDYGVQLQAKQKLKSYYGNINERQFRNLYRKAIKKRGDTAENLIGLLERRLDAIVYRAKLSSTIFSSRQLINHGHVRVNGKKVNIASYQVKEEDNIEIRDKSKQLAIIDIALANKEREIPEYLQVDEKNKKIKFVRIPKFEEVRYPVVMEPQSCS

SEQ ID NO: 85393 - protein, 69 aa, Unknown
  Bacterial polypetide isolated from the Sargasso Sea
EEDTIEIRDKSKQLALIDIALANKEREVPEYLQLDEKNKKVKFVRVPSFEEVPYPVVMEPNLVIEYYSR

SEQ ID NO: 85394 - protein, 205 aa, Unknown
  Bacterial polypetide isolated from the Sargasso Sea
MTKRLNSKHKIDRRLKVNLWGRPKSPFNTRAYGPGQHGQTKTSKPSDYGIQLQAKQKLKAYYGNINERQFRNIYKKAVMLKGDTGENLIGLLERRLDAVIYRAKFATTIFSARQLINHGHVKVNGKKVNIGSYLVKEEDTIEIRDKSKQLAIIDIALANKERETPEYIQMDEKNKKLKFVRVPKFDEVPYPIVMEPNLVIEYYSR

SEQ ID NO: 85395 - protein, 122 aa, Unknown
  Bacterial polypetide isolated from the Sargasso Sea
TPIAYGLAHPARIDAGVRPLDFSDMKDFSFHTPCFERYPNLKLAIEACRAGQAATTWLNAANEVAVSHFLEGHIAFCDIAYVNESTLNAMSSVDVTSIQQIVEQDELARVAAESVIKVKVAC

SEQ ID NO: 85396 - protein, 205 aa, Unknown
  Bacterial polypetide isolated from the Sargasso Sea
MTKRLNSKHKIDRRLKVNLWGRPKSPFNKRAYGPGQHGQTKQGKPSDYGIQLQAKQKLKAYYGNINERQFRNIYKKASMLKGDTSENLIGLLERRLDSVIYRAKFATTIFSARQLINHGHVKVNGKKVNISSYLVREEDTIEIRDKSKQMALVDIALANKERETPEYIQLDQKNKKFKFVRIPKFEEVPYPVVMEPNLVIEYYSR

SEQ ID NO: 85397 - protein, 170 aa, Unknown
  Bacterial polypetide isolated from the Sargasso Sea
QHGQTKTSKPSDYGIQLQAKQKLKAYYGNINEKQFRNFYKKAVMLKGDTGENLIGLLERRLDAVIYRAKFATTIFSSRQLINHGHVRVNGKKVNIGSYLVKEEDTIEIRDKSKQLAIIDIALANKERETPEYIQMDEKNKKLKFVRVPKFEEVPYPVIMEPNLVIEYYSR

SEQ ID NO: 85398 - protein, 68 aa, Unknown
  Bacterial polypetide isolated from the Sargasso Sea
EDTIEIRDKSKQLALIDIALANKERDVPEYLQLDEKNKKVKFVRIPTFEEVPYPVVMEPNLVIEYYSR

SEQ ID NO: 85399 - protein, 259 aa, Unknown
  Bacterial polypetide isolated from the Sargasso Sea
KHISKKTHSEVVPIDSEHFSIQQLTKNYKDHEIKKIYITASGGPFLNRALRVFKNIKAKDAIKHPNWQMGKKISIDSSNMMNKVLELIEAFKLFPFKENKYEIIVHPQSLIHAIVFFKNGQTKFLYHETDMTIPIANAIYNNQINIEKFIQTKNNFLKNLQSLKFEKIDKKRFPIVTLLPKIIKQDSAPIVLNASNEVFVDSFIKGKITFNSIYSYLRAVFRDRDFGKYAIKKTPSLKDIYIIDKWARKKAEELVKKGI

SEQ ID NO: 85400 - protein, 66 aa, Unknown
  Bacterial polypetide isolated from the Sargasso Sea
MKYITVLGSTGSIGTQTLEIASEQPDKFKAVALSAGRNINLLTEQVKTHKPEVVAIEDENLIDNFK

SEQ ID NO: 85401 - protein, 205 aa, Unknown
  Bacterial polypetide isolated from the Sargasso Sea
KEKFSNISVKKALNHPYWRMGKKITIDSATLMNKVFEVIEAKNIFNLDYGKISILTHPKSYLHAIVKFKNGLTKLLLHEPDMKIPIYNAIYFPHIKRIKTNKLNFKILNNLELREVDIKKFPLIKLLNKLPNYPSLFETVLITINDYLVFKFLKKKINFPKLIKLIDRISNLKEFQKFKKIKPKNIDDIYQLRDYVSLKLDNLGI

SEQ ID NO: 85402 - protein, 140 aa, Unknown
  Bacterial polypetide isolated from the Sargasso Sea
MIKKIAILGSTGSIGTASLNIFQKDLKKFKIVLLSANSNYSLIRKQIKIYKPKYFVINDKTVFRKIKNKYGKNKVKIYNKFSDINLKKIKFDITISAIVGIAGFEPTIKFINHSKKILLANKETIVCGWHIVKNISKNNK

SEQ ID NO: 85403 - protein, 64 aa, Unknown
  Bacterial polypetide isolated from the Sargasso Sea
MKYITVLGSTGSIGTQTLEIASEQPDKFKAVALSAGRNINLLTEQVKKHKPEVVAIEDENLTED

SEQ ID NO: 85404 - protein, 267 aa, Unknown
  Bacterial polypetide isolated from the Sargasso Sea
NYKNKIGKTKILDFNELLSYLSSSKSDLSVLAISGYKSLYFLEHIIENTDNLGIANKEAIVSAGHIFQKNKFFYKTNIFPLDSEHFSLFDYFKKTKIKNNIKNYIITASGGPFYKRKFKNLKNIKFSEAINHPKWKMGYKNSIDSATLVNKCLELIEAHYLFDIPFDKMKILIHPQAIVHSAIEYENFVTQFNLFKNDMKIPIFNFLINSKVATNFNQSKLFLKDYSQFSFKDVNNDIFPIYKFFKSIDKKKPQNLIKFNIGNEFAV

SEQ ID NO: 85405 - protein, 176 aa, Unknown
  Bacterial polypetide isolated from the Sargasso Sea
RAYGPGQHGQTKTSKPSDYGIQLQAKQKLKAYYGNINERQFRNIYKKAVMLKGDTGENLIGLLERRLDAVIYRAKFATTIFSARQLINHGHVKVNGKKVNIGSYLVREEDSIEIRDKSKQLAIIDIALANKERETPEYIQMDEKNKKLKFVRVPKFEEVPYPIVMEPNLVIEYYSR

SEQ ID NO: 85406 - protein, 170 aa, Unknown
  Bacterial polypetide isolated from the Sargasso Sea
QHGQTRSSKPSDYGIQLQAKQKLKAYYGNINERQFRNIYKKAVMLKGDTSENLIGLLEKRLDAIIYRAKFATTIFSARQLINHGHVKVNGKKVNISSYSVKEEDTIEIRDKSKQLAIIDIALANKERETPEYIQMDEKNKKLKFVRIPKFEEVPYPIVMEPNLVIEYYSR

SEQ ID NO: 85407 - protein, 135 aa, Unknown
  Bacterial polypetide isolated from the Sargasso Sea
IHSMVNYDGSYKAHLGTPDMKVPIQYALTYPARKTLAIDSLDLSDLSLAFQSPDYKRYPILGLVHELIKLGGNRVAVMSIANDYIVQKFLDEKISFNQIFILTKEVVSEFGSDDLPSLEDLLILDENIKLYLEPN

SEQ ID NO: 85408 - protein, 165 aa, Unknown
  Bacterial polypetide isolated from the Sargasso Sea
HLFDIPFENIDVVVHPQSMIHSMVSFSDGNILAQLGPPDMRYPIQYVLTYPEKKGCPWPKLTLSDLQDLQFFKPDTTKFPLLSLAYEMGKKGGSYPVVLNAANEAIVGLFLQERISFVDIYNLIKYVITTTHHQDDPSLEDIVSIDLDVKNRVNHDNFLKECHAL

SEQ ID NO: 85409 - protein, 268 aa, Unknown
  Bacterial polypetide isolated from the Sargasso Sea
KESIICGWDIIEKTANKFSVKIIPVDSEHFSILKLLENQNINDIKKIFITASGGPFLNYKPSQLKTITPSQALRHPKWKMGKKISIDSATMMNKVLEIIEAQKLFKLPNNKLEIIIHPESLVHAIIEYKNGLLKFIYHETSMIIPLANAIFDGKLNIKDFYFKEKTIEPNIKNLTFSRVDNKIFSIIKLKNRLNEHPSSSIIINAANEILVDHFLRKKIPFLSISKIIMTILNDRNYKKYAIRKPKNVDQIYEIDIWARKATMDKINL

SEQ ID NO: 85410 - protein, 233 aa, Unknown
  Bacterial polypetide isolated from the Sargasso Sea
VKKIYITASGGPFLRKTLKSFKKINATEASKHPKWKMGKKISIDSSNLMNKTLEIIEAYRLFPFDPKKYEIIIHPQSLVHAIVFFKNGQSKFLYHETDMKIPIANAIYDNNLDISNLLKKKDNLLSNLKFLKFEKVDKKRFPIVTLLNDKILKNSAPIILNASNEILVDSFIKKKIPYNEIYQYLKRVFKDRDFNKYAIKKTPNINEIYKIDDWARKKTIDIIRKKNNEKYFY

SEQ ID NO: 85411 - protein, 262 aa, Unknown
  Bacterial polypetide isolated from the Sargasso Sea
IVSCGHLFSKLLKKHKVNIFPLDSEHFSIHNLENQKTNSLKNLYKIYLTASGGPLLNYNKRRMNNISLKEVVNHPKWKMGYKNSIDSATLANKCLELIEAMYLFQVSMKDLDIVIHPEALIHSIIEYNNSTSIFNYFYNDMSIPIFHFMNYITNKKLKKMDKFKINKNFNLNFIEVDKNKFPIYDIFKNIDYNSPQQIIKFNAANQYAVELFKKDMIKYIQIPKIIEKSISYELNASINSIGSIIKYEKEFNKIMISNYEKA

SEQ ID NO: 85412 - protein, 128 aa, Unknown
  Bacterial polypetide isolated from the Sargasso Sea
CNVKGRYWRKLIGLLERRLDAVIYRAKFSTTIFSARQLINHGHVKVNGKKVNISSYLVKEEDSIEIRDKSKQLAIIDIALANKEREIPEYIQIDQKNKKFKFIRIPKFEEVPYPIIMEPNLVIEYYSR

SEQ ID NO: 85413 - protein, 191 aa, Unknown
  Bacterial polypetide isolated from the Sargasso Sea
LKVNLWGRPKSPFNTRAYGPGQHGQTKTSKPSDYGIQLQAKQKLKAYYGNINEKQFRNIYKKASMLKGDTSENLIGLLERRLDSVIYRAKFATTIFSARQLINHGHVKVNGKKINIGSALVREEDTIEIRDKSKQLAIVDIALANKERETPEYIQMDEKNKKFKFVRIPKFEEVPYPVVMEPNLVIEYYSR

SEQ ID NO: 85414 - protein, 205 aa, Unknown
  Bacterial polypetide isolated from the Sargasso Sea
MTKRLNSKHKVDRRLKVNLWGRPKSPFNTRAYGPGQHGQTRSSKPSDYGIQLQAKQKLKAYYGNINERQFRNIYKKAAMLKGDTGENLIGLLERRLDAVIYRAKFATTIFSARQLINHGHVKVNGKKVNIGSYSVKEEDFIEIRDKSKKLAIIDIALANKERETPEYLQMDEKNKKLKFVRIPKFEEVPYPIVMEPNLVIEYYSR

SEQ ID NO: 85415 - protein, 205 aa, Unknown
  Bacterial polypetide isolated from the Sargasso Sea
MTKRLNSKHKVDRRLKVNLWGRPKSPYNTRAYPPGQHGQTKSAKPSDYGIQLQAKQKLKCYYGNMNERQFRNMYKKAIMKKGDTAENLIGLLERRLDAVIYRSKLSNTIFSSRQLINHGHVRVNGKKVNISSYQVKEEDSIEIRDKSKQLALIDIALANKEREVPEYLQLDEKNKKVKFVRVPKFEEVPYPVVMEPNLVIEYYSR

SEQ ID NO: 85416 - protein, 88 aa, Unknown
  Bacterial polypetide isolated from the Sargasso Sea
GELEKLINKEENDIIVCATSGFAGLKAAYIAAKTGKKILLANKESIVAGGDLILPLAKKNNPEIIPIDSEHKAIFQGLSGEKGTEEVK

SEQ ID NO: 85417 - protein, 240 aa, Unknown
  Bacterial polypetide isolated from the Sargasso Sea
PVDSEHFSILNLLKNHSIKEIKKIYITASGGPFLNFNRRQFKKIKPSDALNHPKWKMGKKISIDSSTLMNKIFELVEAKKLFNISNDKLDILVHPDSLVHAIIEFKNGLVKFMYHDTSMIIPLANAIFDGKINIEDFYTNKKAKFKDKVIKDLRFSKVNNEAFPLIKLKNRILEFPSTPIIVNAANEILVDHFLNKKLQFLRINKIIMSVLNDRNYKKYAIRKPKILTILLKLINGLENS

SEQ ID NO: 85418 - protein, 141 aa, Unknown
  Bacterial polypetide isolated from the Sargasso Sea
MNERQFRNVYKKAIMKKGDTAENLIGLLERRLDAVIYRSKLSNTIFSSRQLINHGHVKVNGKKVNIASYQVKEEDTIEIRDKSKQLALIDIALANKEREVPEYLQLDEKNKKVKFVRVPSFEEVPYPVVMEPNLVIEYYSR

SEQ ID NO: 85419 - protein, 207 aa, Unknown
  Bacterial polypetide isolated from the Sargasso Sea
YLMTKRLNSKHKVDRRLRVNLWGRPKSPFNARAYPPGQHGQTKSTKPSNYGVQLQAKQKLKSYYGNINERQFRNLYRKAIMKKGDTAENLIGLLERRLDAIVYRAKLSTTIFSSRQLINHGHVTVNGKKVNIPSYQLKEEDTIEIRDKSKQLALIDIALANKEREVPEYLQVDEKSKKVKFVRIPKFEEVPYPVAMEPSLVVEYYSR

SEQ ID NO: 85420 - protein, 269 aa, Unknown
  Bacterial polypetide isolated from the Sargasso Sea
ANTNYLTIKKQIQKFKPKFFVVNNKVIFKKIKKKFIRSKTTIINKFSDISKNVKFDITISSIVGIAGLEPTIFFTKKSKKILIANKESIICGWHLIKKISKKYKTKIIPIDSEHFSIYQLTKNYKDNDIKKIYITASGGPFLKKPLNFFKKAKANDAAKHPNWKMGKKISIDSSNLMNKVFEVVEAYKLFPFSKNKYDILIHPQSLIHAIVLFNNGQCKFLYHETDMRIPIANAIYDNQINIKNVFKSKSNFLNNLQHLRLKKSIKKSS

SEQ ID NO: 85421 - protein, 172 aa, Unknown
  Bacterial polypetide isolated from the Sargasso Sea
MKKKIAILGSTGSIGQASLKIIKNNLKEFNIFLLSGNSNQILINAQIKKYKPKVFVINNFAVYKQIKKKYKNKKIKIYNKFSHIPLSLTKLDITISAIVGIAGLEPTIQFIKKSKKILLANKETIICGWHIIRNLCKKTKTKIIPIDSEHFSIDQLTKNFQDKDIEKIYITA

SEQ ID NO: 85422 - protein, 58 aa, Unknown
  Bacterial polypetide isolated from the Sargasso Sea
KQLAIVDIALANKERETPEYIQMDEKNKKFKFIRVPKFEEVPYPIVMEPNLVIEYYSR

SEQ ID NO: 85423 - protein, 205 aa, Unknown
  Bacterial polypetide isolated from the Sargasso Sea
MTKRLNSKHKVDRRLKVNLWGRPKSPFNTRAYPPGQHGQTKSAKPSDYGIQLQAKQKLKCYYGNMNEKQFRNMYKKAIMKKGDTAENLIGLLERRLDAVIYRSKLSNTIFSSRQLINHGHVRVNGKKVNISSYQVKEEDSIEIREKSKQLALIDIALANKEREVPEYLQLDEKNKKVKFVRVPKFEEVPYPVVMEPNLVIEYYSR

SEQ ID NO: 85424 - protein, 203 aa, Unknown
  Bacterial polypetide isolated from the Sargasso Sea
MNINIYGSTGTIGKKTLNIIDKFFPNIKINLLCANSNDVLLLKQIKKFNPKYVHIYDKNKLSKLKKSVSKKITFLDFDELNNYLYTNKSELSILAISGYKSLYFLDQIIYNTDNLGLVSKEAIVSAGHIFKKKKYFQKTNIFPLDSEHFSLFDFMQSSKENNIYKIIITASGGPFHKRKYNDLKNIKFEEAIKHPKWNMGYKN

SEQ ID NO: 85425 - protein, 270 aa, Unknown
  Bacterial polypetide isolated from the Sargasso Sea
KNFDIILLTANNNYKKLVQQAKEFNVKNVLIKNESYYEITKKSLKRNSTKVFSGDTPIKKIYPKKLDYTISAIVGIAGLQPTLDAIKNSKSVAIANKESIICAWDILIKEIKKHKTKILPVDSEHFSILELTKNIKDQEVEEIIITASGGPFLNLPLNKLYKVKPSEAINHPNWKMGKKISVDSSNLMNKVFEVIEACKFFNFNSKKYRIMIHPQSYVHSIIRFKNGLVKMILHNADMKIPISNTLYGKKNYIPNIKKIDSKILNNLNFS

SEQ ID NO: 85426 - protein, 205 aa, Unknown
  Bacterial polypetide isolated from the Sargasso Sea
MTKRLNSKHKVDRRLKVNLWGRPKSPFNTRAYGPGQHGQTKSSKPSDYGIQLQAKQKLKAYYGNINERQFRNIYKKATMLRGDTGENLIGLLERRLDAVIYRAKFSTTIFSARQLINHGHVKVNGKKVNISSYLVREEDTIEIRDKSKQLAIIDIALANKERETPEYIQMDLKNKKFKFVRTPKFEEVPYPIVMEPNLVIEYYSR

SEQ ID NO: 85427 - protein, 72 aa, Unknown
  Bacterial polypetide isolated from the Sargasso Sea
QLKEEETIEIRDKSKQLALIDIALANKEREVPEYLQVDEKNRKVKFVRTPKFEEVPYPVVMEPNLVIEYYSR

SEQ ID NO: 85428 - protein, 205 aa, Unknown
  Bacterial polypetide isolated from the Sargasso Sea
MTKRLNSKHKVDRRLKVNLWGRPKSPFNTRAYGPGQHGQTKTSKPSDYGIQLQAKQKLKAYYGNINERQFRNIYRKASMLKGDTSENLIGLLERRLDAVIYRAKFATTIFSARQLINHGHVKVNGKKVNISSYMVKEEDTIEIRDKSKQLAIIDIALANKERETPEYIQLDEKNKKFKFVRVPKFEEVPYPIVMEPNLVIEYYSR

SEQ ID NO: 85429 - protein, 301 aa, Unknown
  Bacterial polypetide isolated from the Sargasso Sea
CDAVPLKGLNRILVNKGLEVMQKLNNPGLRALAEKSNIKQKVSVYDLGFKLGPRINAAGRLGRSSFGTDLLTASQKLIADQISEELNKFNSERRTIESYVLDQAIEQVTKDKLKNKVLIVYGEGWHEGVIGIIASRLKDKFNKPTLVFSINDDVAKGSGRSLKGIDLGSLVVAAQQSQIILKGGGHAMAAGLTMEKNKIDELSQFFEKKLNKVDAIETNFTTMLADDKLSISAVNLEVYDEIEKVGPFGSENPEPNFIFENIKLASVDQIGEDHLKCLIKSNESSFIEAMAFRSLNTKLGD

SEQ ID NO: 85430 - protein, 162 aa, Unknown
  Bacterial polypetide isolated from the Sargasso Sea
MTKRLNSKHKVDRRLKVNLWGRPKSPFNTRAYPPGQHGQTKSAKPSDYGIQLQAKQKLKCYYGNMNERQFRNMYKKAIMKKGDTAENLIGLLERRLDAVIYRSKLSNTIFSSRQLINHGHVRVNGKKVNISSYQVKEEDNIEIRDKSKQLALIDIALANKER

SEQ ID NO: 85431 - protein, 139 aa, Unknown
  Bacterial polypetide isolated from the Sargasso Sea
VVAHLAGADMRTPISYALAWPDRLQWASERLDLATMDQLTFASVDTQRFPCFALARQALCDGGAAPAVLNAANEVAVAAFLQKKIGFGQIPAIVETVLNQSTTLPIDHLDAVMEIDADARQLAVAAVTKNRSYLSPILR

SEQ ID NO: 85432 - protein, 193 aa, Unknown
  Bacterial polypetide isolated from the Sargasso Sea
RRLKVNLWGRPKSPFNTRAYPPGQHGQTRSSKPSDFGIQLQAKQKLKSYYGNMNERQFRNTYKRAIMKRGDTAENLIGLLERRLDAVIYRSKLSNTIFSSRQLINHGHVRVNGKKVNISSYQVKEEDSIEIRDKSKQLALIDIALANKEREVPEYLQLDEKNKKVKFVRIPKFEEVPYPVVMEPNLVIEYYSR

SEQ ID NO: 85433 - protein, 171 aa, Unknown
  Bacterial polypetide isolated from the Sargasso Sea
MKKVILLGSSGSIGLSTCKVARALPDEMHLVGLAVNRSVDVLEEQVNEFSPVAVAVTDPDCAQKAAGRFTGCHYYAGEAGLVRLVEETDADMVLVAIVGTAGLAPALVALKTGKDLAVASKEILVMAGESVMETAKQEGRAVLPVDSEHNAIFQCLQGAPDQEVRKLILTA

SEQ ID NO: 85434 - protein, 183 aa, Unknown
  Bacterial polypetide isolated from the Sargasso Sea
GIWGIRSRVDSSTMMNKCLEIIEAKWLFGFDNIDVLIHPEGIIHSLVEFKDKSLMAQLSIPDMKIPIAYGLGFPERINSGSDSLDFEKISNLSFVKPDSKKFPSLVLAKDCINSGGTSFSTLNAANEECVASFLEGRIGYLDIHRIISEVLDKSDIKMVEEIEDIFEADMQSREMTKELINTN

SEQ ID NO: 85435 - protein, 205 aa, Unknown
  Bacterial polypetide isolated from the Sargasso Sea
MTKRLNSKHKVDRRLKVNLWGRPKSPFNTRAYPPGQHGQTKSSKPSDYGIQLQAKQKLKCYYGNINERQFRNMYKKAIMKKGDTAENLIGLLERRLDAVIYRSKLSNTIFSSRQLINHGHVRVNGKKVNIASYQVKEEDSIEIRDKSKQLALIDIALANKEREVPEYLQLDEKNKKVKFVRVPKFEEVPYPVVMEPNLVIEYYSR

SEQ ID NO: 85436 - protein, 236 aa, Unknown
  Bacterial polypetide isolated from the Sargasso Sea
LEEIEDVRKKILPVDSEPSAIWQCIEKESSIANIIITASGGSLRNISTDKYENVTPEQVLNHPVWSMGSKITIDSATFANKAFEVIEAKWLFDIDYEKISVLVHPQSIIHSIVEFNDGSMKAQLANPDMRLPIQHALLYPERKPNDLVSPLNLAEIGKLEFNETDNHKYPCFKLILDAAKLGKSYPALICATDEVLVNAFLNRQIKYTDIPRYLEKIINQHKPSIITKDTIIQITE

SEQ ID NO: 85437 - protein, 192 aa, Unknown
  Bacterial polypetide isolated from the Sargasso Sea
MTKRLNSKHKVDRRLKVNLWGRPKSPFNTRAYPPGQHGQSRSSKPSDFGIQLQAKQKLKSYYGNMNERQFRNMYKKAIMKKGDTAENLIGLLERRLDAVIYRSKLSNTIFSSRQLINHGHVRVNGKKVNISSYQVKEEDSIEIRDKSKQLALIDIALANKEREVPEYLQLDEKNKKVKFVRVPKFDEVPYPV

SEQ ID NO: 85438 - protein, 259 aa, Unknown
  Bacterial polypetide isolated from the Sargasso Sea
MIINVYGSTGVIGKTFLRIIKNQFPKYKINLLCAKNNIKLLANQCKEFNANFVYLDNQKKINTLRSILPKAIKILNKNELNEYLQKSRSDLSILSVSGYESLKYLELICINTDKIGIVSKEAIVSAGHILKNIIKKNNTKIFPLDSEHFSIFQNFNTTSVDYSNIKKIYITASGGPFINKKFNLLKNVSFKEATKHPKWKMGYKNSIDSATLVNKCLELIEAHYLFDIPLTKLDILIHPESLVHSIIEDHNYVSKLIYF

SEQ ID NO: 85439 - protein, 204 aa, Unknown
  Bacterial polypetide isolated from the Sargasso Sea
MTKRLTQKHKVDRDLSKFMGRPKSPFNTRAYPPGQHGQSKSSKPSDYGIQLQAKQKLKCYYGNMNERQFRNMYKRAIMKKGDTAENLIGLLERRLDAVIYRSKLSNTIFSSRQLINHGHVRVNGKKVNISSYQLKEEDSIEIRDKSKQLALIDIALANKEREVPEYLQLDEKNKKVKFVRIPKFEEVPYPVVMEPNLVIEYYSR

SEQ ID NO: 85440 - protein, 205 aa, Unknown
  Bacterial polypetide isolated from the Sargasso Sea
MTKRLNSKHKVDRRLKVNLWGRPKSPFNTRAYGPGQHGQTKTSKPSDYGIQLQAKQKLKAYYGNINERQFRNIYKKAVMLKGDTGENLIGLLERRLDAVIYRAKFATTIFSARQLINHGHVKVNGKKVNIGSYLVREEDLIEIRDKSKQLAIIDIALANKERETPEYIQMDEKNKKLKFVRVPKFEEVPYPIIMEPNLVIEYYSR

SEQ ID NO: 85441 - protein, 205 aa, Unknown
  Bacterial polypetide isolated from the Sargasso Sea
MTKRLNSKHKVDRRLKVNLWGRPKSPFNTRAYPPGQHGQTKSAKPSDYGIQLQAKQKLKCYYGNMNERQFRNMYKKAIMKKGDTAENLIGLLERRLDAVIYRSKLSNTIFSSRQLINHGHVRVNGKKVNISSYQVKEEDSIEIREKSKQLALIDIALANKEREVPEYLQLDEKNKKVKFVRVPKFEEVPYPVVMEPNLVIEYYSR

SEQ ID NO: 85442 - protein, 168 aa, Unknown
  Bacterial polypetide isolated from the Sargasso Sea
GQTKSSKPSDYGTQLQAKQKLKSYYGNMNEKQFRNMYKRAIMKKGDTAENLIGLLERRLDAVIYRSKLSNTMFSSRQLINHGHVRVNGKKVNISSYQVKEEDNIEIRDKSKQLALIDIALANKEREVPEYLQLDEKNKKVKFVRIPKFEEVPYPVVMEPNLVIEYYSR

SEQ ID NO: 85443 - protein, 141 aa, Unknown
  Bacterial polypetide isolated from the Sargasso Sea
INERQFRNIYKKASMLKGDTSENLIGLLERRLDAVIYRAKFATTIFSARQLINHGHVKVNGKKVNIASYSVREEDTIEIRDKSKQLAIIDIALANKERETPEYIQMDEKNKKFKFVRVPKFEEVPYPIVMEPNLVIEYYSR

SEQ ID NO: 85444 - protein, 205 aa, Unknown
  Bacterial polypetide isolated from the Sargasso Sea
MTKRLNSKHKVDRRLKVNLWGRPKSPFNSRAYPPGQHGQTRSSKPSDYGIQLQAKQKLKSYYGNINERQFRNMYKKAIMKKGDTAENLIGLLERRLDAVIYRSKLSNTIFSSRQLINHGHVRVNGKKVNISSYQVKEEDAIEIRDKSKQLALIDIALANKEREVPEYLQLDEKNKKVKFVRIPKFEEVPYPVVMEPNLVIEYYSR

SEQ ID NO: 85445 - protein, 205 aa, Unknown
  Bacterial polypetide isolated from the Sargasso Sea
MTKRLNSKHKVDRRLKVNLWGRPKSPFNTRAYPPGQHGQTKSSKPSDFGIQLQAKQKLKSYYGNMNERQFRNVYKKAIMKKGDTAENLIGLLERRLDAVIYRSKLSNTIFSSRQLINHGHVKVNGKKVNISSYQVKEEDSIEIKDKSKQLAFIDIALANKEREVPEYLQLDEKNKKVKFVRVPKFEEVPYPVVMEPNLVIEYYSR

SEQ ID NO: 85446 - protein, 170 aa, Unknown
  Bacterial polypetide isolated from the Sargasso Sea
MTKRLKSKHKVDRRLKVNLWGRPKSPFNARAYPPGQHGQTKSSKPSDYGVQLQAKQKLKSYYGNINERQFRNVYRKAIMKKGDTAENLIGLLERRLDAVVYRAKLSTTIFSARQLINHGHVKVNGKKVNIPSYQVKEEDSIEIRDKSKQLALIDIALANKERETPEYIQV

SEQ ID NO: 85447 - protein, 205 aa, Unknown
  Bacterial polypetide isolated from the Sargasso Sea
MTKRLNSKHKVDRRLRVNLWGRPKSPFNSRAYPPGQHGQSKSAKPSDYGVQLNAKQKLKSYYGNINERQFRNLYKKAIMKKGDTAENLIGLLERRLDAVVYRSKLSNTIFSSRQLINHGHVRVNGKKVNISSYQVKEEDSIEIRDKSKQLSIIDIALANKERETPEYLQVDEKNKKVKFVRVPKFEEVPYPVVMEPNLVIEYYSR

SEQ ID NO: 85448 - protein, 205 aa, Unknown
  Bacterial polypetide isolated from the Sargasso Sea
MTKRLNSKHKVDRRLKVNLWGRPKSPFNTRAYPPGQHGQTKSSKPSDYGIQLQAKQKLKCYYGNMNERQFRNMYKRAIMKKGDTAENLIGLLERRLDAVIYRSKLSNTIFSSRQLINHGHVRVNGKKVNISSYQVKEEDSIEIRDKSKQLALIDIALANKEREVPEYLQLDEKNKKVKFVRIPKFEEVPYPVVMEPNLVIEYYSR

SEQ ID NO: 85449 - protein, 205 aa, Unknown
  Bacterial polypetide isolated from the Sargasso Sea
MTKRLNSKHKVDRRLKVNLWGRPKSPFNSRAYPPGQHGQTKSSKPSDYGIQLQAKQKLKSYYGNINERQFRNIYKKAIMKKGDTAENLIGLLERRLDAVIYRAKLATTIFSARQLINHGHIRVNGKKVNISSYQLKEEESVEVRDKSKQLSIIDIALANKEREVPEYIQVDEKNKKIKFVRVPKFEEVPYPVVMEPNLVIEYYSR

SEQ ID NO: 85450 - protein, 205 aa, Unknown
  Bacterial polypetide isolated from the Sargasso Sea
MTKRLNSKHKVDRRLRVNLWGRPKSPFNTRAYPPGQHGQSKSSKPSDYGIQLNAKQKLKSYYGNMNERQFRNVYKKAIMKKGDTAENLIGLLERRLDAVIYRSKLSNTIFSSRQLINHGHVRVNGKKVNIASYQVKEEDSIEIRDKSKQLALIDIALANKEREVPEYLQLDEKNKKVKFVRVPKFEEVPYPVVMEPNLVIEYYSR

SEQ ID NO: 85451 - protein, 177 aa, Unknown
  Bacterial polypetide isolated from the Sargasso Sea
MTKRLNSKHKVDRRLKVNLWGRPKSPFNTRAYPPGQHGQTKAGKPSDYGIQLQAKQKLKSYYGNMNERQFRNVYKKAIMKKGDTAENLIGLLERRLDAVIYRSKLSNTIFSSRQLINHGHVKVNGKKVNIASYQVKEEDTIEIRDKSKQLALIDIALANKEREVPEYLQLDEKNKKV

SEQ ID NO: 85452 - protein, 205 aa, Unknown
  Bacterial polypetide isolated from the Sargasso Sea
MTKRLNSKHKVDRRLKVNLWGRPKSPFNSRAYPPGQHGQTKSSKPSDFGTQLQAKQKLKSYYGNMNERQFRNMYKKAIMKRGDTAENLIGLLERRLDAVVYRSKLSNTMFSSRQLINHGHIKVNGKKVNISSYQVKEEDTVEIRDKSKQLALIDIALANKERDVPEYLQVDEKNKKVKFVRVPKFEEVPYPVTMEPNLVIEYYSR

SEQ ID NO: 85453 - protein, 133 aa, Unknown
  Bacterial polypetide isolated from the Sargasso Sea
MNILLLGATGSIGDSVLSVIKENHSELNLFGITFHKNKNKSQEIIKDFKPEFAYVEDRSTFEDLKDTSDITFLNGDSSLKELIEHDDVDVIISAISGFAGLKATYLAASTGKKILLANKESIVAGGDLITARA

SEQ ID NO: 85454 - protein, 122 aa, Unknown
  Bacterial polypetide isolated from the Sargasso Sea
MNILLLGATGSIGDSVLSVIEENHSELNLFGITFHKNINKSQEIIKDFKPEFAYVEDRSTFEDLKDTSDITFLNGDSSLKELIEHDDVDVIISAISGFAGLKATYLAASTGKKILLANKEKV

SEQ ID NO: 85455 - protein, 205 aa, Unknown
  Bacterial polypetide isolated from the Sargasso Sea
MTKRLNSKHKVDRRLKVNLWGRPKSPFNTRAYGPGQHGQTRSSKPSDYGIQLQAKQKLKAYYGNINERQFRNIYKKAVMLKGDTGENLIGLLERRLDAVIYRAKFATTIFSARQLINHGHVKVNGKKVNIGSYSVKEEDSIEIRDKSKQLAIIDIALANKERETPEYLQMDEKNKKLKFVRIPKFEEVPYPIVMEPNLVIEYYSR

SEQ ID NO: 85456 - protein, 134 aa, Unknown
  Bacterial polypetide isolated from the Sargasso Sea
NIYKKASMQKGDTSENLIGLLERRLDAIIYRAKFATTIFSARQLINHGHVKVNNKKVNIASYLVKEEDTIEIRDKSKQLAIIDIALANKERETPEYIQMDEKNKKLKFVRVPKFDEVPYPIVMEPNLVVEYYSR

SEQ ID NO: 85457 - protein, 166 aa, Unknown
  Bacterial polypetide isolated from the Sargasso Sea
DNIDVIVHPQSIVHSMVETADSSVLAQLGWPDMRLPILYTMSWPNRVQCSEVTWPRLDFVKMGDLTFRAPDFEKYPSLTMGYAAGRFGGTMTGVFSAANEQAVAMFLDKKIGFFDIYKVIDLAMEAHKNELVLDPTLDDIVHFDLWARDFVKQVVESGKCTEALPV

SEQ ID NO: 85458 - protein, 181 aa, Unknown
  Bacterial polypetide isolated from the Sargasso Sea
MTKRLNSKHKVDRRLKVNLWGRPKSPFNTRAYGPGQHGQTRQGKPSDYGIQLQAKQKLKAYYGNINERQFRNIYKKAVMLKGDTGENLIGLLERRLDAVIYRAKFATTIFSARQLINHNHVRVNGKKVNVGSYLVKEEDSIEIRDKSKQLAIIDIALANKEREAPEYIQMDEKIKNLNLLE

SEQ ID NO: 85459 - protein, 229 aa, Unknown
  Bacterial polypetide isolated from the Sargasso Sea
MVLVLKTVSVLGSTGSVGKNTLEVISNLSDRFELYGISCNENNSLLYDQIIEYNPKVAVITNHEKYNEFMNEYGNKIGETRILFGDEGLNEISSHDNVDVVVAAIVGFQCLKPVIDAIASNKTVIIANKEILVAAGEMIVSILNESDGKLLPVDSEHNALLQVILSSGLEYKVNNKEYYEANIKNLTITASGGPFIDLDVSEFKKIKSKHAIKHPTWDMGEKSQLIHLP

SEQ ID NO: 85460 - protein, 205 aa, Unknown
  Bacterial polypetide isolated from the Sargasso Sea
MTKRLNSKHKVDRRLKVNLWGRPKSPFNTRAYPPGQHGQTKAGKPSDYGIQLQAKQKLKSYYGNMNERQFRNVYKKAIMKKGDTAENLIGLLERRLDAVIYRSKLSNTIFSSRQLINHGHVKVNGKKVNISSYQLKEEDTIEIRDKSKQLALIDIALANKEREVPEYLQLDEKNKKVKFVRVPSFEEVPYPVVMEPNLVIEYYSR

SEQ ID NO: 85461 - protein, 205 aa, Unknown
  Bacterial polypetide isolated from the Sargasso Sea
MTKRLNSKHKVDRRLKVNLWGRPKSPFNTRAYPPGQHGQTKAGKPSDYGIQLQAKQKLKSYYGNMNERQFRNVYKKAIMKKGDTAENLIGLLERRLDAVIYRSKLSNTIFSSRQLINHGHVKVNGKKVNIASYQVKEEDTIEIRDKSKQLALIDIALANKEREVPEYLQLDEKNKKVKFVRVPSFEEVPYPVVMEPNLVIEYYSR

SEQ ID NO: 85462 - protein, 167 aa, Unknown
  Bacterial polypetide isolated from the Sargasso Sea
QTKAGKLSDYGIQLQAKQKLKSYYGNMNERQFRNVYKKAIMKKGDTAENLIGLLERRLDAVIYRSKLSNTIFSSRQLINHGHVKVNGKKVNIASYQVKEEDTIEIRDKSKQLALIDIALANKEREVPEYLQLDEKNKKVKFVRVPSFEEVPYPVVMEPNLVIEYYSR

SEQ ID NO: 85463 - protein, 200 aa, Unknown
  Bacterial polypetide isolated from the Sargasso Sea
DINDFDSITPEDAINHPVWNMGRKISVDSSTLMNKGLEIIEARWLFNCENIEVLIHPEGIIHSLVEFKDNSVLAQLSNPDMKIPIAYGLGYPDRINSGSKQLNLKEIKSLNFMEPDLEKFPCLKLAMDLLPIGGNSFSILNASNEECVDAFLEGRISYKQIYEIISKVLDRIEIKAVQSLEDIFDSDKESRLETVSIINN

SEQ ID NO: 85464 - protein, 182 aa, Unknown
  Bacterial polypetide isolated from the Sargasso Sea
MTKRLNSKHKVDRRLKVNLWGRPKSPFNTRGYPPGQHGQSKSSKPSDYGVQLNAKQKLKSYYGNMNERQFRNAYKKAMMKKGNSAENLIGLLERRLDAIVYRAKLATTIFSARQLINHSHVKVNGKKVNISSYLVKEEDSIEIRDKSKKLAFIDIALANKEREVPEYLQVDEKNKKVKFLES

SEQ ID NO: 85465 - protein, 191 aa, Unknown
  Bacterial polypetide isolated from the Sargasso Sea
EEALNHPNWDMGDKITIDSATLVNKCFELIEAKYLFDLDVDKLEVLIQPQSIIHSMVELKDGSVEAQMSLPSMIIPLSFGLLGEYSDKTKKDFSLDMFKEDVKLTISDFPKDREELIGISKDVMKNGGNRGLIFAAVNDFAVKKYLKGEINFGEIYNLIFQHYSEIEKKEILSLEDLRGNQRKILNYLGSI

SEQ ID NO: 85466 - protein, 205 aa, Unknown
  Bacterial polypetide isolated from the Sargasso Sea
MTKRLNSKHKIDRRLKVNLWGRPKSPFNKRAYPPGQHGQSKNAKLSDYGTQLQAKQKLKSYYGNINERQFRNVYRKAIMKKGDTAENLIGLLERRLDSVIYRAKFSSTIFSSRQFINHGHVKVNGKKVNISSYLLSEEDTIEIKDKSKQLAIIDIALANKERDIPEYLQVDEKKRTIKFVRTPKFEEVPYPVVMEPNLVIEYYSR

SEQ ID NO: 85467 - protein, 205 aa, Unknown
  Bacterial polypetide isolated from the Sargasso Sea
MTKRLNSKHKVDRRLKVNLWGRPKSPFNTRAYGPGQHGQTKTSKPSDYGIQLQAKQKLKAYYGNINEKQFRNIYKKAVMLKGDTGENLIGLLERRLDAIIYRAKFATTIFSARQLINHGHVRVNSKKVNIGSYSVKEEDTIEIRDKSKQLAIIDIALANKERETPEYIQMDEKNKKLKFVRVPKFEEVPYPVIMEPNLVIEYYSR

SEQ ID NO: 85468 - protein, 205 aa, Unknown
  Bacterial polypetide isolated from the Sargasso Sea
MTKRLNSKHKVDRRLKVNLWGRPKSPFNTRAYGPGQHGQSRSSKPSDYGIQLQAKQKLKAYYGNINERQFRNIYKKAVMLKGDTGENLIGLLERRLDAVIYRAKFATTIFSARQLINHGHVKVNGKKVNIGSYLVKEEDSIEIRDKSKQLAIIDIALANKERETPEYIQMDEKNKKLKFVRTPKFDEVPYPIVMEPNLVIEYYSR

SEQ ID NO: 85469 - protein, 205 aa, Unknown
  Bacterial polypetide isolated from the Sargasso Sea
MTKRLNSKHKIDRRLKVNLWGRPKSPFNKRAYPPGQHGQSKNSKLSDYGTQLQAKQKLKSYYGNINERQFRNVYRKAIMKKGDTAENLIGLLERRLDAVIYRAKFSSTIFSSRQFINHGHVKVNGKKVNISSYLLGEEDTIEIKDKSKQLAIIDIALANKERDIPEYLQVDEKKRTIKFVRTPKFEEVPYPVVMEPNLVIEYYSR

SEQ ID NO: 85470 - protein, 82 aa, Unknown
  Bacterial polypetide isolated from the Sargasso Sea
MLRKLILGSYLVKEEDTIEIRDKSKQLAIIDIALANKERETPEYIQMDEKNKKLKFVRVPKFEEVPYPVIMEPNLVIEYYSR

SEQ ID NO: 85471 - protein, 205 aa, Unknown
  Bacterial polypetide isolated from the Sargasso Sea
MTKRLNSKHKVDRRLKVNLWGRPKSPFNTRAYPPGQHGQTKSAKPSDYGLQLQAKQKLKCYYGNMNERQFRNMYKKAIMKKGDTAENLIGLLERRLDAVIYRSKLSNTIFSSRQLINHGHVRVNGKKVNISSYQVREEDSIEIRDKSKQLALIDIALANKEREVPEYLQLDEKNKKVKFVRVPKFEEVPYPVVMEPNLVIEYYSR

SEQ ID NO: 85472 - protein, 99 aa, Unknown
  Bacterial polypetide isolated from the Sargasso Sea
MKRIAIFGSTGSIGTQTLSIIDEYKEKFQIVCLSCNNNADLLLQQVEKFMPKKVAINDIESNHLLNDFCHKNHIELIVESNASNKLSQYNGVDLAINAI

SEQ ID NO: 85473 - protein, 153 aa, Unknown
  Bacterial polypetide isolated from the Sargasso Sea
MKNILILGATGSIGESVLSVIKQNYEKLNLFGISFNQNIAKGKQIIDEFSPSFVHIDDLMGYNNIEKSENSSYLNSIEDLENLINHQDIDIIVCAISGFAGLNATHMAVHTGKKLLLANKESIVAGGDLILPIAKEYKTEIIPIDSEHNAIFQ

SEQ ID NO: 85474 - protein, 205 aa, Unknown
  Bacterial polypetide isolated from the Sargasso Sea
MTKRLNSKHKVDRRLKVNLWGRPKSPFNTRAYGPGQHGQTKQGKPSDYGIQLQAKQKLKAYYGNINERQFRNIYKKAVMLKGDTGENLIGLLERRLDAVIYRAKFATTIFSARQLINHGHVRVNGKKVNIGSYLVKEEDTIEIRDKSKQLAIIDIALANKEREAPEYIQMDEKNKKFKFVRIPKFEEVPYPIVMEPNLVIEYYSR

SEQ ID NO: 85475 - protein, 205 aa, Unknown
  Bacterial polypetide isolated from the Sargasso Sea
MTKRLNSKHKIDRRLKVNLWGRPKSPFNTRAYGPGQHGQTRTSKPSNYGIQLNAKQKLKAYYGNINERQFRNIYKKATMLRGDTSENLIGLLERRLDAIIYRAKFSTTIFSARQLINHGHVKVNNKKVNIASYLVKEEDTIEIRDKSKQLAIIDIALANKERDTPEYIQMDEKNKKLKFVRIPKFEEVPYPIVMEPNLVVEYYSR

SEQ ID NO: 85476 - protein, 205 aa, Unknown
  Bacterial polypetide isolated from the Sargasso Sea
MTKRLNSKHKVDRRLKVNLWGRPKSPFNTRAYGPGQHGQTRSSKPSDYGIQLQAKQKLKAYYGNINERQFRNIYKKAVMLKGDTGENLIGLLERRLDAVIYRAKFATTIFSARQLINHGHVKVNGKKVNIGSYLVKEEDSIEIRDKSKQLAIVDIALANKERETPEYIQMDEKNKKLKFVRTPKFEEVPYPIVMEPNLVIEYYSR

SEQ ID NO: 85477 - protein, 205 aa, Unknown
  Bacterial polypetide isolated from the Sargasso Sea
MTKRLNSKHKVDRRLKVNLWGRPKSPFNTRAYGPGQHGQTKTSKPSDYGIQLQAKQKLKAYYGNINEKQFRNIYKKAVMLKGDTGENLIGLLERRLDAIIYRAKFATTIFSARQLINHGHVRVNGKKVNIGSYLVKEEDTIEIRDKSKQLAIIDIALANKERETPEYIQMDEKNKKLKFVRIPKFDEVPYPVIMEPNLVIEYYSR

SEQ ID NO: 85478 - protein, 132 aa, Unknown
  Bacterial polypetide isolated from the Sargasso Sea
YKKAVMLKGDTGENLIGLLERRLDAVIYRAKFATTIFSARQLINHGHVKVNGKKVNIGSYLVREEDSIEIRDKSKQLAIIDIALANKERETPEYIQMDEKNKKLKFVRVPKFEEVPYPIVMEPNLVIEYYSR

SEQ ID NO: 85479 - protein, 205 aa, Unknown
  Bacterial polypetide isolated from the Sargasso Sea
MTKRLNSKHKVDRRLRVNLWGRPKSPFNTRAYPPGQHGQSKSSKPSDYGIQLNAKQKLKSYYGNMNERQFRNVYKKAIMKKGDTAENLIGLLERRLDAVIYRSKLSNTIFSSRQLINHGHVRVNGKKVNIASYQVREEDSIEIRDKSKKLPLIDIALANKERDVPEYLQLDEKNKKVKFVRVPKFEEVPYPVVMEPNLVIEYYSR

SEQ ID NO: 85480 - protein, 205 aa, Unknown
  Bacterial polypetide isolated from the Sargasso Sea
MTKRLNSKHKVDRRLKVNLWGRPKSPFNKRAYGPGQHGQTKTSKPSDYGIQLQAKQKLKAYYGNINERQFRNIYKKAVMLKGDTGENLIGLLERRLDAVIYRAKFSTTIFSARQLINHGHVKVNGKKVNIGSYLVREEDSIEIRDKSKQLAIIDIALANKERETPEYIQMDEKNKKLKFVRVPKFEEVPYPIVMEPNLVIEYYSR

SEQ ID NO: 85481 - protein, 205 aa, Unknown
  Bacterial polypetide isolated from the Sargasso Sea
MTKRLNSKHKVDRRLKVNLWGRPKSPFNTRAYGPGQHGQTKTSKPSDYGIQLQAKQKLKSYYGNINERQFRNIYKKASMLKGDTSENLIGLLERRLDAIIYRGKFATTIFSARQLINHGHVRVNGKKVNIASYIAKEEDTIEIRDKSKQLAIIDIALANKERETPEYIQMDEKNKKLKFVRVPKFEEVPYPIIMEPNLVVEYYSR

SEQ ID NO: 85482 - protein, 78 aa, Unknown
  Bacterial polypetide isolated from the Sargasso Sea
VNIASYQVREEDTIEIRDKSKQLALIDIALANKEREVPEYLQLDEKNKKVKFVRVPKFEEVPYPVLMEPNLVIEYYSR

SEQ ID NO: 85483 - protein, 250 aa, Unknown
  Bacterial polypetide isolated from the Sargasso Sea
MNINLYGSTGQIGQKTLNIIKKYFPQLKINLLCANSNVSLLLKQIKIFKPNYIYLDNPNAAKKLKSNLPNNIELLTFNELKNYLKKSNSDYSILAVSGYKSLYYLEDIVNNTKNLGIVSKEAIVSAGHLFRKKKYFNKTNIFPLDSEHFSLFENFKSINYFKNINKVIITASGGPFYKKNFKSLKNIKFQEAIKHPKWKMGYKNSIDSATLVNKCLEVIETHYLFNIPYNKIDVLIHPPSFNSFNSEKDN

SEQ ID NO: 85484 - protein, 253 aa, Unknown
  Bacterial polypetide isolated from the Sargasso Sea
AKKYQSEIIPLDSEHSAIFQCLQGSSNDDVNKIILCCSGGPFWDKKIESFKKITVQDALNHPVWKMGEKISIDSSTLMNKSLEIIEASVLFGVDANKIDVVIHPQHIVHSMVEFKDGSILSNLSAPDMKASISYGLGFPKRLESGIERLSFSDLSLNFFEPDHKKFPTLDYAKKALSLGGNLPLILNSFNEVAVDLFLQKKINYLDIFQLISHAFDAKDNLDMNKKFDTVDEILHFEALSKKQAKVYAERYTF

SEQ ID NO: 85485 - protein, 105 aa, Unknown
  Bacterial polypetide isolated from the Sargasso Sea
YRSKLSNTIFSSRQLINHGHVRVNGKKVNIASYQVKEEDSIEIRDKSKQLALIDIALANKEREVPEYLQLDEKNKKVKFVRVPKFEEVPYPVVMEPNLVIEYYSR

SEQ ID NO: 85486 - protein, 141 aa, Unknown
  Bacterial polypetide isolated from the Sargasso Sea
MNERQFRNVYKKAIMKKGDTAENLIGLLERRLDAVIYRSKLSNTIFSSRQLINHGHVRVNGKKVNIASYQVREEDSIEIRDKSKQLALIDIALANKEREVPEYLQLDEKNKKVKFVRVPKFEEVPYPVVMEPNLVIEYYSR

SEQ ID NO: 85487 - protein, 205 aa, Unknown
  Bacterial polypetide isolated from the Sargasso Sea
MTKRLNSKHKVDRRLKVNLWGRPKSPFNTRAYPPGQHGQTKSAKPSDYGIQLQAKQKLKSYYGNMNERQFRNMYKKAIMKKGDTAENLIGLLERRLDAVIYRSKLSNTIFSSRQLINHGHVKVNGKKVNIASFQVKEEDTIEIRDKSKTLALIDIALANKEREVPEYLQLDEKNKKVKFVRIPAFEEVPYPVVMEPNLVIEYYSR

SEQ ID NO: 85488 - protein, 196 aa, Unknown
  Bacterial polypetide isolated from the Sargasso Sea
MKKKIAILGSTGSIGKKTLHILRNDKKNFDIFLLTANKNTSLLIKQIKEFNPKNIIITDDKNYKIVKKKFKNKNVYDSLNKINSIFKSKIDYTMSSISGFNGLKPTLEIIKFTKTIAIANKESIICGWNLISKQLKKHKTNFIPIDSEHFSIWSLIKNSPREGIDKIIITASGGPFLKKTYKQLKKINPIDAIKHP

SEQ ID NO: 85489 - protein, 252 aa, Unknown
  Bacterial polypetide isolated from the Sargasso Sea
LIKNNTKFIPIDSEHFSICSLIENEPINKVEKIIITASGGPFLNYKLNKLKNVKPKDAIKHPNWRMGKKISIDSATLMNKVFEVIEAQRIFKIDINKFDILIHPKSYIHSIIKFINGQIKILAHDTDMKIPIFNSIYQGEIKKIMTKKININLLNNMKLMKADNKRFPSINLLKKFNNNNTLFETVLISANDELVELYLNNKIKFFDINKILIKILNNKNYRKLNKKKPKNISDIINLSKEVRLKTRNLCIQ

SEQ ID NO: 85490 - protein, 309 aa, Unknown
  Bacterial polypetide isolated from the Sargasso Sea
MNYKIKNSNILITAIPGIDGLKPTLDFIKKSQKLLIANKESIICGWNLIKKESRKYKVKIIPIDSEHFSIMQILKNIKNNDIEKIFITASGGPFLKFNKKQIAQATPSQALKHPKWKMGKKISIDSATLMNKIFEVVEASKLFSINLNKIEILIHPQSLIHAIIKYKNGLSTLLYFEPDMTIPICNAISDQGLDIKNYLNAKTKKDNLIIKEKLEFFKVDKNKFPAIKLKPILNKFNSLPIVVNAGNEIFVDQFLKKKISFYSIIYNLFKLLKDPKIRKYAIKKSTNLNSIISIDKWARDQATKILEKK

SEQ ID NO: 85491 - protein, 331 aa, Unknown
  Bacterial polypetide isolated from the Sargasso Sea
MKKNIAILGCTGSIGKKTLDILRNDKKNFDIFLLTANKNTSLLIKQIKEFNPKNIIITDNKSYKIVKKKFKNKKIYDSLNKINSIFKSKIDYTMSSISGFNGLKPTLDIIKFTKTIAIANKESIICGWNLINKQLKNHKTNFIPIDSEHFSIWSLIKNSPHEDIDKIIITASGGPFLKKTHKQLKKIKPADAIKHPNWKMGKKISIDSATLMNKIFEVIEAKKIFNIKFNKFKVLIHPQSYIHAIIKFKNGLIKIIAHDTDMKIPIFNSLYNNENKAIHSKNINLKILNNLELQEVDPKKFPVIKLLNKIPNNETLFETLLVTMNDELVDL

SEQ ID NO: 85492 - protein, 261 aa, Unknown
  Bacterial polypetide isolated from the Sargasso Sea
ICGWNLIRNQLDKFKTNFIPIDSEHFSIYSLIQKNNKDQIDKVFITASGGPFLNTSSKKLKNIKKKDALKHPNWKMGKKISIDSSTMMNKVFEVIEAKKLFNLNYKNISILTHPKSYVHAIVKFKNALIKILIHEPDMKIPIYNSLYPLTKNKVKSKKLNLSILNNLDLKKINYHKFPLLKLLNNLNEKDSLYETILVVINDFFVLKYLNNEIKYHEMIKLIYKYSNYNEFLKYRKILPKKVTDIYKLRDYVSLKLSTLSV

SEQ ID NO: 85493 - protein, 182 aa, Unknown
  Bacterial polypetide isolated from the Sargasso Sea
MSKKKIAILGSTGSIGKTLFDIIKKDKNKFKILLLTANKDYKTLLDQAKIFKVKNLIITNKKSFKILKLKANKLNINIFNNFDNLNQIFQNKIDYTMSSITGIEGLDPTLEIIKYTKKIAIANKESIICGWGLINKSLKKNKTEFIPVDSEHFSLWYGLKNINLNIIDKIYLTASGGPFFKT

SEQ ID NO: 85494 - protein, 275 aa, Unknown
  Bacterial polypetide isolated from the Sargasso Sea
NLICAKSNYKLLKKQIYKYNPKYAFLYDIDELPKFNYKINKTKILNFDELINYLLGSKSNLTILAISGYKALYFLESIIQNTDNLGLANKESIVSAGHLFKKKKYLSKTNIFPLDSEHFSLYDFFNKTNQAKNNISKIILTASGGPFYKKKFNDLKTITFLQATNHPKWKMGYKNSIDSATLVNKCLELIEAHYLFDIPFKNMDILVHPEAIVHSAIEYKNYITHLNLFKNDMKIPILNFLLTSKYKNNLIKNKKYLLNFNNLNFHKVKNDIFPI

SEQ ID NO: 85495 - protein, 239 aa, Unknown
  Bacterial polypetide isolated from the Sargasso Sea
MIKRKIAILGSTGSIGVSSLDILKINLKKFKIILLSANKNYPLIKKQIKKYKPKYFIINNKDVFNRIVKTNKYNKTKIYNKFSDIPLKIKFDITISSIVGIAGLEPTISFVKRSKKLLLANKESIICGWHILKEISKKSNTEILPIDSEHFSIYQLTKNCDDNDIKKIYITASGGPFLRKPLKFFKNIKANQAVKHPKWKMGKKISIDSSNLMNKVLEVIEAYKFFPFHQKKYEILIHP

SEQ ID NO: 85496 - protein, 268 aa, Unknown
  Bacterial polypetide isolated from the Sargasso Sea
HYSFKQAKYFNVKNVIILNTKKYFLWKKKFEKNKIKIFNSYRDLNKIIKKKLDYTINAISGLDGLEPTIKIIKHTKKIAIANKESIICGWNLIEKELEKNRTEFIPVDSEHFSIYSLINKTPNNQIKKIIITASGGPFLKKSIKSKVKISDALNHPNWKMGKKISIDSATLMNKVFEVIEAKKIFKLKYDKIQILINPNSYLHAVVIFNNGTIKLLVHETKMDIPIYNSIYSTSNYKLYKTKNLDLNKINNLFLSKPDSKKFKSIDVL

SEQ ID NO: 85497 - protein, 265 aa, Unknown
  Bacterial polypetide isolated from the Sargasso Sea
ANKNHLKLIKQANKYKVKNIIITNPNSYKILKKINKNKQIKIYNNFDNLNKIFKTKVDYAMSSITGLDGLKPTIEISKFTKKLAIANKEAIICGWNLISKILKKYKTEFVPVDSEHFSIWYALKNNMDIVSKIYLTASGGPFLNLPTSKLRKVKIKDALKHPNWKMGKKISIDSATMMNKVFEIIEAKKIFNLKYNQLSILTHPDSYIHAIVQFKNGLVKLIAHKTDMKIPIENTIYDRKKNFSDNVKLEISKLNNINLKKIDEK

SEQ ID NO: 85498 - protein, 251 aa, Unknown
  Bacterial polypetide isolated from the Sargasso Sea
STLDIISNDKKKYSIELLVANKNFKTIHKQVIKFKPKFVYLANKIYSRRLSILLRNNKTKIITNFDEINKKISKSDIMMSSITGLDGLKYNLSLIKKAKKILFANKESIICGWNLIKKEMNKYNSSYVPVDSEHFAISELIKNKDFKKIKNITITASGGPFFNFEKKLMKNINKKMALNHPKWKMGKKISIDSATMMNKIFEVMEAYRLFDLKSHQVNIVIHPQSIVHAIVNYKNGTSHALLHHTDMRIPI

SEQ ID NO: 85499 - protein, 94 aa, Unknown
  Bacterial polypetide isolated from the Sargasso Sea
MGSTGSIGTQTLQIAEEFPDQFRVVALTAGRNLSLLVQQIQRHQPELVALADPALLPVLKQHLEDLPADQRPAKAPELVAGPSGLNAAASWDTA

SEQ ID NO: 85500 - protein, 221 aa, Unknown
  Bacterial polypetide isolated from the Sargasso Sea
MKKKLSVFGCTGSIGETTFKLLKNNKQFKFYILTGFKNYKKIKYLIRYYKPKYFVIFDDKTFLKIKKEFDKKKVIILNSKDFYSFKFEKSDVTILAIPGMAGLEPSLEIIKKSKKILIANKESVICGWNLINKIAKKYKVKILPVDSEHFSIMNLINETHNKFIEKIYLTASGGPFLNYPLKKMSKIKPSQAINHPKWKMGKKISIDSATLMNKLFEVIEA

SEQ ID NO: 85501 - protein, 292 aa, Unknown
  Bacterial polypetide isolated from the Sargasso Sea
DVGNFRIGCLKPTIDIIKFSKTIAIANKESIICAWNLIQKNLTKYKTKFIPVDSEHFSIWSLLSDNKKNNIEKVIITASGGPFLKIPLSEFKKIKPNDAVKHPNWKMGNKISIDSATLMNKVFEVIEAQRIFKINVNKFKILIHPKSYVHAIIKFNNGLTKILVHDTDMKIPIFNSIYNEKNINFKNSKLNLKILNNLNFSNVNLKKFPSIKILNKIPKKISLYETVLVSANDQLVDLFLKNKISFQKITFFLNKILIKKNFLKYKNRSPKNYDEIIKLSNYVRLKTRLLCI

SEQ ID NO: 85502 - protein, 225 aa, Unknown
  Bacterial polypetide isolated from the Sargasso Sea
MKKSISILGSTGSIGTTVFKIIDKKKNNFKIDILSANKNIKIILKQIKKYKPKYFIINNKKSFLKIKKKYSNKKTKIFNNLNSIKINKKSDICVSAIPGIAGLEPTILMISNSKKILIANKESIICGWNIIKQKAKKYNTKIIPVDSEHFSIMKLFEDHKIKEIDKVFITASGGPFLNYKLNQFNHIKPSDALKHPKWKMGKKVTIDSSTMMNKLLEIIEAQKLF

SEQ ID NO: 85503 - protein, 202 aa, Unknown
  Bacterial polypetide isolated from the Sargasso Sea
STKNIAIANKESIICAWNLIEKKLIKNKTKFIPVDSEHFSIWSLLQNESINNVEKVIITASGGPFLNYKLNKLKTVKPNQAMKHPNWKMGKKISIDSATLMNKVFEIIEAQRIFKINIKKFDILIHPNSYIHSIIKFKNGQIKILAHDTDMKIPIFNSIYPDGFKKIDTNQININFLNDLKLSNIDIVRYPSIKILKKINNI

SEQ ID NO: 85504 - protein, 256 aa, Unknown
  Bacterial polypetide isolated from the Sargasso Sea
KRNAKKNSTKIIPIDSEHYSIMKLLENHKINDIEKIFLTASGGPFLNYKLSELKNITPSAALKHPKWKMGKKISIDSATLMNKILELIEAQKLFSIPNSKIDILIHPNSLVHAIINFKNGLTKLLYHETSMIIPLANAIFDGKINIKDFYKKTKQKNNKILDNLYFEKVNKKTFPIIKIKDEINKFPSTPIIVNAVNEVLVGEFLKKKLPYLSIYKHILGIMKDRNFKKYAIKNPKSIKQILEIDNWAKSTIKKKL

SEQ ID NO: 85505 - protein, 255 aa, Unknown
  Bacterial polypetide isolated from the Sargasso Sea
KPLYFLVSDKIIYKKIKEKFKKKKNRTIIINRIEEIKIRKKSDVTISAIPGIIGLKPTIYLIKLSKKILLANKESVICGWDLIRKEIKKYNTTLVPIDSEHYSIMNLIKNHKINEINKIFITASGGPFLNYKVSQFKKINPTDALKHPKWKMGKKISIDSATLMNKILELIEAQKLFNLPPEKLEIVIHPESLVHSIIDFKNGIKKFIYHETTMIIPIANALFEESINIENIIKIAKKEKIKNLIFKKVDKKIFP

SEQ ID NO: 85506 - protein, 250 aa, Unknown
  Bacterial polypetide isolated from the Sargasso Sea
MNINIFGSTGVIGNKSLNLIKKFFPEIRINLLVANNNYKKLISQCDKYKPKYICIINENLIYKIKPHIDKKIKIIKNKNLNKHLNAVKTDLTILSVSGYKALIYFESILKNTKYLGLVNKEIIVSVGHLFKEKKFLNNTLIFPLDSEHFSLFNFFQKNNYKINEIRKIYLTASGGPFLNYNIKKLQNVKLKDAIKHPKWKMGHKNSIDSATLANKCLELIEAHYLFNVPFNKLDILIHPESLVHSIVELK

SEQ ID NO: 85507 - protein, 315 aa, Unknown
  Bacterial polypetide isolated from the Sargasso Sea
YPNLFISLVRKPKKNLKIFGLNIEVLDCIEIVAERIENSPSDIYLSAVSSYEALELTIAAAKSGKKLLLANKESLVVFGKFIMDTVSSSGTELIPIDSEHFSLFSSLRSLNKNDIKKIFITASGGPFLGQNLEQIKNKKAVDALKHPTWKMGDKITIDSATLTNKCFELIEAKFLFDLDPEKLDILIQPQSIIHSLIELNDGSVEAQLSKPSMIIPLSYGLLDSRSDEVRNKFSLNMFEEEINLQLKFFPEDRKELLKITKEIMDLGGNRGLIFATLNQIAVNNFLKDQIKFGEIYEFIYNNYFNFEKKELNTLE

SEQ ID NO: 85508 - protein, 263 aa, Unknown
  Bacterial polypetide isolated from the Sargasso Sea
ICGWTLIDKELKKNKTKFIPVDSEHFSLWYGLINTEIDLIEKIYLTASGGPFYLTPLKKFKNIKIQQALKHPNWKMGNKISIDSATMINKIYEVIEAKNIFNIPYSKIEILVHPKSYVHAIIKFKNGLTKIIVHDTTMKIPIFNTLYNNTKKTLKSGQLKIDLLNNLKFNKVEYKRYPMIKILNYLSNKHSLYETIIVSANDALVDLYLKKRIKFVDIHKKLFDLIKTNHFLKYKKIYPRKIKDILELNDYVRLKVNEKVYKS

SEQ ID NO: 85509 - protein, 194 aa, Unknown
  Bacterial polypetide isolated from the Sargasso Sea
MKKIAILGSTGSIGQQTIDILRKDKKQFKILLLTANKNHFLLSKQIKEFNVKNVFITNKEGCSILKKKFKKVNIFNDINKIDKILTSKLDYTMSSIAGFDGLKPTLKIIKKTKKIAIANKESIICGWSLIEKEIKKHKVKFIPVDSEHFSIWSLIKNTDPKKVDEIIITASGGPFYKSKKKNVKKTPKWQQIIQ

SEQ ID NO: 85510 - protein, 293 aa, Unknown
  Bacterial polypetide isolated from the Sargasso Sea
MKKINLVIYGATGSIGKSVLSIIRENKDKFNIQGITCDKSYKKLIKIGNEFSIKKIGINKEIKNKIKELGKFSIYHKIEKFHEIIDNKTDIIIFAITGLAGLDLISNLIKSGKKIGIANKECIISLGNNLPRLARSYSTEIIPLDSEHNSIYHLLNNKYGEFESITITASGGPFRNMPRKNLNNVTIDQALTHPIWKMGKKISIDSATMMNKALEIIEAKYLFDLKDSQINAIIHPQAIIHAVINYKNGVSSALMNKPDMRIPISSLFFKFESYSKNDKQLSLVDHSNLEFFD

SEQ ID NO: 85511 - protein, 223 aa, Unknown
  Bacterial polypetide isolated from the Sargasso Sea
VKNQESISRLILTGSGGPFLNRDINDFKNITPKEATSHPIWNMGDKISVDSSTMMNKCLEIIEAKWLFGFDNIDVLIHPEGIIHSLVEFKDKSLMAQLSIPDMKIPIAYGLGFPERINSGSDSLDFEKISNLSFVKPDSKKFPSLVLAKDCINSGGTSFSTLNAANEECVASFLEGRIGYLDIHRIISEVLDKSDIKKVEEIEDIFEADMQSREMTKELINTN

SEQ ID NO: 85512 - protein, 286 aa, Unknown
  Bacterial polypetide isolated from the Sargasso Sea
QHLLKSIEISKKVGVANKESIICGWNLIKKSLYKNQTKFIPLDSEHFSLWRLIRNKKINDIKEVFLTASGGPFLNKKKSDLKNIDSKLALRHPNWKMGKKISIDSATMMNKVFEVIEAHKLFNIDFNKIKILIHPTSYIHSIVKLKDGTIHLLAHDTKMEIPIANSLFENNIYNYNDNKFNININNMKFYKPNKNQFPSLKFLDQFKNRNKYYEILLIVGNDELVNYYLKNKIKYEDIYYLLSKLIKMNLFKNYDNNGHISLKKINKIIKIVKSNIRNIIKNKKIK

SEQ ID NO: 85513 - protein, 193 aa, Unknown
  Bacterial polypetide isolated from the Sargasso Sea
MKKKIAILGSTGSIGQSTLDVIEKDKKNFDIVFLSANNNYKKLIQQAKKFKVKNVLIGNKKFYQKVKNSLKKTKVYTGEISIQKIISKKIDYTMAAVVGIAGLQPTIDAIKVSHNVAIANKETIICGWNILSKLIKKYKTKIIPVDSEHFSIMELTKNMKDSDINEIIITASGGPFLYKNIKKINKATPSQAS

SEQ ID NO: 85514 - protein, 269 aa, Unknown
  Bacterial polypetide isolated from the Sargasso Sea
KFKVKNLIIRNKRGFEILKNKLKNDKSIKIFNNYNSFSKIFKKKNYYVMSSISGVDGLSPTVKIIKYTKNIAIANKESIIIAWNLIDRELKKNKTNFIPVDSEHFSVWYGLNNLDASNVEKIYLTASGGPFANLPLKNFKKIKLKQALKHPNWRMGKKISIDSATMINKIYEVIEAKNIFNINYKNIKILQHSNSYIHAILKFKNGLIKLVAHDTTMKIPIFNTLYFNERKKISSKKLNLNTLNNLKFKIPDSKRYPMIKLLKLLPIKP

SEQ ID NO: 85515 - protein, 261 aa, Unknown
  Bacterial polypetide isolated from the Sargasso Sea
NYRLICKQIKKFKPEIFIIFNTKVFEKTKKKFKNNKVKIVQNINIKKNILKKSDVTIAAIPGIAGLKPTIELTKLSKKILIANKESIICGWDLIKKNAIKYNTKVIPVDSEHFSIQKLLENQKINNVKKIYITASGGPFLNHKISKLKTVKPHDAIKHPKWKMGKKISIDSATLMNKILEVIEAHKLFNIDIKKFEIVIHPESLIHAIVEFKNGLYKFIYHETSMLIPLANAIFDDNIDIDYFLKSKLKSKRSIFFQSLNF

SEQ ID NO: 85516 - protein, 230 aa, Unknown
  Bacterial polypetide isolated from the Sargasso Sea
YQLLNNNKHSVRTITITATGGPFLNKKLDDFKNIKVEEAINHPVWNMGEKISVDSATMVNKGLEVIEAKYLFDLDVNKINVLVHPQAIIHGFITYKDNSIFSFMSYPDMQIPISNLLFPNKDVNFDDLYLDLAKIQTLNFYDINEKKFPAIKYAKEVISIGGLAPNGFNYANEKLVNFFLSKKINFIDIVNFNIATIDKFFAKNSNIERPTIEDIFNFNKWIDENIYLGD

SEQ ID NO: 85517 - protein, 301 aa, Unknown
  Bacterial polypetide isolated from the Sargasso Sea
LNILKKDKKNFRIKLLTTHSNIKKIYKQALLFNVNKIVIFNKKEFLKNYKKFEKKKISVFCTIGDAFKTNKKKSYLTINAISGIDGLEPSLNIIKYSNNLAIANKESIICGWKFLHKELLKNKTGFIPLDSEHFSIWSLLKQEKKQNIKKIYLTASGGPFLNLKLKKIKDIKPKYALKHPNWKMGKKISIDSATMMNKIFEVIEAIKIFNLDSKQIDIIIHPKSYLHAIVNFNNGLTKLLAHDTTMEVPIANSIYQNFKIYNYKNSTFKYKMLNGLNFIKPDQKKFPLLKILKYKFNNTYL

SEQ ID NO: 85518 - protein, 153 aa, Unknown
  Bacterial polypetide isolated from the Sargasso Sea
MKYITVLGSTGSIGTQTLEIASEQPDKFKAVALSAGRNINLLTEQVKTHKPEVVAIEDENLIEDLKDNINNLDLDSAPLVLSGKEGINAVAAWDKADTVVTGIVGCAGLIPTMSAINAGKDIALANKETLIAAGPIVIPALKKNNSRLLPADS

SEQ ID NO: 85519 - protein, 227 aa, Unknown
  Bacterial polypetide isolated from the Sargasso Sea
MVNKKRVSIIGSTGFIGKQTLNVVDKQPWFKIELLSCYRNIKELKKQISKYKPSNIYIECKKAREKFKHYNIKSKFNIIEKKSELNDFISSDSNDILVASSSGINSIDTVIAALKKKKKICVASKEIFLLYGKEIMKISKKFNNKIIPIDSEHSGVFQLLESNRAEDVKKIYITASGGPFYGRKIKDLSKIKKEDALNHPTWKMGDKITIDSATLMNKGIEIIEAAT

SEQ ID NO: 85520 - protein, 171 aa, Unknown
  Bacterial polypetide isolated from the Sargasso Sea
FGLDNDHIEIVIHPQSIIHSMIELRDSSVLPQLGWPDMKLPILYCLSWPSRLETPWRRLDLTEVGQLTFRAPDTTKYPCMELAYAAGRAGGTMPAVLNAANEEAVAQFLEERIHFLDIPEVIEAACERHKPDLMNHPQLEDVLSVDRWAREAVREQVSRGTRRVPVAALAA

SEQ ID NO: 85521 - protein, 284 aa, Unknown
  Bacterial polypetide isolated from the Sargasso Sea
LICAKSNVNILLKQIHYYNPSYACIYDSRKVDIIKSKINNNTKLITFNELLKYLKSSSSTYSVLAISGYKSLYYLDDIIGNTEHLGIASKEAIVSAGHIFTKKNYFNNTKIFPLDSEHFSLFDYLNQNNFNKSIKKITLTASGGPFYKRKFQTLKNVKFKNAIKHPKWKMGYKNSIDSATLVNKCLELIEAHYLFGVPFSKLNIKIHPQALVHSIVQKDNFVFHMNLFKNDMKIPILNFLNIKYKNIDYIEKKLSIIDFKKLEFLEVKNTNFPIYNFFLKRDKN

SEQ ID NO: 85522 - protein, 267 aa, Unknown
  Bacterial polypetide isolated from the Sargasso Sea
IVNKESIICGWNLIKNALEKNKCNFIPIDSEHYSIHSLLKGHQLNEIEKIYITASGGPFINIPKKKFDNIKLKDALSHPNWKMGKKITIDSSTLMNKVFEVIEARNIFNIDYKKILILTHPKSYVHAIVKFNNGLSKILLHEPDMKIPIYNSLNLTNKKTRTLPLRFDTLNKLNFNEVDNKKFPLVNIINKLPKKISLFETILITVNDYFVNKFLEKKISYKKLIFIIIKILNMKEFQKYKKIKPKNIEDIYRLRDYVSFKMDSLSI

SEQ ID NO: 85523 - protein, 325 aa, Unknown
  Bacterial polypetide isolated from the Sargasso Sea
YKPKIFIINNHAIFKKVKKRFKKKKTIILNNFNSLKIRKKSDITVSAIPGIAGLQPTLKMIAGSRKILIANKESIICGWDILNKEAKKNKTKIIPIDSEHFSIMKLLESNKLEDINKIYITASGGPFLNYSINQLQKIRPSDALKHPKWKMGKKVTIDSATLMNKILELMEAQLLFNLDLKKLDILIHPESLVHAVVELSNGLYKFIYHDTSMIIPLANAIYEDKLNINHFYIKKNSIIKNLTFQKVNKNIFPIIKLKKKLNEYPATPIIINAANEILVDQFLRKKIPFSSIYKFIMAILKDRNYRKYAIKRPKNIKSIFKVDNW

SEQ ID NO: 85524 - protein, 220 aa, Unknown
  Bacterial polypetide isolated from the Sargasso Sea
KSSIDRVFITASGGPFVGQSRQEIEDKKPEEALDHPNWDMGDKITIDSATLVNKCFELIEAKYLFNLDADKLEVLIQPQSIIHSMVELKDGSVEAQMSLPSMIIPLSFGLLDQYSDKTKKDFSLDMFKEDIRLTISDFPKDREELIDISKDVMKNGGNRGLIFAAVNDFAVKKYLEGEINFGEIYNLIFKHYSEIGKKEILSLEDLRDNQREILNYLGSI

SEQ ID NO: 85525 - protein, 186 aa, Unknown
  Bacterial polypetide isolated from the Sargasso Sea
MKKKLSIFGCTGSIGDTTLKLLNKKNKEYSFYILSGYKNYKKIKYLIKKYNPKFFVIFDNNTFKKIKKENLKSNAKILNSFEYQNFKFKKSDISILAIPGIAGLEPTLKAIRISKTILIANKESVICGWDLIKKLVKKCKTKIFPVDSEHFSIMNLINQSNKKNVEKVYLTASGGPFLKYSLKKMK

SEQ ID NO: 85526 - protein, 233 aa, Unknown
  Bacterial polypetide isolated from the Sargasso Sea
YQILVNANIESISKVIITGSGGPFRGFSYKKLKKVTLEEAINHPIWNMGKKISVDSATLMNKGLELIEAAYLFNIKQKNIDIIIHPESIIHGIVEFKDGSMNAGLSHPDMKSPISYALNYPDKVKANIKKLNLTVIKSLNFEEVDTSVFKSINISRSALKQGHAFVISLNAVNEVAVESFIKNNISFNAIINIIEESLSKIKTNNINNLEDIFIIDDNARKISKQIIKNGNFK

SEQ ID NO: 85527 - protein, 127 aa, Unknown
  Bacterial polypetide isolated from the Sargasso Sea
MKKKITIFGSTGSIGLSTLDIISQHNDKYEIVGLSINNNYEKLLEQVSAFKPKIVSIKDTNSFEKFKNRNTLKNLKILNGSDSFDDILNYETDIVVAAITGSAGLLPVVGAVKRGITIALANKESLV

SEQ ID NO: 85528 - protein, 294 aa, Unknown
  Bacterial polypetide isolated from the Sargasso Sea
MSSITGIEGLKPTLDIIKFSKKIAIANKESIICGWNLINFQLKKNKTKFIPVDSEHFSLWYGLKDINNNIIDKIYLTASGGPFVKTPLKKLKYVSVREALKHPNWKMGNKISIDSATMINKIYEVIEAKNIFNLSYKQIEILIHTNSYVHAIIKLKNGMIKVIAHDTTMKVPIFNTLFFNSNKMLKTNNLKIKSLNNLNLIKVNSKRFPMVKILNLLSNKHSLYNTVIVSANDVLVNLYLQKQIKFTDIQKKLFLILKNKEFLKYKKYFPSKAKDIIELNKYVHLKVLENVYKS

SEQ ID NO: 85529 - protein, 203 aa, Unknown
  Bacterial polypetide isolated from the Sargasso Sea
MKKKISIFGSTGSIGNSSLKLFKNNKKTHELYILTANKNFNKIIYQIKIFKPKIFIIFDYNTYIKVKKIIKNKKILILNSHNYYSYKFKKSDVAISAIPGIAGLEPTLHLIKICKKLLIANKESVICGWNLINSLSKKKKVKIVPIDSEHFSILNLLKNIKFQEIEKIYLTASGGPFLNLPLNKLKSVKPSQAVNHPKGKWKK

SEQ ID NO: 85530 - protein, 196 aa, Unknown
  Bacterial polypetide isolated from the Sargasso Sea
MKKTIAILGSTGSIGKNTYNIIKNNKNDFDVILLSTNKNINTIYKQAKELKAKNIIVSSKFHFLKLKQKIKKSKIKIHNDLDNLQSIIDKKIDYTMCAISGLNGLKPTIDAIKFSKTIAIANKESIICGWHIINKQLKKNKTNFIPIDSEHFSIWTLIKNQKKENIKKIYLTASGGPFLNKKNSVIANIKPKFALK

SEQ ID NO: 85531 - protein, 183 aa, Unknown
  Bacterial polypetide isolated from the Sargasso Sea
ATMMNKGLEVIEAHWLFDTPVQNIQVVMHRESVIHSIVEFVDGSFLAQMGLPDMRVPLAYCLGWPKRLPLKIQRMDPISLKSLNFEEIDPKRFPCLAISITAAKHGGGAPAVLNGANEILVDSFLEEEINFLDISKNLHSVMQKFYRTISLPEVPSFLKQISTIEDAFKADQWGREEAIRCMS

SEQ ID NO: 85532 - protein, 295 aa, Unknown
  Bacterial polypetide isolated from the Sargasso Sea
TLSVINKNKDKYRVHSLAAGKSIKLLLNQVSKFKPQIISIMNEKDAILLKKNPLLKKIKILHGDEGLKEIGQSNKADILVSATSGVNSLIPTIEFLKLGKRVCVASKEIFLLFGEKINDTAKKYSGEIIPIDSEHSGLFQLIKNENINNIKKLYLTASGGPFFGRKMKELLNVTPKEALNHPTWSMGRKISIDSATMMNKAIEIIEASIMFNIPHNKILPIINKKSHIHSIVEFIDGNIMFSGSENDMKIPIGYSLSYPSRLKSYKTKFSNNDHIELIRVNEKSYKAFSLARKAL

SEQ ID NO: 85533 - protein, 211 aa, Unknown
  Bacterial polypetide isolated from the Sargasso Sea
MKKIIILGSTGSIGRQTLEIIKKDKNKFKILLLSTDKNINLISKQIKTFNVENVVVTNKKKYNILKKKFKKIKIFPDFKKIDKELKIKADYTMSAISGIEGLRPTIHIIKKTKRIAIANKESLICGWGLIQKELKKHKTEFIPVDSEHFSIWSVIKDYQKSDIEKVILTASGGPFLNKKIKKNVSTRDAISHPNWTMGKKISIDSATMRIK

SEQ ID NO: 85534 - protein, 209 aa, Unknown
  Bacterial polypetide isolated from the Sargasso Sea
FRNWSLEMMQSATLEEALKHPNWSMGSRITIDSASMFNKSLELIEAMHLFELEFSDVEVIIHPQSIIHSMVNFKDGSTLAQMSFPDMRGPIGYSLNYPKRLNIGIENIDFAKIGSLDFYKPDKKKFRSLEIVEQVGRNLDLGVIFNAAKEIALDRFISGEISFLDMVTLVEKTLAESSLLNKITKSPQSVSEILEMNELSRIFAEKIKV

SEQ ID NO: 85535 - protein, 188 aa, Unknown
  Bacterial polypetide isolated from the Sargasso Sea
MKKKIAILGSTGSIGKTTFNIIKENKKHFNVVLLTTNQNINEIIKQTHQVKVKNILVTNKKKYLILKDKLKNTNIKIFNNFDNINKIVKKKLDYTMSAISGLDGLKPTINIIKSTKNIAIANKESIICGWNLIDKELKKNKTNFIPVDSEHFSIWSNINKINKNFINQVILTASGGPFLKKNNKFLKK

SEQ ID NO: 85536 - protein, 91 aa, Unknown
  Bacterial polypetide isolated from the Sargasso Sea
MGSTGSIGTQTLQIAEEFPEQFRVVALTAGRNLDLLVQQIQRHQPELVALANADLLPELQQRLDALGTDRKRPQLVGGPDGLNIAASWESA

SEQ ID NO: 85537 - protein, 245 aa, Unknown
  Bacterial polypetide isolated from the Sargasso Sea
MVENLGIANKESIICGWKFISQELKKNKTKFIPLDSEHFSIWSLLRSENKNNVKKIYLTASGGPFLNKKLKDIKNIKPNEALKHPNWKMGKKISIDSATMMNKIFEVIEAKKIFNLNINCFEILIHPKSYVHAIIHFKNGLTKLLAHDTTMEIPIINFLNSKNDNFTYNNSFNYLNLNGLNFIKPKKTNFPLLNIINHNFNDTYFEIILVTINDKLVNLYLNNSISYYSIHKLLLILLRKPYFSK

SEQ ID NO: 85538 - protein, 265 aa, Unknown
  Bacterial polypetide isolated from the Sargasso Sea
MKKKIAILGSTGSIGESTIKIISNNKNDFDVIFLSTNTNYKKLLKQTEIVKPKSVIIFNEKIYLKHKKKFIKKKIKVFNSFKELKKKLLKKKIDYIMCAITGIAGLDSTINCIDKTKSIAIANKESIICAWRLIEKKLIKNNTKFIPIDSEHFSIWSLINNEPISKVEKIIITASGGPFLNYKLNQLKYVKPKDAIKHPNWRMGKKISIDSATLMNKVFEVIEAQRIFKVDINKFDILIHPKSYIHSIIKFINGQIKILAHDTDM

SEQ ID NO: 85539 - protein, 138 aa, Unknown
  Bacterial polypetide isolated from the Sargasso Sea
MKYITVLGSTGSIGTQTLEIASEQPDKFKAVALSAGRNINLLTEQVKTHKPEVVAIEDENLIEDLKDNINNLDLDSDPLVLSGKEGINAVAAWDKADTVVTGIVGCAGLIPTMSAINAGKNIALANKETLIAAGPIVI

SEQ ID NO: 85540 - protein, 191 aa, Unknown
  Bacterial polypetide isolated from the Sargasso Sea
MKKLISILGSTGSVGLTTLNIIDKDNKNFIPYLFSANKNYNFICKQIKKYKPKYFIINNVNIFLKVKKKFYKTRTKILNNFSSISLKRKSDITICAIPGIAGLKPTISLINFSKKILIANKESIICGWSLIKQKSIKSKTNIIPIDSEHFSIFNLIKNREKNEINKIYLTASGGPFLNYTQSELKKVKPKD

SEQ ID NO: 85541 - protein, 264 aa, Unknown
  Bacterial polypetide isolated from the Sargasso Sea
KFSKKFYQKKIKVFFNIKDALKNKTKKNYLTINAISGIEGLGPTLETIKYSENIAIANKESIICGWKFIQKELRKNSSNFIPLDSEHFSIWSIINGENTNNIKKIYLTASGGPFLKKKLTQIKNIKSKYALKHPNWKMGKKISIDSATMMNKIFEIREASNIFNLEMSKFEILIHPKSYIHAIVHFKSGLVKFLAHDTTMEIPIACALYKNNENIVFKNNKFKYHILNEDNFKKPNIKNFPLLNILKYKFPKSFFDTILVTIND

SEQ ID NO: 85542 - protein, 179 aa, Unknown
  Bacterial polypetide isolated from the Sargasso Sea
MCRRVFILGSTGSIGTSAIDVICHLNELSPDSYNVVGLAAKTSKDLLLKQAHALKANAISLSSGTIDYKNFSKSAVELLSEHAQQGDLVIAAMVGFDGIEPVLKAIEIGCDIALANKECLVAAGELIMKQVNGSSSSMIPIDSEHSAIYQALGHNSSKSIQKVILTASGGSLRDFSTMK

SEQ ID NO: 85543 - protein, 212 aa, Unknown
  Bacterial polypetide isolated from the Sargasso Sea
MCRRVFILGSTGSIGTSAIEVICHLNELSPDSYNVVGLAAKTSKELLLKQAHALEASAISLSSETIDYKNFSNSAVELLSEHAQQGDLVIAAMVGFDGIAPVLKAIEIGCDIALANKECLVAAGELIMNEVDGSSSTMIPIDSEHSAIYQALGHNSSKAIQKVILTASGGSLRDFSNHGIKNATVDDVLNHPTWDMGQKVTVDSASLMNKGL

SEQ ID NO: 85544 - protein, 197 aa, Unknown
  Bacterial polypetide isolated from the Sargasso Sea
MKKKIAIIGSTGSIGKSTIQVIKENRNDFNILLLSTNNNVNKIYKQALELNVKNVIINNRFKYLKIKNKFKKKKIKVYFDHSNIKKIIKKKLDYCMCAISGLEGLSPTLEAIKCSKVVGIANKESIICGWNLIQKNLNKYKTRFVPIDSEHFSIWSLLKGSNKKNVEKIYITASGGPFLNTKISKLKKVTPRLAINH

SEQ ID NO: 85545 - protein, 208 aa, Unknown
  Bacterial polypetide isolated from the Sargasso Sea
KLPLSKFSKIKISDAIKHPNWSMGKKISVDSATMMNKVFEIIEAKNIFNLSVSKLKILIHTDSYLHAIVKFYNGLSYMVIHDTSMKIPIFNTLYENKKFYQNSNNIDLSKLSHLNLKIPDPKKFPLIKVLKKIQSKSTLYETLIVSINDTLVDLFLKNKIGFTQISKIFFSTINDQQFLKYKSITPKNIDEIIKIKNIVQKKIKSRYI

SEQ ID NO: 85546 - protein, 278 aa, Unknown
  Bacterial polypetide isolated from the Sargasso Sea
TKKIAIANKESIICGWDLIKKELKKNNTKFIPVDSEHFSIWYALKNENSKNIEKLYITASGGPFYKIPIKSFKNIKVKNALKHPNWKMGKKISVDSATIINKVYEIIEAKNIFNLSYKKIKVLIHPNSYVHCIIKFKSGLIKIIAHETTMKIPILNTIYSNKHNKLIKSKIDIKSLNNLSLGEVSRLRYPMIKLINLLPEKNSLFETIIVSANDTLVDLFLKKKIKFTNIQKELFNFIQSKEFGKYKKIFPKKVQDIIKLNHYVRLKLLKKVYKFDDV

SEQ ID NO: 85547 - protein, 132 aa, Unknown
  Bacterial polypetide isolated from the Sargasso Sea
MGSTGSIGTQTLEIIQDHPDEFEVVVLGAAKSVELLIEQAKKHEPQIVAISDPLLEKELRQKLPPQIDVISGPEALANSCPVADVVINGVVGFAGLPITISALKAGKRLGLANKESLIAAGPLIQNFRSIEG

SEQ ID NO: 85548 - protein, 292 aa, Unknown
  Bacterial polypetide isolated from the Sargasso Sea
LLAANSNYSLICKQIKIFKPQYYIISNQLVFKKIKKRFKYKKIKIYNNFSDINLKKKRFDITISSIVGIAGLSPTIKFVKCSKKILLANKESIICGWHLIKNLSKLHKTKIIPVDSEHFSIDQLTKNYKDKDIEKIYLTASGGPFLNKSLNSFKSIKVSDAIKHPRWKMGKKISIDSSNLMNKVLETIEAYRLFPFKIDKYEIIIHPQSLIHAIVLFKNGQTKFLYHETDMKIPILNAIFENNFDKKNFIYPKKDILKKFENLKFIKVDKKRFPIVTLLKKFSNNNSGPIIL

SEQ ID NO: 85549 - protein, 170 aa, Unknown
  Bacterial polypetide isolated from the Sargasso Sea
MNKGLEIIEAKWLFDLKPDQIDVIVHPQSIVHSIVQFEDGSMKAQMGLPDMKLPIQFALTYPHRMPTKFPRFNFLDYPQLNFEKANTDVFKSILLAQQAMIEEGTAACTLNAANEVSVQAFLDEKISFLDILNINEKVLNDMSNKKSPLLQDYISADKEARLYAEKLCAI

SEQ ID NO: 85550 - protein, 228 aa, Unknown
  Bacterial polypetide isolated from the Sargasso Sea
LSGEKGTEDVKSITITASGGPFINASIQELQHVSVEDALNHPNWKMGSKVTIDSATLVNKCLELIEARYLFDLDEKYFDLVIHPQSIIHSIVTYIDGSSICQMSSPDMRVPIAHALSEENRIPIDFKDLDFSNLNLSFQKFPSDRSKIQDIAREVCNKGGFLGTVFNAANEIAVESFLNKKISFNEIYEVIYRTFDKNIVSNEVTIESINEVDAQTRIHAQKVVKSFA

SEQ ID NO: 85551 - protein, 202 aa, Unknown
  Bacterial polypetide isolated from the Sargasso Sea
MKKNIIILGSTGSIGKTSLSAINNNKNYKVCLLSTRSNVKKLYKQALQYDVKKVIIEDKISFNRYKNNFKKKKINVYLGHDNLNKIFKKKIDFCINSISGIEGLFPTLKIIPFTKNILIANKESIICGWDLIQKNLQKYKTNFIPIDSEHFSIWNLIKNEEKENIEKVILTASGGPFLKKKIKNISNIKPIEATRHPKWKMG

SEQ ID NO: 85552 - protein, 263 aa, Unknown
  Bacterial polypetide isolated from the Sargasso Sea
AVITNYEKYNEFLNEHGNEIGITRILFGDEGLNEISSNNGIDIVVIAIVGFQCLKPTVNAIRTNKTVIIANKEILVAAGEMLMSILSKSDAKLLPVDSEHNALLQVILSSGLEYKVNNKEYYESNINNLTITASGGPFIDLNISEFKNIKPKHAIKHPTWDMGEKISVDSSTMMNKGLEIIEAKLLFNLNLDKINAIIHRQSRVHALVEFFDGTIIAHMSDPDMKIPISYALTFPHRVYKSASSKFIYNNLTFEDIPISKFPC

SEQ ID NO: 85553 - protein, 272 aa, Unknown
  Bacterial polypetide isolated from the Sargasso Sea
NKLFKINILAANKNYQLICKQINQFKPEVFVVNDAKVLKKVKKRFKNNKVKIIKDIDIKKNYFKKSDITIAAIPGIAGLKPTVELTKISKKILIANKESIICGWNLIKKIALKHNTKIIPIDSEHFSIMKLLENQKINDVKKIYLTASGGPFLNLNISKLKNVKPHEAIKHPKWKMGKKISIDSATLMNKILEVIEAHKLFEIDIKKFEIVIHPESLIHAIIEFKNGLYKFIYHETSMLIPLANAIFDNTINIDDFLKPRLNSKKSIFFQSL

SEQ ID NO: 85554 - protein, 193 aa, Unknown
  Bacterial polypetide isolated from the Sargasso Sea
MKINIFGSTGIIGDKSLKLISKLFPKIQINLLVANNNYNKLIKQCNLYSPKYVCIKNSIYINKIKNNINNKIKIIEYKNLNIFLKTKKSEITILSISGYQALDYFESILKNTKFLGLVNKETIVSIGHLFRNSNFKKNTIFFPLDSEHFSLFDFFSNNKTDLNKVKKIYLTASGGPFLNYNIKQLRKVKFGQA

SEQ ID NO: 85555 - protein, 287 aa, Unknown
  Bacterial polypetide isolated from the Sargasso Sea
EEINHQIGKRVNSFDELLQIDDSDLIIIALSGISGFYPVVNSIKQGRKIALANKESLVACGDLLMEISKNNNSEIIPLDSEHSAIWQCIKNEKEKYVKSIVITASGGSLRDASINELSSVTPKTVLNHPTWKMGDKITVDSSTLINKVFEVKEAANLFDIALEDIEVIFHNESIIHGMVNMVDGNTLALLSKPDMRIPILYSLFYPERTESKNIEKIDFTKLGKLSFRNRDEKKLNFFNFGIDVIRNSKLGASFLVGSDQAVVENFLEEKINYLDMLDIMKSVYEKD

SEQ ID NO: 85556 - protein, 267 aa, Unknown
  Bacterial polypetide isolated from the Sargasso Sea
RGISIDILKISKKKRINVFFSIKNFLKKNKKKSSITINAISGIDGLEPTLNIIKYSKNLAIANKESIICGWYFINKELRKYKTGFIPLDSEHFSIWSLLKNERKSNIKKIYLTASGGPFLNRKLLSIKNVKPKIALNHPNWKMGKKISIDSATMMNKIFEVIEAMKIFNLNSNKFEILVHPKSYIHAIIHFKNGLTKLLAHNTTMEIPIANSIDLNSNRYKFKDDNFNYNILNGVNFINPDIKKFPLLKILNYEFKNTYFEIILVSI

SEQ ID NO: 85557 - protein, 72 aa, Unknown
  Bacterial polypetide isolated from the Sargasso Sea
IALANKETLIAAGSVVIPALKESKSRLLPADSEHSSIFQCIQGLPNYENADFSTGQIPNGLKAIHLTASGGA

SEQ ID NO: 85558 - protein, 259 aa, Unknown
  Bacterial polypetide isolated from the Sargasso Sea
MKKKIVILGSTGSIGKTLIEIIKKDKKKFNILLLTANKNYKTILKQAKKFKVKNIIIKNKESYLKSLKLNRDKKLKIYNNFDNFHKIFKNKVDYTMSSITGIDGLEPTIKIIKHTKKIAIANKESLICGWNLINKELVKFNTEFVPVDSEHFSIWYALKNNKDSIEKLFLTASGGPFNNLSIKKFKKISVKDALNHPNWKMGKKISIDSATMMNKVFEVIEAKNIFKTTYKKIDILIHPKSYVHALVQFKNGISKSNLT

SEQ ID NO: 85559 - protein, 292 aa, Unknown
  Bacterial polypetide isolated from the Sargasso Sea
WVMSAIIGSAGLLPGLTAMQAGANVALANKESMVAAGPIMKQVCEERGVKLLPVDSEHSAVSQVIRGEDRKTLDKIIITASGGAFRNRSIDELKKVTPDEASKHPNWDMGQRITIDSASLFNKALEIIEAKEFFNLNHSEINVLIHPQSIVHAIACFHDQGMKAHLGPADMKHAIAYALHEEKRFRLPLKEINLSEIGTLNFYEPDVNKYPALELGYDVIRHGGLAGAAFNAAKEEALDNFLNLKLSFLGMSDVVRATMDELTASNQLDQVVELDAVMEIDLLARSVAKKYV

SEQ ID NO: 85560 - protein, 268 aa, Unknown
  Bacterial polypetide isolated from the Sargasso Sea
IANKESIICGWNLISKELKNYKTSFIPVDSEHFSIWSLLQNYNSNDIDKIFITASGGPFLKLPKKQFSNISIKKALNHPNWRMGKKITIDSATLMNKVFEVIEAKNIFNLDYSKISILTHPKSYLHAITKFKNGLTKLLLHDPDMKIPIYNSIYSTDIKSIKTHSLNLKILNDLELKEVDTKKFPLIKILNKLPKYTSLFETVLITINDYLVFKFLEKKINFQKLIKLIDRFSNLREFQKFKKIKPKNIDDIYKLRDYVSLKLDSLGI

SEQ ID NO: 85561 - protein, 188 aa, Unknown
  Bacterial polypetide isolated from the Sargasso Sea
MNINIFGSTGIIGKKTLELIDKNFSKIEVNLLCAKSNSNLLKKQIYKYNPKYAFLYDGFKFKYKKNIIGKTKILNFNELLNYLSNSKSDLSILAISGYKSLYFLDHIVKNTNFLGIVSKEAIVSAGHIFKKKNYFKKTKIIPLDSEHFSLFELFKKTGNFNSINKIILTASGGPFHKRKFNTLKNIKF

SEQ ID NO: 85562 - protein, 271 aa, Unknown
  Bacterial polypetide isolated from the Sargasso Sea
NKIIRKKLDYTMCSITGLAGLKPTIDCIKFTKTIAIANKESIICAWNLIQKKLNKHKTQFIPVDSEHFSIMSLLGSKPISSVDEIIITASGGPFLNIPKNKFYKIKPKDAIKHPNWSMGKKISIDSSTLMNKVFEVIEAQKIFGIDSKKFKVLTHPKSYVHAIIKFKNGLTKILIHDTDMKIPIFNSIFNNYNNYLKTKKIDYKKINNLDFQEIDSNKFPSIKILKKLNNKNTLFETVLVSANEELVDLFIKDKIKFTDITRILFKILNNK

SEQ ID NO: 85563 - protein, 242 aa, Unknown
  Bacterial polypetide isolated from the Sargasso Sea
MKSLAILGSTGSVGKSTLDVIRENKDEFNIELLTASTNFRLMVEQCKEFTPKFVYLENKEAQKSFLDELGINSSRVTLLSDEKELNQIIASQDLEIVVAAMVGIVGLKPVFQAIKHGKHILLANKESYVVAGEILNNLSKKTGATIFPIDSEHSAIHQCLMGVKNEESISRLILTGSGGPFLDKDINDFKNITPKEATAHPIWNMGDKISVDSSTMMNKCLEIIEAKWLFGFDDIDVLIHPE

SEQ ID NO: 85564 - protein, 256 aa, Unknown
  Bacterial polypetide isolated from the Sargasso Sea
MKDIFLLGSTGSIGQSTLNVVKKEKKKYKIALLTTNNNVNKIYKQALEYSVKNVVIFNKEKAYKSYQKFKKKKINIFFTIEEALKKVKKKSYITINAISGIEGLEPSLTIIKKTKNFAMANKESIICGWSFIKKELQRHNTNFIPLDSEHFSIWYLLKSENIKNIKKIYLTASGGPFLKKKLKDIKNVNPQYALNHPNWKMGDKISIDSATMMNKIFEVIEAIKIFGLNPKIFQILIHPKSYIHAIVHLNSGLIKF

SEQ ID NO: 85565 - protein, 229 aa, Unknown
  Bacterial polypetide isolated from the Sargasso Sea
MHKIEKIILTASGGPFLNTSVKKIKNINPKYALSHPNWKMGKKISIDSSNMMNKVFEYIEAKKIFNLDRKELDILVHPSSYVHAIVYFKGGIIKLLAHEAKMTIPISSALGVDDFSSKNSFDLSLKKLNSMKFLVPNKFKFPLLSLIDQLPTNTSYFETILITLNDSLVKKYLDKKINYISIQQNLLRLIKKPFFRKYYKLKPKSIYDIKKMISITKSYLNTNINYYND

SEQ ID NO: 85566 - protein, 270 aa, Unknown
  Bacterial polypetide isolated from the Sargasso Sea
NKDYKTLLKQAKKFNVKNIILTNSEIYKSLKNKNYRSKINLFNSFKNLNKIFEKKIDYVMSSIVGIQGLEPTYKIIKYTKNIAIANKESIICGWNLINKELKKNKTNFIPVDSEHFSLWYGLKNINKDYIEKIYLTASGGPFYSTPLSLFKKVSIKNAIKHPNWKMGKKISIDSATLINKVYEVIEAKNIFNISYKKIEIFTHPKSYVHALIKFKNGMIKIIAHDTTMRIPIFNTLYLNKKKIESKKINLNILNNLNFKKVNSKRFPMIK

SEQ ID NO: 85567 - protein, 238 aa, Unknown
  Bacterial polypetide isolated from the Sargasso Sea
MIKKKIAILGSTGSIGRSSLQVLKNNKKKFKIILLSANSNYSTIIKQINIYKPKYFVINDWIVFNKVFKKHNTVKTKIYNKFSDIPSKIEFDITISAIVGVAGLEPTINFIKKSKKVLLANKESIICGWHLLKKISKKNKTKIIPIDSEHFSIYQLTRNCKDSDIKKIYITASGGPFLRKPLTQFKNIKAKEAIRHPNWEMGKKISIDSSNLMNKVFELIEAYKFFPFDIKKYEILIH

SEQ ID NO: 85568 - protein, 220 aa, Unknown; identical to SEQ ID NO: 85524
  Bacterial polypetide isolated from the Sargasso Sea

SEQ ID NO: 85569 - protein, 208 aa, Unknown
  Bacterial polypetide isolated from the Sargasso Sea
NKIKKATPKFAIKHPNWSMGKKISVDSATMMNKVFELIEAQRIFNLDRSKFKILIHPQSLVHAMIKFDNGLTKLLIHDTNMKIPIFNTIYDNSEKKINSKKLGPDQLNRLMFKKIDLNKFPSINILKILPKKISLFETIIVSCNDELVDLFLKRKINFWSIHMILKKLLNMKEFTKYKRITPNNTRQIYDLCEYVRLKTRALSIISAK

SEQ ID NO: 85570 - protein, 295 aa, Unknown
  Bacterial polypetide isolated from the Sargasso Sea
KKKYEIIKKKFKNINIFPDFKNIDKKIDSKVDYTMSAISGLEGLNPTLKIIKKTKRIAIANKESIICGWGLIQKELKKHKTEFIPVDSEHFSIWSVIKDYNNSDIEKIILTASGGPFLNKKIKNNIKIKDAIKHPNWKMGKKISIDSATLMNKIFEIVEAKKIFDIEFKKFDILIHPKSYIHAIVKLKNGLIKIIAHDTNMRIPIYNSIYMGSKNQKFIKSKNINLNILNSLNFQKVNFKKFPVTKILNKLTEKNSLFDTVLVSINDELVNLFLENKINFLDISSKYLAFNKFPI

SEQ ID NO: 85571 - protein, 192 aa, Unknown
  Bacterial polypetide isolated from the Sargasso Sea
MKKKIAILGSTGSIGKQTLEIVKNNKKNFEIFLLSTNKNLKEISKQVKLFKPKNLIITNEKRFFLFKKKNKKINVFNNYDNFKKIFPKKIDYVMSAISGFDGLQPTIEIIKHTKSIAIANKESIICGWNLINEELKKNKTSFVPVDSEHFSIWCLTNKKYGNIDEIYLTASGGPFLNKKRQHLKNIKPVHAI

SEQ ID NO: 85572 - protein, 246 aa, Unknown
  Bacterial polypetide isolated from the Sargasso Sea
KTISILGSTGSIGLTSLGIINKKKKLFNIFLLYANQNFDLISKQIKKYQPKFYIIKNKKVYSKIKKKFKRSKTRFLNNLESLKLKKKIDISISAIPGISGLEPTIKVIKNSKKVLIANKESVICGWSVIKKLSSKKTKLIPVDSEHFSIFKLLKDHKIEEINKIFITASGGPFLRYKKKQFKNITPNKALMHPKWKMGKKISVDSSTLMNKIFEVIEAQKLFEIPYNKLDILIHPQSLVHAIIEFK

SEQ ID NO: 85573 - protein, 193 aa, Unknown
  Bacterial polypetide isolated from the Sargasso Sea
LLHQLRALKHPELGTWGKKISIDSATMMNKALELVEALWLFDIDIEQIEITIHPQSIIHSMVEFIDGSYKAHLGTPDMKVPIQYALTYPARKTLAIDSLDLSDLSLAFQSPDYKRYPILGLVHELIKLGGNRVAVMSIANDYIVQKFLDEKISFNQIFILTKEVVSEFGSDDLPSLEDLLILDENIKLYLEPN

SEQ ID NO: 85574 - protein, 158 aa, Unknown
  Bacterial polypetide isolated from the Sargasso Sea
ESIIHSMVEFCDGSTLAQLGFPDMRIPISYCLGWPDRLELELPNLDLTKIGSLNFSSVEPTRYPCLELAIDAAWMDRSVPAVLNGANEAVVESYLNGHLHFFEIAKLLQDVMSGYQSISQKSDCPSYLRDIQTLEDAVKADQWGREEAQQRMQKRVAA

SEQ ID NO: 85575 - protein, 269 aa, Unknown
  Bacterial polypetide isolated from the Sargasso Sea
MKKKIAILGSTGSIGKQTLEIINNYKKNFEILLLSTNTNLEEISKQIKLFKPKNLIITDENKFHLFKKKYKKIKVFNNYDNFKKIFPKKIDYAMSAISGFDGLQPTIEIIKHTKSIAIANKESIICGWNLINRELKKNKTNFVPVDSEHFSIWSLTNRNYGNIDEIYLTASGGPFLNKKRQHLKKIKPVHAIKHPRWNMGKKISIDSATMVNKVFEIIEANKIFNVSFNKIKVFSHPESYVHAIVKFKNGLTKILIHDTNMKIPIFNSL

SEQ ID NO: 85576 - protein, 151 aa, Unknown
  Bacterial polypetide isolated from the Sargasso Sea
DPDQINIIVHPQSIIHSMVEMKDGSVKAQMGVPDMKVPIQYALTYPRHIEATWEKLDLINCADLTFEKPDYNRFPCIALGFKVLERFGSSGAALNLSNDYAVYRFLNEEIQFTDIPKINESVLEEHPWIEEPSLEDLIELDEWVKNYVTTH

SEQ ID NO: 85577 - protein, 186 aa, Unknown
  Bacterial polypetide isolated from the Sargasso Sea
MKKKIAILGSTGSIGTTSLNIIKKKKNLFNVELLSANKNYKSICQQIIRFKPKYFVVTNNLIFLKIKKRFKNKKTKILNSYDNLSLTKKIDVTIASIPGIAGLKPTISLVRKSKKILLANKESVICGWKIINNLAKKYKTKIVPIDSEHFSIMKLLENHKKNEIEKIYITASGGPFLNLPKNKLKI

SEQ ID NO: 85578 - protein, 203 aa, Unknown
  Bacterial polypetide isolated from the Sargasso Sea
MKKKIAILGSTGSIGKASLEVISKNKSEFKITLLSANSNYFLIKKQIKNFKPNFFIINNKNVYNKIKKEFHNKKTNIYNKFSNIPANVRFDITISAIVGIAGLEPTINFIKKSKKILLANKESIICGWHILKKISLKYKTKILPIDSEHFSIHQLTQGCSDSDIKKIYITASGGPFLRKPLKYFKNINPIEAAKHPRWKMGKK

SEQ ID NO: 85579 - protein, 312 aa, Unknown
  Bacterial polypetide isolated from the Sargasso Sea
IKVLTQQIRKYKPKYAFLYDHEKFSNFDYKIGKTKFLNLDELKSFLSSSKSNLSLLAISGYKSLYFLENIIQNTDNLGIVSKEAIVSGGHIFKKKNYFNKTNIFPIDSEHFSLFELFGKIKTKTNIKKIILTASGGPFHKKKFNSLKNVKFNQAIKHPKWKMGYKNSIDSATLVNKCLELIEAHYLFDIPFNQMKILIHPEALVHSIVEFDNYVTQFNLFENDMSIPIINFLCKSKIKYKYDDKRFYINRYKNLNFEDIKDDIFPVYKFFNDINKKQPENLIKFNIGNEFAVNLFKENKIKYTDIYRIIKKV

SEQ ID NO: 85580 - protein, 287 aa, Unknown
  Bacterial polypetide isolated from the Sargasso Sea
AKSNHPLLLEQIKLFKPNYIYLEDESSFISIKDAIKDIDQSLEVINNEQDLLSLISSNIIDTVVAAVVGIAGLNGVEAALSSGKRVLLANKESYVVAGEYLNKLCKENGGLIIPLDSEHSAIHQCLSRGNQKEKASRIILTGSGGPFLNKKKTDLANVTMEEAINHPIWTMGRKISVDSSTLMNKGLELIEAKWLFESDTNEIEIIIHPEGIVHSLVEFKDNSIIAQLGKPDMKIPIAYGLGFPNRIHSNVESLNLSELGPLTFLDPDFDKFPCLGLATEALITGGT

SEQ ID NO: 85581 - protein, 272 aa, Unknown
  Bacterial polypetide isolated from the Sargasso Sea
NFVGWKFIKKSLKKNNTNFVPLDSEHFSIWSLIKSENIDNIKKIYLTASGGPFLNKKLDDIKNIKPKFALRHPNWKMGKKISIDSATMMNKIFEVIEAKKIFNIKSNKLDIIIHPKSYIHAVVHFKNGLTKFLAHDTTMEIPILNSLYKKNEKFIFNNKDFNYMKFNGTNFLKPDPKIFPLLKILDYNFNGTYFDIILVCLNDILVNLYLKNSINYISIHKLLIKLLKKAYFSRYYDKSPKNINEIENMVNKVKKYLYKYLKLNEKFYKNNN

SEQ ID NO: 85582 - protein, 287 aa, Unknown
  Bacterial polypetide isolated from the Sargasso Sea
SPTLKIIKKTKRIAIANKESIICGWELIQKELKKSKTEFIPVDSEHFSIWSVIKDHDKSEIEKIILTASGGPFLNKNIKNNIKIKDAINHPNWQMGKKISIDSATLMNKIFEIIEAKKIFNIELKKFDILIHPKSYVHAIVKFKNGLIKIIAHDTDMQIPISNSIYMGSARKEFIKSKKIDLNILNSLNFKKVNVKKFPVIKILDKISKQNSLFDTVLVSINDELVNLFLKNKINFLDISSKICHLINLSIFSKYKLQKPKNLAQIEKLNEFVRLKTRTLSVISRTK

SEQ ID NO: 85583 - protein, 236 aa, Unknown
  Bacterial polypetide isolated from the Sargasso Sea
FSIWQLLKQENINNVKFIYLTASGGPFLNYNKSQLKKIIPKKAINHPKWSMGKKISIDSATMMNKVFEVIEAQRLFSIDYKNIKILIHPESYLHSIVKFNNGITKFLVHDTNMKIPIFNSIYTNKNAKIKSNKLNLKIMNNLNLTFPNKKKFPHLTILNKIPKKISLFETVLISANDEIVNQFLSGKISYLKIYKILSRVINYDKFKKLKKSKPLNLKQIHRLHNYVRLITRSYCE

SEQ ID NO: 85584 - protein, 202 aa, Unknown
  Bacterial polypetide isolated from the Sargasso Sea
AIANKEAIICGWDLIEKRLNKHKTKFIPVDSEHFSIWYALQEIEKNLIEKIYLTASGGPFLGKSFRKLKKVNIKEVINHPNWKMGKKISTDSATMINKVFEVIEAKKIFKISYNKLAIIIHPKSYVHAIIKFKNGLTKIIVHDTDMKIPIFNSLYSSKKFINSKKLDFKALNNLDFRGANPKKFPLIKVLKMLLDNTSLFET

SEQ ID NO: 85585 - protein, 277 aa, Unknown
  Bacterial polypetide isolated from the Sargasso Sea
KNIKIYNNFSSFDKIFNSKIDYVMSSITGIAGLEPTLKIIKHTKSIGIANKETIICAWNLIYKQLKIYNTFFVPIDSEHFSIYSLNNGFNTSQIEKIFITASGGPFLKFTKKKLNMVNPSKAVQHPNWKMGKKISVDSATLMNKVFEVIEAQRIFNLKKKFFEILIHPKSYLHSIIKYKNGTSKLLIHDTTMKIPIFNYICKDISHKLNTNKINFSLLNNLELKKPIQRQFPLLKILNKIPENISLFETILISANDELVENFINGNIKFNQIHKILF

SEQ ID NO: 85586 - protein, 236 aa, Unknown
  Bacterial polypetide isolated from the Sargasso Sea
INSLSGIDGLEPTLKIIPRTKNILIANKESIICGWHLIKKKLNKHNTKFIPIDSEHYSIMKLIQGENIESIDKIILTASGGPFLNKSKKQIVNISPKEAINHPNWKMGKKISIDSSNMMNKIYEYIEAKKIFNLSNSKLSILIHPNSYVHAIINLKGGLIKFLAHDTNMRIPILNALGIKKKTENIFSNKSLKSFNNLKFKKPTTKQFPLLNILNIIPNRTSYFETILITLNDSLV

SEQ ID NO: 85587 - protein, 236 aa, Unknown
  Bacterial polypetide isolated from the Sargasso Sea
MKKKIAILGSTGSIGLTTLDIIYKNKKSFKIELLSTNRNIKKIKSQIKNFKVKNIIIHDKKIFDKNKFYFEKLNINVYQNLRDFRREFKKKLDYVMCAITGLDGLEPTLDIIQSTKRIAIANKESIICGWNLIKRKLKKYKTEFIPIDSEHFSIFELIKNDKPENIKKIYITASGGPFLNIDKSKLSKFVPKNAIKHPTWKMGKKISIDSSTLINKVYELIEAKKIFELDYNKFEI

SEQ ID NO: 85588 - protein, 181 aa, Unknown
  Bacterial polypetide isolated from the Sargasso Sea
MKKNIVILGSTGSIGKSTIKIIEKDKKNFKIKLLSTNKNVLELIKQAKKFKVKNLIINDLKKFNQAKKKFKNLKMNFYNSFSVLDKLFKKKEIYYSMISLVGIDGLKPSMQMIKSSKNIAIVNKESLICGWDLLKKSLKKYKTNFIPIDSEHFSIFSLIDNINAVDKIYITASGGPFLKYS

SEQ ID NO: 85589 - protein, 235 aa, Unknown
  Bacterial polypetide isolated from the Sargasso Sea
MKKIIILGSTGSIGKQTLEIIKKDKNKFRILLLSTDKNINILLKQIKTFKVENIVVTNQKKYKILKKKIKKIKRIKIFQNFEKINKELKVKADYAMSAISGIEGLRPTINIIKNTNRIAIANKESLICGWSLIQKELKKHKTEFIPVDSEHFSIWSIIKNYQKSDIEKIILTASGGPFLNKMIKKNILPRDATSHPNWVMGKKISIDSATMMNKIFEIIEAKNIFNIELNKFEIL

SEQ ID NO: 85590 - protein, 191 aa, Unknown
  Bacterial polypetide isolated from the Sargasso Sea
MTKDIFLLGSTGSIGETTLKVIKKDKSNFNIKLLSTNKNVEKIYKQAIQFGVKKVVVFDKKSYLNNLKKFREKKIKIFLTIKEALKNNKKKSFLTLNGIAGIEGLEPTLDIIKYSNNLAMANKESIICGWQFIQKELKKRQTRFIPLDSEHFSISSLIKDESKQNIKKIYLTASGGPFLYKDLKKIQNIKP

SEQ ID NO: 85591 - protein, 151 aa, Unknown
  Bacterial polypetide isolated from the Sargasso Sea
MKYITVLGSTGSIGTQTLEIACEQPDKFKAVALSAGRNINLLTEQVKTHKPEVVAIEDESLIEDLKDNINILDLDDAPLVLGGKQGINAVAAWDKADTVVTGIVGCAGLIPTMSAINAGKNIALANKETLIAAGPIVIPALKKNNSRLLPA

SEQ ID NO: 85592 - protein, 292 aa, Unknown
  Bacterial polypetide isolated from the Sargasso Sea
ITGLAGLDSTINCIDSTKNIAIANKESIICAWDLIKKKLNKYNTKFIPVDSEHFSIWSLLKSESVSNVEKIIITASGGPFLNLNLKKLKNVKSKDAVKHPNWKMGNKISVDSATLMNKVFEVIEAQRIFNIDMNKFLILIHPNSYIHSIIKFYNGQIKILAHEADMKIPIFNSIYQNTYRKIVTKKINLNVLNNINLSKVDTNKFQSLKFLKKIRNKNTLFETVLISANDELVDLFIKNKISFLDIHKKLTKIINNIKYSSLISKKPKNISDIITLSEDVRLKTRNLCVKIK

SEQ ID NO: 85593 - protein, 289 aa, Unknown
  Bacterial polypetide isolated from the Sargasso Sea
NKYLWFTGVIGQKSLKLVNNYPNIKINLLLANNNYKKLISQSIKYKPKYICIKNSKHYEYLKSKIPKNVNLIKHNDLNSFIEKNFVEISLLAVSGYNALLYFDSIINNTKFLGLVNKEVIVSAGHLFKKKNYIKCAKIFPIDSEHFSLFNFFNNYNYKLADIKNVYLTASGGPFLNYNSNKLANVSVKEATNHPKWKMGKKNSIDSATLANKCLELIEAHYLFDIPYNKLKILIHPESLVHSIVEFYNGISIFNYFYNDMDIPLINFFEYVMNKKSINLKSQYFINKNF

SEQ ID NO: 85594 - protein, 197 aa, Unknown
  Bacterial polypetide isolated from the Sargasso Sea
MKNIVVMGSTGSIGIQSLDVISKDNSYNVVGLTCHSNANLLFEQAKKHSPDFVAIDVIDSSHDLFNLCKENNIELIIGSKASSNIPFKNLDLAINAIVGTAGLRPTIELIKNGVDIALSNKESLVLGGHIIMPLAHKKNVNIIPVDSEHSAIFQCLNGENHKELKKIILTGSGGPFLETPIHEFDSITPEQALKHPN

SEQ ID NO: 85595 - protein, 135 aa, Unknown
  Bacterial polypetide isolated from the Sargasso Sea
LDGSVLAQLANPDMRVPIAYGLSYPRRMESGVEHLDLVGLTDLQFLEVDEDRFPCLKLARLAAKEGGSSPILLNAANEIAVEAFLRGEISFVKIPQIIEEVMMKIPCESPASIAIIHDLDLRARQLSNRLINKGS

SEQ ID NO: 85596 - protein, 199 aa, Unknown
  Bacterial polypetide isolated from the Sargasso Sea
MKKKIGILGSTGSIGDNTVKIIQNNKKDFDVIFLSTNSNVKKLLKQCQILKPRSAIIFNHKKYLKYKKKFLNKKINVFNSFKELKKKSLKKRVDYIMCAISGLAGLEPTINSIDATKNIAIANKESIICAWDLINSKLIKYKTKFIPIDSEHFSIWSLLQNESTKGVEKIFITASGGPFLNYKLTKLKNVKPKDAINHP

SEQ ID NO: 85597 - protein, 236 aa, Unknown
  Bacterial polypetide isolated from the Sargasso Sea
MKKKIAILGSTGSIGKSTLEIVKKDKKNFEVVLLSTNKNLRELSKQQKIFKPKYLIINDFKSFIKFKKKNKSKIKVFNDYNFIKKIFKKKIDYTMCSIGGFDGLKPTLDIIPFTKIVAVANKESLICGWNLLQEKIKKYNTKFIPVDSEHFSIWSLIKNISEDIDKIYITASGGPFLNKKAKDLKKIKPEAAIKHPNWKMGKKISIDSATMINKVFEVIEAKKIFNLNLNQFENFT

SEQ ID NO: 85598 - protein, 268 aa, Unknown
  Bacterial polypetide isolated from the Sargasso Sea
MKINIFGSTVNIGVKSLNLIKTFFPKIKINLLCAKDNIKLLEKQIAVFKPNYVFLENEKKSYILKKKITKCTTVLNYNDLQKYLKQSKSDYTILSISGYKSLNFLENIVGNTNLLGLVSKEAIVSAGHLFHKSSKYKKTIIYPLDSEHFSIYKFLNLNKPRYKIKNLFLTASGGPFLGKKYFNLKNISFEKACKHPKWKMGYKNSIDSATLVNKCLELVEAHYLFNIPYDKLDVVVHPESLVHSIFEYKNYISEFIYFHNDMKIPIYN

SEQ ID NO: 85599 - protein, 229 aa, Unknown
  Bacterial polypetide isolated from the Sargasso Sea
YALRNNSITNLDKILLTASGGPLLNVPIKKFKNLKIRKIIKHPNWNMGAKISVDSSTMINKVFEIIEAKKIFNLKYKQLSILIHPKSYVHAILKFKDGLIKIIAHETTMEIPIINTLNQIDKNKLKTKKINLKKLNNLNLSNIDSNKFPLTKIIKKLPSKDSLFETVLVSLNDELVRLFLNKKFSYLTLINKLFKLMHKKEFIKYKSIEPKKITDILKLNKLIKSKIKL

SEQ ID NO: 85600 - protein, 127 aa, Unknown
  Bacterial polypetide isolated from the Sargasso Sea
MTSLAIFGSTGSIGEQTLDVVRADRAGFEIKVLAAGNSTSRILEQINEFKPEFVIMADSDAAKKVQDASPGVEVACGESALREASSTAEVVVNAVVGFAGLPVTMEALKSGRRLALANKESLISAGP

SEQ ID NO: 85601 - protein, 171 aa, Unknown
  Bacterial polypetide isolated from the Sargasso Sea
MKNILLLGATGSIGESVLSVISQNKESLNLFGISLNKNIQKSQEILKEYSPDYVFIDDHDSFKSLASEDSERYLNDEGDLEKLINKEEIDIIVCATSGFAGLKAAYIAAKTGKKILLANKESIVAGGDLILPLAKKNNSEIIPIDSEHNAIFQCLSGEKGTEDVKRITITA

SEQ ID NO: 85602 - protein, 292 aa, Unknown
  Bacterial polypetide isolated from the Sargasso Sea
MKKIISILGSTGSVGLNALRIIDKRQDLFKFNLLSANKNYSLICKQIKKYNPRIFIINEKKIFIKVKYKFRKKNIKILNSYEDLKLKKISHITISAIPGIVGLKPTIKMIKKSKKLLIANKESIICGWNLIEKLSKRYKTKIIPVDSEHFSILKLLENHKIKEIKKIYLTASGGPFLNYLPSQLKKIKPKEALRHPKWKMGKKISIDSSTLMNKILELIEAQKLFNLKIKSLDILIHPESLVHAIVEFKNGLTKFIYHDTSMIIPLANAIFDGSLNIKKFYKTKKKTINDLS

SEQ ID NO: 85603 - protein, 187 aa, Unknown
  Bacterial polypetide isolated from the Sargasso Sea
MKKISILGSTGSVGTQCLEIISEFKNQFEIISLTAGKNEELLGDQIKKFKPKYYLSDTNVNHRDGIRIKSYDELLKIDDSDLIVIALSGISGFFPVLNCIKQGRKIALANKESLVACGDLLIEISKTTNSEIIPLDSEHSAIWQCIKNEEDKYVKSIVITASGGSLRDMPISELYSVTPEIVLNHPT

SEQ ID NO: 85604 - protein, 388 aa, Unknown
  Bacterial polypetide isolated from the Sargasso Sea
MINVAILGSTGSIGLTTLNIIRKNKKKFRIQLLSANTNAKTLFDQAKEFNVKNVILLNTSENKKWFKKFKKNKINLFNNFLIFENIFKKKLEYVINAITGVDGLKPTLKIIKHTKKIAIANKESIICGWNLINKELVKNKTQFIPVDSEHFSIYELIKNQENQLIKKIIITASGGPFLRKKSLKKIRVKDALKHPNWKMGKKISIDSSTMMNKVFEVIEAKKIFNLSFKKIEILINPNSYLHAIVLFENGIIKMLAHENKMEIPIYNSIYSNQPKDLYKSDELNLNKINKLNLSKPRISKFNSLKILKLIPEKDSLYETIIISVNDELVNMFLNKKIEFNRISFYLLKIINFKKFRKYCKVKPKSIEQIYEVKNLAVNFVHDYLNLEK

SEQ ID NO: 85605 - protein, 256 aa, Unknown
  Bacterial polypetide isolated from the Sargasso Sea
MIDEIQKIKSKIIPLDSEHNAILQCCPDGRKIDEVKEVLITASGGPFFGSSEDDLKNVSIEEALAHPNWQMGAKISVDSATLINKCLELIEASYLFDLDEKKIRLAIHPQSIIHSIVTYINGSSIAQMSNPSMKIPLASALGLTLGNRKIPISFNPINFDKLELNFFKFPEEHNSLESLARDIARSKNSSGIIFNAANEIGVEAFLENKIQFTQIKEVISRTFDTSCLSNVSSIEEIFEIDKVARNAAHKVIKSLN

SEQ ID NO: 85606 - protein, 271 aa, Unknown
  Bacterial polypetide isolated from the Sargasso Sea
MANKESIICGWQFIRKELQKRHTRFVPLDSEHFSISSLIKDESKKNIKKIYLTASGGPFLYKNLKNIKNIKPKFALNHPNWKMGKKISIDSATLMNKIFEIIEAIKIFDMERSKFDILIHPKSYLHAIVNFKNGLTKLVAHETTMQIPIANALYLSKNNYIYNSSNFNYHKLNSLNFIKPNIKNFPLLKILNYKFKNTYFEIILVSINDMLVKNYLLNKISYISIHNKMLELLKKPYFIKYYSSKPKNIKDIKSMVEIVNQYIIKNLKVND

SEQ ID NO: 85607 - protein, 284 aa, Unknown
  Bacterial polypetide isolated from the Sargasso Sea
MTKKVAILGSTGSIGKSLLNIIASDKNNFQIVLLTANKNHKLLLNQAKKFNVKNVIITNKKSYEILKDRLKKNKSINVFNNYNSFNKILKKKIYYTMSSISGINGLSPTLKIIKYTKNIAIANKESIIIAWNLISKELKKNKTNFIPVDSEHFSIWYGLNNYESSNLDKIYLTASGGPFSNLALQEFKKIKLKQALNHPNWKMGKKISIDSATMINKIYEVIEAKNIFNINYKNIKILLHPNSYVHAILKFNNGLIKLIAHDTTMKIPIFNTLYFNQFKKKLFQ

SEQ ID NO: 85608 - protein, 301 aa, Unknown
  Bacterial polypetide isolated from the Sargasso Sea
IVGIAGLEPTIKFVSHSKKILLANKEAIICGWHLIKNLSKKNKTKIVPIDSEHFSISELTKDYKDKDIEKILITASGGPFLEKPLKSFKHISASDAAKHPKWKMGKKISIDSSNLMNKVLETIEAYKLFPFSTKKYQIIIHPQALVHAIVFFKNGQTKLLYHQTDMRIPIANAIYENNFDAKIFLKNRHNKLLNLQNLKFLKVDKKRFPIVTLLKKYSAKKSGPIVLNASNEVLVDKFIKGKITFKSIFNCLKAVLGDKDYKKYAIKSSPNINDIYKIDKWARFKTLEIVKKKLINEKIIL

SEQ ID NO: 85609 - protein, 147 aa, Unknown
  Bacterial polypetide isolated from the Sargasso Sea
PQSIVHALVSFSDGSVISHMSNHDMRIAISYALSWPKRYDIGIEKLKNKSFSNLSFERVRKNQFKCLDLCSKALQLGHNAPTVLNAANEVAVEKFLENKIKFIDIPVIIEHALNNMKLTKKNTLKSILACDKLTRDEISDYIKIRWK

SEQ ID NO: 85610 - protein, 302 aa, Unknown
  Bacterial polypetide isolated from the Sargasso Sea
MKKKIIILGSTGSIGKTTFQIIQKNSSEFNVVLLTTNKNISEIINQARSLNVKNIIVASRDHYLKLKKNNKNKKLKIYNNFDVINKIFKKKEIDYCMSAITGLNGLKPTLDTIKLSKTIAIANKESIICGWNLIEKKLKKYKTNFIPVDSEHFSIWSVIKNFKNDDIEEIILTASGGPFLNKPLKFIKNANPLRATKHPNWKMGKKISIDSATLINKVFEIIEAQRIFKINKSKFKILIHPKSYIHAIVKFKNGLIKIVAHETSMKIPIFNSIYYDANKHIETNKINLEVLNNLNLSNPDLK

SEQ ID NO: 85611 - protein, 258 aa, Unknown
  Bacterial polypetide isolated from the Sargasso Sea
MKKINLLIYGATGSIGDSVLTIIRKHRDRFNVVGMTCDKNIKKLSILSNEFDTKNIGIATYNKELDYKKYFPDKNIYFTLSEFNELIAKNVDIIIFAISGASILALSLEIAKSGRIVGLANKECIVSLGNILLDAAKFHKTKIIPLDSEHNSIYQLLNNNKHSFRTITITATGGPFLNKKLDDFKNIKVEEAINHPVWDMGKKISIDSATMVNKGLEVIEAKYLFDLDVSKINVLIHPQAMIHGFITYKDNSIFSFIS

SEQ ID NO: 85612 - protein, 233 aa, Unknown
  Bacterial polypetide isolated from the Sargasso Sea
FYFSNFNNIKFDSSNIKKIYLTASGGPFRNKKFNTLTNVSFKEATNHPKWKMGYKNSIDSATLVNKCLELIEAHYLFDIPLIKLDILIHPESLVHSIIEDHNYISKLIYFYNDMKIPLINFLNNNSYDSLPIINRFDFLNEFSLNFTKVNTEIYPVYKFFKSIDKSNPRNLIKFNLGNEYAVDLFKQKKIKYVEILQLIKEITSLNIDSDVNNIHNIIQYHENLKLYINTNFP

SEQ ID NO: 85613 - protein, 370 aa, Unknown
  Bacterial polypetide isolated from the Sargasso Sea
TFNIVQQNAKDFDVVLLTTHSNINFILRQAKILKVNNIIITSKKDFLIAKKKKIKKINIYNDFSVYKKIFHKKIDYTISAISGLAGLKPTIDIIKFTKNIAIANKESIICGWNLLSKELIKNNTKFIPVDSEHFSIWSNIQNLNLNLIDQVIITASGGPFLNKTNKFTKNATLKNALRHPNWKMGKKISIDSATLMNKVFEFIEAMRIFNLSKDKLDILIHPKSYVHSIIKFKNGLINITAHDTNMKIPIFNSIYQPFSKNIKSKKINFQLLNDLNLSKPSCKKFPSLNLIKYIGDQTSLFETILISTNDTLVDLYIKKKIKFGDIIKYLNKILNFKEFKVYKRKKPTNVHQILNLNDQVRLKTIKLCIK

SEQ ID NO: 85614 - protein, 154 aa, Unknown
  Bacterial polypetide isolated from the Sargasso Sea
NIDVSMIDIVVHPQSIIHSMIEFKDSSIKAQMGVPDMKVPIQYALTYPNHLSAPWERLDFKLLADLSFEAPDFDRFPCIKLAYMSLDKMGSTPAVLNMANDYSVYKFLNSEIKFTEIPKIIEAAMIDHQWVEKPDLDYIRELDNWTKDFVNNFD

SEQ ID NO: 85615 - protein, 277 aa, Unknown
  Bacterial polypetide isolated from the Sargasso Sea
MRKNIVILGSTGSIGVNAIDVIKQHPEKFNVIAISTNKSIDLIIQQAKELKPNYICVKNKEDLNKISNELNDPNLEIIFGEDSLAKLSQIEEADYVLNAIVGSAGLKSSMNAVKSGKKLLLANKEPLVMCGDLLMRFANDNNAIILPIDSEHNAIHQCIESKNKKHIKKIMLTASGGPFLKRDLNTFNSISVKDALKHPTWKMGNKITIDCATMVNKGLEIIEAMHLFEMPSNRVEAIIHPQSLIHSCVFFNDNSVLTQMSISDMKIPHSILPSMAR

SEQ ID NO: 85616 - protein, 201 aa, Unknown
  Bacterial polypetide isolated from the Sargasso Sea
MKKKIAILGSTGSIGTTSLNIIKKKKNLFDVQLLSANKNYQSICQQILKFKPRYFVVTNNNIFLKIKKRFKNKRTKILNNYENLYLSKKIDITIASIPGIAGLKPTINLVRKSKKILLANKESVICGWQIINNLAKKYKTKIVPIDSEHFSIMKLLENHKKNQIEKIYITASGGPFLNLPKSKFKNIKPKDAIKHPKWSMG

SEQ ID NO: 85617 - protein, 121 aa, Unknown
  Bacterial polypetide isolated from the Sargasso Sea
MKKLTLLGSTGSIGLNTLDVVRMFPRQFRIEALSCRSSIEQLIEQIREFQPKTVCVEKNENAGELRQIFPNKEFVFGMQGLEKISTNPETDLVVSGIVGAAGLKPTFSALKAGKTVVLANK

SEQ ID NO: 85618 - protein, 129 aa, Unknown
  Bacterial polypetide isolated from the Sargasso Sea
MKYITVLGSTGSIGTQTLEIASEQPDKFKAVALSAGRNINLLTEQVKTHKPEVVAIEDENLIEDLKDNINNLDLDSAPLVLSGKEGINAVAAWDKADTVVTGIVGCAGLIPTMSAINAGKNIALANKET

SEQ ID NO: 85619 - protein, 384 aa, Unknown
  Bacterial polypetide isolated from the Sargasso Sea
MKKKIAILGSTGSIGKNTINILKKDKKNIKIVLLTSNKNIKEILKQQKIFNVQNLIITDKSKFKIIKDISKKRNFKVYNNYECLKKIFKNKIDYVMAAITGISGLEPTLKIIKYSKIIAIANKESIVCAWNLVSKELRKNNTEFIPVDSEHFSIWEILKGFKINNVEKIYITASGGPLLNLPIKKIKKISKKETLKHPNWSMGKKISIDSCTMMNKVFEVIEAQRIFNLPSNKIEILVHPKSYLHSIVKFKNGTVKLLIHETDMKIPIFNTLYGNTEKSINTKKINFKKLNNLNLQKPNLNKFPFLRLQKKIPSKISLFETVLVSANDEIVKYYLDGLIEYNQIFPKLLKILNLKKFKSLKNKSPKNLHSINQLNEYVRFENQR

SEQ ID NO: 85620 - protein, 195 aa, Unknown
  Bacterial polypetide isolated from the Sargasso Sea
MKKKSIIILGSTGSIGETSLKVIRDNKKKFSIKILMANSNYRKIFNQIKKFKPKYYIVENYETFIKINKNNPNKKTKILNVYKKLDNKIIKSDILISAIPGLAGLLPTIKFLTQTKKLLIANKESIICGWNLIKNILKKKKIKFIPIDSEHFSIMKLLENNPSKNIEKIFLTASGGPFLNYDLKKIKNAKPNEAI

SEQ ID NO: 85621 - protein, 192 aa, Unknown
  Bacterial polypetide isolated from the Sargasso Sea
MKKIFILGATGSVGENALSVIDSNKEKFELIGISINSNVEKANKIIKKHNPKYIYINDKLVKENILVTENAIICEDDKELSDIFNSSDVDIVISAISGFAGIKTTFQAAKSGKKVLLANKESIVAGGSLLMKIIRENNTELVPIDSEHNAIFQCLPETKSTEDVKQIVITASGGPFYGKNIDELNNMESKML

SEQ ID NO: 85622 - protein, 257 aa, Unknown
  Bacterial polypetide isolated from the Sargasso Sea
NKTVVIPIDSEHFSIKQLTYNYKNADIKKIYLTASGGPFLKRPLRSFNKIKSKDACKHPNWRMGKKISIDSSNLMNKILELIEAYKLFLFDPKKYEILIHPQSLIHAIVTFENGQSKFLYHDTDMRIPISNAIYDNQVNIKNIIKKNNNFLDKLKNIEFIKVDKKRFPIVTFINNKFLSKSAPIILNASNEVLVDSFIKNKIPYNGIFKTLNRVFKDRDFGKYAVKKTPSIYEIYEIDKWARKKTVQLISRNYEKFI

SEQ ID NO: 85623 - protein, 122 aa, Unknown
  Bacterial polypetide isolated from the Sargasso Sea
MGSTGSIGTQTLQIAEEFPDQFRVVALTAGRNLDLLVEQIQRHQPELVALADAERLPELQQRLDALDPSQKPGQPPQLVGGPDGLNVAASWDTADLVGHGIVGCAGLPATLAARRAGKDLGP

SEQ ID NO: 85624 - protein, 380 aa, Unknown
  Bacterial polypetide isolated from the Sargasso Sea
MKKISIFGFTGNLGTQALDILKSYKNQFEFDIFVCDKNLNLAKSVVREFNPKSIFFSCEEVKKEFKNLELNVEVLDCIEDVAERIENNPSDIFLSAISSYEALELTIAAAKSGKKLLLANKESLVVFGKFIMDKVSSSGTELIPIDSEHFSLFSSLRSLNKNDIKKIFITASGGPFLGQNLEQIKNKKAVDALKHPTWKMGDKITIDSATLINKCFELIEAKFLFNLDPEKLDILIQPQSIIHSLIELNDGSVEAQLSKPSMIIPLSYGLLDSRSDEVRNKFSLNMFEDEINLQLKFFPEDRKELLKITREIMNLGGNRGLIFATLNQIAVNKFLKDQIKFGEIYEFIYKNYFNFEKKELDTLEDLRSAHKDILEKLNKS

SEQ ID NO: 85625 - protein, 503 aa, Unknown
  Bacterial polypetide isolated from the Sargasso Sea
GAAITDTATVTFTVGAADPTNGNTTLVAAPTSVVADGSTTSSVTVTLADASGNLLTASGGTVALSSTGSATIGAVTDNGDGTYTATVTNTVAESVTISGTLDGAAITDTATVTFTVGAADPTNGNTTLVAAPTSVVADGSTTSSVTVTLADASGNLLTASGGTVALSSTGSATIGAVTDNGDGTYTATVTNTVAESVTISGTLDGAAITDTATVTFTVGAADPTNGNTTLVAAPTSVVADGSTTSSVTVTLADASGNLLTASGGTVALSSTGSATIGAVTDNGDGTYTATVTNTVAESVTISGTLDGAAITDTATVTFTVGLSVTTSEKSPREEFLELEDDIRNEIKFNTNININLFLKTTNTAVSSARDRYISNRMMNSSSKIENQFSEGPVRLEKDNSNTASNSEKTNGVIQIDNDTENSFNLRSSTRGTVADGQIYTTHNYFNGKVARYTGTKFNFTKSENKAKTGSATSQIIFEQKKSDELTIGYFTGSSLSKYSNSEQ

SEQ ID NO: 85626 - protein, 232 aa, Unknown
  Bacterial polypetide isolated from the Sargasso Sea
MKKIFILGASGSIGENALSVIDSNKENFELVGISVNSNVEKANKIIKKHNPKYIYINDKSAIENILKTEDTVICKDEKELSDIFNSSDVDIVISAISGFAGIKSTFHAAKSGKKVLLANKESIVAGGSLLMETVRENNTELVPIDSEHNAIFQCLPESRSTQDVKQIVITASGGPFHGKNIDELNNVRVQDALNHPNWEMGSKISIDSATLVNKCLELIEACYLFDMDESFL

SEQ ID NO: 85627 - protein, 183 aa, Unknown
  Bacterial polypetide isolated from the Sargasso Sea
MTKDLIIIGSTGSIGKSTLNIIKKNKKKFKIKLLTTNTNIQQIFEQALEFKVKKVVINDKKNFLKFSNLFKKKRIKVYFNIDNALKQIKKKVYFTVSAISGIEGLEPTLSVIRYTKNLGIANKESIICGWKILVKELRKYNTNFIPLDSEHFSVWSIIKDENKKNIKKKYLTASGGPFLKKKL

SEQ ID NO: 85628 - protein, 229 aa, Unknown
  Bacterial polypetide isolated from the Sargasso Sea
CLSGQRSPDDVQNITITASGGPFIGKKISDLKDVTKDDALNHPNWDMGSKISIDSATLVNKCLELIEAKYLFDLEESIFDLVIHPQSIVHSVVTYKDGSSICQMSMPDMRVPIAHALSNEHRLPINFEKINFNDLNLSFHAFPEDRLQIQKIAREVCNSGGHLGTIFNAANEVAVESFLNDQISFDKIYEVIHRTFDNNSMSKDVSIESIYEADTQTRIKAKKVVKSIT

SEQ ID NO: 85629 - protein, 309 aa, Unknown
  Bacterial polypetide isolated from the Sargasso Sea
GCAGLLPTLAAVRAGKDLALANKETLIAAGPVVLPELKKSGSRLLPADSEHSAIFQCLQGTPWAENARLSTGVPTPGLRRIQLTASGGAFRDWKAEDLENATVADATSHPNWSMGRKITVDSASLMNKGLEVIEAHYLFGLDYDHIEIVIHPQSIIHSMIELADSSVLAQLGWPDMKLPILYCLSWPSRLETPWRRLDLTEVGQLTFRAPDPAKYPCMQLAYAAGRAGGTMPAVMNAANEEAVAQFLEEKIHFLDIPVVIEAACERHKADLIAHPQLEDVLAVDQWARMAVREQVKRGTTRVPLAALAA

SEQ ID NO: 85630 - protein, 245 aa, Unknown
  Bacterial polypetide isolated from the Sargasso Sea
KIIPLDSEHNAIYQILQNENKNNIKNIVLTASGGPFLRMNKKNFKNITVADALKHPNWKMGKKITIDSATLVNKIIEVIEASILFNLNLKQIDILIHPASLIHGIVNFVDGSSHLVASSPDMKVPISFALSWPDRYFNQVKFIDFVQNNDLNFIKPDYKKFPALSLKKIVSNSLFTKSTIIVLNAANEIAVDNFLKKNIKFDDIVKTIKKTIYKFNHIEVKTLNDILSVDCEARLLTNKIIKKNN

SEQ ID NO: 85631 - protein, 315 aa, Unknown
  Bacterial polypetide isolated from the Sargasso Sea
LTEQVKTHKPEVVAIEDESLIEDLKDNINNLDLDDAPLVLGGKQGINAVAAWDKADTVVTGIVGCAGLLPTMSAINAGKNIALANKETLIAAGPIVIPALKKNNSRLLPADSEHSAIFQCLQGLPNYENADFSTGEMTKGLKAIHLTASGGAFRDWAVEDLKHVTVEDATSHPNWDMGKKITVDSATLMNKGLEVIEAHYLFGTSYENIEIVIHPQSIIHSMIEMEDSSVLAQLGWPDMKLPILYAMSWPERFKTNWKRLNLSEIGKLTFKEPDEFKYPCMGLAYAAGKSSGTMPAVLNAANEMAVEQFLKEKIS

SEQ ID NO: 85632 - protein, 317 aa, Unknown
  Bacterial polypetide isolated from the Sargasso Sea
IGTQTLEIASEQPDKFKAVALSAGRNINLLTEQVKTHKPEVVAIEDESLIEDLKDNINNLDLNDSPLILGGKQGINAVAAWDKADTVVTGIVGCAGLIPTMSAINAGKNIALANKETLIAAGPIVIPALKKNNSRLLPADSEHSAIFQCLQGLPNYENADFSTGEMPKGLKAIHLTASGGAFRDWAVEDLKHVTVEDATSHPNWDMGKKITVDSATLMNKGLEVIEAHYLFGTSYENIEIVIHPQSIIHSMIEMEDSSVLAQLGWPDMKLPILYAMSWPERFKTNWKRLNLSEIGKLTFKEPDEFKYPCMGLAYAAG

SEQ ID NO: 85633 - protein, 324 aa, Unknown
  Bacterial polypetide isolated from the Sargasso Sea
MKYITVLGSTGSIGTQTLEIASEQPDKFKAVALSAGRNINLLTQQVKTHKPEVVAIEDESLIEDLKDNISNLDLDDAPLVLGGKQGINAVAAWDKADTVVTGIVGCAGLIPTMSAINTGKNIALANKETLIAAGPIVIPALKKNNSRLLPADSEHSAIFQCLQGLPNYENADFSTGVMPKGLKAIHLTASGGAFRDWAVEDLKHVTVEDATSHPNWDMGKKITVDSATLMNKGLEVIEAHYLFGTSYENIEIVIHPQSIIHSMIELEDSSVLAQLGWPDMKLPILYAMSWPERFKTNWKRLNLSEIGKLTFKEPDEFKYPCMGL

SEQ ID NO: 85634 - protein, 278 aa, Unknown
  Bacterial polypetide isolated from the Sargasso Sea
ILEKYAPDYVYIEDHDSFKSLCSKDKERYLNGDEELERLINRDDVDIIVCATSGFAGLKTAYIASKTGKKILLANKESVVAGGDLILPSAKENNTKIIPIDSEHNAIFQCLSAEKGTEDVKNITITASGGPFINTPIQELQHVTVEDALNHPNWKMGSKVSIDSATLVNKCLELIEARYLFDLDEKYFDLVIHPQSIIHSIVTYIDGSSICQMSSPDMRVPIAHALSEENRIPIDFKVLDFSNLNLSFQEFPSDRSKIQDIAREVCNKGGFLGTVFYA

SEQ ID NO: 85635 - protein, 193 aa, Unknown
  Bacterial polypetide isolated from the Sargasso Sea
ILGKKITVDSATLMNKGLEVIEAHYLFGTSYENIEIVIHPQSIIHSMIEMEDSSVLAQLGWPDMKLPILYAMSWPERFKTNWKRLNLSEIGKLTFKEPDEFKYPCMGLAYAAGKSSGTMPAVLNAANEMAVEQFLKEKISFQEIPTFISKACESHMKNLNLSPELEDILEIDNWARLFVEQEIKKGKKYVSIG

SEQ ID NO: 85636 - protein, 233 aa, Unknown
  Bacterial polypetide isolated from the Sargasso Sea
EIPKGLKAIHLTASGGAFRDWAVEDLKHVTVEDATSHPNWDMGKKITVDSATLMNKGLEVIEAHYLFGTSYDNIEIVIHPQSIIHSMIEMEDSSVLAQLGWPDMKLPILYAMSWPERFKTNWKRLNLSEIGKLTFKEPDEFKYPCMGLAYAAGKSSGTMPAVLNAANEMAVEQFLKEKISFQEIPTFISKACESHMENLNLSPELEDILEVDNWARLFVEQEIKKGKKYLSIG

SEQ ID NO: 85637 - protein, 237 aa, Unknown
  Bacterial polypetide isolated from the Sargasso Sea
MNKKRISIFGATGSVGQNTLDLISRDRDSYEIVVLTAGSNIDLLIKAALEFKPQAVVAATNDQFEELKNALRNTQINIGTGREALLESASRKCDLAFSAIVGAAGLEPGLIALENGADLALANKESMVAAGDLVKQKASKNKCKLIPVDSEHSAIFQALHGENVNSIERVILTASGGAFRDWTIEEIAKATPEQASTHPNWNMGQRITIDSASMFNKALEVIEAKELFNLASKQIEV

SEQ ID NO: 85638 - protein, 266 aa, Unknown
  Bacterial polypetide isolated from the Sargasso Sea
NKESIICAWNLIEKQLKKNKTKFIPVDSEHFSIWSLVKNIKNYKIDKILITASGGPFLNLPIKKFKNIKPKDALKHPNWIMGRKISVDSATMMNKVFEIIEAQRIFKVNLNKFEILIHPNSYLHAIVKFENGLTKMLVHDTSMSIPIFNTIYSESSRKIKNNTINLSYLNNLNLSKPNVKKFPTLKIIKLVPKNISLFETVIIAVNDELVNYFLKGKISFLDMQKYLLKIIKFSQFKKYCYKKPQNINQITKVMEEARLKTKNVCV

SEQ ID NO: 85639 - protein, 193 aa, Unknown
  Bacterial polypetide isolated from the Sargasso Sea
EEALNHPNWSMGNKITIDSATMMNKGLEVIEARWLFDLKIHQIDILIHPQSIIHSMVEFNDRSIKAQLGIPDMKIPIQYALTYPTHLLSDWKELDLAKIGKLTFEEKDIEKFPCIELAYESLRSGGSTPAVLNVANDNAVYSFLNKKIKFTDIPIIIEEACSTHDFIKNPNLDELLELELWTNEFVKNKIDNK

SEQ ID NO: 85640 - protein, 231 aa, Unknown
  Bacterial polypetide isolated from the Sargasso Sea
DKIRDPAGAGITRILLTASGGPFREHSAEDLRSVTPAQACAHPNWSMGQKISVDSATLMNKGLELIEACWLFNTTPQKVEVHVHPESIVHSMVEYADGSVLAQLGSPDMKTPIANGLAWPERIDAGVPPLDLFAIGRFHFERPDLVRFPCLRLAAEAFEAGGTAPAVLNAANEVAVAAFLEGSLCFSDIPVIIERTLAVTAVEPADNFDVIFAKDKEARACAREQIGLLTV

SEQ ID NO: 85641 - protein, 246 aa, Unknown
  Bacterial polypetide isolated from the Sargasso Sea
ADAGLPTQAHAGTPALDALVSGPECDTVVAAIVGAAGLSSTLAAARAGKRLLLANKESLVLAGELVTRAADASGAEIIPIDSEHNAIFQCLRSRQAQGDVSRIVLTASGGPFRGRRRDELAQVTREQAVAHPKWSMGPKISVDSATLMNKGLELIEAHHLFGVGRERLDVLVHPQSLVHSLVEFVDGSTLAQLGLPDMRTSLAVGLGWPERIASGVGGLDLLRHPRLEFEAPDTDAFPCLRLAWEA

SEQ ID NO: 85642 - protein, 182 aa, Unknown
  Bacterial polypetide isolated from the Sargasso Sea
MLTASGGPFLNTPINELASKTPEQACKHPKWKMGRKISVDSATMMNKGLEIIEASWLFNIDPDSINVVIHPQSIIHSLVEYKDGSVLAQLGNPDMRIPISFGLAWPDRIKTKVERLDLFDISQFDFKRPEEDRFPCLRLAREAIKQGGTSSAILNAANEVAVNEFLNNNLKFTDIAIVIDSV

SEQ ID NO: 85643 - protein, 217 aa, Unknown
  Bacterial polypetide isolated from the Sargasso Sea
MKNIVLLGATGSIGKSCLNVIRQNKEHFHLFGIGFGSNLDKAQEIVQEFNPDHIYVAQSQADKSHNFWKINSNILTSEDELQALIQDPDVDIVISAISGFAGLKTSYFAIEAGKKILVANKESIVAAGDILMPLAELRDSEIIPVDSEHNALYQCLPRERNLNEISKILITASGGPFREKSLSDLKGVSLEDALKHPTWSMGAKITIDSATLVNKCL

SEQ ID NO: 85644 - protein, 252 aa, Unknown
  Bacterial polypetide isolated from the Sargasso Sea
SRYHEILEKHSPDYVYVEDHDLFKSLCSKDKERYLNGDEELEKLIIRDDVDIIVCATSGFAGLKTAYIASKTGKKILLANKESIVAGGDLILPLAKENNTKIIPIDSEHNAIFQCLSGEKGTEDVKSITITASGGPFINASIQELQHVTVEDALNHPNWKMGSKVTIDSATLVNKCLELIEARYLFDLDEKYFDLVVHPQSIVHSIVTYIDGSSICQMSSPDMRVPIAHALSEENRIPIDFKELDFSNLNLS

SEQ ID NO: 85645 - protein, 303 aa, Unknown
  Bacterial polypetide isolated from the Sargasso Sea
LSVIDSNKENFELVGISVNRNVDKANKIIKKHNPKYIYINDKSAKENILKTEDAVICEDDKELSDIFKSSDVDIVISAISGFAGIKSTFHAAKSGKKILLANKESIVAGGSLLMETARENNTELVPIDSEHNAIFQCLPESRSTQDVKQIVITASGGPFHGKNIDELNNVGVQDALNHPNWEMGSKISIDSATLVNKCLELIEACYLFDMDESFFELVIHPESIVHSIVTFNDGSSICQMSNPDMRVPIANAMSYDKRLSIPFQPIDFNNLKLNFEIFPNDRAEIVHLAREAVREDSSKGIYF

SEQ ID NO: 85646 - protein, 240 aa, Unknown
  Bacterial polypetide isolated from the Sargasso Sea
HCALHQCLRSSDPEGQARHLHQLVLTASGGPFRGLSSIELEQVTVEEALAHPTWAMGPKITVDSSTLMNKGLEVIEAHELFGVDYEKIEVVVHPQSIVHSMATFTDGTTIAQLSEPDMRLPIAYALAYPERISTSFGSIDWGKAQSLHFEPPDKKTFPCLNLAYSAGKTGGTAPAWMNGANEAAVDAFLDGHIPWQEIAASIENALEQHDGANPDSVEAIVRADQRGRECVATRLAKRNC

SEQ ID NO: 85647 - protein, 230 aa, Unknown
  Bacterial polypetide isolated from the Sargasso Sea
MKKKIAILGSTGSIGTASLDIIEKDLKKFKIYLLSANSNYSLINKQIKKYKPNIFVINNFYVYKKILEKYRKKNIKIYNKFSDLIKTKFKFDITISAIVGIAGLDPTIKFTKISKKILLANKESIICGWHLLKKVSEKSKTCIIPIDSEHFSINELTKNCKNNDIEKIYLTASGGPFLRKPKRDFKKIRIKDAINHPNWQMGKKISVDSSTMMNKILEVIEAFKLFPFNE

SEQ ID NO: 85648 - protein, 273 aa, Unknown
  Bacterial polypetide isolated from the Sargasso Sea
MKKKLSIYGCTGSIGDSTFKLFKQGNKNYKFHILTGYKNHKKIKHIIKKYKPNYFVVFDEKTYLKLKKSNNKTNVKILNSKDFQNHKFEKSDISILAIPGIAGLQPTLNAIKISKKVLIANKESVICGWDLIKKLVKKFKVDVVPVDSEHFSIMNLINETNKEYIEKIYLTASGGPFLNYPISKMKKIKPSQAINHPKWKMGKKISVDSATLMNKIFEVIEAHKLFSINLRNIDIIIHPQSLVHAIVKFKNGLYKFLYFETDMMIPNRKRFIG

SEQ ID NO: 85649 - protein, 209 aa, Unknown
  Bacterial polypetide isolated from the Sargasso Sea
MKKKKIAILGSTGSIGKNSLQIFNLNKKNFNIVLLSAHSNFNEILNQIRVYKPSYFVITNFFIFQKVKKKIRNKKIKIFYNFKDVPLKLRFDITISAIVGIAGLEPTIRFTKQSQKILLANKESIICGWHILSSLIKKYKTILIPIDSEHFSIKQLTENYTDLDINKIYITASGGPFLRRSLKSFKKIKSIEAFKHPNWSMGKKISIDS

SEQ ID NO: 85650 - protein, 205 aa, Unknown
  Bacterial polypetide isolated from the Sargasso Sea
PTIEIIKFTKKIAIANKESIICGWDLIQKELKKNKTEFIPVDSEHFSIWYALKDIDKRLIEKIYLTASGGPFLNKPLNRLKNVSSKQAIKHPNWKMGKKISVDSATMMNKVFEIIEAKKIFNLSYTKLSILTHPKSYVHAIIKLKNGLTKIVAHDTNMRIPIFNSLYSSNNFIDSKKLNLKILNNLSFKEINYKRFSVIKILNKL

SEQ ID NO: 85651 - protein, 233 aa, Unknown
  Bacterial polypetide isolated from the Sargasso Sea
EMPKGLKAIHLTASGGAFRDWAVEDLKHVTVEDATSHPNWDMGKKITVDSATLMNKGLEVIEAHYLFGTSYENIEIVIHPQSIIHSMIEMEDSSVLAQLGWPDMKLPILYAMSWPERFKTNWKRLNLSEIGKLTFKEPDEFKYPCMGLAYAAGKSSGTMPAVLNAANEMAVEQFLKEKISFQEIPTFISKACESHMKNLNLSPELEDILEVDNWARLFVRQEIKKGKKYVSIG

SEQ ID NO: 85652 - protein, 301 aa, Unknown
  Bacterial polypetide isolated from the Sargasso Sea
ELASERVNWSMSAIIGFAGVEVALRCAEFSDVLALANKEALVCAGELLLSKINYHKNKLIPVDSEHSAIYQCLQGENRKGLKEIILTASGGPFRNWTVNDMKKATLKDALEHPNWDMGDKITIDSASMFNKSLELIEAMHLFNVSFHEIKVVIHPQSIIHSMVNFKDGTTIAQLAVPDMKGPIGYALNYPERNELGIENINLTEVGQLEFFEPDCEKFHSLKIVENVGKNLNLGVIFNAAKEVAVEKFISGEINFLDMALVVEKAINENSLRELTKSGKQTFLSLVDIDLATRDFSRNINF

SEQ ID NO: 85653 - protein, 215 aa, Unknown
  Bacterial polypetide isolated from the Sargasso Sea
MIKDIYILGSTGSVGTTTLKIINKDKGNFNIKLLTTNKNVNKIFKQALKYNVNKIVIFDKEKYKKNLDKFKKKKINVYLTIKDALKNKKKKSFLTINAVSGIDGLEPSLNIIKYTKNFATANKESIICGWRLLEKECKKNKTNFIPLDSEHFSIWTLLKSENQKLIKKIFLTASGGPFLNKKLKNIKNIKPRLALKHPNWKMGKKITIDSATNDE

SEQ ID NO: 85654 - protein, 268 aa, Unknown
  Bacterial polypetide isolated from the Sargasso Sea
FCRELIISQLRNSKAIMLPIDSEHNALLQIILSSGLEYKINDADYYKAKIKNIIITASGGPFIDYNLNDLKRINAKDAVQHPTWNMGKKISVDSSTMMNKGLEIIEAKTLFNLDINNISAIIHRQSKIHAFVEFFDGTVISHMSNPDMKIPISYAITYPERIYHDNKSNFSYDNFSFEELIYDKFPCYRLARKVAEIGKNTGLILNAANEISVEYFLEDKISYLDIPNIIEDILESSTVVNHDTLDSIIDNDREIRELTRDCIKTKYS

SEQ ID NO: 85655 - protein, 258 aa, Unknown
  Bacterial polypetide isolated from the Sargasso Sea
QERKYYWANKESIVAGGDLILPLAKKHNTEIVPIDSEHNAIFQCLAGESGMEDVKKITITASGGPFLNSSISDLKNVRLQEALNHPNWNMGSKITIDSATLVNKCLELIEARYLFDLDEKYFDLVVHPQSIIHSIVTYLDGSSICQMSSPDMRVPIAHALSDKRRVPINFDSLNFSSLNLSFQEFPLDRIQVQNIAREVCISGSNLGTVFNASNEIAVESFINGLISFDKIYEVIYRTFDINIMSKDMSIDSINDIDK

SEQ ID NO: 85656 - protein, 233 aa, Unknown
  Bacterial polypetide isolated from the Sargasso Sea
AAWDKADTVVTGIVGCAGLIPTMSAINAGKNIALANKETLIAAGPIVIPALKKNNSRLLPADSEHSAIFQCLQGLPNYENADFSTGVMPKGLKAIHLTASGGAFRDWAVEDLKHVTVEDATSHPNWDMGKKITVDSATLMNKGLEVIEAHYLFGTSYENIEIVIHPQSIIHSMIEMEDSSVLAQLGWPDMKLPILYAMSWPERFKTNWKRLNLSEIGKLTFKEPDEFKYPCMG

SEQ ID NO: 85657 - protein, 296 aa, Unknown
  Bacterial polypetide isolated from the Sargasso Sea
KDLFKKKKINLHLGISFLKKIVKKKVDYCINSISGISGLEPTIQSIPLTKNILIANKESIITGWPIIKKKLNQHKTNFIPIDSEHFSIFQLIKNENNKNLSRIILTASGGPFLNQNIKKSDDIKIKDVIKHPNWRMGKKISVDSATMMNKVFEFIEAKKIFNLKNDQISILIHPTSFIHAIVFFKGEIIKMLAHNTKMTVPIAYALDAYRKNIKKIYIQNDLKKLNNIKLINPDFVKFPLLNLIKTIPEKDSYFETILVTLNDELVKNYLNSNIKYFYIEKYLLKIIKSPFFKKIL

SEQ ID NO: 85658 - protein, 241 aa, Unknown
  Bacterial polypetide isolated from the Sargasso Sea
LNKNKTKFIPVDSEHFSIFSLLENKEIDDIEKVYITASGGPFINLPKNQFKKIKLNDALRHPNWSMGKKITIDSATLMNKVFEVIEAKNIFNISYDNISILTHPKSYVHAIIKFKNGLSKFLIHEPDMKIPIYNSIFYESRQNLKTNSLDFKILNNLNLKKVEINKFPLVKLLQKLPNNSSLYETVLITINDYLVYKFLDKKMNFQELTKSIYKISNLKEFQKFKKIQPKSIKDIYNLRDY

SEQ ID NO: 85659 - protein, 196 aa, Unknown
  Bacterial polypetide isolated from the Sargasso Sea
MKKIFILGASGSIGENTLSVIDSNKEKFELVGISVNKNVEKANKIIKKHNPKYIYINDKSAKENILKTEDAVIYEDDKELSDIFNSSDVDIVISAISGFAGIKSTFHAAKSGKKILLANKESIVAGGSLLMETARENNTELVPIDSEHNAIFQCLPESRSTQDVKQIVITASGGPFHGKNIDELNNVGVQDALNHP

SEQ ID NO: 85660 - protein, 149 aa, Unknown
  Bacterial polypetide isolated from the Sargasso Sea
MIDIVVHPQSIIHSMVEFKDSSIKAQMGVPDMKVPIQYALTYPDHLSAPWERLDFKFIGDLSFEAPDFDRFPCIKLAYMSLDRMGSTPAVLNMANDYSVYKFLNSEIKFTEIPKIIEAAMKNHQWVEKPDLDCIRELDNWTKDFVNNFD

SEQ ID NO: 85661 - protein, 263 aa, Unknown
  Bacterial polypetide isolated from the Sargasso Sea
GLLPTYKIINRTKLIAIANKEAIICGWPLIKKELRKYKTKFIPVDSEHFSIFSLLQNKEISDIEKVYITASGGPFIDLPKSQFEKIKLNDALKHPNWIMGKKITIDSATLMNKVFEVIEAKNIFNISYKKISILTHPKSYVHAIIKFKNGLSKFLIHEPDMKIPIYNSIFYKSQKNLKTDSLDFKILNNLNLKKVEKTKFPLVRLLQKLPENSSLYETVLITINDYLVNKFLNKKINYQKLIKLIYKISNLKEFQKFKKIQPK

SEQ ID NO: 85662 - protein, 232 aa, Unknown
  Bacterial polypetide isolated from the Sargasso Sea
NNVELLAQFAIEFNAKYAVIANSDKYQKLKECLFGSSVIPVAGTDELIKLCEEPVDWTMNAIVGFAGLAPSLAVAKTGKALALANKESLVCGGALLTKEIGQSNGTLLPVDSEHNAIFQCLRHENISTVHKLILTASGGPFRDWTKEKMNKVTLEEALQHPNWDMGAKISIDSATMFNKALEVIEAKHLFNVKSSEIEVLIHRQSIIHSLVSFCDGSVIAQLGNPDMRGAIG

SEQ ID NO: 85663 - protein, 292 aa, Unknown
  Bacterial polypetide isolated from the Sargasso Sea
LKQAKEFKVKNIIISDLSTYQKAKKKLNKSKIRIYNDFNNFNKIFKKKNDFIMSSITGLSGLEPTLRSIKYTKKILIANKESIICGWSLINKELKKYKTKFIPVDSEHFSIWSLLKNYSPNDVEKIYITASGGPFLKLPKKSFSNISVKRALKHPNWKMGKKITIDSATLMNKVFEVIEAKNIFDLPYNKISILTHPNSYIHAIIKFYNGLTKILAHDPDMKIPISNSLNDEKFKMKKISPINFEILNDLNLKKVDRKKFLFVNILNRMPKYSTLFETVLITINDYFVYKFL

SEQ ID NO: 85664 - protein, 197 aa, Unknown
  Bacterial polypetide isolated from the Sargasso Sea
YCAVKAGKKVFLANKEALIMSGDLLLREARKTKSLIIPIDSEHNALLQIISMFGLNYIHGKKSLPQNIDSISLTASGGPFLGYNNRMLSQVTPNQAIKHPNWKMGKKISIDSATMMNKGLEVIEASLLFNINPDKINVYIHPQSLIHALITFYDGSTLSHLSYHDMKIPISYALNWPNRQRLAKKMKTLNGTYELRK

SEQ ID NO: 85665 - protein, 231 aa, Unknown
  Bacterial polypetide isolated from the Sargasso Sea
PSSRGNQKEKASRIILTGSGGPFLDKEKSDLVNVTMEEAINHPIWKMGKKISVDSSTLMNKGLELIEAKWLFESDTQEIEIIIHPEGIVHSLVEFKDNSIIAQMGNPDMKIPIAYGLGFPDRIFSNVGSLNLSELGPLTFLDPDFDKFPCLGLAKEAMMVGGTAPTLLNAANEVAVEAFLNQSIKYLDISKVISEVLERNEIKKVDNISSIKEVDSIARISADLIIKGLAA

SEQ ID NO: 85666 - protein, 278 aa, Unknown
  Bacterial polypetide isolated from the Sargasso Sea
PAITALRSGNDIAIANKEPLVIAGDFFIRETKINNTKILPVDSEHNSIFQCFDERQREKINNITLTASGGPFLNLHKKYFSKIKPSDAINHPVWRMGKKISVDSATLINKALEVIEAGYLFNLKPNQIDVLIHPQSIIHGMVHYMDGSTLANLSYPNMISPLSVALSYPERLNLGLKKLDLSKIGELTFKKPDLDKFPGLKLGWEILKQPKPYSIIMNAANEIAVELFLKNVISFNEIVDLINYALQRFEFDIPSNLEDIIDIDKRTRILIKENYRGV

SEQ ID NO: 85667 - protein, 165 aa, Unknown
  Bacterial polypetide isolated from the Sargasso Sea
MGSTGSIGTQTLQIAEEFPDQFRVVALTAGRNLNLLVQQIQRHRPEVVALADADLLPDLQERLKDAGVAASHKPKLVGGADGLNVAAAWDSADLVVTGIVGCAGLLPTLAAVRAGKDLALANKETLIAAGPVVLPELKKSGSRLLPADSEHSAIFQCLQGTPWAE

SEQ ID NO: 85668 - protein, 253 aa, Unknown
  Bacterial polypetide isolated from the Sargasso Sea
MREVVRCEATLLPVDSEHNAIYQVFDFEQIEAIEKLILTASGGPFRDLQIEDMRTVTPSQAVAHPNWDMGAKISVDSATMMNKGLEVIEAHHIFGMPSSRIDVLVHPQSVVHSMVSYVDGSVLAQLGSPDMRTPIAYTLAWPSRIETPSKRLDLSTISTLQFEAPDERRFPALRLAREALQTGGAAATILNAANEVAVDAFLAEQIGFLEIANIVEETMGNVNFDRLKTIDDVFHLDATARNVAYVETEKRAS

SEQ ID NO: 85669 - protein, 301 aa, Unknown
  Bacterial polypetide isolated from the Sargasso Sea
KFNPKSVVMINEEASKAVKKGLSGYDINVLSGRESLLNISRDKEIDLVLNALVGSPGMEPTLEAVKAGVDVALSNKESLVVAGDLITTEMKKTGANIFPVDSEHSAIWQCMVGESFSDVEKIILTGSGGPFRTRPINTFNDIDVSEALNHPNWEMGKKITIDSATMMNKGLEVIEAYWLFNFDVSMIDIVVHPQSIIHSMVEFKDSSIKAQMGVPNMKVPIQYALTYPDHLSAPWERLDFKFIGDLSFEAPDFDRFPCIKLAYMSLDRMGSTPAVLNMANDYSDYKFLNSEIKFTEIPKII

SEQ ID NO: 85670 - protein, 210 aa, Unknown
  Bacterial polypetide isolated from the Sargasso Sea
ILTGSGGPFLEKPLSEFDLISPAQALNHPNWNMGKKISIDSATMMNKALELVEALWLFDIDIEQIEITIHPQSIIHSMVEFIDGSYKAHLGTPDMKVPIQYALTYPARKKLAIDSLDLSDLSLAFQSPDYKRYPILGLVHELIKLGGNRVAVMSIANDYIVQKFLDEKISFNQIFILTKEVVSKFGSDDLPSLEDLLILDENIKLYLEPN

SEQ ID NO: 85671 - protein, 245 aa, Unknown
  Bacterial polypetide isolated from the Sargasso Sea
MFKKDEIKIISIFGVTGSVGMSTQELLKLNNEKFKVDTIVANNDVKGLIKAAKNLKPNLVIINNDKMFTTLKEGLENYNIDIASGNDSIIEASKRKVDVFVAAISGFAGLNSTFNAIGNAKCIALANKESIVCAGPILLNKVKNSISKIIPIDSEHNTLYQILINANIDSISKVIITGSGGPFRGFSSMKLNKVTLDEAINHPIWKMGKKISVDSATLMNKGLELIEAAYLFNIKQNNIDINNPS

SEQ ID NO: 85672 - protein, 173 aa, Unknown
  Bacterial polypetide isolated from the Sargasso Sea
VAGIVGFAGLRPTLSAARAGKTILLANKEALVSAGALFIETVKRGGATLLPVDSEHNAMHQCLPIDTFGRPDMTNVEKIILTASGGPFRGRARESLHSVTPDEACAHPNWSMGAKISVDSATLANKGLELAEACWLFTRTPDQIEIVVHPQSIVHSMIRYQDGSVLAQLGQPD

SEQ ID NO: 85673 - protein, 233 aa, Unknown
  Bacterial polypetide isolated from the Sargasso Sea
MGYADLEQNGVMSVLLTGSGGPFRETPLHELVSMTPDQACRHPNWSMGRKISVDSATMMNKGLEYIEARWLFNASARQMEVLIHPQSVIHSMVRYQDGSVLAQLGEPDMRTPIAHTMAWPNRVTSGVKPLDFCKLSALTFSAPDYQRYPCLKLAMEAFEQGQAATTALNAANEVVVAAFLAEEIRFTDIADLNLAVLEQMDLEEPQSVDDVLRVDAIAREVARKQVMRLASLG

SEQ ID NO: 85674 - protein, 210 aa, Unknown
  Bacterial polypetide isolated from the Sargasso Sea
MKKKISILGSTGSIGESTLKIIKKDKKNFEINLLSTNRNVKKIFKQAKEFKVKNIIITDLASFKKAQIKFKKSKIKIYNDFNNFNKIFKKKNDFIMSSITGLSGLEPTLKSIKFTRKILVANKEAIICGWNLILKELKKYKTDFIPVDSEHFSIYSLLNSVNKKEINRIYITASGGPFLNFPKKKFFKIKLSQALKHPNWKMGKKITIDS

SEQ ID NO: 85675 - protein, 254 aa, Unknown
  Bacterial polypetide isolated from the Sargasso Sea
KKGGAELLPIDSEHNAIFQSMPADYAGCLDASGIRKILLTASGGPFRGRQSSELNDVTPSQAVAHPNWSMGAKISVDSATLMNKGLELIEACFLFNCDADDVEVVVHPESVIHSMVQYCDGSVLAQLGQPDMRTPIAYGMAWPERIEAGVESLNLFDIARLNFEAPDEENFPCLALARMAFAQGGTMPAVLNAANEVAVAAFLREDIRFTTIPMLIKKVMDQHSVTDADSLDAVLSADSWARKAADRLLQEESF

SEQ ID NO: 85676 - protein, 271 aa, Unknown
  Bacterial polypetide isolated from the Sargasso Sea
IAIANKESIICAWNIIEKKLKKHKTKFIPVDSEHFSIWSLLQNESIQNVEKIFITASGGPFLNSKLNKLKNVKVKKAIKHPNWSMGKKISVDSATLMNKVFEIIEAQRIFKVDIKKFEILIHPNSYVHSIIKFYNGQIKILAHDTDMKIPIFNSIYQKKIKKIRTKKVDISLLNNLNLRDINPERFGSIKILKKINNNNTLFETVLISANDELVDLFIRNKISFLDITKNLIKILKNKKYLNLIKKKPKKISDIITLSEEVRLKTKNLCIQ

SEQ ID NO: 85677 - protein, 247 aa, Unknown
  Bacterial polypetide isolated from the Sargasso Sea
HQTRFVPVDSEHSVLFQCLAAVDFKPEFVKHVTLTASGGPFFKRDPDTFASIAPADALQHPNWDMGAKITIDSATMMNKGLEVIEAHHLFGLDFDDIHVVVHPKSIVHAFVETIDGAILSHMGRPDMRYPIQYALTYPDRFETPFTQDPLTQLSGLEFFEPNRDAFPLLDLAIECGRKGGVYPIVFNAANEVAVQLFLNHDISYLEIHSYIVQMLDHFSSRCVSTIEDIIALDAEVKSNRSIAFEGA

SEQ ID NO: 85678 - protein, 328 aa, Unknown
  Bacterial polypetide isolated from the Sargasso Sea
DVIRNFPEQFRIISLSCRSSIDKLMNKIREFHPKIVCVEKDTQAAELRQIFSDMEFVSGLKGLEKIAEDPETDLMMSGIVGAAGLKPTFAAIKAGKTVAIANKEPLVMAGELFMQTATKTGAKLLPADSEHNAIFQALKNEPPESIARLILTASGGSLRDKPLNEFETITLAQALDHPNWEMGKKITIDSATMMNKGLEVIEAHWLFDTPVQNIEVVMHRESIIHSMVEFVDGSFLAQMGLPDMRVPLAHCLGWPNRLPMKIPRIDPISLKALHFEPINSNRFPCLSISIKAAKHGGGAPAVLNGANEKVVTSFLEEDINFSNISKTL

SEQ ID NO: 85679 - protein, 291 aa, Unknown
  Bacterial polypetide isolated from the Sargasso Sea
NAVICEDEKELFDIFNSSDVDIVISAISGFAGIKSTFHAAKSGKKILLANKESIVAGGSLLMETVRENNSELVPIDSEHNAIFQCLPESRSTQDVKQIVITASGGPFHGKSIDELNNVGVQDALNHPNWEMGSKISIDSATLVNKCLELIEACYLFDMDESFFELVIHPESIVHSIVTFNDGSSICQMSNPDMRVPIANAMSDDKRLSIPFEPIDFNNLKLNFESFPNDRAEIVHLAREAVREDSSKGIYFNAANEIAVENFLKKRITFRQIYEVILRTFDTKEMSKSSTS

SEQ ID NO: 85680 - protein, 315 aa, Unknown
  Bacterial polypetide isolated from the Sargasso Sea
MQAIEVVKKFKDYQIEYLSCLSNADKIIEQAKEIRPKKVCIVNSDLEKKVCSALKGENIQVLSGYQGIHELAKQKVSLLLNSIVGADGMEPSILALESNIPLALANKESIVMAGWIMNDIKKKKNSTLLPVDSEHSAIFQCLMGEDYKNIKRIILTGSGGPFRVRKLDTFKSITLQEALKHPNWSMGNKITIDSATMMNKGLEFIEAYWLFEVKQSQIDIVIHPQSVIHSMVEFSDGSIKAQMGEPDMKVPIQFSLSYPDRYTDKINSFNFIDNNELTFESVDFEKFPCIRIAKEALSAGGSHQVVLNVANDQVV

SEQ ID NO: 85681 - protein, 291 aa, Unknown
  Bacterial polypetide isolated from the Sargasso Sea
DSFKSLCSKDKERYLNGDEELERLINRDDVDIIVCATSGFAGLKTAYIASKTGKKILLANKESIVAGGDLILSLAKENNTKIIPIDSEHNAIFQCLSGEKGTEDVKSITITASGGPFINASIKELQHVTVEDALKHPNWKMGSKVTIDSATLVNKCLELIEARYLFDLDEKYFDLVIHPQSIIHSIVTYIDGSSICQMSSPDMRVPIAHALSEENRIPIDFKDLDFSNLNLSFQEFPSDRSKIQDIAREVCNKGGFLGTVFNAANEIAVESFLNKKINFNEIYEVIYRTFD

SEQ ID NO: 85682 - protein, 195 aa, Unknown
  Bacterial polypetide isolated from the Sargasso Sea
TLDVVAARPDEFDVVALGAARSVDLLVEQARVFDPEVVAIADPLLGSAVEAAVPAGTTVLAGPSAMAEAAVAAEVAINGVVGFAGLPVTLAVLAAGRRLGLANKESLIAAGPVVQQVRSTPGAELLPVDSEHCAIHQCLRANESDERVERIVLTASGGPFRGRTRADLAMVTVEEALDHPTWSMGPKVTVDSSTL

SEQ ID NO: 85683 - protein, 273 aa, Unknown
  Bacterial polypetide isolated from the Sargasso Sea
MKKKMQILGSTGSIGKTLLDIVNKDRKNFEITLLTANINYKLLYEQAKKFNVKNLIIANTKKYNLLKKINKKKDLNIYNDFKSLNRIFKSKVDYSMSSITGIDGLEPTFNIIKYSKKIAIANKESIICGWNLIDKELKKNKTQFVPVDSEHFSLWYGLQNLRIKNIENIYLTASGGPFINISLNRFKNIKINQALKHPNWKMGKKISIDSATMINKVYEVIEARNIFNINYQKIKILIHPKSYIHAILKFDNGLTKIIAHDTTMKIPIFNTLY

SEQ ID NO: 85684 - protein, 268 aa, Unknown
  Bacterial polypetide isolated from the Sargasso Sea
MGKNLLDIINKDKKNFEILLLTAHKNHIELFKQAKKFKVKNLIITDPKSFQILREKIKNNKINIFNNFSKLSLILSKKTDYLMSSITGIDGLNPTLKSIKYTNTIAIANKESIICGWNLIKRELDKNKTRFIPVDSEHFSLWYGLRPFKSETIEKIYLTASGGPLFNLPLNKFKNVSINQALKHPNWSMGKKISIDSATMMNKVYEVIEAKNIFNLSYDKIKILIHPQSYVHTLIKFQNGLIKIIAHDTTMKIPIFNTIYLNSSKYFK

SEQ ID NO: 85685 - protein, 281 aa, Unknown
  Bacterial polypetide isolated from the Sargasso Sea
AARAGKRVMLANKESLVMSGHLFMEAVSSAGAELLPIDSEHNAIFQCMPADFERGLNSVGVSKILLTASGGPFRTMPIDRLSSVTPNEAVAHPNWVMGRKISVDSATMMNKGLEVIEACWLFDTSPESIEVVVHPQSVVHSMVQYVDGSVLAQLGNPDMRTPIAYSLAWPERIDAGVDTLDMFEIGRLDFERPDYDRFPCLRLARDAVNAGGTAPAILNAANEIAVEAFLNSEIGFMQIPELVEAALSEVDTRVADSLDTILEADSAARQSVRLKIAGTVQ

SEQ ID NO: 85686 - protein, 312 aa, Unknown
  Bacterial polypetide isolated from the Sargasso Sea
CRIHQPAHAVMGDLDAAAVLGERLADLPAVRVESDASVLDDLVAAPTVDTVVAGIVGFTGLRPTLSAARAGKTILLANKEALVSAGSLFMEAVRQGEATLLPVDSEHNAMHQCLPVASDGRPDMTDVEKILLTASGGPFRGRSRSSLDAVTPEEACAHPNWSMGPKISVDSATLSNKGLELAEACWLFDRRPDEIEIVVHPQSIVHSMIRYRDGSVLAQLGQPDMRTPIAYCLAWPERVDAGVAALDIVSAGRLDFEAPDLEAFPCLALAQWAITQPGGMCVFSAANEIAVAAFLSGEIRFTDIDRVMTLRE

SEQ ID NO: 85687 - protein, 212 aa, Unknown
  Bacterial polypetide isolated from the Sargasso Sea
KIVKKRIDFTMCAISGLAGLKPTVDAIKFSKSIGIANKESIICGWQFINKALKKNKTNFIPIDSEHFSIWTLLKNQNLNNVKKIYLTASGGPFLHKKKSEIINIKPYYALKHPNWKMGKKISIDSATLMNKIFEVIEAKKIFNLDIKKFKIIIHPKSYVHAIVHFNNGLVKFLAHDTNMAVPIMNSLYMNGKSFKYKDSNVKFELLNGLNFI

SEQ ID NO: 85688 - protein, 284 aa, Unknown
  Bacterial polypetide isolated from the Sargasso Sea
MKNIVLLGATGSIGKSCLSVIRQNKEDFHLYGIGFGSNVDKAQEIIQEFNPNYIFAAQSQADRSHNFWQVNSNILSNEDELQGLIQDPNVDIVISAISGFAGLKASFFAIEAGRTILIANKESIVAAGDILMPLAKKKNAEIIPVDSEHNALYQCLPLEKNLNEISKILITASGGPFREDSLSDLRGVSLNDALKHPTWSMGAKITIDSATLVNKCLELIEAHYLFNIPESQIEIVVHPQSIIHSMITFIDGSTIAQMSNPSMEVPISNALGMGKRLPINLRRL

SEQ ID NO: 85689 - protein, 241 aa, Unknown
  Bacterial polypetide isolated from the Sargasso Sea
MKDLIILGSTGSIGISTLNLIRKDKKNFNVKLLTTNNNIHKIYKQAVEFKVKEIVIFNKQKYIKFSKRFKKKKIKVFFSIEEVYKKRNNKVFLTINAISGIDGLEPTLNIIKYSKNIAIANKESIICGWKFIKKELKKNKSNFIPLDSEHFSIWSLLNGDNVNNIKKIYLTASGGPFLRKKLSQVKNIQPKYALKHPNWKMGKKISIDSATMMNKIFEIIEAVNIFNLNTKKFDILIHPKS

SEQ ID NO: 85690 - protein, 230 aa, Unknown
  Bacterial polypetide isolated from the Sargasso Sea
GATGSIGASTLRVMEHNPADFHLYGLVANASVDKMLALCVRYQPDYAHMVDERAAMQLKAQLPSHCITQVTTGAAALNALVTDSKTDTVMAAIVGAAGLVPTFDAVKAGKRVLLANKEALVMSGELFMNTAKSSGATVLPVDSEHNAIFQCLPLQVQTELGYCDLNEHGISHILLTGSGGPFLQADLKLLSTMTPAQACNHPNWSMGPKISVDSATMMNKGLEFIEARWL

SEQ ID NO: 85691 - protein, 283 aa, Unknown
  Bacterial polypetide isolated from the Sargasso Sea
MKKLALLGSTGSIGLNTLDVVRDFPEQLRIEALSCRSSIEQLTEQITEFQPKTVCVDKDEQARELREIFPDKKFVCGMKGLIQISSDPGADMVVSGIVGAAGLKPTFSALKAGKTVALANKEPLVMAGELFMQTAIKAGAKLLPADSEHNAIFQALNNEPTESIARLILTASGGSLRDHPLNDFKHITPAQALDHPNWEMGRKITIDSATMMNKGLEIIEAHWLFDTPVQNIEVVMHRESIIHSMVEFIDGSFLAQMGLPDMRVPLAHCLGWPERLPLKIPRM

SEQ ID NO: 85692 - protein, 178 aa, Unknown
  Bacterial polypetide isolated from the Sargasso Sea
KKITIDSATMMNKGLEVIEAHWLFNMDYPNIEIVVHPQSIIHSMVQFKDGSVKAQLGVPDMKIPIQYALTYPRHFPSNWERLDFKKVGDLTFEAPNFERFPCLSLAYDALEQKGSSPAVLNFANDYSVFKFLKDEIKFTDIPKIIALAIKNHEWNENPNLSDLRDLDFWTKDFVKNFD

SEQ ID NO: 85693 - protein, 283 aa, Unknown
  Bacterial polypetide isolated from the Sargasso Sea
LKLIRYTKKIAIANKESIICGWNLINKELTKNKTLFIPVDSEHFSIYQLIGEKHAILKKIIITASGGPFLNKKNKKKIRVSEALKHPNWRMGKKITIDSATLMNKVFEVIEAKKIFNIKYNNIDIVINPNSYVHAILIFNNGIIKILAHEPNMKIPLFNSIYENKSIIDFNNNLDLNKINNLNFSKPDIKRFKSLKILRQLPHKDSLFETILITTNDELVHMFLNKQIEYEKLVLYLIKIINFKIFKKYYKIRPKSVKQILEIRYLVKKLVHEYIRKTKKKFY

SEQ ID NO: 85694 - protein, 216 aa, Unknown
  Bacterial polypetide isolated from the Sargasso Sea
MKNILLLGATGSIGTSVLSVIKQNKEKLNLYGIAQESNIDKALAISKDFSPKYIYFNEKHNLPDCEFLDKKTKLLFEKEELETLINDPNIDYIVSAISGFAGLESTLMAAKTGKKILLANKESIVVAGELIIPIAEHYQSKIIPIDSEHNAIFQCLDDDKNIDDVSKIIITASGGPFVYKDLKDLVNVTKSEALKHPNWNMGSKISIDSATLVNKC

SEQ ID NO: 85695 - protein, 247 aa, Unknown
  Bacterial polypetide isolated from the Sargasso Sea
MKKNISILGSTGSIGINSLKIFSKKKKLFKIYILAANKNYKLICKQIYQFNPEIFFVNDLKVYEKVKKKFKNYKVRIIKDIDTKKNYFKKSDITIAAIPGIAGLKPTVELIKKSKKILIANKESVICGWSLIKKTASKHNTHIIPVDSEHFSIMKLLENEKKNNVKKIYLTASGGPFLNLNISKLKSVKPHEAIKHPKWKMGKKISIDSATLMNKMLEVIEAHKLFSIEIDKFEIVIHPRVINSCNY

SEQ ID NO: 85696 - protein, 220 aa, Unknown
  Bacterial polypetide isolated from the Sargasso Sea
MKYITVLGSTGSIGTQTLEIASEQPDKFKAVALSAGRNINLLTEQVKTHKPEVVAIEDESLIEDLKDNINNLDLDNAPLVLGGKQGINAVAAWDKADTVVTGIVGCAGLIPTMSAINAGKNIALANKETLIAAGPIVIPALKKNNSRLLPADSEHSAIFQCLQGLPNYENADFSTGEMPKGLKAIHLTASGGAFRDWAVEDLKHVTVEDATSHPNWDMGK

SEQ ID NO: 85697 - protein, 246 aa, Unknown
  Bacterial polypetide isolated from the Sargasso Sea
MQKIVKKKIDYTMCAISGLAGLKPTVDAIKFSKTIGIANKESIICGWQFINKALKKNKTNFIPIDSEHFSIWTLLKDQNLNNIKRIYLTASGGPFLYKKKSEIINIKPYYALKHPNWKMGKKISIDSATLMNKIFEVIEAKKIFNLDIKKFKIIIHPKSYVHAIVHFNNGLVKFLAHDTSMAVPIMNSLYINGKPFKYKDGNVKFESLNGLNFINPNVKKFPVVKLLNLIKNKPSYFETILISIND

SEQ ID NO: 85698 - protein, 298 aa, Unknown
  Bacterial polypetide isolated from the Sargasso Sea
FDIDFDLVVNGISGFAGIKPTFVVIEKGKDIAIANKETIVSGGNLIIDKSKLSGSKIIPIDSEHNALFQLMKNYELHEIDKITITASGGPFRRDTYKELSNRKYSEALNHPTWNMGTKNTIDSASLMNKGLEVIEASVLFSLPSNKISVLVHPESIIHGILHLIDGGIISYMSQPDMRVPIYNAMNFPYTFKHFLPSYKFGNLSFHDLNENIFPSIKIARYALEKGFIATNFFNAANEIAVESFIKNEINFTTIFSIVENVTKLSKPGDPKSIEDVFEYDKLAREYALNEVIKYSNDR

SEQ ID NO: 85699 - protein, 250 aa, Unknown
  Bacterial polypetide isolated from the Sargasso Sea
MSHKKNIILLGATGSIGQSSLRLIRKNKEKFNLLGVSAHNNVKLLSQIVNEFDVPNVVLSNPKNALDYFGKNELQLGPSSLIELAKIKCDVVISGIIGMTGLHSAFAAINVGNDLAIANKETLVSAGNFFLDNSNKNRGKILPVDSEHSAIFQCLDKNNFSNVDYITLTASGGPFLNTPLSEFKNIQIKDAIKHPVWKMGKKISVDSATMFNKALEIIEASVLFNIESDKIEVIIHPEHIIHGLVHYKDG

SEQ ID NO: 85700 - protein, 162 aa, Unknown
  Bacterial polypetide isolated from the Sargasso Sea
RWLFNTKKDQLKVVIHPQSVIHSMVQYRDGSVIAQMGNPDMRTPIAHCMSYPQRIDAGVEPLDFFKVGQLSFCEPDFVRFPCLRLAMQACEKGQEATTVLNAANEIAVDAFLKGQIRFTDIADVNHHCLDSVQQTRLATIDDILQLDDQARNTAKSFINVLN

SEQ ID NO: 85701 - protein, 182 aa, Unknown
  Bacterial polypetide isolated from the Sargasso Sea
KIILTGSGGPFRTRPINTFMDIEVSEALNHPNWEMGKKITIDSATMMNKGLEVIEAFWLFNIEVNMIDIVVHPQSIIHSMVEFKDSSIKAQMGVPDMKVPIQYALTYPNHISAPWERLDLKLIGDLSFEAPDFDRFPCIKLAYMSLDRMGSTPAILNMANDYSVYKFLNSEIKFTEIPKIIE

SEQ ID NO: 85702 - protein, 302 aa, Unknown
  Bacterial polypetide isolated from the Sargasso Sea
ELKLCSSGIVGAAALKPTLAAIESGKKILLANKESLIMSGPLMINAAKKSGAIIIPVDSEHNAILQIMTTMGLDFNNIQNSKQNERINKITLTASGGPFLDFTKNQLSRVTPAQAIKHPKWKMGKKISVDSASMMNKGLEIIEAAILFNLQPSQINILIHPQSVVHALVSFSDGSVISHMSNHDMRVAISYALSWPKRYDIDLDELNLDTVNNLSFKKVRKNQFKCLDLCLKALKLGNNAPTVLNAANEVAVEKFLENKIKFIDIPVIIEHALSNMRCMRNNTLKSILACDQLTRDQVSEYI

SEQ ID NO: 85703 - protein, 266 aa, Unknown
  Bacterial polypetide isolated from the Sargasso Sea
ADEFSVPFACLEHPPPYEASFPENTELLCGQEGIQAMAALPEADLIVVAVVGAAGLVPTLSAVKEGKDVVLANKEALVVGGELVTQTAARHGARLIPADSEHNAVFQCLHGQPEKSLDSIILTASGGPFRDLPEEDFQSITPERALSHPNWSMGKKISIDSATMANKALELIEAHWLFGLPPEKLEVVVHPSSLVHAIVRFVDGCCLAQLSPPSMTFALQNALLYPERVPGVDESMDLSNPLDLSFTPPCYKKFPCLRLGTDALLK

SEQ ID NO: 85704 - protein, 233 aa, Unknown
  Bacterial polypetide isolated from the Sargasso Sea
KKKKSRVFPVDSEPSAIWQCIEGEERKISKIILTASGGIFRDKKFDELKNITPKDATSHPNWNMGKKITVDSSTMMNKIFEIVETSYMFNIPFENIDVLIHRQSIVHSMVEFFDGSIKAQLSKADMKLPIQYALDFPNFNLNYENKLDFSEIKNLTFSPVDRSKYPCYDFSIDYIKKGKLYISALSILDEILVNLFLDEKISYVSIPLYLEKFLDDEKFDQNFTIDNIIEVRE

SEQ ID NO: 85705 - protein, 219 aa, Unknown
  Bacterial polypetide isolated from the Sargasso Sea
MKKFISILGSTGSIGVTSLNILNKKKKLFKINILAADKNFNTICKQIKKYKPIIFAINNKKILFKVKKKFKNSNCKIIHLNEINKYNFLNSDILISAIPGIAGLTPTINVLKKSKKLLIANKESVICGWKFIYKIVKKKKIKVIPIDSEHYGIMSLIRGQNINSISKIYLTASGGPFLNYKISKIKNVSPQKALKHPRWKMGKKISIDSATLMNKILEL

SEQ ID NO: 85706 - protein, 283 aa, Unknown
  Bacterial polypetide isolated from the Sargasso Sea
KNITLLSSQIDEFSPEYVVVHHEEDAISLNKKYPKLTVLYGQDGLNSLAAVNADMILVAISGTTAIEPTYTAIQAKTPIALACKEVLVSAGHIIMEKAKSLNCPILPVDSEHAALKQCLSSVNESLDDVRQVILTASGGPFWTKDVKEFDAITPEMALKHPNWDMGKKISIDSATLMNKGLEIIEAHHLFNIPYDKINALIHPQSIVHAIVEFNDGTMLSQMSSADMRLPIQYALSYPQKWSNPWPPLSLTEMNDLSFHPVNTDAFPLFQLAIDCGKEGGLLP

SEQ ID NO: 85707 - protein, 257 aa, Unknown
  Bacterial polypetide isolated from the Sargasso Sea
MKKKIAILGSTGSIGKQTLDIIKNNKNYFDIILLSTNKNVKEISKQVKLFKPKNLIINDTKKFNLFKKKNKKINIFNNYKCFKKIFKKKVDYAMSSISGFSGLQPTIDIIKYTRTIAIANKESIICGWNLIDRQLKKNKTQFVPIDSEHFSIWSLLYNKKENIDKIYITASGGPFLNKKINTLKNIKPMHAINHPRWKMGKKISVDSATMINKVFEILEAKKIFNISLKKLKILLHPDSYVHAIVKFKNGLTKMFIH

SEQ ID NO: 85708 - protein, 261 aa, Unknown
  Bacterial polypetide isolated from the Sargasso Sea
LKVENILVSNKKKFLKLKDKLKKSNIKIFNNFKDFNKIIKKKLDYTMCAISGLDGLNPTINIIKSTKNIAIANKESIICGWNLIDKELKKYKTKFIPVDSEHFSIWSSINKINQNLIDQVILTASGGPFLKKNNKFLKKATIKSALKHPNWKMGKKISIDSATLMNKVFEFIEAMRIFDLKKEKLSILIHPKSYVHSIVKFSNGLINITAHDTNMKIPIFNSIYFPNFKKIITKNIDYEVLNNLSLFTPSYKKFPSLKLIN

SEQ ID NO: 85709 - protein, 256 aa, Unknown
  Bacterial polypetide isolated from the Sargasso Sea
MNKKKNIILLGATGSIGETSLRLLRKNKEKFNLIGVSAHDNVESLSKIVNEFDVPNVVLSNPKNAKLYFGKYELNVGQYCLVELAKLSCDVVISGIIGMSGLYPAFAAISAGNNLAMANKETLVSAGKIFMEKSCEKKVKIFPVDSEHSAIFQCLEKNNISNIDFITLTASGGPFLNTPLGNFENIKPKDAIKHPVWKMGKKISIDSATMFNKALEIIEASVLFNIRYDKIEVIVHPEHIIHGLVHYKDGSILANL

SEQ ID NO: 85710 - protein, 173 aa, Unknown
  Bacterial polypetide isolated from the Sargasso Sea
MNKGLEIIEAAILFNLLPNQINVLIHPQSIVHALVSFSDGSVISHMSNHDMRVAISYALSWPKRYDIDIEKLKHKSFSNLSFEKVKKNQFKCLDLCTKALKLGHNAPTVLNAANEVAVEKFLENKIKFIDIPVIIEHALNNMKLTKNNTLKSILACDKLTRDQISDYIKIRWK

SEQ ID NO: 85711 - protein, 194 aa, Unknown
  Bacterial polypetide isolated from the Sargasso Sea
MKYITVLGSTGSIGTQTLEIASELPGKFKAVALSAGRNINLLTEQVKTHRPEVVAIEDENLIEDLKDNIKNLNLDSAPLVLGGKEGINEVAAWDKADTVVTGIVGCAGLIPTMSAINAGKNIALANKETLIAAGPIVIPALKKNNSRLLPADSEHSAIFQCLQGLPNYEHADFSTGEMPKGLKAIHLTASGGAS

SEQ ID NO: 85712 - protein, 266 aa, Unknown
  Bacterial polypetide isolated from the Sargasso Sea
IGKSLLRIVEKDKKNFKIELLTANTNYKDLINQAKKFKVKNIIITDLESFNKAKLIIKNKQFNIFQNFDYLKKILPKKVDYVMSAISGIGGLLPTHKIINRTKVIAIANKEAIICGWPLIKKELKKNKTKFIPVDSEHFSIFSLLDNNIKSEVEKIYITASGGPFINLPKSHFKKIKISEALKHPNWNMGKKITIDSATLMNKVFEVIEAKNIFDIGYDKISILTHPKSYVHTIIKFKNGLSKLLIHEPDMTIPIYNSVYLQENKN

SEQ ID NO: 85713 - protein, 168 aa, Unknown
  Bacterial polypetide isolated from the Sargasso Sea
MNKGLEVIEAYWLFNLDVSMIDIIVHPQSIIHSMVEFKDSSIKAQIGVPDMKVPIQYALTYPNHLSAPWERLDFKLLGDLSFEAPDFDRFPCIQLAYMSLDRMGSTPAVLNMANDYSVYKFLNSEIKFTDIPKIIEAAMKYHQWVEKPDLDYIKELDNWTKDFVNNFD

SEQ ID NO: 85714 - protein, 251 aa, Unknown
  Bacterial polypetide isolated from the Sargasso Sea
TNLADKTDVKIYPVDSEHFSIWQCLVGEDTKEINKIILTGSGGPFRELPIEKFNTITLDQALNHPNWEMGKKITIDSATMMNKGLEVIEAQWLFDMPTEKIKIVIHPQSIIHSMVEFKDKSIKAQLGLPDMKIPIQYALTYPSHCETDWDELDLTEIQSLTFEKPDFIKFPCMRLAFDVLNTGGTAPAVLNVANEQAVYRFLNQEINFNEIPSIIEMACEKHDFVSEPSLDDILNIEKWSTDFVKSYHSKS

SEQ ID NO: 85715 - protein, 295 aa, Unknown
  Bacterial polypetide isolated from the Sargasso Sea
HLKDQFEVKYLSSNTNYELLIEQIEIFKPKAVCIVSKEAYKIVKKEVNNIDVKVLAGRQGLLELAKSEDVDIMLNALVGAAGMEPTLVAIESGIDVALANKESLVMAGDIINKAMKKTGAKIFPVDSEHSALWQCMVGEQLSDIDRIILTGSGGPFRMRAINTFGDITIEDALNHPNWDMGNKITIDSATMMNKGLEVIEAYWLFGFKPENIDIVVHPQSIIHSMIEMKDGAIKAQIGIPDMKVPIQYALTYPNHLSAPWERLNFFNCGDLTFEEPDFEKFPLIQVAYRALEMAG

SEQ ID NO: 85716 - protein, 194 aa, Unknown
  Bacterial polypetide isolated from the Sargasso Sea
MKIIIFGSTGSIGQSTLSLIRILKNTHNFEILALTGNDNIDQLCKDAIEFKVKRVVTANKNYIFQLKQKLSSHNVEIYAGEEAILDTARMGADWIISAIVGFAGVPPTIEAVKYCKIVAVANKESLVCAGKLLIDTANTYKSKLLPVDSEHNAIFQCINSENPKTIKKVILTASGGPFRNFTLSEMANVTVLKL

SEQ ID NO: 85717 - protein, 195 aa, Unknown
  Bacterial polypetide isolated from the Sargasso Sea
LREARKTKSLIIPIDSEHNALLQIISIFGLNYIHGKKSLPQNIDSISLTASGGPFLGYNNRMLSQVTPNQAIKHPNWKMGKKISIDSATMMNKGLEVIEASLLFNINPDKINVYIHPQSLIHALITFYDGSTLSHISYHDMKIPISYALNWPNRQRSSKKMNNLNGTYELRKIKKSDYPCYDLCIEALKIGKNAT

SEQ ID NO: 85718 - protein, 257 aa, Unknown
  Bacterial polypetide isolated from the Sargasso Sea
MTKNIFLLGSTGSIGDAALKVLKKDKKNFNIKLLTTNSNVKKIYDQAISLNVKEIVIFDKKEYYNNYKKFSLKNIKIYSSIKEAFKKKKRKSYLTINAISGIDGLEPTLDIIKYSRNLAIANKESIICGWKFLNKELLKHKTGFIPLDSEHFSIWSLIKNEKKKNLNRIYLTASGGPFLNSKLNKIKNIKPKFALKHPNWKMGKKISIDSATMMNKIFEVIEAIKIFDLNPEQIKILIHPKSYLHAIVNFKNGLTKL

SEQ ID NO: 85719 - protein, 262 aa, Unknown
  Bacterial polypetide isolated from the Sargasso Sea
IICGWSLIKKELKKHKTKFIPVDSEHFSIFSLLDNSGKNDIEEIYITASGGPFRNLPKKKFKNIKLKDALKHPNWRMGKKITIDSATLMNKVFEVIEAKNIFNSSYDKISILIHPKSYVHAIVKFKNGLIKFLIHEPDMKIPIYNSIYYKRNKSIKTRPLDFKILNNLELKKVEKTKFPLVKLLDKIPNRSSLFETILITINDYLVYKFLEKKINFQELNRLIYKISNYKEFQKFKKINPKNLKEIYNLRDYVRLKIKSLGI

SEQ ID NO: 85720 - protein, 258 aa, Unknown
  Bacterial polypetide isolated from the Sargasso Sea
MKYITVLGSTGSIGTQTLEIASEQPDKFKAVALSAGRNINLLTEQVKTHKPEVVAIEDESLIEDLKDNINNLDLDDSPLILGGKQGINAVAAWDKADTVVTGIVGCAGLIPTMSAINAGKNIALANKETLIAAGPIVIPALKKNNSRLLPADSEHSAIFQCLQGLPNYENADFSTGEMPKGLKAIHLTASGGAFRDWAVEDLKHVTVEDATSHPNWDMGKKITVDSATLMNKGLEVIEAHYLFGTSYENIEIVIHPQS

SEQ ID NO: 85721 - protein, 176 aa, Unknown
  Bacterial polypetide isolated from the Sargasso Sea
MKYITVLGSTGSIGTQTLEIASEQPDKFKAVALSAGRNINLLTEQVKTHKPEVVAIEDENLIEDLKDNINNLDLDRAPLVLSGKEGINAVAAWDKADTVVTGIVGCAGLIPTMSAINAGKNIALANKETLIAAGPIVIPALKKNNSRLLPADSEHSAIFQCLQGLPNYENADFSTG

SEQ ID NO: 85722 - protein, 201 aa, Unknown
  Bacterial polypetide isolated from the Sargasso Sea
MGTVAYSTASTHYCRCCRLPCCCSARERDMQKRLTLLGSTGSIGDSTLDVVARHPERFSVYALTAHRNGDKLVEQCLRFQPEVAVVGDADTAAQVAAKLREAGCKTEVTYGPQALVDVSESNGCDTVVAAIVGAAGLAPSLAAARAGKRILLANKEALVMSGAIFMDAVRDNGAVLLPVDSEHNAIFQCLPREAALHGGVS

SEQ ID NO: 85723 - protein, 163 aa, Unknown
  Bacterial polypetide isolated from the Sargasso Sea
YENIEIVIHPQSVIHSMIEMEDSSVLAQLGWPDMKLPILYAMSWPERFKTNWKRLNLSEIGKLTFKEPDEFKYPCMGLAYAAGKSSGTMPAVLNAANEMAVEQFLKEKISFQEIPTFISKACESHMENLNLSPELEDILEIDNWARLFVEQEIKKGKKYVSIG

SEQ ID NO: 85724 - protein, 301 aa, Unknown
  Bacterial polypetide isolated from the Sargasso Sea
SSSYEKDYTIASIVGIAGLKSAYNSIGNTKNLALANKEAIVCAGKIFMNRAKKMNTNILPLDSEHNALFQIIQNSNIKAIKNIILTASGGPFWNKKKNFGTISVNEALKHPNWKMGRKISIDSATMINKVLEKIEAAILFSLDFDKIDIVIHPSSIVHGVVNFIDGNSLMLLSKPDMKIPISCALNWPKRVKTNINSIDLKKIKKLDFFDINSKTFPSLSLFKYLYDNKINDGKLIVLNASNEVAVKSFLSKDIKFLDIIKVIKNSLLSFNCAAPKNINDVFDIHDEASKISYDYINKLVT

SEQ ID NO: 85725 - protein, 149 aa, Unknown
  Bacterial polypetide isolated from the Sargasso Sea
MIDIVVHPQSIIHSMVEFKDSSIKAQMGVPDMKVPIQYALTYPNHISAPWERLDFKLIGDLSFEAPDFDRFPCIKLAYMSLDRMGSTPAILNIANDYSVYKFLNSEIKFTEIPKIIEAAMKHHQWVEKPDLDYIRELDNWTKDFVNNFD

SEQ ID NO: 85726 - protein, 290 aa, Unknown
  Bacterial polypetide isolated from the Sargasso Sea
SIGKSLINIIKKDKKKFDIVLLTAEKNYSELLKQAKLFKVKNLIISDKKKYLDLIKKKKVKNLKIYNNFDQLNSILKKKVDYSMCAISGINGLEPSLKIIKYSKKLALANKESIICGWNLIKKELKKNKTQFLPVDSEHFSIWSLIDKESKNIIDKVFITASGGPFLKWPLSKIKNASPTNALKHPNWSMGKKISIDSATMMNKVFEVIETQKIFNLPKEKIEILVHEKSYVHAIVEFKNGLKKLLAHDTNMRIPIFNTLYHNTTKTIKSDSLDIKKFNNLNFRPVDKKK

SEQ ID NO: 85727 - protein, 299 aa, Unknown
  Bacterial polypetide isolated from the Sargasso Sea
YKKINYLINKYKPSYFVIFDNHTYQKIKKKKYKGKVKILNSEQYFKYNFKKSDVSILAIPGIAGLQPTLKSLKISKKILIANKESVICGWDLINKYKKKYKVKIFPVDSEHFSIMNMLNKTNKKNIEKIYLTASGGPFLNYPLKMMRNIKPAQAINHPKWKMGKKISVDSATLMNKIFEVIEASKLFSIDLKKIDILIHPQSLVHAIIKFKNGLYKFLYFETDMSIPIGNALFEDKFEVSKFSKLNYKLKKNDLTENLNFFKVDHKKFPAIKLKPKLNQYNSTSIILNAANEIFVDQFL

SEQ ID NO: 85728 - protein, 283 aa, Unknown
  Bacterial polypetide isolated from the Sargasso Sea
KNIKIYNNFESLNKIFKNKVDYTISAITGIDGLLPTLKIIKHTQKIAIANKEAIICGWHILKKELKKYGTEFVPVDSEHFSTWYGLKKNKDSIDKIYLTASGGPFINYPLKNFYKINIEQALKHPNWKMGKKISIDSATMMNKVFEIIEAKHIFSIKYKNLSILTHPESYIHSIIKFNNGLIKLIAHKTDMKIPIFNSIYTGNDKFILKHNEIDLSKLNRLNLKKIDLKKFPIVNIIKYLPEYNSLFETIIVSANDELVKLFLTKKIKFTDISKKLMLFIKKP

SEQ ID NO: 85729 - protein, 221 aa, Unknown
  Bacterial polypetide isolated from the Sargasso Sea
LKSITLTASGGPFRNWSLKKMRSATLKQALKHPNWSMGTRITIDSASMFNKALELIEAMHLFGLKFSEVEVIIHPQSIIHSMVNFNDGTTLAQMSLPDMRGPISYSLNYPKRLKIDLESIDFTRINTLEFHEADIEKFPALDIVEKVGKNLDLGVIFNAAKEVALDKFISGEIGFLDMANLVEKTLEESSLTTKLMDAPQSVPDILELNELTREIAKKLKF

SEQ ID NO: 85730 - protein, 252 aa, Unknown
  Bacterial polypetide isolated from the Sargasso Sea
AEILPIDSEHNAIFQCLPHDYEYGNLAASGIRKILLTGSGGPFRERSLDSFSSITIDEASTHPNWSMGRKITIDSATMMNKGLEFIEACWLFGAGADDIDVVIHPQSIIHSMVQYVDGSVIAQMGNPDMRTPIAYGLAHPERIEAGVTPLDFSDIANFSFQTPCFERYPNLKLAIDACKEGQCATTRVNASNEVAVEAFLEGKIQFCDIAKVNDATLNAMPYVSVNSIQQILEQDSLARAKANEIIRGKFQC

SEQ ID NO: 85731 - protein, 255 aa, Unknown
  Bacterial polypetide isolated from the Sargasso Sea
MIKIAILGSTGSIGKSTLNIIRKNKKKFKVILLSANVNGKTLFKQAKEFKVKNVIISNTEKNKYWITKFHNKKIRTFDNFLKFNKIFKKKIDHVINGISGLDGLKPTLDIIKHTNKIAIANKESIICGWNLILKELKQYNTKFIPLDSEHFSLNKLLKNYDNKDVKKIIITASGGPFLNKKINNKKIKINEALKHPNWKMGKKITIDSSTLMNKVFEVIEAKKIFNFELNKIQILINPNSYIHAIIIINNGTIKF

SEQ ID NO: 85732 - protein, 260 aa, Unknown
  Bacterial polypetide isolated from the Sargasso Sea
MKKIIILGSTGSIGKQTLEIIKKDKNKFKILLLSTDKNIKLLSKQIKTFKVKNIVVTNKEKYKVLKKRLKKIQIFPDFKKMDKKLIAKADYTMSAISGIEGLRPTIDIIKKTKRIAIANKESLICGWSLIQKELKKYKTEFIPVDSEHFSIWSVIKDYKKSDIEKVILTASGGPFLNKKIKKNVSLRDAISHPNWSMGKKISIDSATMMNKIFEIIEAKKIFDIGLNKFEILIHPKSYVHAIVKLKNGLIKIVAHDTDMK

SEQ ID NO: 85733 - protein, 241 aa, Unknown
  Bacterial polypetide isolated from the Sargasso Sea
MKNVLLLGATGSIGKSVLSVISQNKESLNLIGISFNKNVLRYQEISEKHSPDFVYIEDHDSFKSLCSTDKERYLNGDEELERLINRDDVDIIVCATSGFAGLKTAYIASKTGKKILLANKESIVVGGDLILPLAKENNSEIIPIDSEHNAIFQCLSGEKGTEDVKSITITASGGPFIDTSLQKLKHVTVEDALNHPNWKMGSKVTIDSATLVNKCLELIEAKYLFDLDEKYFDLVIHPQSI

SEQ ID NO: 85734 - protein, 275 aa, Unknown
  Bacterial polypetide isolated from the Sargasso Sea
ELVGISVNRNVEKANKIIKKHNPKYIYINDKSAKENLLKTEDAVFFEDDKDLSDIFNSSDVDIVISAISGFAGIKSTFHAAKSGKKILLANKESIVAGGSLLIETARENNTELVPIDSEHNAIFQCLPESRSTQDVKQIVITASGGPFHGKNIDELNNVGVQDALNHPNWEMGSKISIDSATLVNKCLELIEACYLFDMDESFFELVIHPESIVHSIVTFNDGSSICQMSNPDMRVPIANAMSYDKRLSIPFQPIDFNNLKLNFESFPNDRAEIV

SEQ ID NO: 85735 - protein, 231 aa, Unknown
  Bacterial polypetide isolated from the Sargasso Sea
PNGLKAIHLTASGGAFRDWSVEDLKHVTVADATSHPNWDMGKKITVDSATLMNKGLEVIEAHYLFGTSYENIKIVIHPQSIIHSMIEMEDSSVLAQLGWPDMKLPILYAMSWPERLETNWKRLNLSEIGQLTFKEPDEFKYPCMGLAYAAGKSSGTMPAVLNAANEMAVEQFLKENISFQEIPTFISKACDSHMENLNLSPELEDILEVDNWARLFVKQEIKKGKKYVSIG

SEQ ID NO: 85736 - protein, 297 aa, Unknown
  Bacterial polypetide isolated from the Sargasso Sea
IVGCAGLIPTMSAINAGKNIALANKETLIAAGPIVIPALKKNKSRLLPADSEHSAIFQCLQGLPNYEYADFSTGEIPQGLKAIHLTASGGAFRDWAVEDLKHVTVADATSHPNWDMGKKITVDSATLMNKGLEVIEAHYLFGTSYENIEIVIHPQSIIHSMIEMEDSSVLAQLGWPDMKLPILYAMSWPERFQTNWKRLDLSEIGQLTFKKPDEFKYPCMGLAYAAGKSSGTMPAVLNAANEIAVEQFLKEKISFQEIPTFISKACESHMENLNLSPELEDILEVDKWARLFVKQEI

SEQ ID NO: 85737 - protein, 257 aa, Unknown
  Bacterial polypetide isolated from the Sargasso Sea
MRETAALKSPKRITVLGSTGSVGTSTLDLVARNREMFTVEALTANQNIKALALQAQQFEAKLAVIGEEDLYADLKSALSGTSIACAAGPEALKEAAARPSELVMAAIVGTAGLAPTLEAVRRGTTIALANKECLVSAGDIFTQAVEDHGAILLPVDSEHSAIYQVFDFDQAKQVTRIILTASGGPFRTREIANMQNVTPAEAVAHPNWEMGAKISVDSATMMNKGLELIEVFHLFPVDKSKIDILVHPQSVIHSLVE

SEQ ID NO: 85738 - protein, 276 aa, Unknown
  Bacterial polypetide isolated from the Sargasso Sea
MLKRRLSIFGSTGSIGRSTLALVDSAADRFTIECLVAGGNYALLAEQALKYRPRIVGLRDETGLAALQAALAGSGIEIVAGQRDCDGLARIPVDIVIAGITGLAGLGSVMAAVETGQTLALANKESLVSAGRIVMQAALKNGARILPLDSEHSAIFQCWAGWQSHHPELLVATDNGLQEISHICLTASGGPFRSLPLADFSAITPAQAVRHPNWSMGQKISVDSATMMNKGLEVIEAAWLFGLASDAIEVLLHPQVAIHGLVYFRDGSVIGQLGTA

SEQ ID NO: 85739 - protein, 233 aa, Unknown
  Bacterial polypetide isolated from the Sargasso Sea
IKYQNKENIKKIYLTASGGPFLNKKKSQLYNIEPKLALKHPNWKMGKKISIDSATLMNKIFEVIEAKKIFNLDINKFKIIIHPKSYVHAIVHFNNGLVKFLAHDTNMSIPIMNSLYANKIFHYKNKSLNISMLNNLNFSEPNKKKFPVIKLINMLPKKITYFETILITINDYLVDKYLNEEINYNSLNFGLIKLIKKRYFTRYYKFGPKNITDVKIMVKRVTTYLNKIKLNEY

SEQ ID NO: 85740 - protein, 250 aa, Unknown
  Bacterial polypetide isolated from the Sargasso Sea
QCLQGLPNYENADFSTGEMPKGLKAIHLTASGGAFRDWAVEDLKHVTVEDATSHPNWDMGKKITVDSATLMNKGLEVIEAHYLFGTSYENIEIVIHPQSIIHSMIEMEDSSVLAQLGWPDMKLPILYAMSWPERFKTNWKRLNLSEIGKLTFKEPDEFKYPCMGLAYAAGKSSGTMPAVLNAANEMAVDQFLKEKISFQEIPTFISKACESHMENLNLSPELEDILEVDNWARLFVKQEIKKGKKYVSIG

SEQ ID NO: 85741 - protein, 279 aa, Unknown
  Bacterial polypetide isolated from the Sargasso Sea
MKKKIAILGSTSSIGKSLLNIINKDKKKFKIELLTANTNYKDLINQATKFDVKNIVITDLSSFKKTKILCKKKKIKIYNNFENLKKILPKKVDYVMSAISGIGGLLPTLRIINRTRLIAIANKEAIICGWPIIKKELKKHKTKFIPVDSEHFSIFSLLGDQKINDVEKIYITASGGPFINLPKSKFKKIKLSDALKHPNWIMGKKITIDSATLMNKVFEVIEAKNIFNIDYDKISILTHPKSYVHTIIKYKSGLSKFLIHEPDMTIPIYNSIYFEEKKI

SEQ ID NO: 85742 - protein, 283 aa, Unknown
  Bacterial polypetide isolated from the Sargasso Sea
MKNILLLGATGSIGKSVLSVINENKSKLNLFGISLNNNLNEANKIIDKFNPSFVYIEDKDAFDYQKESKEIIYLNGDDELKDLINHQDVDIIISAISGFAGLKATHLAASSGKKILLANKESIVAGGDLILPLAKDNNSEIIPIDSEHNAIFQCLSGEKGIDDVKRVTITASGGPFINKKLLDLKNVKKSDALNHPNWKMGSKISIDSATLVNKCLELIEAKYLFDLDEKYFDLVVHPQSIIHSIVTYVDGSSICQLSKPDMRIPIAHALYNENRLIIDFDSI

SEQ ID NO: 85743 - protein, 304 aa, Unknown
  Bacterial polypetide isolated from the Sargasso Sea
NSELLLDQIKEHQPQIVAIDKIDSSHELFDYCHQNNIKVYNGENSSSKIPFQNIDLAINAIVGTSGLQPTVELIKNGIDIALSNKESLVLGGHFIMPLAKKNNVKIIPVDSEHSAIFQCLHGENHSDLKKIILTGSGGPFLEKPLSEFDSISPAQALKHPNWNMGKKISIDSATMMNKALELVEALWLFDIDIEQIEITIHPQSIIHSMVEFIDGSYKAHLGTPDMKVPIQYALTYPARKKLSIDSLDLRDLTLEFQSPDYKRYPILGLVRELINLGGNRVPVMSIANDYIVQKFLDEKISFNQ

SEQ ID NO: 85744 - protein, 239 aa, Unknown
  Bacterial polypetide isolated from the Sargasso Sea
NLFPVDSEHSAIWQCLFGENEKDIEKIILTGSGGPFRTRPIDTFSLITKDDALKHPNWVMGQKITIDSATMMNKGLEVIEAHWLFNIDSSNIEIVVHPQSIIHSMVQFKDGSVKAQLGVPDMKIPIQYALTYPRHLSSNWERLDFKKVGDLTFEAPNFERFPCLSLAYDALEKKGSSPAVLNFANDYSVFRFLKDEIKFTDIPKIIESAMKNHEWVENPNLSNLKDLDFWAKDFVKNFD

SEQ ID NO: 85745 - protein, 265 aa, Unknown
  Bacterial polypetide isolated from the Sargasso Sea
MENKKKITIFGATGSIGDSTLKLIEKNRNKFQIHGITANKNISKLIYISKKFKPNNVVIKDTDQYKYLKNQLSGYDINIECGEKSIVELSKQKVDCVIAGISGIAGLSSVYSAAKSGQNIALANKEALIVLGHLIMPHLKKYKSKIIPIDSEHNAIFQCLKGSNLNEIDQIILTASGGPFLNTPIKKLDDVKVEQALTHPKWRMGKKITIDSATMMNKGLELIEAYWLFGQKKKIIEAIIHPESIVHGLISYIDGSLIAHLAKAD

SEQ ID NO: 85746 - protein, 279 aa, Unknown
  Bacterial polypetide isolated from the Sargasso Sea
MCVGAIVGIAGLAPVYAAVQAGQQIALANKETLVAAGHIIMPLLAQTAATILPVDSEHSAIFQCLRGEQPEAVEDITLTASGGPFRQLTRQQMISVSREQALAHPNWSMGPKVTIDSATLMNKGLELIEAKWLFGLAPDRIKAVIHPQSVIHGLVNFKDGSCLAHLGAADMRIPISYALDYPNRLAWQAETLDLVQLAQLDFAAIDFDRFPCFALARQAMAAEPEAAVILNAANEIAVAAFLADQISYLQIADVVDSALTHFSGCAQTTNIDDVICLDP

SEQ ID NO: 85747 - protein, 276 aa, Unknown
  Bacterial polypetide isolated from the Sargasso Sea
MAVHTGKKVLLANKESIVAGGDLILPIAKKHNTEIVPIDSEHNAIFQCLNGEKGIEDVKEVIITASGGPFLNSSVEDLKNVTLQDALNHPNWKMGTKVTIDSATLVNKCLELIEAKYLFDLDENYFHLVIHPQSIIHSIVTYVDGSSICQMSNPDMKVPIAHALSEKNRLIIDFNSLDFTSLNLTFQEFPKDRMQIQNIAREVCNKGGNLGTVFNAANEVAVESFINGEIKFDEIYEVIYRTFSIDHMSKDLSIESIHDIDTQTRIEAKKVVKSFN

SEQ ID NO: 85748 - protein, 262 aa, Unknown
  Bacterial polypetide isolated from the Sargasso Sea
MCAISGLDGLKPTINIIKSTKNIAIANKESIICGWNLIDNELKKNKTNFIPVDSEHFSIWSNINKINKNLINQVILTASGGPFLKKNNKFLKKATIKSALKHPNWKMGKKISIDSATLMNKVFEFIEAMRIFNLDKHKLSILIHPKSYVHSIIKFNNGLINITAHDTNMKIPIFNSIYLSNFKLIKTKDIDYKVLNNLSLSKPSYKKFPSLKLINFIGNKTSLYETILISANDCLVDLFIKKKIKFTEIIYNLNKILNMKEF

SEQ ID NO: 85749 - protein, 228 aa, Unknown
  Bacterial polypetide isolated from the Sargasso Sea
NDADYYKAKIKNIIITASGGPFIDYNLNDLKRVNANDAIQHPTWNMGKKISVDSSTMMNKGLEIIEAKTLFNLDVNNIKAIIHRQSKIHAFVEFFDGTVISHMSNPDMRIPISYAITYPERMYSDNKGDFSYENFSFEEVNYDKFPCYRLARKVAEMGKNTGLILNAANEISVEYFLKDKISFLDIPNIIEDILDSSDVVDHDTLDSIIENDREIRELTRNYIKTRYS

SEQ ID NO: 85750 - protein, 266 aa, Unknown
  Bacterial polypetide isolated from the Sargasso Sea
MYKDLILLGSTGSIGISTLNVIKKNKKKIKIHLLSTNSNIKKIYEQAVEFNVKKIVIYDPSKLYKYSQLLKKKKIKVFSSISNAMSKNKEKVYLSISAISGINGLKPTMDIIKYSHNLAIANKESIICGWKFIERELKKNNANFIPLDSEHFSVWKLIEGENKKNIKKIYLTASGGPFLNKKLRDIKNIQPKFALKHPNWKMGKKISIDSATMMNKIFEIIEAQKIFDLDIDKFEILIHPKSYVHAIVHFTNGLTRFLAHETTMEI

SEQ ID NO: 85751 - protein, 392 aa, Unknown
  Bacterial polypetide isolated from the Sargasso Sea
MKKKIAIIGSTGSIGKNLLEIISNDINDFKINLLTADKDHKTLLRQAKKFNVTNLIIKNKSSYKVLKKKTSNTNIKVFNSFEHLGLIFKNKIDYVMNSIMGIDGLEPTIKIIKYTKNLAIANKESIICGWNIILKELKKNNTNFIPVDSEHFSIWYGLQNLKATNVEKIYLTASGGPFRKLSLNKFKKIKINQAVSHPNWTMGKKISVDSATMINKVYEVIEAKNIFNIPYQNIEIIIHPKSYIHALIKFTNGLTTIIAHDTTMKIPIFNSLYSKSDKKIFTNTINFKTLNNLNLSKLNSIRYPMIKLLKILPSKSSLFETVIVAANDTLVDLFLNKKINFINIHKELFKILKLKEFNKFKKISPKKLEDVIKLNDYVRLKVLKKVYKFTDV

SEQ ID NO: 85752 - protein, 221 aa, Unknown
  Bacterial polypetide isolated from the Sargasso Sea
MTILGSTGSIGVNALSIPAIEENFSMLALVAGKDVNTLSRQCLKFKPKYAVISDTQMYGELKKNLFGTKIEVKAGYDEINEIASKSSDVVLSAISGSAGIEPTYQAINRTEKLAIANKESIVVAGSLLFDKKINKSTNIIPVDSEHNAIHKLLNYVNYKNLKTITLTASGGPFLNARIKDLENVTLEDALKHPTWVMGKKITIDSAALINKGLELIEATYL

SEQ ID NO: 85753 - protein, 211 aa, Unknown
  Bacterial polypetide isolated from the Sargasso Sea
SGGPFREKTFKDLSEVTLQDALKHPTWSMGTKITIDSATLVNKCLELIEAHYLFQIPESQIEVVVHPQSIIHSMVTYIDGSTIAQMSNPNMEVPIANALGLDHRLPIHFEAINFSELNLSFEPIADGREIIFEMAREVCNKRGNLGVIFNASNEIAVDAFTTQKIDFVDIYKVIQRTFDHFSCSNVSTLEDIFEYDKQARIQAEKVIKSLH

SEQ ID NO: 85754 - protein, 399 aa, Unknown
  Bacterial polypetide isolated from the Sargasso Sea
MTRQKNISILGATGSIGDSTLSVIRQHPDRFRIVSLTCHSSVEKLCELVHEFRPEKVSVHSTSEARHVREAFPELEVFSGKEGLINIAEDPDAQIVVAGIVGSAGLFPTFSAVSSGKNVALANKEPLVMAGRLFIEEASKSGAKILPTDSEHNAIFQVLNGRTQDKIRKLVLTASGGPFRDLPLEQFPHIRLEDALSHPNWEMGNKITIDSATMMNKGLEVIEARWLFDMPVEKIEVVIHRESIIHSMVEFCDGSTLAQLGFPDMRIPISYCLGWPDRLELELPNLDLTKIGSLNFSSVEPTRYPCLELAIDAARMDKSVPAVLNGANEAVVESYLKGHLHFVEIAKLLQDVMSEYQNISQKSDCPSYLRDIQTLEDAVKADQWGREEVQQRMQERVAA

SEQ ID NO: 85755 - protein, 174 aa, Unknown
  Bacterial polypetide isolated from the Sargasso Sea
MHLQKKGIAILGSTGSIGTQALEVIESNPNYFDLQVLTAGSNVSLLIKQAKKYKPNTVVIANEEKYLELRNALEDLDIHVYAGSDALSQVVESKEVHVVLTALVGYAGLIPTIKAIEARKTIALANKETLVVAGELIKKIARKYQSNIYPVDSEHSAIFQCLMGEYKNPIEKIY

SEQ ID NO: 85756 - protein, 230 aa, Unknown
  Bacterial polypetide isolated from the Sargasso Sea
AISQCIEGNNKDISRIILTASGGAFRDINFNEWKDITPEQAKKHPNWDMGEKITIDSSTMMNKIFEIVETSYLFDVPIEKIEVLIHRESLVHSMVEFSDGSVKAQISKTDMRLPIQHALNYDSQNLNYQNKLDFSKLNNLSFSPVDRKKYPCYDFAIDFIKKGPLYISALSITNEILVDLFLSEKISYISIPKLMNFALDTEKFDDEINFDNIIEIREMIKSKISHKLNL

SEQ ID NO: 85757 - protein, 175 aa, Unknown
  Bacterial polypetide isolated from the Sargasso Sea
DSATMMNKGLEIIEAHYLFNVEESLIDVVIHPQSIVHSLVSYLDGSVLAQLADPDMKIPIAYALSWPKRMDATIPRLDLLKIGSLEFFKPDTKRFPALNLARESIKLGGSSNLVLNAANEVAVAGFLAGKIKFTDIVATVEKVLDKNVETAPKSIEEVIFMDTEIRKYTESILEP

SEQ ID NO: 85758 - protein, 397 aa, Unknown
  Bacterial polypetide isolated from the Sargasso Sea
MRTLVILGATGSIGCNTLDVVAMHPDDYQVLGLTGATQVDKLFAQIQQFTPRYAVMTDPLAADQLRQLVKEANLPTEVWAGAQALCDLAAHPDADMVMAAIVGAAGLLPTLAAVEQGKTVLLANKEALVMSGELFINKVQQHGATLLPIDSEHNAIFQCLPSALQQNTATQKLSDYGISKLLLTGSGGPFLRKDLNEFSAITPAQAVAHPNWVMGQKISVDSATMMNKGLEFIEARWLFNCAADDIQVVIHPQSIIHSMVQYTDGSVLAQLGQPDMRTPIAHALAYPHRIQTTVKPLNFFELADFSFSKPEPQRYPNLYLAITACGYGQGATTALNAANEITVAAFLAGHIRFTDIALLNEKALERFATIKAPDLESILDLDQQARAYMQDQLKKVS

SEQ ID NO: 85759 - protein, 275 aa, Unknown
  Bacterial polypetide isolated from the Sargasso Sea
MRKRIVILGSTGSIGKSTINILKKKKKNFEVVLLTTHKNYKELYKQAKSFNVKNLIISDQKSYAILKAKNKDKKIKIFNNYKDLNKILKKKVDYTMSSISGLQGLEPTLNLIKFTKKIAVANKEAIICGWGLIKDALIKNKTEFIPVDSEHFSIWSLIKKGENKLIDKVYITASGGPFLKLSLNKIKDVSPRKAIKHPNWSMGKKISIDSSTMMNKVFEVIETQRIFDLQKSKIHILIHEKSYVHAIVQFKNGLKKILAHDTNMLIPIFYTIYGK

SEQ ID NO: 85760 - protein, 395 aa, Unknown
  Bacterial polypetide isolated from the Sargasso Sea
MDIIILGSTGTIGRNTLKVIDSSESKYEIFGLTAKSSLKLLAKQICKYKPSYAVVEKKSDIQKIKSLCGDYSKKLKILHGKEGLCRLASFKKGKCLVSAISGAAALEPTYSAVKAGKKVLLANKEALIMSGDLLLREARKTKSLIIPIDSEHNALLQIISIFGLNYIHGKKSLPQNIDSISLTASGGPFLGYNNRMLSQVTPEQAIKHPNWKMGKKISIDSATMMNKGLEVIEASLLFNINPDKINVYIHPQSLIHALITFYDGSTLSHISYHDMKIPISYALNWPNRQRLSKKMNNLNGTYELRKIKKSEYPCYDLCIEALKIGKNATTIINAANEVAVEYFLQNKIKFTDIPVIIKYILKQSKIRNISNISDILKYDIETRNLTEQLIKTKWK

SEQ ID NO: 85761 - protein, 335 aa, Unknown
  Bacterial polypetide isolated from the Sargasso Sea
MLPDRTVASATSMAVSGVEVMSDQSVDFQKPSDAVPLRVAVLGSTGSIGKNTLEVIAASEGRFKVHLLCGHRSVETLVEQAHACRPRWVVVTDSTAAESLGPGALPEGTELVVGPERLEELLGAPEVDRVVSAIVGAAGLRSTWSALAAGKTVALANKETLVTAGPLVTQLAARSGGTIVPVDSEHSAIHQALRSGRRQELRRVVLTASGGPFRTHTKEQISEVTPEQALKHPTWSMGPKITIDSATMMNKALELIEARWLFDLRAEQLGVVVHPQSIIHSFVEFVDGSVIAQLGPPDMKLPIQYALAYPERYDGPAQRFDFSAAQRLELSPPDS

SEQ ID NO: 85762 - protein, 238 aa, Unknown
  Bacterial polypetide isolated from the Sargasso Sea
MKSVSIFGFTGSIGSQALEILRKHKDQFSFDVFVCNSNADKALEIINEFNPEYVFLSDVIAADKLKKSLSSQTKIFADISDVISHLNTNHSDIYLSAISSFDCLELTVLAAESGNKLLLANKESLVVHGEALINISNKAGTQIVPIDSEHYSLMNSLNNVEKSSIDRVFITASGGPFVGQSRQEIEDKKPEEALNHPNWNMGDKITIDSATLVNKCFELIEAKYLFDLDVDKLEVLIQ

SEQ ID NO: 85763 - protein, 363 aa, Unknown
  Bacterial polypetide isolated from the Sargasso Sea
MKKKIAILGSTGSIGKTTFNIIKKNKKDFEVVLLTTNKNIKEILKQAKKLNVNNIIIRSKKHYLKVLKNKKYKKLKIYNDFYAVNKILKKKVDYCMCAITGLPGLEPTLSFIKHSKKIAIANKESIICAWNLIQKELIKYKTEFVPVDSEHFSIMSLIKNSNNEKIDKIYITASGGPFLNLPINKFKKISPKNAVKHPRWSMGKKISVDSATMMNKLFEIIEAKKIFNLKYSQLKILIHPNSYVHAIIKFNNGLTKMLIHDTDMSVPIFNSIYNNASDYYGSKHLNFKLMNNLNLSYVNKTKFPSIKLLKKIPNNNSLFETVLISSNDVLVDCFLNKMIKFTDINNNLKKILNLSEFKQLKRV

SEQ ID NO: 85764 - protein, 382 aa, Unknown
  Bacterial polypetide isolated from the Sargasso Sea
MKKIFILGASGSIGENALSVIDSNKENFELVGISVNRNVEKANKIIKKHNPKYIYINDKLAKENILKTEDVVICEDEKELSDIFNSSDVDIVISAISGFAGIKSTFHAAKSGKKILLANKESIVAGGSLLMETVRENNTELVPIDSEHNAIFQCLPDSRSTQDVKQIVITASGGPFHGKNIDELNNVGVQDALNHPNWEMGSKISIDSATLVNKCLELIEACYLFDMDESFFELVVHPESIVHSIVTFNDGSSICQMSNPDMRVPIANAMSYDKRLSIPFQPIDFNNLKLNFERFPNDRAEIVHLAREAVREDSSKGIYFNAANEIAVENFLKKRITFRQIYEVILRTFDTKEMSKFNSIEDIFEIDQEARNISNMVIKSLT

SEQ ID NO: 85765 - protein, 379 aa, Unknown
  Bacterial polypetide isolated from the Sargasso Sea
STGSIGKTTLKIIRKNKKDFTVKLLSTNNNISTIYNQALEFKVKIVVIKNYKKINKKVFLKFNKKKIKIFSTYEQALKNIRKKVYYTINGISGINGLEPTIQIIPFTQNIAIANKESIICGWKFIYRSLKRYKTNFIPIDSEHFSIWSLLKDEKINNVNKIYLTASGGPFLNQKLSNLKNIKSRYAIKHPNWSMGKKISVDSATMMNKIFEVIEAVNIFNLKLNKFEIIIHPRSYIHAIIKFKNGISKILVHETSMQVPIFNSLYLNNETKVYDNKKFNFKMLNGINFIKPDKIKFPFLKLLKYINVNNTYFEVILVSINDALVNKYLKDEITFISLQKNLFKLIKHPYFTKYYKSSPNNINDIKIMVNRVNTYMKKNY

SEQ ID NO: 85766 - protein, 393 aa, Unknown
  Bacterial polypetide isolated from the Sargasso Sea
MAKKTISIFGCTGSVGTTTLDIIRENKEQFEVKVLTANKNIDDLILFANEFNPEAICFNNASDLEKVKNEINTDKMEYYIGDEGLLECAKICTDIVVAGIVGLAGLRPLLESIKNSKKVCIANKECFVSAGSLIMSEAKKYEAQILPLDSEHSAIFQILNSSNNKLKDIYLTASGGPFYGYTKEELLNVEVQDAIKNPNWTMGKKISVDSATLMNKGLEIIEAKHLFNLSEDNIKVVIHRQSIAHGIVSFEDNTFFAAFGHPNMTHPIKYAIFYPNNYFSVDQKMGINSLNNLTFETINEDEYHALKLVRSVLNEDSKDKSIILNSSNEVAVKAFLDKKIRFIDILVVVEESIEYVSKLISNNSLNYRDNLDNILNLDSLTRQKTEELIKLRF

SEQ ID NO: 85767 - protein, 391 aa, Unknown
  Bacterial polypetide isolated from the Sargasso Sea
MKKLTLLGSTGSIGLNTLDVVRMFPEQFSIEALSCRSSIEQLIEQIREFHPKTVCVDKDEMAGELKQIFPNKEFVFGMQGLEKISTNPDADLVVSGIVGAAGLKPTFSALKAGKTVVLANKEPLVMAGELFMQTAIKAGAKLLPADSEHNAIFQALNNEPVESISRLILTASGGSLRDKPLNEFENITPAQALDHPNWEMGSKITIDSATMMNKGLEVIEAHWLFDTPVQNIQVVMHRESVIHSIVEFVDGSFLAQMGLPDMRVPLAYCLGWPKRLPLKIPRMDLISLKSLNFEEIDPKRFPCLAISIKAAKQGGGAPAVLNGANETLVDSFLEEEINFLDISKNLHSVMQQFYKTISLNEVPSFLKHISTIEDAVKADQWGREQALRYMS

SEQ ID NO: 85768 - protein, 396 aa, Unknown
  Bacterial polypetide isolated from the Sargasso Sea
MQNMVILGATGSIGASTLSVISANPDAYRVYALVANASVDKMLALCLTHRPQVAHMVDSQAALALQAKLPPELNIQVTSGEDELIALVTATEVDTVMAAIVGAAGLVPTLAAVKAGKRVLLANKEALVMSGELFIEATKASGATLLPVDSEHNAIFQCLPEEVQANLGRCDLAASGISHILLTGSGGPFLTAELASLASMTPAQACKHPNWSMGPKISVDSATMMNKGLEFIEARWLFNTQKDQLKVVIHPQSVIHSMVQYRDGSVIAQMGNPDMRTPIAHCMSYPQRIRSGVEPLDFFKVGQLSFCEPDFNRFPCLALAIAACAQGQEATTVLNAANEIAVEAFLQGQIGFTHIAKVNEACLSSVPKRAMTSIDDIIALDAQTRIYAREQLAKFA

SEQ ID NO: 85769 - protein, 280 aa, Unknown
  Bacterial polypetide isolated from the Sargasso Sea
MKNILLLGATGSIGESVLSVISQNKKSLNLFGISLNKNILKSQEILKEYSPDYIFIDDHNSFKSLASEDSERYLNDEGDLEKLINKEEIDIIVCATSGFAGLKAAYLAVKTGKKILLANKESIVVGGDLILPLAKKNNSEIIPIDSEHNAIFQCLSGEKGTEDVKRITITASGGPFINTPIKELKHVTVEDALNHPNWKMGSKVTIDSATLVNKCLELIEAKYLFDMNEKYFELVVHPQSIIHSIVTFIDGSSLCQMSAPDMRVPIAHALSEEQRLPIDF

SEQ ID NO: 85770 - protein, 381 aa, Unknown
  Bacterial polypetide isolated from the Sargasso Sea
MKKHISILGSTGSIGVNALKIADSLNQEINVQYLTAYKNFDLLTLQTKKFKPKSICLVDEKFYKDLKSGINTNQVELLIGREGLLEICKRKDVDVLLNGLVGAAGMGPTLFALEAGVDVALSNKESLVMAGQIIKRAMKLSGAKIFPVDSEHSAIWQCLVGEKNEDIKKIILTGSGGPFRNRSLNTFNNISVDEALKHPNWSMGKKITIDSATMMNKCLEVIEAYWLFEIEPNSIDIIIHPQSIVHSMVEFNDGSIKAQLGVPDMKVPIQYALTYPSHLKSSWERLDLLKCGDLTFQKPDYDRFPSLKLAYQALEKSGTASAALNLSNDYSVSKFLNDKIKFTDIYKINHSALHSHPWVKEPDLNDLTDLDRWVKNHVNNF

SEQ ID NO: 85771 - protein, 385 aa, Unknown
  Bacterial polypetide isolated from the Sargasso Sea
MTRKISILGSTGSIGVNTLSVIDTLKEDFDVVYLSTFQNSKLIIDQAKKYQPKAIVIVDDSNISDVKNALEKDNIEILSGREGLLEISKRDDIDLVMNGLVGSSGMEPTLNALKASVDVALSNKESMVMAGDLINKTMNETGAKIYPVDSEHSAIWQCLVGENIKDVNRIILTGSGGPFRTRDVKTFPEINLTEALNHPNWSMGKKITIDSATMMNKGLEVIEARWLFNLEVNQIDILIHPQSIIHSMVEFKDRSIKAQLGIPDMKIPIQYAITYPRHALAEWEKLDLAKIGNLTFEEKDVDRFPCIDLAYQSLSVGGSAPAVLNVANDNAVYSFLNKRIKFTDIPIIIEKACNAHKLVNNPSLEELLELELWTRDFVMNEVDKT

SEQ ID NO: 85772 - protein, 378 aa, Unknown
  Bacterial polypetide isolated from the Sargasso Sea
MKKNVFVMGSTGSIGVQSLDVISKSNSHKVIGLSCYSNSELLLDQIKEHQPQIVAIDKIDSSHELFDYCHHNNIKVYNGENSSSKIPFQNIDLAINAIVGTSGLKPTVELIKNGIDIALSNKESLVLGGHFIMPLAKKNNVKIIPVDSEHSAIFQCLHGENHSDLKKIILTGSGGPFLEKPLSEFDLISPAQALKHPNWNMGKKISIDSATMMNKALELVEALWLFDIDIEQIEITIHPQSIIHSMVEFIDGSYKAHLGTPDMKVPIQYALTYPARKTLAIDSLDLSDLSLAFQSPDYKRYPILGLVHELIKLGGNRVAVMSIANDYIVQKFLDEKISFNQIFILTKEVVSEFGSDDLPSLEDLLILDENIKLYLEPN

SEQ ID NO: 85773 - protein, 397 aa, Unknown
  Bacterial polypetide isolated from the Sargasso Sea
MHNLVILGASGSIGQSTLKVLRHNPGRWQVLALTAARSVEAMLRDCLEFSPRFAVMVDDAAASELAAQLKTHGSATRVMAGPAALCEVAAHPDAHSVMAAIVGAAGLAPTMAAVRAGKRILLANKEALVMSGAFFMEAVREHGAELLPIDSEHNAIFQCLPEAIQRQPGFCDLAGAGISKILLTGSGGPFRYTDIAELARVTPAQAIAHPNWSMGAKISVDSATMINKGLEYIEARWLFNAAPEQIQVVIHPQSVIHSMVQYKDGSVLAQLGNPDMCTPIAHALAYPARIESGVEPLDFFSVGEFSFIRPDYERYPCLQLAMHACQQGQAATTALNAANEEAVAAFLAERIGFMDIARVNEATMLALGGTAAGSLDDLIALDGAARARAHNLIEELS

SEQ ID NO: 85774 - protein, 380 aa, Unknown
  Bacterial polypetide isolated from the Sargasso Sea
MKHISILGSTGSIGVTTLKVIENLNDKIKIKYLSAFKNADLLIEQMKKFKPKSVAIVDHIAYEKVKSFFLSDSVEILKGREGLLNLASRDDIDLMLNGLVGASGMEPTLNAIKAGVNVALSNKESLVMAGEIINIEMKKTGAKLFPVDSEHSAIWQCMLGEDIEDIENLVITASGGPFRERSIKSFKDITKKEALNHPNWEMGEKITIDSATMMNKGFEVIEAFWLFGFSPSNIKVVVHPQSIIHSMIEFKDGAIKAQLGVPDMKVPIQYALTYPRHLKAPWERLDFFSCGKLTFLEPDLEKFPCISLAFKSLEKLGTMPAALNLANDYAVLRFLKNQIGFLDIHKINKTVMETHGWIEHPNLDDLRELDIWVRKVVFNF

SEQ ID NO: 85775 - protein, 298 aa, Unknown
  Bacterial polypetide isolated from the Sargasso Sea
NASCNIPFDNLDLAINAIVGTAGLKPTIELVNNGIDIALSNKESLVLGGHIIMPLAQKNNVNIIPVDSEHSAIFQCLNGENHKELKKIILTGSGGPFLETPIDKFNTITPDQALKHPNWDMGAKISIDSATMMNKALELIEALWLFNIKLDKIQITIHPQSIVHSMVEFVDGSYKAHLGLPDMKVPIQYALTFPNRTNSSVGSLDFENLNLDFRKPDLERYPILSLVEELINLGGNRVAVMSMANDYIVERFLDRKISFNEIFYLIQEVVNEFASDDLPSLEELFILDKNIQLYLNSN

SEQ ID NO: 85776 - protein, 385 aa, Unknown
  Bacterial polypetide isolated from the Sargasso Sea
MKNILLLGATGSIGKSVLSVINENKSELNLFGISLNNNINEATKIINEFEPSFIYIEDTAALEDFINHNQSKDIIHLNGDGELKDLINHQDVDIIISAISGFAGLKATYLAASSGKKILLANKESIVAGGDLILPLAKESNSEIIPIDSEHNAIFQCLSGEKGVDDVKRVTITASGGPFINKKLLDLKNVKKSDALNHPNWEMGNKISIDSATLVNKCLELIEAKYLFDLDEKYFDLVVHPQSIIHSIVTYVDGSSICQLSKPDMRIPIAHALSNENRLNIDFDSIDFTNLELSFQEFPSDRMGIQDIAREVCNIGGSLGTIFNAANEIAVENFLNEQINFDEIYEVIYRTFDKNNMSNDLSLESINEVDMLTRIEAQKVVKSIA

SEQ ID NO: 85777 - protein, 382 aa, Unknown
  Bacterial polypetide isolated from the Sargasso Sea
MKNILLLGATGSIGKSVLSVINENQSKLNLFGISLNNNLNTANKIIDDFNPSFIHIEDKDTFDNQKASKEIIYLNGDDELKGLINHQDVDIIISAISGFAGLKATHLAASSGKKILLANKESIVAGGDLILPLVKENNSEIIPIDSEHNAIFQCLSGEKGVDDVQRVTITASGGPFINKKLSDLKNVRRSDALNHPNWKMGSKISIDSATLVNKCLELIEAKYLFDLDEKYFDLVVHPQSIIHSIVTYVDGSSICQLSKPDMRIPIAHALSNENRLNIDFDSIDFTNLELSFQEFPSDRIGIQDIAREVCNIGGLLGTIFNAANEIAVESFLNEKIKFDEIYEVIYRTFDKNNMSNELSLETINEIDMLTRIEAKKVVKSIA

SEQ ID NO: 85778 - protein, 382 aa, Unknown
  Bacterial polypetide isolated from the Sargasso Sea
MKNVLLLGATGSIGKSVLSVISQNKESLNLIGISFNKNVSRYQEILEKHSPEYVYIEDHDSFKSLCSKDKERYLNGDEELERLINRDDVDIIVCATSGFAGLKTAYIASKTGKKILLANKESIVAGGDLILPLAKENNTKIIPIDSEHNAIFQCLSGEKGTEDVKSITITASGGPFINAPIQDLQHVTVEDALKHPNWKMGSKVTIDSATLVNKCLELIEARYLFDLDEKYFDLVIHPQSIIHSIVTYIDGSSICQMSSPDMRVPIAHALSEENRIPIDFKDLDFSNLNLSFQEFPSDRSKIQDIARDVCNKGGFLGTVFNAANEIAVESFLNKKINFNEIYEVIYRTFDKNIVSNEVTIESINEVDVQTRIHAQKVVKSFA

SEQ ID NO: 85779 - protein, 152 aa, Unknown
  Bacterial polypetide isolated from the Sargasso Sea
MGSTGSIGTQTLQIAEEFPEQFRVVALTAGRNLDLLVQQIQRHQPELVALANADLLPELQQRLDALGSDRKRPQLVGGPDGLNIAASWESADLVVTGIVGCAGLLPTLAAVRAGKDLALANKETLIAAGPVVLPELKKSGSRLLPADSEHSA

SEQ ID NO: 85780 - protein, 252 aa, Unknown
  Bacterial polypetide isolated from the Sargasso Sea
MPPVKALSVLGSTGSIGTQTLEIVAEFPQRFRVVALTAGRNLELLVQQIRQFQPEVVALAEPALLPELRERLRGLAQPCSPELVAGREGLCQAAAWPTADLVVTGIVGCAGLLPTMAAIEAGKDLALANKETLIAAGPVVLPALERSGSRLLPADSEHSAIFQCLQGTPWADNARLSTGIPTPGLRRIQLTASGGAFRDWEAADLVKATVADATSHPNWSMGRKITVDSASLMNKGLEVIEAHYLYGGIRPH

SEQ ID NO: 85781 - protein, 302 aa, Unknown
  Bacterial polypetide isolated from the Sargasso Sea
MTKKTISIFGSTGSVGNTTLNILRENKEIFDVKILTGYKNISDLASLANEFNPEAICFANESDLELIKNKINYDEVEYYFGDDGLLECAKVSVDIVIAGIVGLAGLPPLLESIKSSKKVCIANKECFVSAGSLIMNEANKYKTQILPLDSEHSAIFQILENTNNVVKDIFLTASGGPFYKYSSDELLKVKVDDAIKNPNWVMGKKISVDSATLMNKGLEIIEAKHLFNLHESKIKVVIHRQSIAHGIVSFEDNTFLTAFGYPDMTHPIKYAIFHPKNYNNKSQKMNIELLNNLSFELVNEEE

SEQ ID NO: 85782 - protein, 265 aa, Unknown
  Bacterial polypetide isolated from the Sargasso Sea
NSRLLPADSEHSAIFQCLQGLPNYENADFSTGEMPKGLKAIHLTASGGAFRDWPVEDLKHVTVEDATSHPNWDMGKKITVDSATLMNKGLEVIEAHYLFGTSYENIEIVIHPQSIIHSMIEMEDSSVLAQLGWPDMKLPILFAMSWPERFKTNWKRLNLSEIGKLTFKEPDEFKYPCMGLAYAAGKSSGTMPAVLNAANEMAVEQFLKEKISFQEIPTFISKACESHMENLNLSPALEDILEVDNWARLFVEQEIKKGKKYLSIG

SEQ ID NO: 85783 - protein, 386 aa, Unknown
  Bacterial polypetide isolated from the Sargasso Sea
MKKNIVILGSTGSIGVNAIDVIKQHPEKFNVIAISTNQSIDLIIQQAKELKPNYVCVKNKEDLNKISNELSDPNLEIIFGEDSLAKLSQIEEADYVLNAIVGSAGLKSSMNAVKSGKKLLLANKEPLVMCGDLLMGIANDNNAIILPIDSEHNAIHQCIESKNKKHIKKIVLTASGGPFLKRDLNTFNSISVKDALKHPTWKMGNKITVDCATMVNKGLEIIEAMHLFEMPSSKVEAIIHPQSLIHSCVFFNDNSVLTQMSISDMRIPIAYCLAWPDRIDSGVSELSLEESSPLNFEQIEEKRYPSFFLTKKIAEEGGIYPCVLNAANEIAVKSFIEEKIKFLDIHTIIEKTVSNFENSNASNIDEVLEYDKKARLFANNLVNDII

SEQ ID NO: 85784 - protein, 323 aa, Unknown
  Bacterial polypetide isolated from the Sargasso Sea
INYDEVEYYFGADGLLECAKVSVDIVIAGIVGLAGLPPLLESIKSSKKVCIANKECFVSAGSLIMNEANKYKTQILPLDSEHSAIFQILENTNNVVKDIFLTASGGPFYKYSSDELLKVKVDDAIKNPNWVMGKKISVDSATLMNKGLEIIEAKHLFNLDESKIKVVIHRQSIAHGIVSFEDNTFLTAFGYPDMTHPVKYAIFHPKNYNNKSQKMNIELLNNLSFELVNEEEYQALKLVRSVLKGNDEEKSIILNSSNEVAVKAFLDKKIRFIDILVVVEESIEYVSKLLGNETINYSDNLDNILYLDSLTRQKTEELIKLRI

SEQ ID NO: 85785 - protein, 316 aa, Unknown
  Bacterial polypetide isolated from the Sargasso Sea
MKTLAIIGSTGSIGTQTLDVVRQFPGHLSITAMAAGDNTEAFNKQIDEFNPKYVNCNNNASITNTNVSFLNLVDMCSLPEVDIVVMATSGLIGLEPTIAALKSGKNVALSNKEPIVVAGDLIKQTEKDSSGNIYPVDSEPSAIWQCIAGSTNVNKLIITGSGGSARDIPIDKLDSLTPEMALKHPNWAMGRKITIDSATMVNKAFEIIESHWLFEMPWENIEAVIHPQSLVHSLVEFDDASIKAQISNPNMHIPIQYALFYPNNVTNPQFTRLDFSKVINMDFYPMDHQRYPAFNIVLEAAKLGGSYPIVVNTADE

SEQ ID NO: 85786 - protein, 293 aa, Unknown
  Bacterial polypetide isolated from the Sargasso Sea
MKNVLLLGATGSIGKSVLSVISQNKESLNLIGISFNKNVSRYQEILEKHAPDFVYIEDHDSFKSLCSKDKERYLNGDEELERLINRDNVDIIVCATSGFAGLKTAYIASKTGKKILLANKESIVAGGDLILPLAKENNSEIIPIDSEHNAIFQCLSGEKGTEDVKSITITASGGPFINTPIQELQHVTVEDALNHPNWKMGSKVTIDSATLVNKCLELIEARYLFDLDEKYFDLVIHPQSIIHSIVTYIDGSSICQMSSPDMRVPIAHALSEENRISIDFKDLDFSSLNLSFQ

SEQ ID NO: 85787 - protein, 371 aa, Unknown
  Bacterial polypetide isolated from the Sargasso Sea
MKNISILGSTGSIGTQTLDEINKKRENFRILGLTCNSNIKLLSKQINQFQAIQFHANKNISTKAKKTSPNAIASDNKLHKLVVATEGINSLNPTLNALNNSKIVGIANKESLLCGYEFIQKSLQKYEGKLIPLDSEPVSVQNLLNENKSFVDKIIITASGGPFRNKTESELSSISPKEASNHPNWKMGKKISVDSATLMNKAFEVLECNLLFDFPLEKIEVIINPSSNIHALIQYKNNTIIASKYKPDMKIPISEFLTGKLSPFSTHVYFKKHELIKPEFENFNASKFPAYQIGLHYGKRRGSWIIALCAADQAAVELFINHKINFIDIPKIIESVLDNHIESNISKLEDIYTVYKSTINETYKLAKSKWN

SEQ ID NO: 85788 - protein, 184 aa, Unknown
  Bacterial polypetide isolated from the Sargasso Sea
MKKIFILGASGSIGENALSVIDSNKEKFELVGISVNKNVEKANKIIKKHNPKYIYINDKSAKENILKTEDAVIYEDDKELSDIFNSSDVDIVISAISGFAGIKSTFHAAKSGKKILLANKESIVAGGSLLMETARENNTELVPIDSEHNAIFQCLPESRSTQDVKQIVITASGGPFHGKNIDEL

SEQ ID NO: 85789 - protein, 409 aa, Unknown
  Bacterial polypetide isolated from the Sargasso Sea
MKYITVLGSTGSIGTQTLEIASEQPDKFKAVALSAGRNINLLTEQVKTHKPEVVAIEDESLIEDLKDNINNLDLNDSPLILGGKQGINAVAAWDKADTVVTGIVGCAGLIPTMSAINAGKNIALANKETLIAAGPIVIPALKKNNSRLLPADSEHSAIFQCLQGLPNYENADFSTGEMPKGLKAIHLTASGGAFRDWAVEDLKHVTVEDATSHPNWDMGKKITVDSATLMNKGLEVIEAHYLFGTSYENIEIVIHPQSIIHSMIEMEDSSVLAQLGWPDMKLPILYAMSWPERFKTNWKRLNLSEIGKLTFKEPDEFKYPCMGLAYAAGKSSGTMPAVLNAANEMAVEQFLKEKISFQEIPTFISKACESHMKNLNLSPELEDILEVDNWARLFVKQEIKKGKKYVSIG

SEQ ID NO: 85790 - protein, 315 aa, Unknown
  Bacterial polypetide isolated from the Sargasso Sea
MGSTGSIGTQTLEIVEEFPQRFRVVALTAGRNLALLCQQVQQHQPEVVALADPALLPELRERLSALNLPRLPELVAGREGLCQAAAWSSADLVVTGIVGCAGLLPTLAAIEAGKDLALANKETLIAAGPVVLPALERSGSRLLPADSEHSAIFQCLQGTPWADNARLSTGVPTPGLRRIQLTASGGAFRDWKAADLAKATVADATSHPNWSMGRKITVDSASLMNKGLEVIEAHYLYGVDYDHIEIVIHPQSIIHSMVELADSSVLAQLGWPDMKLPILYCLSWPERLETPWRRLDLTELGQLSFRAPDPAKYPC

SEQ ID NO: 85791 - protein, 303 aa, Unknown
  Bacterial polypetide isolated from the Sargasso Sea
MKKKIAILGSTGSVGKTTFNIIRENKKYFNVILLTTNQNINEIIKQTKQVKVKNIIVTNKKKYLKLKDKFKKSNIKIFNNFDDLNKIIKKKLDYTMSAISGLDGLKPTISIIKSTKNIAIANKESIICGWNLIDNELKKNKTKFIPVDSEHFSIWSNINKINKNLINQVILTASGGPFLKKNNKFLKKATIKSALKHPNWKMGKKISIDSATLMNKVFEFIEAMRIFNLDKDKLSILVHPKSYVHSIIKFNNGLINITAHDTNMKIPIFNSIYFPNFKRIYTKNIDYKVLNNLSLSKPSFKKF

SEQ ID NO: 85792 - protein, 392 aa, Unknown
  Bacterial polypetide isolated from the Sargasso Sea
MDCKINSKMKKISILGSTGSIGINALSVIDNHLNDFIVVALSAHKNGKLLIEQAKKYQPEFVAVVDLDTANFVEDELRSTNIKILKGREGLLELSSYGSVDLMLNALVGSSGMEPTINALQSEVDVALSNKESLVMAGSIINEIKNKSGAKIFPVDSEHSAIWQCLAGESIKEVNKIILTGSGGPFRTLEIGQFNSITVDRALNHPNWEMGKKITIDSATMMNKGLEVIEAFWLFDISKDMIEIIIHPQSIIHSMVEFKDKSVKAQLGLPDMKIPIQYALTYPNHSNADWDELDLTSIESLTFEKPDFNKFPCMRLAFDALEQEGTVPALLNVVNEYSVYRFLNNEISFIEIPQLIERAFDEHDFIKEPSIDDVLNIEIWAQEFVKSYTPKN

SEQ ID NO: 85793 - protein, 396 aa, Unknown
  Bacterial polypetide isolated from the Sargasso Sea
MQNMVILGATGSIGASTLSVISANPSAYRVYALVANASVDKMLALCLAHRPQVAHMVDPNAALALKTQLPAALNIQVTSGEDELIALVTSSVVDTVMAAIVGAAGLVPTLAAVKAGKRVLLANKEALVMSGELFIEATKRSGATLLPVDSEHNAIFQCLPEEVQANLGRCDLAASGISHILLTGSGGPFLTAELSSLAAMTPAQACKHPNWSMGPKISVDSATMMNKGLEFIEARWLFNTQKDQLKVVIHPQSVIHSMVQYRDGSVIAQMGNPDMRTPIAHCMSYPQRIRSGVEPLDFFKVGQLSFCEPDFNRFPCLALAIAACAQGQEATTVLNAANEIAVEAFLQGKIGFTHIAKVNEACLSSVPKRAMTSIEDIIALDAQTRIYARELLAKFA

SEQ ID NO: 85794 - protein, 382 aa, Unknown
  Bacterial polypetide isolated from the Sargasso Sea
MKNILLLGATGSIGKSVLSVISENKNKFNLMGISFNSNYSKAEEIINNFLPKYVYIDDHDCYVKNTTNNGCTFLNGDSSLEQLIKNTEIDIIICATSGFAGLKAASIAVTTGKKILLANKESIVAGGDLIIPLAKKHSSEIIPIDSEHNAIFQCLSGENGIDDVQKVIITASGGPFLNSSIRDLKNVTLDQALNHPNWEMGNKVTIDSATLVNKCLELIEAKYLFNLEENIFELVVHPQSIIHSVVTYKDGSSICQMSSPDMKIPIANGLSDINRVPISFEQLDFTSLKLSFHEFPNDRKKIQDIAREVCNKGSNLGAVFNAANEIAVESFIKGQINFDKIYDVIYRTFNENNVSNEVSIESINDIDRHTRIEAQKVVKSIS

SEQ ID NO: 85795 - protein, 398 aa, Unknown
  Bacterial polypetide isolated from the Sargasso Sea
MQNRLTLLGSTGSIGDSTLDVVARHPERFSVYALTAHRNGDKLVEQCLRFAPEVAVVGDAETAAHVDAKLRAAGSKTTVLYGPQALVDVSKSDGCDTVVAAIVGAAGMAPSLAAARAGKRILLANKEALVMSGAIFMDAVRDHGAILLPVDSEHNAIFQCMPRDAAEHGGISKIILTASGGPFRTREPATLVDVTPDEACKHPNWVMGRKISVDSATMMNKGLEVIEAHWIFGLPGERIDVLIHPQSVIHSLVSYRDGSVLAQLGNPDMRTPIAHALAFPERVDAGVEQLDLAQIAQLSFEKPDYARFPCLALALKALDEGGIASAALNAANEVAVEAFLERRIGFMAIAATVDAVLNTLPNRTPDGLEDVLAADAEARRLAAEIIAKAPAPRVERTV

SEQ ID NO: 85796 - protein, 339 aa, Unknown
  Bacterial polypetide isolated from the Sargasso Sea
AKKFKPKSIIFGDKSKEKLLNEELKNENIEIYFGEESLNNFLKYCSPDIVLTALVGKSGLIPTINAVKKGIDIALANKETLVIAGEIIRKISKDKNVNIYPVDSEHSAIFQCLVGEDNNKIENIILTASGGPFRNKSLDDLKKISKKEALNHPNWEMGEKITIDSSTLMNKGLEVIEAKYLFDIDIKKIKVVIHPQSIIHSMVEFVDGSIKAQMGEPDMKLPIQYALLSGKRVKNYFNRYNYLKNNTLTFEEPCLKTFNNLKLAFDAGNLGGNAPCVLNASNEIVVDAFLKEKIGYLDMTKVIEESLNKIPYIASPNLEQLIETDLLTRKYTLEKINKI

SEQ ID NO: 85797 - protein, 382 aa, Unknown
  Bacterial polypetide isolated from the Sargasso Sea
MKKIGILGSTGSIGTQALELINNNKNFKVSYLSAFSNVELLIKQAQKFNPDAVCIVQNSEFKKLKDGLKNFDIEILSGNKGIEELASRNNIDLLLNALVGYSGMLPTLRALENGVDVALANKESLVVGGNIIQKELAKNNAKLFPVDSEHSAIWQCLLGENKSEINKIILTGSGGPFRTLPLSEFNNITKEQALKHPNWEMGSKITIDSATMMNKGFEIIEAYWLFNLPIDKIEVIIHPQSIIHSMVEFIDGSIKAQLGTPNMTIPINFALNYPERTFNDFYRFNFLESNLLTFEKPDFKKFKCIKLAYEALKLGGSYLIVLNVVNDICVNAFLNNKINFIDIPNFIDEAMQNHKPNNLTDIESIFNTISNTTEYIKDKLKL

SEQ ID NO: 85798 - protein, 384 aa, Unknown
  Bacterial polypetide isolated from the Sargasso Sea
MNIAILGSTGSIGHSTLEVIRQNKHKFSVTLLTARQNHELLFEQSKEFNPKFVYLEDEQARKLFKENALQKKLETRIIQSQEEFEEVLGSNETEVVVAGMVGIAGLIPVHFAISKGKRVLLANKESYVVAGEYLNKLCSQTGATIFPIDSEHSAIHQCLANTKNMSDVSKIILTGSGGPFLNKDISEFTSITPEQAVNHPVWSMGKKISVDSSTLMNKGLEVIEARWLFGYENIEILIHPEGIIHSLVEFRDNSVLAQLSNPDMKVPIAYGLSYPDRIPSGSTPLHLHEVGSLNFLEPDFKKFPCLKLAIDLLPIGGTSFSILNASNEICVEAFLDGRISYIQIYEIISKVLDRIEIKTVESLDEIFESDKNSRKETSSLINNL

SEQ ID NO: 85799 - protein, 382 aa, Unknown
  Bacterial polypetide isolated from the Sargasso Sea
MKNVLLLGATGSIGKSVLSVISQNKESLNLIGISFNKNISRYQEILEKHSPDYVYIEDHDSFKSLCSKDKERYLNGDEELERLINRDDVDIIVCATSGFAGLKTAYIASKTGKKILLANKESIVAGGDLILSLAKENNTKIIPIDSEHNAIFQCLSGGKGTEDVKSITITASGGPFINASIKELQHVTVEDALNHPNWKMGSKVTIDSATLVNKCLELIEARYLFNLDEKYFDLVIHPQSIIHSIVTYIDGSSICQMSSPDMRVPIAHALSEENRIPIDFKDLDFSNLNLSFQEFPSDRSKIQDIAREVCNKGGFLGTVFNAANEIAVESFLDKKIKFNEIYEVIYRTFDKNIVSNEVTIESINEVDAQTRIHAQKVVKSFA

SEQ ID NO: 85800 - protein, 382 aa, Unknown
  Bacterial polypetide isolated from the Sargasso Sea
MKKIFILGASGSIGENALSVIDSNKENYELVGISVNSNVEKVNKIIKKHNPKYIYINDKSAKENIIKTEDAVICEDEKELYDIFNSSDVDIVISAISGFAGIKSTFHAAKSGKKILLANKESIVAGGSLLMETVRENNTELVPIDSEHNAIFQCLPESRSTQDVKQIVITASGGPFHGKNIDELNNVGVQDALNHPNWEMGSKISIDSATLVNKCLELIEACYLFDMDESFFELVIHPESIVHSIVTFNDGSSICQMSNPDMRVPIANAMSYDKRLSIPFQPIDFNNLKLNFESFPNDRAEIVRLARDAVREDSSKGIYFNAANEVAVENFLKKRITFRQIYEVILRTFDTKEMSKFNSIEDIFEIDQEARNISNMVIKSLT

SEQ ID NO: 85801 - protein, 381 aa, Unknown
  Bacterial polypetide isolated from the Sargasso Sea
MKSISIFGCTGSIGTQALEIIRQNKEQFSFDVFVCNSNTDKALEIVNEFNPKHIFMSDAVASNKLKESLSSGTNVLENISDVIDHLKARQSDIYLSAISSFDCIELTILAAESGNKLLLANKESLVVYGEHLVNISNRSGTKIVPIDSEHYSLMNSLNNIPKNDIDRIFITASGGPFIGQSLNEIANKEPKEALDHPNWSMGDKITIDSATLVNKCFELIEAKYLFDLDPGKLKVLIQPQSIIHSMVELKDGSVEAQMSLPSMIIPLSFGLLGEYSAKAKNNFSLDMFKEDIKLTILDFPKDRDKLIEISQDVMRNGGNRGLIFASINDFAVKKYLQGEIKFGEIYNLIFKHYSVMEKKEILNLEDLKHNQSEILEYLESI

SEQ ID NO: 85802 - protein, 353 aa, Unknown
  Bacterial polypetide isolated from the Sargasso Sea
MKYITVLGSTGSIGTQTLEIASEQPDKFKAVALSAGRNINLLTEQVKTHKPEVVAIEDENLIEDLKDNINNLDLDSAPLVLSGKEGINAVAAWDKADTVVTGIVGCAGLIPTMSAINAGKNIALANKETLIAAGPIVIPALKKNNSRLLPADSEHSAIFQCLQGLPNYENADFSTGEIPKGLKAIHLTASGGAFRDWAVEDLKHVTVEDATSHPNWDMGKKITVDSATLMNKGLEVIEAHYLFGTSYDNIEIVIHPQSIIHSMIEMEDSSVLAQLGWPDMKLPILYAMSWPERFKTNWKRLNLSEIGKLTFKEPDEFKYPCMGLAYAAGKSSGTMPAVLNAANEIAVEQFLKE

SEQ ID NO: 85803 - protein, 365 aa, Unknown
  Bacterial polypetide isolated from the Sargasso Sea
IGIQSLDVISKNNSHKVIGLTCHSNADLLFEQTKKYSPDFVAIDVIDSSHNLFNLCEKNNIELITGNDASSNIPFSNLDLAINAIVGTSGLRPTIELIKNGVDVALSNKESLVLGGHIIMPLANKKNVNIIPVDSEHSAIFQCLNGENQKELKKIILTGSGGPFLKKPIHEFDTITPNEALKHPNWDMGAKISIDSATMMNKALELVEALWLFNIKLDKIQITIHPQSIVHSMVEFVDGSYKAHLGLPDMKVPIQYALTFPERKDSSVGSLDFDNLNLDFKKPDLERYPILSLVEELINLGGNRVAAMSMANDYIVQKFLDKKISFNEIFSLIKEVVDEFASDDLPSLEELFILDKNIQLYLDPN

SEQ ID NO: 85804 - protein, 382 aa, Unknown
  Bacterial polypetide isolated from the Sargasso Sea
MKNILLLGATGSIGDSVLNVISQNRDLFNLFGISLNKNISKSTKITKEFSPKYIHVNENEYLKSNQKNSSNIYLNGDEDLKNLINDQDVDIIICAISGFAGLNATYMSAQTGKKILLANKESIVAGGDLILPLAKKYNTEIVPIDSEHNAIFQCLAGESGVEDVKKITITASGGPFLNSSISDLKNVRLQEALNHPNWNMGSKITIDSATLVNKCLELIEARYLFDLDEKYFDLVVHPQSIIHSIVTYLDGSSICQMSSPDMRVPIAHALSDKRRVPINFDSLNFSSLNLSFQEFPLDRMQVQNIAREVCISGSNLGTVFNASNEIAVESFINGLISFDKIYEVIYRTFDINIMSKDISIDSINDIDKQTRIEAKKVVKSFI

SEQ ID NO: 85805 - protein, 377 aa, Unknown
  Bacterial polypetide isolated from the Sargasso Sea
MRGVFILGGTGSIGSSALSVIRQNTDSLKLIGFSYNNNHEKAKQIISEFKPKYVFSNQSNDLDVPNQIYEEDDLLEVFCLKSIEFIICGVSGFEGLKSTMLASRSGKKILLANKESIVTAGSIFLDSCKKHNSQIFPIDSEHNAVLQCLDTKSSNSEISKVTLTASGGPFYGMGMGQLKEITPEQAANHPNWKMGTKISIDSATLMNKCLEVIEAAILFNIESDKINAVIHPQSILHAMVTYVDGSSIAHLSNPSMEVPIANMLRGDKRISINFEELLTSERALEFFPIPHEKESLFEIARDVIEHQGNRGAIFNAINEVAVQQFRDSKISFLEIDKVIKGTYSVMSMSKLDSIEEVYFYDQEARIKSLEMIKSISH

SEQ ID NO: 85806 - protein, 341 aa, Unknown
  Bacterial polypetide isolated from the Sargasso Sea
KALEIINEFNPEYVFLSYVIAADKLKKSLPSQTKIFADISDVTSYLNTNHSDIYLSAISSFDCLELTVLAAESGNKLLLANKESLVVHGEALINISTKAGTQIVPIDSEHYSLMNSLNNVEKSSIDRVFITASGGPFVGQSRQEIEDKKPEEALNHPNWNMGDKITIDSATLVNKCFELIEAKYLFDLDVDKLEVLIQPQSIIHSMVELKDGSVEAQMSLPSMIIPLSFGLLGEYSDKTKKDFSLDMFKEDVKLTISNFPKDREELLGISKDVMKNGGNRGLIFAAVNDFAVKKYLEGEINFGEIYNLIFQHYSEIEKKEILSLEDLRNNQREILDYLGNI

SEQ ID NO: 85807 - protein, 266 aa, Unknown
  Bacterial polypetide isolated from the Sargasso Sea
LANKESVVAGGDIILPIAKKNNTEIIPIDSEHNAIFQCLSGENDTKDVKKIIITASGGPFLNKTISELKNVTVDEALNHPNWNMGSKISIDSATLVNKCLELIEAKYLFDLDEKFFDLVVHPQSIIHSIVTFLDGSSICQLSMPDMKVPIAHALSEDRRLAIDFNPIEFSSLNLSFQEFPEDRSNIENIAREVCNKGGFLGTVFNAANEVAVAEFLNGRINFDKIYEVIYRTFDKNIMSNDMSIDSIYSVDKETRIEAKKMVKSIA

SEQ ID NO: 85808 - protein, 239 aa, Unknown
  Bacterial polypetide isolated from the Sargasso Sea
KSEKIILSKVDEIYSTKYKTSKNFLQMMNMSLNELNKSNDPLIIFAKETFEESLKYEKEFEEIGAKRQLLKSKFIKLLKQYYESLDKQMYADANGTLRVTYGNVAGVSLKDGMIYEPFTRLEGIIQKHTGVEPFNASNKLLDLIKDKDYGKYAYEPINSVPVNFLATLDITNGNSGSATINSKFELVGLAFDGMLETIIADYKHIPDARTISVDSRYFLWTLEKLEKADNILEELSIVR

SEQ ID NO: 85809 - protein, 257 aa, Unknown
  Bacterial polypetide isolated from the Sargasso Sea
YTDKEALDFHKDKKPGKIEIISSKNMTTKRDLALAYSPGVAAPVKKISEDPEAAYDYTSKGNLVAVISNGSAILGLGNLGALASKPVMEGKAVLFKRFADIDSIDLEIDCKDADEIINSIKNFAPSFGGINLEDIAAPDCFIIEQKLKEILDIPVFHDDQHGTAIITTAALLNALDISGKSIKDIKVVVNGAGASAQACTELFINSGVKSENVIMLDRKGVIYKGRAEGIDQWKSRFAINTDLRTVSDAIKGADVFL

SEQ ID NO: 85810 - protein, 216 aa, Unknown
  Bacterial polypetide isolated from the Sargasso Sea
MLEMSLDDLNNSQDPLIVFAKDTFDESLAYEKESEEIGAKRQLLKSKFIGLLKKYYESSGKQMYADANGTLRVTYGNVAGVSLKDGLIYEPFTRLEGIAQKHTGIKPFNASEKLLNLIEAKDYGKYFYKPINSVPVNFLSTLDITNGNSGSATINSKFELVGLAFDGMLETIIADYKYIPDARTISVDSRYLLWTLEKLDEAENILEELTISNSIY

SEQ ID NO: 85811 - protein, 51 aa, Unknown
  Bacterial polypetide isolated from the Sargasso Sea
MLVDFKRPTSQIKYLSSFTSDEWIKLALSNPVDILIDHAHCERKAAGVAIQ

SEQ ID NO: 85812 - protein, 199 aa, Unknown
  Bacterial polypetide isolated from the Sargasso Sea
MSQNKSNIALLLGDPAGIGPELISKLLNDDITKKANIVIIGEKQVFENGNNITGIFHKLDVVENFDEIDFNKSNRFLLDISKGKNHKYKLALPSKESGESVLEALYLALTLAKEKKIDAINFAPMNKTSLKLGGNKHSDELQLMAEKLGVESFCCEFNVIDDFWTARVTSHIPIKEVAQHITKENIMKPIKLINEVMEL

SEQ ID NO: 85813 - protein, 276 aa, Unknown
  Bacterial polypetide isolated from the Sargasso Sea
MTVYLSTVGIETDKFNNQIKKRISLINKNIDIDLKKIKLILDPFELKIYAKTVGTTVYFIKRPLALESIKTQVSLSSLIKNEISSSNIEVTTKSILLKDLIKFIRATNNKPELFILEKIVKKGHVIIDLSFNIDENGKLKNDYIIEGLIKDASFNFLNRGNFKNINFNFNFQKDNYRFDKINFKAEEVNFISKKINVKKRKNSFLIDAIIENDQSSLNSNILKLLNLSFKNIIVDDAKFKTNNEFSIEINEKFKVKNIILNSDINITQLKYKNLKI

SEQ ID NO: 85814 - protein, 189 aa, Unknown
  Bacterial polypetide isolated from the Sargasso Sea
MKNNILKYFIPLLSVLVVLTVYLSTVGLETDKFNDQIKKKISLINKKIDIDLKKIKLILDPFKLKIYAKTVGTTVYFLKRPLSLESIKTEVSISSLIKNKISSSNIEVKTKSILLKDLIKFIRTTTNKPELFILEKILKKGHVIIDLKLNIDENGKIKNDYEIEGLIKDASINFLNKVNFKNINFNFNF

SEQ ID NO: 85815 - protein, 355 aa, Unknown
  Bacterial polypetide isolated from the Sargasso Sea
LPEEIGGGGMPITLSGGTLEILSTANLAFGLAPGLSAGAISAINFHGNQEQKDKFLPKLVSGQWTGTMNLSEPQSGSDLGTITTKAEKQDDGTYKVTGTKVWITFGEHNMTENIIHLVLAKVPGSPEGTKGISMFIVPKVMVNDDGSLGDNNNVSCISIEEKLGIHASPTCVMEYDGSVGYLVGEENRGLNYMFTMMNEARVWVGGQGLACASGALQGASQYARDRVQGRPVGMSKEDAKKSTIIDHADVRRMLITIKSYVDAMRYLMYDNQLMLDLEYFAEGELKEFGEERCGILTPITKAWISDLGVELSSIAIQVYGGMGYVEETGVAQYLRDSRIAPIYEGTNGIQALDLM

SEQ ID NO: 85816 - protein, 445 aa, Unknown
  Bacterial polypetide isolated from the Sargasso Sea
LDVNLKKIKLTLDPLNFKFNAKTIGAKVIYKKRNIELESIKTQISINSLIKNKIVSSNLIISTKSILLKDLVGFLRATTNKTELFFLEKAIDKGFAIIDLEVNFDENGKIKKDYKVKGLLKDGKINLLNDFNIKNINFLLNIENDNFDLSDISFTTNKIDLFSNNLKIKRKQDKFFISGDIENNNSKLNNKFLNLLRLSNHDINFNNVEISSKNKFSFIVNNRFNYENLFVNSEISLDKAEYEKPKLLSKYLTEVKNVINLRKHKIKATFKDNNLSLIGSGKIQLEKEYDDIDYSISQSGDKVNIDSNIKLSGLNIKSQKNLKTFFPKINEVLNLKDHQINIKFKDNNLSLIGSGKIQLEKEYDDIDYSISQSGDKVNIDSNIKLSGLNIKSQKNLKTFFPKINEVLNLKDHQINIKFKDNNLSLIGSGKIQLEKEYDDIDYSIL

SEQ ID NO: 85817 - protein, 154 aa, Unknown
  Bacterial polypetide isolated from the Sargasso Sea
MYADANGTLRVTYGNVAGVSLKDGLIYEPFTRLEGIAQKHTGIKPFNASGKLLNLIETKDYGKYFYKPINSVPVNFLSTLDITNGNSGSATINSKFELVGLAFDGMLETIIADYKYIPDARTISVDSRYLLWTLEKLDEAENILEELTITNSIY

SEQ ID NO: 85818 - protein, 342 aa, Unknown
  Bacterial polypetide isolated from the Sargasso Sea
MIGEATTAGARQVRACAVLGLSARTVQRWQGGGPEAVDGRTLCHHDAVHKLSREERAELLAVANSVEFGHLPPSQIVPRLADQGRYIASESTFYRVLREENQLAHRRSERPARARSKPRAVCADAPNQLFSWDITYLPTTVRGQYFYLYLFMDVFSRMVVGWQVYAEESSAQASELLKDLCAREAIKPGQVILHSDNGGPMKGATMLATLQALGVMPSLSRPGVSNDNPFSESLFKTLKYRPAYPLQAFDTLFAARAWVTGLVRWYNHEHRHSAIRFVTPAQRHANLDQKILDHRATLYEAARQRNPLRWKGPTRNWKRVHTVHLNPDQTDNSELIQRPHQQ

SEQ ID NO: 85819 - protein, 187 aa, Unknown
  Bacterial polypetide isolated from the Sargasso Sea
ALQKITGIPHSHVVGMAGVLDTSRFKFHLAEALGYSVQDVSSSVLGGHGDDMVALLRHTTISGIPLEDMIRMKKITRKKVNEIVNRIRTCGGEIITYMGTSAYYSPAASAIEMVECYLRDQKKILPCSAYLRGQYGVKGIYVGVPVVLGANGAEKIVEINLKKDEKKEFIKSVNSVSDVLKVAKKLI

SEQ ID NO: 85820 - protein, 314 aa, Unknown
  Bacterial polypetide isolated from the Sargasso Sea
MNTKARKVMIIGAGNVGTSAAYALLNQTICEELILVDLDTARAQAHAQDLSDAAAYMPGMMTISTRDISECADVDIAVITVSGGALKQGQSRLDELNATAKIVNSIVPPMMGNGFNGIFLVATNPCDIITWQVWKLSGLPRSQVIGTGVWLDTTRLRRVLAQALDIGAQSIDAFILGEHGDTQFPVWSHSSVYGSPIADVYLKHTGQQLDRQHIAEEVRTLGFEIYAGKGCTEYGVAGTIAEICRNIFTGSHRALAISCILDGEYGMDDVAVGVPAVLAQSGVQQIIELQLAEDEAAQFRHSVEVIKANIARLA

SEQ ID NO: 85821 - protein, 75 aa, Unknown
  Bacterial polypetide isolated from the Sargasso Sea
MKFIPPFGLGTFRLKDQIAIDSVRTGLELGYRHIDTAQIYGNEAAVGQAIAASNVARDELFVTTKIWTENLGNGR

SEQ ID NO: 85822 - protein, 250 aa, Unknown
  Bacterial polypetide isolated from the Sargasso Sea
VIASVKTALELGYRFVDTAQIYDNEAAVGQAIAESGVPRNELYITTKIWIENLSKEKLLPSLKESLKKLRTDYVDLALIHWPSPGDAVSVEEFMLALLEAKQQGLTREIGISNFTIALMEKAIAAVGADNIATNQIELSPYLQSRKVVDWAKAHGIHITSYMTLAYGNALKDEVIAHIAAKYNATPAQVILAWAMGEGYSVIPSSTKRENLASNLLALELHLDGEDKKMIAALDCNDRLVSPEGLAPAWD

SEQ ID NO: 85823 - protein, 205 aa, Unknown
  Bacterial polypetide isolated from the Sargasso Sea
MTIPAFGLGTFRLKDDVVIASVKTALELGYRTIDTAQIYDNEAAVGQAIAESGVARDELFITTKIWIENLSKDKLIASLKESLLKLRTDYVDLTLIHWPSPNDAVAVEEFMAALLEAKKQGLTRQIGISNFTIPLMERAIAAVGAENIATNQVELSPYLQNRKVVDWAREHGIHITSYMTLAYGKALKDEVIARIATKHNATPAQ

SEQ ID NO: 85824 - protein, 187 aa, Unknown
  Bacterial polypetide isolated from the Sargasso Sea
CSKAWEKLQLDYLDLYLMHWPVPAIDHYVEAWENMIDLQKEGLIKSIGVCNFQINHLQRLMDETGVPPVINQIELHPLMQQRQLHAWNATHKIQTESWSPLAQGGKDVFDQKIIRDLAEKYGKSPAQIVIRWHLDSGLVVIPKSVTPARIAENFNVWDFRLDKDELGEIAKLDQGKRLGPDPDQFGG

SEQ ID NO: 85825 - protein, 66 aa, Unknown
  Bacterial polypetide isolated from the Sargasso Sea
MDVTAKYELIGLMAYPIRHSLSPEMQNKALEKAGLPFTYMAFEVDNSTFANAIAGLKALKMRGTGV

SEQ ID NO: 85826 - protein, 296 aa, Unknown
  Bacterial polypetide isolated from the Sargasso Sea
GLLGLGTVGGGTVSVLMRNADEIARRAGRDIQITLAAAKEYDADKIVGLDQIGKITDDPFSVVDNPDVEIIIELIGGYSPAKELVLKAIENGKHVITANKALIALHGNEIFKAAQKKGVTVAFEAAVAGGIPIIKAVREGLAANQIEWIAGIINGTGNFILTEMRDKGRNFEDALKDAQSLGYAEADPTFDVEGTDAAHKLTILGSIAFGMPLQFDKTYVEGIAKIKQQDVLYAEELGYRIKHIGISRKVDNGIEQRVHPTLIPERRLIANVDGVMNAVLVKSDAVGATLYYGAGA

SEQ ID NO: 85827 - protein, 169 aa, Unknown
  Bacterial polypetide isolated from the Sargasso Sea
MIGIGIIGFGNVGQGIYNIFREKGSFISERLGTHIEIRKILVRSPEKYQDLVDDSSLLTTDINDILTDSNIQIVIEVIGGEYPAFDFISNALNSKKHVVTANKEVVSKHKQHFFKTAKENGVDFYFEASVGGGIPIIRSLKVGFAANKINAFYGIVNGTTNYILTKIKE

SEQ ID NO: 85828 - protein, 169 aa, Unknown
  Bacterial polypetide isolated from the Sargasso Sea
MAAKVGVGLLGLGTVGGGVASILQNPSERHPLVGELELIRVAVRDLNRPRPVVLDESLLTTDPSAVIQDPTVDVVVEVIGGLEPARSLILQAIAAGKSVVTANKAVIARHGQEIAEAAAAAGVYVLIEAAVGGGIPIIEPLKQSLGGNRINRVSGIINGTTNYILTRMA

SEQ ID NO: 85829 - protein, 300 aa, Unknown
  Bacterial polypetide isolated from the Sargasso Sea
WLGPVGGGVASILLSPDERHPLVADLDLVRVAVRDLDRPRPVDLSADQLTTDPEAVVNDPSVDVVVEVIGGIEPARSLILKAIGNGKSVVTANKAVIARHGREIADAAAAAGVYVLIEAAVGGGIPIIEPLKQSLGGNRINRVSGIINGTTNYILTRMATEGVAYDDVLAEAQRLGYAEADPAADVDGLDAADKIAILAALAFGGAIDRSGVPTEGISSLQGRDVEYASQLGYGVKLLAVAERMTDQGATDVLPLSLRVQPTLVPTDHPLAGVNGVNNAILVEGDPIGRVMFYGPGCRCR

SEQ ID NO: 85830 - protein, 254 aa, Unknown
  Bacterial polypetide isolated from the Sargasso Sea
MQPVKIGLLGLGTVGGGTVSVLARNADEIARRAGRDIQITFAAAKEYDADAIVGLNKIKNITNDPFLVVDNPDVEIIIELIGGYSPAKELVLKAIENGKHVITANKALIALHGNEIFASAQKKGVTVAFEAAVAGGIPIIKAVREGLAANQIEWIAGIINGTGNFILTEMRDKGRDFKDVLKEAQSLGYAEADPTFDIEGIDAAHKLTILGSIAFGMPLQFDKTYTEGITKIEKQDVLYAEELGYRIKHPWYFT

SEQ ID NO: 85831 - protein, 246 aa, Unknown
  Bacterial polypetide isolated from the Sargasso Sea
MKDVNVGICGLGTVGGGTFNVLKRNAAIIAGRAGCNIRVVRVASRRSRDDLALGDVPFSTDIFDVVNDPAVDIVVELIGGYDAAKELVLAAIANGKHVVTANKALIAVHGNEIFEAAEKAGVVVAYEAGVAGGIPVIKAVREGLAANRIDTIAGIINGTGNYILTEMRAGRPFEEVLKEAQALGYAEADPTFDVEGIDAAHKLTILAASGFGVPLQFDKAFTEGISALTPNDIAHAELLGYRVKHL

SEQ ID NO: 85832 - protein, 442 aa, Unknown
  Bacterial polypetide isolated from the Sargasso Sea
MEPIKVGLLGFGTVGSGTFTVLGRNQEEIKRRAGRGIEVTRIAVRNPAKALAALGGDAGAAQITDDFNAVVDDPSIAIIAEMIGGTGIARELVLRAIANGKHVVTANKALLAVHGTEIFEAARAKGVMVAFEAAVAGGIPIIKALREGLTANRIQYIAGIINGTTNYILSEMRDRGLDFATALKAAQELGYAEADPTFDIEGVDAAHKATIMSAIAFGVPVQFERAYVEGISKLDATDIRYAEELGYRIKLLGITRRAENGIELRVHPTLIPEKRLLANVEGAMNAVVVHGDAVGTTLYYGKGAGAEPTASAVVADLVDVTRLHTADPEHRVPHLAFQPDSLSNTPILPIEEVTSGYYLRLRVADQTGVLAAITRILAESGISIDALLQKESEQVDGANGETDIILITHETVEKNVNAAIAQIESLATVVSKVTKLRMEALN

SEQ ID NO: 85833 - protein, 336 aa, Unknown
  Bacterial polypetide isolated from the Sargasso Sea
MRIILCGFGVVAQSFSELLESRTHDLYSKFGLRPRIVGVFDSKGCAYDETGLDLKKLNKIKKQSGTVRNYDKSIKQISGKEIIENFDADVLIETTASNYKDAEPGMSHIISAMKKKMHVISVNKGPLALAFPSLMELANYNQVMLRFSGTVGGGTPILDYAKNSLRGEKILSFQGILNGTTNYILTNMAEGMSFEDALNDAKSKGYVEADEALDLDGLDAAAKLVILANWIMGMKVTMPDIIKKGIRKVNTNDIKNAEKNGSAVKLIASCNKELTVSPVEIKINDPLCVNGTLNAISFTSEHSGTQTIIGRGAGGTETASSILRDLIDIRKEITKS

SEQ ID NO: 85834 - protein, 413 aa, Unknown
  Bacterial polypetide isolated from the Sargasso Sea
RRAGRGIEITRIAVRNPAKATAALGSEAGTVALTDDFNAVVDDPSIDIVAEMIGGTGVARDLVLRAIRNRKHVVTANKALLAVHGTEIFEAARANGVMVSFEAAVAGGIPIIKALREGLTANRIQYIAGIINGTTNYILSEMRDRGLDFATALKAAQELGYAEADPTFDIEGVDAAHKATIMSAIAFGVPVQFDKAYVEGISKLAAIDIKYAEELGYRIKLLGISRRTDKGIELRVHPTLIPEKRLLANVEGAMNAVVVHGDAVGSTLYYGKGAGAEPTASAVVADLVDVTRLHTADPEHRVPHLAFQPDSLSSTPILPIDDVTSGYYLRLRVADVTGVLADITRILADRGISIDALLQKESEQVDANGKGETDIILITHETVEKNVNAAIRTIEALKTVVSQVTKLRMEALN

SEQ ID NO: 85835 - protein, 373 aa, Unknown
  Bacterial polypetide isolated from the Sargasso Sea
MNNRAIKIGIAGLGTVGSGVINLLKKNSEEISKRSGFEIKLECVSASDKTKKRICDISGLRFYSDPIEMLDKETIDIFIELVGGETISKDLVTKALKNNIHVVTANKALIALHGNEISKISNNNNSDIYYEASVAGAVPIIRVIRESLNANDINWIAGIINGTTNYILTEMLKSKKDFDVVLKEAQDLGYAEADPSFDVGGIDAAHKLTILSSLCFGIPLDFSSIHVEGIEAIELDDLNYARELGYSIKHLAIGRKNENGIELRVHSCLIPEKRLLANVDGVKNAVVISSDAAGPTLYYGAGAGSLATASSVVSDIIDIGRKIVSKSSNTIPFLSYQSNELRNKRILDINEIVSRYYLRIRVTNKPGVLADIT

SEQ ID NO: 85836 - protein, 435 aa, Unknown
  Bacterial polypetide isolated from the Sargasso Sea
MGARIGVGLLGLGTVGGGVAEILLNPEERHPLVADLDLIRVAVRDVNRPRTVVLADAVRTTDPSEVVIDPNVDVVVEVIGGIEPARSLILQAIANGKSVVTANKAVIARHGPEIASAAKAAGVYVLIEAAVGGGIPIIEPLKQSLGGNRINRVSGIINGTTNYILTRMADEGAAYADVLAEAQRLGYAEADPAADVDGLDAADKIAILSALAFGGTVDRDALPTTGISALQGRDVEYARQLGYGVKLLAVAERLAGQGDPLPLSLRVQPTLVPSDHPLAGVNGVNNAILVEGDPIGRVMFYGPGAGAGPTASAVVADILNIAGIRQASGDQGPVDPLLAAGSWRPCVLADSGDIRQRHYVRFNTEDAPGVIGKVGGRFGDAGVSIQSIVQFNASEAGAEIVVITHEVTQRQVIAALDAITALDEVSGLAAHLGCL

SEQ ID NO: 85837 - protein, 199 aa, Unknown
  Bacterial polypetide isolated from the Sargasso Sea
MNIGNPFATVPEVVKNLLIINILMLLATIVAGSFNIDLSEWLGLHHWSSDFFLPHQLVTYMFMHGGLTHLFFNMFALYIFGRVLEQVWGSKKFLIFYLICGIGAGIVQLLVTELRINSIIDQVDPILYEKVLQDGSAVIHSGKNFVDEAAGQLNRLINTSTVGASGSVFGILLAFGMLFPNVQLMLIFPPIPMKAKYFV

SEQ ID NO: 85838 - protein, 255 aa, Unknown
  Bacterial polypetide isolated from the Sargasso Sea
MRAIILAAGLGLRLQQPPEAQYPKCLLRFDDVSLLERHLRVLDAAGVDEIVLGLGFQHEKVEQELKRLGRQAEIVINDRYDLGSVLTVHTVADAMTRGGDVLLMDADVLYDENILHALVADSDRAVDRLLIDRDFEAGDEPVKLCLKDGVPVELRKQLAVDLEYDTIGESVGFFRFTEGTARRLATIVAGYVDSGRANMPHEEAVRDLLLEGGHSFDVADVTGSPWIEIDFPNDVARATQEILPLIQRTTAGVAR

SEQ ID NO: 85839 - protein, 153 aa, Unknown
  Bacterial polypetide isolated from the Sargasso Sea
DLESFARTVSVNLVGSFNMLRLAAECMAQGQANADGERGVIINTASVAAFDGQIGQAAYAASKGGVVGMTLPIARELARHGIRVMCIAPGIFETPMMAGMPQEVRDALGAAVPFPPRLGRPAEYAALVRHIVENAMLNGEVIRLDGAIRMAAK

SEQ ID NO: 85840 - protein, 156 aa, Unknown
  Bacterial polypetide isolated from the Sargasso Sea
GAHGLDSFRRTVEINLIGSFNLLRLAAEAMAQNTPNAGGERGVIINTASVAAFDGQMGQVAYAASKGGVAALTLPAARDLARSGIRVMCVAPGVFETPMMAGMPQEVRDSLAANVPFPPRLGRPDEYAALVRHIVENPMLNGEVIRLDGALRMAAK

SEQ ID NO: 85841 - protein, 225 aa, Unknown
  Bacterial polypetide isolated from the Sargasso Sea
KVAVFDLNKDMAEQTAVELVEAKAYQVNVIDDDSVKVAIEAVKNDFGSIHINVNCAGIGASSRTVGKDGAHDINKFNFIVQVNLVGTFSVLSKCAAIMQLNEPEGEALEKGVIINTASVAAFEGQIGDVAYSASKAGVLGMTLPIARDLSRQGVRVCTISPGVFDTRMMAASPDQDRDSLIDMVQHPTRMGLPLEFALLSEQIVENPYLNGETIRLDGGIRVGPK

SEQ ID NO: 85842 - protein, 255 aa, Unknown
  Bacterial polypetide isolated from the Sargasso Sea
MEINGKVSAVVTGGASGLGEATSRMLSSMGAKVAIFDLDADKGLAISKEINSDFYKVDVSDINSVKQAVLSFSKQNEGIQIVVNCAGIGPAAKTVSRGEAHPNELFGKVININLIGSFNVASVCAAEMVKNREYSEDGFRGVIVNTASVAAFDGQIGQVAYAASKGGIVGMTLPMARDLSDKGIRVCSIAPGLFLTPLLESLPEEVQESLGKQVPFPSRLGRPTEFSKLVVQIIENDMLNGEVIRLDGAIRMAPR

SEQ ID NO: 85843 - protein, 255 aa, Unknown
  Bacterial polypetide isolated from the Sargasso Sea
MEISNKVALITGGASGLGLATAEALVGSGSKVMLLDLNEDNAKAAVEKLGSDSSYVIANVTDESSVQSAIDKTVEEFGSLHIVVNCAGIGSASKTVGRNGAHPLDYFKTVVDINLNGTFNVLRLAAVVMGNNEPNEDGECGVIINTASVAAFDGQIGQAAYSASKGGVVGMTLPIARDLARMGIRINTIAPGIFDTPLMAMAPDTVRNPLIEMTQFPKRLGLPNEYASLTKHIVENPFLNGETIRLDGGIRMQPK

SEQ ID NO: 85844 - protein, 255 aa, Unknown
  Bacterial polypetide isolated from the Sargasso Sea
MEISNKVALITGGASGLGLATAKTLVESGANVMLVDLNEDNVKNAVESLGDKSSYVVANVTEEESVQNAVDETVKKFGGIHIAVNCAGIGSASKTVGRDGAHPLDYFKTVVDINLNGTFNVLRLAAVEMGKNEPNSDGECGVIINTASVAAFDGQVGQAAYSASKGGVVGMTLPIARDLARMGIRINTIAPGIFDTPLFSMAPDSVKNPLIEMTQFPKRLGIPSEYAALSKHIIENAFLNGETIRLDGAIRMQPK

SEQ ID NO: 85845 - protein, 131 aa, Unknown
  Bacterial polypetide isolated from the Sargasso Sea
NALIAGQSAADIINDENLIENDYLPLVQQRGKAVIDARGASSAASAANAAIDTVKSVESKTPEGDWFSAAVASDGSYGIPEGIIFGYPLRSDGNGNVEIVQGVELNEFAKSKIEVTTQELKEEKEAVKDLL

SEQ ID NO: 85846 - protein, 111 aa, Unknown
  Bacterial polypetide isolated from the Sargasso Sea
MSAKKITVVGAGHVGATCSQLLSQKELAKEVVLVDIADGIPQGKGLDQWESAPIEGFDSRVFGASDYQSSVDSEIFIVTAGIARKPGMSRDDLLKTNANVIPFSLSGKLQG

SEQ ID NO: 85847 - protein, 133 aa, Unknown
  Bacterial polypetide isolated from the Sargasso Sea
MTRPKISLIGGGQVGGNIALLSAQKELGDIVIVDIPEAENFMKGKALDISQLLPHDGYDAKLSGTSKFEDIKDSDVVVITAGFPRQPGMDREDLLQKNLDIMTNVANQVKNFAPDAFVIVVSNPLDDNGLCFS

SEQ ID NO: 85848 - protein, 96 aa, Unknown
  Bacterial polypetide isolated from the Sargasso Sea
FRKGSAFYAPAASGVQMAEAYLNDEKKLLPCAVQLNGEYGVQNVYAGVPVIIGKDGVEKIEEIDLDEKEKKEFIHSIDAVKALWEAASKIDPDLSK

SEQ ID NO: 85849 - protein, 228 aa, Unknown
  Bacterial polypetide isolated from the Sargasso Sea
MERSDLILDNANIFRSQAEIINNVCSQKTKIIVVGNPANTNALILNYNTPDIPNGNITSLMKLDQNRAKSILASKLNDKVEKVNNMIIWGNHSTTQVPDLYNCKVDSKVISLDDSWIHDTFIPKVQKRGGEIIEYRGLSSAASAASAIYDHVHALENGSNDIEAIGTLSSGEYNITPDLMFSLPLTVSPGQYSVNKDIKINPSLVDLIKASEDELIKERDIVKQYLPL

SEQ ID NO: 85850 - protein, 148 aa, Unknown
  Bacterial polypetide isolated from the Sargasso Sea
MGGHGDTMVPVPNRTTIAGKPLLDFINEGIISQSRLDEIINRTRNGGAEIVKLLEKGSAFYGPAASGIEMAQSYLKDEKKTLPCAAYLNGEYGFKDIYAGVPVVIGSNGIEKVIELDLDDEEKKSFETSIAAVTELFDAAKNIDPLLK

SEQ ID NO: 85851 - protein, 98 aa, Unknown
  Bacterial polypetide isolated from the Sargasso Sea
FAGGEIVKLFGNGSAYYAPAQSAIEMAESYLKDKKRVIPCASLCEGEFGINGYFIGVPSVIGSEGVEKILEFDLKDEEKAALDNTLEAVKNTVKETGL

SEQ ID NO: 85852 - protein, 223 aa, Unknown
  Bacterial polypetide isolated from the Sargasso Sea
MKIVVTGAAGQIAYSLIPFLCERGIFQSEEKIDLHLVEIPAAMERLNGFVKELEDSAYSTVNSINTHDSIDAAVEHADWCLLVGSIPRGIVFQGKEIKERSDLLQINGGIFTEQGKAIGSKAKDNCKILVVGNPANTNALIGYHNAGNKNQTWMAMTMLDALRAKAQLSIKLGCHVDEIYRLAVFGNHSPTMFPDLENTIVNGQNAYEAINDPAWVENEFLPK

SEQ ID NO: 85853 - protein, 243 aa, Unknown
  Bacterial polypetide isolated from the Sargasso Sea
MKEINVAVTGGAGQISYSLLPRLISGETFGPDTKVNLRLVEIPQVVDKLEGTIMELIDCGFDQTGSLLATADIKEGVDGANWVLLVGSIPRGIVVDGKKIEERSDLLRINGGIFTDQGSAIGELANKDAKILVVGNPANTNALIGKQHANNASQQWFAMTALDANRAKAQLALKAETDITSVTNMTIWGNHSPTMYPDPYNAKINGTSAAEVINDEKWIENEYLPLVQQRGKAVIDARGASSA

SEQ ID NO: 85854 - protein, 114 aa, Unknown
  Bacterial polypetide isolated from the Sargasso Sea
LDDIIKRTKNGGAEIVKYLEKGSAFYAPAASGVEMAECYLKDLKKQLPCAVYLNGEYGVRDLYAGVPVIIGKDGVEKVIELELSGDEKVNFEKSIKAVQELFSAAKKIDKDLNL

SEQ ID NO: 85855 - protein, 263 aa, Unknown
  Bacterial polypetide isolated from the Sargasso Sea
TTPSVVAFTDKNDILVGQAAKRQAVTNPVNTIYSAKRLIGRLFDEVNKESKDLPYKIKKGKNNEVVISSFDKDYALPQISAMILQKIKKTAESYLGEEVKDAVITVPAYFNDSQRQATKDAGEIAGFNVKRIINEPTAAALAYGLDNKKDQKIAVFDLGGGTFDVSILEIGDGIIEVKSTNGDTALGGDDFDQSIVDWLIAEFKKSDGIDLSKDPMAIQRLKEAGEKAKCELSSTKQTDINLPFITADASGPKHFNISLTRAK

SEQ ID NO: 85856 - protein, 135 aa, Unknown
  Bacterial polypetide isolated from the Sargasso Sea
MKVTVVGAGAVGASCAEYIAIKNFASQVVILDIKDGFAEGKAMDLMQTASLNNFDTKIVGTTNDYSKTADSDICVITSGIPRKPGMTREELIGINAGIVKEVSAKLIEKSPNTIIIVVSNPMDTMTYFSHKTTGI

SEQ ID NO: 85857 - protein, 141 aa, Unknown
  Bacterial polypetide isolated from the Sargasso Sea
DTMVPVIRYATVPGIPVPELIKLKWSNTKRINAIINRTRDGGGEIGRLMKTASAFYAPASSAIAMAESFLKDQKRVLPCAAYLNGQYGVKGLYVGVPVIIGKKGVEKVIELKLSAKEKKQFNNSVKAVKNLTVLAKKLISK

SEQ ID NO: 85858 - protein, 109 aa, Unknown
  Bacterial polypetide isolated from the Sargasso Sea
ITERTKKGGAEIVKYLGNGSAFYAPAASGVQMAESYLKDKKMQLPCAAYLNGEYGIKEVYAGVPVIIGNKGVEKIIEIKLSKEEEDNFKKSVQSVKDLYSAAKNIDSEL

SEQ ID NO: 85859 - protein, 97 aa, Unknown
  Bacterial polypetide isolated from the Sargasso Sea
MRRKKISLIGGGQIGGNLALIASQKELGDVVIFDIPQSEGMVKGKALDIMQLRPHDGYDTNITGTSDYNDIADSDVIIITAGIPRKPGMDREDLMSI

SEQ ID NO: 85860 - protein, 193 aa, Unknown
  Bacterial polypetide isolated from the Sargasso Sea
MSIKKVTITGAAGNIAYSLIFRILSKLPFKATDKIDLTLLDIELSQKSLTGLRFEIEDCAFSSLNEIAITADSEKAFDDSDYIIMVGAKPRSKGMERSDLILDNAGIFKSQAETINNVCSSSTKIIVVGNPANTNALILNYNTPKIPNENVTSLMKLDQNRAKSILASKLDKQVEEIHQMIIWGNHSTTQVPD

SEQ ID NO: 85861 - protein, 150 aa, Unknown
  Bacterial polypetide isolated from the Sargasso Sea
MKDRIKVVVTGAAGQISYSLIPRLIDGHTFGDKIVDLELVEIPQVVDKLQGLIMELEDSNFPNMGNVNYTSDFESAAKDADWFLLVGSIPRGIVFNGKKIEERADLLQINGGIFVGQGQAIGKYGKSDAKILVVGNPANTNALIGRHAAG

SEQ ID NO: 85862 - protein, 115 aa, Unknown
  Bacterial polypetide isolated from the Sargasso Sea
FSLLSKEEIAAIEDRTRFGGGEIVKLFGKGSAFYAPAQSAVEMIESFVRDKKRVIPCASLCEGEFGIDGYFIGVPTVIGCGGVEKILTFDLNEEEKNALNNTLTEVEKTVLETKL

SEQ ID NO: 85863 - protein, 141 aa, Unknown
  Bacterial polypetide isolated from the Sargasso Sea
QGKAIGRYGGENAKILVVGNPANTNAFIGKHAANNDSQLWMAMTMLDANRAKSILAKKTNNNVSDIKNMIIWGNHSPTMYPDSENVQILGELGSSVVNDINWVESDFIPKVQQRGKAVIDARGASSATSAAKARNRYCDCL

SEQ ID NO: 85864 - protein, 103 aa, Unknown
  Bacterial polypetide isolated from the Sargasso Sea
LDGGAEIVGLLKTGSAFYAPASSAIEMADSYLKDKKKLLPCAAYVDGHYNLNGLYVGVPVIIGKNGVERIVEISFTSDEKNMFDHSVLTVKQLNEVASKFEAS

SEQ ID NO: 85865 - protein, 282 aa, Unknown
  Bacterial polypetide isolated from the Sargasso Sea
ALVEIPQVVDKLKGLVMELEDSYFPSMGKVTYTDNFSEAAKDADWFLLVGSIPRGIVYNGRKIEERSDLLSINGGIFVDQGKAIGSFGKDKAKILVVGNPANTNAFIGKNAADNESQLWMAMTMLDSNRAKSVISKKTDVNISEIKNMIIWGNHSPTMYPDSENVIINNQLGSTVINDMNWVEKDFIPSVQQRGKAVIDARGASSATSAAKAAIDTVMACESPTEEGNSFSAAIASDGSYDVPEGIICGFPLVTLGDGTVDIKRDIALSDLQRQSFRFQLMN

SEQ ID NO: 85866 - protein, 205 aa, Unknown
  Bacterial polypetide isolated from the Sargasso Sea
MKEINVAVTGGAGQISYSLLPRLISGETFGPDTKVNLRLVEIPQVVDKLEGTIMELVDCGFDQTGSMLATADIKEGVDGADWVLLVGSIPRGIVVDGKKIEERSDLLRINGGIFTDQGSAIGELANKEAKILVVGNPANTNALIGKRHANNDSQQWFAMTALDANRAKAQLALKAETDITSVTNMTIWGNHSPTMYPDPYNAKIN

SEQ ID NO: 85867 - protein, 163 aa, Unknown
  Bacterial polypetide isolated from the Sargasso Sea
MSSSVKVVVTGAAGQIAYSLIPRLVDGRTFGDKKVDLTLVEIPQVVEKLKGLVMELEDSYFPNMGEVTFTDNFEEASKDGDWFLLVGSIPRGIVYNGKKIEERSDLLSINGGIFVDQGKAIGQHGKDDAKILVVGNPANTNAFIGRNAANKDSQLWMGMTMLG

SEQ ID NO: 85868 - protein, 95 aa, Unknown
  Bacterial polypetide isolated from the Sargasso Sea
MSYQHIHLPEQGEKISVKEGRLHIPDNPIVGYVEGDGIGPDITRAMLRVLDSAVEKAYGGARQIHWCELYLGEKAGRIYGGNYFPDETLEAIREL

SEQ ID NO: 85869 - protein, 293 aa, Unknown
  Bacterial polypetide isolated from the Sargasso Sea
RYPEHSIKAVIQILKTVSLSQLKWSNTNLDFRLSCLEQLIGVLKDKKREFASLISLEMGKPISQSEGEIEKCIWLCEYYFENSRKILSRKLIDDEKEKCYVTFQPIGNVLGVMPWNFPFWQVFRFAVPTIVAGNGAILKHSSNVQGCAYAIESCFQLAGFPSNIFRNISIKGKDVKYVIESPFINAVSLTGSTSVGQSVAQTAGKYIKKTVLELGGSDPYIILEDANLNLALEACINGRILNTGQSCISAKRIIVVDKLYDEFLIKLEKKLSEKIMGDPMDNVDIGPMVTKNA

SEQ ID NO: 85870 - protein, 177 aa, Unknown
  Bacterial polypetide isolated from the Sargasso Sea
MKEINVAVTGGAGQIAYSLLPRLISGETFGADIKVNLRLIEIPQVVEKLEGTIMELIDCGFSQTGKLIATSNIDEGVEDADWVLLVGSIPRGIVIDGKKIEERSDLLKINGGIFTNQGKAIGELAKPDAKVLVVGNPANTNALIGRNSAKNDGQHWYAMTALDANRAKAQLAEKSRY

SEQ ID NO: 85871 - protein, 82 aa, Unknown
  Bacterial polypetide isolated from the Sargasso Sea
MKSPVRVAVTGAAGQISYSLIFRIAAGEMLGPDQPVILQLLEITPALEALKGTVMEIEDCAFPLVQGITQSDDPKVAFQDAD

SEQ ID NO: 85872 - protein, 60 aa, Unknown
  Bacterial polypetide isolated from the Sargasso Sea
VGVVAALVPWNFPLVLSSRKISTGLAAGCSVIVKPDVITPGVVMELVEICRECGVPPRGD

SEQ ID NO: 85873 - protein, 184 aa, Unknown
  Bacterial polypetide isolated from the Sargasso Sea
MSKSIKVVVTGAAGQIAYSLIPRLVDGNTFGDKIVDLALVEIPQVVDKLKGLVMELEDSYFPKMGKVTYTDNFEEASKDADWFLLVGSIPRGIVYKGKKIEERSDLLSINGGIFVQQGEAIGKYGKDDAKILVVGNPANTNAFIGKDAANNDNQLWMAMTMLDSNRAKSILAKKTNNNVSDVKN

SEQ ID NO: 85874 - protein, 97 aa, Unknown
  Bacterial polypetide isolated from the Sargasso Sea
GLLKTGSAFYAPASSALLMAEAYIKNKKRILPSAAFLKGEYGVKNLYVGVPVIIGSKGVEKVIEIKLEPSEKKMFKKSVQSVEKLVNVVKKIKLRLN

SEQ ID NO: 85875 - protein, 245 aa, Unknown
  Bacterial polypetide isolated from the Sargasso Sea
SIPRGIVYKEKKMEERSDLLSINGGIFVQQGEAIGKYGKDDAKILVVGNPANTNAFIGKDAANNDNQLWMAMTMLDSNRAKSILAKKTNNNVSDVKNMIIWGNHSPTMYPDSENALISGKLGSEVINDINWMESEFIPKVQQRGKAVIDARGASSATSAAKAAIDTVIACENPTDSGDCFSAAIASDGAYDVPEGIICGYPLITLDNGSIEIKRDISLSEFAKSKFKISIDELLSEREAVKHLLK

SEQ ID NO: 85876 - protein, 306 aa, Unknown
  Bacterial polypetide isolated from the Sargasso Sea
FFALMNEVESEEMVFTLETIVEKFGEEIAPYAMGMTQNLVAAFWKLNRSQDQTDEDDFTGALASVGCLRAIATILESLSALPHMYAQLEPALMPIMRKMLGADGYDVYEEVLEILSYMTYYAPAVSPAMWELWPVLISALDGEYGVQYFENILVPMDNYISRGTETFLAHPTCKGDCLRVASGVLLNNDIPEPEMLPAPKLLECVLQNCKGRVDDCVAPYLAVALERLKTCELTYLKDLLIQIVANCLWYNAALTLDILVKNGALGTALQTWFGMLGDRTRKGGNKRKHHRREHDKKVCILGLVAL

SEQ ID NO: 85877 - protein, 202 aa, Unknown
  Bacterial polypetide isolated from the Sargasso Sea
NTNAFIGKHAGCNDKQLWMAMTMLDSNRAKSILAKKTNNNVSDIKNMIIWGNHSPTMYPDIENALVSGELGSSAINDMSWVESEFLPTVQQRGKAVIDARGASSATSAAKAAIDTVIACETPTEEGDSFSAAIASDGAYDVPEGLICGYPLICLDGGKIEIKRDIALSEFAKSKFKLSIDELVSEREAVKHLMYDKKRKNSS

SEQ ID NO: 85878 - protein, 106 aa, Unknown
  Bacterial polypetide isolated from the Sargasso Sea
RDGGAEIVKYLEKGSAFYAPAASGIEMASAYINDEKKLLPCAAYMNGEYGVNEIYAGVPVIIGKNGIEKIEEVKLDDKEKLEFNHSIEAVKKLWEAASAIDPDLKR

SEQ ID NO: 85879 - protein, 206 aa, Unknown
  Bacterial polypetide isolated from the Sargasso Sea
LLSINGGIFVQQGEAIGKYGKDDAKILVVGNPANTNAFIGKDAANNDNQLWMAMTMLDSNRAKSILAKKTNNNVSDVKNMIIWGNHSPTMYPDSENALISGKLGSEVINDMNWMESEFIPKVQQRGKAVIDARGASSATSAAKAAIDTVIACENPTDSGDCFSAAIASDGAYDVPEGIICGYPLITLDNGSIEIKRDISLSEFAKI

SEQ ID NO: 85880 - protein, 273 aa, Unknown
  Bacterial polypetide isolated from the Sargasso Sea
MSKIIGIDLGTTNSCVSVMEAGKPTVITNSEGGRTTPSIVAFSSDGDTLIGSPAKRQAVTNPVNTIFSAKRFIGRTYDEIENDASTIPYKIKKGKNSEVRILAEDKDYAPEQISAMLLQKLKQTAEEHLGEKVLDAVITVPAYFNDSQRQSTKDAGAIAGLNVKRIINEPTAAALAYGLDSKKDEKIAVFDLGGGTFDISILDIGDGVFEVKSTNGDTHLGGDDFDQIIVDYLIDEFKKNESIDLREDPMALQRLRDAAEKAKCELSSSKQTD

SEQ ID NO: 85881 - protein, 302 aa, Unknown
  Bacterial polypetide isolated from the Sargasso Sea
MNKCSIAITGAAGNIAYSLIFRILSGNIFMPDTKIDLRLLDIPNAKKILHGVKLEIEDCAFNSLDSITVTDKPDVAFADCDYILLVGAKPRSKGMQRSDLILDNAHIFSDQGKIINKVSKKSAKIIVVGNPANTNALIVCSNTPDIPNENISSLMRLDQNRAKSILSSKVGQHVSSVTKLVVWGNHSTTQYPDISHAQINSSNNFLDTIDEQWIYDDFIPRVQKRGAEIIEHRGLSSAASAASAVYDHFNVLVNGSDDWESMGILTSNNYSITSNLFYSLPLKISKNSFNVIESLEVSEKMR

SEQ ID NO: 85882 - protein, 323 aa, Unknown
  Bacterial polypetide isolated from the Sargasso Sea
MNKCSIAITGAAGNIAYSLIFRILSGNIFMPDTKIDLRLLDIPDTKKILHGVKLEIEDCAFNSLDTITVTDKPDVAFADCDYILLVGAKPRSKGMQRSDLILDNAHIFCDQGKIINKVSKKSAKIIVVGNPANTNALIVCSNTPDIPNENISSLMRLDQNRAKSILSSKVGQHVSSVTKLVVWGNHSTTQYPDISHAQINNSNNFLDTIDEQWIHDDFIPRVQKRGAEIIEHRGLSSAASAASAVYDHFNVLVNGSDDWESMGILTSNNYSITSNLFYSLPLKISKNSFDVIESIEVSKKMRTYLSATEKELIDERDTVKEFL

SEQ ID NO: 85883 - protein, 112 aa, Unknown
  Bacterial polypetide isolated from the Sargasso Sea
GAHEAHSNGGTEVVEAKGGAGSATLSMAAAAAEFADACLRGLSGESGIWACAYVESSATSAPFFATKVLLGKNGVERVAGVGAMSAYEKQSLKQMLPELKASIQKGYDFARS

SEQ ID NO: 85884 - protein, 180 aa, Unknown
  Bacterial polypetide isolated from the Sargasso Sea
MSASVKVIVTGAAGQIAYSLIPRLVNGRTFGDKKVDLVLVEIPQVVDKLKGLIMELEDSYFPNMGNVTYTDNFDEAASDGDWFLLVGSIPRGIVFNGKKIEERSDLLSINGGIFVDQGQAIGKHGKDDAKILVVGNPANTNAFIGKNAANKDSQLWMAMTMLDSNRAKSIISKKQIKIFQ

SEQ ID NO: 85885 - protein, 150 aa, Unknown
  Bacterial polypetide isolated from the Sargasso Sea
MSKSIKVVVTGAAGQIAYSLIPRLVDGNTFGDKIVDLALVEIPQVVDKLKGLVMELEDSYFPKMGKVTYTDNFEEASKDADWFLLVGSIPRGIVYKGKKIEERSDLLSINGGIFVQQGEAIGKYGKDDAKILVVGNPANTNAFIGKDAAN

SEQ ID NO: 85886 - protein, 50 aa, Unknown
  Bacterial polypetide isolated from the Sargasso Sea
MAGILDSSRFKLFLSEELNVPVKEIDAMVMGGHGDTMVPLPRFTKFLVNL

SEQ ID NO: 85887 - protein, 321 aa, Unknown
  Bacterial polypetide isolated from the Sargasso Sea
AAGQISYSLIPFLCENGIFKSNEKIDFSLVEIPSAMEKLSGFVKELEDSAYSNISSISVHDNINSAVEDADWCLLVGSIPRGIVLNGKEIKERADLLKINGGIFTEQGKAIGSKAKDSCKILVVGNPANTNALIGCTNANNPSQKWMAMTMLDALRAKAQVALKLQVHVDDIYRLAIFGNHSPTMFPDLENALLDGEIIYKKINDHDWVEHKFLPKIQQRGAEIIKSRGASSASSAARAACETVSSVENPTRSGDVFNAAILSDGSYGVAEGVFSGFPLTSDGMGNINIVRDFSLSEFAKSRIALTSNELVEERELVKDLL

SEQ ID NO: 85888 - protein, 328 aa, Unknown
  Bacterial polypetide isolated from the Sargasso Sea
MKIVVTGAAGQIAYSLVPFLCERGIFKSEEKIDLHLVEIPAAMERLDGFVKELEDSAYSTVNSINTHDNIDAAVENADWCLLVGSIPRGIVFQGKEIKERSDLLQINGGIFTEQGKAIGSKAKDNCKVLVVGNPANTNALIGYHNANNANQNWMAMTMLDALRAKAQLSMKLDCHVDDIYRLAVFGNHSPTMFPDLENTIVNGQNAYEKINDRSWVEDKFLPKIQKRGAEIIEARGASSASSAARAACDTVKAVEHPTRSGDVFNAAIMSDGSYDIPAGIFSGFPLLSDGNGKIEIVRDFSLSEFAKSKIAITANELLEEKDLVKDLI

SEQ ID NO: 85889 - protein, 322 aa, Unknown
  Bacterial polypetide isolated from the Sargasso Sea
GAAGQISYSLIPRLIDGHTFGDKIVDLELVEIPQVVDKLQGLIMELEDSNFPNMGNVNYTSDFESAAKDADWFLLVGSIPRGIVFNGKKIEERADLLQINGGIFVGQGQAIGKYGKSDAKILVVGNPANTNALIGRHAAGNDSQLWMAMTMLDSSRARSVLSKKLNVGIEDIGKMIIWGNHSPTMYPDFENIISNGELGKNLIDDMNWVNNDFLPIVQQRGKAVIDSRGASSATSAAKAALDTVIACENPSKSGECFSAAVITDGSYDLPHGIICGMPLMTTSEGSVEIVRDIVLSDFAKEKIKISTNELIEERSAVEDLLK

SEQ ID NO: 85890 - protein, 170 aa, Unknown
  Bacterial polypetide isolated from the Sargasso Sea
MSSTIKVVVTGAAGQIAYSLIPRLVDGKTFGDKTVDLCLVEIPQVVDKLKGLVMELEDSYFPNMGEVSYTSNFEEASVDGDWFLLVGSIPRGIVYNGKKIEERSDLLSINGGIFVDQGKAIGKNGNDNAKVLVVGNPANTNALIGKNAANNNSQIWMAMTMLDFNRAKSI

SEQ ID NO: 85891 - protein, 200 aa, Unknown
  Bacterial polypetide isolated from the Sargasso Sea
VVGNPANTNAFIGKHAANNDSQLWMAMTMLDANRAKSILAKKTNNNVSDIKNMIIWGNHSPTMYPDSENVQILGELGSLVINDINWVESDFIPKVQQRGKAVIDARGASSATSAAKAAIDTVIACENPTDPGDCFSAAIASDGSYNVPKGIICGYPLMTLEDGSIEIKRDISLSEFAKNKFQISIDELLSEREAVKHLMQ

SEQ ID NO: 85892 - protein, 124 aa, Unknown
  Bacterial polypetide isolated from the Sargasso Sea
VTEVIQDVGWLQGDFIKSVQQRGAAIIKARGASSAASAANAVIDTIQRLNNPTPDGEWFSTAIPSNGSYGIPDGIMFSYPLRSLGNYEYEVAQSLELNEFGQQKIQATREELEMEREAVSDIMG

SEQ ID NO: 85893 - protein, 68 aa, Unknown
  Bacterial polypetide isolated from the Sargasso Sea
MNKPVRVTITGAAGQIGYQLAFRIASGQMLGSNKQIILQLLEITPALPALQGVLMELEDCAFPTLAGV

SEQ ID NO: 85894 - protein, 119 aa, Unknown
  Bacterial polypetide isolated from the Sargasso Sea
NDNLWIEDSYLPLVQQRGKAVIDARGASSAASAANAAIDTVKAVINPTKEGDCFSAAVVSDGSYGVPKGLIFGFPLRTNSNGKIEIIQGIELNEFAQTKIKVTTEELESEREAVSDLIG

SEQ ID NO: 85895 - protein, 272 aa, Unknown
  Bacterial polypetide isolated from the Sargasso Sea
MAIKNISITGAAGNIAYSLIFRILPNLPFKATDKINLRLLDIPESQKSLEGLKFEIEDCAFESLNDLVTTDNAELAFSDADYILMVGAKPRSKGMERSDLILDNAYIFKSQAEIINNVCSKKTNIIVVGNPANTNALIINHNTPNIPNRNITSLMKLDHNRARSILAAKLNEKVEDIENIVIWGNHSTTQVPDLYNCKVSSKEINLDHSWIHETFIPRVQKRGGEIIEFRGLSSAASAASAIYDHINVLENGSEDWEALGVLSSGEYNITPD

SEQ ID NO: 85896 - protein, 251 aa, Unknown
  Bacterial polypetide isolated from the Sargasso Sea
WFLLVGSIPRGIVYNGKKIEERSDLLSINGGIFVDQGKAIGSFGKDKAKILVVGNPANTNAFIGKNAADNESQLWMAMTMLDSNRAKSVISKKTGVNISEIKNMIIWGNHSPTMYPDSENVIINNQLGSTVINDMSWVEKDFIPSVQQRGKAVIDARGASSATSAAKAAIDTVMACESPTEEGNSFSAAIASDGSYDVPEGIICGFPLVTLSDGTIDIKRDIALSDFAKSKFQISIDELLSERDAVKHLMK

SEQ ID NO: 85897 - protein, 156 aa, Unknown
  Bacterial polypetide isolated from the Sargasso Sea
EIDAMVMGGHGDTMVPLPRFTKVSGKPLMDLLKDGKISEEKLESINQRTRDGGAEIVKYLEKGSAFYAPAASGVEMAEAFLKDQKKLLPCAAHLHGEYGINNVYAGVPVIIGKEGVERIDEIDLNENEKTEFNNSVEAVIKLWDAASKIDPDLNKD

SEQ ID NO: 85898 - protein, 118 aa, Unknown
  Bacterial polypetide isolated from the Sargasso Sea
MAFRCPIKCGICYAYNEIKEINDKNIFNWCRPNRRNTCTFNRNERTSDEVVLFDVASGIAKGKALDIAQSSSVDGFNVRFSGTDNYEDIKDSDVIIITAGIPRKPGMSRDDLLGINLK

SEQ ID NO: 85899 - protein, 159 aa, Unknown
  Bacterial polypetide isolated from the Sargasso Sea
VPVREIEAMVMGGHGDTMVPMPRFTKISGKPLLDLVKDGKISSERVEEINQRTRDGGAEIVKYLEKGSAFYAPAASGVQMAEAYLNDQKKLLPCAVQLNGEYGVKNVYAGVPVVIGKDGVEKIEEIDLDEKEKKEFMHSIDAVKALWEAASKIDPDLSK

SEQ ID NO: 85900 - protein, 120 aa, Unknown
  Bacterial polypetide isolated from the Sargasso Sea
KLSEERLEEINQRTRDGGAEIVKYLEKGSAFYAPAASGVQMAEAYLKDEKKLLPCAVQLNGEYGVKNIFAGVPVIIGKNGVEKIEEINLDEKEKSQFMHSIDAVKKLWESASAIDNDLSK

SEQ ID NO: 85901 - protein, 121 aa, Unknown
  Bacterial polypetide isolated from the Sargasso Sea
GVISFEKLESINQRTRDGGAEIVKFLEKGSAFYAPAASGVEMASSYLNDSKKLLPCAAYLNGEYGIKDIFAGVPVIIGKNGVEKVDEIELDGKESKEFLNSISAVKKLWEVATKIDPSLLA

SEQ ID NO: 85902 - protein, 147 aa, Unknown
  Bacterial polypetide isolated from the Sargasso Sea
MSRPKISLIGGGQVGGNIALLSAQKELGDIVIVDIPEAENFMKGKALDISQLLPHDGYDSKLSGTSKFEDIKDSDVVVITAGFPRQPGMDREDLLQKNLDIMTNVANQVKNFAPDAFVIVVSNPLDAMVYAFHKISGFSKNKVVGMA

SEQ ID NO: 85903 - protein, 45 aa, Unknown
  Bacterial polypetide isolated from the Sargasso Sea
MRKKITLIGAGQIGGTLAHLIALKELGDVVLFDVAARYSKRQSIR

SEQ ID NO: 85904 - protein, 170 aa, Unknown
  Bacterial polypetide isolated from the Sargasso Sea
FKLFLSEELKVPVREMKAMVMGGHGDTMVPLPRFTKISGKPLMDLLKEGRISSERLESINQRTRDGGAEIVKYLEKGSAFYAPAASGVEMAEAYLKDKKKILPCAAYLHGEYGINNVYAGVPVVIGKDGVEKIEEIDLNENEKNEFNNSVEAVIKLWDAASKIDPSLNKD

SEQ ID NO: 85905 - protein, 155 aa, Unknown
  Bacterial polypetide isolated from the Sargasso Sea
MKVTIVGAGNVGASCAEYILIKEIVDEIVLLDIKDGFAEGKALDLTQTTSTLGFKSKVIGVTNDYKSTSNSDVVVITSGIPRKPGMTREELIGINAGIVKSVSENLLMHSPDAIIIVVSNPMDTMTYLVNKSFNISKNRVIGMGGILDSSRFKTY

SEQ ID NO: 85906 - protein, 299 aa, Unknown
  Bacterial polypetide isolated from the Sargasso Sea
MKVTVIGAGNVGSSCVEYIAIKSIASDIVLLDIKKGLAEGKALDLMQTSTTLGFNSRILGVTNDYKATSNSDVVVITSGVPRKPGMTREELIGINAGIVESVVSGVLIHSPNAIIVMVSNPMDTMTYLTLKLSKLSKNKVIGMGGALDSSRFKTYLSIALNKPANQIEGMVIGGHGDTTMIPLTRLATYNGIPVSHFLSEKELDKISSDTMVGGATLTKLLGTSAWYAPGASVSYLVDSILNDRHLLIPCSVLLEGEYDQKDICMGVPCVIGKNGVESVLDLKLNFDEMKKFQNSSASV

SEQ ID NO: 85907 - protein, 199 aa, Unknown
  Bacterial polypetide isolated from the Sargasso Sea
MKDRVKVVVTGAAGQISYSLIPRLVDGYTFGEKIVDLELVEIPQVVDKLKGLIMELEDSNFPNMGNVNYTSDFDSAAKDADWFLLVGSIPRGIVFNGKKIEERSDLLQINGGIFVGQGQAIGKYAKSNAKILVVGNPANTNALIGRHAAGNDSQLWMAMTMLDSSRARSVLSKKLNVGIEDISKMIIWGNHSPTMYPDF

SEQ ID NO: 85908 - protein, 160 aa, Unknown
  Bacterial polypetide isolated from the Sargasso Sea
MRRAKISIIGAGNVGATTAHWCAAAELGDVVLLDIPATEGMPAGKALDLFQASPIMGFDSKITGTTDWSDTAASDVIVVTAGIARKPGMSRDDLLSTNAKIVGDVAGQIKNTSPDAIVIVVSNPLDAMVQRTFQVLGFPPSRVLGQAGILDTARYRAFLA

SEQ ID NO: 85909 - protein, 262 aa, Unknown
  Bacterial polypetide isolated from the Sargasso Sea
MKEINVLVTGAAGQISYSLLPRLISGETFGSNTKVNLKLVEIPPVLDKLQGTVFELVDCGFSNCGSIMSTSDINEAAEDCDWALLVGSIPRGITINGKKIEERGDLLHVNGGIFTDQGKAIGTKGKEDAKILVVGNPANTNALIGKSNSNNNSQLWMAMTALDANRAKAQVSIKTNRSIEDIKGMTIWGNHSPTMYPDLDNASIDGKSVSEIINDSNWIENDFLVRVQQRGKEIIDARGASSAASAANAAIDTVKNVENDTE

SEQ ID NO: 85910 - protein, 127 aa, Unknown
  Bacterial polypetide isolated from the Sargasso Sea
MNKVTVVGAGKYGSMTALRIAEYDIVQEVVMTDIVEGLPQGLALDINQSRFVEQFNTKLIGTNDYKDTEGSDVVVITAGLPRKPGMSRMDLLEVNAKIVEGVTEEILKYSDNPSIIVVTNPLDQMTT

SEQ ID NO: 85911 - protein, 108 aa, Unknown
  Bacterial polypetide isolated from the Sargasso Sea
NDFIPVIQQRGASIIEARGASSAASAANAAIDHMHDWVLGTSEIVSMGVCSDGSYGIEEGLIYSYPATCSNGEWSIVQGQQINAFSQEKMTTTENELKEERDAVAHLL

SEQ ID NO: 85912 - protein, 123 aa, Unknown
  Bacterial polypetide isolated from the Sargasso Sea
LVKEKKITHEKLDQIVERTKKGGAEIVKYLEKGSAFYAPAASGVEMAESYLKDLKKQLPCAAYLDGQYGVKDLYAGVPVIIGSNGVEKIIELNLHEQEKKNFENSIKSVKDLFVAAQKIDKNL

SEQ ID NO: 85913 - protein, 120 aa, Unknown
  Bacterial polypetide isolated from the Sargasso Sea
IKDEEWLKGDFIKTVQQRGSEIIKARGASSAASAANAALDTITKIIAPTNKMDWFSAAIPSDGSYGVTQGLIFSYPLRSSGNGDYEVVQGIELDNFSQQKIKATREELEMERDAVKGMLN

SEQ ID NO: 85914 - protein, 151 aa, Unknown
  Bacterial polypetide isolated from the Sargasso Sea
MVMGGHGDTMVPMPRFTKISGKPLLDLVKEGKISLERVEEINQRTRDGGAEIVKYLEKGSAFYAPAASGVQMAEAYLKDQKKMLPCAVQLNGEYGVQNVYAGVPVVIGKDGAEKIEQIDLDEKEKNEFMHSIDAVKALWEAACKIDPDLSK

SEQ ID NO: 85915 - protein, 35 aa, Unknown
  Bacterial polypetide isolated from the Sargasso Sea
MRKKITLIGAGQIGGTLAHLIALKELGDVVLFDVA

SEQ ID NO: 85916 - protein, 143 aa, Unknown
  Bacterial polypetide isolated from the Sargasso Sea
MVPLPRLTKVSGKPLLDLVEEGKISSKKLESINQRTRDGGAEIVKFLEKGSAFYAPAASGVEMAESYIKDLKKVLPCAAYLDGQYGIKDLYAGVPVLIGKNGVEKIEEINLDDKEKSEFMNSVNAVKKLWEAASKIDPDLKNR

SEQ ID NO: 85917 - protein, 150 aa, Unknown
  Bacterial polypetide isolated from the Sargasso Sea
VMGGHGDTMVPMPRFTKISGKPLLDLVKEGKISLERVEEINQRTRDGGAEIVKYLEKGSAFYAPAASGVQMAEAYLNDKKKLLPCAVQLNGEYGVNNVYAGVPVVIGKDGVEKIEQIDLDEKEKKEFMHSIDAVKALWEAASKIDPDLSK

SEQ ID NO: 85918 - protein, 204 aa, Unknown
  Bacterial polypetide isolated from the Sargasso Sea
MKVSVIGAGNVGASCAEYIAISKIANEVILLDIKEGLSEGKALDLTQTSSTLGFDTVIKGVTNDYKITQDSDVVVITSGIPRKPGMTREELIDINAGIVNSVTENILKFSPNTIIVVVSNPMDTMTYLTLKSNKLEKNKVIGMGGALDSSRFKTYLSKALNKPQSDIHAMVIGGHGDTTMIPLTRLASYNGIPISNLLSDEKQK

SEQ ID NO: 85919 - protein, 178 aa, Unknown
  Bacterial polypetide isolated from the Sargasso Sea
MKVTIVGAGNVGSTCADVIAYKRIASELVLLDIKKDFAEGKALDMNQTSSLLGFNTKIVGTTNNYSLTSNSDVVVITSGIPRKPGMTREELIGVNANIVKTVIRNILKFSPSTVIVIVSNPMDTMTYLAIKESGLPKNKIIGMGGALDSARFRTYLSLAINKPSNDIHAMVIGGHGDT

SEQ ID NO: 85920 - protein, 121 aa, Unknown
  Bacterial polypetide isolated from the Sargasso Sea
EKFPKKDFEEINQRTRDGGAEIVKFLEKGSAFYAPAASGVQMAEAYLNDQKKLLPCAVQLNGEYGVNNVFAGVPVIIGKSGVEKIEEVNLDDNEKKEFMHSIDAVKALWEAASKIDPDLSK

SEQ ID NO: 85921 - protein, 154 aa, Unknown
  Bacterial polypetide isolated from the Sargasso Sea
SSCKKYRELSMGGHGDTMVPMPNHTRVDGKPLKEIINKEKLEKIIDRTRKGGAEIIKFLEKGSAFYAPAASGVEMAESYIKNMKKTLPCAAYLNGEYGYKDIYAGVPVVIGENGVEKIIEIKLDNVEKKNFDVSIKAVRELFDAAKNIDKDLKK

SEQ ID NO: 85922 - protein, 166 aa, Unknown
  Bacterial polypetide isolated from the Sargasso Sea
YFLSQELKVPVQKIKSFVLGGHGDSMVAMLGLTEVNGKKISELVKEGQIKKEKLDQIVERTKKGGAEIVKYLEKGSAFYAPAASGVEMAESYLKDLKKQLPCAAYLNGEYNTKGLYAGVPVIIGSGGVEKVLELELDKDEKKNFENSIKSVQALFSAAQKIDPNLK

SEQ ID NO: 85923 - protein, 240 aa, Unknown
  Bacterial polypetide isolated from the Sargasso Sea
MKNEIKVVVTGAAGQIGYSLIPRLIDGNTFGDKTVNLSLVEIPQVVSKLEGLAMELDDSYFPNLGTINYTDNFSEAADGADWFLLVGSIPRGIVYNGKKIEERSDLLQINGGIFVDQGKSIGEFGNENAKILVVGNPANTNALIGRKAANNSSQIWMAMTMLDSNRAKSMLAKKLSCNVSEIKKMIIWGNHSPTMYPDFENALKDNQSVANLIEDTNWIDSHFIPNVQQRGKAVIDARGA

SEQ ID NO: 85924 - protein, 89 aa, Unknown
  Bacterial polypetide isolated from the Sargasso Sea
MAKISLIGAGQIGGTLAHLIGTKELVNEVVLFDVASGIAKGKALDIAQSSSVDGFNVRFSGTDNYEDIKDSDVIIITAGVPRKPGMSRD

SEQ ID NO: 85925 - protein, 170 aa, Unknown
  Bacterial polypetide isolated from the Sargasso Sea
MICITFYQNKHTCNNSVLCKFINHFLYKYLAISKRRHIMKRKKISLVGGGQIGGNLALLASQKELGDIVIYDIPNAEGMIKGKALDISQLNPLDGYDANISGSSNPEDLKDSDVVIITAGIPRKPGMNREDLLEINIKIITDVANNVKKYAPNAFVIVLSNPLDAIVYSF

SEQ ID NO: 85926 - protein, 130 aa, Unknown
  Bacterial polypetide isolated from the Sargasso Sea
GKPLLDLVKEGKISSEKLESINQRTRDGGAEIVKYLEKGSAFYAPAASGVQMAEAYLQDKKLTLPCAVKLDGQYGFKDVYAGVPVIIGSKGVEKIVEIELNDQEKKEFIHSVDSVKKLWDAATKIDPDLK

SEQ ID NO: 85927 - protein, 107 aa, Unknown
  Bacterial polypetide isolated from the Sargasso Sea
RIQNAGTEVVEAKAGGGSATLSMGQAACRFGMSLVRGLQGEANIVECAYVDGGSEHAEFFAQPVLLGKNGIEKVQPYGEVSAFEANARDSMLDTLKGDIKLGVDFVK

SEQ ID NO: 85928 - protein, 152 aa, Unknown
  Bacterial polypetide isolated from the Sargasso Sea
MVMGGHGDTMVPLPRFTKVSGKPLMDLLKEGKISEEKLESINQRTRDGGAEIVKYLEKGSAFYAPAASGVEMAEAFLKDQKKLLPCAAHLHGEYGINNVYAGVPVVIGKEGVERIDEIDLNENEKTEFNNSVEAVIKLWDAASKIDPDLNKD

SEQ ID NO: 85929 - protein, 173 aa, Unknown
  Bacterial polypetide isolated from the Sargasso Sea
MDTSIFKYFLSKEMNVPINQIQSLVLGGHGDTMVAMINHTKINGKLLSELTSAGKIKKEKLDTIIERTKTGGAEIVKHLQKGSAFYAPAASGVEMAESYLKDLKKELPCAAFLNGEYGVKNLYAGVPTIIGKNGVEKIIEINLTEDEKKNFKKSINSVQELFDAAKKIDKTLS

SEQ ID NO: 85930 - protein, 196 aa, Unknown
  Bacterial polypetide isolated from the Sargasso Sea
GNPANTNALIAMSNAPDIDQNAFTAMMRLDHNRALAQLASKLDCHSSMLTNMTIWGNHSTTQYPDITNLKLSGEDASKRLDETWIKGEFIPRVQNRGAEIIKARGLSSAASAASAAIDHMRDWALGTEDNDWVSMAIPSDGSYGISEGIIYSFPVTCQNGSYSIVQDLEIDDFSKECMEITEKELLEEKAAIEHLL

SEQ ID NO: 85931 - protein, 136 aa, Unknown
  Bacterial polypetide isolated from the Sargasso Sea
FTKVSGKPLLDLVKEGKISQERLEEINQRTRDGGAEIVKFLEKGSAFYAPAASGVEMAKAYLKDEKKMLPCAAYMNGEYGIKDIYAGVPIIIGKNGVEKIEEINLDEKEKSEFLHSIDAVKKLWEAASKIDPDLTK

SEQ ID NO: 85932 - protein, 97 aa, Unknown
  Bacterial polypetide isolated from the Sargasso Sea
VNEVVLFDVASGIAKGKGLDIAHSSSVDGFNVKFSGTDDYKDFKDSDVIIITAGVPRKPGMSRDDLLGINLKIIKQVAEGIKQNAPKAFVICITYPF

SEQ ID NO: 85933 - protein, 75 aa, Unknown
  Bacterial polypetide isolated from the Sargasso Sea
MKDPVRVTITGAAGQIGYALLFRVASGAMLGNDQPVSLQLLEITSALDAVKGVVMELDDCAFHFFRMLCTPMTPM

SEQ ID NO: 85934 - protein, 141 aa, Unknown
  Bacterial polypetide isolated from the Sargasso Sea
VSGKPLLDLVNDGKISKERLEEINQRTRDGGAEIVKFLEKGSAFYAPAASGIEMAKAYLNDEKKMLPCAAHLDGEYGIKDIYAGVPIIIGKSGVEKIEEINLDEKEKSEFLHSVEAVKKLWEAASKIDPDLVKNEYSRTPS

SEQ ID NO: 85935 - protein, 127 aa, Unknown
  Bacterial polypetide isolated from the Sargasso Sea
IKENSPNAFVICITNPLDVMVMAFQKYSKLNPKKVVGMAGKLDSSRIKLFLSLELNVAVKEIETTVMGGHGDTMVPLPRLTTIKGKPLFELVKEGKITNDRINSIVQRTRDGGAEIVRLLEKGSAYY

SEQ ID NO: 85936 - protein, 120 aa, Unknown
  Bacterial polypetide isolated from the Sargasso Sea
ISSERLESINQRTRDGGAEIVKYLEKGSAFYAPAASGVEMAEAYLKDKKTILPCAAYLHGEYGINNVYAGVPVVIGKDGVEKIEEIDLNENEKTEFNNSVEAVIKLWDVASKIDPSLNKD

SEQ ID NO: 85937 - protein, 227 aa, Unknown
  Bacterial polypetide isolated from the Sargasso Sea
MKVTVVGAGAVGASCAEYIAIKNFASEVVLLDIKEGFAEGKAMDLMQTASLNGFDTKITGVTNDYSKTADSDICIITSGIPRKPGMTREELIGINAGIVKDVSSNLVKHSPKTIIIVVSNPMDTMTYLVHKTSGLDKNKIIGMGGALDSARFKYRLAEALGAPISDVDGMVIGGHSDTGMVPLTRLATRNSIPVTKFISEERMNQVMEDTKVGGATLTKLLGTSAWY

SEQ ID NO: 85938 - protein, 119 aa, Unknown
  Bacterial polypetide isolated from the Sargasso Sea
ISSEKLESINQRTRDGGAEIVKYLEKGSAFYAPAASGVEMAAAYLNDEKKLLPCAAYMNGEYGVEKIYAGVPVIIGKNGIEKIEEVELDDKEKAEFNHSIDAVKKLWEAASAIDPELKK

SEQ ID NO: 85939 - protein, 246 aa, Unknown
  Bacterial polypetide isolated from the Sargasso Sea
MKVTIVGAGSVGSSCAEYIAIKDIADEIVLLDIKEGFAEGKSLDLMQTSSSLGFNAQIFGVTSDYEKTKSSDVVVITSGIPRKPGMTREELIGINAGIVDSVTENLLIHSPDAIIIVVSNPMDTMTYLVVKKTGLPRNRVIGMGGILDSSRFKTYISIALNNEPQKNIDAMVIGGHGDTTMIPLTDNAKVNDIPLSDLLSTDEISKISSDTMVGGATLTKLLGTSAWYAPGASVAFLVKSILNDQK

SEQ ID NO: 85940 - protein, 126 aa, Unknown
  Bacterial polypetide isolated from the Sargasso Sea
LSQVKGVTFSDEEVASLTKRIQNAGTEVVEAKAGGGSATLSMGQAACRFGMSLVRGLQGEANIVECAYVDGGSEHAEFFAQPVLLGKNGIEKVQPYGEVSAFEANARDSMLDTLKGDIKLGVDFVK

SEQ ID NO: 85941 - protein, 307 aa, Unknown
  Bacterial polypetide isolated from the Sargasso Sea
SVKVVVQGAAGQIAYSLIPRLVDGRTFGNKKVNLTLVEIPQVVEKLKGLVMELEDSYFPNMGEVKYTDNFEEASKDADWFLLVGSIPRGIVYNGKKIEERSDLLSINGGIFVDQGKAIGEHGKASAKILVVGNPANTNAFIGKNAANNDSQLWMAMTMLDSNRAKSVISKKTNTDISDVTNMIIWGNHSPTMYPDSENVCINGVLGSEAINDMTWVESEFIPTVQQRGKAVIDARGASSATSAAKAAIDTVIACENPTPSGVCFSAAIASDGSYDVPEGIICGYPLMTLEDGTVDIKRDIALSDLQS

SEQ ID NO: 85942 - protein, 57 aa, Unknown
  Bacterial polypetide isolated from the Sargasso Sea
MRKKIALIGAGNIGGTLAQHVSLKELGDVVLLDIFEGMPKGKSLDLAQSSSIEGFHA

SEQ ID NO: 85943 - protein, 121 aa, Unknown
  Bacterial polypetide isolated from the Sargasso Sea
QVKSQKETLNLIVERTKKGGAEIVKYLEKGSAFYAPAASGVEMAESYLKDLKKQMPCAAYLDGEYGVKDLYVGVPVIIGSNGVEKVIELKLSEVEKKDFHKSIDSVKELFKAAKKIDPSIE

SEQ ID NO: 85944 - protein, 45 aa, Unknown
  Bacterial polypetide isolated from the Sargasso Sea
MTNKKISLIGAGQIGGTLAHLAAMKELGDVVLFDLMSGLAKGKAL

SEQ ID NO: 85945 - protein, 147 aa, Unknown
  Bacterial polypetide isolated from the Sargasso Sea
WSWRYNVPMPRFTKISGKPLLDLVKEGKISLERVEEINQRTRDGGAEIVKYLEKGSAFYAPAASGVQMAEAYLNDKKKLLPCAVQLNGEYGVNNVYAGVPVVIGKDGVEKIEQIDLDEKEKKEFMHSIDAVKALWEAASKIDPDLSK

SEQ ID NO: 85946 - protein, 140 aa, Unknown
  Bacterial polypetide isolated from the Sargasso Sea
SSPRFTKISGKPLLDLVKEGKISTKRLEEINQRTREGGAEIVKYLEKGSAFYAPAASGVEMAASYLNDEKKLLPCAVHLDGEYGVSNIYAGVPVIIGKDGVEKIEEINLDDKEKKEFMSSIDSVRKLWKAALVIDKDLSK

SEQ ID NO: 85947 - protein, 161 aa, Unknown
  Bacterial polypetide isolated from the Sargasso Sea
DSARFRAFIAEATNLSSQDVNCMVLGGHGDTMVPVSRLATVGGVPLSSLLSSEEIIAIENRTRVGGGEIVKLFGKGSAFYAPAQSAVEMIESFIRDKKRVIPCASLCEGEFDVEGYFIGVPTVIGSGGVEKILTFDLDKDEKIALSNTLIEVKKTVSETGL

SEQ ID NO: 85948 - protein, 121 aa, Unknown
  Bacterial polypetide isolated from the Sargasso Sea
MNKVTVVGAGKYGSMTALRIAEYNIVQEVVMTDIVEGLPQGLALDINQSRFVEQFNTKLIGTNDYKDTEGSDVVVITAGLPRKPGMSRMDLLEVNAKIVEGVTEEILKYSDNPSIVVVTNP

SEQ ID NO: 85949 - protein, 113 aa, Unknown
  Bacterial polypetide isolated from the Sargasso Sea
SGDFIKSVQQRGAAIIKARGASSAASAANAVIDTIQRLNNPTPDGEWFSTAIPSDGSYGIPDGIMFSYPLRSLGNYEYEVVQSLELNEFGQQKVQATREELEMEREAVSDIMG

SEQ ID NO: 85950 - protein, 143 aa, Unknown
  Bacterial polypetide isolated from the Sargasso Sea
GHGDTMVPLVRYSAVAGIPVPDLIEMGWSTKDKIDKIVQRTRDGGAEIVGLLKTGSAFYAPAESAIQMAEAFLKDKKKLLPCAAHVEKAYGLNGLYVGVPVIIGKNGVERIVEINLTDDEKKMFDHSVESVKKLNQLAKKFEN

SEQ ID NO: 85951 - protein, 173 aa, Unknown
  Bacterial polypetide isolated from the Sargasso Sea
MTALDANRAKAQLALKAGSDITSVSNMTIWGNHSPTMYPDPYNAKINGISATEVINDDKWIENEYLPLVQQRGKAVIDARGASSAASAANAAIDTVKAVENVTPENDSFSAAIASDGSYGVPEGLIFGYPLRTTSPGKVEIIQGLELNEFAESKIKATTEELISEKEAVADLL

SEQ ID NO: 85952 - protein, 121 aa, Unknown
  Bacterial polypetide isolated from the Sargasso Sea
GVPVEDMIEKNKLASIVQRTRDGGAEIVALLKTGSAFYAPSASIVQMVEAILLDKQQILPCAALLNGEYGFNDVYAGVPVKLGANGIEEVIEVDLNKDEHSALSKSVDSVIELLDIMKKNS

SEQ ID NO: 85953 - protein, 123 aa, Unknown
  Bacterial polypetide isolated from the Sargasso Sea
KENKISKSKLDEIVNRTRKGGAEIVKLLEKGSAFYAPAASGVEMAEAYIKDQKKTLPCAAYLNGEYGYKDIYAGVPVMIGKNGVEKILEIELENNEKSNFDVSINAVKELCSAAAKIDPVLGK

SEQ ID NO: 85954 - protein, 116 aa, Unknown
  Bacterial polypetide isolated from the Sargasso Sea
KLESINQRTRDGGAEIVKYLEKGSAFYAPAASGVEMAEAFLKDQKKLLPCAAHLHGEYGINNVYAGVPVVIGKEGVERIDEIDLNENEKKEFNNSVEAVIKLWDAASKIDPDLNKD

SEQ ID NO: 85955 - protein, 266 aa, Unknown
  Bacterial polypetide isolated from the Sargasso Sea
MKEINVAVTGGAGQIAYSLLPRLVSGETFGVDTKVNLRLIEIPQVVDKLEGTIMELIDCGFEQTGTLIATADIKEGVKDAHWVLLVGSIPRGIVVDGKKIEERSDLLKINGGIFTDQGEAIGKLAQKDAKILVVGNPANTNALIGRTKSENPTQSWFAMTALDANRAKAQLAEKAGAEISSVTNMTVWGNHSPTMYPDPYNAQIDGVSAVEVISDLDWVENKYLPLVQQRGKAVIDARGASSAASAANAAIDTVKAVDNQTKEGDW

SEQ ID NO: 85956 - protein, 143 aa, Unknown
  Bacterial polypetide isolated from the Sargasso Sea
MARKKITLIGGGQIGGNLALLATQKELGDVVIFDIPQSEGMVKGKALDIMQLRPHEGYDSNITGSADWKDVKGTDVFIITAGIPRKPGMNREDLLEINLGIMKDVAKNIKENAPKAFVIVISNPLDAMVYAFHKVSGFKKNQV

SEQ ID NO: 85957 - protein, 101 aa, Unknown
  Bacterial polypetide isolated from the Sargasso Sea
MGYRRNKISLIGAGQIGGTLALLSGLKNLGDLVLFDIVDGVPQGKGLDIAQASTVEMFDSKIEGASDYSAIEDSDVIIVTAGVPRKPGMSRDDLLEINLKV

SEQ ID NO: 85958 - protein, 33 aa, Unknown
  Bacterial polypetide isolated from the Sargasso Sea
YIITAGVPRKPGMSRDDLLGINLKIIKQSCRRE

SEQ ID NO: 85959 - protein, 93 aa, Unknown
  Bacterial polypetide isolated from the Sargasso Sea
MSKSKIALVGSGAIGGTLAHLIGLKELGDVVLLDIAKGIPEGKSLDIAQSSPVEGFDVSMRGGSNYSLLKNSNVVIVTAGIPRKPGMSRDDLL

SEQ ID NO: 85960 - protein, 224 aa, Unknown
  Bacterial polypetide isolated from the Sargasso Sea
MSESIKVVVTGAAGQIAYSLIPRLVNGRTFGDKKVDLVLVEIPQVVNKLKGLIMELEDSYFPNMGNVTYTDNFEEAALDGDWFLLVGSIPRGIVYNGKKIEERSDLLSINGGIFVDQGQAIGRYGKDDAKILVVGNPANTNAFIGRNAANKESQLWMAMTMLDSNRAKSIISKKTNKNISDIKNMIIWGNHSPTMYPDAENTIISDELGNSVINDMNWIESDFI

SEQ ID NO: 85961 - protein, 328 aa, Unknown
  Bacterial polypetide isolated from the Sargasso Sea
MKIVVTGAAGQIAYSLVPFLCEKGIFQSEEKIDLHLVEIPSAMERLDGFVKELEDSAYSTVNSINTHDNITAAVENADWCLLVGSIPRGIVFQGKEIKERSDLLQINGGIFTEQGKAIGSKAKDNCKILVVGNPANTNALIGHHNANNANQTWMAMTMLDALRAKAQLSIKLNCHVDDIYRLAVFGNHSPTMFPDLENTIVNGKNAYESINDHSWVEKEFLPKIQQRGAEIIEARGASSASSAARAACDTVKAVEHPTRSGDVFNAAIMSDGSYGVPAGIFSGFPLLSDGSGNIEIVRDYNLSEFAKSKIAITANELLEEKDLVKDLI

SEQ ID NO: 85962 - protein, 273 aa, Unknown
  Bacterial polypetide isolated from the Sargasso Sea
MSSSIKVVVTGAAGQIAYSLIPRLVNGRTFGDKKVDLALVEIPQVVDKLKGLVMELEDSYFPSMGKVTYTDNFSEAAKDADWFLLVGSIPRGIVYNGKKIEERSDLLSINGGIFVDQGKAIGSFGKDKAKILVVGNPANTNAFIGKNAADNESQLWMAMTMLDSNRAKSVISKKTDVNISEIKNMIIWGNHSPTMYPDSENVIINNQLGSTVINDMNWVEKDFIPSVQQRGKAVIDARGASSATSAAKAAIDTVMACESPTEEGNSFSAAIAS

SEQ ID NO: 85963 - protein, 253 aa, Unknown
  Bacterial polypetide isolated from the Sargasso Sea
MKNEIKVVVTGAAGQIGYSLIPRLIDGNTFGDATVNLSLVEIPQVVSKLEGLAMELDDSYFPNLGTIDYTDNFSEAADGADWFLLVGSIPRGIVYNGKKIEERSDLLQINGGIFVDQGKAIGEFGNENAKILVVGNPANTNALIGRKAANNSSQTWMAMTMLDSNRAKSMLAKKLSCNVSEIKKMIIWGNHSPTMYPDFENAVKDNQSVANLIEDTNWIDSHFIPNVQQRGKAVIDARGASSATSAAKAALDT

SEQ ID NO: 85964 - protein, 174 aa, Unknown
  Bacterial polypetide isolated from the Sargasso Sea
MKVTIVGAGNVGATAADVIASKGIADHVVLLDIKDGFAEGKALDLMQTATTKGFDSIITGTTGDYSLTKDSDVVVITSGIPRKPGMTREELIGINANIVKDVSSSILKYNKEPIIVMVSNPMDTMTYLSLKSTGLNPKKVIGMGGALDSSRFKTYLSLALNKPQKGLDAMVIGG

SEQ ID NO: 85965 - protein, 331 aa, Unknown
  Bacterial polypetide isolated from the Sargasso Sea
MKKEIKVVVTGAAGQIGYSLIPRLVDGNTFGDKTVNLSLVEIPQVVSKLEGLAMELDDSYFPNLGTVDYTDNFSEAAKSADWFLLVGSIPRGIVYNGKKIEERSDLLQINGGIFVDQGRAIGELGNENAKILVVGNPANTNALIGRSAANNPSQTWMAMTMLDSNRAKSMLAKKLSCNVSEIKKMIIWGNHSPTMYPDYENALKDDQSIANLIEDTNWIDSHFIPNVQQRGKAVIDARGASSATSAAKAALDTVIACENETSSDDCFSAAVYSDGAYDVPEGIMCGFPLMTTPSGEIEIIRDLTLSDNARSRLSLSVDELLSEREAVKDLL

SEQ ID NO: 85966 - protein, 261 aa, Unknown
  Bacterial polypetide isolated from the Sargasso Sea
MKNEIKVVVTGAAGQIGYSLIPRLIDGNTFGDKTVNLSLVEIPQVVSKLEGLAMELDDSYFPNLGTIDYTDNFSEAADGADWFLLVGSIPRGIVYNGKKIEERSDLLQINGGIFVDQGKAIGEFGNENAKILVVGNPANTNALIGRKAANNSSQTWMAMTMLDSNRAKSMLAKKLSCNVSEIKKMIIWGNHSPTMYPDFENALKDNQSVANLIEDTNWIDSHFIPNVQQRGKAVIDARGASSATSAAKATLDTVIACENAT

SEQ ID NO: 85967 - protein, 311 aa, Unknown
  Bacterial polypetide isolated from the Sargasso Sea
MKVTVVGAGSVGSSCAEYLAIKDIADDIVLLDIKEGFAEGKSLDLIQTSSSLGFNAKISGVTSDYEKTKSSDVTVITSGIPRKPGMTREELIGINAGIVDSVTENLLKYSPNAIIIVVSNPMDTMTYLVLKKTGLPRNRVIGMGGILDSSRFKTYISLALNNEPQKNIDAMVIGGHGDTTMIPLTDHAKVNDKPLASLLSVDEIEKIASDTMVGGATLTRLLGTSAWYAPGASVAYLVQSILNDSKKILPCSVMLNGEYHSKDICIGVPCIIGSNGLEEIIEINLNNIVRERFQKSVEAVKNTNLLLKGLT

SEQ ID NO: 85968 - protein, 86 aa, Unknown
  Bacterial polypetide isolated from the Sargasso Sea
MTKISLIGAGQIGGTLAHLIGLKELVNEVVLFDVASGIAKGKGLDIAQSSSIDGFDVKFSGSDNYKDIKGSDVIIITAGVPRKPGM

SEQ ID NO: 85969 - protein, 97 aa, Unknown
  Bacterial polypetide isolated from the Sargasso Sea
MTKVTVVGSGKYGSMTALRVAEYDIADTVVMTDIVEGLPQGLALDMNQSRFVEKFSSKIIGTNNYEDTSDSDVVVITAGLPRKPGMSRMDLLEVNAN

SEQ ID NO: 85970 - protein, 332 aa, Unknown
  Bacterial polypetide isolated from the Sargasso Sea
MSKSIKVVVTGAAGQIAYSLIPRLVDGKTFGDKIVNLALVEIPQVVDKLEGLVMELEDSYFPNMGEVTYTDNFEEASKDADWFLLVGSIPRGIVYNGKKIEERSDLLSINGGIFVDQGIAIGRYGRKNAKILVVGNPANTNAFIGKHAANNDSQLWMAMTMLDANRAKSILAKKTNNNVSDIKNMIIWGNHSPTMYPDSENVQILGELGSSVINDINWVESDFIPKVQQRGKAVIDARGASSATSAAKAAIDTVIACENPTDPGDCFSAAIASDGSYDVPKGIICGYPLMTLEDGSIEIKRDISLSEFAKNKFQISIDELLSEREAVKHLMQ

SEQ ID NO: 85971 - protein, 332 aa, Unknown
  Bacterial polypetide isolated from the Sargasso Sea
MSKSIKVVVTGAAGQIAYSLIPRLVDGNTFGDKIVDLALVEIPQVVDKLKGLVMELEDSYFPKMGKVTYTDNFEEASKDADWFLLVGSIPRGIVYNGKKIEERSDLLSINGGIFVQQGEAIGKYGKDDAKILVVGNPANTNAFIGKDAANNDNQLWMAMTMLDSNRAKSILAKKTNNNVSDIKNMIIWGNHSPTMYPDSENALISGKLGSEVINDMNWIESEFIPTVQQRGKAVIDARGASSATSAAKAAIDTVIACENPTDSGDCFSAAIASDGAYDVPEGIICGYPLITLDDGSIEIKRDISLSDFAKSKFKISIDELLSEREAVKHLLK

SEQ ID NO: 85972 - protein, 176 aa, Unknown
  Bacterial polypetide isolated from the Sargasso Sea
GILDSSRFKLFLSLELKVPVKEIEALVMGGHGDSMVPLPRFTKVSGKPLLDIVKSGKLTLKRLEEINQRTRDGGAEIVKHLEKGSAFYAPAASGVQMAESYLKDEKKLLPCAVYLNGEYGVKNIFAGVPVIIGKNGVEKVEEIILDEKEKSEFLHSIDAVKKLWDAASSIDKDLSK

SEQ ID NO: 85973 - protein, 114 aa, Unknown
  Bacterial polypetide isolated from the Sargasso Sea
LESINQRTRDGGAEIVKYLEKGSAFYAPAASGVEMAAAYLNDEKKLLPCAAYINGEYGVEKIYAGVPVIIGKNGIEKIEEVELDDKEKAEFNHSIDAVKKLWEAASAIDPDLKR

SEQ ID NO: 85974 - protein, 103 aa, Unknown
  Bacterial polypetide isolated from the Sargasso Sea
MKTVKVAVTGAAGQIGYAMLFRLASGAVFGQDTAVELRLLELEQALPALEGVKMELDDCAFPLLENIVTTSDTDHAFKGVDWALLVGSVPRKADMERNDLLKV

SEQ ID NO: 85975 - protein, 167 aa, Unknown
  Bacterial polypetide isolated from the Sargasso Sea
LFLSLELNVPVKEIEAMVMGGHGDTMVPMPRFTKVSGKPLIDLVKEGKISQERLEEINQRTRDGGAEIVKFLEKGSAFYAPAASGVQMAEAYLNDEKKLLPCAVQLNGEYGVENVYAGVPVTIGKDGVEKIEEINLNEKEKKEFLHSIDAVKTLWEAASKIDPDLSK

SEQ ID NO: 85976 - protein, 310 aa, Unknown
  Bacterial polypetide isolated from the Sargasso Sea
MKVTIVGAGNVGATAADVIASKDIAENVVLLDIKEGFAEGKALDLMQTASTKGFDSVITGTTGDYSLTEGSDVVVITSGIPRKPGMTREELIGINANIVKDVSKNILEYTPNPIIVMVSNPMDTMTYLALKSTGLDPKRVIGMGGALDSSRFKTYISLAINKPQKNIDAMVIGGHGDTTMIPLHRFAKHNDNLLNELLNNDEIEKVVKSTMVGGATLTKLLGTSAWYAPGSSIAYLVDSILNDRKNIIPCSVYLEGEYDQSDICIGVPCVIGKNGLEEVIQLDLNDDEITKFNESADAVRSMNSTLVDHT

SEQ ID NO: 85977 - protein, 310 aa, Unknown
  Bacterial polypetide isolated from the Sargasso Sea
MKVTIVGAGNVGASCAEYIAIKQIAEEVILLDIKEGFAEGKALDLTQTTSTLGFTSRILGVTNQYEKTSNSDVVVITSGIPRKPGMTREELIGINAGIVKSVSENLLKFSPDAVIIVVSNPMDTMTYLVNKSFNLSKNKIIGMGGILDSSRFKTYISKSTKYSQHEIDAMVIGGHGDTTMIPVTSNAKCSDILLSEILTKEEILNITTNTMVGGATLTKLLGTSAWYAPGASVSYLVNAIVNDTKEILPCSVLLNGEYGAKDLCIGVPVIIGKNGFEDIIEIDLNNIEVEMFKKSVEAVKQTNSALDGLI

SEQ ID NO: 85978 - protein, 328 aa, Unknown
  Bacterial polypetide isolated from the Sargasso Sea
MKIVVTGAAGQIAYSLVPFLCEKGIFQSEEKIDLHLVEIPSAMERLDGFVKELEDSAYSTVNSISTHDNITAAAENADWCLLVGSIPRGIVFQGKEIKERSDLLQINGGIFTEQGRAIGSKAKDNCKILVVGNPANTNALIGHHNANNANQTWMAMTMLDALRAKAQLSIKLNCHIDDIYRLAVFGNHSPTMFPDLENTIVDGKNAYESINDHSWVEKEFLPKIQQRGAEIIEARGASSASSAARAACDTVKAVEHPTRSGDVFNAAIMSDGSYGIPAGIFSGFPLLSDGSGNIEIVRDYNLSEFAKSKIAITANELLEEKDLVKDLI

SEQ ID NO: 85979 - protein, 157 aa, Unknown
  Bacterial polypetide isolated from the Sargasso Sea
KEIDAMVMGGHGDTMVPLPRFTKVSGQPLMELVKEGKISEEKLESINQRTRDGGAEIVKYLEKGSAFYAPAASGVEMAEAFLKDQKKLLPCAAYLHGEYGINNVYAGVPVIIGNEGVEKIEEIDLNENEKTEFNNSVEAVIKLWDAASKIDPDLNKD

SEQ ID NO: 85980 - protein, 331 aa, Unknown
  Bacterial polypetide isolated from the Sargasso Sea
MKNEIKVVVTGAAGQIGYSLIPRLIDGNTFGDKTVNLSLVEIPQVVSKLEGLAMELDDSYFPNLGTIDYTDNFSEAAEGADWFLLVGSIPRGIVYNGKKIEERSDLLQINGGIFVDQGKAIGEFGNQDAKILVVGNPANTNALIGRNAANNSSQTWMAMTMLDSNRAKSMLAKKLSCNVSEIKKMIIWGNHSPTMFPDFENALKDNRSVASLIEDTNWIDSHFIPNVQQRGKAVIDARGASSATSAAKAALDTVIACENITSSDDCFSAAVYSDGAYGVPEGIMCGFPLMTTPSGEIEIIRDLTLSDSARSRLNLSIDELLSEREAVEDLL

SEQ ID NO: 85981 - protein, 113 aa, Unknown
  Bacterial polypetide isolated from the Sargasso Sea
EEINQRTRDGGAEIVKYLEKGSAFYAPAASGVQKAEAYLNDEKKLLPCAIQLNGEYGVNNVYAGVPVMIGKNGVEKIEEIDLDEKEKKEFMHSIDAVKALWEAASKIDPDLSK

SEQ ID NO: 85982 - protein, 65 aa, Unknown
  Bacterial polypetide isolated from the Sargasso Sea
MKKKISLIGAGQIGGTLAHLISIKELGDVVLFDVMEGIAKGKALDIAQSTSIDGYNINILGTNKY

SEQ ID NO: 85983 - protein, 105 aa, Unknown
  Bacterial polypetide isolated from the Sargasso Sea
MRKKIALIGAGNIGGTLAQLVSLKELGDVVLLDIFEGMPKGKSLDLAQSSSIEGFHANFKGTSSFRDIKNSDVVIVTAGFPRKPGMSRDDLLEKNSIIIQECREK

SEQ ID NO: 85984 - protein, 285 aa, Unknown
  Bacterial polypetide isolated from the Sargasso Sea
SLSLYDLRGTAGVAADLSHTNTACSVEGFEGPENLAAALTGCVLVIIPAGVPRKPGMSRDDLFSINAGIVKDLCVAVSENCPDALVNIISNPVNSTVPIAAEVFKAAGTYDPKKVFGVTTLDVVRSNTFVAEAQGLDVNDVDVPVVGGHAGITILPLLSQAYPSVEFSADELEKLTVRIQNAGTEVVEAKAGAGSATLSMAYAAARMAEACLRGLSGEPDVYECAYVASSVTDLPFFATKVKLGPGGAEEVLPVGDITDYERGWLEKLIPELKASIDKGIEFAGK

SEQ ID NO: 85985 - protein, 261 aa, Unknown
  Bacterial polypetide isolated from the Sargasso Sea
FKGTSSYKDIKNSDVVIVTAGFPRKPGMTRDDLVEKNSSIIQNVGLNIRKYCPRAFVICITNPLDAMVSVLQKSSGLKTNMCVGMAGVLDSARLKYFLSEEFNVSVKDISAFVLGGHGDTMVPVIRYATVSGLPVPELIKMKWTTQKRIDTIIQRTREGGGEIGKLMKVASAYYAPASSAILMAESYLKDHKRVLPCAAYLNGEYGIKGLYVGVPVIIGKRGVEKIIELKLNSKEKKDFNHSVNAVKDLTKLANNFLKKKK

SEQ ID NO: 85986 - protein, 161 aa, Unknown
  Bacterial polypetide isolated from the Sargasso Sea
MRNKIALIGSGNIGGTLAHLAAIRELGDVALFDIAEGIPQGKALDLAQSGPVEGFDCNISGSNEYSALSESDVVIVTAGVARKPGMSRDDLVEINTKVMKQVGEGIKENCPNAFVICITNPLDAMVGVLQRASGLPTNMVVGMAGVLDSARFRRFLADEFD

SEQ ID NO: 85987 - protein, 300 aa, Unknown
  Bacterial polypetide isolated from the Sargasso Sea
VSLKELGDVVLLDIFEGMPKGKSLDLAQSSSIEGFHADFKGTSNFRDIKNSDVVIVTAGFPRKPGMSRDDLVEKNSIIIQNVGKNIKKYCPKAFVICITNPLDAMVSVLQKSSGLKTNMCIGMAGVLDSARLKYFLSKEFNVSINDISAFVLGGHGDTMVPLMRYSTVSGIPVPELIKMKWTTKKNIDKIIQRTRDGGAEIVKLMNTSAYYAPASSAIQMAESFLLDQKRLLPCAAYLNGEYGVKGLYVGVPVIIGKKGVEKIIELKLNNNEKKEFNHSVKAVKSLTTLSNKLLNKKNKK

SEQ ID NO: 85988 - protein, 298 aa, Unknown
  Bacterial polypetide isolated from the Sargasso Sea
KELVNEVVLFDVASGIAKRKALDIAQSSSVDGFNVRLSGTDNYEDIKDSDVIIITAGVPRKPGMSRDDLLGINLKIIKQVAEGVKKNAPDAFVICITNPLDVMVMAFQKFSGLPSNKVVGMAGILDSSRFKLFLSLELNVPVREIEAMVMGGHGDTMVPMPRFTKISGKPLLNLVKDGKISLERVEEINQRTRDGGAEIVKYLEKGSAFYAPAASGVQMAEAYLNDQKKLLPCAVQLNGEYGVKNVYAGVPVVIGKDGVEKIEEIDLDEKEKKEFMHSIDAVKALWEAASKIDPDLSK

SEQ ID NO: 85989 - protein, 209 aa, Unknown
  Bacterial polypetide isolated from the Sargasso Sea
KAFVICITNPLDVMVMAFQKFSGLPSNKVVGMAGILDSSRFKLFLSLELNVPVREIEAMVMGGHGDTMVPMPRFTKISGKPLLDLVKDGKISLERVEEINQRTRDGGAEIVKYLEKGSAFYAPAASGVQMAEAYLNDQKKLLPCAVQLNGEYGVKNVYAGVPVVIGKDGVEKIEEIDLDEKEKNEFMHSIDAVKALWEAASKIDPDLSK

SEQ ID NO: 85990 - protein, 301 aa, Unknown
  Bacterial polypetide isolated from the Sargasso Sea
MSKKISLIGAGQIGGTLAHLIGLKELVDEVVMFDVASGIAKGKALDIAQSSSVDGFNVKLSGTDNYEDIKDSDVIIITAGVPRKPGMSRDDLLGINLKIIKQVAEGIKKNAPNAFVICITNPLDVMVMAFQKYSGLPTNKVVGMAGILDSSRFKLFLSLEFKIPVKEIEATVMGGHGDTMVPLPRFTKVSGKPLLDLVKEGKLSAERLEEINQRTRDGGAEIVKYLEKGSAFYAPAASGVQMAEAYLKDEKKLLPCAVQLNGEYGVKNIFAGVPVIIGKNGVEKIEEINLDEKEKSQFMHS

SEQ ID NO: 85991 - protein, 172 aa, Unknown
  Bacterial polypetide isolated from the Sargasso Sea
RLLRNRAKSQLAWKAGVPVKDVTNMTIWGNHSATQYPDYTNALIKGMPASHIIKDEEWLKGDFIKTVQQRGSEIIKARGASSAASAANAALDTITRVITPTKKVDWFSAAIPSDGSYGVNPGLIFSYPLRSSGNGDYEVVQGIELDEFSKQKIKATREELEMERAAVKEMLN

SEQ ID NO: 85992 - protein, 231 aa, Unknown
  Bacterial polypetide isolated from the Sargasso Sea
DDLLGINLKIIKEVAHGIKKHSPNAFVICITNPLDVMVMALQKYSRLPEKKVVGMAGILDSSRFKLFLSLELNVPVKDIEAMVMGGHGDTMVPLPRFTKVSGKTLLDLVKEGKISEERLESINQRTKDGGAEIVKYLEKGSAFYAPAASGVQMAEAYLKNTKQILPCAAFLNGQYGFKDIYAGVPVVIGKDGVEKIQEIDLDEKEKKEFNNSVEAVKKLWDAAIAIDPDLK

SEQ ID NO: 85993 - protein, 299 aa, Unknown
  Bacterial polypetide isolated from the Sargasso Sea
LIALKEIADVILFDVAEGLAKGKALDIAQSSPVNGFNINLIGTSSYEDTKNSDVIIITAGVPRKPGMTRDDLLGINLKIIKQVGEGIKKSSPNAFVICITNPLDVIVMALQKYSGLPKNKVVGMAGILDSSRFIYFLSQELKVPVQKIKSFVLGGHGDTMVAMLGSTEINGKKILDLVKEGKITKERLDAIVDRTKRGGAEIVKYLEKGSAFYAPAASGVEMAEAYLKDQKKQLPCACYLNGEYGVKDIYAGVPVIIGKNGVEKVIEIILSDEEKNNFIKSVNSVKELFNAAKKIDPSL

SEQ ID NO: 85994 - protein, 239 aa, Unknown
  Bacterial polypetide isolated from the Sargasso Sea
MKKISLIGAGQIGGTLAHLIGLKELVDEVVLFDVASGMAKGKALDIAQSSSVDGFNVKFSGTDNYEDIKNSDVIIITAGVPRKPGMSRDDLLGINLKIIKQVAEGIKTNAPNAFVICITNPLDVMVMAFQKFSGLPTNKVVGMAGILDTSRFKLFLSLELNVPVKEIEAMVMGGHGDTMVPLPRFTKVSGKPLLDIVKEGKISLEKLESINQRTRDGGAEIVKIFRKRICILCSCRIRS

SEQ ID NO: 85995 - protein, 248 aa, Unknown
  Bacterial polypetide isolated from the Sargasso Sea
MTKISLIGAGQIGGTLAHLIGTKELVNEVVLFDVASGIAKGKALDIAQSSSVDGFNVRFSGTDNYEDIKDSDVIIITAGVPRKPGMSRDDLLGINLKIIKQVAEGVKKNAPNAFVICITNPLDVMVMAFQKFSGLPSNKVVGMAGILDSSRFKLFLSLELNVPVREIEAMVMGGHGDTMVPMPRFTKISGKPLLDLVKDGKISLERVEEINQRTRDGGAEIVKYLEKGSAFYAPAASGVQMAEAYLND

SEQ ID NO: 85996 - protein, 146 aa, Unknown
  Bacterial polypetide isolated from the Sargasso Sea
MSKISLIGAGQIGGTLAHLIGLKELVNEIVLFDVASGVAKGKALDIAQSSSVDGFNVKLSGTDNYENIKNSDVIIITAGVPRKPGMSRDDLLGINLKIIKQVAQGIKQHSPNAFVICITNPLDVMVMALQKYSGLPEKKVVGMAGI

SEQ ID NO: 85997 - protein, 193 aa, Unknown
  Bacterial polypetide isolated from the Sargasso Sea
MSKISLIGAGQIGGTLAHLIGIKELVKEVVLFDVASGIAKGKALDIAQSSSVDGFNVKLSGTDNYEDIKNSDVIIITAGVPRKPGMSRDDLLGINLKIIKQVAQGIKKHSPNAFVICITNPLDVMVMALQKYSGLAANKVVGMAGILDSSRFKLFLSLELNVPVKDIEAMVMGGHGDTMVPLPGLQKFQVNHY

SEQ ID NO: 85998 - protein, 311 aa, Unknown
  Bacterial polypetide isolated from the Sargasso Sea
VAVLGAAGGIGQPCGLLMKMNPLVTELSLYDIAGTPGVAADVGHVNTAAQTKGYAGEGELAEALKDADVVIVPAGVPRKPGMTRDDLFAINGGIVKGLVEAIADNCPKAMINMISNPVNSTVPIAAEVLKAKGKYDAKKLFGVTTLDVVRAKTFYAEKAGLETARVDVPVVGGHAGITILPLFSQATPKANNLSADDIDALTKRTQDGGTEVVAAKAGKGSATLSMAYAGALFADACLRAKNGEANIVECTYVESKVTEAPFFSSKVTLGRDGVDTVHGLGALSDYEQAALDAMMPQLQGEIKKGVDFVKG

SEQ ID NO: 85999 - protein, 258 aa, Unknown
  Bacterial polypetide isolated from the Sargasso Sea
MTKISLIGAGQIGGTLAHLIGTKELVNEVVLFDVASGIAKGKALDIAQSSSVDGFNVRFSGTDNYEDIKDSDVIIITAGVPRKPGMSRDDLLGINLKIIKQVAEGVKKNAPNAFVICITNPLDVMVMAFQKFSGLPSNKVVGMAGILDSSRFKLFLSLELNVPVREIEAMVMGGHGDTMVPMPRFTKISGKPLLDLVKDGKISLERVEEINQRTRDGGAEIVKYLEKGSAFYAPAASGVQMAEAYLNDQKKYYPALYN

SEQ ID NO: 86000 - protein, 303 aa, Unknown
  Bacterial polypetide isolated from the Sargasso Sea
MKKISLFGAGQIGGTLAHLIGLKEFVDEVVLFDVVSGVAKGKALDIAQSSSVDGFNVKFSGTDNYKDIKNSDVIIITAGVPRKPGMSRDDLLGINLKIIKQVAEGIKKNAPSAFVICITNPLDVMVMAFQKYSGLPTNKVVGMAGILDSSRFKLFLSQELKVPVKEIEAMVMGGHGDTMVPLPRFTKVSGKPLLDLVKEGKLSSERLEEINQRTRDGGAEIVKYLEKGSAFYAPAASGVQMAEAYLKDEKKLLPCAVQLNGEYGVKNIFAGVPVIIGKNGVEQIEEVSLDEKEKSQFMHSIYA

SEQ ID NO: 86001 - protein, 320 aa, Unknown
  Bacterial polypetide isolated from the Sargasso Sea
MTNKKISLIGAGQIGGTLAHLAAMKELGDVVLFDLMSGLAKGKALDIAQSSAIDGFNVSLSGTDNYEDTSDSDVIIITAGVPRKPGMTRDDLLGTNLKIIKQVAEGIKSTSPNAFVICITNPLDVIVMALQKYSGFPKNKVVGMAGVLDTSRFKYFLSQELNVPISDVDSFVLGGHGDTMVPVPNRTMISGENLTDLVNKGEISKARLDEIIDRTRKGGAEVVKLLETGSAFYGPAASGIEMADSYLNDKKKTLPCAAYLNGEYGVSDLYVGVPVVIGSAGIEKVVELDLDEEEKKFFKTSIEAVSELFEAAKNIDPSLK

SEQ ID NO: 86002 - protein, 183 aa, Unknown
  Bacterial polypetide isolated from the Sargasso Sea
MTKISLIGAGQIGGTLAHLIGLKELVDEVLLFDVASGIAKGKALDIAQSSSIDGFNVKFSGTDNYEDIKNSDVIIITAGVPRKPGMSRDDLLGINLNIIKQVAKGIKHHAPNAFVICITNPLDVMVMAFQKFSGLLPNKVVGMAGILDTSRFKLFLSLELNVPVREIEAMVMGGHGDTMVPLP

SEQ ID NO: 86003 - protein, 249 aa, Unknown
  Bacterial polypetide isolated from the Sargasso Sea
KGSDVIIITAGVPRKPGMSRDDLLGINLKIIKQVAEGIKNNAPSAFVICITNPLDVMVMAFQKYSGLPVHKVVGMAGILDSSRFKLFLSEELNVPVKEIDAMVMGGHGDTMVPLPRFTKVSGQPLMELVKEGKISEEKLESINQRTRDGGAEIVKYLEKGSAFYAPAASGVEMAEAFLKDQKKLLPCAAYLHGEYGINNVYAGVPVIIGNEGVEKIEEIDLNENEKTEFNNSVEAVIKLWDAASKIDPD

SEQ ID NO: 86004 - protein, 152 aa, Unknown
  Bacterial polypetide isolated from the Sargasso Sea
ELKGLNVADVKVNVIGGHSGVTILPLLSQVEGVTFSDEEVASLTKRIQNAGTEVVEAKAGGGSATLSMGQAACRFGMSLVRGLQGEANIVECAYVDGGSEHAEFFAQPVLLGKNGIEKVLPYGEVSAFEANARDSMLDTLKGDIKLGVDFVK

SEQ ID NO: 86005 - protein, 187 aa, Unknown
  Bacterial polypetide isolated from the Sargasso Sea
MTKISLIGAGQIGGTLAHLIGTKELVNEVVLFDVASGIAKGKALDIAQSSSVDGFNVKFYGTDNYEDIKDSDVIIITAGVPRKPGMSRDDLLGINLKIIKQVAEGVKKNAPNAFVICITNPLDVMVMAFQKFSGLPANKVVGMAGILDSSRFKLFLSLELNVPVREIDAMVMGGHGDTHGTNAPRFT

SEQ ID NO: 86006 - protein, 134 aa, Unknown
  Bacterial polypetide isolated from the Sargasso Sea
MKKISLIGAGQIGGTLAHLIGIKELVNEVVLFDVASGIAKGKALDIAQSSSVDGFNVKLSGTDKYEDIKKSDVIIITAGVPRKPGMSRDDLLGINLKIIKQVAQGIKKHSPDAFVICITNPLDVMVMALQKYSG

SEQ ID NO: 86007 - protein, 170 aa, Unknown
  Bacterial polypetide isolated from the Sargasso Sea
ARFRYFLAQEFNVSVKDVSAFVLGGHGDTMVPLARYSTVGGIPLPDLVEMGWTTQEKLDAIIQRTRDGGAEVVGLLKTGSAFYAPAASAIQMAESYLKDQNRVVPCAAYVDGPYGLSGIYVGVPTVIGQNGVEKIVEIKLDKDERLEFEKSVDSVHSLISACKNIDNALS

SEQ ID NO: 86008 - protein, 113 aa, Unknown
  Bacterial polypetide isolated from the Sargasso Sea
MKKKITLIGAGQIGGTLAHLIAIKDLADVVLFDVAEGLAKGKALDISQSSPINGFGKKLIGTSDYEDTKDSDVIIITAGVPRKPGMTRDDLLGINLKIIKQVAEGIKKTSPNA

SEQ ID NO: 86009 - protein, 153 aa, Unknown
  Bacterial polypetide isolated from the Sargasso Sea
SVRDVSAFVLGGHGDSMVPLIRYSTVSGIPVPDLIEMNWTSQERIDAIVQRTRDGGAEIVGLLKTGSAFYAPASSAIEMAESYLKDQRRLLPCAAWCDGEYGLDGIFVGVPAIIGKGGIEKVVEINMNDEEKEMFNKSVEAVRQLNSIAAKME

SEQ ID NO: 86010 - protein, 154 aa, Unknown
  Bacterial polypetide isolated from the Sargasso Sea
VEDVSAFVLGGHGDTMVPLIRFASVAGVPISELIKLKWSTKKRIDSIIERTRDGGGEIGRLMKTASAFYAPASSAIAMAESFLKDQKRVLPCAAYLNGQYGVKGLYVGVPVIIGKKGVEKVLDLKLNSDEKKQFNNSVKAVKNLTALAKKLTSK

SEQ ID NO: 86011 - protein, 293 aa, Unknown
  Bacterial polypetide isolated from the Sargasso Sea
KELVDEVVMFDVASGIAKGKALDIAQSSSIDGFNVKLSGTDNYDDIKDSDVIIITAGVPRKPGMSRDDLLGINLKIIKQVAEGIKKNSPNAFVICITNPLDVMVMAFQKYSGLPINKVVGMAGILDSSRFKLFLSLELKIPVKEIEAMVMGGHGDTMVPLPRFTKVSGKPLLDLVKEGKISAERLEEINQRTRDGGAEIVKYLEKGSAFYAPAASGIQMAEAYLKDEKKLLPCAVQLNGEYGVKNIFAGAPVIIGKNGVEKIEEINLDEKEKIQFMHSIDAVKKLWEAASAID

SEQ ID NO: 86012 - protein, 235 aa, Unknown
  Bacterial polypetide isolated from the Sargasso Sea
MSRDDLLGTNLKIIKQVSDGIKDTSPNAFVICITNPLDVIVMALQKYSKFSTNKVVGMAGILDSSRFKYFLSRELKEPVKNIESLVLGGHGDTMVPMPKQTKINNKTLIELVNENKISKSKLEEIIARTRKGGAEIVKLLEKGSAFYAPAASGVEMAESYLKDLKKTLPCAAYLNGEYGYKNIYAGVPVVISKKGVEKIVEIELDKSEKLNFDTSIKAVKELFQSAVKIDPTLTK

SEQ ID NO: 86013 - protein, 266 aa, Unknown
  Bacterial polypetide isolated from the Sargasso Sea
MKNKKISLIGAGQIGGTLAHLAAMKELGDVVLFDLMAGLAKGKALDISQSSAIDGFNVSLSGTDNYEDTRDSDVIIITAGVPRKPGMTRDDLLGTNLKIIKQVAEGIKSTSPDAFVICITNPLDVIVMALQKYSGLPKNKVIGMAGVLDTSRFKYFLSQELNVPISEVNSFVLGGHGDTMVPVPNRTTVSGKPLMDLVNQGQISQSRLDEIIDRTRKGGAEVVKLLEVGSAFYGPAASGIEMADSYLNDKKKTLPCAAHLNGEYGV

SEQ ID NO: 86014 - protein, 202 aa, Unknown
  Bacterial polypetide isolated from the Sargasso Sea
MTNNVKNISITGAAGNIAYSALFRIASGELYGKDTKINFKLIDISDFENKMFGVKLELLDCAFPLLNSVEVTSDLNKGFGDADCIFLFGAKPRGKGMERKDLLESNANIFSIQGKAINDNANKNVKVIVVGNPANTNALILSKNARNINPSQITSMMRLDHDRAKALVAEKTGIECSNVKNSFVWGNHSSTQVPDITNIINA

SEQ ID NO: 86015 - protein, 258 aa, Unknown
  Bacterial polypetide isolated from the Sargasso Sea
TNEDIKRSDVIIITACVPRKPGMSRDDLLGINLKIIKQVAEGIKNNSPNAFVICITNPLDVMVMAFQKYSGLPTHKVVGMAGILDSSRFKLFLSEELNVPVKEIDAMVMGGHGDTMVPLPRFTKVSGQPLMELVKEGKISEEKLESINQRTRDGGAEIVKYLEKGSAFYAPAASGVEMAESFLKDQKKLLPCAAYLHGEYGINNVYAGVPVIIGNEGVEKIEEIDLNENEKTEFNNSVEAVIKLWDAASKIDPDLNKD

SEQ ID NO: 86016 - protein, 212 aa, Unknown
  Bacterial polypetide isolated from the Sargasso Sea
MKKKISLIGAGQIGGTLAHLIGTKELVSEVVLFDVASGIAKGKALDIAQSSSVDGFNVKFSGTDNYEDIKDSDVIIITAGVPRKPGMSRDDLLGINLKIIKQVAEGIKQNAPNAFVICITNPLDVMVMAFQKFSGLPSNKVVGMAGILDSSRFKLFLSLELNVPVREIDAMVMGGHGDTMVPMPRFTKVSGKPLLDIVKEGKISQERLEEIN

SEQ ID NO: 86017 - protein, 286 aa, Unknown
  Bacterial polypetide isolated from the Sargasso Sea
ASGIAKGKALDIAQSSSVDGFNVRFSGTDNYESIKDSDVIIITAGVPRKPGMSRDDLLGINLKIIKQVAEGVKKNAPNAFVICITNPLDVMVMAFQKFSGMPSNKVVGMAGILDSSRFKLFLSLELNVPVREIEAMVMGGHGDTMVPMPRFTKISGKPLLDLVKDGKISLERVEEINQRTRDGGAEIVKYLEKGSAFYAPAASGVQMAEAYLNDQKKLLPCAVQLNGEYGVKNVYAGVPVVIGKDGVEKIEEINLDEKEKKEFMHSIDAVKALWEAASKIDPDLSK

SEQ ID NO: 86018 - protein, 199 aa, Unknown
  Bacterial polypetide isolated from the Sargasso Sea
PLDVMVMAFQKFSGLPTNKVVGMAGILDSSRFKLFLSLELNVPVKEIEAMVMGGHGDTMVPLPRFTKVSGKPLLDLVKEGKISKEKLENINQRTRDGGAEIVKYLEKGSAFYAPAASGVQMAEAYLNDTKKILPCAVFLNGQYGFKDVYAGVPVVIGKNGVEKINEIDLDEKEKKEFSNSVEAVKKLWNSAATIDPDLK

SEQ ID NO: 86019 - protein, 232 aa, Unknown
  Bacterial polypetide isolated from the Sargasso Sea
SGFPRQPGMTREDLIGKNADIVSQVGEGIRQHAPNSIVVMVTNPLDLMTYHMQKVTGFEHSRVVGQAGILDSARMTHFIAQAVGCSNEDVQAMVLGGHGDTMVPLPRYTTVNGIPVSQLLSDEEVEEICQRTASGGGEIVKLLEKGSAFYAPGSAAAIMAEAILDDRKRVLPCSTYLTGEYGMDDIYIGVPVVLGRNGVERIIELELAENELNSLQGSGSFYKEQLSEILGY

SEQ ID NO: 86020 - protein, 288 aa, Unknown
  Bacterial polypetide isolated from the Sargasso Sea
DVASGIAKGKALDIAQSSSVDGFNVNFSGTDNYEDIKNSDVIIITAGVPRKPGMSRDDLLGINLKIIKQVAEGVKTHSPDAFVICITNPLDVMVMAFQKYSSLPVNKVVGMAGILDSSRFKLFLSRELNVPVKEIDAIVMGGHGDTMVPLPRFTKVSKKPLLDLVKDGKISSEKLESINQRTRDGGAEIVKYLEKGSAFYAPAASGVEMAAAYLNDEKKLLPCAAYMNGEYGVEKIYAGVPVIIGKNGIEKIEEVELDDKEKTEFNHSIEAVKKLWEAASAIDPDLKR

SEQ ID NO: 86021 - protein, 242 aa, Unknown
  Bacterial polypetide isolated from the Sargasso Sea
VIIPAGVPRKPGMTRDDLFKINAGIVAGLTQACAENCPKAMINMISNPVNSTVPIAAEVLKKKGVYDPKKLFGVTTLDVVRAKTFYAEKNGLETAKVDVPVVGGHAGITILPLLSQATPAVAMTDDVIDALTKRTQDGGTEVVAAKAGKGSATLSMAYAGALFADACLRAKNGEANVVECTYVESKVTEAPFFATKVTLGKEGVEKIHGLGELSAYEQKALDAMMPELKDSINKGVEFAKSM

SEQ ID NO: 86022 - protein, 250 aa, Unknown
  Bacterial polypetide isolated from the Sargasso Sea
GADVCIVTAGVPRKPGMSRDDLLGINLKVMEAVGAGIAQHAPNAFVICITNPLDAMVWALQKFSGLPANKVVGMAGVLDSARFRYFLAEEFNVSVEDVTAFVLGGHGDTMVPVAQYSTVAGIPLPDLVKMGWTTQEKLDAIITRTRGGGGEIVALLKNGSAYYAPAASAIAMAESYLKDKKRVMPAAAHLTGEYGVDGMYVGVPIVIGEGGVERIVEIPLEGEDKAGFDKSVDAVKGLCDACKEIAPSLK

SEQ ID NO: 86023 - protein, 225 aa, Unknown
  Bacterial polypetide isolated from the Sargasso Sea
MSKKISLIGAGQIGGTLAHLIGLKELVDEVVMFDVASGIAKGKALDIAQSSSVDGFNVKLSGTDNYEDIKDSDVIIITAGVPRKPGMSRDDLLGINLKIIKQVAEGIKKKAPNAFVICITNPLDVMVMAFQKYSGLPANKVVGMAGILDSSRFKLFLSLELKIPVKEIEAMVMGGHGDTMVPLPRFTKVSGKPLLDLVKEGKLSSERLEEINQRTRDGGAEIVNI

SEQ ID NO: 86024 - protein, 305 aa, Unknown
  Bacterial polypetide isolated from the Sargasso Sea
GGTLAHLIGTKELVDEVVLFDVASGIAKGKALDIAQSSSVDGFNVKFSGTDNYKDIEGSDVVIITAGVPRKPGMSRDDLLGINLKIIKQVANGVKENAPDAFVICITNPLDVMVMAFQKFSGLPSNKVVGMAGILDSSRFKLFLSLEFDVPVKEIDAMVMGGHGDTMVPLPRFTKVSGKPLLDLVNDGKISKERLEEINQRTRDGGAEIVKFLEKGSAFYAPAASGIEMAKAYLNDEKKMLPCAAHLNGEYGIKDIYAGVPIIIGKSGVEKIEEINLDEKEKSEFLHSVEAVKKLWEAASKSILI

SEQ ID NO: 86025 - protein, 160 aa, Unknown
  Bacterial polypetide isolated from the Sargasso Sea
MKKKISLIGAGQIGGTLAHLIAIKEIADIVLFDVAEGIAKGKALDIAQSSGVSGSNVNLIGTDKYKEIKDSDVIIITAGVPRKPGMSRDDLLGINLKIIKQVADGIKENSPQSFVICITNPLDVIVMALQKYSGLPTKKIVGMAGIIDSSRFKYFISPGT

SEQ ID NO: 86026 - protein, 183 aa, Unknown
  Bacterial polypetide isolated from the Sargasso Sea
MSKKISLIGAGQIGGTLAHLIGLKELVDEVLMFDVASGIAKGKALDIAQSSSVDGFNVKLSGTDNYEDIKDSDVIIITAGVPRKPGMSRDDLLGINLKIIKQVAEGIKKNAPNAFVICITNPLDVMVMAFQKYSGHPANKVVGMAGILDSSRFKLFLSLELKIPVKEIEAMVMGGHGDTMVPL

SEQ ID NO: 86027 - protein, 274 aa, Unknown
  Bacterial polypetide isolated from the Sargasso Sea
FDIPKAEGMVKGKALDLMQLRPHDGYDSNISGTSNWNDLKNTDVFIITAGIPRKPGMNREDLLGINLGIMKDVAKNIKEQAPNSFVIVISNPLDAMVYTFYKVSGFSKNKVVGMAGALDSARFRTFIAMETGCSVQDITCMVLGGHGDTMVPVTRLATVGGVPLEGLISSERLEEIVDRTRFAGGEIVKLFGNGSAYYAPAQSAIEMAESYLKDKKRVIPCASLCEGEFGIDGYFIGVPSIIGSGGVEKILEFDLKDEEKLALNNTLEAVKNTV

SEQ ID NO: 86028 - protein, 234 aa, Unknown
  Bacterial polypetide isolated from the Sargasso Sea
MSKSIKVVVTGAAGQIAYSLIPRLVDGNTFGDKIVDLALVEIPQVVDKLKGVVMELEDSYFPKMGKVTYTDNFEEASKDADWFLLVGSIPRGIVYNGKKIEERSDLLSINGGIFVQQGEAIGKYGKDDAKILVVGNPANTNAFIGKDAANNDNQLWMAMTMLDSNRAKSILAKKTNNNVSDVKNMIIWGNHSPTMYPDSENALISGKLGSEIINDMNWIESEFVPTVQQRGKAG

SEQ ID NO: 86029 - protein, 178 aa, Unknown
  Bacterial polypetide isolated from the Sargasso Sea
MAGILDSSRFKLFLSIELKVPVKEIEAMVMGGHGDTMVPLPRFTKVSGKPLLDLVKEGKLSLKRLEEINQRTRDGGAEIVKHLEKGSAFYAPAASGVQMAEAYLKDEKKLLPCAVQLNGEYGVKNIFAGVPVIIGKNGVEKIEEINLDEKEKSQFMHSIDAVKKLWDAASGIDKDLSK

SEQ ID NO: 86030 - protein, 218 aa, Unknown
  Bacterial polypetide isolated from the Sargasso Sea
AEGIKKNAPSAFVICITNPLDVMVMAFQKYSGLPANKVVGMAGILDSSRFKMFLSTELKIPVKEIEAMVMGGHGDTMVPLPRFTKVSGKPLLDLVKEGKLSAERLEEINQRTRNGGAEIVKYLEKGSAFYAPAASGVQMAEAYLKDKKKLLPCAVQLNGEYGVQNIFAGVPVIIGKNGVEKIEEINLDEKEKSQFMHSIDAVKKLWDAASAIDKDLSK

SEQ ID NO: 86031 - protein, 175 aa, Unknown
  Bacterial polypetide isolated from the Sargasso Sea
MSKKISLIGAGQIGGTLAHLIGLKELADEVVMFDVASGIAKGKALDIAQSSSVDGFNVKLSGTDNYEDIKDSDVIIITAGVPRKPGMSRDDLLGINLKIIKQVAEGIKKNAPNAFVICITNPLDVMVMAFQKYSELPANKVVGMAGILDSSRFKLFLSLELKIPVREKEAMVMGG

SEQ ID NO: 86032 - protein, 107 aa, Unknown
  Bacterial polypetide isolated from the Sargasso Sea
MRKKIALIGAGNIGGTLAQLVSLNELGDVVLLDIFEGMPKGKSLDLAQSSSIEGFHADFKGTSNFKDIKNSDVVIVTAGFPRKPGMSRDDLVEKNSLIIQNVEKILK

SEQ ID NO: 86033 - protein, 208 aa, Unknown
  Bacterial polypetide isolated from the Sargasso Sea
MRKKIALIGAGNIGGTLAQLVSLKELGDVVLLDIFEGMPKGKSLDLAQSSSIEGFHADFKGTSSFRDIKNSDVVIVTAGFPRKPGMSRDDLVEKNSIIIQNVGKNIKKYCPKAFVICITNPLDAMVSVLQKSSDLKTNMCIGMAGVLDSARLKYFLSKEFNVSINDISAFVLGGHGDTMVPLMRYSTVSGIPVPELIKMKWTTKKNID

SEQ ID NO: 86034 - protein, 95 aa, Unknown
  Bacterial polypetide isolated from the Sargasso Sea
MSKISLIGAGQIGGTLAHLIGIKELVKEVVLFDVASGIAKGKALDIAQSSSVDGFNVKLSGTDNYENIKNSDVIIITAGVPRKPGMSKDDLLGIN

SEQ ID NO: 86035 - protein, 203 aa, Unknown
  Bacterial polypetide isolated from the Sargasso Sea
MTKKISLIGAGQIGGTLAHLIAIKELGDVVLFDVAKGLAKGKALDIAQSSGVTGFNVNISGTNDYEDTKNSDVIIITAGVPRKPGMSRDDLLGTNLKIIKQVSDGIKNTSPEAFVICITNPLDVIVMALQKYSGLPSNKVVGMAGILDSSRFKYFLSKELNEPIKNIDSLVLGGHGDTMVPMPKKTKIKKQNINRFNKREKNF

SEQ ID NO: 86036 - protein, 95 aa, Unknown
  Bacterial polypetide isolated from the Sargasso Sea
MTKISLIGAGQIGGTLAHLIGTKELANEVVLFDVASGIAKGKALDIAQSSSVDGFNVRFSGTDNYEDIKDSDVIIITAGVPRKPGMSRDDLLGII

SEQ ID NO: 86037 - protein, 194 aa, Unknown
  Bacterial polypetide isolated from the Sargasso Sea
MKNKKISLIGSGQIGGTLAHLAAMKELGDVVLFDLMAGLAKGKALDISQSSAIDGFNVSLSGTDNYEDTRDSDVIIITAGVPRKPGMTRDDLLGTNLKIIKQVAEGIKSTSPNAFVICITNPLDVIVMALQKYSGLPKNKVIGMAGVLDTSRFKYFLSQELDVPISEVNSFVLGGHGDTMVPVPNRTTVSGKPL

SEQ ID NO: 86038 - protein, 129 aa, Unknown
  Bacterial polypetide isolated from the Sargasso Sea
MSKISLIGAGQIGGTLAHLIGTKELVDEVVLFDVASGIAKGKALDIAQSSSVDGFNVKFSGTDDYKDIKDSDVIIITAGVPRKPGMSRDDLLGINLKIIKQVAEGIKHNSPNAFVICITNPLDVMVMAF

SEQ ID NO: 86039 - protein, 287 aa, Unknown
  Bacterial polypetide isolated from the Sargasso Sea
LFDLMSGLAKGKALDIAQSSAIDGFNVSLSGTDNYEDTSDSDVIIITAGVPRKPGMTRDDLLGTNLKIIKQVAEGIKSTSPNAFVICITNPLDVIVMALQKYSGLPKNKVVGMAGVLDTSRFKYFLSQELNVPISEVDSFVLGGHGDTMVPVPNRTMVSGENLTDLVNKGKISKARLDEIIDRTRKGGAEVVKLLETGSAFYGPAASGIEMADSYLNDKKKTLPCAAYLNGEYGISDLYVGVPVVIGLAGIEKVVELDLDEEEKKFFKTSIEAVSELFEAAKNIDPS

SEQ ID NO: 86040 - protein, 164 aa, Unknown
  Bacterial polypetide isolated from the Sargasso Sea
GALDSARFRAFIAEATNLSSQDVNCMVLGGHGDTMVPVSRLATVGGVPLSSLLSSEEIIAIENRTRVGGGEIVKLFGKGSAFYAPAQSAVEMIESFIRDKKRVIPCASLCEGEFDVEGYFIGVPTVIGSGGVEKILTFDLDKDEKIALSNTLIEVKKTVSETGL

SEQ ID NO: 86041 - protein, 162 aa, Unknown
  Bacterial polypetide isolated from the Sargasso Sea
ISKKTNKSISDIKNMIIWGNHSPTMYPDAENSIISGELGSTVINDVDWLENDFIPLVQQRGKAVIDARGSSSATSAAKAAIDTIIACENPTESGECFSAAIASDGSYGVPEGLICGFPLITQKDGTVDIKRDVALSDFGKTKIKISIEELLAEKEAVKHLMK

SEQ ID NO: 86042 - protein, 175 aa, Unknown
  Bacterial polypetide isolated from the Sargasso Sea
IIGMAGVLDSARLRTFVSLELGCSLVDVDAMVLGGHGDSMVPLPRYTSVSGISITELMTKEQIDRVVERTRKGGAEIVSLLKTGSAFYAPGSSVVKMIEAILHDKRRILPCTAYLEGEYGWSGIFFGVPVMMGINGIEKIIELKMTDEEKVALDKSAQDVKKTCDEIDAILATSN

SEQ ID NO: 86043 - protein, 169 aa, Unknown
  Bacterial polypetide isolated from the Sargasso Sea
RLDHNRALSQIAAKTGKPVSSIEKLFVWGNHSPTMYADYRYATIDGKSVKDMINDPVWNNDVFLPTVGKRGAAIIEARGLSSAASAANAAIDHVRDWVLGSNGKIVTMGIPSNGEYGIPKDVMFGFPVTTENGKYKIVEGLEIDEYSQGKIKITLDELEAERAGVQHLL

SEQ ID NO: 86044 - protein, 207 aa, Unknown
  Bacterial polypetide isolated from the Sargasso Sea
FVICITNPLDVIVMALQKYSGLPTNKVVGMAGILDSSRFKYFLSREFKEPIKNIESLVLGGHGDTMVPMLKQTKIKNKNLNELVKDNKISKNKLDQIINRTRKGGAEIVKLLEKGSAFYAPAASGVEMAESYLKDLKKTLPCAAYLNGEYGYKNIYAGVPVVISKKGAERIIEIQLEKNEKLNFDISAKAVKELFESAVKIDPTLAK

SEQ ID NO: 86045 - protein, 96 aa, Unknown
  Bacterial polypetide isolated from the Sargasso Sea
MKTGSAFYAPASAAIQMADSYLKDKKRVLPCAAFLRGQYGVKDLYVGVPVVIGAKGVERIVEIKMNATEKAAFRRSVSAVRKLVKESSKLINSSKK

SEQ ID NO: 86046 - protein, 108 aa, Unknown
  Bacterial polypetide isolated from the Sargasso Sea
MTKISLIGAGQIGGTLAHLIGTKELVNEVVLFDVASGIAKGKALDIAQSSSVDGFNVKFSGTDNYKDIKDSDVIIITAGVPRKPGMSRDDLLGINLKIIKQVAEGVKQ

SEQ ID NO: 86047 - protein, 107 aa, Unknown
  Bacterial polypetide isolated from the Sargasso Sea
MSKISLIGAGQIGGTLAHLIGVKELVNEVVLFDVASGIAKGKALDIAQSSSVDGFDVKFSGTDDYKDIKDSDVIIITAGVPRKPGMSRDDLLGINLKIIKQVAEGIK

SEQ ID NO: 86048 - protein, 270 aa, Unknown
  Bacterial polypetide isolated from the Sargasso Sea
STVEMFDSKIEGASDYSAIEDSDVIIVTAGVPRKPGMSRDDLLEINLKVMSSVGEGIKKYAPNSFVICITNPLDAMVWALQKATGHSTNMICGMAGVLDSARFRYFLAEAMGVSVEDVTAFVLGGHGDTMVPLTKYSTVAGIPLPDLIKMKWITQKKLDEIVQRTRDGGAEIVSLLKTGSAYYAPASSAIAMAESYLRDKKRLLPAAAYLNGEYDVNGYYIGVPVIIGKDGVERIVEINLDKDEKEEFSSSVKSVISLVEACQKIAPDLK

SEQ ID NO: 86049 - protein, 155 aa, Unknown
  Bacterial polypetide isolated from the Sargasso Sea
KIKTLVLGGHGDTMVPMPNRTTINGKSLIELIKENKITKEKLEDIITRTRKGGAEIIKFLQKGSAFYAPAASGVEMAESYIKNLKKTLPCAAYLNGEYGFNKLYAGVPAIIGNKGVEKIVEIKLDTKEKENFEVSVKAVKDLLKIAIKIDPSLAN

SEQ ID NO: 86050 - protein, 231 aa, Unknown
  Bacterial polypetide isolated from the Sargasso Sea
DDLLEINLKVMSSVGEGIKKYAPNSFVICITNPLDAMVWALQKATGHSTNMICGMAGVLDSARFRYFLAEEMDVSVEDVTAFVLGGHGDTMVPLTKYSTVAGIPLPDLIKMKWITQKKLDEIVQRTRDGGAEIVSLLKTGSAYYAPASSAIAMAESYLRDKKRLLPAAAYLKGEYDVNGYYIGVPVIIGKDGVERIVEINLDKDEKEEFSSSVKSVISLVEACQKIAPDLN

SEQ ID NO: 86051 - protein, 209 aa, Unknown
  Bacterial polypetide isolated from the Sargasso Sea
NAFVICITNPLDVMVMAFQKYSGLPANKVVGMAGILDSSRFKLFLSIELKIPVKEIEAMVMGGHGDTMVPLPRFTKVSGKPLLNLVKEGKLSAERLEEINQRTRDGGAEIVKYLEKGSAFYAPAASGVQMAEAYIKDEKKLLPCAVQLNGEYGVKNIFAGVPVIIGKNGVEKIEEINLDEKEKSQFMHSIDAVKKLWEAASAIDKDLSK

SEQ ID NO: 86052 - protein, 282 aa, Unknown
  Bacterial polypetide isolated from the Sargasso Sea
KISLIGAGNIGGTLAHLIGLKELADVVLLDIAKGIPQGKSLDIAESSPVDGFDIDLTGSNNFSRIKNSDVIIVTAGSPRKPGMSRDDLIEINLKVMKSVGEGIKKYSPRSFVICITNPLDAMVWALREFSKLPHQMVVGMAGVLDSARFRYFIANHMKVSVEDVSAFVLGGHGDTMVPLVRFSNVGGIPLPELVKMKLIDNKSVNKIVERTRAGGGEIVSLLKTGSAFYAPASSALAMAESFLKDKKRILPCAAFLNGEYNVKNFYVGVPVIIGKKGVEKVI

SEQ ID NO: 86053 - protein, 258 aa, Unknown
  Bacterial polypetide isolated from the Sargasso Sea
DNYKDIKNSDVIIITAGVPRKPGMSRDDLLGINLNIIKQVAKGIKNNSPEAFVICITNPLDVMVMAFQKYSGLPTKKVVGMAGILDSSRFKLFLSLELNVPVKEIDSMVMGGHGDTMVPLPRFTKVSGKPLLDIVKNGKISSERLEEINQRTRDGGAEIVKYLEKGSAYYAPAASGVQMAETYLKDDKKLLPCAVYLNGEYGVSNIYAGVPAIIGKNGVEKIEEIKLDPKEKEQFLHSIYSVKKLWEAAKNIDKDLSK

SEQ ID NO: 86054 - protein, 313 aa, Unknown
  Bacterial polypetide isolated from the Sargasso Sea
MSHDKKISLIGAGNIGTILAFSISRKRLGNITLIDRVKGLAEGKCLDLSQSLSAENLNTKILGTDDISKIKNSDAIVITAGIPRKPGMSRDDLVETNFSIMKELGNAIKEYSPNAFVVCVTNPLDAMVWSLKEIAEIDKKMIVGMAGILDSARFKFFLSNELSISTDSIQTMVLGGHGDTMVPLLRFTSISGIPLSEFIKKKRISKNKVEEIVSRTRNGGGEIVALMKNSSAFFSPAASAIEMLESYLFDNRRILPCSAYLEGEYNVKGLCVGVPVVISKNGVEEIIELDLQNSEKDEFNNSVKAVREIVQKC

SEQ ID NO: 86055 - protein, 145 aa, Unknown
  Bacterial polypetide isolated from the Sargasso Sea
MGRKKVTVVGAGNVGATTAQRLFERGYMDVVLVDVVEDMPQGKALDIAESGPVLGVDSSIVGSNGYAESAGSDVVVITAGIARKPGMSRDDLLFTNMKIIGSVVSEVVKLSPEAILIIVSNPLDAMVQHAFSLAGFPKNRVVGMA

SEQ ID NO: 86056 - protein, 216 aa, Unknown
  Bacterial polypetide isolated from the Sargasso Sea
MSKKISLIGAGQIGGTLAHLIGLKEIVDEVVMFDVASGIAKGKALDIAQSSSVDGFNVKLSGTDNYEDIKDSDVIIITAGVPRKPGMSRDDLLGINLKIIKQVAEGVKKNAPNAFVICITNPLDVMVMAFQKYSGLPTNKVVGMAGILDSSRFKLFLSIELNVPVKEIEAMVMGGHGDTMVPLPRFTKVSGKPLLDLVKEGKLSSERLEEINQRTR

SEQ ID NO: 86057 - protein, 171 aa, Unknown
  Bacterial polypetide isolated from the Sargasso Sea
MARNKIALVGAGQIGGTLALLSGMKELGDVVLFDIVKGVPQGKALDIEQASTIEGFDASVKGANSYAGLRNADVVIVTAGVPRKPGMSRDDLIGINTNVMRQVGAGIKKYCPKAFVICITNPLDVMVGILRDACGLPYNRVVGMAGVLDSARFRLFLAQEFNVSVEDVTAF

SEQ ID NO: 86058 - protein, 255 aa, Unknown
  Bacterial polypetide isolated from the Sargasso Sea
MRTPKNSDVIIITAGVPRKPGMTRDDLLGINLKIIKQVAEGIKKTSPNAFVICITNPLDVIVMALQKYSDLPKNKIVGMAGILDSSRFIYFLSQELKVPVQKIKSFVLGGHGDSMVAMLGLTEVDGKKISELVKEGKIKKEKLDKIVERTKKGGAEIVKYLEKGSAFYAPAASGVEMAESYLKDLKKQLPCAAYLNGEYNTKGLYAGVPVIIGSGGVEKVVELQLDKEEKKNFENSIKSVQDLFQAAQKIDPSLK

SEQ ID NO: 86059 - protein, 177 aa, Unknown
  Bacterial polypetide isolated from the Sargasso Sea
AGVLDSARLKYFLSKEFNVSINDISAFVLGGHGDTMVPLMRYSTVSGIPVPELIKMKWTTKKNIDKIIQRTRDGGAEIVKLMNTSAYYAPASSAIQMAESFLLDQKRLLPCAAYLNGEYGVKGLYVGVPVIIGKKGVEKIIELQLNNNEKKEFNHSVKAVKSLTTLSNKLLNKKNKK

SEQ ID NO: 86060 - protein, 271 aa, Unknown
  Bacterial polypetide isolated from the Sargasso Sea
MKKISLIGAGQIGGTLAHLIGTKELVDEVVLFDVASGIAKGKALDIAQSSSVDGFNVRFSGTDNYESIKDSDVIIITAGVPRKPGMSRDDLLGINLKIIKQVAEGVKKNAPNAFVICITNPLDVMVMAFQKFSGMPSNKVVGMAGILDSSRFKLFLSLELNVPVREIEAMVMGGHGDTMVPMPRFTKISGKPLLDLVKDEKISSERVEEINQRTRDGGAEIVKYLEKGSAFYAPAASGVQMAEAYLNDQKKLLPCAVQLNGEYGVKNVYAG

SEQ ID NO: 86061 - protein, 206 aa, Unknown
  Bacterial polypetide isolated from the Sargasso Sea
MSKKISLIGAGQIGGTLAHLIGLKELVDEVVMFDVASGIAKGKALDIAQSSSVDGFNVKLSGTDNYEDIKDSNVIIITAGVPRKPGMSRDDLLGINLKIIKQVAEGIKKNAPNAFVICITNPLDVMVMAFQKYSGLPANKVVGMAGILDSSRFKLFLSLELKTPVKEIEAMVMGGHGDTMVPLPRFTKVSGKPLLDLVKEGKLSLE

SEQ ID NO: 86062 - protein, 258 aa, Unknown
  Bacterial polypetide isolated from the Sargasso Sea
SGSSKYSEMKGADVVIVTAGFQRRPGMTRDDLVEKNSVIIQTVGSGIKANCPKAFVICITNPLDAMVSVLQKAAGLKTNMCVGMAGVLDSARLKYFLAEEFKVSVEDVSAFVLGGHGDTMVPLIRYASVAGIPVPELIKLKWTTKKRIDSIIERTRDGGGEIGRLMKTASAFYAPASSAIAMAESFLKDQKRALPCAAYLNGQYGVKGLYVGVPVIIGKKGVEKVLDLKLNSDEKKQFNNSVKAVKNLTALAKKLTSK

SEQ ID NO: 86063 - protein, 250 aa, Unknown
  Bacterial polypetide isolated from the Sargasso Sea
NSDVIIITAGVPRKPGMSRDDLLGINLKIIKEVALGIKKTSPDAFVICITNPLDVIVMALQKYSGLPKNKVVGMAGILDSSRLIYFLSEKLNIEASKIKSFVLGGHGDTMVAMLNHTKVDGEPIKNLVKSGKILEEDLNKLVDRTKKGGAEIVKYLEKGSAFYAPASAGVEMAESFIKDLKKELPCAAYLNGEYGVKDIYAGVPVIIGKNGVEKVVEIKLSSDEKDQFNKSIKAVQDLFEAAKKIDNNLK

SEQ ID NO: 86064 - protein, 192 aa, Unknown
  Bacterial polypetide isolated from the Sargasso Sea
LQKSSGLKTNMCIGMAGVLDSARLKYFLSKEFNVSINDISAFVLGGHGDTMVPLMRYSTVSGIPVPELIKMKWTTKKNIDKIIQRTRDGGAEIVKHMNTSAYYAPASSAIQMAESFLLDQKRLLPCAAYLNGEYGVKGLYVGVPVIIGKKGVEKIIELKLNNNEKKEFNHSVKAVKSLTTLSNKLLNKKNKK

SEQ ID NO: 86065 - protein, 236 aa, Unknown
  Bacterial polypetide isolated from the Sargasso Sea
MKKKISLIGAGQIGGTLAHLIALKQLGDIVLFDVDEGVAKGKALDIAQSSAVEEFDLNLTGTSNYNDTENSDVIIITAGVPRKPGMSRDDLLGINLKIIKQVSEGIKSTSPNAFVICITNPLDVIVMALQKYTGFKKSKVVGMAGILDSSRFKYFLSTELGIPAKSIKSFVLGGHGDTMVAMTNNTFINEKPLSEFVKTGKLPETKLKKIIERTKTGGAEIVKYLKKGFCILRTRF

SEQ ID NO: 86066 - protein, 153 aa, Unknown
  Bacterial polypetide isolated from the Sargasso Sea
MARKKIALIGAGNIGGTLAHLAGLKELGDVVLFDIVKGIPQGKALDIVQSSPVSGLDAKYLGANSYRAIRGADVVIVTAGIPRKPGMSRDDLVSVNTGVMEAVGAGIKANCPKAFVICITNPLDAMVLVLKEASGLPHNKVVGMAGILDSARF

SEQ ID NO: 86067 - protein, 310 aa, Unknown
  Bacterial polypetide isolated from the Sargasso Sea
RVTITGAAGQIGYQLAFRIASGQMLGSNQKVILQLLEITPALPALQGVLMELEDCAFPTLAGVIATDNADEAFNETDYALLVGAMPRGPGMERADLLEANAKIFTHQGSAINNSANKDAKILVVGNPANTNALIASSNAPNIDPSNFSAMTRLDHNRAKSYLAKKIEVSSTEIKKMIIWGNHSATQFPDLYHVLYNGKPINNEIDHQWLIDDFIPTVQQRGAEIIKARGASSAASAASAAIDHMRDWALGTPKDDWVSMAIPSDGSYGIEPGIIFSFPVKCENGKYEIVQGLDIEAFSRERINITEAELR

SEQ ID NO: 86068 - protein, 258 aa, Unknown
  Bacterial polypetide isolated from the Sargasso Sea
NYDDIKDSDVIIITAGVPRKPGMSRDDLLGINLKIIKQVAEGIKVNAPNAFVICITNPLDVMVMAFQKYSGLPANKVVGMAGILDSSRFKLFLSEELNVPVREIDAMVMGGHGDTMVPLPRFTKVSGKPLMDLLKDGKISEEKLESINQRTRDGGAEIVKYLEKGSAFYAPAASGVEMAEAFLKDQKKLLPCAAHLHGEYGINNVYAGVPVIIGKEGVERIDEIDLNENEKTEFNNSVEAVIKLWDAASKIDPDLNKD

SEQ ID NO: 86069 - protein, 263 aa, Unknown
  Bacterial polypetide isolated from the Sargasso Sea
MKKVTVVGAGKYGSMTALRIAEYDIAKTVVMTDIVEGLPQGLSLDINQSRYVEGFNTKLIGTNNYEDTSDSDIVVITAGLPRKPGMSRMDLLEVNAGIVSEVTKNILKHSENPIIVVVTNPLDQMTTLTAEVSNLSKNRVIGQAGVLDSSRFAYFISEKVGVDISAVEALTLGSHGDTMVPVPSLCKVDGKPLEEILSSEEINDLVQRTSDGGAEIVSLLKTGSAYFAPASSAATMVKAMLSDSNEIFPVCAWLDGEYGINDV

SEQ ID NO: 86070 - protein, 184 aa, Unknown
  Bacterial polypetide isolated from the Sargasso Sea
KTNMCVGMAGVLDSARLKYFLAKEFKVSVKDVSAFVLGGHGDTMVPIIRHSTVSGVSVPELIKLGLSTKKRIDSIIKRTRNGGGEIGKLMKTSSAFYAPASSAILMAESYLKDQKRILPCAAYLNGHYGVKSLYVGVPVIIGKKGVEKILELKLNSVEKKQFSNSVKAVKKLTSLAFKLIKNNK

SEQ ID NO: 86071 - protein, 287 aa, Unknown
  Bacterial polypetide isolated from the Sargasso Sea
REVDIGIDCRKVFADADWALLIGAKPRGPGMERGDLLDMNGAIFAEQGKALNDVAKPTCKVIVVGNPCNTNALIALSHAPNLDPRNFHALTKLDENRAKCQLAIKAGVFYETVSNVVIWGNHSTTQVPDFVNAKINGDMATEVINDTEWLENDFTPAIQTRGGLLIKKWGRSSAASTAVSIESAIKDLVNPTPEGDWFSTAVLSNGNPYGIQDGLVYSFPCRSTGDGSYEFVEGLEINDWLRERMAKSEEELSGEKGCVSQLMGTAHVAGGDLCPVDLEDTLLPGEM

SEQ ID NO: 86072 - protein, 107 aa, Unknown
  Bacterial polypetide isolated from the Sargasso Sea
MSKKISLIGAGQIGGTLAHLIGLKELADEVVMFDVASGIAKGKALDIAQSSSVDGFNVKLSGTDNYEDIKDSNVIIITAGVPRKPGMSRDDLLGINLKIIKQVAEGI

SEQ ID NO: 86073 - protein, 178 aa, Unknown
  Bacterial polypetide isolated from the Sargasso Sea
MAGILDSSRFKLFLSRELNVPVKEIDAIVMGGHGDTMVPLPRFTKVSKKPLLDLVKDGKISSEKLESINQRTRDGGAEIVKYLEKGSAFYAPAASGVEMAAAYLNDEKKLLPCAAYMNGEYGVEKIYAGVPVIIGKNGIEKIEEVELDDKEKTEFNHSIEAVKKLWEAASAIDPDLKR

SEQ ID NO: 86074 - protein, 238 aa, Unknown
  Bacterial polypetide isolated from the Sargasso Sea
KPGMSRDDLLGINLKIIKQVAEGIKKNSPNAFVICITNPLDVMVMALQKYSGLGKNKVVGMAGILDSSRFKLFLSKELKVQVKEIEAMVMGGHGDTMVPLPRLTKVSGKPLLDLIKEGKISSKKLESINQRTRDGGAEIVKFLEKGSAFYAPAASGVEMAESYIKDLKKVLPCAAYLDGQYGVKDLYAGVPVVIGKNGVEKIEEINLDDKEKSEFMNSVNAVKKLWEAASKIDPDLNK

SEQ ID NO: 86075 - protein, 240 aa, Unknown
  Bacterial polypetide isolated from the Sargasso Sea
MKKKISLIGAGQIGGTLAHLIGTKDLVNEVVLFDVASGIAKGKALDIAQSSSVDGFNVKFSGTDDYKDIKDSDVIIITAGVPRKPGMSRDDLLGINLKIIKQVAEGVKQNAPNAFVICITNPLDVMVMAFQKFSGLPSNKVVGMAGILDSSRFKLFLSLELNVPVREIDAMVMGGHGDTMVPMPRFTKVSGKPLLDLIKEGKISQERLEEINQRTRDGGAEIVKYLEKGSAFYAPAASGV

SEQ ID NO: 86076 - protein, 95 aa, Unknown
  Bacterial polypetide isolated from the Sargasso Sea
MKKISLIGSGQIGGTLAHLIGLKELADEVVLFDVASGIAKGKSLDIAQSSSVDGFNVKLSGTDDYKDIKNSDVIIITAGVPRKPGMSRDDLLGIN

SEQ ID NO: 86077 - protein, 239 aa, Unknown
  Bacterial polypetide isolated from the Sargasso Sea
RKPGMSRDDLLGINLKIIKQVADGIKKNSPESFIICITNPLDVMVMALQKYSSLSPNKVVGMAGILDSSRFKLFLSLELNVPVREIEAMVMGGHGDTMVPLPRFTKISGKPLLELIQEGKISKDRLESINQRTRDGGAEIVKFLEKGSAFYAPAASGVQMAEAYLKNQKKILPCAAYLNGQYGFKNIYAGVPVVIGKNGVEKIEEIDLDEKEKQEFNHSVDAVKKLWEAAINIDPDLSK

SEQ ID NO: 86078 - protein, 217 aa, Unknown
  Bacterial polypetide isolated from the Sargasso Sea
MKKISLIGAGQIGGTLAHLIGLKELVNEVVLFDVVGGVAKGKALDIEQSSSVDGFNVKLSGTDNYEDIKNSDVIIITAGVPRKPGMSRDDLLGINLKIIKQVAEGIKKNAPSAFVICITNPLDVMVMAFQKYSGLPTNKVVGMAGILDSSRFKLFLSQELKVPVREIESMVMGGHGDTMVPLPRFTKVSGKPLLDLVKDGKLSNERLEELIKEPEMV

SEQ ID NO: 86079 - protein, 181 aa, Unknown
  Bacterial polypetide isolated from the Sargasso Sea
MTKISLIGAGQIGGTLAHLIGTKELVNEVVLFDVASGIAKGKALDIAQSSSVDGFNVSFSGTDNYEDIKDSDVIIITAGVPRKPGMSRDDLLGINLKIIKQVAEGVKKNAPNAFVICITNPLDVMVMAFQKFSGLPSNKVVGMAGILDSSRFKLFLSLELNVPVREIEAMVMGGHGDTMVP

SEQ ID NO: 86080 - protein, 219 aa, Unknown
  Bacterial polypetide isolated from the Sargasso Sea
AEGIKNNAPNAFVICITNPLDVMVMAFQKYSGLPVHKVVGMAGILDSSRFKLFLSEELNVPVKEIDAMVMGGHGDTMVPLPRFTKVSGQPLMELVKEGKISEEKLESINQRTRDGGAEIVKYLEKGSAFYAPAASGVEMAEAFLKDQKKLLPCAAYLHGEYGINNVYAGVPVIIGNEGVEKIEEIDLNENEKTEFNNSVEAVIKLWDAASKIDPDLNKD

SEQ ID NO: 86081 - protein, 231 aa, Unknown
  Bacterial polypetide isolated from the Sargasso Sea
MSRDDLVEKNSKIIQTVGKAIKKYCPKAFIICITNPLDAMVSVLQKSSSLKTNMCVGMAGVLDSARLKLFLANEFKVSVKEVNTFVLGGHGDTMVPLIRYSTISGIPVPELIKLKLSSNKKINSIVKRTRNGGAEIVKLMKTSAFYAPASSAIAMAESYLRDEKRILPCAAHLNGEYGVKGLYVGVPVIIGKKGVEKIVELKLTPLEKKQFSKSVKAVRNLTKLAINLLKK

SEQ ID NO: 86082 - protein, 179 aa, Unknown
  Bacterial polypetide isolated from the Sargasso Sea
MRKKIALIGAGNIGGTLAQLVSIKELGDVVLLDIFEGMPKGKSLDLAQSSSIQGFHADFKGTSSFRDIKNSDVVIVTAGFPRKPGMSRDDLVEKNSIIIQNVGKNIKKYCPKAFVICITNPLDAMVSVLQKSSGLKTNMCIGMAGVLDSARLKYFLSKEFNVSINDISAFVLGGHGDTM

SEQ ID NO: 86083 - protein, 269 aa, Unknown
  Bacterial polypetide isolated from the Sargasso Sea
GAGNIGGELASLIASKSLGDVVLVDVVDGLAKGKALDLGQSGAVRNFIYSISGGSSLSKIKNSDVIVVTAGISRKPGMSRDDLISTNLEIMKNIGQAIKIYSPNSFIVCVTNPLDAMAWVLKKISGIKKNMIVGMAGILDSARFKFFLSKALNVSQEDIQTMVLGGHGDTMVPLLNYTKISGIPILEYLKQNNVKRKIVDDIIERTRNGGGEVVSLLKTGSAFYAPAISACEIVESFLRNKKKLVPCSTYLTGEYGVKNLFVGVPVVNR

SEQ ID NO: 86084 - protein, 189 aa, Unknown
  Bacterial polypetide isolated from the Sargasso Sea
YSKLPTNKVVGMAGILDSSRFKLFLSLELGVPVKQIDAMVMGGHGDTMVPLPRFTKVNGKMLNDLISEGKISADKVESINQRTRDGGAEIVKYLEKGSAYYAPAASGVEMAISFLNDEKKVLPCAAHLNGEYGIKNVYAGVPVLIGNKGVEKIEEIQLDEKEKKEFLNSVSAVEKLWEAAVKIDPELNN

SEQ ID NO: 86085 - protein, 250 aa, Unknown
  Bacterial polypetide isolated from the Sargasso Sea
DVCIVTAGVPRKPGMSRDDLLGINLKVMKSVAEGISTHAPNAFVICITNPLDAMVWALKEFSGLPHEKVVGMAGVLDSSRFRYFISEETGVSVQDISAFVLGGHGDTMVPLVRYSTVGGIPLPDIVEMGIMSQDSLDNIVQRTRDGGAEIVGLLKTGSAYYAPASSAIQMAESYLYDSKRLLPCAAFVDGQYNLNGIYVGVPVVIGGQGIERVIEISLSKEEQIEFSNSVDSVKGLIDACIKIDPSLGKK

SEQ ID NO: 86086 - protein, 128 aa, Unknown
  Bacterial polypetide isolated from the Sargasso Sea
MSKISLIGAGQIGGTLAHLIGIKELVNEVVLFDVASGIAKGKALDIAQSSSVDGFNVKFLGTDDYNDIKGSDVIIITAGVPRKPGMSRDDLLGINLKIIKQVAEGVKQNAPDAFVICITNPLDVMVMA

SEQ ID NO: 86087 - protein, 155 aa, Unknown
  Bacterial polypetide isolated from the Sargasso Sea
MKKKITLIGSGSIGGTLAHLIALKELGDITLIDIIKGVPQGKALDLAQSSSVELFDVKIVGSNNYSSLRNSNVVIITAGIPRLPGMSREDLLDTNTRIILNIGKAIKKYCPKAFLICITNPLDAMVSVLQLASKVKHNMCVGMAGILDSSRLKYF

SEQ ID NO: 86088 - protein, 197 aa, Unknown
  Bacterial polypetide isolated from the Sargasso Sea
LDVIVMALQKYSSLPTSMIVGMAGILDTSRFKYFLSQELKISINKINSLVLGGHGDTMVPTLNHTIIDGKSLTQLVKDKKISPEKLSSIIDRTRKGGAEIVKLLEKGSAFYAPAASGVDMAESYIKDIKKTLPCAAYLNGEYNVKGLYVGVPVVIGKSGVEKILELELNDEEKNNFEKSVKAVEELFHSAQKIDPSL

SEQ ID NO: 86089 - protein, 248 aa, Unknown
  Bacterial polypetide isolated from the Sargasso Sea
MKKKITLIGAGQIGGTLAHLIALKELGDIVLFDVAVGIAKGKALDIAQSSPVNKFNIDLIGTDNYEDTKNSDVIIITAGIPRKPGMTRDDLLSINLKIIKQVSEGIKKTSPNAFVICITNPLDVIVMALQKYSGLPKNKVVGMAGILDSSRFIYFLSKELKVPVQKIKSFVLGGHGDTMVAMLESTEVEGKKILDLVKKGKISKDKLNQIVERTKKGGAEIVKYLEKGSAFYAPAASGVEMAESYLKD

SEQ ID NO: 86090 - protein, 278 aa, Unknown
  Bacterial polypetide isolated from the Sargasso Sea
ALDIAQSSSVDGFNVKFSGTDKYEDIKDSDVIIITAGVPRKPGMSRDDLLGINLKIIKQVAEGIKKHSPDSFVICITNPLDVMVMAFQKYSGLPTNMVVGMAGILDSSRFKLFLSRELKVPVKEIDAMVMGGHGDTMVPLPRFTKVSGKPLLDIVKEGKISSERLEEINQRTRDGGAEIVKFLEKGSAFYAPAASGVQMAEAFINDEKKLLPCAVHLNGEYGVKNVFAGVPVVIGKNGIEKIKEIDLDENEKKEFMNSIEAVKKLWEAASVIDPNLIK

SEQ ID NO: 86091 - protein, 306 aa, Unknown
  Bacterial polypetide isolated from the Sargasso Sea
KKISLIGAGQIGGTLAHLIALKDLADVVLFDVAAGIAKGKALDIAQSSPVNGFNIKLFGTNNYEDTKDSDVIIITAGVPRKPGMTRDDLLGINLKIIKQVAEGIKNTSPEAFVICITNPLDVIVMALQKYSNMPKNKIVGMAGILDSSRFIYFLSQELKVPVQKIKSFVLGGHGDTMVAMLGSTEVDGKKITELVKDGKISQNKLDEIVDRTKKGGAEIVKYLEKGSAFYAPAASGVEMAESYLLDKKKQLPCAAHLNGEYGIKNLYAGVPVIIGSKGVEKIVELKLSQDEKENFKKSVDAVSKLF

SEQ ID NO: 86092 - protein, 257 aa, Unknown
  Bacterial polypetide isolated from the Sargasso Sea
MKKKISLIGAGQIGGTLAHLIGIKELVDEVILFDVASGIAKGKALDIAQSSSVDGFNVKFIGTDDYKDIKDSDVIIITAGVPRKPGMSRDDLLGINLKIIKQVAEGIKLNAPDAFVICITNPLDVMVMAFQKFSGLPSNKVVGMAGILDSSRFKLFLSLDLNVPVKEIEAMVMGGHGDTMVPLPRYTKVSGKPLLDFVKEGKISEERLDEINQRTRDGGAEIVKFLEKGSAFYAPAASGVEMAKAYLEDEKKMLPCA

SEQ ID NO: 86093 - protein, 208 aa, Unknown
  Bacterial polypetide isolated from the Sargasso Sea
MKRNKIALIGSGNIGGTLAHLVAIKELGDVVLFDIAEGIPQGKALDLQQSGPVESFDSKITGTNKYEDLQDSDVVIVTAGVPRKPGMSRDDLVEINTKVMKQVGEGIKQNCPKAFVICITNPLDAMVGVLQRASNLPVNMVVGMAGVLDSARFRTFLAHEFNVSLSDVTAFVLGGHGDTMVPLVRYSAVAGIPVPDLIKMGWSSDKKI

SEQ ID NO: 86094 - protein, 119 aa, Unknown
  Bacterial polypetide isolated from the Sargasso Sea
MSKISLIGAGQIGGTLAHLIGIKELVNEVVLFDVASGVAKGKALDIAQSSSVDGFDVKFSGTDDYKDIKGSDVIIITAGVPRKPGMSRDDLLGINLKIIKQVAEGIKKNSPDAFVICIT

SEQ ID NO: 86095 - protein, 109 aa, Unknown
  Bacterial polypetide isolated from the Sargasso Sea
MRKKIALIGAGNIGGTLAQLVSLKELGDVVLLDIFEGMPKGKSLDLAQSSSIEGFHADFKGTSSFRDIKNSDVVIVTAGFPRKPGMSRDDLVEKNSIIIQNVGKNIKKY

SEQ ID NO: 86096 - protein, 243 aa, Unknown
  Bacterial polypetide isolated from the Sargasso Sea
ADLVIIPAGVPRKPGMTRDDLFAINAGIVRDLCEACASACPNALVNIISNPVNSTVPIASEVFKKAGCYDPKKIFGVTTLDIVRSNTFVAEAKDLDINDVDVPVIGGHAGITILPLLSQTYPKCDFTPEELEKLTVRIQNAGTEVVEAKAGAGSATLSMAYAAARMAEACLRGLSGESDVYECSYVASDVTDLPYFATKVRLGPSGAEEVMPIGDITEYESEWLAKLKVELKGSIEKGINFVN

SEQ ID NO: 86097 - protein, 251 aa, Unknown
  Bacterial polypetide isolated from the Sargasso Sea
MKKVTVVGAGKYGSMTALRIAEYDIAKTVVMTDIVEGLPQGLSLDINQSRYVEGFNTKLIGTNNYEDTSDSDIVVITAGLPRKPGMSRMDLLEVNAGIVSEVTKNILKHSENPIIVVVTNPLDQMTTLTAEVSNLSKNRVIGQAGVLDSSRFAYFISEKVGVDISAVEALTLGSHGDTMVPVPSLCKVDGKPLEEILSSEEINDLVQRTSDGGAEIVSLLKTGSAYFAPASSAATMVKAMLSDSNEIFPVC

SEQ ID NO: 86098 - protein, 172 aa, Unknown
  Bacterial polypetide isolated from the Sargasso Sea
MGMAGVLDASRFKAFLSMELNVAVSKIDTLVLGGHGDDMVPLKNCTGISGVPITQLIDEKKLNKIIQRTRDGGAEIVKLLKTGSAFYAPGVSAVDMAESILKDQRKLLPCCVFANGQYGVKNQFLGLPVILSSKGVDEIVEIELTDSEKEELHASALHVKELCDLIDGFGIL

SEQ ID NO: 86099 - protein, 200 aa, Unknown
  Bacterial polypetide isolated from the Sargasso Sea
VLVVGNPANTNALIAMSNAPDIDQNAFTAMMRLDHNRALAQLASKLDCHSSELSNMTIWGNHSTTQYPDITNLKVLGEAASKRLNESWIKDDFIPRVQNRGAEIIKARGLSSAASAASAAIDHMRDWALGTEDNDWVSMAIPSDGSYGITEGIIYSFPVTCQNGSYSIVQDLDIDDFSKECMEITEKELLEEKAAIEHLL

SEQ ID NO: 86100 - protein, 228 aa, Unknown
  Bacterial polypetide isolated from the Sargasso Sea
MIGGGQIGGNLALIAAQKELGDVVIFDIPQSEGMVKGKALDIMQLRPHDGYDSELSGTSDYKDIEGSDVVIITAGIPRKPGMDREDLMSINLGIMKDVASNVKKYAPDAFVIVISNPLDAMVYAFHKVSGFDKNKVIGMAGALDSGRFRAFLAMETGLSVQDVSCMVLGGHGDSMVPITRLATIGGVPVTDLIDSERLKEIEDRTRFAGGELVKLFGNGSAFYAPAQC

SEQ ID NO: 86101 - protein, 270 aa, Unknown
  Bacterial polypetide isolated from the Sargasso Sea
FDVASGIAKGKALDIAQSSSVDGFNVKFSGTDDYKDIKDSDVIIITAGVPRKPGMSRDDLLGINLKIIKQVANGIKENSPNAFIICITNPLDVMVMALQKYSGLPTNKVVGMAGILDSSRFKLFLSLELNIPVKEIDAMVMGGHGDTMVPLPRFTKVSGKPLLDLIKDGKITKERLEEINQRTRDGGAEIVKYLEKGSAFYAPAASGVQMAEAYLNDKKKLLPCAVQLNGEYGVNNVYAGVPVIVGKDGVEKIEQIDLDEKEKKEFMHSI

SEQ ID NO: 86102 - protein, 305 aa, Unknown
  Bacterial polypetide isolated from the Sargasso Sea
IKDLVDEVVLFDVASGVAKGKALDIAQSSSVDGFNVKFSGTDDYKDIKGSDVIIITAGVPRKPGMSRDDLLGINLKIIKQVAEGIKQNAPDAFVICITNPLDVMVMAFQKFSGLSPNKVVGMAGILDSSRFKLFLSEEFNIPVRDIEAMVMGGHGDTMVPLPRFTKVSGKPLLDLVKEGKISQKRLEEINQRTRDGGAEIVKFLEKGSAFYAPAASGVEMAKAYLKDEKKMLPCAAYLNGEYGIKDIYAGVPIIIGKNGVEKIEEINLDDKEKSEFLHSVEAVKKLWEAASNIDTDLKNNEYSRA

SEQ ID NO: 86103 - protein, 215 aa, Unknown
  Bacterial polypetide isolated from the Sargasso Sea
MTKKISLIGAGQIGGTLAHLIAIKELGDVVLFDVAKGLAKGKALDIAQSSGVTGFNVNISGTNDYEDTKNSDVIIITAGVPRKPGMSRDDLLGTNLKIIKQVSDGIKNTSPEAFVICITNPLDVIVMALQKYSGLPSNKVVGMAGILDSSRFKYFLSKELNEPIKNIESLVLGGHGDTMVPMPKKTKIKNKTLIDLINERKISKDKLDEIINRTR

SEQ ID NO: 86104 - protein, 266 aa, Unknown
  Bacterial polypetide isolated from the Sargasso Sea
MSKTPVHVTVTGAAGQIGYALLFRIASGQMLGADQPVVLRLLEITPALGALDGVHMELDDCAFPLLEGVVKTDDANVAFAESNYGLLVGAMPRRDGMERADLLEANGGIFGPQGKAIAENANENIKVLVVGNPANTNALIAQSSASAINPRQFTAMTRLDHNRAQTQVASKLGVQVSDVKKMTIWGNHSATQYPDLFNCEVNGESVAHTINDQQWLENDFIPTVQQRGAAIIKARGASSAASAANAAIDHMRDWTLGTPDGDWVSM

SEQ ID NO: 86105 - protein, 280 aa, Unknown
  Bacterial polypetide isolated from the Sargasso Sea
MGKKITLIGAGQIGGTLAHLIALKELGDIVLFDVAAGIAKGKALDIAQSSPVSGFNVNLTGTDDYNDTRNSDVIIITAGVPRKPGMSRDDLLEINLKIIKEVAEGIKRTSPNAFVICITNPLDVIVMALQKYSGLPKNKIVGMAGILDSSRFIYFLSQELKEPVQNIKSFVLGGHGDSMVAMLGLTTVNGITITNLVKEGKIKQEKLNEIVSRTQNGGAEIVKFLEKGSAFYAPAASGVEMAESYLKDQKKQLPCAAFLNGEYGVSNLYAGVQVIIGSTG

SEQ ID NO: 86106 - protein, 120 aa, Unknown
  Bacterial polypetide isolated from the Sargasso Sea
MKNKKISLIGAGQIGGTLAHLAATKELGDVVLFDLMAGLAKGKALDISQSSAIDGFNVSLSGTDNYEDTRDSDVIIITAGVPRKPGMTRDDLLGTNLKIIKQVAEGIKSTSPNAFVICIT

SEQ ID NO: 86107 - protein, 189 aa, Unknown
  Bacterial polypetide isolated from the Sargasso Sea
MARDKIALIGAGNIGGTLAHLLGLKELGDIVLFDIVKGVPAGKALDLAESSPIEGFDCSLKGINSYSGINGARVVIVTAGVARKPGMTRDDLIGINTSVMQKVGAGIKKYAPNAFVICITNPLDAMVMVLRDATGFNHNKVVGMAGVLDSARFSYFLAKEFNVSVEDITSFVLGGHGDTMVPLTRYSAV

SEQ ID NO: 86108 - protein, 190 aa, Unknown
  Bacterial polypetide isolated from the Sargasso Sea
KYSDLPTNKVVGMAGVLDSSRFKLFLSQELNIPVKKIEAMVMGGHGDTMVPLPRFTKVSGKPLLDLVKEGKISKERLENINQRTRDGGAEIVKFLEKGSAFYAPAASGVEMASAYLKNEKKLLPCAAYLKGEYGIKDIYAGVPVVIGNKGVEKIEEINLNEKEKKEFLNSINAVKKLWEAASTIDPDLSK

SEQ ID NO: 86109 - protein, 212 aa, Unknown
  Bacterial polypetide isolated from the Sargasso Sea
NAPNAFVICITNPLDIMVMAFQKYSGLPTNKVVGMAGILDSSRFKLFLSLELKVSVKEIESMVMGGHGDTMVPLPRFTKVSGKPLLDLVNEGKLSLGRLEEINQRTRDGGAEIVKYLEKGSAFYAPAASGVKMAEAYLKDEKKLLPCAVHLNGEYGVKNIFAGVPVIIGKNGVEKIEEIKLDEKEKSQFMHSIDAVKKLWDVASSIDKDLSK

SEQ ID NO: 86110 - protein, 304 aa, Unknown
  Bacterial polypetide isolated from the Sargasso Sea
SGLPKRQIINGPETDPMARPKIALIGAGQIGGTLAHLAAIKELGDVVLFDIAEGTPEGKALDIAESGPSEGFDAKLKGTQDYADIAGADVCIVTAGVPRKPGMSRDDLLGINLKVMKSVGEGIRDNAPNAFVICITNPLDAMVWALQKFSGLPAEKVCGMAGVLDSARFRHFLAEEFNVSMKDVTAFVLGGHGDTMVPCVRYSTVAGVPLPDLVDMGWTTQEKLDAIVQRTRDGGAEIVGLLKTGSAFYAPATSAIEMAEAYLKDQKRVLPCAAYCDGDLGVKGMYVGVPHVIGAGGIEKIVHI

SEQ ID NO: 86111 - protein, 116 aa, Unknown
  Bacterial polypetide isolated from the Sargasso Sea
MTKEQIDRVVERTRKGGAEIVSLLKTGSAFYAPGASVVKMIEAILQDKRRILPCTAYLEGEYGWSGIFFGVPVMMGIHGIEKVIELNMTEEEKAALDKSAQDVKKTCDEIDAILAE

SEQ ID NO: 86112 - protein, 179 aa, Unknown
  Bacterial polypetide isolated from the Sargasso Sea
MARAKISLIGGGQIGGNLALLAAQKELGDIVIFDIPKAEGMVKGKALDLMQLKPHDGYDANISGTSDWKDLTDSDVFIITAGLPRKPGMDREDLLEINLGIMTDVAENIKEYSPNAFVIVVSNPLDAMVYAFYKVSQLKKNMVVGMAGALDSARFRAFIAMEVGCSVQDVTCMVLGGHG

SEQ ID NO: 86113 - protein, 154 aa, Unknown
  Bacterial polypetide isolated from the Sargasso Sea
MKKYKIALIGSGQIGGTLAHLAGLKELGDIVLFDIADGIPQGKALDIAESSSISSFDSNIIGTSKYEDISDADVCIVTAGVPRKPGMSRDDLLSINLKVMKSVGEGIKKYAPNSFVICITNPLDAMVWALQKFSTLPAENVVGMAGVLDSGRLH

SEQ ID NO: 86114 - protein, 183 aa, Unknown
  Bacterial polypetide isolated from the Sargasso Sea
MLFERLRTRFRGRFSLFNGNRSGDVKIGVVGAGNVGATTAQLIAQQELGREIVLLDVAEGIPQGKGLDIAESSPVDRFDTLIKGTNDPEDLCNCGITVVTAGIARKPGMSRDDLLATNAEVVGSVCEHIARVAPNAIVITVTNPLDAMTHVAFKKTGFPPERVVGMAGILDTARYRYFLACEL

SEQ ID NO: 86115 - protein, 225 aa, Unknown
  Bacterial polypetide isolated from the Sargasso Sea
LLQEDAKIFSAQGKAINENASRDIRVLVVGNPANTNALIAMSNAPDIEKNAFTAMMRLDHNRALAQIASKLDCHSSELSNMTIWGNHSTTQYPDVNNLKLSGETISSRLDEVWIKNEFIPRVQNRGAEIIKARGLSSAASAASAAINHMRDWALGTKNNDWVSMAIPSDGSYGINEGIIYSFPVTCQNGSYSIVQDLEIDDFSKECMKITEKELLEEKEAIEHLL

SEQ ID NO: 86116 - protein, 158 aa, Unknown
  Bacterial polypetide isolated from the Sargasso Sea
QVKEIEAMVMGGHGDTMVPLPRLTKVSGKPLLDLVEEGKISSKKLESINQRTRDGGAEIVKFLEKGSAFYAPAASGVEMAESYIKDLKKVLPCAAYLDGQYGVKDLYAGVPVVIGKNGVEKIEEINLDDKEKSEFMNSVNAVKKLWEAASKIDPDLNK

SEQ ID NO: 86117 - protein, 269 aa, Unknown
  Bacterial polypetide isolated from the Sargasso Sea
MRKKIALIGAGNIGGTLAQLISLKELGDVVLLDIFEGMPKGKSLDLAQSSSIEGFHANFKGTSSFKDIKNSDAVIVTAGFPRKPGMSRDDLVEKNSVIIQNVGKNIKKYCPKAFVICITNPLDAMVSVLQKSSGLKTNMCVGMAGVLDSARLKYFLSKEFNVSINDISAFVLGGHGDTMVPLMRYATVSGIPVPELIKMKWTTKKNIDKIIQRTRDGGAEIVKLMKTSAYYAPASSAIQMAESFLLDQKRLLPCAAYLNGEYGVKGLYV

SEQ ID NO: 86118 - protein, 246 aa, Unknown
  Bacterial polypetide isolated from the Sargasso Sea
DYADMLGSEVIVVTSGFSRQPGMTREDLIGKNADIVSQVGTGIREHAPDSVVIMVTNPLDLMTYHMQKVTGFPTNRVIGQAGILDSARMAHFIALELNCAEEDVSPMVLGGHGDTMVPLPRYTTVGGIPITQLMSEERIDAISKRTASGGGEIVKLLERGSAFYAPGSAAAIMAESVLNDRRRLIPASCHLTGQYGLDNVYIGVPCILGANGVEQIFELDLADDELESLQGSGNFYKSQLSELLGY

SEQ ID NO: 86119 - protein, 266 aa, Unknown
  Bacterial polypetide isolated from the Sargasso Sea
NGFNVNLSGTDNYEDTKNSDVIIITAGVPRKPGMTRDDLLGINLKIIKQVAEGIKRTSPNAFVICITNPLDVIVMALQKYSGLPKNKVVGMAGILDSSRFIYFLSQELKVPVTKIKSFVLGGHGDSMVAMLGSTEIDGKKIYEFIKDGKITQEKLNQIVERTKKGGAEIVKYLEKGSAFYAPAASGVEMAESYLKDQKKKLPCAVYLDGEYGAKNIYAGVPAIIGSGGVENIIEIELSPQEKENFKKSIKSVQDLFSAAQKIDKTL

SEQ ID NO: 86120 - protein, 207 aa, Unknown
  Bacterial polypetide isolated from the Sargasso Sea
MRKKIALIGAGNIGGTLAQLVSLKELGDVVLLDIFEGMPKGKSLDLAQSSSIEGFHTDFKGTSSFRDIKNSDVVIVTAGFPRKPGMSRDDLVEKNSIIIQNVGKNIKKYCPKAFVICITNPLDAMVSVLQKSSGLKTNMCIGMAGVLDSARLKYFLSKEFNVSINDISAFVLGGHGDTMVPLMRYSTVSGIPVPELINMKWTTKKNI

SEQ ID NO: 86121 - protein, 194 aa, Unknown
  Bacterial polypetide isolated from the Sargasso Sea
MNKKISLIGAGQIGGTLAHLIGIKELASEVVLFDVAQGIAKGKSLDIAQSSSVDGFNVKFSGTDKYSDIKNSDLIIITAGVPRKPGMSRDDLLSINLKIMKQVAKGIKENCPNAFVICITNPLDVMVMALQKYSNLPTSKVVGMAGILDTSRFKLFLSLELGVPVKEIQAMVMGGHGDTMVPLPRFTKVGGKNY

SEQ ID NO: 86122 - protein, 224 aa, Unknown
  Bacterial polypetide isolated from the Sargasso Sea
MSKKISLIGAGQIGGTLAHLIGLKELVDEVVLFDVASGIAKGKALDIAQSSSVDGFNVKLSGTDNYEDIKDSDVIIITAGVPRKPGMSRDDLLGINLKIIKQVAEGIKKNAPNAFVICITNPLDVMVMAFQKYSGLPANKVVGMAGILDSSRFKLFLSLELKIPVKEIEAMVMGGHGDTMVPLPRFTKISGKSLMDLIREGKLSSKRLEEINQRTRDGGAEIVK

SEQ ID NO: 86123 - protein, 212 aa, Unknown
  Bacterial polypetide isolated from the Sargasso Sea
MTKISLIGAGQIGGTLAHLIGIKELVNEVVLFDVASGIAKGKALDIAQSSSVDGFNVRFSGTDNYEDIKDSDVIIITAGVPRKPGMSRDDLLGINLNIIKQVAEGVKKNAPNAFVICITNPLDVMVMAFQKFSGLPSNKVVGMAGILDSSRFKLFLSLELNVPVRDIEAMVMGGHGDTMVPMPRFTKISGKPLLDLVKNGKISSERVEEINQ

SEQ ID NO: 86124 - protein, 150 aa, Unknown
  Bacterial polypetide isolated from the Sargasso Sea
MSKISLIGAGQIGGTLAHLIGIKELANEVVLFDVVSGVAKGKALDIAQSSSVDGFDVKFSGTDDYKDIKDSEVIVITAGVPRKPGMSRDDLLGINLKIIKQVAEGIKENAPNAFVICITNPLDVMVMAFQKFSGLSPNKVVGMAGILDSS

SEQ ID NO: 86125 - protein, 221 aa, Unknown
  Bacterial polypetide isolated from the Sargasso Sea
KQVANGIKENAPNAFIICITNPLDVMVMALQKFSGLPANKIVGMAGILDSSRFKLFLSLELNVPVKEIDAMVMGGHGDTMVPMPRFTKVSGKPLLDLVEEGKITKERLEEINQRTRDGGAEIVKYLEKGSAFYAPAASGVQMAEAYLNNEKKLLPCAVQLNGEYGVNNVYAGVPVIVGKEGVEKIEQIDLDEKEKKEFMHSIEAVKALWEAASKIDPDLSK

SEQ ID NO: 86126 - protein, 184 aa, Unknown
  Bacterial polypetide isolated from the Sargasso Sea
TNKVVGMAGILDSSRFKLFLSLELGVPVKQIDAMVMGGHGDTMVPLPRFTKVNGKMLNDLINEGKISANKVESINQRTRDGGAEIVKYLEKGSAYYAPAASGVEMAISFINDEKKVLPCAAYLNGEYGIKNVYAGVPVLIGNKGVEKIEEIQLDEKEKKEFLNSVNAVEKLWEAAVKIDPELNN

SEQ ID NO: 86127 - protein, 239 aa, Unknown
  Bacterial polypetide isolated from the Sargasso Sea
DSDLFIITAGIPRKPGMDREDLLEINLGIIKNVAKEIKEKAPNSFVIVISNPLDAMVYAFYKISGFPKNRVVGMAGALDSTRFRTFIAMETGYSVQDVTCMVLGGHGDTMVPISRLATIGGVPILDIISKDKLKEIEDRTRVAGGEIVKLFGNGSAFYAPAQSAIEMAESYLRDKKRVIPCAALCEGEFGIEGYFIGVPTVIGSNGVEEILAFTLSEKEKADLNNTLDAVKKTVKETGL

SEQ ID NO: 86128 - protein, 128 aa, Unknown
  Bacterial polypetide isolated from the Sargasso Sea
MNTVKVAVTGAAGQIGYALLFRIASGSVFGPDTKVELQLLELEPALPALEGVKMELDDCAFPLLQKITTTSDAGVAFKDTDWILLVGAAPRKAGMERNDLLRVNGGIFVGQGKAIEEQAGDRAKILVI

SEQ ID NO: 86129 - protein, 189 aa, Unknown
  Bacterial polypetide isolated from the Sargasso Sea
YSKLPTNKVVGMAGILDSSRFKLFLSLELGVPVKEIDAMVMGGHGDTMVPLPRFTKVNGKMLNDLINEGKISADKVESINQRTRDGGAEIVKYLEKGSAYYAPAASGVEMAISFINDEKKVLPCAAYLNGEYGIKNVYAGVPVLIGNKGVEKIEEIQLDEKEKKEFLNSVNAVEKLWEAAVKIDPELNN

SEQ ID NO: 86130 - protein, 159 aa, Unknown
  Bacterial polypetide isolated from the Sargasso Sea
MSKKPVRVAVTGAAGQIGYALLFRIASGEMLGKDQPVILQLLEVPVEGPQKALKGVMMELDDCAFPLLVEMTAHSDPMTAFKDADYALLVGSRPRGPGMERAELLAVNGAIFTAQGKALNAVASRDVKVLVVGNPANTNAYIAMKSAPDLPRKNFTAML

SEQ ID NO: 86131 - protein, 155 aa, Unknown
  Bacterial polypetide isolated from the Sargasso Sea
DLVRMKWMTQKKLDEIVQRTRDGGGEIVALLKTGSAFYAPASAAIQMADAYLKDKKRVLPCAAYLRGEFGIKGLYVGVPVVIGAKGVEKIVEIKMDREEKAAFNKSIRAVKKLVTESKRVLSGQAQKSNTAKKKAPAKKKVVVKKKGAIKERAKK

SEQ ID NO: 86132 - protein, 95 aa, Unknown
  Bacterial polypetide isolated from the Sargasso Sea
MARHKISLIGAGNIGGTLAVLAGLKELGDITMFDIAEGIPQGKALDIVQSSPIERFNAAVTGANDYAALADSDVVIVTAGVPRKPGMSRDDLIGI

SEQ ID NO: 86133 - protein, 205 aa, Unknown
  Bacterial polypetide isolated from the Sargasso Sea
MRKKISLIGAGQIGGTLAHLICIKELADVVLFDVAEGIAKGKALDIAQSISVDGQNVGIIGTSNYKDTANSDVIIITAGVPRKPGMSRDDLLEINLKIIKQVADGIAQTSPNAFVICITNPLDVIVMALQKYSKFPTQRIVGMAGILDSSRFKYFLSQELKVPVKNINALVLGGHGDTMVPMLNHTTVNKKSLIELVKEKKISQE

SEQ ID NO: 86134 - protein, 255 aa, Unknown
  Bacterial polypetide isolated from the Sargasso Sea
MKKSKISLIGSGQIGGTLAHLIVMKELGDVVLFDVAEGLAKGKALDLSQSTAVDGLDVKITGTSDYSDTSNSDVIIITAGVPRKPGMTRDDLLGTNLNIIKQVAEGIKDTSPNAFVICITNPLDVIVMALQKYSGLPKNKVIGMAGILDTSRFKFFISQELNVPIKEVDSFVLGGHGDTMVPVPNRTTVSGKPLMDYVNEGKITLDRLDEIIDRTRKGGAEVVKLLQTGSAFYGPAASGIEMAESYLKNQNKTLP

SEQ ID NO: 86135 - protein, 288 aa, Unknown
  Bacterial polypetide isolated from the Sargasso Sea
GAGQIGGTLAHLIGIKELVNEVVLFDVVSGIAKGKALDIAQSSSVDGFNVRFSGTDNYEDIKDSDVIIITAGVPRKPGMSRDDLLGINLKIIKQVAKGVKKNAPNAFVICITNPLDVMVMAFQKFSGLPSNKVVGMAGILDSSRFKLFLSLELNVPVRDIEAMVMGGHGDTMVPMPRFTKISGKPLLDFVKDGKISLERVEEINQRTRDGGAEIVKYLEKGSAFYAPAASGVQMAEAYLNDQKKLLPCAVQLNGEYGVKNVYAGVPVVIGKDGAEKIEEIDLDEKEKK

SEQ ID NO: 86136 - protein, 102 aa, Unknown
  Bacterial polypetide isolated from the Sargasso Sea
MRNKIALVGSGNIGGTLAHLAAIKELGDVTLFDIAEGIPQGKSLDLAQSGPVESFDSKMIGSNDYKDLKDSDVVIVTAGVARKPGMSRDDLVEINTKVRNRL

SEQ ID NO: 86137 - protein, 142 aa, Unknown
  Bacterial polypetide isolated from the Sargasso Sea
MGYRRNKISLIGAGQIGGTLALLSGLKNLGDLVLFDIVDGVPQGKGLDIAQASTVEMFDSKIEGASDYSAIEDSDVIIVTAGVPRKPGMSRDDLLEINLKVMSSVGEGIKKYAPNSFVICITNPLDAMVWALQKATGHSTNM

SEQ ID NO: 86138 - protein, 251 aa, Unknown; identical to SEQ ID NO: 86097
  Bacterial polypetide isolated from the Sargasso Sea

SEQ ID NO: 86139 - protein, 148 aa, Unknown
  Bacterial polypetide isolated from the Sargasso Sea
MKKKISLIGAGQIGGTLAHLLSIKELADVVLFDVAEGIAKGKALDIAQSTAVDGHNVNLIGTNDYNDIKNSDVIIITAGVPRKPGMTRDDLLDTNLKIIKQVALGIKKNSPNAFVICITNPLDVIVMAFQKYSGLNTNKVVGMAGILD

SEQ ID NO: 86140 - protein, 175 aa, Unknown
  Bacterial polypetide isolated from the Sargasso Sea
KPNEVFGMAGVLDSARFTTFISQSQNTSVKSISSNVLGGHGDTMVPLLNNSFIGGKSLSESIKEDELNDLVDRTKNGGAEIVNYLKTGSAFYAPSASIVQMVDAISSDSKEVLPTTAYLQGEYGINDLYFGVPAKLGKNGVEEIIQYDLSDAEKEDLNKSAKAVKDTVIAMENLS

SEQ ID NO: 86141 - protein, 182 aa, Unknown
  Bacterial polypetide isolated from the Sargasso Sea
NKVVGMAGILDSSRFIYFLSQELKVPVQKIKSFVLGGHGDSMVAMLASTEIEGKKILDLVKDGKISMERLNKIVDRTKKGGAEIVKYLEKGSAFYAPAASGVEMAECYLKDSKKQLPCAVYLNGEYGAKDIYAGVPVIIGSKGVEKIIELDLTSEEKSNFEKSIDSVKDLFNAAKNIDPNLN

SEQ ID NO: 86142 - protein, 272 aa, Unknown
  Bacterial polypetide isolated from the Sargasso Sea
GMVKGKALDLMQLRPHDGHDANIMGTSDWNDVKDSDVFIITAGIPRKPGMDREDLLEINLGIMKDVANNIKEQSPNAFVIVISNPLDAMVYAFHKVSGFPKNQVVGMAGALDSARFRAFIAMETEYSVQDVTCMVLGGHGDTMVPISRLATVGGVPVTDLINSDRLKEIEDRTRVAGGEIVKLFGNGSAFYAPAQSAIEMAESYIRDKKRVIPCASLCEGEFGIDGYFIGVPTVIGSNGVEKILEFTLNDDEKTELNKTLEAVKKTVAETEL

SEQ ID NO: 86143 - protein, 177 aa, Unknown
  Bacterial polypetide isolated from the Sargasso Sea
IIITAGVPRKPGMSRDDLLGINLKIIKQVAEGIKQNAPDAFVICITNPLDVMVMAFQKFSGLSPNKVVGMAGILDSSRFKLFLSEEFNVPVREIEAMVMGGHGDTMVPLPRFTKVSKKPLLDLVKEGKISQKRLEEINQRTRDGGAEIVKFLEKGSAFYAPAASGVEMAKAYLKDEK

SEQ ID NO: 86144 - protein, 133 aa, Unknown
  Bacterial polypetide isolated from the Sargasso Sea
MKRNKIALIGSGNIGGTLAHLVALKELGDIVLFDIAEGIPQGKALDLQQSGPIESFDGKISGTNQYQDLQESDVVIVTAGVPRKPGMSRDDLVEINTKVMKQVGQGIKENCPNAFVICITNPLDAMVGVLQRA

SEQ ID NO: 86145 - protein, 127 aa, Unknown
  Bacterial polypetide isolated from the Sargasso Sea
MKRNKIALIGSGNIGGTLAHLTGLKELGDVVLYDIAKGIPQGKSLDIAESSPVDSFDCKLIGSNSYAAIKNSDVVIVTAGIPRKPGMSRDDLLNINTDVMKQVGKGIKKYCPNAFVICITNPLDAMV

SEQ ID NO: 86146 - protein, 298 aa, Unknown
  Bacterial polypetide isolated from the Sargasso Sea
KELVDEVVLFDIASGIAKGKALDISQSSSVDGFNVKFLGTDDYKDIKNSDVIIITAGVPRKPGMSRDDLLGINLKIIKQVAEGIKQNAPNAFVICITNPLDVMVMAFQKFSGLPANKVVGMAGILDSSRFKLFLSLELNVPVKEIDAMVMGGHGDTMVPMPRFTKVSGKPLLDLVKEEKISKERLEEINQRTRDGGAEIVRYLEKGSAFYAPAASGVQMAEAYLKNEKKLLPCAVQLNGEYGVKNVYAGVPVIIGKKGVEKIEEIKLDDKEKKEFMNSIDAVRGLWKAASKIDPDLSK

SEQ ID NO: 86147 - protein, 135 aa, Unknown
  Bacterial polypetide isolated from the Sargasso Sea
MSKKISLIGAGQIGGTLAHLIGLKELVDEVVMFDVASGIAKGKALDIAQSSSVDGFNVKLSGTDNYEDIKDSNVIIITAGVPRKPGMSRDDLLGINLKIIKQVAEGIKKNAPNAFVICITNPLDVMVMAFQNTQD

SEQ ID NO: 86148 - protein, 108 aa, Unknown
  Bacterial polypetide isolated from the Sargasso Sea
MNRKISLIGAGQIGGTLAHLLGLKEVASEIVLFDVAAGVAKGKALDIAQSSSVDGFNVKLSGTDDYNDIKNSDVIIITAGVPRKPGMSRDDLLGINLKIMKKVADGIR

SEQ ID NO: 86149 - protein, 280 aa, Unknown
  Bacterial polypetide isolated from the Sargasso Sea
MKSKITLIGAGQIGGTLAHLIVLKKLGDVVLFDVAEGLAKGKALDIAQSSPVHNFDNKIIGTNNYKDIKNSDVIIITAGVPRKPGMNRDDLLSINLKIIKEVADGIKKNSPNAFVICITNPLDVIVMALQKYSGLPKNKVVGMAGILDSSRFIYFLSQELKVPVSKIESFVLGGHGDTMVAMVNHTKIDGTPLIDIVKQGKIEKKVLDQIINRTKNGGAEIVKFLEKGSAFYAPAASGVLMAESYIFNKKNQLPCAAFLNGEYGVYNLYAGVPVVLEMAE

SEQ ID NO: 86150 - protein, 267 aa, Unknown
  Bacterial polypetide isolated from the Sargasso Sea
GFNVKFSGTDNYVDIKNSDVIIITAGVPRKPGMSRDDLLGINLKIIKQVAEGIKKNAPSAFVICITNPLDVMVMAFQKYSGLPTNKVVGMAGILDSSRFKLFLSQELKVPVREIEAMVMGGHGDTMVPLPRFTKVSGKPLLELVKEGKLSSEKLEEINKRTRDGGAEIVKYLEKGSAFYAPAASGVQMAEAYLKNEKKLLPCAVHLNGEYGVKNIFAGVPVIIGKNGVEKIEEISLDEKEKSQFMHSINAVKKLWEAASAIDKDLSK

SEQ ID NO: 86151 - protein, 141 aa, Unknown
  Bacterial polypetide isolated from the Sargasso Sea
MKVAVLGAAGGIGQALSLLLKLNLPAGTDLALYDLAPVTPGVAVDLSHIPTAVKITGFGKEDLDKALIGADIVMIPAGMPRKPGMDRSDLFNINAGVVKTLAEAIVVNCPKALVGVITNPVNTTVAIAAEVFKKAGTYDPK

SEQ ID NO: 86152 - protein, 282 aa, Unknown
  Bacterial polypetide isolated from the Sargasso Sea
MGALEGVAMELDDCAFPLLKQIELSDQADEAFNEANIALLVGSRPRSKGMERKDLLEANGEIFTGQGEALNKKAADDIRVLVVGNPANTNCLIAMNNAPDIPRHRFTAMTRLDHNRAITQVAHKLDIGTTEITKMTIWGNHSATQYPDLFNCKISDKSAAEVIDDQNWLEETFIPSVQQRGAAIIEARGASSAASAANAAIDHVRDWTDSTPENDWVSMAVCSDGSYGVEEGLISSFPVKCSNGNWEIVQDLEIDDFSKIKIDASVKELSEERDTVSDLNLI

SEQ ID NO: 86153 - protein, 103 aa, Unknown
  Bacterial polypetide isolated from the Sargasso Sea
MSKISLIGAGQIGGTLAHLIGIKDLVDELVLFDVASGIAKGKALDIAQSSSVDGFNVKLSGTDNYEDIKNSDVIIITAGVPRKPGMSRDDLLGINLKIIKQVA

SEQ ID NO: 86154 - protein, 188 aa, Unknown
  Bacterial polypetide isolated from the Sargasso Sea
IAASSAPNLDRNQFTAMTRLDHNRAISWLAEKTQTHSTQIRRMSIWGNHSATQYPDLSNCTVNGTLATELVDETWCRESFIPKVQKRGAEVIRARGASSAASAASAAIDHVRTWLRGTTEGDWTSMAVASDGSYGVEEGIVYSYPVTCSNGSYSIVQDLEVSEFSRGCMNTTEAELREERAAVEDLLE

SEQ ID NO: 86155 - protein, 284 aa, Unknown
  Bacterial polypetide isolated from the Sargasso Sea
GIAKGKALDIAQSSSVDGFNVRFSGTDDYKDIKGSDVIIITAGVPRKPGMSRDDLLGINLKIIKQVADGVKQNAPDAFVICITNPLDVMVMAFQKFSGLSPNKVVGMAGILDSSRFKLFLSEEFNVPVREIEAMVMGGHGDTMVPLPRFTKVSNKPLLELVKEGKISQKRLEEINQRTRDGGAEIVKFLEKGSAFYAPAASGVEMAKAYLKDEKKILPCAAYLKGEYGIKDIYAGVPIIVGKNGVEKIEEINLDEKEKSEFLHSVEAVKKLWEVASKIDPDLAK

SEQ ID NO: 86156 - protein, 163 aa, Unknown
  Bacterial polypetide isolated from the Sargasso Sea
SFPQFNVPIKKVESFVLGGHGDTMVPILNSSFVDGKNLTELVKEKKIKKETLESIIMRTRKGGAEIVKFLEKGSAFYAPAASGIQMAESYIKDLKKTLPCAAYLNGEYETKNLYVGVPVVIGKNGVEKVIELKLTDEEKNDFKKSVKAVEDLFSSAKKIDSSL

SEQ ID NO: 86157 - protein, 207 aa, Unknown
  Bacterial polypetide isolated from the Sargasso Sea
MRKKIALVGAGNIGGTLAHLIGLKELGDVVLIDIADGMTKGKALDLAQSSSIESFNAKMSGSSNYREMKNADVVIVTAGFQRRPGMTRDDLVEKNSAIIQTVGKGIKINCPKAFVICITNPLDAMVSVLQKAAGLKSNMCVGMAGVLDSARLKYFLAEEFKVSVEDVSAFVLGGHGDTMVPVIRYATVAGVPVPELIKLKWSTSKKI

SEQ ID NO: 86158 - protein, 197 aa, Unknown
  Bacterial polypetide isolated from the Sargasso Sea
MGAAGGIGQPLSLLLKQNTLVAALNLYDVAAVVAGVAADISHVNTPAHVRGFAGPAQLGAALAGADLVVIPAGVPRKPGMTRDDLFAVNAGIVSTLVDACATHCPRAIVNVISNPVNSTVPIAAEVLKRRGCFDPRKLLGVTHLDVVRARTFVAEAKGLDPAGVDVPVVGGHAGATILPLLSQTRPFPRDGFTPEEV

SEQ ID NO: 86159 - protein, 204 aa, Unknown
  Bacterial polypetide isolated from the Sargasso Sea
KKNAPNAFIICITNPLDVMVMAFQKFSGLPANKIVGMAGILDSSRFKLFLSLELNVPVNQIEAMVMGGHGDTMVPMPRFTKVSGKPLLDLVKDGKISQERLEEINQRTRDGGAEIVKYLEKGSAFYAPAASGVQMAEAYLNNQKKLLPCAVQLNGEYGVQNLYAGVPVVIGKDGVEKIDEIELDEKEKKEFMHSIDAVKAHMGS

SEQ ID NO: 86160 - protein, 319 aa, Unknown
  Bacterial polypetide isolated from the Sargasso Sea
MSKKISLIGAGQIGGTLAHLIGLKELVNEVVMFDIASGIAKGKALDIAQSSSVDGFNVKFSGTDNYEDIKNSDVVIITAGVPRKPGMSRDDLLGINLKIIKQVAEGIKKNAPKAFVICITNPLDVMVMAFQKYSGLPVNKVVGMAGILDSSRFKLFLSIELKIPVKEIEAMVMGGHGDTMVPLPRFTKVSGKPLLDLVKEGKLSLERLEEINQRTRDGGAEIVKYLEKGSAFYAPAASGVQMAEAYLKDEKKLLPCAVHLNGEYGVKNIFAGVPVIIGKNGVEKIEEINLDEKEKSQFMNSIDAVKKLWDAASAIDKDL

SEQ ID NO: 86161 - protein, 231 aa, Unknown
  Bacterial polypetide isolated from the Sargasso Sea
SDLLQANGGIFTGQGRALSDAANSSVKVLVVGNPANTNCLIAMHNAPNIPDAQFTAMTRLDHNRAIAQLAQKTSVSVNEIKHMTIWGNHSATQYPDLFHADVAGQNAAALVNDQQWLENEFIPTVQQRGAAIIDARGASSAASAASAAVDHIRDWALGTPRGDWVSMAIPSTGDYGAPEGIITSFPCTTSEGQYEVVLGLDLHPFSLEKIEASWAELVEERDTVASMGLLG

SEQ ID NO: 86162 - protein, 166 aa, Unknown
  Bacterial polypetide isolated from the Sargasso Sea
MKTIKVAVTGAAGQIGYAMLFRLASGAVFGRDTAVELRLLELEQALPALEGVKMELDDCAFPLLENIVTTSDTEHAFKGVDWVILVGSVPRKAGMERNDLLKVNGGIFVGQGKAINQNAGSNVRIVVVGNPCNTNCLIAMNNAPDIPHERWFAMTALDENRAKSQL

SEQ ID NO: 86163 - protein, 204 aa, Unknown
  Bacterial polypetide isolated from the Sargasso Sea
MSRKKISLIGGGQIGGNLALLCAQKELGDVVIYDVPNAEGMIKGKALDISQLTPMDGYDAKITGTSNPEDIKDSDIVIITAGIPRKPGMNREDLLEINIKIITDVANNVKKYAPNAFVIVLSNPLDAIVYSFYKVSGFKKNKVVGMAGVLDSTRFKTFLAIETGYSTQDIQCMVLGGHGDTMVPITRLATIGGIPAEELISKEK

SEQ ID NO: 86164 - protein, 98 aa, Unknown
  Bacterial polypetide isolated from the Sargasso Sea
MARKKIALIGAGNIGGTLAHLVGLRELGDVVLFDIVKGIPQGKALDIVQSSPASGFDAKYLGANSYRAIRGADVVIVTAGIPRKPGMSRDDLVSVNTG

SEQ ID NO: 86165 - protein, 208 aa, Unknown
  Bacterial polypetide isolated from the Sargasso Sea
MRKKISLIGAGQIGGTLAHLIALKQLGDVVLFDVAEGIAKGKALDIAQSSPVNGFNIKLTGTNNYEDTRNSDVIIITAGVPRKPGMTRDDLLGVNLKIIKQVAEGIKKTSPEAFVICITNPLDVIVMALQKYSNLPKNKIVGMAGILDSSRFIYFLSEELNTPVQKIKSLVLGGHGDTMVAMLGSTEVDGKKINELVKAGKISKGKLD

SEQ ID NO: 86166 - protein, 205 aa, Unknown
  Bacterial polypetide isolated from the Sargasso Sea
MARKKISLIGAGNIGGTLAHLIGLKELADVVLLDIAKGIPQGKSLDIAESSPVDGFDVDLAGSNNFSRIKNSDVIIVTAGSPRKPGMSRDDLIEINLKVMKSVGEAIKKYSPKSFVICITNPLDAMVWALREFSKLPHQMVVGMAGVLDSARFRYFIANHMKVSVEDVSAFVLGGHGDTMVPLVRFSNVGGVPIPELVKMKFNRQ

SEQ ID NO: 86167 - protein, 279 aa, Unknown
  Bacterial polypetide isolated from the Sargasso Sea
KGKALDIAQSSPVNGFNINLSGTNKYEDTKNSDVIIITAGVPRKPGMTRDDLLGINLKIIKQVAEGIKSTSPNAFVICITNPLDVIVMALQKYSGLPKNKIVGMAGILDSSRFIYFLSQELKIPVQKIQSFVLGGHGDSMVAMLGSTKVDGRKIEDLIKDGVIKKEKLEEIVERTKKGGAEIVKYLKKGSAFYAPAASGVEMAESYLKDLKKQLPCAAYLKGEYGVKDIYAGVPVVIGSNGVEKVIELSLNTEEKNNFENSIQSVRDLFSVAKKIDPEL

SEQ ID NO: 86168 - protein, 182 aa, Unknown
  Bacterial polypetide isolated from the Sargasso Sea
KVVGMAGILDSSRFKLFLSLELKIPVKEIEAMVMGGHGDTMVPLPRFTKVSGKPLLDLVKEEKLSVERLEEINQRTRDGGAEIVKYLEKGSAFYAPAAAGVQMAEAYLKDEKKLLPCAVQLNGEYGVKNIFAGVPVIIGKDGVEKIEEINLDEKEKNQFMHSIDAVKKLWDTASKIDKDLSK

SEQ ID NO: 86169 - protein, 284 aa, Unknown
  Bacterial polypetide isolated from the Sargasso Sea
GQIGGTLALLAGLKNLGDVVLFDIAKGMPQGKALDIAQASTIEGFDANITGANSYSALKGADVVIVTAGVPRKPGMSRDDLLGINTSVMQSVGEGIKKYCPKAFVICITNPLDVMVHQLRKACGLPYNKVVGMAGVLDSARFRLFLAQEFGVSVEDVSAFVLGGHGDTMVPLVRYSTVAGIPVPDLIKMGWTTQKKIDAIVERTANGGGEIVNLLGNGSAFYAPASSAISMAESYLLDKKRVVPAAAYVKGYYGLKGLYVGVPVVIGAKGVERIVKLSLTLREE

SEQ ID NO: 86170 - protein, 115 aa, Unknown
  Bacterial polypetide isolated from the Sargasso Sea
MRKISLIGAGQIGGTLAHLIGLKELVNEVVMFDVASGIAKGKALDIAQSSSVDGFNVNFSGTDNYEDIKNSDVIIITAGVPRKPGMSRDDLLGINLKIKRQVAEGIKIHSPEAFV

SEQ ID NO: 86171 - protein, 164 aa, Unknown
  Bacterial polypetide isolated from the Sargasso Sea
LSKQLDIPVNKINSLVLGGHGDTMVPMLEQTKIDGVSLSKFLKDGKIDKKKLEEIVDRTRKGGAEIVKFLQKGSAFYAPAASGIEMAESYLKDQKKQLPCAAYLQGEYGVKNLYAGVPVIIGASGVEKVIELKLNSEEKESFHQSIKAVEDLLSAAKKIDTSLN

SEQ ID NO: 86172 - protein, 186 aa, Unknown
  Bacterial polypetide isolated from the Sargasso Sea
MKKKITLIGAGQIGGTLAHLIALKELGDVVLFDVAVGIAKGKALDISQSSPVDGFNINLSGTDNYEDTKNSDVIIVTAGVPRKPGMTRDDLLGINLKIIKQVAEGIKKTSPNAFVICITNPLDVIVMALQKYSGLPKNKIVGMAGILDSSRFIYFLSQELKVPGKKIKSFVLGGHGDSMVAMLGHT

SEQ ID NO: 86173 - protein, 249 aa, Unknown
  Bacterial polypetide isolated from the Sargasso Sea
MKKISLIGAGNIGGELAAIAASKSLGNIMLIDIEEGIARGKSLDLSQSGVVRNFSSKINGTSNLSKIKDSDVIIVTAGIARKPGMSRDDLIITNLKIMTSIGNAIKTYSPKAFVICVTNPLDAMTWILKKISGIKKNMIVGMAGILDSSRFRFFLSEEIKVSSANIQTMVLGGHGDTMVPMLNYTSISGIPILEFIKEGKLTMSTLEKIIKRTRNGGGEIVGLLKSSSAYYAPAISAIEMAESFLLDQK

SEQ ID NO: 86174 - protein, 206 aa, Unknown
  Bacterial polypetide isolated from the Sargasso Sea
MSKKISLIGAGQIGGTLAHLIGLKELVDEIVMFDVASGIAKGKALDIAQSSSVDGFNVKLSGTDNYEDIKDSDVIIITAGVPRKPGMSRDDLLGINLKIIKQVAEGIKKNAPNAFVICITNPLDVMVMAFQKYSALPANKVVGMAGILDSSRFKLFLSLELKIPVREIEAMVMGGHGDTMVPLPRFTKVSGKPLLDLVKEGKLTSE

SEQ ID NO: 86175 - protein, 252 aa, Unknown
  Bacterial polypetide isolated from the Sargasso Sea
KALEGVVMELDDCSFPLLKDVRPTSDLDEGFGGANWALLVGSVPRKAGMERGDLLGINGKIFTGQGRAIQKNAASDVRVLVVGNPCNTNCLIAMNNAPDVPRERWFAMTRLDENRAAAQLAAKAGVQVSEVSNVTIWGNHSATQYPDYYNARIGGTPAPEVISDDTWAHIDFIPTVQQRGAAIIEARGASSAASAANAAIDTVHSLVNPTPEGDWNSLCVASDGSYDTKEGLITSFPVRSDGNGWEIVQDVP

SEQ ID NO: 86176 - protein, 228 aa, Unknown
  Bacterial polypetide isolated from the Sargasso Sea
MKKISLIGAGQIGGTLAHLIGLKELVNEVVMFDVASGIAKGKALDIAQSSSVDGFNVNFSGTDNYEDIKNSDVIIITAGVPRKPGMSRDDLLGINLKIIKQVAEGIKTHSPDAFVICITNPLDVMVMAFQKYSGLPANKVVGMAGILDSSRFKLFLSRELEVPVKEIDAIVMGGHGDTMVPLPRFTKVSEKPLLDLVKEGKISSEKLESINQRTRDGGAEIVKYLEKG

SEQ ID NO: 86177 - protein, 207 aa, Unknown
  Bacterial polypetide isolated from the Sargasso Sea
MNKKITLIGAGQIGGTLAHMIALKELADVVLFDVASGIAKGKALDIAQSSPVNGFNINLFGTDNYEDTKDSDVIIITAGVPRKPGMTRDDLLGINLKIIKQVAEGIKNTSPNAFVICITNPLDVIVMALQKYSGLPKNKVVGMAGILDSSRFIYFLSQELRVPVQKIQSFVLGGHGDSMVAMLGSTIVDGKKIYDLVKEGKISNEKL

SEQ ID NO: 86178 - protein, 236 aa, Unknown
  Bacterial polypetide isolated from the Sargasso Sea
MRKKFALIGAGNIGGTLAHLVGLKELGDVVLIDIAKGIPKGKALDLIQSSPIESFDSNIIGSSNYKDIKDADVVIVTAGFPRRPGMSRDDLVEKNAKIIQTIGQAIKKHCPNAFVICITNPLDAMVSVLQKSASLKTNMCVGMAGVLDSARLKYFLAKEFNVSIKDVNTFVLGGHGDTMVPLIRYSTVSGIPVSELIKLKQTTQKKINSIITRTRNGGAEIINLMKTSAFYAPASS

SEQ ID NO: 86179 - protein, 128 aa, Unknown
  Bacterial polypetide isolated from the Sargasso Sea
MSKISLIGAGQIGGTLAHLIGIKELVKEVVLFDVASGIAKGKALDIAQSSSVDGFDVKLTGTDNYEDIKNSDVIIITAGVPRKPGMSRDDLLGINLKIIKQVAQGIKKNSPDAFVICITNPLDVMVMA

SEQ ID NO: 86180 - protein, 195 aa, Unknown
  Bacterial polypetide isolated from the Sargasso Sea
MARNKIALVGAGQIGGTLALLSGLKELGDVVLFDIVKGVPQGKALDIEQASTIEGFDASVKGANSYAGLRNADVVIVTAGVPRKPGMSRDDLIGINTNVMRQVGAGIKKYCPKAFVICITNPLDVMVGVLRDACGLPHNRVVGMAGVLDSARFRLFLAQEFNVSVEDVTAFVLGGHGDSMVPLVRYSTVAGIPVP

SEQ ID NO: 86181 - protein, 192 aa, Unknown
  Bacterial polypetide isolated from the Sargasso Sea
MVGVLQRASGLPTNMIVGMAGVLDSARFRYFLAEEFNISMTDVSAFVLGGHGDTMVPLVRYSTVAGIPIPDLLEMGWSSQKKIDDIVQRTRDGGAEIVGLLKTGSAFYAPAESAVQMADAFLKDKKKLLPCAAFVDGPYNLDGIYVGVPVVIGKEGVERIVEINLSEEEKQMFNHSVESVQKLNQLAKNFEN

SEQ ID NO: 86182 - protein, 167 aa, Unknown
  Bacterial polypetide isolated from the Sargasso Sea
MRKISLIGAGQIGGTLAHLIGLKELANEVVMFDVAKGVAKGKALDIAQSSSVDGFNVNFSGTDNYEDIKNSDVIIITAGVPRKPGMSRDDLLGINLKIIKQVAEGIKTHSPDAFVICITNPLDVMVMAFQKYSGLPANKVVGMAGILDSSRFKLFLSRELNVPVKRL

SEQ ID NO: 86183 - protein, 317 aa, Unknown
  Bacterial polypetide isolated from the Sargasso Sea
MNKPVRVTITGAAGQIGYQLAFRIASGQMLGSNKKIILQLLEITPALPALQGVLMELEDCAFPTLAGVIATDNADEAFNETDYALLVGAMPRGPGMERADLLEANAKIFTHQGSAINNGANKDAKILVVGNPANTNALIASSNAPNIDPSNFSAMTRLDHNRAKSYLAKKIGVTTTEIKKMIIWGNHSATQFPDLDHVLCNGKSINNEINHQWLIDDFIPTIQQRGAEIIKARGASSAASAASAAIDHMRDWALGTPKDDWVSMAIPSDGSYGIEPGIIFSFPVKCENGKYEIVQGLDIEVFSRERNHITEAELREE

SEQ ID NO: 86184 - protein, 225 aa, Unknown
  Bacterial polypetide isolated from the Sargasso Sea
MEWDREDLLEINLGIMTDVAENIKKYSPNAFVIVVSNPLDAMVYAFYKVSQLKKNMVVGMAGALDSARFRAFIAMEVGCSVQDVTCMVLGGHGDTMVPITRVGTVGGVPIESLIKPDRLEEIVNRTRFAGGEIVKLFGNGSAFYAPAQSAIEMAESYLRDKKRIIPCASLCEGEFGINGYFIGVPSKIGKNGVEKILEFELRDNEKSALENTLEAVKKTVLETKL

SEQ ID NO: 86185 - protein, 259 aa, Unknown
  Bacterial polypetide isolated from the Sargasso Sea
GFNINLSGTDNYEDTKNSDVIIITAGVPRKPGMTRDDLLGINLKIIKQVAEGIKKTSPGAFVICITNPLDVIVMALQKYSGLPKNKVIGMAGILDSSRFIYFLSQELKVSVQKIKSFVLGGHGDSMVAMLGSTKVDGKKIADLVEEGKISKEKLDQIVDRTKKGGAEIVKYLEKGSAFYAPAASGVEMAECYLKDLKKQLPCAAHLDGEYGIKDIYAGVPVIIGSGGVEKIIELKLSSKERENFEKSVDAVRSLFNAAK

SEQ ID NO: 86186 - protein, 153 aa, Unknown
  Bacterial polypetide isolated from the Sargasso Sea
VPVKNIETLVLGGHGDTMVPMPNHTTVNKKPLSQLIKKEKLDSIINRTRKGGAEIIKLLEKGSAFYAPAASGIEMAESYIKDQKKILPCAAYLNGEYGVKNIYAGVPVQIGKGGAEKIIEKTLLDEEKRQFNDSIKAVKELFESAKKIDKDLK

SEQ ID NO: 86187 - protein, 104 aa, Unknown
  Bacterial polypetide isolated from the Sargasso Sea
MTKKISLIGAGQIGGTLAHLIAIKELANVVLFDVVEGVAKGKALDIAQSSGVAEFNINLIGTSNYNDIKDSDVVIITAGVPRKPGMSRDDLLGINLKIIKQVAK

SEQ ID NO: 86188 - protein, 205 aa, Unknown
  Bacterial polypetide isolated from the Sargasso Sea
DVRIIVVGNPCNTNCLIAMNNAPKIPKDRWFAMTMLDENRAKAQLAEKAKQPVNSISNMTIWGNHSATQYPDFHSAKINGQNATSVINDNGWLENIFIPKVQKRGAEIIAARGASSAASAANAIIDSIKSIITPTSEGDWFSICLHSDGSYGIDEGLIASFPCTSNGEAISIVQGIELNSFSQEKIRFTVEELRLEKENVKALLN

SEQ ID NO: 86189 - protein, 196 aa, Unknown
  Bacterial polypetide isolated from the Sargasso Sea
ITNPVNTTVAIAAEMLKAKGVYNKNKLFGVTTLDVIRAETFVAELKGVDVASVHVPVIGGHSGTTILPLLSQVEGVEFTDEEVASLTTRIQNAGTEVVEAKAGGGSATLSMGQAAARFCLSLVAAMQGENVVEYTYVQTDDSDDAAFFAHPVRLSANGVEEILPYGELSAFEEKAKNDMLEGLRGDIKLGVDFVNG

SEQ ID NO: 86190 - protein, 244 aa, Unknown
  Bacterial polypetide isolated from the Sargasso Sea
MRKISLIGAGQIGGTLAHLIGIKELANEVVMFDVASGIAKGKALDIAQSSSVDGFNVNFSGTDNYEDIKNSDVIIITAGVPRKPGMSRDDLLGINLKIIKQVAEGVKTHSPDAFVICITNPLDVMVMAFQKYSSLPVNKVVGMAGILDSSRFKLFLSRELNVPVKEIDAIVMGGHGDTMVPLPRFTKVSKKPLLDLVKDGKISSEKLESINQRTRDGGAEIVKYLEKGSAFYAPAASGVEMAAA

SEQ ID NO: 86191 - protein, 110 aa, Unknown
  Bacterial polypetide isolated from the Sargasso Sea
MSKISLIGAGQIGGTLAHLIGLKELVDEVVLFDVASGIAKGKGLDIAQSSSIDGFNVKFSGTDKYEDIKGSDVIIITAGVPRKPGMSRDDLLGINLKIIKQVAEGIKNNA

SEQ ID NO: 86192 - protein, 247 aa, Unknown
  Bacterial polypetide isolated from the Sargasso Sea
MRKKITLIGAGQIGGTLAHLIALKELADVVLFDVAAGIAKGKALDIAQSSPINGFNVNLSGTDNYEDTKNSDVIIITAGVPRKPGMTRDDLLEINLKIIKQVAAGIKATSPNAFVICITNPLDVIVMALQKYSGLPKNKVVGMAGILDSSRFIYFLSQELNVPVKKIKSFVLGGHGDSMVTMLGSTEVDGTNINELVKKGKISQEKLDQIVDRTKKGGAEIVKYLEKGSAFYAPAASGVEMAESYLK

SEQ ID NO: 86193 - protein, 177 aa, Unknown
  Bacterial polypetide isolated from the Sargasso Sea
WFAMTALDENRAKSQLAHKANVAARDVTNMTIWGNHSATQYPDYTNALIKGMPAIKVIKDEEWLKGDFIKTVQQRGSEIITARGASSAASAANAALDTITKIITPTIKEDWFSAAIPSSGSYGVSQGLIFSYPLRSSGNGDYEVVQGIELDDFSQQKIKATREELEMEREAVDEILN

SEQ ID NO: 86194 - protein, 119 aa, Unknown
  Bacterial polypetide isolated from the Sargasso Sea
MSKISLIGAGQIGGTLAHLIGLKELVDEVVLFDVASGVAKGKGLDIAQSSSVDGFNVKFSGTDKYEDIKGSDVIIITAGVPRKPGMSRDDLLGINLKIIKQVAEGIKNNAPNAFVICIT

SEQ ID NO: 86195 - protein, 165 aa, Unknown
  Bacterial polypetide isolated from the Sargasso Sea
MKKKITLIGAGQIGGTLAHLIALKGLADVVLFDVAEGIAKGKALDIAQSSPVEGFDVSLKGTSDYKDTSNSDVIIITAGVPRKPGMSRDDLLGINLKIIKQVAEGIKKTSPNAFVICITNPLDVIVMALQKYSGLPKNKVVGMAGILDSSRFIYFLSQRVKSASK

SEQ ID NO: 86196 - protein, 203 aa, Unknown
  Bacterial polypetide isolated from the Sargasso Sea
MKKISLIGAGQIGGTLAHLIGTKELVDEVVLFDVASGIAKGKALDIAQSSSVDGFNVKFSGTDNYEDIKGSDVIIITAGVPRKPGMSRDDLLGINLKIIKQVAEGVKKNAPNAFVICITNPLDVMVMAFQKFSGLPSNKVVGMAGILDSSRFKLFLSLELNVPVREIEAMVMGGHGDTMVPMPRFTKIQGNHLLDLVKDGKDF

SEQ ID NO: 86197 - protein, 167 aa, Unknown
  Bacterial polypetide isolated from the Sargasso Sea
LAQLSERSGKPTREVKNTIIWGNHSSTQYPDVNHATIGGKPARDVVGDDAYLDGNFVDVVRKRGAAIIEARKLSSALSAASSVCDHVYDWIYGTKEGEWTSMGVVSDGSYGIPEGLVYSFPVTCTGGKWQIVQGLNIDERSRKLMDESAQELTEEFAVAEECLAESA

SEQ ID NO: 86198 - protein, 157 aa, Unknown
  Bacterial polypetide isolated from the Sargasso Sea
MNTVKVAVTGAAGQIGYALLFRIASGSVFGPDTKVELQLLELEPALPALEGVKMELDDCAFPLLQKITTTSDAGVAFKDTDWILLVGAAPRKAGMERNDLLRVNGGIFVGQGKAIEEQAGDRAKILVIGNPCNTNCMIAMSHAPSIPKEPLVRHDRT

SEQ ID NO: 86199 - protein, 191 aa, Unknown
  Bacterial polypetide isolated from the Sargasso Sea
NNIKEQSPNAFLIVISNPLDAMVYAFHKVSEFPKNQVVGMAGALDSARFRAFIAMETGYSVQDVTCMVLGGHGDTMVPISRLATVGGVPVTDLINAEKLKEIEDRTRVAGGEIVKLFGNGSAFYAPAQSAIEMAESYIIDKKRVIPCASLCEGEFGIDGYFIGVPTVIGSNGVEKILEFTLNDDEKTELNK

SEQ ID NO: 86200 - protein, 214 aa, Unknown
  Bacterial polypetide isolated from the Sargasso Sea
MKAPVRVTVTGAAGQIGYALLFRIASGSMLGDDQPVILQLLDITPAMGALGGVKMELDDCAFPLLADVICTDDPEVAFKDSDYALLVGARPRGPGMERKDLLEANAAIFGVQGKAINAVASKEIKVLVVGNPANTNALITQRNAPDIDPRQFTAMTRLDHNRAKTQLAQKTKTTVNDIRQMTIWGNHSATQYPDLHHALVSGESAMNGLDIDWY

SEQ ID NO: 86201 - protein, 235 aa, Unknown
  Bacterial polypetide isolated from the Sargasso Sea
MKKISLIGAGQIGGTLTHLIGLKEFVNEVVLFDVVSGVAKGKALDIAQSSSVDGFNVKLFGTDNYEDIKNSNVIIVTAGIPRKPGMSKDDLLGINLKIIKQVAEGIKKNAPSAFVICITNPLDVMVMAFQKYSGLPTNKVVGMAGILDSSRFKLFLSQELKVPVREIEAMVMGGHGDTMVPLPRFTKVSGKPLLDLVKEGKLSSEKLEEINQRTRDGGAEIVKYLEKGSAFYAPA

SEQ ID NO: 86202 - protein, 261 aa, Unknown
  Bacterial polypetide isolated from the Sargasso Sea
AGVVCTDDPDVAFKDSDYALLVGARPRGPGMERKDLLEANAAIFGVQGKAINSVASRSIKVLVVGNPANTNALITQRNAPDVNSRQFTAMTRLDHNRAKTQLAQKTGTTVNDICQMTIWGNHSATQYPDLHHALVRGDSAMGDVDMDWYRAEFIPTVQQRGAAIIEARGASSAASAANAAIDHMRSWALGSPKDDWVSMGVISDGSYDVEPGLIYSFPCRCHDGEWEIVQGLEISEFSREKMEATAQELIEERDAVSHLLS

SEQ ID NO: 86203 - protein, 104 aa, Unknown
  Bacterial polypetide isolated from the Sargasso Sea
MKKKISLIGAGQIGGTLAHLIALKELGDIVLFDVAEGIAKGKALDIAQSSPVSKFDINVTGTNNYEDTKNSDVIIITAGVPRKPGMTRDDLLGINLKIIKEVAE

SEQ ID NO: 86204 - protein, 272 aa, Unknown
  Bacterial polypetide isolated from the Sargasso Sea
ILVSHLPLRALQGKITGTNDFSHMRNSDVIIITAGLPRQPGMSRDDLLETNGKIIKKIGLDIKKHSPKAFVICITNPLDAMVYVLQKYSKLPKNMCVGMAGVLDSSRMKFFLSEALDVSINDVETFVLGGHGDDMVPLVNYTTIGGIPLMDYIKIKKVPTSKIKKIVDRTRMGGGEIVKLLKRGSAFYAPASSAIQMAEAYLLNQKKLLPCAAFLSGQYGLKNMYMGVPTIIGNKGIEKIIEVKISANEKSMLKKSVKSVQGLVNAVEKILK

SEQ ID NO: 86205 - protein, 89 aa, Unknown
  Bacterial polypetide isolated from the Sargasso Sea
MAKPAKRVAVTGAAGQIAYSLLFRIANGDLLGKDQPVILQLLDLPQAQAAVKGVVMELDDCAFPLLAGVVITDDPKVAFKDADVALLVG

SEQ ID NO: 86206 - protein, 108 aa, Unknown
  Bacterial polypetide isolated from the Sargasso Sea
MRKKIALIGAGNIGGTLAQLVSLKELGDVVLLDIFEGMPKGKSLDLAQSSSIEGFHADFKGTSSFRDIKNSDVVIVTAGFPRKPGMSRDDLVEKNSIIIQNVGKNIKK

SEQ ID NO: 86207 - protein, 254 aa, Unknown
  Bacterial polypetide isolated from the Sargasso Sea
MILNYLGTSNFEDIKNSDVVVITAGFPRKPGMDRADLLSKNLDIMTNVANKVRKFAPEAFVIVVSNPLDAMVYAFYKISGFPKNRVVGMAGALDSARFRAFIADATNLSSQDVNCMVLGGHGDTMVPVSRLATVGGVPLSSLLSKKEIIAIENRTRVGGGEIVKLFGKGSAFYAPAQSAVEMIESFVRDKKRVIPCASLCEGEFDIDGYFIGVPTVIGSGGVEKILTFDLNDEEKSSLNNTLVEVKKTVSETGL

SEQ ID NO: 86208 - protein, 204 aa, Unknown
  Bacterial polypetide isolated from the Sargasso Sea
MKKISLIGAGQIGGTLAHLIALKKLANVVLFDVAEGIAKGKALDISQSSAVEKFEINVVGTNSYEDTKNSDVIIITAGVPRKPGMSRDDLLGINLKIIKEVAEGIKKTSPNAFVICITNPLDIIVMALQKYTGFKENKVVGMAGILDTSRFKYFLSKELNISINEIKSFVLGGHGDTMVAMLNHTYIKNKPIKEYIKSGQLKEK

SEQ ID NO: 86209 - protein, 168 aa, Unknown
  Bacterial polypetide isolated from the Sargasso Sea
KKNAPNAFVICITNPLDVMVMAFQKFSGMPSNKVVGMAGILDSSRFKLFLSLELNVPVREIEAMVMGGHGDTMVPMPRFTKISGKPLLDLVKDEKISSERVEEINQRTRDGGAEIVKYLEKGSAFYAPSASGVQMAEAYLNDQKKLLPCAVQLNGEYGVKNVYAGVPV

SEQ ID NO: 86210 - protein, 178 aa, Unknown
  Bacterial polypetide isolated from the Sargasso Sea
MIVGMAGILDSARFKFFLSNELHISTDSIQTMVLGGHGDTMVPLLRFTSISGIPLAEFIKKKKISKEKVEQIISRTRNGGGEIVALMKNSSAFYSPATSALEMLESYFFDNRRILPCSAYLEGEYNVNGLCVGVPVVIGKDGVEEIIELKLQDFEKKELDNSIEAVQELVEKCKKLLV

SEQ ID NO: 86211 - protein, 113 aa, Unknown
  Bacterial polypetide isolated from the Sargasso Sea
MKKKISLIGAGQIGGTLAHLIGTKELVDEVVLFDVASGIAKGKALDIAQSSSVDGFNVKFSGTDDYKDIKDSDVIIITAGVPRKPGMSRDDLLGINLKIIKQVAEGVKQNAPN

SEQ ID NO: 86212 - protein, 163 aa, Unknown
  Bacterial polypetide isolated from the Sargasso Sea
MRKKIALVGAGNIGGTLAHLIGLKELGDVVLIDIADGMTKGKALDLVQSSSIEKFNAKIGGSSNYREMKGADVVIVTAGFQRRPGMTRDDLVEKNSAIIQTVGKGIKLNCPKAFVICITNPLDAMVSVLQKAAGLKTNMCVGMAGCSDSARLKYFLAEESKFL

SEQ ID NO: 86213 - protein, 238 aa, Unknown
  Bacterial polypetide isolated from the Sargasso Sea
MTKISLIGAGQIGGTLAHLIGTKELVNEVVLFDVASGIAKGKALDIAQSSSVDGFNVRFSGTDNYEDIKNSDVIIITAGVPRKPGMSRDDLLGINLKIIKQVAEGVKKNAPNAFVICITNPLDVMVMAFQKFSGLPSNKVVGMAGILDSSRFKLFLSLELNVPVREIEAMVMGGHGDTMVPMPRFTKISGKPLLDLVKDGKISLERVEEINQRTRDGGAEIVKYLEKGFSPFMHPAAS

SEQ ID NO: 86214 - protein, 235 aa, Unknown
  Bacterial polypetide isolated from the Sargasso Sea
MKKKISLIGAGQIGGTLAHLISIKELADVVLFDVAEGIAKGKALDIAQSTSVDGFDVNILGTNNYEDTKNSDVIIITAGVPRKPGMTRDDLLGTNLKIIKQVAEGIRKTSPNAFVICITNPLDVMVMALQKYSKLPTNKVVGMAGILDSSRFKYFLSQELKVPVKKIDTLVLGGHGDTMVPMPNYTKINGISLNQLIKENKIDNKKLNSIIDRTRKGGAEIIKFWKKVQHFTHPL

SEQ ID NO: 86215 - protein, 199 aa, Unknown
  Bacterial polypetide isolated from the Sargasso Sea
LDVMVMAFQKYSGLPTNKVVGMAGILDSSRFKLFLSNELQVPVKEIEAMVMGGHGDTMVPLPRFTKVSGKSLLDLVKEGKLTAERLEEINQRTRDGGAEIVKFLEKGSAYYAPAASGVQMAEAYLKDEKKLLPCAVYLNGEYGVTNIFAGAPVIIGKNGVEKIEEISLDEKEKSQFMHSIDAVKKLWESASAIDKDLSK

SEQ ID NO: 86216 - protein, 194 aa, Unknown
  Bacterial polypetide isolated from the Sargasso Sea
MALQKYSSLAKNKVVGMAGILDSSRFIYFLSKELNVPVNKIKSFVLGGHGDSMVAMLNSTEIGGKKILSLVESGKLKKEKLNEIVERTKKGGAEIVKYLEKGSAFYAPAASGVQMAESYLKDEKKQLPCAVYLNGEYGVKGIYAGVPAIIGKEGVEKIIELSLSDEEKRNFENSVKSVKELFEAAAKIDPFLKS

SEQ ID NO: 86217 - protein, 176 aa, Unknown
  Bacterial polypetide isolated from the Sargasso Sea
MRKKIALIGAGNIGGTLAQLVSLKELGDVVLLDIFEGMPKGKSLDLAQSSSIEGFHADFKGTSSFRDIKNSDVVIVTAGFPRKPGMSRDDLVEKNSIIIQNVGKNIKKYCPKAFVICITNPLDAMVSVLQKSSGLKTNMCIGMAGVLDSARLKYFLSKEFSVSINDISAFVLGVRR

SEQ ID NO: 86218 - protein, 243 aa, Unknown
  Bacterial polypetide isolated from the Sargasso Sea
VVIVTAGVARKPGMSRDDLIGINTKVMNEVGAGIKSHCPDAFVICITNPLDVMVGVLQRASGLPAAKVVGMAGVLDSARFRLFLAEEFNVSVEDVTAFVLGGHGDTMVPLVRYSAVAGIPVPDLIKMGWSSDDRIADIVQRTRDGGAEIVGLLKTGSAFYAPASSAIDMADAYLKDKKRLLPCAAYVDGAYGLNGLYVGVPVIIGAAGVERIVEIDLNAGEQAMFDNSVGAVKALNDVVAGLE

SEQ ID NO: 86219 - protein, 162 aa, Unknown
  Bacterial polypetide isolated from the Sargasso Sea
MKKISLIGAGQIGGTLAHLIGLKELVDEVVLFDVVSGLAKGKALDIEQSSSVDGFNVKLSGTNNYEDIKNSDVIVITAGVPRKPGMSRDDLLVINLKIIKQVAEGIKKNAPNSFVICITNPLDVMVMAFQKYSGLPTNKVVGMAGILDSSRFKLFLSQELKV

SEQ ID NO: 86220 - protein, 246 aa, Unknown
  Bacterial polypetide isolated from the Sargasso Sea
FDTLGDISISDDPNEAFKETEYAFLVGAKPRGPGMERSDLLQENAKIFSAQGKAINDNASRDIRVLVVGNPANTNALIAMSNAPDINQNAFTAMMRLDHNRALAQLASKLDCHSSELLNMTIWGNHSTTQYPDISNLKLSGELISKRLDERWVKDEFIPRVQNRGAEIIKARGLSSAASAASAAIDHMRDWTFGTKNNDWVSMAIQSDGSYGICDGIIFSFPVTCQNGSYTIVQDLEIDDFSKKCL

SEQ ID NO: 86221 - protein, 81 aa, Unknown
  Bacterial polypetide isolated from the Sargasso Sea
MRKKIALIGAGNIGGTLAHLICLKELADVVLIDIAKGIPQGKALDIAQSSAIESFNINIQGSNNYKDIKNSDVIIVTAGFA

SEQ ID NO: 86222 - protein, 113 aa, Unknown
  Bacterial polypetide isolated from the Sargasso Sea
MTKISLIGAGQIGGTLAHLIGLKELANEVVLFDVASGIAKGKALDIAQSSSVDGFNVKFSGTDNYEDIKDSDIIIITAGVPRKPGMSRDDLLGINLKIIKQVAEGIKKYSPNA

SEQ ID NO: 86223 - protein, 257 aa, Unknown
  Bacterial polypetide isolated from the Sargasso Sea
MSKISLIGAGQIGGTLAHLIGLKELADEVVLFDVASGIAKGKALDIAQSSSVDGFNVKFSGTDNYEDIKDSDVIIITAGVPRKPGMSRDDLLGINLKIIKQVAEGIKKYSPNAFVICITNPLDVMVMAFQKYSGLPTNKVVGMAGILDSSRFKLFLSLELNIPVKEIHAMVMGGHGDTMVPLPRFTKISGKPLNELVKQGKISEERLESINQRTRDGGAEIVKYLEKGSAFYAPAASGVEMAKAYMNNENKVLPCAA

SEQ ID NO: 86224 - protein, 319 aa, Unknown
  Bacterial polypetide isolated from the Sargasso Sea
MRKKIALIGAGNIGGTLAHLICLKELGDVVLIDVAEGVPQGKALDIAQSSAIESFNSNITGSNNYKDIKNSDVVIVTAGFPRKPGMSRDDLVEKNAFIIKQVGKAIKSYCPKSFVICITNPLDAMVSVLQKFSGLKNKMCVGMAGVLDTARLEYFLSKEFNVSIEDVQAIVLGGHGDTMVPLIRYSNISGVPIPELIKLKFTTSKKIDEIIKRTRDGGGEIGKLMKTSSAFYAPASSAISMAESFLRDQKRVLPCAAYLNGEYGVKGFYVGVPTIIGSKGVEQIMEFKLNTPEKKQFKKSVNAVKKLTKLASKLVNKNK

SEQ ID NO: 86225 - protein, 177 aa, Unknown
  Bacterial polypetide isolated from the Sargasso Sea
MIGLKELGDVVLIDIADGMTKGKALDLAQSSSIESFNANLNGSSKYRDMKDADVVIVTAGFQRRPGMTRDDLVEKNSTIIQTVGKGIKMNCPKAFVICITNPLDAMVSVLQKVAGLKTNMCVGMAGVLDSARLKYFLAEEFKVSVEDVSAFVLGGHGDTMVPIIRYATVAGIPVPEL

SEQ ID NO: 86226 - protein, 320 aa, Unknown
  Bacterial polypetide isolated from the Sargasso Sea
MSKISLIGAGQIGGTLAHLIGIKELVNEVVLFDVARGIAKGKALDIAQSSSVDGFNVKFSGTDDYKDIKNSDVIIITAGVPRKPGMSRDDLLGINLKIIKQVAEGIKQNSPDAFVICITNPLDVMVMAFQKFSGLSPNKVVGMAGILDSSRFKLFLSEEFNIPVKKIDAMVMGGHGDTMVPLPRFTKVSGKPLLDLVKDGKISQERLEEINQRTRDGGAEIVKFLEKGSAFYAPAASGVEMAKAYLQDEKKILPCAAYLNGEYGIKNIYAGVPIIIGKKGVEKIEEIDLDEKEKSEFLHSIDAVKKLWEAASKIDPDLVK

SEQ ID NO: 86227 - protein, 256 aa, Unknown
  Bacterial polypetide isolated from the Sargasso Sea
YKDIKNSDVIIITAGVPRKPGMSRDDLLGINLNIIKQVALGIKDNSPDAFVICITNPLDVMVMAFQKYSGLAPNKVVGMAGILDSSRFKLFLSLELNVPVKEIEAMVMGGHGDTMVPLPRFTKVSGRPLLEIVKEGKISIEKLEEINQRTRDGGAEIVKFLEKGSAYYAPAASGVQMAEAYLKDQKKLLPCAVYLKGEYGVSNIYAGVPVIIGKNGVEKIEEISLDPKEKKQFLHSIDSVKKLWDAAKNIDISLSK

SEQ ID NO: 86228 - protein, 228 aa, Unknown
  Bacterial polypetide isolated from the Sargasso Sea
GINLKIIKQVAEGVKLNAPNAFVICITNPLDVMVMAFQKFSGLSPNRVVGMAGILDSSRFKLFLSEEFNVPVREVEAMVMGGHGDTMVPLPRFTKVSGKPLLNLVKDGKISEKRLEEINQRTRDGGAEIVKFLEKGSAFYAPAASGVEMAKAYLMDEKKKLPCAAYLSGEYGIKNIYAGVPVVIGKDGVEKIEEINLDEKEKSEFLHSVDAVKKLWDAASKIDPDLAK

SEQ ID NO: 86229 - protein, 239 aa, Unknown
  Bacterial polypetide isolated from the Sargasso Sea
DSDVFIITAGIPRKPGMDREDLLEINLGIMKDVANNIKVQSPNAFVIVISNPLDAMVYAFHKVSEFPKNQVVGMAGALDSARFRAFIAMETGYSVQDVTCMVLGGHGDTMVPISRLATVGGVPVTDLINSNRLKEIEDRTRVAGGEIVKLFGNGSAFYAPAQSAIEMAESYIRDKKRVIPCASLCEGEFGIDGYFIGVPTVIGSNGVEKILEFTLNDDEKTELNKTLEAVKKTVAETEL

SEQ ID NO: 86230 - protein, 150 aa, Unknown
  Bacterial polypetide isolated from the Sargasso Sea
MKKKITLIGAGQIGGTLAHLIALKGLADVVLFDVASGLAKGKALDIAQSSPVSGFNVNLYGTDNYQDTKNSDVVIITAGVPRKPGMTRDDLLGINLKIIKQVAEGIKNTSPDAFVICITNPLDVIVMALQKYSGLPKNKVVGMARYIRFF

SEQ ID NO: 86231 - protein, 293 aa, Unknown
  Bacterial polypetide isolated from the Sargasso Sea
GHVVLFDVAEGIAKGKALDIAQSSPINNFNTSLSGTNNYEDTKDSDVIIITAGVPRKPGMTRDDLLGINLKIIKQVAQGIKNTSPNAFVICITNPLDVIVMALQKYSGLPKNKVVGMAGILDSSRFIYFLSQEMKIPTSKIESLVLGGHGDSMVAMVNHTKIDGKFLRELIKEGKIKQEKIDQIVDRTKKGGAEIVKYLEKGSAFYAPASSGVEMAESYLKNLKKQLPCAAYLNGEYGVKDLYVGVPVVIGNKGVERVIELNLNDEEKKNFNNSIKAVKDLFEAAKKIDKELV

SEQ ID NO: 86232 - protein, 215 aa, Unknown
  Bacterial polypetide isolated from the Sargasso Sea
MTKISLIGAGQIGGTLAHLIGTKELVNEVVLFDVASGIAKGKALDIAQSSSVDGFNVRFSGTDNYEDIKDSDVIIITAGVPRKPGMSRDDLLGINLKIIKQVAEGVKKNAPNAFVICITNPLDVMVMAFQKFSGLPSNKVVGMAGILDSSRFKLFLSLELNVPVKEIEAMVMGGHGDTMVPMPRFTKISGKPLLNLVKDGKISSERVEEINQRTR

SEQ ID NO: 86233 - protein, 320 aa, Unknown
  Bacterial polypetide isolated from the Sargasso Sea
MTKPKISLIGAGQIGGTLAHLIALKELGDVVLFDVAEGIAKGKALDLSQSTAIDGLNVSITGTNNYNDTSDSDVIIITAGVPRKPGMTRDDLLGINLKIIKQVAEGIKDTSPNAFVICITNPLDVIVMALQKYSGLPKNKVIGMAGVLDTSRFKFFLSQELNVPISEVDSFVLGGHGDTMVPVPNRTTVSGKPLLDFVKEGKISEEKLNEIIDRTRNGGAEVVKLLETGSAFYGPAASGIEMAESYLKNLKKTLPCAAHLNGQYGVKDLYVGVPVIIGSNGIEEVVELTLDDEEKRYFDISIDAVKELFDAAINIDTNLK

SEQ ID NO: 86234 - protein, 302 aa, Unknown
  Bacterial polypetide isolated from the Sargasso Sea
MIGLKELANEVVLFDVASGIAKGKALDIAQSSSVDGFNVKFSGTDNYQDIKNSDVIIITAGVPRKPGMSRDDLLGINLKIIKQVAEGIKKNAPNAFVICITNPLDVMVMAFQKYSGLPVNKVVGMAGVLDSSRFKLFLSLELKVPVKEIEAMVMGGHGDTMVPLPRFTKVSGKSLLDLVKDGRLSLERLEKINQRTRDGGAEIVKFLEKGSAFYAPAASGVQMAEAYLKDEKKLLPCAVYLGGEYGVKDIFAGVPVLIGKGGVEKIEEISLDEKEKSQFMHSIDAVKKLWQAASAIDKDLLK

SEQ ID NO: 86235 - protein, 175 aa, Unknown
  Bacterial polypetide isolated from the Sargasso Sea
ILDSSRYKLFLSEEFNVPVKKIEALVMGGHGDTMVPLPGFTKIDGKKLLDLVDDGKITNEKIESINQRTRDGGAEIVKYLEKGSAYYAPAASGVEMAKSYLNDEKKLLPCAVYINGEYGVKDIYAGVPVIIGKKGVEKIEEINLRDNEKAEFQKSVEAVKKLWQAAIKIDPDLNN

SEQ ID NO: 86236 - protein, 272 aa, Unknown
  Bacterial polypetide isolated from the Sargasso Sea
GMVKGKALDIMQLRPHDGYDSELSGTSDYSDIAGSDVIIITAGIPRKPGMDREDLMSINLGIMKDVASNVKKHAPDAFVIVISNPLDAMVYAFHKVSGFAKNKVVGMAGALDSGRFRAFLAMETGLSVQDVSCMVLGGHGDSMVPITRLATIGGVPVTDLISSERLREIEDRTRFAGGELVKLFGNGSAFYAPAQCAIEMAEAYLKDKKRVIPSAALCEGEFGIHGYFIGVPTVIGASGIEKIIEFNLTDEEKSALDNTLDAVKKTVEETKL

SEQ ID NO: 86237 - protein, 159 aa, Unknown
  Bacterial polypetide isolated from the Sargasso Sea
MKSKVTVVGAGNVGATTAQRIFEKGHSDVVLIDVVEGIPQGKALDILESGPIVKSDAKIVGTNTYEESKDSDIVVITAGIARKPGMSRDDLLITNMNIVGSVTESIMKYSKNPIIIVVSNPLDAMVQHSFLKSGLSKERVIGMAGILDTGRFRTFLAEE

SEQ ID NO: 86238 - protein, 321 aa, Unknown
  Bacterial polypetide isolated from the Sargasso Sea
MKKKISLIGAGQIGGTLAHLIGIKELANEVVLFDVASGIAKGKALDIAQSSSVDGFNVNFFGTDNYKDIKGSDVIIITAGVPRKPGMSRDDLLGINLKIIKQVAEGIKQNTPDAFVICITNPLDVMVMAFQKYSGLSANKVVGMAGILDSSRFKLFLAEEFNVPVREIDAMVMGGHGDTMVPLPRFTKVSGKPLLDLVKEGKISKERLEEINQRTRDGGAEIVKFLEKGSAYYAPAASGVEMAKAYLKDEKKMLPCAAYLNGEYGIKNIYAGVPTIIGEKGVEKIEEINLDDKEKSEFLNSVDAVKKLWIAASKIDTDLSK

SEQ ID NO: 86239 - protein, 215 aa, Unknown
  Bacterial polypetide isolated from the Sargasso Sea
MGIKNTSPNAFVICITNPLDVIVMALQKYSGLPKNKVVGMAGILDSSRFIYFLSQELNLSVKKIKSLVLGGHGDSMVAMVNHTTVDGMKLIDLVKGGKLKKEQLDKIIDRTKKGGAEIVKYLEKGSAFYAPASSGVEMAESYLKDLKKELPCAAYLNGEYGVKDLYAGVPVIIGKNGVEKVIELELNNTEKINFESSIKSVQELFNAAKKIDKEL

SEQ ID NO: 86240 - protein, 318 aa, Unknown
  Bacterial polypetide isolated from the Sargasso Sea
MRKKITLIGAGQIGGTLAHLIALKKLADVVLFDVASGIAKGKALDIAQSSPIDEFDINLSGTDNYEDTKNSDVIIITAGVPRKPGMTRDDLLSVNLKIIKQVAEGIKKTSPNAFVICITNPLDVMVMALQKYSGLPKNKIVGMAGILDSSRFIYFLSQELRVSVKKIKSFVLGGHGDSMVAMLGSTVVDGKKIDVLVKEGKISKQKLDEIVERTKKGGAEIVKYLEKGSAFYAPAASGVEMAESYLKDLKKQLPCAVYLKGEYGAKDIYAGVPVIIGSQGVEKIIELDLSAEEKKNFDKSIKSVQDLFEMAKKIDPSL

SEQ ID NO: 86241 - protein, 207 aa, Unknown
  Bacterial polypetide isolated from the Sargasso Sea
VANNIKEQSPNAFVIVISNPLDAMVYAFHKVSEFPKNQVVGMAGALDSARFRAFIAMETGYSVQDVTCMVLGGHGDTMVPISRLATVGGVPVTNLINADRLKEIEDRTRVAGGEIVKLFGNGSAFYAPAQSAIEMAESYIRDKKRVIPCASLCEGEFGIDGYFIGVPTVIGCNGVEKILEFSLNDDEKTELNKTLEAVKKTVAETEL

SEQ ID NO: 86242 - protein, 318 aa, Unknown
  Bacterial polypetide isolated from the Sargasso Sea
MKKKITLIGAGQIGGTLAHLIALKELGDVVLFDVAAGIAKGKALDIAQSSPVNEFNINLTGTDKYEDTRDSDVIIITAGVPRKPGMTRDDLLGINLKIIKQVAEGINKTSPNAFVICITNPLDVIVMALQKYSGLPKTKIVGMAGILDSSRFIYFLSQELKVPVKKIKSFVLGGHGDSMVAMLGSTEVEGKNILKLVEEGKISQKRLDEIINRTKTGGAEIVKYLEKGSAFYAPAASGVEMAESYLKDLKKQLPCAAYLNGEYGFKDIYAGVPVIIGKNGVEKIIEIELSKNEKNDFDKSIEAVKDLFDAAKKIDSSL

SEQ ID NO: 86243 - protein, 203 aa, Unknown
  Bacterial polypetide isolated from the Sargasso Sea
MFDVASGVAKGKALDIAQSSSVDGFNVKFSGTDNYEDIKNSDVIIITAGVPRKPGMSRDDLLGINLKIIKQVAEGIKTYSPDAFVICITNPLDVMVMAFQKYSELPTNKVVGMAGILDSSRFKLFLSKELKVPVKKIDAMVMGGHGDTMVPLPRFTKVSGKPLLDLVKDGKISSEKLESINQRTRDGGAEIVKYLEKGSAFYA

SEQ ID NO: 86244 - protein, 160 aa, Unknown
  Bacterial polypetide isolated from the Sargasso Sea
MRKRITLIGAGQIGGTLAHLIALKGIGDVILFDVAEGIAKGKALDIAQSSPVNKFNINLSGTSNYEDTRNSDVIIITAGVPRKPGMTRDDLLGINLKIIKQVAEGIKKTSPNAFVICITNPLDVMVMALQKYSGLPKNKVVGMAGILDSSRFIYFLSQET

SEQ ID NO: 86245 - protein, 348 aa, Unknown
  Bacterial polypetide isolated from the Sargasso Sea
MSKKWLKNGAKLSERSNQNNHRDQIVSKTVTITGAAGQIGYQLAFRIASGQLLGANEKINLNLLEISPALDALKGVAMELEDCAFETLENISFTDDPNEAFKNTDYAFLVGAKPRGPGMERSDLLKENAKIFSAQGKAINENASRDIKVLVVGNPANTNALIAMSNAPNINQNAFTAMMRLDHNRALAQLASKLDCHSSELSNMTIWGNHSTTQYPDVNNLMLSGEAISSMLDERWVKDEFIPKVQNRGAEIIKARGLSSAASAASAAIDHIRDWALGTKDSDWVSMAIPSDGSYGIKKGIIYSFPVTCQGGSYSIVQNLEINQFSKECMQITEKELLEEKAAIEHLL

SEQ ID NO: 86246 - protein, 146 aa, Unknown
  Bacterial polypetide isolated from the Sargasso Sea
MRRNKIALIGGGQIGGTLAHLAGLKELGDVVIFDIIKGIPQGKSLDLAESSPVSSFNSQMKGSNSYSAIKGSDVVIVTAGVPRKPGMSRDDLLSINLKVMSDVGKGIKKYAPNAFVICITNPLDAMVWALRKFSGLPAKKVVGMAG

SEQ ID NO: 86247 - protein, 327 aa, Unknown
  Bacterial polypetide isolated from the Sargasso Sea
MKTVKVAVTGAAGQIGYAMLFRLASGAVFGQDTAVELRLLELEQALPALEGVKMELDDCAFPLLENIVTTSDTDEAFKGVDWALLVGSVPRKANMERNDLLKVNGGIFVGQGKAINKNAGSNVRIVVVGNPCNTNCLIAMNNAPDIPRERWFAMTALDENRAKSQLAWKAGVPVKDVTNMTIWGNHSATQYPDYTNALIKGMPASQLIKDEEWLKGDFIKTVQQRGSEIIKARGASSAASAANAALDTITKIITPTNKMDWFSAAIPSDGSYGVTQGLIFSYPLRSSGNGDYEVVQGIELDEFSQQKIKATREELEMERDAVKEMLN

SEQ ID NO: 86248 - protein, 314 aa, Unknown
  Bacterial polypetide isolated from the Sargasso Sea
MIGAGNIGGTLAQLVSQKELGDIVLLDIFEGMPKGKSLDLAQSSSIEGFHADFKGTSSFRDIKNSDVVIVTAGFPRKPGMSRDDLVEKNSIIIQNVGKNIKKYCPKAFVICITNPLDAMVSVIQKSSGLKTNMCIGMAGVLDSARLKYFLSKEFNVSINDISAFVLGGHGDTMVPLMRYSTVSGIPVPELIKMKWTTKKIINKIIQRTRDGGAEIVKLMNTSAYYAPASSAVQMAESFLLDQKRLLPCAAHLNGEYGVRGLYVGVPVIIGKKGVEKIIELKLNNNEKKEFNHSVKAVKSLTTLSNKLLNKKNKK

SEQ ID NO: 86249 - protein, 320 aa, Unknown
  Bacterial polypetide isolated from the Sargasso Sea
MRKKIALIGAGNIGGTLAQLISLKELGDVVLLDIFEGMPKGKSLDLAQSSSIEGFHADFRGTSSFKDIKNSDVVIVTAGFPRKPGMSRDDLVEKNSVIIQNVGKNIKKYCPKAFVICITNPLDAMVSVLQKSSGLKTNMCVGMAGVLDSARLKYFLSKEFNVSINDISAFVLGGHGDTMVPLMRYATVSGIPVPELIKMKWTSKKNIDKIIKRTREGGAEIVKLMKTSAYYAPASSAVQMAESYLLDQKRLLPCAAYLNGEYGVKGLYVGVPVVIGKKGVEKIIQLKLNNNEKKEFHYSVKAVKSLTTLSNNLLSKKNKK

SEQ ID NO: 86250 - protein, 331 aa, Unknown
  Bacterial polypetide isolated from the Sargasso Sea
MKEINVLVTGAAGQISYSLLPRLISGETFGPNTKVNLKLVEIPPVLDKLQGTVLELEDCGFSNCGSIMSTSDINEAAEDCDWALLVGSIPRGITINGKKIEERGDLLHVNGGIFTDQGNAIGTKGKEDAKILVVGNPANTNALIGKSNSNNNSQLWMAMTALDANRAKAQVSIKTNRSIEDIKGMTIWGNHSPTMYPDLDNASIDGKSVSEIINDNNWIENDFLVRVQQRGKEIIDARGASSAASAANAAIDTVKNVENDTEAGTWFSAAVASDGSYGVPEGLIFGYPLRTKNGKVKIVQDLELNDYAKGKIEITTNELLEEKEEVKDLIA

SEQ ID NO: 86251 - protein, 331 aa, Unknown
  Bacterial polypetide isolated from the Sargasso Sea
MNTPVRVAVTGAAGQISYSLLFRIASGQMLGPDQPVIFQLLEITPAMKALEGVVMEIDDCAFPLVEDFILTDDINTAFNDVNYALLVGAKPRGPGMERSDLLEANGGIFKLQGKGLNENANRDVKVLVVGNPANTNAYTAMVSAPDLNSRNFSAMTRLDHNRALAQLAAITKFPVKDIKKMTIWGNHSTTQYPDISNIEISGMPDSGQRIKDDIDIDWYKNTYIPRVAKRGAEIIDARGASSAASAAHGAVEHMHDWVLGTPDNDWVSMAVPSNGSYGIPEGLVFSFPVTCKDGDYHIVQGLEFDEFGQSKIDATRKELEEEKAALSSILD

SEQ ID NO: 86252 - protein, 327 aa, Unknown
  Bacterial polypetide isolated from the Sargasso Sea
MNTVKVAVTGAAGQIGYALLFRIASGSVFGPDTKVELQLLELEPALPSLEGVKMELDDCAFPLLQKITTTSDAGVAFKDTDWILLVGAAPRKAGMERNDLLRVNGGIFVGQGKAIEKQAGDRAKILVIGNPCNTNCMIAMSHAPSIPKNRWFAMTALDENRARRQLAERSGSDISDVKNLCIWGNHSATQYPDFYNASIHGKPVTEVIQDEGWLQGDFIKSVQQRGAAIIKARGASSAASAANAVVDTIQRLNNPTPDGEWFSTAIPSDGSYGIPEGIMFSYPLRSLGNYEYEVVQSLELNEFGQQKVQATREELEMEREAVSDIMG

SEQ ID NO: 86253 - protein, 320 aa, Unknown
  Bacterial polypetide isolated from the Sargasso Sea
MTNKKISLIGAGQIGGTLAHLAAMKELGDIVLFDLMSGLAKGKALDIAQSSAIDGFNVSLSGTDNYEDTSDSDVIIITAGVPRKPGMTRDDLLGTNLKIIKQVAEGIKSTSPNAFVICITNPLDVIVMALQKYSGLPKNKVVGMAGVLDTSRFKYFLSQELNVPISEVDSFVLGGHGDTMVPVPNRTMVSGENLTDLVNKGKISKARLDEIIDRTRKGGAEVVKLLETGSAFYGPAASGIEMADSYLNDKKKTLPCAAYLNGEYGISDLYVGVPVVIGSAGIEKVVELDLDEEEKKFFKTSIEAVSELFEAAKNIDPSLK

SEQ ID NO: 86254 - protein, 238 aa, Unknown
  Bacterial polypetide isolated from the Sargasso Sea
MSKKRIALIGGGQIGGNLALLAAQKELGDIVIFDIPKAEGMVKGKALDLMQLRPHDGHDVNITGTSNWKDVKDADVFIITAGIPRKPGMDREDLLDINLGIMKDVAENIKEQAPNSFVIVISNPLDAMVYAFYKTSGFKSNKVVGMAGALDSTRFRTFIAMETGFSVQDVTCMVLGGHGDTMVPITRLATIGGVPVGDLISEEKITKIEERTRFAGGEIVKLFGNGSAFYAPAQSAIE

SEQ ID NO: 86255 - protein, 311 aa, Unknown
  Bacterial polypetide isolated from the Sargasso Sea
MSKKRIALIGGGQIGGNLALLAAQKELGDIVIFDIPKAEGMVKGKALDLMQLRPHDGYDVNITGTSNWKDVKDADVFIITAGIPRKPGMDREDLLDINLGIMKDVAENIKEQAPNSFVIVISNPLDAMVYAFYKTSGFKSNKVVGMAGALDSTRFRTFIAMETGFSVQDVTCMVLGGHGDTMVPITRLATIGGVPLGDLISEEKITKIEERTRFAGGEIVKLFGNGSAFYAPAQSAIEMAESYLRDKKRVIPCATLCNGEFGIDGYFIGVPTVIGSNGVEKILDFKLKENEQEALNQTLEAVKKTVSETGL

SEQ ID NO: 86256 - protein, 319 aa, Unknown
  Bacterial polypetide isolated from the Sargasso Sea
MRKKISLIGAGNIGGTLAHLIGIKELADVVLVDIAKGIPQGKALDIAQSSAIETFNINIKGSNSYKDIKNSDVIIVTAGFARKPGMSRDDLVQKNSTIVQQVGQAIKKYSQKSFVICITNPLDAMVSVLQKSAGLKTNMCVGMAGVLDSARLKYFLSNEFKVSVEDVSAFVLGGHGDTMVPLIRYSTVSGIPIPELIRLKLTTSKKIDQIIKRTRDGGAEIGKLLKIASAFYAPASSAISMAESFIRNEKRVLPCAAYLNGEYGVKGFYVGVPVIIGNKGVEKIIELKLNSSEKKQFKQSINAVKNLTKLADKLLKKNK

SEQ ID NO: 86257 - protein, 161 aa, Unknown
  Bacterial polypetide isolated from the Sargasso Sea
MSKKISLIGTGQIGGTLAHLIGLKELVNEVVMFDVASGIAKGKALDIAQSSSVDGFNVKFSGTDNYEDIKNSDVVIITAGVPRKPGMSRDDLLGINLKIIKQVAEGIKKNAPKAFVICITNPLDVMVMAFQKYSGLPTNKVVGMAGILDSSRFKLFLSLEL

SEQ ID NO: 86258 - protein, 203 aa, Unknown
  Bacterial polypetide isolated from the Sargasso Sea
ITNPLDVMVMAFHKYSGLPKNKVVGMAGILDSSRFKLFLSLELKVPVKEIEAMVMGGHGDTMVPLPRFTKVSGKPLLDLVKEGKLSSERLEEINQRTRDGGAEIVKYLEKGSAFYAPAASGVQMAEAYLKDQKKLLPCAVHLDGEYGVKSIFAGVPVIIGKDGVEKIEEINLDEKEKNQFMHSIEAVKKLWDAASKIDKDLSK

SEQ ID NO: 86259 - protein, 320 aa, Unknown
  Bacterial polypetide isolated from the Sargasso Sea
MRKKIALIGAGNIGGTLTQLVSLKELGDVVLLDIFEGMPKGKSLDLAQSSSIEGFHADFKGTSSFRDIKNSDVVIVTAGFPRKPGMSRDDLVEKNSIIIQNVGKNIKKYCPKAFVICITNPLDAMVSVLQKSSGLKANMCIGMAGVLDSARLKYFLSKEFNVSINDISAFVLGGHGDTMVPLMRYSTVSGIPVPELIKMKWTTKKNIDKIIQRTRDGGAEIVKLMNTSAYYAPASSAIQMAESFLLDQKRLLPCAAYLNGEYGVKGLYVGVPVIIGKKGVEKIIELKLNNNEKKKFNHSVKAVKSLTTLSNKLLNKKNKK

SEQ ID NO: 86260 - protein, 139 aa, Unknown
  Bacterial polypetide isolated from the Sargasso Sea
MSKISLIGAGQIGGTLAHLIGLKELVDEVVLFDVASGIAKGKGLDIAQSSSVDGFNVKFSGTDNYEDIKGSDVIIITAGVPRKPGMSRDDLLGINLKIIKQVAKGIKLNAPNAFVICITNPLDVMVMAFQKYSGLPAKK

SEQ ID NO: 86261 - protein, 311 aa, Unknown
  Bacterial polypetide isolated from the Sargasso Sea
MSRPKIALIGGGQVGGNIALLSAQKELGDIVILDIPEAENFMKGKALDISQLLPLDGYDSKLSGTSNFEDIKNSDVVVITAGFPRKPGMDRADLLSKNLDIMTNVANKVRKFAPEAFVIVVSNPLDAMVYAFYKISGFPRNRVVGMAGALDSARFRAFIADATNLSSQDVNCMVLGGHGDTMVPVSRLATVGGVPLSSLLSKKEIIAIENRTRVGGGEIVKLFGKGSAFYAPAQSAVEMIESFVRDKKRVIPCASLCEGEFDIDGYFIGVPTVIGSGGVEKILTFDLNDEEKSSLNNTLVEVKKTVSETGL

SEQ ID NO: 86262 - protein, 319 aa, Unknown
  Bacterial polypetide isolated from the Sargasso Sea
MTKKISLIGAGQIGGTLAHLIAIKELGDVVLFDVAEGLAKGKALDIAQSSGVTGFNVNISGTNDYEDTKNSDVIIITAGVPRKPGMSRDDLLGTNLKIIKQVSDGIRNTSPKAFVICITNPLDVIVMALQKYSGLPSNKVVGMAGILDSSRFKYFLSKELNEPIKNIESLVLGGHGDTMVPMPKKTKIKNKTLIDLVNEKKISKDKLDGIINRTRKGGAEIVKLLEKGSAFYAPAASGVEMAESYLKDLKKTLPCAAFLNGEYGYKNIYAGVPVVIGKNGVEKIVEIELESTEKSNFDTSIKAVKELCDSAIKIDPSLS

SEQ ID NO: 86263 - protein, 288 aa, Unknown
  Bacterial polypetide isolated from the Sargasso Sea
MKKKISLIGAGQIGGTLAHLIALKELGDVVLFDVAEGIAKGKALDIAQSSGVDKFNVSLIGTNKYEDIKDSDVIIITAGVPRKPGMSRDDLLGTNLKIIKQVAEGIKKNSPKAFVICITNPLDIIVMALQKYSGLPKNMVVGMAGILDTSRFKYFLSSEFKVPIKKIESLILGGHGDTMVAMVNHTKIDGKPLSEFLNEGKIKKERLEEIVNRTKKGGAEIVKLLEKGSAFYAPAASGVEMAESFLKNQKKELPCAAYLSGRYGVKDLYVGVPVVIGSKGVEKVMKSN

SEQ ID NO: 86264 - protein, 320 aa, Unknown
  Bacterial polypetide isolated from the Sargasso Sea
MKKIALIGAGQIGGTLAHLIGIKELVDEVVLFDVASGIAKGKALDIAQSSSVDGFNVKLSGTDDYKDIKDSDVIIITAGVPRKPGMSRDDLLGINLKIIKQVAQGVKENAPNAFVICITNPLDVMVMAFQKFSGLPANKVVGMAGILDSSRFKLFLSLEFGVPVREIEAMVMGGHGDTMVPMPRFTKVSGKPLLDLVKEGKISQERVEEINQRTRDGGAEIVKYLEKGSAFYAPAASGVQMAESYLKDEKKLLPCAVQLNGEYGVENVYAGVPVVIGKDGVEKIEVVDLDEKENKEFMHSIDAVKALWEAASKIDPDLSK

SEQ ID NO: 86265 - protein, 150 aa, Unknown
  Bacterial polypetide isolated from the Sargasso Sea
YVSVASVNAYVLGGHGDTMVPVIGATNVGGVPVEDMIEKNKLASIVQRTRDGGAEIVALLKTGSAFYAPSASIVQMVEAILLDKQQILPCAALLSGEYGFNDVYAGVPVKLGANGIEKVIEVDLNKDEHSALSKSVDSVIELLDIMKKNS

SEQ ID NO: 86266 - protein, 320 aa, Unknown
  Bacterial polypetide isolated from the Sargasso Sea
MSKISLIGAGQIGGTLAHLIGTKELADEVVLFDIASGIAKGKALDIAQSSSVDGFNVKFLGTDDYKDIKNSDVIIITAGVPRKPGMSRDDLLGINLKIIKQVAEGIKQNAPNAFVICITNPLDVMVMAFQKFSGLPAKKVVGMAGILDSSRFKLFLSLELNVPVKEIDAIVMGGHGDTMVPMPRFTKVSGKPLLDLVKEGKISKERLEEINQRTRDGGAEIVKYLEKGSAFYAPAASGVQMAEAYLKNEKKLLPCAVQLDGEYGVKNVYAGVPVIIGKEGVEKIEEIKLDDKEKKEFMNSIDAVRGLWEAASKIDPDLSK

SEQ ID NO: 86267 - protein, 99 aa, Unknown
  Bacterial polypetide isolated from the Sargasso Sea
MTKISLIGAGQIGGTLAHLIGTKELVNEVVLFDVASGIAKGKALDIAQSSSVDGFNVKFSGTDDYKDIKGSDVIIITAGVPRKPGMSRDDLLGINLKIN

SEQ ID NO: 86268 - protein, 133 aa, Unknown
  Bacterial polypetide isolated from the Sargasso Sea
MSKISLIGAGQIGGTLAHLIGIKELVNEVVLFDVASGIAKGKALDIAQSSSVDGFNVKFSGTDDYKDIKGSDVIIITAGVPRKPGMSRDDLLEINLKIIKQVAEGIKQNAPDAFVICITNPLDVMVMAFQKFS

SEQ ID NO: 86269 - protein, 219 aa, Unknown
  Bacterial polypetide isolated from the Sargasso Sea
MGKKISLIGAGQIGGTLAHLLGLKEVVSEVVLFDVASGVAKGKALDIAQSSSVDGFNVKFSGTNDYKDIKNSDVIIITAGVPRKPGMSRDDLLGINLKIMKQVAEGIKSNCPDAFVICITNPLDVMVMALQKYSNLPKNKVVGMAGILDSSRYKLFLSVELNVPVKNIEALVMGGHGDTMVPLPGFTKINGKKLLDLVNDGIITKERIEEINQRTRDGG

SEQ ID NO: 86270 - protein, 45 aa, Unknown
  Bacterial polypetide isolated from the Sargasso Sea
MKVAVLGAAGGIGQALSLLLKTGLPAGSELSLYDVAPVVPGVAVD

SEQ ID NO: 86271 - protein, 95 aa, Unknown
  Bacterial polypetide isolated from the Sargasso Sea
MKKISLIGAGQIGGTLAHLIGLKELVDEVVMFDVASGIAKGKALDIAQSSSVDGFNVKFSGTDNYEDIKNSNVIIITAGVPRKPGMSRDDLLGII

SEQ ID NO: 86272 - protein, 332 aa, Unknown
  Bacterial polypetide isolated from the Sargasso Sea
MKEINVAVTGGAGQIAYSLLPRLVSGETFGPDIKVNLRLIEIPQVVDKLQGTIMELIDCGFDQTGELTATSDISEGVKDADWVLLVGSIPRGIVIDGKKIEERSDLLKINGGIFTDQGAAIGQVAKPDAKILVVGNPANTNALIGMNSAKNPSQQWFAMTALDANRAKAQLAKKAGASISSLKNMIIWGNHSPTMYPDPYNATINGVSAAETINDDQWLAEEYLPLVQQRGKAVIDARGASSAASAANAAIDTVKAVINPTPDGDCFSAAIASDGSYGVPQGLIFGFPLRTSANGEVEIIQGIELNEFAQSKIAITTQELESEREAVADLID

SEQ ID NO: 86273 - protein, 295 aa, Unknown
  Bacterial polypetide isolated from the Sargasso Sea
ASEVVLFDVASGVAKGKALDIAQSSSVDGFNVKFSGTDKYEDIKNSDVIIITAGVPRKPGMSRDDLLGINLKIIKQVAQGVKQHAPNAFVICITNPLDVMVMAFQKYSNLPTNKVVGMAGILDSSRFKLFLSLELKVPVKEIEAMVMGGHGDTMVPLPRFTKISGKPLLDLVKEGKLSSNRLEEINQRTRDGGAEIVKFLEKGSAFYAPAASGVQMAEVYLKDEKKLLPCAAYLNGEYGINNIYAGVPVIIGKSGVEKIDEIKLDDKEKKEFLNSIEAVKKLWEAASKIDPDLSK

SEQ ID NO: 86274 - protein, 167 aa, Unknown
  Bacterial polypetide isolated from the Sargasso Sea
MSKISLIGAGQIGGTLAHLIGLKELVDEVVLFDVASGIAKGKALDIAQSSSVDGFNVKFSGTDNYEDIKNSDVIIITAGVPRKPGMSRDDLLGINLKIIKQVAEGIKQHAPNAFVICITNPLDVMVMAFQKFSGLSPNKVVGMAGILDTSRFKLFLSLELNVPVREI

SEQ ID NO: 86275 - protein, 311 aa, Unknown
  Bacterial polypetide isolated from the Sargasso Sea
MSRPKIALIGGGQVGGNIALLSAQKELGDIVIVDIPEAENFMKGKALDISQLLPHDGYDSKLSGTSNFEDIQDSDVIVITAGFPRQPGMNREDLLQKNLDIMTNVANQVKKYAPEAFVIVVSNPLDAMVYAFHKISGFPKNKVVGMAGALDSARFRAFIAEATNLSSQDVNCMVLGGHGDTMVPVSRLATVGGVPLSSLLSSEEIIAIENRTRVGGGEIVKLFGKGSAFYAPAQSAVEMIESFIRDKKRVIPCASLCEGEFDVEGYFIGVPTVIGSGGVEKILTFDLDKDEKIALSNTLIEVKKTVSETGL

SEQ ID NO: 86276 - protein, 111 aa, Unknown
  Bacterial polypetide isolated from the Sargasso Sea
MKNKKISLIGAGQIGGTLAHLAAMKELGDVVLFDLMAGLAKGKALDISQSSAIDGFNVSLSGTDNYEDTRDSDVIIITAGVPRKPGMTRDDLLGTNLKIIKQVAEGIQSTS

SEQ ID NO: 86277 - protein, 286 aa, Unknown
  Bacterial polypetide isolated from the Sargasso Sea
MKRNKIALIGGGQIGGTLAHLAGLKELGDVVIFDIVKGIPQGKALDLAEASPVSPYNVDLKGSNNYSAIKDSDVVIVTAGVPRKPGMSRDDLLSINLKVMSDVGAGIKKYCPKAFVICITNPLDAMVWALQKFSGVKPNMIVGMAGVLDSARFRYFLSQEFNVSVEDVTAFVLGGHGDSMVPLARYSTVSGIPLPDLVKMGWTTQKKLNDIIQRTRDGGAEIVGLLKTGSAFYAPAASAIEMADSYLKDKKRVLPCAAHLSGEYKIKDMYVGVPVVIGAKGVERIW

SEQ ID NO: 86278 - protein, 250 aa, Unknown
  Bacterial polypetide isolated from the Sargasso Sea
MSKISLIGAGQIGGTLAHLIGIKELVNEVVLFDVASGIAKGKALDIAQSSSVDGFNVKFSGTDNYKDIKGSDVIIITAGVPRKPGMSRDDLLEINLKIIKQVAEGIKQNAPDAFVICITNPLDVMVMAFQKFSGLSPNKVVGMAGILDSSRFKLFLSEEFNVPVREIEAMVMGGHGDTMVPLPRFTKVSKKPLLDLVKEGKISQKRLEEINQRTRDGGAEIVKFLEKGSAFYAPAASGVEMAKAYLNEKK

SEQ ID NO: 86279 - protein, 202 aa, Unknown
  Bacterial polypetide isolated from the Sargasso Sea
MAKPAKRVAVTGAAGQIAYSLLFRIANGDLLGKDQPVILQLLDLPQAQGAVKGVVMELDDCAFPLLSGVVITDDPKVAFKDADVALLVGARPRSKGMERKDLLSANAEIFTVQGKALNEVASRDVKVLVVGNPANTNAYIAMKSAPDLPKKNFTAMLRLDHNRALSQLAAKSGKPVASIEKLAVWGNHSPTMYPDSASQPQK

SEQ ID NO: 86280 - protein, 116 aa, Unknown
  Bacterial polypetide isolated from the Sargasso Sea
MIASDRLDSIVERTRKGGAEIVGLLKTGSAYYAPAAASAQMVEAVVRDKKRLVPCAAYCDSEYGVGGYFVGVPVILGGSGVEKIVELSLLPDEKAALNKSIEAVRELVAVMGRLTA

SEQ ID NO: 86281 - protein, 234 aa, Unknown
  Bacterial polypetide isolated from the Sargasso Sea
MSKISLIGAGQIGGTLAHLIGLKELVNEVVLFDVASGIAKGKALDIAQSSSVDGFNVKFSGTDNYDDIKDSDVIIITAGVPRKPGMSRDDLLGINLKIIKQVAEGIKVNAPNAFVICITNPLDVMVMAFQKYSGLPANKVVGMAGILDSSRFKLFLSEELNVPVREIDAMVMGGHGDTMVPLPRFTKVSGKPLMDLLKDGKISEEKLESINQRTRDGGAEIVKYWKRDLHFMHQ

SEQ ID NO: 86282 - protein, 320 aa, Unknown
  Bacterial polypetide isolated from the Sargasso Sea
MKKISLIGAGQIGGTLAHLIGLKELVDEVVLFDVASGIAKGKALDIAQSSSVDGFNVKFSGTDNYEDIKKSDVIIITAGVPRKPGMSRDDLLGINLKIIKQVAEGIKTHAPNAFVICITNPLDVMVMAFQKYSGLPTKKVVGMAGVLDTSRFKLFLSLELNVPVKEIEAMVMGGHGDTMVPLPRFTKVSGKPLLDLVKEGKISSEKLESINQRTRDGGAEIVKYLEKGSAFYAPAASGVEMAEAYLKDQKKLLPCAVYLHGEYGINNVYAGVPVIIGKNGIEKIEEIDLDEKEKSEFNHSVEAVIKLWEAASKIDPGLNN

SEQ ID NO: 86283 - protein, 165 aa, Unknown
  Bacterial polypetide isolated from the Sargasso Sea
AGALDSARFRAFIAEATNLSSQDVNCMVLGGHGDTMVPVSRLATVGGVPLSSLLSSEEIIAIENRTRVGGGEIVKLFGKGSAFYAPAQSAVEMIESFIRDKKRVIPCASLCEGEFDVEGYFIGVPTVIGSGGVEKILTFDLDEDEKTALSNTLIEVKKTVSETGL

SEQ ID NO: 86284 - protein, 218 aa, Unknown
  Bacterial polypetide isolated from the Sargasso Sea
MSKISLIGAGQIGGTLAHLIGIKELVDEVVLFDVASGIAKGKALDIAQSSSVDGFNVKFSGTDNYEDIKNSDVIIITAGVPRKPGMSRDDLLGINLKIIKQVAQGIKKYSPSAFVICITNPLDVMVMALQKYSGLPSNKVIGMAGILDSSRFKLFLSLELSVQVKDIETMVMGGHGDTMVPLPRFTKVSGKPLLDLVKEGKISEERLESINQRTRDGG

SEQ ID NO: 86285 - protein, 312 aa, Unknown
  Bacterial polypetide isolated from the Sargasso Sea
MKVAVLGAAGGIGQALSLLLKTQLPAGSDLALYDVAPVVPGVAVDLSHIPTAVKVTGHGKDDLADALTGADVVLIPAGMPRKPGMDRSDLFNINAGIVKNLIEGVADNCPNACVGIITNPVNTTVAIAAETLKAKGVYDKNKLFGVTTLDVIRAETFVAELKGVDVSSVHVPVIGGHSGTTILPLLSQVEGVEFTDEEVASLTTRIQNAGTEVVEAKAGGGSATLSMGQAAARFCLSLVAAMQGENVVEYTYVQTDDSDDAAFFAHPVRLGANGVEEILPYGELSAFEEKAKNDMLEGLRGDIKLGVDFVNG

SEQ ID NO: 86286 - protein, 205 aa, Unknown
  Bacterial polypetide isolated from the Sargasso Sea
MKKISLIGAGQIGGTLAHLIGLKELVDEVVLFDVASGIAKGKALDIAQSSSVDGFNVKFSGTDNYEDIKNSDVIIITAGVPRKPGMSRDDLLGINLKIIKQVAEGIKTHAPNAFVICITNPLDVMVMAFQKFSGLPTNKVVGMAGILDTSRFKLFLSLELNVPVKEIEAMVMGGHGDTMVPLPRFTKVSGKPLLDLVKEGKIPQK

SEQ ID NO: 86287 - protein, 298 aa, Unknown
  Bacterial polypetide isolated from the Sargasso Sea
MSKISLIGAGQIGGTLAHLIGLKELVDEVVLFDVVSGVAKGKGLDIAQSSSVDGFNVKFSGTDKYEDIKGSDVIIITAGVPRKPGMSRDDLLGINLKIIKQVAEGIKNNAPNAFVICITNPLDVMVMAFQKYSGLPVHKVVGMAGILDSSRFKLFLSEELNVPVKEIDAMVMGGHGDTMVPLPRFTKVSGQPLMELVKEGKISEEKLESINQRTRDGGAEIVKYLEKGSAFYAPAASGVEMAEAFLKDQKKLLPCAAYLHGEYGINNVYAGVPVIIGNEGVEKIEEIDLNENEKTEFN

SEQ ID NO: 86288 - protein, 310 aa, Unknown
  Bacterial polypetide isolated from the Sargasso Sea
IGGTLAHLISIKEIVDEVVLFDVASGLAKGKALDIAQSSSVDGFNVKFSGTDNYEDIKNSDVIIITAGVPRKPGMSRDDLLGINLKIIKQVAEGVKTHAPNAFVICITNPLDVMVMAFQKFSGLPTKKVVGMAGILDTSRFKLFLSLELNVPVNEIDAMVMGGHGDTMVPLPRFTKVSGKPLLDLVKEGKISEERLESINQRTRDGGAEIVKYLEKGSAFYAPAASGVEMAEAYLKDQKKLLPCAAYLHGEYGVNNVYAGVPVIIGKDGIEKIEEIDLDEKEKLEFNNSVEAVIKLWEAASKIDPSLNNS

SEQ ID NO: 86289 - protein, 243 aa, Unknown
  Bacterial polypetide isolated from the Sargasso Sea
MSKISLIGAGQIGGTLAHLIGIKELVNEVVLFDVASGIAKGKALDIAQSSSVDGFNVKFSGTDDYKDIKGSDVIIITAGVPRKPGMSRDDLLGINLKIIKQVAEGIKQNAPDAFVICITNPLDVMVMAFQKFSGLSPNKVVGMAGILDSSRFKLFLSEEFNIPVRDIEAMVMGGHGDTMVPLPRFTKVSGKPLLDLVKEGKISQRRLEEINQRTRDGGAEIVKFLEKGSAFYAPAASGVEMAK

SEQ ID NO: 86290 - protein, 251 aa, Unknown
  Bacterial polypetide isolated from the Sargasso Sea
MSKISLIGAGQIGGTLAHLIGIKELVEEVVLFDVASGIAKGKALDIAQSSSVDGFNVKLSGTDNYEDIKNSDVIIITAGVPRKPGMSRDDLLGINLKIIKQVAQGIKKNSPDAFVICITNPLDVMVMALQKYSGLPANKVVGMAGILDSSRFKLFLSLELNVPVKDIEAMVMGGHGDTMVPLPRFTKVSGKPLLDLVKEGKISEERLESINQRTRDGGAEIVKFLEKGSAFYAPAASGTQMAEAYLNNSKQ

SEQ ID NO: 86291 - protein, 321 aa, Unknown
  Bacterial polypetide isolated from the Sargasso Sea
MAKKISLIGAGQIGGTLAHLIGTKELVNEVVLFDIACGIAKGKALDIAQSSSVDGFNVKFSGTDDYKDIKDSDVIIITAGVPRKPGMSRDDLLGINLKIIKQVAKGIKENAPNAFIICITNPLDVMVMALQKFSGLPANKIVGMAGILDSSRFKLFLSLELNVPVKEIDAMVMGGHGDTMVPMPRFTKVSGKPLLDLIKEGKITKERLEEINQRTRDGGAEIVKYLEKGSAFYAPAASGVQMAEAYLNNKKKLLPCAVQLNGEYGVKNVYAGVPVIVGKDGVEKIEQIDLDEKEKKDFMHSIDAVKALWEAACKIDPDLEK

SEQ ID NO: 86292 - protein, 311 aa, Unknown
  Bacterial polypetide isolated from the Sargasso Sea
MGRKKITLVGGGQIGGNLALLAAQKELGDVVIFDIPQAEGMVKGKALDLMQLRPHDGHDSDIVGTSDWNDVKNSDVFIITAGIPRKPGMNREDLLGINLGIMKDVASNIKDKAPNAFVIVISNPLDAMVYAFHKVSGFPKNQVVGMAGALDSARFRTFIAMETGYSVQDVTCMVLGGHGDTMVPISRLATVGGVPVTDLITDKRLKEIEDRTRVAGGEIVKLFGNGSAFYAPAQSAIEMAESYIRDKKRVIPCASLCEGEFGIDGYFIGVPTVIGSDGVEKILEFTLNDNEKTELDRTLEAVKKTVAETGL

SEQ ID NO: 86293 - protein, 319 aa, Unknown
  Bacterial polypetide isolated from the Sargasso Sea
MTKKISLIGAGQIGGTLAHLIALKELGDVVLFDVAEGLAKGKALDIAQSSGVSGFNIDLKGTSNYEDTKNSDVIIITAGIPRKPGMTRDDLLGTNLKIIKQVADGIRKNSPEAFVICITNPLDVIVMALQKYSGLSTKKIVGMAGILDTSRFKYFLSKEMKIPIGSINSLVLGGHGDSMVPMQNHTIVNDKSLSDLVREKKISEDKLKSIIERTKNGGGEIGKLLAKGSAFYAPAASGVQMAESYLKDKKEKLPCAAYLNGEYGVKGLYAGVPVIIGKSGVEKIIELDLNSEEKKNFEVSIKAVRELLESAKKIDPELK

SEQ ID NO: 86294 - protein, 242 aa, Unknown
  Bacterial polypetide isolated from the Sargasso Sea
GVPRKPGMSRDDLLGINLKIMKQVAEGVKQNAPDAFVICITNPLDVMVMAFQKFSGLPTNKVVGMAGILDSSRFKLFLSLELNIPVKEIDAMVMGGHGDTMVPLPRFTKVSGKPLLDLVKSGKISMEKLEAINQRTRDGGAEIVKFLEKGSAFYAPAASGVEMAQAFLKDEKKMLPCAAFLNGEYGIKNIYAGVPIIVGKKGVEKIEVINLDEKEKSEFINSVNAVKKLWEAASKIDPDLAK

SEQ ID NO: 86295 - protein, 275 aa, Unknown
  Bacterial polypetide isolated from the Sargasso Sea
DIAQSSSVDGFNVKFSGTDNYEDIKNSDVIIITAGVPRKPGMSRDDLLGINLKIIKEVAHGIKQYSPNAFVICITNPLDVMVMALQKYSGLPAKKVVGMAGILDSSRFKLFLSQELNVPVKEIEAMVMGGHGDSMVPLPRFTNVSGKPLLDLVKEEKISQERLESINQRTRDGGAEIVKFLEKGSAFYAPAASGVQMAESYLNNTKQILPCAVFLSGQYGFKDIYAGVPVVLGKDGVEKIKEINLDDKEKKEFNNSIEAVKKLWEAAANIDPDLK

SEQ ID NO: 86296 - protein, 304 aa, Unknown
  Bacterial polypetide isolated from the Sargasso Sea
MRKISLIGSGQIGGTLAHLIGLKELANEVVMFDVANGIAKGKALDIAQSSSVDGFNVNFSGTDNYEDIKNSDVIIITAGVPRKPGMSRDDLLGINLKIIKQVAEGIKTHSPDAFVICITNPLDVMVMAFQKYSGLPTNKVVGMAGILDSSRFKLFLSRELNVPVKEIDAIVMGGHGDTMVPLPRFTKVSKKPLLDLVKEGKISSEKLESINQRTRDGGAEIVKYLEKGSAFYAPAASGVEMAAAYLNDEKKLLPCAAYMNGEYGVEKIYAGVPVIIGKNGIEKIEEVELDDKEKVEFNHSIEAV

SEQ ID NO: 86297 - protein, 320 aa, Unknown
  Bacterial polypetide isolated from the Sargasso Sea
MKKISLIGAGQIGGTLAHLIGTKELVNEVVLFDVASGIAKGKALDIAQSSSVDGFNVKFSGTDNYKDIKDSNVIIITAGVPRKPGMSRDDLLGINLKIIKQVAEGVKKNAPNAFVICITNPLDVMVMAFQKFSGLPSNKVIGMAGILDSSRFKLFLSLELNVPVKEIDAIVMGGHGDTMVPMPRFTKIAGKPLLDIVKEGKISLERVEEINQRTRDGGAEIVKYLEKGSAFYAPAAAGVQMAEAFLKDEKKLLPCAAKLNGEYGVKNVYAGVPVIVGKNGVEKIEEVDLDEKEKKEFIHSIDAVKALWEAASKIDPDLSK

SEQ ID NO: 86298 - protein, 291 aa, Unknown
  Bacterial polypetide isolated from the Sargasso Sea
MTKKNSKISLIGAGQIGGTLAHLIGTKELVDEVVLFDVASGIAKGKALDIAQSSSVDGFNVKFSGTDNYKDIEGSDVVIITAGVPRKPGMSRDDLLGINLKIIKQVANGVKENAPDAFVICITNPLDVMVMAFQKFSGLPSNKVVGMAGILDSSRFKLFLSLEFDVPVKEIDAMVMGGHGDTMVPLPRFTKVSGKPLSDLVNDGKISKERLEEINQRTRDGGAEIVKFLEKGSAFYAPAASGIEMAKAYLNDEKKMLPCAAQLNGEYGIKDIYAGVPIIIGKSGVEKIEEN

SEQ ID NO: 86299 - protein, 319 aa, Unknown
  Bacterial polypetide isolated from the Sargasso Sea
MKRNKIALIGSGQIGGTLAHIVGLKELGDIVLFDIADGIPQGKALDIAESSPISTFDTNIIGTSSYDDIKDSDVCIVTAGVPRKPGMSRDDLLSINLRVMKSVGDGIKKYAPNSFVICITNPLDAMVWALQKYSGLPPENVVGMAGVLDSGRFSYFLAEEFNVSVKDVQTFVLGGHGDTMVPLVRYSTVGGIPIPDLVKMGWSSQKKIDQIVQRTRDGGAEIVALLKTGSAFYAPAASAINMAESYLRDQKRIIPCAANLSGKYGFKDIYAGVPTIIGNKGVEKIIEINLNEIEKLNFSKSIESVKNLIDACKKIDQDL

SEQ ID NO: 86300 - protein, 318 aa, Unknown
  Bacterial polypetide isolated from the Sargasso Sea
MRKKISLIGAGQIGGTLAHLIALKELADVVLFDVAEGIAKGKALDIAQSSGVSGFNSSIIGTNNYEDIRNSDVIIITAGVPRKPGMSRDDLLGINLKIIKQVAEGIKKNSPNSFIICITNPLDVIVMALQKYSSLPTSKIVGMAGILDTSRFKYFLSQELKISINKINSLVLGGHGDTMVPTLNHTIIDGKSLTELVKIKKISPEKLDSIIDRTRKGGAEIVKLLEKGSAFYAPAASGVDMAESYIKDLKKTLPCAAYLNGEYNVKGLYVGVPVIIGKNGVEKVLELELNDQEKNNFEKSVKAVEELFNSAKKIDPSL

SEQ ID NO: 86301 - protein, 110 aa, Unknown
  Bacterial polypetide isolated from the Sargasso Sea
NQRTRDGGGEIVKFLEKGSAYYAPAASGVQMAEAFLGDKKLQLPCAALLEGQYGFNGIYAGVPVVIGKNGVEKIVEIQLDEKEKAEFINSVNAVNKLWEAAVKIDPSLKK

SEQ ID NO: 86302 - protein, 187 aa, Unknown
  Bacterial polypetide isolated from the Sargasso Sea
MSYDKKISLIGAGNIGTILAFSLSRKRLGNITLIDKVKGLAEGKCLDLSQSLSAENLNTKIVGTDDISKIKDSDVIIITAGIPRKPGMSRDDLVETNFSIMTELGDAIKEYSPSAFVICVTNPLDAMVWSLKEITGINKRMIVGMAGILDSARFKFFLSNELSVSTDSIQTIVLGGHGDSMVPLLRL

SEQ ID NO: 86303 - protein, 319 aa, Unknown
  Bacterial polypetide isolated from the Sargasso Sea
MSKISLIGAGQIGGTLAHLIGIKELVSEVVLFDVASGIAKGKALDIAQSSSVDGFNVKFSGTDKYNDIKGSDVIIITAGVPRKPGMSRDDLLGINLKIIKQVAEGVKQNAPDAFVICITNPLDVMVMAFQKFSGLLPSKVVGMAGILDSSRFKLFLSEEFNTPVREIEAMVMGGHGDTMVPLPRFTKVSQKPLLDLVKEGKISKERLEEINQRTRDGGAEIVKFLEKGSAFYAPAASGVEMAKAYLNDEKKLLPCAAYLNGEYGIKDIYAGVPIIIGKNGVEKIEEIKLDEKEKSEFLHSIDAVKKLWEAASKIDPDLA

SEQ ID NO: 86304 - protein, 321 aa, Unknown
  Bacterial polypetide isolated from the Sargasso Sea
MKKKISLIGAGQIGGTLAHLIGTKEVVNEVVLFDVASGIAKGKALDIAQSSSVDGFNVKFSGTDNYEDIKDSDVIIITAGVPRKPGMSRDDLLGINLKIIKLVAEGVKKNAPNAFVICITNPLDVMVMAFQKFSGLPSNKVVGMAGILDSSRFKLFLSLEFNVPVREIEAMVMGGHGDTMVPLPRFTKVSGKPLLDLVKEGKISQKRLEEINQRTRDGGAEIVKFLEKGSAFYAPAASGVEMAKAYLNDEKKMVPCAAFLNGEYGIKNIYAGVPIIIGKNGVEKIEEIDLDEKEKLEFMNSVDAVKRLWEAASKIDPDLAK

SEQ ID NO: 86305 - protein, 174 aa, Unknown
  Bacterial polypetide isolated from the Sargasso Sea
ILDSSRFKLFLSLELNVPVKEIEAMVMGGHGDTMVPLPRFTKVLGKPLLDLVKEGKISEERLESINQRTRDGGAEIVKYLEKGSAFYAPAASGVQMAEAYLKNSKQTLPCAVFLNGEYGFKNVYAGAPVIIGKNGVEKIQEIELDEKERNEFNHSVESVKKLWNVATTIDPDLK

SEQ ID NO: 86306 - protein, 320 aa, Unknown
  Bacterial polypetide isolated from the Sargasso Sea
MTKISLIGAGQIGGTLAHLIGTKELVNEVVLFDVASGIAKGKALDIAQSSSVDGFNVKFSGTDNYKDIKDSDVIIITAGVPRKPGMSRDDLLGINLKIIKQVAEGVRQNAPNAFVICITNPLDVMVMAFQKFSGLPANKVVGMAGILDSSRFKLFLSLELNVPVKEIEAMVMGGHGDTMVPMPRFTKVSGRPLLDLVKDGKISQKRLEEINQRTRDGGAEIVKFLEKGSAFYAPAASGVQMAEAYLNDQKKLLPCAVQLNGEYSVKNVYAGVPVIIGKSGVEKIEEVSLDDKEKKEFMHSIDAVKALWEAASKIDPDLSK

SEQ ID NO: 86307 - protein, 311 aa, Unknown
  Bacterial polypetide isolated from the Sargasso Sea
MRRKKISLIGGGQIGGNLALIASQKELGDVIIFDIPQSEGMVKGKALDIMQLQPHDGYDTDVIGTSDYNDIKDSDVIIITAGIPRKPGMDREDLMSINLGIMKDVATNVKKYAPESFVIVISNPLDAMVYAFHKVSGFKKNKVIGMAGALDSGRFRAFIAMETGYSVQDVTCMVLGGHGDSMVPITRLATIGGVPVTDLISPDRLKEIEDRTRFAGGELVKLFGNGSAFYAPAQCAIEMAESFLKDKKRVIPCAALCEGEFGIHGYFIGVPTVIGSSGIEKIIEFNLTDDEKNALENTLNAVKKTVSETKL

SEQ ID NO: 86308 - protein, 280 aa, Unknown
  Bacterial polypetide isolated from the Sargasso Sea
MRKKIALVGAGNIGGTLAHLIGLKELGDVVLIDIADGMTKGKALDLAQSSSIESFNSNLSGSSKYRDMKDADVVIVTAGFQRRPGMTRDDLVEKNSTIIQTVGKGIKMNCPKAFVICITNPLDAMVSVLQKAAGLKTNMCVGMAGILDSARLKYFLAEEFKVSVEDVSAFVLGGHGDTMVPIIRYATVAGIPVPELIKLKWSTTKKINAIIDRTRDGGGEIGRLMKTASAFYAPASSAIAMAESFLKDQKRVLPCASYLNGQYGVKGLYVGVPVIIGKKG

SEQ ID NO: 86309 - protein, 328 aa, Unknown
  Bacterial polypetide isolated from the Sargasso Sea
MAKPAKRVAVTGAAGQIAYSLLFRIANGDLLGKDQPVILQLLDLPQAQAAVKGVVMELDDCAFPLLAGVVITDDPKVAFKDADVALLVGARPRSKGMERKDLLSANAEIFTVQGAALNEVASRDVKVLVVGNPANTNAYIAMKSAPDLPKKNFTAMLRLDHNRALSQLAAKSGKPVASIEKLAVWGNHSPTMYPDFRFATAEGESLLKLINDDVWNRDTFIPTVGKRGAAIIEARGLSSAASAANAAIDHVRDWVLGTNGKWVTMGIPSDGSYGIPEDIIYGVPVVCENGEYKRVEGLEIDAFSREKMDGTLAELLEERDGVAHLLKN

SEQ ID NO: 86310 - protein, 316 aa, Unknown
  Bacterial polypetide isolated from the Sargasso Sea
MARNKIALVGSGNIGGTLALLSGIKELGDVALFDIAEGIPSGKALDIVQASPVEKFDAKLTGGNDYSVLNGSDVVIVTAGVPRKPGMSRDDLIETNTNVMKQVGKGIADNCPNAFVICITNPLDAMVGVLQRAAGLKTNKIVGMAGVLDSARFRYFLAEEFNVSVRDVSAFVLGGHGDSMVPLIRYSTVAGIPVPDLIEMGWTTQEKIDSIVQRTRDGGAEIVGLLKTGSAFYAPASSAIEMAESFLKDQRRLLPCAAWCNGEYGLDGIFVGVPAIIGKNGIEKVIEIKLNDEEKTMFDNSVEAVRQLNSIASKME

SEQ ID NO: 86311 - protein, 164 aa, Unknown
  Bacterial polypetide isolated from the Sargasso Sea
MKVTIVGAGNVGASCAEYILIKEIVDEIVLLDIKEGFAEGKALDLSQTTSTLGFKSNVIGVTNDYPSTSNSDVVVITSGIPRKPGMTREELIGINAGIVKSVSENLLKYSPQAIIIVVSNPMDTMTYLVNKSFDIPKNRVIGMGGILDSSRFKTYISLETNSLN

SEQ ID NO: 86312 - protein, 328 aa, Unknown
  Bacterial polypetide isolated from the Sargasso Sea
MKRNKIALIGGGQIGGTLAHLAGLKELGDVVIFDIVKGIPQGKALDLAEASPVSPYNVDLKGSNNYSAIKDSDVVIVTAGVPRKPGMSRDDLLSINLKVMSDVGAGIKKYCPKAFVICITNPLDAMVWALQKFSGVKPNMIVGMAGVLDSARFRYFLSQEFNVSVEDVTAFVLGGHGDSMVPLARYSTVSGIPLPDLVKMGWTTQKKLNDIIQRTRDGGAEIVGLLKTGSAFYAPAASAIEMADSYLKDKKRVLPCAAHLSGEYKIKDMYVGVPVVIGAKGVERILEISLNSRETKLFKDSIASVKSLMRACTKIDKRLASRKKSSRK

SEQ ID NO: 86313 - protein, 250 aa, Unknown
  Bacterial polypetide isolated from the Sargasso Sea
MRKISLIGAGQIGGTLAHLIGIKELVSEVVLFDVAKGIAKGKALDIAQSSSVDGFNVKFSGTDDYKDIKDSDVIIITAGVPRKPGMSRDDLLGINLKIIKQVAEGIKNNAPNAFVICITNPLDVMVMAFQKFSGLEAKKVVGMAGILDSSRFKLFLSLELNIPVKEIDAIVMGGHGDTMVPMPRFTKVSGRPLLDLVKEGQISIEKLEEINQRTRDGGAEIVKYLEKGSAFYTPAASGVQMAEAYLKDEK

SEQ ID NO: 86314 - protein, 229 aa, Unknown
  Bacterial polypetide isolated from the Sargasso Sea
MKKISLIGAGQIGGTLAHLIGVKELVDEVVLFDVASGIAKGKALDIAQSSSVDGFNVKFSGTDKYEDIKNSDVIIITAGVPRKPGMSRDDLVGINLKIIKQVAEGIKKNSPDAFIICITNPLDVMVMAFQKYSQLAAKKVVGMAGILDSSRFKLFLSEELKVPVKEIDAMVMGGHGDTMVPMPRFTKVSGKPLLDLVNSGVISKEKLESINQRTRDGGGEIVKFLEKGP

SEQ ID NO: 86315 - protein, 318 aa, Unknown
  Bacterial polypetide isolated from the Sargasso Sea
MRKKIALVGAGNIGGTLAHLIVLKELGDVVLIDIADGMTKGKALDLAQSSSVENFNASLTGSSNYREMKGADVVIVTAGFQRRPGMTRDDLVEKNSAIIQTVRKGIKANCPNAFVICITNPLDAMVSVLQKAAGLKTNMCVGMAGVLDSARLKYFLAEEFKVSVEDVTAFVLGGHGDTMVPLIRYSSVAGVPVPELIKHKWSTQKRIDAIIKRTRDGGGEIGRLMKTASAFYAPASSAIVMAESYIKDQKRILPCAAYLNGQYSVKGLYVGVPVVIGKKGVERVVELKLNALEKKQFNHSVKAVKNLTALAKKLISKK

SEQ ID NO: 86316 - protein, 310 aa, Unknown
  Bacterial polypetide isolated from the Sargasso Sea
MKVTIVGAGNVGASCAEYILIKEIVDEIVLLDIKNGFAEGKALDLTQTTSTLGFKSKVTGVTNDYKSTSNSDVVVITSGIPRKPGMTREELIGINAGIVKSVSENLLMHSPDAIIIVVSNPMDTMTYLVNKSFNISKNRVIGMGGILDSSRFKTYISLATNFSQHDIDAMVIGGHGDTTMIPLTSISKCNNKLLSEIVSQDILQKISSDTMVGGATLTKLIGTSAWYAPGASVSYLVNAIVNDTKEILPCSVYLEGEYNSEDICIGVPAIIGKNGFEEVVSLDINKNEIEMFEKSVKAVKQTNLALDGLI

SEQ ID NO: 86317 - protein, 167 aa, Unknown
  Bacterial polypetide isolated from the Sargasso Sea
MKKISLIGAGQIGGTLAHLIGTKELVSEVVLFDVAEGIAKGKALDIAQSSSVDGFNVKFSGTNDYKDIKDSDVIIITAGVPRKPGMSRDDLLGINLKIIKQVAEGIKNNSPDAFVICITNPLDVMVMAFQKFSGLDARKVVGMAGILDSSRFKLFLSLELNVAVKEI

SEQ ID NO: 86318 - protein, 266 aa, Unknown
  Bacterial polypetide isolated from the Sargasso Sea
MVNIHTVFASLSKRTEENFVNNDAVNVTVTGAAGQIGYALLFRIASGQMLGPEQQVNLRLLEITPALGALDGVQMELDDCAFPLLGSITKTDDPNVAFEGSDYGLLVGAMPRKDGMERADLLEANGGIFGPQGRAIAENANTGIKILVVGNPANTNALIAQSAAAGINPGQFTAMTRLDHNRAKSQVADKLGVSIQSVKKMTIWGNHSATQYPDLFHCEVDGKSVAESVNDQDWLENDFIPTVQQRGAAIIKARGASSAASAANAA

SEQ ID NO: 86319 - protein, 320 aa, Unknown
  Bacterial polypetide isolated from the Sargasso Sea
MSKISLIGAGQIGGTLAHLIGLKELVDEVVLFDVASGIAKGKALDIAQSSSVDGFNVKFSGTDNYEDIKNSDVIIITAGVPRKPGMSRDDLLGINLKIIKQVAEGIKQHAPNAFVICITNPLDVMVMAFQKFSGLSPDKVVGMAGILDTSRFKLFLSLELNVPVREIEAMVMGGHGDTMVPLPRFTKVSGKPLLDLVKEGKISKDKLESINQRTRDGGAEIVKYLEKGSAFYAPAASGVEMAEAYLKDSKKMLPCAAHLNGQYGISNIYAGVPVIVGKNGIEKIEEIELDENEKSEFNNSVDAVKKLWEAASKIDPSLNN

SEQ ID NO: 86320 - protein, 319 aa, Unknown
  Bacterial polypetide isolated from the Sargasso Sea
MTKKISLIGAGQIGGTLAHMISLKGLADVILFDVADGLAKGKALDIAQSSGVSGFDVKLKGTNNYKDISNSDVIIITAGVPRKPGMSRDDLLSTNLKIIKQVAEGIKKNSPNSFIICITNPLDVIVMALQKYSGLPSNKIVGMAGILDSSRFKYFLSEELKISISKISSLVLGGHGDTMVPMPNHTLVDGKSLTQLVKEKKIDQSKLDSIIRRTRTGGAEIVKLLEKGSAFYAPAASGVEMAESYLKNLKKKLPCAAYLSGEYGFKNIYAGVPVIIGKNGVEKVIELDLNVNEKENFELSIKAVKELYDSAVKLDPSLK

SEQ ID NO: 86321 - protein, 252 aa, Unknown
  Bacterial polypetide isolated from the Sargasso Sea
PSIAFMDSDYAFLVGAKPRGPGMERSDLLQENAKIFSAQGKAINENASRDIKVLVVGNPANTNALIAMSNAPDIDKSAFTAMMRLDHNRALAQLASHLKCHSSELSNMTIWGNHSTTQYPDVSNLKLNGKNIASSLDSTWVKDDFIPRVQNRGAEIIKARGLSSAASAASAAIDHMRDWTVDTKTDDWVSMAIPSDGSYGVSEGIIYSFPVTCENGSYSIIQNLEIDEFSMASMKLTEKELLEERAAIEELL

SEQ ID NO: 86322 - protein, 226 aa, Unknown
  Bacterial polypetide isolated from the Sargasso Sea
NLKIIKQVAEGIKKNSPDAFVICITNPLDVMVMAFQKYSGLPTNKVVGMAGILDSSRFKLFLSIELKIPVKEIDAMVMGGHGDTMVPLPRFTKVSGKPLLDLVKEGKISLEKLESINQRTRDGGAEIVKYLEKGSAYYAPAASGVEMADAFLNDKKKILPCAAYMNGEYGVDKIYAGVPVVIGKNGIEKIEQIELDEKEKSEFNHSIEAVKKLWDAASAIDPNLKN

SEQ ID NO: 86323 - protein, 320 aa, Unknown
  Bacterial polypetide isolated from the Sargasso Sea
MTKISLIGAGQIGGTLAHLIGTKELVNEVVLFDVASGIAKGKALDIAQSSSVDGFNVKFSGTDDYKDIKDSDVIIITAGVPRKPGMSRDDLLGINLKIIKQVADGVKQNAPNAFVICITNPLDVMVMAFQKFSGLPANKVVGMAGILDTSRFKLFLSLELNVPVKEIEAMVMGGHGDTMVPMPRFTKVSGTPLLDLVKEGKISKERLEEINQRTRDGGAEIVKYLEKGSAFYAPAASGVQMAEAYLNDQKKLLPCAVQLNGEYSVNNVYAGVPVIIGKGGVEKIEEVSLDENEKKEFMHSIDAVKALWEAASKIDPDLSK

SEQ ID NO: 86324 - protein, 311 aa, Unknown
  Bacterial polypetide isolated from the Sargasso Sea
MKVAVLGAAGGIGQALALLLKNRLPAGSELSLYDIAPVTPGVAVDLSHIPTDVKVKGFCGEDPSPALVGADVVLISAGVARKPGMDRSDLFNINAGIVKNLVEKCAASCPKALIGIITNPVNTTVAIAAEVLKKAGVYDKRRLFGVTTLDVIRAETFVAEAKGLNVDKVRVNVIGGHSGVTILPLLSQIEGASFTADEVAAMTKRIQNAGTEVVEAKAGGGSATLSMGQAACRFGLSLIKGLQGEANVIECAYVEGDGKHATFFAQPILLGKNGVETVLDYGKLSAFEQEAMDGMLATLKADIQLGVDFVK

SEQ ID NO: 86325 - protein, 203 aa, Unknown
  Bacterial polypetide isolated from the Sargasso Sea
ITNPLDVMVMAFQKFSGLSPNKVVGMAGILDSSRFKLFLSEEFSVPVREIDAMVMGGHGDTMVPLPRFTKVSGRPLLDLVKEGKISQKRLEEINQRTRDGGAEIVKFLEKGSAFYAPAASGVEMAKAYLKDEKKMLPCAAFLNGEYGIKDIYAGVPIIIGKNGVEKIDEIDLDDKEKAEFLHSIDSVKKLWDAASKIDPDLTK

SEQ ID NO: 86326 - protein, 312 aa, Unknown
  Bacterial polypetide isolated from the Sargasso Sea
MANGAKKVAVIGAGNVGATCAFVLAERKVGEVVLLDIYEGFAKGKALDMSQGGRVLNYDGRVTGTKDYADIANSDVVVVTSGFPRQPGMTREDLIGKNADIVSQVGEGIRQHAPNSIVVMVTNPLDLMTYHMQKVTGFEHSRVVGQAGILDSARMTHFIAQAVGCSNEDVQAMVLGGHGDTMVPLPRYTTVNGIPVSQLLSDEEVEAICQRTASGGGEIVKLLEKGSAFYAPGSAAAIMAEAILEDRKRVLPCSTYLSGEYGMDDIYIGVPVVLGRNGVERIIELELAEKELDSLQGSGSFYKEQLSEILGY

SEQ ID NO: 86327 - protein, 320 aa, Unknown
  Bacterial polypetide isolated from the Sargasso Sea
MSKISLIGAGQIGGTLAHLIGIKELVNEVVLFDVASGVAKGKALDIAQSSSVDGFDVKFSGTDDYKDIKGSDVIIITAGVPRKPGMSRDDLLGINLKIIKQVAEGIKKNAPNAFVICITNPLDVMVMAFQKFSGLTANKVVGMAGILDSSRFKLFLSEEFSVPVKEIEAMVMGGHGDTMVPLPRFTKVSGKPLLDLVKEGKISQKRLEEINQRTRDGGAEIVKFLEKGSAFYAPAASGVEMASAYLRDEKKLLPCAAYLNGEYGIKDIYAGVPIIVGKNGVEKIEEINLDEKEKSEFLHSIDAVRKLWEAASKIDPDLNK

SEQ ID NO: 86328 - protein, 115 aa, Unknown
  Bacterial polypetide isolated from the Sargasso Sea
MKKKISLIGAGQIGGTLAHLIGLKELVNEVVLFDVAKGIAQGKALDIEQSSSVDGFNVKLSGTDNYEDIKNSDVIIVTAGVPRKPGMSRDDLLGINLKIIKQVAEGIKNNAPNAL

SEQ ID NO: 86329 - protein, 321 aa, Unknown
  Bacterial polypetide isolated from the Sargasso Sea
MSKISLIGAGQIGGTLAHLIGLKELVDEVVLFDVASGVAKGKGLDIAQSSSVDGFNVKFSGTDNYEDIKGSDVIIITAGVPRKPGMSRDDLLGINLKIIKQVAEGIKTNAPNAFVICITNPLDVMVMAFQKYSGLPVHKVVGMAGILDSSRFKLFLSEELNVPVKEIDAMVMGGHGDTMVPLPRFTKVSGQPLMELVKEGKISEEKLESINQRTRDGGAEIVKYLEKGSAFYAPAASGVEMAEAFLKDQKKLLPCAAYLHGEYGINNVYAGVPVIIGNEGVEKIEEIDLNENEKTEFNNSVEAVIKLWDAASKIDPDLNKD

SEQ ID NO: 86330 - protein, 302 aa, Unknown
  Bacterial polypetide isolated from the Sargasso Sea
MERAKISLIGGGQIGGNLALLAAQKELGDIVIFDIPKAEGMVKGKALDLMQLRPHDGYDANISGTSNWKDLKDSDVFIITAGLPRKPGMDREDLLEINLGIMTDVAENIKKYSPNAFVIVVSNPLDAMVYAFYKVSQLKKNMVVGMAGALDSARFRAFIAMEVGCSVQDVTCMVLGGHGDTMVPITRVGTVGGVPIESLIKPDRLEEIVNRTRFAGGEIVKLFGNGSAFYAPAQSAIEMAESYLRDKKRIIPCASLCEGEFGINGYFIGVPSMIGKNGVEKILEFELRDNEKSALDNTLEAV

SEQ ID NO: 86331 - protein, 321 aa, Unknown
  Bacterial polypetide isolated from the Sargasso Sea
MSKKISLIGAGQIGGTLAHLIGLKELVDEVVMFDVACGIAKGKALDIAQSSSVDGFNVKLSGTDNYEDIKDSNVIIITAGVPRKPGMSRDDLLGINLKIIKQVAEGIKKNAPNAFVICITNPLDVMVMAFQKYSGLPANKVVGMAGILDSSRFKLFLSLELKIPVKEIEAIVMGGHGDTMIPLPRFTKVSGKPLLDLVKEGKLSAERLEEINQRTRDGGAEIVKYLEKGSAFYAPAASGVQMAEAYLKDEKKLLPCAVQLNGEYGVKNIFAGVPVIIGKNGVEEIQEINLDEKEKSQFMHSIDAVKKLWDAASAIDKDLSK

SEQ ID NO: 86332 - protein, 320 aa, Unknown
  Bacterial polypetide isolated from the Sargasso Sea
MKKISLIGAGQIGGTLAHLIGVKELVDEVVLFDVASGIAKGKALDIAQSSSVDGFNVKFSGTDKYEDIKNSDVIIITAGVPRKPGMSRDDLVGINLKIIKQVAEGIKKNSPDAFIICITNPLDVMVMAFQKYSKLAAKKVVGMAGILDSSRFKLFLSEELKVPVKEIDAMVMGGHGDTMVPMPRFTKVSGKPLLDLVNSGVISKEKLESINQRTRDGGGEIVKFLEKGSAYYAPAASGVQMAEAFLGDKKLQLPCAAQLEGQYGFNGIYAGVPVVIGKNGVEKIVEIQLDEKEKAEFINSVNAVNKLWEAAVKIDPSLKK

SEQ ID NO: 86333 - protein, 289 aa, Unknown
  Bacterial polypetide isolated from the Sargasso Sea
MKKISLIGAGQIGGTLAHLIGIKELVDEVVLFDVASGIAKGKSLDIAQSSSIDGFNVKFLGTDNYQDIKDSDVIIITAGVPRKPGMSRDDLLGINLKIIKQVAEGVRSNAPDAFIICITNPLDVMVMAFQKYSKLPTNKVVGMAGILDTSRFKLFLSEELKVPVREIDAMVMGGHGDTMVPLPRFTKVLGKSLIELVKEGKISLDKLESINQRTRDGGAEIVKYLEKGSAFYAPAASGVEMAESYLKDQKKILPCAAYLHGEYGINNVYAGVPVCIGKDGVERIEEINL

SEQ ID NO: 86334 - protein, 320 aa, Unknown
  Bacterial polypetide isolated from the Sargasso Sea
MKKISLIGAGQIGGTLAHLIGLKELVDEVVLFDVASGIAKGKALDIAQSSSVDGFKVNLSGTDNYEDIKDSNVIIITAGVPRKPGMSRDDLLGINLKIIKQVAEGVKKNAPKAFVICITNPLDVMVMAFQKYSGLPTNKVVGMAGILDSSRFKLFLSLELKVPVKEIEAMVMGGHGDTMVPLPRFTKVSGKPLLDLVKEGKLSLKRLEEINQRTRDGGAEIVKYLEKGSAFYAPAASGVQMAEAYLNDQKKLLPCAVHLNGEYGVKNIFAGVPVIIGKDGVEKIEEIKLDEKEKNQFMHSIEAVKKLWEAASVIDKDLSK

SEQ ID NO: 86335 - protein, 320 aa, Unknown
  Bacterial polypetide isolated from the Sargasso Sea
MSKISLIGAGQIGGTLAHLIGIKELVNEVVLFDVASGVAKGKALDIAQSSSVDGFDVKFSGTDDYKDIKGSDVIIITAGVPRKPGMSRDDLLGINLKIIKQVAEGIKKNSPDAFVICITNPLDVMVMAFQKFSGLSPNKVVGMAGILDSSRFKLFLSEEFSVPVKEIEAMVMGGHGDTMVPLPRFTKVSGKPLLDLVKEGKISQKRLEEINQRTRDGGAEIVKFLEKGSAFYAPAASGVEMAKAYLRDEKKMLPCAAYLNGEYGIKDIYAGVPIIVGKNGVEKIEEINLDEKEKSEFLHSIDAVKKLWEAASKIDPDLNK

SEQ ID NO: 86336 - protein, 312 aa, Unknown
  Bacterial polypetide isolated from the Sargasso Sea
MKKVTVVGAGKYGSMTALRIAEYDIAKTVVMTDIVEGLPQGLSLDINQSRYVEGFNTKLIGTNNYEDTSDSDIVVITAGLPRKPGMSRMDLLEVNAGIVSEVTKNILKHSDNPIIVVVTNPLDQMTTLTAEVSNLSKNRVIGQAGVLDSSRFAYFISEKVGVDISSVEALTLGSHGETMVPVPSLCKVDGKPLEELLSSEEINDLVQKTSDGGAEIVSLLKTGSAYFAPASSAATMVKAMLSDSNEIFPVCAWLNGEYGINDVYLGVPARLGAEGITEIVEYDLTDTEKAALLGASNSVKEKVAELDSIKNQ

SEQ ID NO: 86337 - protein, 328 aa, Unknown
  Bacterial polypetide isolated from the Sargasso Sea
MKRNKIALIGGGQIGGTLAHLAGLKELGDVVIFDIVKGIPQGKALDLAEAAPVSSYNVDLKGSNNYSAIKDSDVVIVTAGVPRKPGMSRDDLLSINLKVMSDVGAGIKKYCPKAFVICITNPLDAMVWALQKFSGVKPNMIVGMAGVLDSARFRYFLSQEFNVSVEDVTAFVLGGHGDSMVPLERYSTVSGIPLPDLVKMGWTTQERLKEIIQRTRDGGAEIVGLLKTGSAFYAPAASAIEMADSYLKDKKRVLPCAAHLSGEYKIKDMYVGVPVVIGKKGVEKILEISLNSRETKMFKDSIASVKSLMRACSKIDKRLVSRKKNSKK

SEQ ID NO: 86338 - protein, 321 aa, Unknown
  Bacterial polypetide isolated from the Sargasso Sea
MSKISLIGAGQIGGTLAHLIGLKELVDEVVLFDVASGVAKGKGLDIAQSSSVDGFNVKFSGTDNYEDIKGSDVIIITAGVPRKPGMSRDDLLGINLKIIKQVAEGIKTNAPNAFVICITNPLDVMVMAFQKYSGLPVHKVVGMAGILDSSRFKLFLSEELNVPVKEIDAMVMGGHGDTMVPLPRFTKVSGKPLMELVKEGKISEKKLESINQRTRDGGAEIVKYLEKGSAFYAPAASGVEMAEAFLKDQKKLLPCAAYLHGEYGINNVYAGVPVIIGNEGVEKIEEIDLNENEKTEFNNSVEAVIKLWDAASKIDPDLNKD

SEQ ID NO: 86339 - protein, 319 aa, Unknown
  Bacterial polypetide isolated from the Sargasso Sea
MKKKITLIGAGQIGGTLAHLIALKDLGDVVLFDIAEGIARGKALDIAQSSPVEGFNVNISGTSNYEDTKNSDVIIITAGIPRKPGMSRDDLLGINLKIIKQVALGIKNTSPNAFVICITNPLDVIVMALQKYSGLPKKKVVGMAGILDSSRFIYFLSQELKLPVNKIKSLVLGGHGDSMVAMTNHTFVDGKSLKKLIEEGKIKKEKLDSLVERTKKGGAEIVKYLEKGSAFYAPAASGVEMAESYLKDLKKELPCAAYLNGEYGVKDLYAGVPVKIGKDGVEKVIEIKLSEEEKKQFDNSINAVQELFDAAKKIDNSLV

SEQ ID NO: 86340 - protein, 320 aa, Unknown
  Bacterial polypetide isolated from the Sargasso Sea
MSKKISLIGAGQIGGTLAHLIAIKELGNIVLFDVAEGLAKGKALDIAQSSGVTGFNVNIIGTNNYNDTKDSDVIIITAGVPRKPGMSRDDLLGTNLKIIKQVADGIKNTSPKAFVICITNPLDVIVMALQKYSGLPTNMIVGMAGILDSSRFKYFLSKELNEPIKNIHSMVLGGHGDTMVPMPKHTKIKNKILSDLVKENKISKSKLEEIVIRTRKGGAEIVKLLEKGSAFYAPAASGVEMAEAYIKDQKKTLPCAAYLNGEYGYKDIYAGVPVVIGKNGVEKILEIELENNEKLNFDVSINAVKELCNAAAKIDPVLGK

SEQ ID NO: 86341 - protein, 314 aa, Unknown
  Bacterial polypetide isolated from the Sargasso Sea
MSSLPKISVIGAGNVGSSAAYRALELNLADVVLLDIVDGLPQGKALDMTQMMSVTGSSSRIIGTTDYSDTKDSDIVIVTSGLARKPGMSRDDLINTNTKIIKDVTEKVVQHSPNSIIIVVTNPLDAMTYVSYKVSGFPKERVIGMAGVLDAARFKAFLSLELNVAVSKIDTLVLGGHGDDMVPLKNYTSVSGVPIAQMIQDSRLDEIIQRTRDGGAEIVKLLKTGSAFYAPGVSAIEMAESILKNQNKILPCCTLAQGQYGISEQFLGLPVILSSEGVKKVIEIKLTPEEQKELVVSASHVKELCNFIDDSGLI

SEQ ID NO: 86342 - protein, 311 aa, Unknown
  Bacterial polypetide isolated from the Sargasso Sea
MSQPKISLIGGGQIGGNLALIAAQKELGDITIFDIPKAEGMVKGKALDLMQLRPHDGYDSNISGTSNWNDLKNTDVFIITAGIPRKPGMNREDLLEINLGIMKDVAKNIKEQAPNSFVIVISNPLDAMVYTFYKVSGFSKNKVVGMAGALDSARFRTFLAMETGCSVQDITCMVLGGHGDTMVPITRLATIGGVPLEELIPSDRLDEIVERTRFAGGEIVKLFGNGSAYYAPAQSAIEMAESYLKDKKRVIPCASLCEGEFGINGYFIGVPSVIGSGGVEKILEFDLKDEEKAALDNTLEAVKNTVQETGL

SEQ ID NO: 86343 - protein, 281 aa, Unknown
  Bacterial polypetide isolated from the Sargasso Sea
MKKISLIGAGQIGGTLAHLIGLKELVSEVVLFDIAGGIAKGKALDIAQSSSVDGFNVSFSGTDKYKDIKNSDVIIITAGVPRKPGMSRDDLLGINLKIIKQVAQGIKQNAPNAFVICITNPLDVMVMAFQKYSNLPTNKVVGMAGILDSSRFKLFLSQELKVPVKEIEAMVMGGHGDTMVPLPRFTKVSGKSLLDLVKEGKLSLERLEEINQRTRDGGAEIVKYLEKGSAFYAPAASGIQMAEAYLKNEKKLLPCAAYLSGEYGIKNIYAGVPSYNWKIRC

SEQ ID NO: 86344 - protein, 249 aa, Unknown
  Bacterial polypetide isolated from the Sargasso Sea
FKDADYALLVGARPRGPGMERKDLLEANAAIFSAQGKAINDNASKGIKVLVVGNPANTNALIAQRNAPDIDPRQFTAMTRLDHNRAMAQLANKLGKTVNDVKKMLIWGNHSSTQYPDLHHCEVDGKVAIDQVEQDWYENDYIPTVQQRGAAIIKARGASSAASAANAAVDHMRSWALGTDEGDWVSMGIYSDGSYGIQEGLIYSFPCTCKNGDWTIVQGLEVNDFSRGKMQATEQELAEERDAVSHLLP

SEQ ID NO: 86345 - protein, 101 aa, Unknown
  Bacterial polypetide isolated from the Sargasso Sea
MRRKKISLIGSGNIGGTLAHLFAMKELGDVMLFDIAEGIPQGKALDLQQSGPVESFDVKVEGTNDYSDLKDSDVVVVTAGVPRKPGMSRDDLVEINTKVMQ

SEQ ID NO: 86346 - protein, 321 aa, Unknown
  Bacterial polypetide isolated from the Sargasso Sea
MNKKIALIGAGQIGGTLAHLIGLKELANEVILFDVAKGIAKGKALDIEQSSSVDGFNVKISGSDNYQDIKNSDVIIVTAGVPRKPGMSRDDLLGINLKIIKQVAEGIKENAPNAFVICITNPLDVMVMAFQKYSNLPKNKVVGMAGILDSSRFKLFLSRELDVPVKEIEAMVMGGHGDTMVPLPRFTKISGKPLLELVNQGTISTEKLESINQRTRDGGAEIVKFLEKGSAFYAPAASGVEMASSYLNDSKKLLPCAAYLSGEYGIKDIFAGVPVVIGKNGVEKVEEIELNDKENKEFLNSIEAVKKLWEAAVKIDPSLLA

SEQ ID NO: 86347 - protein, 332 aa, Unknown
  Bacterial polypetide isolated from the Sargasso Sea
MKEINVAVTGGAGQIAYSLLPRLISGETFGSDTKVNLRLIEIPQVVDKLQGTIMELIDCGFEQTGELIATSDIKEGVKDADWILLVGSIPRGIVIDGKKIEERSDLLKINGGIFTDQGSAIGELAKSDAKILVVGNPANTNALIGMHSANNSSQQWFAMTALDANRAKAQLAEKAAVEISSIKNMIIWGNHSPTMYPDPYNATINGVSAAEVINDNLWLEDSYLPLVQQRGKAVIDARGASSAASAANAAIDTVKAVINPTKEGDCYSAAVVSDGSYGIPEGLIFGFPLSTNSNGEIEIIQGIELNEFAQTKIKVTTEELESEREAVSDLIG

SEQ ID NO: 86348 - protein, 145 aa, Unknown
  Bacterial polypetide isolated from the Sargasso Sea
MKKISLIGAGQIGGTLAHLIGLKELVNEIVLFDVAPGIAKGKALDIAQSSSVDGFNVKLSGTDNYEDIKNSDVIIITAGVPRKPGMSRDDLLEINLKIIKQVAGGIKKNAPEAFVICITNPLDVMVMAFYKYSGLPAKKVVGMAG

SEQ ID NO: 86349 - protein, 185 aa, Unknown
  Bacterial polypetide isolated from the Sargasso Sea
MKFKVSVIGAGNVGATTAQRIFEKKYADVVLVDVVEDMPQGKALDILESGPVLGTDSKITGSNGYEETANSDVVVITAGIARKPGMSRDDLLLTNMKIVGSVTEEVVKHSPNSIIIVVSNPLDAMVQHAYNISGFDSKRVIGMAGILDTARFSTFIAEELNVSVESVNAYVLGGHGDTMVPVIGA

SEQ ID NO: 86350 - protein, 311 aa, Unknown
  Bacterial polypetide isolated from the Sargasso Sea
MKVAVLGAAGGIGQALALLLKTQLPAGSKLSLYDIAPVTPGVAVDLSHIPTAVEIKGFAGEDPTPALEGADVVLISAGVARKPGMDRSDLFNINAGIVRNLIEKVAVTCPKALVGIITNPVNTTVAIAAEVLKKAGVYDKNRLFGVTTLDVIRSETFIAELKGLNVADVKVNVIGGHSGVTILPLLSQVEGVTFSDEEVASLTKRIQNAGTEVVEAKAGGGSATLSMGQAACRFGMSLVRGLQGEANIVECAYVDGGSEHAEFFAQPVLLGKNGIEKVLPYGEVSAFEANARDSMLDTLKGDIKLGVDFVK

SEQ ID NO: 86351 - protein, 219 aa, Unknown
  Bacterial polypetide isolated from the Sargasso Sea
MQKGIKKNAPKAFVICITNPLDVMVMAFQKFSGLSPNKVVGMAGILDSSRFKLFLSEEFNVPVREIEAMVMGGHGDTMVPLPRFTKVSGRPLLDLVNEGKISQKRLEEINQRTRDGGAEIVKFLEKGSAFYAPAASGVEMAKAYLKDEKKMLPCAAFLNGEYGIKNIYAGVPIIVGKNGVEKIEEINLDDKEKAEFLHSIDAVKKLWDAASKIDPDLIK

SEQ ID NO: 86352 - protein, 319 aa, Unknown
  Bacterial polypetide isolated from the Sargasso Sea
MRKKISLIGAGNIGGTLAHLIGIKELADVVLVDIAKGIPQGKALDIAQSSAVESFNIKIKGSNSYKDIKNSDVIIVTAGFARKPGMNRDDLVEKNSTIVQQVGQAIRKYSKKSFVICITNPLDAMVSVLQKSAGLKTNMCVGMAGVLDSARLKYFLSNEFEVSVEDVNAFVLGGHGDTMVPLIRYSTISGIPIPELIRLKWTTSKKIDQIIKRTRDGGAEIGKLLKTASAFYAPASSAISMAESFIRNEKRILPCAAYLNGEYGIKGFYVGVPVIIGSRGVEKIIELKLNSSEKKQFNKSVNAVKNLTKLADKLLKKNK

SEQ ID NO: 86353 - protein, 312 aa, Unknown
  Bacterial polypetide isolated from the Sargasso Sea
MNKVTVVGAGKYGSMTALRIAEYDIVQEVVMTDIVEGLPQGLALDINQSRFVEQFNTKLIGTNDYKDTEGSDVVVITAGLPRKPGMSRMDLLEVNAKIVEGVTEEILKYSDNPSIVVVTNPLDQMTTLASDVSGLPKNKVMGQAGILDSSRFAYFIAEKLSVDTSDVYALTLGSHGETMVPVPSLCTVKGEPLIDILSESDINELVEKTSNGGAEIVGLLKTGSAYFAPASSAAVMVKSIVNNSDEIFPVCAWLEGQYGIDDVYLGVPAKLGKDGVTEVVEFELTEHEKNALIDASNAVKAKVEELNNIKNQ

SEQ ID NO: 86354 - protein, 332 aa, Unknown
  Bacterial polypetide isolated from the Sargasso Sea
MSSSVKVVVTGAAGQIAYSLIPRLVDGRTFGDKKVDLTLVEIPQVVDRLKGLVMELEDSYFPNMGEVTFTDNFEEASKDGDWFLLVGSIPRGIVYNGKKIEERSDLLSINGGIFVDQGKAIGQHGKDDAKILVVGNPANTNAFIGRNAANKDSQLWMAMTMLDSNRAKSVISKKTNTNISDITNMIIWGNHSPTMYPDSENVLINGELGSTIINDMTWIESEFVPAVQQRGKAVIDARGASSATSAAKAAIDTVIACENQTPSGGCFSAAIASDGSYGVPEGLICGYPLMTLQDGTIEIKRDITLSDFAKSKFQISIDELLEEKEAVKHLIK

SEQ ID NO: 86355 - protein, 319 aa, Unknown
  Bacterial polypetide isolated from the Sargasso Sea
MTKISLIGAGQIGGTLAHLIGIKELVNELVLFDVASGIAKGKGLDIAQSSSVDGFNVKFSGTDNYEDIKNSDVIIITAGVPRKPGMSRDDLLGINLKIIKQVAEGIKKNSPNAFVICITNPLDVMVMALQKFSGLPANKVVGMAGILDSSRYKLFLSLELNVPVKDIEAMVMGGHGDTMVPLPRLTKISGKPLLDLVKEGKISSEKLESINQRTRDGGAEIVKYLEKGSAFYAPAASGVQMAEAYLQDKKLTLPCAVKLDGQYGFKDVYAGVPVIIGSKGVEKIVEIELNDQEKKEFIHSVDSVKKLWDAATKIDPELK

SEQ ID NO: 86356 - protein, 196 aa, Unknown
  Bacterial polypetide isolated from the Sargasso Sea
MVMAFQKYSQLAAKKVVGMAGILDSSRFKLFLSEELKVPVKEIDAMVMGGHGDTMVPMPRFTKVSGKPLLDLVNSGVISKEKLESINQRTRDGGGEIVKFLEKGSAYYAPAASGVQMAEAFLGDKKLQLPCAAQLEGQYGFNGIYAGVPVVIGKNGVEKIVEIQLDEKEKAEFINSVNAVNKLWEAAVKIDPSLKK

SEQ ID NO: 86357 - protein, 311 aa, Unknown
  Bacterial polypetide isolated from the Sargasso Sea
MKVAVLGAAGGIGQALALLLKTQLPAGSQLSLYDIAPVTPGVAVDLSHIPTAVEIKGFAGEDPTPALVGADVVLISAGVARKPGMDRSDLFNINAGIVRNLIEKVAVTCPKALVGIITNPVNTTVAIAAEVLKKAGVYDKNRLFGVTTLDVIRSETFIAELKGLNVADVKINVIGGHSGVTILPLLSQVEGVTFSDEEVASLTKRIQNAGTEVVEAKAGGGSATLSMGQAACRFGMSLVRGLQGEANIVECAYVDGGSEHAEFFAQPVLLGKNGIEKVLPYGEVSAFEANARDSMLDTLKGDIKLGVDFVK

SEQ ID NO: 86358 - protein, 237 aa, Unknown
  Bacterial polypetide isolated from the Sargasso Sea
LLGINLGVMKTVGEGIKKYCPNAFVICITNPLDAMVWALRAFSGLPSNKVVGMAGVLDSSRFRYFLSEELGVSISDVTAFVMGGHGDTMVPLIRYSSVAGIPLSELIKMGWITKSKLNEIVQRTRDGGAEIVSMLKTGSAFYAPATSAIQMAESYLKDKKKVLPCAAMLNGEYGVKGMYVGVPVVIGKQGIEKVIEVSLDRTEKTMFKKSVKAVNELVTACKNIDKSLTTHFRKIKL

SEQ ID NO: 86359 - protein, 321 aa, Unknown
  Bacterial polypetide isolated from the Sargasso Sea
MSKKISLIGAGQIGGTLAHLIGLKELVDEVVMFDVASGIAKGKALDIAQSSSVDGFNVKLSGTDNYEDIKNSDVIIITAGVPRKPGMSRDDLLGINLKIIKQVAEGIKKNAHNAFVICITNPLDVMVMAFQKYSGLPSNKVVGMAGILDSSRFKLFLSLELKIPVKEIEAMVMGGHGDTMVPLPRFTKVSGKPLLDLVKEGKLSAERLEEINQRTRDGGAEIVKFLEKGSAFYAPAASGVQMAEAYLKDEKKLLPCAVQLNGEYGVKNIFAGVPVIIGKNGVEKIEEINLDEKEKSQFMHSIDAVKKLWEAASAIDKDLSK

SEQ ID NO: 86360 - protein, 228 aa, Unknown
  Bacterial polypetide isolated from the Sargasso Sea
GINLKIIKQVAERIKKHAADAFVICITNPLDVMVMAFQKYSNLPTNKVVGMAGILDSSRFKLFLSQELKVPVKEIEAMVMGGHGDTMVPLPRFTKVSGKPLLDLAKEGKLSLERLEEINQRTRDGGAEIVKYLEKGSAFYAPAASGVQMAEAYLKDEKKLLPCAAYLNGEYGVKNIYAGVPVIIGKSGVEKIEEIKLDDKEKKEFVNSIEAVKKLWEAASKIDPELSK

SEQ ID NO: 86361 - protein, 276 aa, Unknown
  Bacterial polypetide isolated from the Sargasso Sea
DIAQSSSVDGFDVKFKGTDKYEDIKDSDVIIITAGVPRKPGMSRDDLLGINLKIMKQVASGVKTNCPDAFVICITNPLDVMVMAFQKYSKLPTNKVVGMAGILDSSRFKLFLSLELGIPVKQIDAMVMGGHGDTMVPLPRFTKVNGKNLKDLIKEGKISEDKVESINQRTRDGGAEIVKLLEKGSAYYAPAASGVEMAISFLNDEKKILPCAAYLNGEYGVKDIYAGVPVLIGNKGVEKIHEIELDEKEKKEFLNSVNSVEKLWEAAVKIDPELSN

SEQ ID NO: 86362 - protein, 299 aa, Unknown
  Bacterial polypetide isolated from the Sargasso Sea
TKVNLRLVEIPQVVDKLEGTIMELVDCGFDQTGSMLATADIKEGVDGADWVLLVGSIPRGIVIDGKKIEERSDLLKINGGIFTDQGSAIGSLANKEAKILVVGNPANTNALIGKKHANNDSQQWFAMTALDANRAKAQLALKAGSDITSVSNMTIWGNHSPTMYPDPYNAKINGTSAAEVINDKKWIENEYLPLVQQRGKAVIDARGASSAASAANAAIDTVKAVENITPENDSFSAAIASDGSYGVPEGLIFGYPLRTTAPGKVEIIQGLELNEFAKSRIKITTEELEEEKAAVKDLL

SEQ ID NO: 86363 - protein, 129 aa, Unknown
  Bacterial polypetide isolated from the Sargasso Sea
ATAEGQDLTKLINDDAWNRNEFIPTVGKRGAAIIEARGLSSAASAANAAIDHVRDWVLGTNGKWVTMGIPSDGSYGIPEDIIYGVPVTCENGEYKRVEGLEIDAFSREKMDGTLNELLEEREGVQHLLG

SEQ ID NO: 86364 - protein, 240 aa, Unknown
  Bacterial polypetide isolated from the Sargasso Sea
NKHIYLRAIQDNNETLYYRLVRDHLEEMMPIIYTPTVGDACEKFSDIYRSARGLFISYEDRYQIDDILRNATKGKVKVIVVTDGERILGLGDQGIGGMGIPIGKLSLYTACGGISPAYTLPVMLDVGTNNEKLLNDPMYMGARHKRIAHDEYDEFLDLFIKAVKRRWPNVLLQFEDFAQPNAMPLLKRYREEICSFNDDIQGTASVTVGSLLAACRVKGSTLSQQKVVFVGAGSAGCGIA

SEQ ID NO: 86365 - protein, 382 aa, Unknown
  Bacterial polypetide isolated from the Sargasso Sea
MPKGSQILHEPLLNKGSAFSLKEREALHLNGLLPPRVLTIEQQKNRILENFNNKHNDLEKYIFLIALQDRNETLFYKTITDEIEKMMPIIYTPIVGEACQKYGHIFRRPRGLYISKNDKGNIKSILKNWPNDNVDVIVVTDGERILGLGDLGANGMGIPVGKLSLYTACAGVDPAKCLPIMLDVGTNNENLKNDPLYIGLTDDRIRGEEYDSFIDEFMKETNEKFPDAIIQFEDFGNHNAARLLDKYRNRYRMFNDDIQGTAAVTLAGLLSSQRITKRDLAEEKILFYGAGTAGIGIANLYVTALMKKGYSKEEASSRCWFIDSKGLVVSSRKNLSQDKLPFAHEYYEKKDLSDIVQSIRPTALIGISGQANAFSKNVLKLM

SEQ ID NO: 86366 - protein, 270 aa, Unknown
  Bacterial polypetide isolated from the Sargasso Sea
MVDFKRGIEELPKGSQILHEPLLNKGSAFSLKEREALHLNGLLPPRVLTIEQQKNRILENFNNKHNDLEKYIFLIALQDRNETLFYRTITDEIEEMMPIIYTPIVGEACQKYGHIFRRPRGLYISKNDKGNIRNILKNWSNDNVDVIVVTDGERILGLGDLGANGMGIPVGKLSLYTACAGVDPARCLPIMLDVGTNNENLKNDPLYIGLTEDRIRGEEYDSFIDEFMKETNEKFPDAIIQFEDFGNHNAARLLDKYRNRYRMFNDDIQG

SEQ ID NO: 86367 - protein, 340 aa, Unknown
  Bacterial polypetide isolated from the Sargasso Sea
MTSKIIYTKTDEAPALATYSLLPIIQAYTNAAGVEVETRDISLAGRVIASFPDYLTEEQRIGDALAELGELAKTPEANIIKLPNISASVPQLRAVIKELQAKGYALPDYPVEPKNDEEKAIQAAYDKVKGSAVNPVLREGNSDRRAPGSVKEYARNNPHSMGAWSKDSASYVASMSEGDFFGSEQSTTIEEATDVRIEHVATNGDTTVLKQSTPLLAGEVIDASRISAAKLQAFLAAEIDAAKEKGVLFSLHMKATMMKVSDPIIFGHAVKVFYKDVFAKHGELFEELGVDVNNGLGDVYSKIQTLDDAKRAEIEADIQAVYAERPAIAMVDSDRGITNL

SEQ ID NO: 86368 - protein, 65 aa, Unknown
  Bacterial polypetide isolated from the Sargasso Sea
MSKIKVKNPVVELDGDEMTRIIWEFIKNKLVLPYLDLGIEYYDLGMKSRDDTDDQITINSANAIK

SEQ ID NO: 86369 - protein, 38 aa, Unknown
  Bacterial polypetide isolated from the Sargasso Sea
MTKIKVKNPVVELDGDEMTRIIWDLIKKKLILPYLDID

SEQ ID NO: 86370 - protein, 290 aa, Unknown
  Bacterial polypetide isolated from the Sargasso Sea
MPARSKIIYTFADEAPTLATYSVLPIVEALTASADIAVETRDISLAGRILASFPEQLGTKAIPDHLAELGDLAVTPEANIIKLPNISASTPQLQAAIKELQAQGYALPDYPETVTTDAEKETRARYDKVKGSAVNPVLREGNSDRRAPLSVKNYARKHPHKMGAWAADSKSHIAHMNNGDFYGSEKAVQIETADAVKIALVAKDGTTTVLKEKTSVQAGEIIDTAVLSKKALRSFIAAEIEDAKKQGVLLSVHLKATMMKVSDPIMFGQIVAEFYKDALAKHATVLNRSA

SEQ ID NO: 86371 - protein, 160 aa, Unknown
  Bacterial polypetide isolated from the Sargasso Sea
MTYKKIKVPKKGQKISYENGKLNVPDNPVIPYIEGDGIGVDITPPMIKVVDEAVKIAYSGTKKIEWMEVFCGEKATKVYTKDTWLPDETIDALKEYVVSIKGPLTTPVGGGIRSLNVSLRQLLDLYVCLRPIRYFDGVPSPVKKPKEVDMVIFRENSEDI

SEQ ID NO: 86372 - protein, 29 aa, Unknown
  Bacterial polypetide isolated from the Sargasso Sea
MSKITVKNPVVELDGDEMTRIIWKFIKNK

SEQ ID NO: 86373 - protein, 157 aa, Unknown
  Bacterial polypetide isolated from the Sargasso Sea
WDKYNGKAPEEKIVINDRIADNMLQQILTRTDEYDVLALPNLNGDYMSDACAAQIGGLGLAPGANIGDEIALFEATHGTAPKYAGQDKVNPGSVILSGVMMFEHMGWKEVGNLIVKAMEKTVLDKDVTYDLERQIEGANLLKCSEFGDAIIKNMDKV

SEQ ID NO: 86374 - protein, 237 aa, Unknown
  Bacterial polypetide isolated from the Sargasso Sea
NNGQGAPLTPIFHHILSKKINQNFNIKFPIGFLNIGGIANVTKVINDSDNFQNNLYAFDIGPGNCLIDEWVRNNSNKKFDKNGELSKVGNVDQLILNQVIDNFKINSYSQSLDIKNFDVSFARGLSLEDGCATITDFSAYLIAEGLKYISQKNNITFLLCGGGRKNSNLINCIKNYISNENNITLEIIDNYNLNGDYIESQAFGFLAIRSFLNLPISFTSTTGCKKFTVGGKLVENF

SEQ ID NO: 86375 - protein, 282 aa, Unknown
  Bacterial polypetide isolated from the Sargasso Sea
KESLKKYKDRIDLVGFHGQTILHNPREKITIQLGDGKLLSQITKKKVIYDFRQADIQNNGQGAPLTPIFHYILSKQINLNFNIEFPIGFLNIGGIANVTKVNNNSDNFQNNLIAFDVGPGNCLIDEWVRNNSKQKFDENGELAKSGKVDTLVLNQAIDNFNINSYSQSLDIKNFDVSFAKGLSLENGCATITNFTAYLISQGLKHISQKNSIIFLVCGGGRKNSNLINSIKNYLLDANNINLDIIDNYNLNGDYIESQAFAFLAIRSFLNLPISFSSTTGCD

SEQ ID NO: 86376 - protein, 52 aa, Unknown
  Bacterial polypetide isolated from the Sargasso Sea
MAKIKVKNPVVELDGDEMTRIIWAFIKDKLIKPYLDIELKYFDLGMENRDKT

SEQ ID NO: 86377 - protein, 289 aa, Unknown
  Bacterial polypetide isolated from the Sargasso Sea
MSYQHISIPEQGEQITIDSSGVWHIPSHPIVAYIEGDGVGQDITPVMRSVVDSAVYHAYHDEKKIHWMEVFNGEKAAVLYDGDWFPQETLHAVRQYKIAIKGPLTTPLGGGFRSLNVALRHEMDLFVNMRPIRSYSRLPSPLKEPEKTNITVIRDSSEDVYSGIEWQAGSVDNERMLDFLCQEMGVTRLRFDTQCGIGIKNSSKDGAERLMRYAVNYALQQKSDSLTVVHKGNVLKFTDGAFKRWAFALAEQEFNAHPHENGRWLVIKRDGLSDLTIKEVIADNMCNKP

SEQ ID NO: 86378 - protein, 170 aa, Unknown
  Bacterial polypetide isolated from the Sargasso Sea
MSKIKVANPIVEIDGDEMARIIWKFIKEKLILDYLDLDIVYYDLGIESRDKTDDQITIDAANAIKKYNVGIKCATITPDEQRVEEFSLSRMYKSPNGTIRNIVGGTVFREPIICRSIPRYVQGWSRPICIGRHAFGDQYRATDVITHGPGKLEIKFTPKDGGESTTWEVY

SEQ ID NO: 86379 - protein, 74 aa, Unknown
  Bacterial polypetide isolated from the Sargasso Sea
MTKIKVKNPVVELDGDEMTRIIWDFIKKKLILPYLDIDIKYYDLGILNRDKTSDQVTIDCARAIKKFGVGIKCA

SEQ ID NO: 86380 - protein, 47 aa, Unknown
  Bacterial polypetide isolated from the Sargasso Sea
MAKIKVKNPVVELDGDEMTRIIWSFIKDKLIKPYLEIDLKYYDLGME

SEQ ID NO: 86381 - protein, 41 aa, Unknown
  Bacterial polypetide isolated from the Sargasso Sea
MSKIKVKNPIVELDGDEMTRIIWEFIKNKLILPYLDLGIEY

SEQ ID NO: 86382 - protein, 66 aa, Unknown
  Bacterial polypetide isolated from the Sargasso Sea
MSKIKVKNPIVELDGDEMTRVIWSFIKKKLIFPYIDLGIEYYDLGIKNRDNTNDQVTIDCAKALKQ

SEQ ID NO: 86383 - protein, 39 aa, Unknown
  Bacterial polypetide isolated from the Sargasso Sea
MAKLKVKNPVVELDGDEMTRIIWSFIKDKLIKPYLEIDL

SEQ ID NO: 86384 - protein, 37 aa, Unknown
  Bacterial polypetide isolated from the Sargasso Sea
DVIGDAFLQQILVKHENFVVIATTNLNGDYASDALAA

SEQ ID NO: 86385 - protein, 43 aa, Unknown
  Bacterial polypetide isolated from the Sargasso Sea
MGKIKVKTPLVEIDGDEMTRIIWQFIKDKLILPYLDIELDYYD

SEQ ID NO: 86386 - protein, 114 aa, Unknown
  Bacterial polypetide isolated from the Sargasso Sea
MGDYLSDSAAAAVGGIGIAPGANINYKSGHAIFEATHGTAPKYAGQDKVNPSSVILSAVMMLDYIGWKEAANSIEYALEKAIFNKKVTYDFHRLMDNATLLKCSEFGDEIISKF

SEQ ID NO: 86387 - protein, 59 aa, Unknown
  Bacterial polypetide isolated from the Sargasso Sea
RTPNGTIRNIIGGTVFREPIICKNIPKLVPSWTEPVIIGRHAFGDQYRATEFKVPGKGK

SEQ ID NO: 86388 - protein, 78 aa, Unknown
  Bacterial polypetide isolated from the Sargasso Sea
MSKIKVKNPVVELDGDEMTRIIWEFIKNKLILPYLDLGIEYYDLGMKSRDNTDDQITIDSANAIKKIGVGIKCATITP

SEQ ID NO: 86389 - protein, 114 aa, Unknown
  Bacterial polypetide isolated from the Sargasso Sea
NLNGDYLSDALAAMVGGIGIAPGANIGDEAAMFEATHGTAPKYAGLDKVNPLSLILSAEMMLRHINWNEAADLLINSIEKTIQDRYVTYDFERLMDNATLVSCSGFAKEMIKRM

SEQ ID NO: 86390 - protein, 83 aa, Unknown
  Bacterial polypetide isolated from the Sargasso Sea
MSKIKVKNPIVELDGDEMTRVIWEFIKKKLILQYLDLGIEYYDLGMKSRDATNDQITIDCAKAIKKNGVGIKCATITPDEARE

SEQ ID NO: 86391 - protein, 26 aa, Unknown
  Bacterial polypetide isolated from the Sargasso Sea
MAKIKVKNPVIELDGDEMTRIIWSFI

SEQ ID NO: 86392 - protein, 160 aa, Unknown
  Bacterial polypetide isolated from the Sargasso Sea
DELWDKYDGKAPEGKIVINDRIADNMLQQILTRTDEYDVLALPNLNGDYMSDACAAQIGGLGLAPGANIGDEIALFEATHGTAPKYAGQDKVNPGSVILSGVMMFEHIGWREVSNLIVKALEKTVLDKDVTYDLHRQIEGANLLKCSEFGDAIIKNMDNV

SEQ ID NO: 86393 - protein, 125 aa, Unknown
  Bacterial polypetide isolated from the Sargasso Sea
KDVFDFKDKGCALSMYNLEDSIEGFARACFNYGLNLGWPVYMSTKNTISKAYDGLFKDTFEKIFIKEFKSKFDDKGIIYEHRLIDDMVACAMKWEGGFVWACKNYDGDVQSDTIAQGFGSLGLMT

SEQ ID NO: 86394 - protein, 144 aa, Unknown
  Bacterial polypetide isolated from the Sargasso Sea
VIKRDETNDQITIDAAEAVKKYGVGIKCATITPDENRVEEFKLKQMWRSPNGTIRNILGGTIFRQPIICKNVPRIITNWNHPIVVARHAFGDQYRATDTLINKPGTLKMVFEPKDGSEGFTKDVYEFEKPGVALSMYNLDNSIK

SEQ ID NO: 86395 - protein, 79 aa, Unknown
  Bacterial polypetide isolated from the Sargasso Sea
PGVALSMYNLDQSIKDFARACMNYGLNRKWPVYLSTKNTILKNYDGRFKDLFPEVFDKEFKDKFKEREITYEPRLIDDL

SEQ ID NO: 86396 - protein, 106 aa, Unknown
  Bacterial polypetide isolated from the Sargasso Sea
MPKIVVKNKIVNLNGDEMARVLWNKIESELILPYLELKLSNFDLSITNRDETNDQVTSDAANEIKRINVGLKCATITPDDKRVKEYNLKKKYPSPNGTIRNILKGT

SEQ ID NO: 86397 - protein, 77 aa, Unknown
  Bacterial polypetide isolated from the Sargasso Sea
MSKRTITVIPGDGIGPSIIDSALKILDKAGCDFEYEFADAGLTALEKHGELLPQRTLDLIEKNRITLKGPLTTPVGE

SEQ ID NO: 86398 - protein, 46 aa, Unknown
  Bacterial polypetide isolated from the Sargasso Sea
MGKIKVKTPLVEIDGDEMTRIIWQFIRDKLILPYLDIELDYYDLGV

SEQ ID NO: 86399 - protein, 70 aa, Unknown
  Bacterial polypetide isolated from the Sargasso Sea
MSKIKVKNPVVELDGDEMTRIIWEFIKNKLILPYLDLDIKYFDLGMKSRDNTDDQITIDSAKCIKNVGVG

SEQ ID NO: 86400 - protein, 35 aa, Unknown
  Bacterial polypetide isolated from the Sargasso Sea
MSKIKVLNPVVEMDGDEMTRIIWDKIKQNLILPFL

SEQ ID NO: 86401 - protein, 71 aa, Unknown
  Bacterial polypetide isolated from the Sargasso Sea
MSKIKVKNPIVELDGDEMTRIIWKFIKEKLILPYLDLRIEYYDLGMKSRDDTSDQITVDCANAIKKNGVGI

SEQ ID NO: 86402 - protein, 80 aa, Unknown
  Bacterial polypetide isolated from the Sargasso Sea
FTFAWTRGLMHRGKLDNNQELIDFCKLLEGVCIETIEGGKMTKDLALLVFRDDMVSSNYLTTEQFFEELKSNLERKIKGA

SEQ ID NO: 86403 - protein, 89 aa, Unknown
  Bacterial polypetide isolated from the Sargasso Sea
MTNSKSIKMEDGKLNVPVEPIIPFIEGDGIGPDIWKAAVNVFDSAVQKAYGGSRKVEWLEILAGEKAFETTGEWLPQKTFRFGNQTSCR

SEQ ID NO: 86404 - protein, 289 aa, Unknown
  Bacterial polypetide isolated from the Sargasso Sea
SGQMWGPDGQLKDTKAMIPDRCYAGVYQETIAFCKKHGAFDPTTMGSVPNVGLMAQKAEEYGSHDKTFEITAAGTVNVINQAGDVLMSHNVEVGDIYRMCQVKDAPIRDWVKLAVRRSRLSNTPAIFWLDSARAHDAELIKKVTQYLAQEDTAGLDIQIMSPVEATRVTLERIIKGQDTISVTGNVLRDYLTDLFPILELGTSAKMLSIVPLMNGGGLFETGAGGSAPKHVQQVEKEGHLRWDSLGEFLALAASLEHLAQTANNPKAQVLADTLDLAIGEFLDSNKSPS

SEQ ID NO: 86405 - protein, 87 aa, Unknown
  Bacterial polypetide isolated from the Sargasso Sea
MAKIKVKNPVVEMDGDEMTRIIWEYIKEQLILPYLDIDIKYFDLGIIKRDETNDQITIDAAEAVKKYGVGIKCATITPDENRVEEFK

SEQ ID NO: 86406 - protein, 123 aa, Unknown
  Bacterial polypetide isolated from the Sargasso Sea
KREYEVFNFPGPGVALSMYNLDRSIEDFARSCFNYGLIKKWPVYLSTKNTILKTYDGRFKDIFQKVFNEEFKKDFDKNNITYEHRLIDDMVACAMKWSGKYIWACKNMMETFNRIQLLRDMGL

SEQ ID NO: 86407 - protein, 246 aa, Unknown
  Bacterial polypetide isolated from the Sargasso Sea
YNFRQADIQNNGQGAPLTPIFHHILSKKINQKFNLKFPIGFLNIGGIANVTKVINDSDNFQHNLSAFDIGPGNCLIDEWVRNNSNKKFDTNGEIAKAGKVDQLILNQAIDNFKINSYSQSLDIKNFDVSFARGLSLEDGCATITDFTAYLIAEGLKYIGKKNSITFLLCGGGRKNSNLINLIKNYISNENYINLENIDNYNLNGDYIESQAFGFLAIRSFLNLPISFSTTTGCKEFTVGGKLVENF

SEQ ID NO: 86408 - protein, 26 aa, Unknown
  Bacterial polypetide isolated from the Sargasso Sea
MAKIKGQNPIVELDGDEMTRIIWSFI

SEQ ID NO: 86409 - protein, 131 aa, Unknown
  Bacterial polypetide isolated from the Sargasso Sea
MSKSKIKVPAMGEKITYKNNKLIVPDNPIIPFIEGDGIGVDITPVMLDVINAAVEEAYEGKRKISWMEIYCGEKSVEVYGDNEWLPDETLQACKDYKVSIKGPLTTPVGGGIRSLNVAIRQKLDLYVCLRL

SEQ ID NO: 86410 - protein, 115 aa, Unknown
  Bacterial polypetide isolated from the Sargasso Sea
RGLSLEDGCATITDFTAYLISQGLKHISQKNSITFLICGGGRKNNNLINSIKNYLVNENYINLEIVDNYNLNGDYIESQAFAFLAIRSFLNLPISFKSTTGCNEFTVGGKLVENF

SEQ ID NO: 86411 - protein, 49 aa, Unknown
  Bacterial polypetide isolated from the Sargasso Sea
MFLENLIICSNIPKLVPSWSDPVVIGRHAFGDQYRATDFKVPGKGKMEV

SEQ ID NO: 86412 - protein, 169 aa, Unknown
  Bacterial polypetide isolated from the Sargasso Sea
MSEHKIAVIPGDGIGIEVITEAKRIMTHIEETNAGIKFNYIDLPWGSEYYRQTGLMMPDDGLDQIKDSDAILFGAVGDPNIPDHITLQGLLLPMRRQYDQGISIRPAYLYPGVNSPIKDKGPGEIDMVIFRENTEGEYAPVGGSLYSGTDHETVIQTNVFTRRGTERII

SEQ ID NO: 86413 - protein, 97 aa, Unknown
  Bacterial polypetide isolated from the Sargasso Sea
CPWSNINYTSGHAIFEATHGTAPKYAGKDQVNPSSVILSGVMMLEYMGWQEAADLIVKGIEGAISNKRVTYDFHRLMDGATKLKCSEFGSEIISNMS

SEQ ID NO: 86414 - protein, 26 aa, Unknown
  Bacterial polypetide isolated from the Sargasso Sea
MTKIKVKNPVVELDGDEMTRIIWDFV

SEQ ID NO: 86415 - protein, 45 aa, Unknown
  Bacterial polypetide isolated from the Sargasso Sea
TCIETVESGKMTKDLAILISQDQKWLNTQDFLNTLKDNLERRLET

SEQ ID NO: 86416 - protein, 55 aa, Unknown
  Bacterial polypetide isolated from the Sargasso Sea
MLEYMGWQEAADLIVKGIEGAISNKRVTYDFHRLMDGATKLKCSEFGSEIISNMS

SEQ ID NO: 86417 - protein, 65 aa, Unknown
  Bacterial polypetide isolated from the Sargasso Sea
PSSVILSGVMMLEYMGWQEAADLIVKGIEGAISNKKVTYDFHRLMDGATKLKCSEFGSEIISNMS

SEQ ID NO: 86418 - protein, 183 aa, Unknown
  Bacterial polypetide isolated from the Sargasso Sea
MTYKKIKVPKKGQKISYNNGKLIVLDNPIIPYIEGDGIGVDITPPMIKVVDEAVKLAYNGSKKIEWMEVFCGEKATKIYSKDTWLPDETIDALKEFVVSIKGPLTTPVGGGIRSLNVSLRQLLDLYVCLRPIRYFDGVPSPVKNPEQVDMVIFRENSEDIYCGVEFEGNSKDAKNLLKILKSK

SEQ ID NO: 86419 - protein, 407 aa, Unknown
  Bacterial polypetide isolated from the Sargasso Sea
ADIKAVYAKQPALRWVNSDKGITNLHVPSDVIIDASMPAAIRSSGQMWGPDGKLKDTKAIIPDRCYAGVYQETINFCREHGAFDPRTMGSVPNVGLMAQKAEEYGSHDKTFEIKAAGQVRVVDAAGTVLIQHNVEQGDIWRMCQAKDAPIQDWVKLAVNRARLSKTPAVFWLDKNRAHDAQLIAKVERYLKDHDTTGLDIQIMSPEDATRHTLKRIKAGLDTISVTGNVLRDYLTDLFPILELGTSAKMLSIVPLMNGGGLFETGAGGSAPKHVEQFVEENHLRWDSLGEFLALAASLEHLSQVTGNTKAQVLADALDQATAKFLDNDKSPTRKLGQLDNRGSHFYLAFYWAEALAAQSKDAALAARFAPLAKALTENEAKIVQELNSVQGKAVDIGGYYKPDDALA

SEQ ID NO: 86420 - protein, 174 aa, Unknown
  Bacterial polypetide isolated from the Sargasso Sea
MSEKKAKIIYTDTDEAPALATYSFLPIIKSFTAGSGIAVETRDISLAGRIIANFPEFLNDSQKQSDALAELGELTQDEMANIIKLPNISASIPQMKDAIKELQDKGYVLPDYPEEPNDDQERDIKARYDRIKGSAVNPVLREGNSDRRAPGSVKEYARANPHSMGVWSADSKTH

SEQ ID NO: 86421 - protein, 177 aa, Unknown
  Bacterial polypetide isolated from the Sargasso Sea
MSSQTITVIKGDGIGPSIVEAAIQVLDKVGCNFNYEYVEAGLTALETTGELLPQTTLDAIARNKITLKGPLTTPVGEGFTSINVTLRKKFNLYSNVRPVISFKGTKARYENIDIITVRENTEGMYSGAGQIVKNEGELAEAMSVVTREGSERIVEFAFELARREKRKKVTIVHKANI

SEQ ID NO: 86422 - protein, 71 aa, Unknown
  Bacterial polypetide isolated from the Sargasso Sea
MSKISVKNPIVELDGDEMTRIIWEFIKNKLILPYLDLGIEYYDLGMKSRDNTDDQVTVDSANAIKKIGVGI

SEQ ID NO: 86423 - protein, 188 aa, Unknown
  Bacterial polypetide isolated from the Sargasso Sea
MGYKHIKIPKEGSKIKLSDGIIQVPDNPIIPYIEGDGIGIDITPAMLNVVDSAVEKAYKGSKKISWMEVYCGEKSTKVYDPDTWLPDETIDALKEYMVSIKGPLTTPVGGGIRSLNVSLRQILDLYVCLRPIRYFAGVPSPVKNPSYVDMVIFRENSEDIYAGVEFEAGSSESDAMVKVLQEQFGVTQ

SEQ ID NO: 86424 - protein, 75 aa, Unknown
  Bacterial polypetide isolated from the Sargasso Sea
MKKIKVNTPLVEIDGDEMTRIIWQFIKEKLILPYLDIELDYYDLGVKNRDNSNDQVTVDSANAIKKYGVGVKCAT

SEQ ID NO: 86425 - protein, 380 aa, Unknown
  Bacterial polypetide isolated from the Sargasso Sea
MKKKLYTAIGLMSGTSMDGIDLSIISSDGYDEFSNILDDYYEYDKNLQDQLVRLRDLVLTKKDLLQNSEKLRELERNLTLFHADAVNQSLKKYRDPIDLIGFHGQTIFHNPNEKITNQLGDGKLLSQMVKKKVIYDFRQADIQNNGQGAPLTPIFHHILSKKINQNFNIKFPIGFLNIGGIANVTKVINDSDNFQNNLSAFDIGPGNCLIDEWVRNNSNKKFDKNGELSNAGKVDQLILNQAIDNFKINSYSQSLDIKNFDVSFARGLSLEDGCATITDFTAYLIAEGLKYISQKNSITFLLCGGGRKNINLINCIKNYISNENYINLESIDNYNLNGDYIESQAFGFLAIRSFLNLPISFSTTTGCKDFTVGGKLVENF

SEQ ID NO: 86426 - protein, 93 aa, Unknown
  Bacterial polypetide isolated from the Sargasso Sea
MEKIKVKNPVVEMDGDEMTRVIWEFIKDKLILPYIDVDIKYYDLGVKSRDNSEDQITIDSAEAVKKYGVGIKCATITPDEERVKEFSLKKMWR

SEQ ID NO: 86427 - protein, 64 aa, Unknown
  Bacterial polypetide isolated from the Sargasso Sea
MAKIKVKNPVVELDGDEMTRIIWSFIKDKLIKPYLEINLKYYDLGMESRDKTDDQITVDAANAI

SEQ ID NO: 86428 - protein, 50 aa, Unknown
  Bacterial polypetide isolated from the Sargasso Sea
MSKIKVNNPVVELDGDEMTRIIWEFIKNKLILPYLDLGIEYYDLGMKSKR

SEQ ID NO: 86429 - protein, 409 aa, Unknown
  Bacterial polypetide isolated from the Sargasso Sea
MSTSPKIIYTLTDEAPALATYSLLPIVKAFTRSSDVIVETRDISLAGRIIAAFPDYLSAEQKGSDDLAELGGLTTRPEANIIKLPNISASVPQLKAAIAELRDQGFKLPSYPDEAKTDEEKDVKARYDKIKGSAVNPVLREGNSDRRAPLSVKNYARKHPHKMGRWSADSKSHVAHMSGGDFYGSEKSALIAAAGTVKIELTTADGATRVLKEKTAVQAGEIIDASVLSKNALRNFIEAEIADAKAKGVLFSVHLKATMMKVSDPIIFGHVVSVFYKDVLTKHADALAQAGFNPNNGIGDLYARLKDLPAETREAIEADIKAQYAQRPQLAMVNSDKGITSLHVPSDVIVDASMPAMIRESGKMWGADGALHDAKAVIPDRCYAGVYQAVIEDCKKNGAFDPVTMGTVP

SEQ ID NO: 86430 - protein, 155 aa, Unknown
  Bacterial polypetide isolated from the Sargasso Sea
PGDKILVQDVIADAFLQQILIKPQMFDVIATTNLNGDYASDALAAQIGGIGISPGGNINYENGKAVFEATHGTAPKYAGQDKTNPGSLILSGVMMFRYMGWNSAADLIVNSMEKTILEGKVTYDLARGRSVKKILSSSEFANALISNMKTSKKEK

SEQ ID NO: 86431 - protein, 41 aa, Unknown
  Bacterial polypetide isolated from the Sargasso Sea
EPIICKNIPKLFPSWTDPLIIGRHAFGDQYRATDFLVPVKR

SEQ ID NO: 86432 - protein, 88 aa, Unknown
  Bacterial polypetide isolated from the Sargasso Sea
MHQQGKETSTNPIASIFAWTRGLAHRGKLDNNDKLIKFSDILEKVCIDAVEGGSMTKDLAILLSTSTKYLTTNQFLDELDGRLKKKLN

SEQ ID NO: 86433 - protein, 67 aa, Unknown
  Bacterial polypetide isolated from the Sargasso Sea
VQSDTVAQGYGSLGLMTSVLLAPDGKTMEAEAAHGTVTRHFMDASTGQRNIYQSNSIHFCMDKRFGS

SEQ ID NO: 86434 - protein, 159 aa, Unknown
  Bacterial polypetide isolated from the Sargasso Sea
MAGTAITMNNGELVIPNNPIIYFIEGDGIGVDITPVMQKVVDAAVSKAYGNEKQIHWSEVLAGEKAFNATGEWLPESTLNAMKSGLVSIKGPLTTPVGGGIRSLNVALRQKLDLFACVRPVRWYEGTPSPVRDPGAVDMIIFRENSEDVYAGIEWEMGT

SEQ ID NO: 86435 - protein, 164 aa, Unknown
  Bacterial polypetide isolated from the Sargasso Sea
MAKIKVKNPVVEMDGDEMTRIIWEYIKEQLILPYLDIDIKYFDLGVIKRDETNDQITIDAAEAVKKYGVGIKCATITPDENRVEEFKLKQMWRSPNGTIRNILGGTIFRQPIICKNVPRIITNWNHPIVVARHAFGDQYRATDTLINKPGTLKMVFEPKDGSEG

SEQ ID NO: 86436 - protein, 100 aa, Unknown
  Bacterial polypetide isolated from the Sargasso Sea
VEAEAAHGTVTRHYRNHQKGIETSTNPIASIFAWTRGLSFRGEFDGNIELINFAKNLEDTCIKTVENGEMTRDLAILINKDQKWLNTQDFLSAIKNNFSN

SEQ ID NO: 86437 - protein, 106 aa, Unknown
  Bacterial polypetide isolated from the Sargasso Sea
MAKIKVKNPIVEMDGDEMTRIIWEYIKEQLILPYLDIDIKYFDLGVIKRDETNDQITIDAAEAVKKYGVGIKCATITPDENRVEEFKLKQMWRSPNGTIRNILGGT

SEQ ID NO: 86438 - protein, 168 aa, Unknown
  Bacterial polypetide isolated from the Sargasso Sea
MSKIKVKNPIVELDGDEMTRVIWDFIKNKLVLTYLDLKIEYYDLGMESRDKTEDKITIECANAIKRNGVGIKCATITPDETRVREFNLKKMWRSPNGTIRNIIGGTVFREPIICKNIPKLVPSWTDPLIIGRHAFGDQYRATDFTVPGKGKLEIKWTAEDGSDERKYE

SEQ ID NO: 86439 - protein, 98 aa, Unknown
  Bacterial polypetide isolated from the Sargasso Sea
AHGTVTRHYRIHQQEKETSTNPIASIFAWTRGLAHRGKLDGNEELIKFAQTLEKVCIECVESGSMTKDLAILIGPDSKYLTTNQFLDEIDGNLKKKLN

SEQ ID NO: 86440 - protein, 285 aa, Unknown
  Bacterial polypetide isolated from the Sargasso Sea
REPIMIDKIPKIVDHWNKPVIIARHAFGDIYRSKEIVVDKKGKLTICFEDEDGNKEEKLIHNFETGGVGLAYFNVFESINDFANSCFNFACKRKVSLFLSTKNTILQKYDESFKQIFDDVFKKFKKEFEKNNLTYQHRLIDDMVACLMKWSGGFIWACKNYDGDVMSDLVAQGYGSLGLMTSVLQSPDGKILKSEAAHGTITSHFRQHQQGIQTSTNPIASIFAWTRALKQRAIIDNNSDLLKFSENLENICIDTIDNGFMTKDLALMCGPEQKWITTNEFFDII

SEQ ID NO: 86441 - protein, 131 aa, Unknown
  Bacterial polypetide isolated from the Sargasso Sea
MSKIKVKNPVVELDGDEMTRVIWEFIKKKLILPYLDLGIEYYDLGMKSRDDTSDQITIDCANAIKKNGVGIKCATITPDEARVKEFNLKKMWRSPNGTIRNIIGGTVFREPIICKNVPRLVPSWTDPVIIG

SEQ ID NO: 86442 - protein, 87 aa, Unknown
  Bacterial polypetide isolated from the Sargasso Sea
MNKIKVKNPLVEIDGDEMTRIIWKMIKEKFIFPYLDIDLKYFDLGIEYRDKTTDKVTVDAANAIKLYGVGVKCATITPDEERVKEFN

SEQ ID NO: 86443 - protein, 101 aa, Unknown
  Bacterial polypetide isolated from the Sargasso Sea
MIFGIESRDKTDDQITIDAANAIKQHGVGVKCATITPDEARVEEFKLKKMWRSPNGTIKNILGGTVFREPIICKNVPKLVPGMDTTNCNRQTCFWRSIPCD

SEQ ID NO: 86444 - protein, 91 aa, Unknown
  Bacterial polypetide isolated from the Sargasso Sea
MNYGLVRKWPVYLSTKNTILKAYDGRFKDLFQEVFEKEFYDKFKKANITYEHRLIDDMVACAMKWNGGFVWACKNYDGDVQSDTVAQGFGS

SEQ ID NO: 86445 - protein, 98 aa, Unknown
  Bacterial polypetide isolated from the Sargasso Sea
MSKIKVKNPIVELDGDEMTRVIWDFIKNKLILTYLDLKIEYYDLGMESRDKTEDKITVECANAIKKNGVGIKCATITPDEARVKEFNLKKMWRSPNGT

SEQ ID NO: 86446 - protein, 33 aa, Unknown
  Bacterial polypetide isolated from the Sargasso Sea
ACKNYDGDVQSDTIAQGFGSLGLMTSVLMSPAR

SEQ ID NO: 86447 - protein, 108 aa, Unknown
  Bacterial polypetide isolated from the Sargasso Sea
MHGNTIESEAAHGTVTRHYRLHQQGKETSTNPIASIFAWARGLYHRGKLDNNESLKKFVKTLEKVCIETVENGSMTKDLAMLINKNQKYLTTNEFLEIIDSNLRKSLN

SEQ ID NO: 86448 - protein, 93 aa, Unknown
  Bacterial polypetide isolated from the Sargasso Sea
LDIIDNTQAGKETSTNPIASIFAWTRGLSHRGNLDGNQELIKFASTLEKVCIETVESGSMTKDLAVLISKDQKFLTTNQFLEAIDSNLKKKLN

SEQ ID NO: 86449 - protein, 119 aa, Unknown
  Bacterial polypetide isolated from the Sargasso Sea
MAKIKVKNPVVELDGDEMTRIIWNFIKNKLILPYLDINIKYYDLGIKNRDKTSDQVTVESANAIKKIGVGIKCATITPDEIRVKEFKLKKMWRSPNGTIRNILGGTVFREPIICKNIPK

SEQ ID NO: 86450 - protein, 49 aa, Unknown
  Bacterial polypetide isolated from the Sargasso Sea
MVACAMKWNGNYIWACKNYDGDVQSDTIAQGFGSLGLMTSVLLTPDGKT

SEQ ID NO: 86451 - protein, 142 aa, Unknown
  Bacterial polypetide isolated from the Sargasso Sea
KLFMKFVDEDGKIDEKEVFQFSNQGVALSMYNVDESIRGFARACFNYGLKLKWPVYLSTKDTILKKYDGRFKEIFHEIFQNEFASDFENSKIVYEHRLIDDLVASSMKWSGKFIWACKNYDGDVQSDAVAQGFGSLGMMSSV

SEQ ID NO: 86452 - protein, 50 aa, Unknown
  Bacterial polypetide isolated from the Sargasso Sea
RLIRKAIQYAIDNHRESVTLVHKGNIMKFTEGAFRNWGYELAKEEFGDQV

SEQ ID NO: 86453 - protein, 91 aa, Unknown
  Bacterial polypetide isolated from the Sargasso Sea
KVCNPIVELDGDEMTRVFWEFITNKLILSYLDLGIEYYVLGIKNRDKTNDQVTIDCANAIKKNGVGIKCATITPDELRVKEFSLKKMWSSP

SEQ ID NO: 86454 - protein, 98 aa, Unknown
  Bacterial polypetide isolated from the Sargasso Sea
AHGTVTRHYRLHQQGKETSTNPIASIFAWARGLYHRGKMDNNEELKKFVKTLEKVCIKTVESGLMTKDLAILVGPSSKYLTTNQFLDVIDGNLKNKLN

SEQ ID NO: 86455 - protein, 118 aa, Unknown
  Bacterial polypetide isolated from the Sargasso Sea
LGLMTSVLMTPDGKTIESEAAHGTVTRHYRLHQQGKETSTNPIASIFAWARGLYHRAKLDNNEDLKKFVKTLEKVCIQTVEDGSMTKDLAILIGPSTKFLTTNQFLDEIDGNLKKKLN

SEQ ID NO: 86456 - protein, 89 aa, Unknown
  Bacterial polypetide isolated from the Sargasso Sea
MSKIKVKNPVVELDGDEMTRIIWEFIKNKLILTYLDLGIEYYDLGMKSRDNTNDQITIDSANAVKKIGVGIKCATITPDEARVEEFDLK

SEQ ID NO: 86457 - protein, 115 aa, Unknown
  Bacterial polypetide isolated from the Sargasso Sea
MSKIKVKNPVVELDGDEMTRIIWKFIKDKLILPYLDLKIEYYDLGIKSRDNTGDQITVDCANAIKKIGVGIKCATITPDEGRVKEFNLKKMWRSPNGTIRNILGGTVFREPIMCK

SEQ ID NO: 86458 - protein, 99 aa, Unknown
  Bacterial polypetide isolated from the Sargasso Sea
MADKIQIKDGKLIVPDQPIIPFIEGDGIGPDIWAAAQRVIDAAVEHTYHGARKIEWLEVLCGEKSFNKNEEWLPEETLETLRSHYVGIKGPLTTPIGGG

SEQ ID NO: 86459 - protein, 173 aa, Unknown
  Bacterial polypetide isolated from the Sargasso Sea
MAKIKVKNPVVEMDGDEMTRIIWEYIKEQLILPYLDIDIKYFDLGVIKRDETNDQITIDAAEAVKKYGVGIKCATITPDENRVEEFKLKQMWRSPNGTIRNILGGTIFRQPIICKNVPRIITNWNHPIVVARHAFGDQYRATDTLINKPGTLKMVFEPKDGSEGFTKDVYEFE

SEQ ID NO: 86460 - protein, 118 aa, Unknown
  Bacterial polypetide isolated from the Sargasso Sea
MSKIKVKNPIVELDGDEMTRVIWEFIKNKLILPYLDLGIEYYDLGMKSRDDTDDKITIDCANAIKKNGVGIKCATITPDEARVEEFKLKKMWRSPNGTIRNIIGGTVFREPIICKNIP

SEQ ID NO: 86461 - protein, 187 aa, Unknown
  Bacterial polypetide isolated from the Sargasso Sea
MPKFEKLTLPNEGEIITFNQGKPNVPNNPIVPFIRGDGTGVDIWPATQIVLDSAIKKSYGDERKINWFKVYAGDEACELYGTYNYLPQDTIEAIKLFGVAIKGPLTTPIGGGIRSLNVALRQIFDLYSCVRPCKYYSGTPSPHKNPQNLDVIVYRENTEDIYMGIEWEAEDNNCLELINHLNNIVIP

SEQ ID NO: 86462 - protein, 67 aa, Unknown
  Bacterial polypetide isolated from the Sargasso Sea
YDLGMKSRDNTDDQITIDSAKAIKKIGVGIKCATITPDEARVEEFKLKKMWRSPNGTIRKYNWRNSF

SEQ ID NO: 86463 - protein, 102 aa, Unknown
  Bacterial polypetide isolated from the Sargasso Sea
MTKIKVKNPVVELNGDEMTRVIWEFIKNKLILTYLDLGIEYYDLGIKNRDKTNDQITIDCANAIKKIGVGIKCATITPDEARVKEFNLKKMWRSPNGTIRNI

SEQ ID NO: 86464 - protein, 87 aa, Unknown
  Bacterial polypetide isolated from the Sargasso Sea
MSKIKVKNPIVELDGDEMTRVIWDFIKNKLILTYLDLKIEYYDLGMESRDKTEDKITIECANAIKKNGVGIKCATITPDEARVKEFN

SEQ ID NO: 86465 - protein, 159 aa, Unknown
  Bacterial polypetide isolated from the Sargasso Sea
MKKIKVKKPIVELDGDEMTRVIWDFIKKKLILPYIDIDIEYFDLGIKNRDKTSDKVTIDCANAIKKIGVGIKCATITPDENRVKEFNLSKMWRSPNGTIRNILGGTVFREPIICKNIPKLVPSWTNPIVIGRHAFGDQYRATDFKVPGKGKLELKWTSE

SEQ ID NO: 86466 - protein, 92 aa, Unknown
  Bacterial polypetide isolated from the Sargasso Sea
MSKIAVKNPIVELDGDEMTRIIWEFIKNKLILPYLDLGIEYYDLGMKSRDNTNDQVTVDSANAIKKNGVGIKCATITPDEERVKEFSLKKMW

SEQ ID NO: 86467 - protein, 89 aa, Unknown
  Bacterial polypetide isolated from the Sargasso Sea
EWHQQGKETSTNPIASIFAWTRGLAHRGKLDNNDELIKFSKILEDVCINCVETGSMTKDLAILIDKNQKYLTTNQFLDSIDGNLKKKLN

SEQ ID NO: 86468 - protein, 135 aa, Unknown
  Bacterial polypetide isolated from the Sargasso Sea
MSKIKVKNPVVELDGDEMTRVIWEFIKNKLILPYLDIGIEYYDLGMESRDKTNDQITVDSANAIKKVGVGIKCATITPDEARVEEFKLKKMWRSPNGTIRNIIGGTVFREPIICKNIPKLVPSWTDPVVIGRHAF

SEQ ID NO: 86469 - protein, 88 aa, Unknown
  Bacterial polypetide isolated from the Sargasso Sea
YRNHQKGIETSTNPIASIFAWTRGLSFRGEFDGNNELINFAKKLEETCIKTVESGEMTKDLAILINKDQKWLNTQDFLSAIKNNFQIN

SEQ ID NO: 86470 - protein, 191 aa, Unknown
  Bacterial polypetide isolated from the Sargasso Sea
MSYKNIKIPELGKKITLKDGVLTVPNNPIIPFIEGDGIGSDITPAMIDVVDAAVEKAYGEEKSISWMEIYCGEKSTKVYGKDEWLPDETLDALREYVVSIKGPLTTPVGGGIRSLNVSLRQILDLYVCLRPVRWFSGVPSPVKVPGDVDMVIFRENSEDIYAGVEFASDSKESAELVKILQDKFNVDQIRS

SEQ ID NO: 86471 - protein, 101 aa, Unknown
  Bacterial polypetide isolated from the Sargasso Sea
MKKIEVKTPLVEIDGDEMTRIIWQFIKDKLILPYLDIELDYYDLGVESRDRTNDKITVDSANAIKKYGVGVKCATITPDEDRVEEFKLKEMWRSPNGTIRN

SEQ ID NO: 86472 - protein, 122 aa, Unknown
  Bacterial polypetide isolated from the Sargasso Sea
MISNKKVEMKKDGLYVPDHVSIPYIEGDGIGVDIWASSSMVLNSAVEKAYAGQRSINWIEVFAGEKSFNLNGEWLPQETLDIIKDHKIAIKGPLTTPIGGGIRSLNVALRQKLDLFACVRPV

SEQ ID NO: 86473 - protein, 180 aa, Unknown
  Bacterial polypetide isolated from the Sargasso Sea
ALSLIWGIDLILKKYHGFFDEKNKCYKFKNPNNEKDIIFKDCICDAFLQNILLKPKDYDVIATTNLNGDYVSDSLAACVGGIGISPGANINYTTGEAVFEATHGTAPDIAGENIVNPSSLILSAEMMLRYLGWNEAANNIMNAIEKVIKQKTVTADFAYQMENATLCSCSEFTDLIIEKI

SEQ ID NO: 86474 - protein, 83 aa, Unknown
  Bacterial polypetide isolated from the Sargasso Sea
KETSTNPIASIFAWTRGLAHRGKLDGNDELIKFPSILEKVCIDCVENGSMTKDLAILLGPSTKFLTTNQFLDEIDRNLIKKLN

SEQ ID NO: 86475 - protein, 170 aa, Unknown
  Bacterial polypetide isolated from the Sargasso Sea
MASSKIKIPSSGDKITHNQGKLEVPDNPIIPFIEGDGIGIDITPVMKAVVDAAVEKAYSGKRKISWMEIYCGEKSVEVYGKGHWMPDETLKACEDYVVSIKGPLTTPVGGGIRSLNVALRQVLDLYVCLRPVKYFKGTPSPVKRPDLVNMVIFRENSEDIYAGVEFKSNS

SEQ ID NO: 86476 - protein, 123 aa, Unknown
  Bacterial polypetide isolated from the Sargasso Sea
MAKIKVKNPVVEMDGDEMTRIIWEYIKQQLILPYLDIDIKYFDLGVIKRDETNDQITIDAAEAVKKYGVGIKCATITPDENRVEEFKLKQMWRSPNGTIRNILGGTIFRQPIICKNVPRIITN

SEQ ID NO: 86477 - protein, 143 aa, Unknown
  Bacterial polypetide isolated from the Sargasso Sea
MSKIKVKNPIVELDGDEMTRVIWGFIKNKLILPYLDLEIKYYDLGIKNRDNTNDQITIDCAKAIKENGVGIKCATITPDELRVEEFNLKKMWRSPNGTIRNIIGGTVFREPILCKNIPKLVPSWTNPICIGRHAFGDQYRATD

SEQ ID NO: 86478 - protein, 120 aa, Unknown
  Bacterial polypetide isolated from the Sargasso Sea
MTSVLVCPDGKTFESEAAHGTVTRHYRQHQQGKSTSTNPVASIFAWTSGLTQRGNLDENQELIDFCKTLEKVCVDTVEEGTITKDLASAIHSSSNPDPSTYVSTQEFLDALTAGLQKAVN

SEQ ID NO: 86479 - protein, 78 aa, Unknown
  Bacterial polypetide isolated from the Sargasso Sea
MTKIKVKNPVVELDGDEMTRIIWDLIKKKLILPYLDIDLHYYDLGVEYRDQTNDQVTIDAAEAIQKHGVGVKCATITP

SEQ ID NO: 86480 - protein, 92 aa, Unknown
  Bacterial polypetide isolated from the Sargasso Sea
RHFRIHQQGKETSTNPIASIFAWTRGLSHRGKLDGNNELIKFANTIEQVCIKCVENGSMTKDLAILIGPSSKYLTTNQFLDEIDKNLKKKLN

SEQ ID NO: 86481 - protein, 119 aa, Unknown
  Bacterial polypetide isolated from the Sargasso Sea
MESKVVVPAEGKKITLQNGKLNVPENPIIPFIEGDGIGVDVTPPMIKVVDAAVEKAYKGERKISWMEIYTGEKSTQVYGQDVWLPAETLDLIREYRVAIKGPLTTPVGGGIRSLNVALR

SEQ ID NO: 86482 - protein, 274 aa, Unknown
  Bacterial polypetide isolated from the Sargasso Sea
MAENLKRTDLINAIEETRKSFDTDNPTVPFIEGDGIGIDIWPAAKKVFDAAVEKTYKNDRKINWIEVLAGQKAYDTTSEWLPDKTLETFNEYGVGIKGPLTTPVGEGIRSINVAIRQELDLYVCLRPIKYFKGIQTPTKNPQDVDITLFRENTEDVYAGKELENSSEDVEKLNNFLKQEFGWDIRIDSGIGIKPISQTASERLIRAALNYAVENDKKNVALVHKGNIMKFTEGAFRKWGYDLVKSEFSDVAVSWEDCGGDPGDKILVQDVIADA

SEQ ID NO: 86483 - protein, 195 aa, Unknown
  Bacterial polypetide isolated from the Sargasso Sea
LVHKGNIMSFTEGAFRKWGYDLVKSEFSDVAVSWEDCGGDPGDKILVQDVIADAFLQQILIKPQMFDVIATTNLNGDYASDALAAQIGGIGISPGGNINYENGKAVFEATHGTAPKYAGQDKTNPGSLILSGVMMFRYMGWNSAADLIVNSMEKTILEGKVTYDLARGRSVKKILSSSEFANALISNMKTSKKEK

SEQ ID NO: 86484 - protein, 190 aa, Unknown
  Bacterial polypetide isolated from the Sargasso Sea
SVQANARMIEPGYDSLTPEKKADIDAEVQAVIDAIGSSHGGGKWRSMVLVDDRIADSIFQQIQTRPQEYSILATLNLNGDYISDAAAAMVGGLGMAPGANIGENAAIFEATHGTAPKHAGLDRINPGSVILSGVMMLEFLGWQEAADLVTKGLSAAIADKQVTYDLARLMEPQVDPVSCSGFAEAIIQRF

SEQ ID NO: 86485 - protein, 106 aa, Unknown
  Bacterial polypetide isolated from the Sargasso Sea
GKIAEAEAAHGFVTRHYRQHQQGKETSTNPIASIFAWTRGLAHRGQLDGNDELIKFSDTLEKVCIETVESGSMTKDLAILISKSQKFLTTNQFLEAIDSNLKKKLN

SEQ ID NO: 86486 - protein, 69 aa, Unknown
  Bacterial polypetide isolated from the Sargasso Sea
MAKIKVKNPVVELDGDEMTRIIWSFIKDKLIKPYLDIELKYFDLGMKNRDKTNDQVTIDCAKAIQKYGA

SEQ ID NO: 86487 - protein, 189 aa, Unknown
  Bacterial polypetide isolated from the Sargasso Sea
MAQFEKLTAPSQGTPIRFENGQPVVADHPIIPFIRGDGTGVDIWPATQKVLDAAVAKAYGGAKTIEWFKVYAGDEACDLYGTYQYLPEDTLEAIRTYGVAIKGPLTTPVGGGIRSLNVALRQIFDLYSCVRPCRYYEGTPSPHKRPQDLDVIVYRENTEDIYMGVEWEADDAVGQELRKHLNEVVIPAN

SEQ ID NO: 86488 - protein, 84 aa, Unknown
  Bacterial polypetide isolated from the Sargasso Sea
GKETSTNPIASIFAWTRGLAHRGKLDGNEQLIKFAETLEKVCVDCVEEGSMTKDLAILIGPSTKYLTTNQFLDTLDGKLRQKLN

SEQ ID NO: 86489 - protein, 176 aa, Unknown
  Bacterial polypetide isolated from the Sargasso Sea
FRDWGYELCKEEFDGDDLDGGPWHYFINPNNGRKIIVKDVICDAFLQQILLRPREYDVIATMNLNGDYLSDALAAMVGGIGIAPGANIGDEAAMFEATHGTAPKYAGLDKVNPLSLILSAEMMLRHINWNEAADLLINSIEKTIQDRYVTYDFERLMDNATLVSCSGFAKEMIKRM

SEQ ID NO: 86490 - protein, 202 aa, Unknown
  Bacterial polypetide isolated from the Sargasso Sea
MAKIKVKNPVVEMDGDEMTRIIWKYIKEQLILPYLDIDIKYFDLGVIKRDETNDQITIDAAQAVKKYGVGIKCATITPDENRVDEFKLKQMWRSPNGTIRNILGGTIFRQPIICKNVPRIITNWNHPIVVARHAFGDQYRATDTLIDKPGTLKMVFEPKDGSEGFTKDVYEFEKSGVALSMYNLDNSIKDFARACFNYGLNL

SEQ ID NO: 86491 - protein, 155 aa, Unknown
  Bacterial polypetide isolated from the Sargasso Sea
MSKIKVKNPIVELNGDEMTRIIWEFIKNKLILPYLDLSIDYYDLGIKNRDKTDNQITIDSANAIKKIGVGIKCATITPDEERVKEFNLKKMWRSPNGTIRNIIGGTVFREPIICKNIPKLVPSWKDPVVIGRHAFGDQYRATDFKVPGKGKMEIK

SEQ ID NO: 86492 - protein, 197 aa, Unknown
  Bacterial polypetide isolated from the Sargasso Sea
MTKIKVKNPIVELDGDEMTRVIWKFIKNKLILPYLDLGIEYYDLGIESRDKTEDQITIDSAKAIKRVNVGIKCATITPDEGRVKEFNLKKMWRSPNGTIRNIIGGTVFREPILCSNIPKLVPSWTNPICIGRHAFGDQYRATDFTVPGKGKLEIKWTSEDGKEKKEFEVFNFPGPGIALSMYNLDKSIKDFARACMN

SEQ ID NO: 86493 - protein, 156 aa, Unknown
  Bacterial polypetide isolated from the Sargasso Sea
MPKFEKLTLPNEGERITFNQGKPNVPNNPIVPFIRGDGTGVDIWPATQIVLDSAIKKSYGDERKINWFKIYAGDEACELYGTYNYLPQDTIEAIRHFGIAIKGPLTTPIGGGIRSLNVALRQIFDLYSCVRPCKYYSGTPSPHKNPQKFRRYVYRE

SEQ ID NO: 86494 - protein, 160 aa, Unknown
  Bacterial polypetide isolated from the Sargasso Sea
MTYKNIKVPKEGTKISYKKGKLIVPSNPIIPFIEGDGIGVDITPPMINVVNEAVKIAYNGDKKIEWMEVYCGEKATKVYSKDDWLPDETIKALKEFVISIKGPLTTPVGGGIRSLNVSLRQILDLYVCLRPIRYFNGVPSPVKRPQDTDMVIFRENSEDI

SEQ ID NO: 86495 - protein, 108 aa, Unknown
  Bacterial polypetide isolated from the Sargasso Sea
MEKIKVKNPVVEMDGDEMTRIIWKFIKDKLILPYIDIDLKYYDLGVQNRDSTEDQVTIDSAEAVKKYGVGIKCATITPDEDRVNEFNLKKMWRSPKWNNKKYFRWNYF

SEQ ID NO: 86496 - protein, 741 aa, Unknown
  Bacterial polypetide isolated from the Sargasso Sea
MKDNSPTIIYTETDEAPALATLSLLPIIKTFTDAAGVAVETRDISLSGRVIANFPEKLTDAQKIGDHLAELGELANQPEANIIKLPNISASIPQLKACILELQQKGYDIPNYPDEPKTDEEKSIKARYDKIKGSAVNPVLREGNSDRRAPLSVKNFAKKNPHSMGKWTKESQSHVAHMSEGDFYGSEQSVTLANADTVNIVLSQKDGQEVVLKSGLKLLAGEIIDASVMSKKALVSFFEREIANAKAENVLLSLHLKATMMKVSDPIMFGHAVKVFFKPVFDKHASLFAELGVDVNNGFGDVYAKIAGLPADVRAQIEADIAAVYAERPALAMVDSDKGITNLHVPSDIIIDASMPAAIRSSGQMWGPDGKLHDTKALIPDRCYAGVYQETIAFCKEHGAFDPSTMGSVPNVGLMAQKAEEYGSHDKTFEIPADGVVNVIDASGKVLMSHNVEAGDIWRMCQVKDAPIRDWVKLAVRRARLSNTPAVFWLDANRAHDAQLIAKVKQYLPEHDTNGLEISIMSPEEATRFSLVRIKEGKDTISVTGNVLRDYLTDLFPILELGTSAKMLSIVPLMNGGGLFETGAGGSAPKHVQQVEKEGHLRWDSLGEFLALAASLEHLSQTVGNPKAQVLADTLDQAIGQFLDSNKSPSRRVGELDNRGSHFYLAMYWAQALAAQTKDEQLQAHFIPLAHALSANEQVIVAELNNAQGAPVDLGGYYRLDAAKAEKAMRPSETLNKLLIA

SEQ ID NO: 86497 - protein, 153 aa, Unknown
  Bacterial polypetide isolated from the Sargasso Sea
VTIKNPTNGKNIIIKDVICDAFLQQILTRPKEYDVIATMNLNGDYVSDALAACVGGIGIAPGANIGDESALFEATHGTAPKYAGQDKVNPGSLILSAEMMLRHLGWVEAADLIISSMEAAITDKMVTYDFERLMDDAQLVSCSGFAKEMIKRM

SEQ ID NO: 86498 - protein, 228 aa, Unknown
  Bacterial polypetide isolated from the Sargasso Sea
MGENLNRADLESAIQRTRESFDTDNPTVPYIEGDGIGVDIWPAAQGVFDAVVEKAYKGERKINWLEVLAGQKAFDNVNEWLPEETTNKFEEYGVGIKGPLTTPVGEGIRSINVSIRQIMDLYVCLRPIKYFNGIQTPTKNPQDVDITLFRENTEDVYAGKELEEGSEDVQKLNKFLKSEFGWEIREDSGIGIKPISKTATERLVRASLNYAVENNKKNLALVHKGNIM

SEQ ID NO: 86499 - protein, 132 aa, Unknown
  Bacterial polypetide isolated from the Sargasso Sea
MSKITVKNPIVELDGDEMTRVIWDFIKNKLILTYLDLKIDYYDLGMESRDKTEDKITIECANAIKRNGVGIKCATITPDEARVREFNLKKMWRSPNGTIRNIIGGTVFREPIICKNIPKLVPSWTDPLIIGR

SEQ ID NO: 86500 - protein, 266 aa, Unknown
  Bacterial polypetide isolated from the Sargasso Sea
MSKSNIKVPATGEKITYKNNKLVVPDNPIIPYIEGDGIGVDITPVMLNVIDAAVEKAYDGKRKISWMEIYCGEKSVKIYGDDEWLPDETLQTCKDYKVSIKGPLTTPVGGGIRSLNVAIRQKLDLYVCLRPVKYFNGTPSPVRRPDLVDMVIFRENSEDIYAGVEFESNTDAANKLIKVLQDDFGVEKIRFTENCGIGIKPVSEEGTKRLVRKAYEYAIQNEKDSVTLIHKGNIQKFTEGAFMDWGYELAREEMAESLSMADLGIH

SEQ ID NO: 86501 - protein, 572 aa, Unknown
  Bacterial polypetide isolated from the Sargasso Sea
AKYDKVKGSAVNPVLREGNSDRRAPKSVKQYAKNNPHSMGDWSKDSLSHVSTMSEGDFFGSEKSITVAEATTVDIRHTNAAGETVLLKQDIALLPGEVIDAAVMSKVALRAFLEQNLVEAKQQGVLFSVHLKATMMKVSDPILFGHAVSVFFKDVFEKHGALLDDIGVNPNNGMGDLLKRLESLPDEEKNAVLATIDQCYAQGPDIAMVNSDKGITNLHVPSDVIIDASMPAAIRTSGQMWNAAGKLQDMKAIIPDRSYSGVYQTVIDFCKENGAFDPTTMGTVPNVGLMAQKAEEYGSHDKTFELSSGGRVEVVDAAGNVLLSHEVEEGDIWRMCQVKDAPVQDWVKLAVSRARATEVPAVFWLDKNRAHDAELIKKVEKYLKDHDTEGLDISIQAPVDATLFSCKRAKEGKDTISVTGNVLRDYLTDLFPILELGTSAKMLSIVPLMNGGGLFETGAGGSAPKHVQQFEKEGHLRWDSLGEFLALAASLEHMSVTTGDRTAAILAAALDQATGKFLLEGKSPSRKVNEIDNRGSHFYLAKYWAEALASQEEDQTLKVKFDQLASSLRANE

SEQ ID NO: 86502 - protein, 742 aa, Unknown
  Bacterial polypetide isolated from the Sargasso Sea
MSTSPKIIYTLTDEAPALATYSLLPIVKAFTRSSGVAVETRDISLAGRIIAAFADILPPEQKGSDDLAELGQLTLKPEANIIKLPNISASVPQLKAAIAELQAQGYKLPAYPEDPSTDEEKAVKARYDKIKGSAVNPVLREGNSDRRAPLSVKNYARKHPHKMGAWKATSKAHVAHMTEGDFYGSEKSALIADAGSVKIELTTTDGAKKVLKEKTAVKAGEVIDASVMSRNALRSFIEAQIADAKAQDVLFSVHLKATMMKVSDPILFGHFVSVFYRDALAKHADVLAQVGFNPNNGIGDLYARLKDLPADTREAIEADVKAEYAVRPRLAMVNSDKGITNLHVPSDVIVDASMPAMIRDSGGMWGPDGQLYDAKAVIPDRCYAGVYQAVIEDCKQHGAFDPVTMGSVPNVGLMAQAAEEYGSHDKTFQIPADGVVRVTDEAGNVLLEHAVEAGDIWRMCQTKDAPVQDWVKLAVNRARATGAPAVFWLDPARAHDAQIIAKVERYLKDHDTNGLDIRVMTPVDATRFSLERIRAGKDTISVTGNVLRDYLTDLFPIMELGTSAKMLSIVPLMAGGGMFETGAGGSAPKHVQQFVEEGFLRWDSLGEFLALAASLEHLGNAYRNPKAVVLAKTLDQATGKFLDENKSPARKVGGLDNRGSHFYLCLYWAQALAEQTEDAALKAQFEGVAKALSDSEARILEELAAAQGKAQAIGGYYRPNVDLTSQAMRPSATLNGIVDAVA

SEQ ID NO: 86503 - protein, 741 aa, Unknown
  Bacterial polypetide isolated from the Sargasso Sea
MKDNSPTIIYTETDEAPALATLSLLPIIKTFTDAAGVAVETRDISLSGRVIANFPEKLTDAQKIGDHLAELGELANQPEANIIKLPNISASIPQLKACILELQQKGYDIPNYPDEPKTDEEKSIKARYDKIKGSAVNPVLREGNSDRRAPLSVKNFAKKNPHSMGKWTKESQSHVAHMSEGDFYGSEQSVTLANADTVNIVLSQKDGQEVVLKSGLKLLAGEIIDASVMSKKALVSFFEREIANAKAENVLLSLHLKATMMKVSDPIMFGHAVKVFFKPVFDKHAPLFAELGVDVNNGFGDVYAKIASLPADVRAQIEADIAAVYAERPALAMVDSDKGITNLHVPSDIIIDASMPAAIRSSGQMWGPDGKLHDTKALIPDRCYAGVYQETIAFCKEHGAFDPSTMGSVPNVGLMAQKAEEYGSHDKTFEIPADGVVNVIDASGKVLMSHNVEAGDIWRMCQVKDAPIRDWVKLAVRRARLSNTPAVFWLDANRAHDAQLIAKVKQYLPEHDTNGLDISIMSPEEATRFSLVRIKEGKDTISVTGNVLRDYLTDLFPILELGTSAKMLSIVPLMNGGGLFETGAGGSAPKHVQQVEKEGHLRWDSLGEFLALAASLEHLSQTVGNPKAQVLADTLDQAIGQFLDSNKSPSRRVGELDNRGSHFYLAMYWAQALAAQAKDEQLQAHFIPLAHALSANEQVIVAELNNAQGAPVDLGGYYRLDAAKAEKAMRPSETLNKLLIA

SEQ ID NO: 86504 - protein, 164 aa, Unknown
  Bacterial polypetide isolated from the Sargasso Sea
MSKIKVKNPVVELDGDEMTRVIWDFIKNKLILPYIDLDIKYYDLGIKSRDKTSDQITIDSANAIKKYGVGIKCATITPDETRVKEFSLNKMWRSPNGTIRNILGGTVFREPILCKNIPKLVPSWTNPICIGRHAFGDQYRATDFKVPGKGKLEMKWISEDGKEK

SEQ ID NO: 86505 - protein, 153 aa, Unknown
  Bacterial polypetide isolated from the Sargasso Sea
MAKIKVKNPVVEMDGDEMTRIIWEYIKEQLILPYLDIDIKYFDLGVIKRDETNDQITIHAAEAVKKYGVGIKCATITPDENRVEEFKLKQMWRSPNGTIRNILGGTIFRQPIICKNVPRIITNWNHPIVVARHAFGDQYRATDTLIYKPGTLK

SEQ ID NO: 86506 - protein, 92 aa, Unknown
  Bacterial polypetide isolated from the Sargasso Sea
RHFRQHQQGKETSTNPIASIFAWTRGLAHRGKLDSNDELIKFSNTLEKVCIDCVENGSMTKDLAILVGPSTKYLTTNQFLDEIDHNLLKSLN

SEQ ID NO: 86507 - protein, 252 aa, Unknown
  Bacterial polypetide isolated from the Sargasso Sea
MLKDYQGDKRHVTLVHKGNIMKYTEGAFRDWGYELAVNEFREDCITERESWILDNIHKNPEITIENNARKIEPGFDKLTNNKKAFICEEIKEVIASISNSHGDGKWRELILVDDRIADSIFQQIQTRPQEYSILATLNLNGDYVSDAAAAIVGGLGMAPGANIGDNAAIFEATHGTAPKHAGLNKINPGSVILSGVMMLEYFGWDEAANLITNGLSKAIEQKKVTYDLARLMEPKVEPLSCSSFAEEIISNF

SEQ ID NO: 86508 - protein, 215 aa, Unknown
  Bacterial polypetide isolated from the Sargasso Sea
MSKIKVKNPIVELDGDEMTRVIWEFIKNKLILPYLDLKIEYYDLGIKSRDKTSDQITTDCAKAIKKIGVGIKCATITPDEERVKEFNLKKMWRSPNGTIRNILGGTVFREPIICKNIPKLVPSWTNPICIARHAFGDQYRATDFKVPGKGKLEIKWTSEDGKEKKEFEVFNFPGPGVALSMYNLDQSIKDFARACLNYGLNRRWPVYLSTKNTIF

SEQ ID NO: 86509 - protein, 119 aa, Unknown
  Bacterial polypetide isolated from the Sargasso Sea
MADKITIKDGKLIVPDNPIIPFIEGDGIGPDIWAASQRVIDAAVEHTYHGARKIEWLEVLCGEKSFNKNGEWLPEETLETLRSHLVGIKGPLTTPIGGGIRSLNVALRKELDLYACVRP

SEQ ID NO: 86510 - protein, 257 aa, Unknown
  Bacterial polypetide isolated from the Sargasso Sea
MSKIKVANPIVEIDGDEMARIIWKFIKEKLILDYLDLDIVYYDLGIESRDKTDDQITIDAANAIKKYNVGIKCATITPDEQRVEEFSLSRMYKSPNGTIRNIVGGTVFREPIICRSIPRYVQGWSRPICIGRHAFGDQYRATDVITHGPGKLEMKFTPKNGKESKTWEVYNFEEDGIAMSMYNIDSSIYGFARSCMNMALTKRWPLYLSTKNTILKAYDGRFKDIFQEVYDNEFKDRFENENITYEHRLIDDMVAAA

SEQ ID NO: 86511 - protein, 115 aa, Unknown
  Bacterial polypetide isolated from the Sargasso Sea
MTSVLMTPDGKTIESEAAHGTVTRHYRLHQKGEETSTNPIASIFAWARGLYHRAKLDNNEDLKKFVKTLEKVCIQTVEDGLMTKDLAILISSSTKYLTTNQFLNEIDGKLKNKLN

SEQ ID NO: 86512 - protein, 646 aa, Unknown
  Bacterial polypetide isolated from the Sargasso Sea
MTEEQKIIYTETDEAPRLATFSLLPIIKAFTDSAGVTVETRDISLAGRILSAFPEYLKEEQRIPDDLAELGALTLERSANIIKLPNISASNPQMHEAIKELQDQGFAIPDYPEDATEGEALEIRSRYDAIKGSAVNPVLREGNSDRRAPISVKNFAKKFPHKMGEWSPDSKTSVAHMDSGDFYESEKSFIAENESALTITFIGEDETRIVLSEGIKVTKGEVVDAAAMSKKKLCSFFRKEIDSTPDGVLFSLHLKATMMKVSDPIIFGHAVREYYAKALSENEEVLSQLAIDPNNGIGDVYEKIEFLSDADKEKIKADLDSCLEKGPDLAMVDSDRGITNLHVPSDVIVDASMPAAIRESGKMWGPDGELHDMKAVIPDRCYARVYQAVIEDCQEHGAFDPTTLGTVPNVGLMAQKAEEYGSHDTTFESPGIGRIEVEMAGVGVVLSHSVEESDIWRLCRVKHAAIENWFNLALERASLTGWPLVFWLDKNRAHDARLIEKIDHFLRTHEGNTPELEILAPEEATKYSLKRMRAGQNTISVTGNVLRDYLTDLFPIMELGTSAKMLSIVPLINGGGLFETGAGGSAPKHVQQFEKEGHLRWDSLGEFLALAASLEHLARVFDNKPAALLATTLDEAIAKFLESNKA

SEQ ID NO: 86513 - protein, 99 aa, Unknown
  Bacterial polypetide isolated from the Sargasso Sea
QLMEQLQDIIECINKGKETSTNPIASIFAWTRGLAHRGKLDGNDDLIKFANTIEQVCIDCVESGSMTKDLAILVGPSSKYLTTNQFLDEIDNNLKKKLN

SEQ ID NO: 86514 - protein, 64 aa, Unknown
  Bacterial polypetide isolated from the Sargasso Sea
KEEFGWEIRTDSGIGIKPISQTASERLIRASLNYAVENNKKNVAIVHKGNIMKYTEGAFRKMGL

SEQ ID NO: 86515 - protein, 155 aa, Unknown
  Bacterial polypetide isolated from the Sargasso Sea
TFKNPNTGKDIVIKDVICDAFLQQCLLRPADYDVLATPNLNGDYLSDALAAQVGGIGIAPGANLGDEVAVFEATHGTAPKYAGQDRVNPGSLILSAEMMLRHMGWVEAADLIIEAMQKTISKKRVTYDFARLIDDAEEVSCSKFGDLLIKRIQKQ

SEQ ID NO: 86516 - protein, 113 aa, Unknown
  Bacterial polypetide isolated from the Sargasso Sea
MADKIQIKDGKLIVPDQPIIPFIEGDGIGPDIWAAAQRVIDAAVEHTYHGARKIEWLEVLCGEKSYDKNGEWLPEETLETLQSHLVGIKGPLTTPIGGGIRSLNVALRKELDL

SEQ ID NO: 86517 - protein, 96 aa, Unknown
  Bacterial polypetide isolated from the Sargasso Sea
SVVIGRHAFGDQYRATDFKVPGKGKMEVKWTSEDGKDEIKYEVFNFTGPGVALSMYNLDKSIEDFARSCFSYGLIKKWPVYLSTKNTILKEVRWTF

SEQ ID NO: 86518 - protein, 267 aa, Unknown
  Bacterial polypetide isolated from the Sargasso Sea
VSKTGSQRHIRKAIEHAKRLSGDKRHVTLVHKGNIMKYTEGAFRDWGYELAVNEFREDCITERESWILDNIQKNPEITIENNGRKIEPGFDKLTNNKKAFICEEIKEVIASISNSHGDGKWRKLVLIDDRIADSIFQQIQTRPQEYSILATLNLNGDYVSDAAAAIVGGLGMAPGANIGDNAAIFEATHGTAPKHAGLNKINPGSVILSGVMMLEYFGWNEAANLITNGLSKAIEQKKVTYDLARLMEPKVEPLSCSSFAEEIISNF

SEQ ID NO: 86519 - protein, 329 aa, Unknown
  Bacterial polypetide isolated from the Sargasso Sea
MAQFEKLTAPSQGTPIRFENGQPVVADNPIIPFIRGDGTGVDIWPATQKVLDAAVAKAYGGAKRIEWFKVFAGDEACDLYGTYQYLPEDTLEAIRSYGVAIKGPLTTPVGGGIRSLNVALRQIFDLYSCVRPCRYYEGTPSPHKRPQDLDVIVYRENTEDIYMGVEWEADDAVGQELRKHLNEVVIPANGKLGKRQIPEGSGIGIKPVSKHGSQRHIRKAIQHALRLEGSKRHVTLVHKGNIMKFTEGAFRDWGYELATTEFRDVCITERESWILGNLEKDSDLSVQANARMIEPGYDSLTPEKKADIDAEVQAVIDAIGSSHGGGKWK

SEQ ID NO: 86520 - protein, 292 aa, Unknown
  Bacterial polypetide isolated from the Sargasso Sea
MSKILVKNPVVELDGDEMTRIIWDFIKQKLILPYLDIDLKYYDLSVQNRDQTNDEITVEAAKAIKKFGVGIKCATITPDDNRVSEFKLKKMWRSPNGTIRNILDGTVFRQPIICKNIPRIVRTWDAPIVVGRHAFGDQYKATEMKINKPGKLFMKYVDEDGKIEEKEVFQFQNQGVALSMYNIDESIRGFARACFNYGLKLKWPVYLSTKDTILKKYDGRFKEIFNEIFRKEFKSDFENNQIAYEHRLIDDLVASSMKWSGNFIWACKNYDGDVQSDAVAQGFGSLGMMSSV

SEQ ID NO: 86521 - protein, 264 aa, Unknown
  Bacterial polypetide isolated from the Sargasso Sea
MPKIHVKNPIVELDGDEMTRVIWEFIKNKLILPYLELDIKYYDLGIKSRDKTSDKITVDCAHAIKKYGVGIKCATITPDEGRVEEFNLKKMWRSPNGTIRNILGGTVFREPILCKNIPKLVPSWKNPICIGRHAFGDQYRATDFQVPGKGKLEIKWTSEDGKEKKEYEVFNFPGPGIALSMYNLDQSIRDFARACMNYGLNRKWPVYLSTKNTILKKYDGRFKDLFQEIFETEFKEKFKERNITYEHRLIDDMVACAMKWNGNY

SEQ ID NO: 86522 - protein, 307 aa, Unknown
  Bacterial polypetide isolated from the Sargasso Sea
INVRIRQKLDLFACVRPIKYFPGTSTPMAESGLTDMVVFRENTEDLYSGIEWEPNSPGAKRIIDFINKELGRSPFRFENNCGIGIKPVSEEGTKRLIRMAIDYSLAMNKSSITIVHKGNIMKYTEGAFRDWAYDVVTNEYNGIIQKDNTYIIENSEFNSEIIVKDCIADNFLQQIILAPEQHDVIATLNLNGDYISDALAAQVGGIGMAPGGNIGDGCAVFEATHGSAEPFAGKNRVNPGSIILSGEMMLRYLGWTEAADLVIKGVKGAIQKKQLTYDLARARAGKRLIRVKTSEKHKTIDVKEEIA

SEQ ID NO: 86523 - protein, 334 aa, Unknown
  Bacterial polypetide isolated from the Sargasso Sea
ISVPETGEIIVVNADNSLSVPDNPIIPYIEGDGIGVDISPVMIAVVDAAVAKAYDGGRQISWMEIYTGEKAAELYDGDWFPEETLDAIKTYSVAIKGPLTTPVGGGFRSLNVALRQELDLYTCLRPVRWFEGVPSPVKNPGDCNMVIFRENSEDIYAGIEYQAGTDEAQKVVDFIIKEMGATKIRFPENVGIGIKPVSAEGTQRLVRKAIQYAIDQDLPSVTLVHKGNIMKFTEGAFRDWGYELAQQEFSGELLDGGPWVSIKNPRTGGDILIKDVIADAMLQQVLTRPRDYSVVATLNLNGDYLSDALAAQVGGIGIAPGANLSDTVALFEAT

SEQ ID NO: 86524 - protein, 118 aa, Unknown
  Bacterial polypetide isolated from the Sargasso Sea
MSKIKVKNPVVELDGDEMTRIIWEFIKNKLILPYLDLGIEYYDLGMKSRDNTDDQITVDSANAIKKIGVGIKCATITPDEARVEEFDLKKMWRSPNGTIRNIIGGTVFREPIICKNIP

SEQ ID NO: 86525 - protein, 323 aa, Unknown
  Bacterial polypetide isolated from the Sargasso Sea
YDGKRKISWMEIYCGEKSVKIYGNDEWLPDETLQACKDYKVSIKGPLTTPVGGGIRSLNVAIRQKLDLYVCLRPVKYFDGTPSPVRRPDLVDMVIFRENSEDIYAGVEFESNTDAANKLIKVLQDDFGVEKIRFTENCGIGIKPVSEEGTKRLVRKAYEYAIQNEKDSVTLIHKGNIQKFTEGAFMDWGYELAREEFGGEPLDGGPWHTFKNPNTGKDIIVKDVICDAFLQQCLLRPADYDVLATPNLNGDYLSDALAAQVGGIGIAPGANLGDEVAVFEATHGTAPKYAGQDKVNPGSLILSAEMMLRHIGWVEAADLIISA

SEQ ID NO: 86526 - protein, 347 aa, Unknown
  Bacterial polypetide isolated from the Sargasso Sea
TRVIWEFIKNKLILPYLDLGIEYYDLGMKSRDDTDDKITIDCANAIKKNGVGIKCATITPDEARVEEFKLKKMWRSPNGTIRNIIGGTVFREPIICKNIPKLVPSWTDPLIIGRHAFGDQYRATDFLVPGKGKLEVKWTSEDGSDEKKYEVFDFPGPGIALSMYNLDKSIEDFARSCFNYGLIKKWPVYLSTKNTILKKYDGRFKDIFQNVFEKDFKSEFEKNNITYEHRLIDDMVACAMKWHGKYIWACKNYDGDVQSDTVAQGYGSLGLMTSVLLAPDGRTMEAEAAHGTVTRHFRMHQQGKETSTNPIASIFAWTRGLAHRGKLDTNDELIKFAKTLEEVCVES

SEQ ID NO: 86527 - protein, 131 aa, Unknown
  Bacterial polypetide isolated from the Sargasso Sea
MFSQTRVAQGYGSLGLMTSVLLAPDGRTMEAEAAHGTVTRHFRIHQQGKETSTNPIASIFAWTRGLAHRGKLDSNDELIKFAKTLEEVCVESVESGSMTKDLAILIGPSTKYLTTNQFLDVIDGSLKQKLN

SEQ ID NO: 86528 - protein, 199 aa, Unknown
  Bacterial polypetide isolated from the Sargasso Sea
MAKIKVKNPVVELDGDEMTRIIWSFIKGKLIKPYLDVNIKYFDLGMENRDKTNDQVTIDCAKAIQKYGAGVKCATITPDEARVKEFKLKKMWRSPNGTIRNIVGGTIFREPIICKNVPRLVPHWTESVIVGRHAFGDQYRATDFKVPGKGKMTIKWESEDGKDKIEHEVFKFNESGIALSMYNLDNSIKDFARACLNYG

SEQ ID NO: 86529 - protein, 85 aa, Unknown
  Bacterial polypetide isolated from the Sargasso Sea
MAKIKVKNPVVELDGDEMTRIIWSFIKDKLIKPYLEIDLKYFDLGMENRDITNDQVTIDCAKAIQQYGAGVKCATITPDEARVKE

SEQ ID NO: 86530 - protein, 275 aa, Unknown
  Bacterial polypetide isolated from the Sargasso Sea
MPKFEKLTLPNEGEIITFNQGKPNVPNNPIVPFIRGDGTGVDIWPATQIVLDSAIKKSYGDERKINWFKVYAGDEACELYGTYNYLPQDTIEAIKHFGVAIKGPLTTPIGGGIRSLNVALRQIFDLYSCVRPCKYYSGTPSPHKNPQNLDVIVYRENTEDIYMGIEWEAEDNDCLELINHLNNFVIPKSKNLKNRSIPNGSGIGIKPVSKSGSQRHIRKAIEHAKRLSGDKRHVTLVHKGNIMKYTEGAFRDWGYELAVNEFRKDCITERESWIL

SEQ ID NO: 86531 - protein, 291 aa, Unknown
  Bacterial polypetide isolated from the Sargasso Sea
IRGDGTGVDIWPATQIVLDSAIKKSYGDERKINWFKVYAGDEACELYGTYNYLPQDTIEAIKHFGVAIKGPLTTPIGGGIRSLNVALRQIFDLYSCVRPCKYYSGTPSPHKNPQNLDVIVYRENTEDIYMGIEWEAEDNNCLELINHLNNVVIPKSKNLKNRSIPNGSGIGIKPVSKSGSQRHIRKAIEHAKRLSGDKRHVTLVHKGNIMKYTEGAFRDWGYELAVNEFREDCITERESWILDNIQKNPEITIENNARKIEPGFDKLTNNKKAFICEEIKEVIASISNSHG

SEQ ID NO: 86532 - protein, 342 aa, Unknown
  Bacterial polypetide isolated from the Sargasso Sea
LPYVDIDIKYYDLGVTIRDNTDDQITIDAAEAVKKYRVGIKCATITPDEDRVKEFNLKKMWRSPNGTIRNILGGTIFRQPIICKNVPRIVTNWNKPIVVARHAFGDQYRATDTLISKPGKLKMVFEPSDGSEGFTKDVYNFKKEGIALSMYNLDQSIIDFARACFNYGLELGWPVYLSTKNTILKVYDGRFKDLFEDVFQTEFAEKFKEKNIVYEHRLIDDMVATALKWEGNFIWACKNYDGDVQSDSVAQGYGSLGLMTSVLMTPDGKTVEAEAAHGTVTRHYRNHQQGLETSTNPIASIFAWTRGLQFRGKFDDNINLVNFAKSLEDTCINTVQSGKMTK

SEQ ID NO: 86533 - protein, 229 aa, Unknown
  Bacterial polypetide isolated from the Sargasso Sea
MSKLKVKNPIVELDGDEMTRVIWDFIKNKLILTYLDLKIEYYDLGMESRDKTEDKITIECANAIKKNGVGIKCATITPDEARVKEFNLKKMWRSPNGTIRNIIGGTVFREPIICKNIPKLVPSWTDPLIIGRHAFGDQYRATDFTVPGKGKLEIKWTAEDGTDERKYEVFNFPGPGIALSMYNLDKSIEDFARSCFNYGLIKKWPVYLSTKNTILKRYDGRFKDIFQEV

SEQ ID NO: 86534 - protein, 283 aa, Unknown
  Bacterial polypetide isolated from the Sargasso Sea
MSKIKVKNPIVELDGDEMTRVIWDFIKNKLILPYLELDIKYYDLGIKSRDNTSDKITIDCAHAIRKYGVGIKCATITPDEARVEEFKLKKMWRSPNGTIRNILGGTVFREPILCKNIPKLVPSWENPICIGRHAFGDQYRATDFQVPGKGKLEIKWTSEDGKDKKEFEVFNFPGPGVALSMYNLDQSIIDFARSCMNYGLNRKWPVFLSTKNTILKKYDGRFKDLFQEVYEKEFKEKFKEREITYEHRLIDDMVACAMKWNGNYIWACKNYDGDVSSDTVCSG

SEQ ID NO: 86535 - protein, 311 aa, Unknown
  Bacterial polypetide isolated from the Sargasso Sea
SPNGTIRNIIGGTVFREPIICKNIPKLVPSWTDPVIIGRHAFGDQYRATDFKVPGKGKMEVKWTSEDGKDEIKYEVFNFTGPGVALSMYNLDKSIQDFARSCFSYGLIKKWPVYMSTKNTILKQYDGRFKDIFQEVFENEYKKEFEKNNLTYEHRLIDDMVACAMKWSGKYIWACKNYDGDVQSDTMAQGYGSLGLMTSTLLTPDGKVMEAEAAHGTVTRHYRMHQQGKETSTNPIASIFAWTRGLAHRGKLDNNQELINFAQTLEKVCIECVENGSMTKDLAILVGPDSKYLTTNQFLDEIDSNLKKKLN

SEQ ID NO: 86536 - protein, 242 aa, Unknown
  Bacterial polypetide isolated from the Sargasso Sea
MSYKNIKIPESGKKITLKDGVLTVPNNPIIPFIEGDGIGSDITPAMIEVVDAAVEKAYGKEKSISWMEIYCGEKSTKVYGKDEWLPDETLDALREYVVSIKGPLTTPVGGGIRSLNVSLRQILDLYVCLRPVRWFTGVPSPVKVPGDVDMVIFRENSEDIYAGVEFASDSKESTQLVKILQDKFNVDQIRFPQNVGLGVKPISEEGTKRLVKRAFEYAIEHDRSSVTLVHKGNIMKFTEGAF

SEQ ID NO: 86537 - protein, 202 aa, Unknown
  Bacterial polypetide isolated from the Sargasso Sea
MESKVVVPAEGQKITLQDGKLNVPNNPIIPFIEGDGIGVDVTPAMLKVVDAAVEKAYKGERKISWMEIYTGEKSTQVYGQDVWLPAETLDLIRDYRVAIKGPLTTPVGGGIRSLNVALRQELDLYVCLRPVRYYQGTPSPVKHPELTDMVIFRENSEDIYAGIEWKADSAEAEKVIKFLRDEMGVKKIRFPEHCGIGIKPCS

SEQ ID NO: 86538 - protein, 291 aa, Unknown
  Bacterial polypetide isolated from the Sargasso Sea
KNVPRLVPGWTKPIVIGRHAFGDQYRATDTIIPSSGRLSMVFEPEDGSKKIQHQIFNFPGPGIAMTMYNLDESIKGFARACFNYGLDLGWPVYLSTKNTILKVYDGRFKDIFNDVYEREFKSKFKKKKITYEHRLIDDMVACALKWDGGFVWACKNYDGDVQSDTVAQGFGSLGLMTSVLLTPDGKTVEAEAAHGTVTRHYRQHQAGKQTSTNPIASIFAWTRGLSYRAKFDNSEKVEKFAKNLERVCIETVESGYMTKDLALLVGSDQPWLTTTQFLNKIDENFKKVMSD

SEQ ID NO: 86539 - protein, 137 aa, Unknown
  Bacterial polypetide isolated from the Sargasso Sea
DVQSDVVAQGFGSLGLMTSTLVTPDGKTLEAEAAHGTVTRHYRRHQKGEQTSTNPIASIFAWTRGLMHRGKLDNNENLIKFCKTLEEVCIETVEDGKMTKDLALLVFRDDLVESNFLTTHEFLDELKSNLDKKLAIQ

SEQ ID NO: 86540 - protein, 215 aa, Unknown
  Bacterial polypetide isolated from the Sargasso Sea
MEFSMGYKKIQVPAVGDKITVNADHSLNVPDQPIIPYIEGDGIGVDISPVMIKVVDAAVEKAYGGKRKISWMEVYAGEKATQVYDQDTWLPQETLDAVKDYVVSIKGPLTTPVGGGIRSLNVALRQQLDLYVCLRPVRWFEGVPSPVKKPGDVDMTIFRENSEDIYAGIEWKAGSPEAIKVIKFLKEEMGVTKIRFDQDCGIGVKPVSKEGTKRW

SEQ ID NO: 86541 - protein, 165 aa, Unknown
  Bacterial polypetide isolated from the Sargasso Sea
YEHRLIDDMVAAAIKWKGGFVWACKNYDGDVQSDVVAQGFGSLGLMTSTLVTPDGKTLEAEAAHGTVTRHFRRHQKGEQTSTNPIASIFAWTRGLMHRGKLDNNEKLISFCKTLEEVCIETVEDGKMTKDLALLVFRDDLVNSNFLTTHEFLDELKSNLDKKLAI

SEQ ID NO: 86542 - protein, 225 aa, Unknown
  Bacterial polypetide isolated from the Sargasso Sea
PICIGRHAFGDQYRATDVATHGPGKLEMKFTPSDGSESKTWEVYNFEEDGIAMSMYNIDSSIYGFARSCMNMALTKRWPLYLSTKNTILKAYDGRFKDIFEEVFIKEFKDKFEKENITYEHRLIDDMVAAAIKWKGGFVWACKNYDGDVQSDIVAQGFGSLGLMTSTLVTPDGKTLEAEAAHGTVTRHYRRHQQGEETSTNPIASIFAWTRGLMHRGKLDNNKEL

SEQ ID NO: 86543 - protein, 263 aa, Unknown
  Bacterial polypetide isolated from the Sargasso Sea
ENSEDIYCGVEFEGNSKEAKSLIKTLKTRFDVSKIRFDENVGIGVKPISKSGTSRLVKKAIDYAIDNNRSSVTLVHKGNIMKYTEGAFRDWGYELAKNEYGGIEIDDGPWQEIVNPNNGKKIVIKDVICDAFLQQILLRPTEYDVIATMNLNGDYISDALAAMVGGIGIAPGANISDEYAVFEATHGTAPKYAGQNKVNPGSLILSAEMMLRHMGWIEAADLIMSSMDRAIGAKKVTYDFARMMSDADLVSSSGFADEMIKRM

SEQ ID NO: 86544 - protein, 177 aa, Unknown
  Bacterial polypetide isolated from the Sargasso Sea
EIFDKEFKQKFEERKITYEHRLIDDMVACAMKWNGNYIWACKNYDGDVQSDTIAQGFGSLGLMSSVLMTPDGKTLEAEAAHGTVTRHYRLHQQGKETSTNPIASIFAWARGLYHRGKLDGNDELKKFVKNLEKVCIETVESGSMTKDLAILIGPSTKYLTTNQFLDKLDNNLKKKLN

SEQ ID NO: 86545 - protein, 193 aa, Unknown
  Bacterial polypetide isolated from the Sargasso Sea
IQFLKKYDGRFKDLFQEIYEKEFKEKFKERNITYEHRLIDDMVACAMKWNGNYIWACKNYDGDVQSDTIAQGFGSLGLMTSVLMSPDGKTIEAEAAHGTVTRHFRLHQQGKETSTNPIASIFAWARGLYHRGKLDGNEDLKKFVKTLEKVCIETVENGSMTKDLAILISPSEKYLTTNQFLDKIDNNLKKKLN

SEQ ID NO: 86546 - protein, 213 aa, Unknown
  Bacterial polypetide isolated from the Sargasso Sea
QGTERLVKQALDYAIKNDRSSVTLVHKGNIMKFTEGAFRDWGYELSMNSYNGQLLDGGPWVTIKNPTNEKNIIIKDVICDAFLQQILTRPKEYDVIATMNLNGDYVSDALAACVGGIGIAPGANIGDESALFEATHGTAPKYAGQDKVNPGSLILSAEMMLRHLGWVEAADLIISSMEAAITDKMVTYDFERLMDDAQLVSCSGFAKEMIKRM

SEQ ID NO: 86547 - protein, 307 aa, Unknown
  Bacterial polypetide isolated from the Sargasso Sea
SPNGTIRNILGGTVFRQPIICQNVPRLVPGWTRPIVIGRHAFGDQYRATDFVTPGAGKLTMTFQPADGSPAITHDVFDFPEGGVAMAMYNLDESIRGFARACMNYGLDLGWPVYLSTKNTILKAYDGRFKDLFEEVFETEFAVKFKDAGLIYEHRLIDDMVACAMKWDGGFVWACKNYDGDVQSDTVAQGFGSLGLMTSVLMTPDGKTVEAEAAHGTVTRHFRQHQQGKTTSTNPIASIFAWTRGLSYRAKFDDTPDVAAFADIVEKVCIQTVERGQMTKDLALLISNEQPFLTTDGFLDAIDEHLQ

SEQ ID NO: 86548 - protein, 99 aa, Unknown
  Bacterial polypetide isolated from the Sargasso Sea
MAKIKVKNPIVELDGDEMTRIIWSFIKKKLIKPYLEIDLKYYDLGMENRDNTNDQVTVDCAKAIQKFGVGVKCATITPDEARVKEFNLKKIVEISKTVQ

SEQ ID NO: 86549 - protein, 279 aa, Unknown
  Bacterial polypetide isolated from the Sargasso Sea
MRGTVFREPIICKNVPRLVPSWTDPVIIGRHAFGDQYRATDFKVPGKGKLEIKWTSEDGKDTKNYEVFNFPGSGVALTMYNLDKSIEDFARSCFNYGLIKKWPVYLSTKNTILKTYDGRFKDIFQGVFEKEFKSSFEKNNLTYEHRLIDDMVACAMKWSGKYIWACKNYDGDVQSDTVAQGYGSLGLMTSVLLAPDGRTMEAEAAHGTVTRHFRMHQQGKETSTNPIASIFAWTRGLAHRGKLDANDELIKFANTLEKVCIDCVETGSMTKDLAILIDA

SEQ ID NO: 86550 - protein, 304 aa, Unknown
  Bacterial polypetide isolated from the Sargasso Sea
LIKPYLEIDLKYHDLGMESRDKTNDQITVDAARAIQKHGAGVKCATITPDEARVKEFNLKKMWRSPNGTIRNIVGGTIFREPIICKNVPRLVPHWTDSVIVGRHAFGDQYKATDFKVPGKGKVTVKWESENGKDKIEHEVFNFDGPGVALSMYNLDNSIKDFARACMNYGLVRKWPVYFSTKNTILKAYDGRFKDIFEEVFQKEFKKKFEEVGITYEHRLIDDMVACAMKWSGKYIWACKNYDGDVQSDTIAQGYGSLGLMTSVLRTPDGKVAEAEAAHGTVTRHYRQHQAGKETSTNPIASIL

SEQ ID NO: 86551 - protein, 106 aa, Unknown
  Bacterial polypetide isolated from the Sargasso Sea
PDGKTVEAEAAHGTVTRHYRNHQKGIETSTNPIASIFAWTRGLGFRGEFDGNNELINFAKKLEETCIKTVESGEMTKDLAILINKDQKWLNTQDFLSAIKNNFLIN

SEQ ID NO: 86552 - protein, 226 aa, Unknown
  Bacterial polypetide isolated from the Sargasso Sea
IIMKNIPRYVQGWVKPICIGRHAFGDQYKATDFLTHGKGRLTMTFTPENGDEEKTWEIYNFQEDGIAMGMYNIESSIYGFARSCMNRAVSKGWPLYLSTKNTILKAYDGRFKDIFHEVYENEFKEKFEEIGITYEHRLIDDMVAAAMKWEGGFVWACKNYDGDVQSDTVAQGFGSLGLMTSTLLTPDGKTMEAEAAHGTVTRHYRLHQKGKETSTNPIASIFAWTR

SEQ ID NO: 86553 - protein, 278 aa, Unknown
  Bacterial polypetide isolated from the Sargasso Sea
RNILGGTVFREPIICKNVPKLVPGWTKPIVIGRHAFGDQYRATDFLIPGEGNLEVKWTSKDGKDKKEFKVFDFPGSGTALTMYNLDDSIKNFARACMNYGLGRKWPVYLSTKNTILKAYDGRFKDLFQEVFEKEFSNKFKKANITYEHRLIDDMVACAMKWNGGYVWACKNYDGDVQSDTVAQGFGSLGLMTSVLMTPDGKTVESEAAHGTVTRHYRMHQQGKETSTNPIASIFAWTRGLAHRGKLDGNDELIKFSTNVEEVCVKTVESGSMTKDLAI

SEQ ID NO: 86554 - protein, 266 aa, Unknown
  Bacterial polypetide isolated from the Sargasso Sea
MSKIKVKNPIVELDGDEMTRIIWEFIKNKLILPYLDLGIEYYDLGMKSRDNTDDQITIDSANAIKKIGVGIKCATITPDEARVEEFELKKMWRSPNGTIRNIIGGTVFREPIICKNIPKLVPSWTDPVIIGRHAFGDQYRATDFKVPGKGKMEVKWTSEDGKDEIKYEVFNFTGPGVALSMYNLDKSIQDFARSCFSYGLIKKWPVYMSTKNTILKQYDGRFKDIFQEVFENEYKEDFDKNNLTYEHRLIDDMVACAMKWSGKYIW

SEQ ID NO: 86555 - protein, 167 aa, Unknown
  Bacterial polypetide isolated from the Sargasso Sea
MSKIEVKKPIVELDGDEMTRVIWEFIKKKLILPYLDLKIEYFDLGIKNRDKTDDQITVDCANAIKKIGVGIKCATITPDEARVKEFNLKKMWRSPNGTIRNIIGGTVFREPIICKNIPKLVPSWTNPICIGRHAFGDQYRATDFHVPGKGKLEIKWTSEDEKKKKNS

SEQ ID NO: 86556 - protein, 221 aa, Unknown
  Bacterial polypetide isolated from the Sargasso Sea
LGVKPISKQGTERLVKQALDYAIKNDRSSVTLVHKGNIMKFTEGAFRDWGYELSMNLYNGELLDGGPWVTVKNPKTNKNIIVKDVICDAFLQQILTRPKEYDVIATMNLNGDYVSDALAACVGGIGIAPGANIGDDSALFEATHGTAPKYAGQDKVNPGSLILSAEMMLRHMGWTEAADLIISSMEAAITDKMVTYDFERLMDGANLVSCSGFAKEMIKRM

SEQ ID NO: 86557 - protein, 170 aa, Unknown
  Bacterial polypetide isolated from the Sargasso Sea
MGYEHIKVPDYGEKIVVNDDHSLSVPDQPIIPYIEGDGIGVDISPVMINVVNAAVEKAYGAGRKVSWMEIFTGEKAAELYDGEWFPAETLDAIREFSVAIKGPLTTPVGGGFRSLNVALRQELDLYTCLRPVRWFDGVPSPVKDPGSCDMVIFRENSEDIYAGIEYQAGS

SEQ ID NO: 86558 - protein, 264 aa, Unknown
  Bacterial polypetide isolated from the Sargasso Sea
YYDLGLENRDKTNDQITIECANAIKKFGVGIKCATITPDEERVKEFNLKKMWRSPNGTIRNILGGTVFREPIICKNVPKLVPSWTNPICIGRHAFGDQYRATDFNVPGKGKLEIKWTSEDGKEKKEFEVFNFPGPGVALSMYNLDQSIKDFARSCMNYGLNRKWPVYLSTKNTILKKYDGKFKDLFQEVYEKEFIDKFKQRKITYEHRLIDDMVACAMKWNGNYIWACKNYDGDVQSDTIAQGFGSLGLMTSVLMSPRWQNNRI

SEQ ID NO: 86559 - protein, 300 aa, Unknown
  Bacterial polypetide isolated from the Sargasso Sea
IEAAESVKKYGVGIKCATITPDEDRVKEFQLKKMWRSPNGTIRNILGGTIFRQPIICKNIPRIITNWNKPIIVARHAFGDQYKATDTIIDKPGTLKMVFQPKDGSNGFTKDVYDFEKAGVALSMYNLDDSIKDFARACFNYGLDLGWPVYLSTKNTILKVYDGRFKDIFQEIFDKEFKDKFIEKNIIYEHRLIDDMVASALKWEGNFIWACKNYDGDVQSDSVAQGFGSLGLMTSVLMTPDGKTVEAEAAHGTVTRHFRNHQKGLETSTNPIASIFAWTRGLKFRGKFDSNNELIKLQKI

SEQ ID NO: 86560 - protein, 281 aa, Unknown
  Bacterial polypetide isolated from the Sargasso Sea
DNWLPPETLRALEIYLVGIKGPLTTPVGGGIRSLNVALRQELDLYVCQRPVRYFDGVPSPVTSPEKTDMVIFRENSEDIYAGIEWEAGSEGAEKVIKFLTEEMGVTKIRFLEECGIGVKPVSKQGTERLVDKAIQYAIANDRDSVTLVHKGNIMKFTEGSFKDWGYQFAASKYGAIELDGGPWHSLTNPVTGREIVIKDVIADAFLQQILTRPDEYSVIATLNLNGDYISDALAAEVGGIGIAPGANLGDKIALFEATHGTAPKYAGLDKVNPGSLILSAE

SEQ ID NO: 86561 - protein, 275 aa, Unknown
  Bacterial polypetide isolated from the Sargasso Sea
RPDLVDMVIFRENSEDIYAGVEFESNTDAANKLIKVLQDDFGVEKIRFTENCGIGIKPVSEEGTKRLVRKAYEYAIQNEKDSVTLIHKGNIQKFTEGAFMDWGYELAREEFGGEPLDGGPWHTFKNPNTGKDIIVKDVICDAFLQQCLLRPADYDVLATPNLNGDYLSDALAAQVGGIGIAPGANLGDEVAVFEATHGTAPKYAGQDKVNPGSLILSAEMMLRHMGWVEAADLIISAMEKTIGKKKVTYDFARLIDDAEEVSCSKFGELLIKKFK

SEQ ID NO: 86562 - protein, 167 aa, Unknown
  Bacterial polypetide isolated from the Sargasso Sea
MRKIYLTYEHRLIDDMVACAMKWSGKYIWACKNYDGDVQSDTMAQGYGSLGLMTSTLLTPDGKIMEAEAAHGTVTRHYRLHQQGKETSTNPIASIFAWTRGLAHRGKLDGNNELIKFTNTLERVCINCVESGSMTKDLAILVGPSSKYLTTNQFLDAIDNNLKKKLN

SEQ ID NO: 86563 - protein, 270 aa, Unknown
  Bacterial polypetide isolated from the Sargasso Sea
FGDQYRATDFNVPGKGTLEIKWTSEDGKEKKEFEVFNFPGPGVALSMYNLDQSIKDFARSCMNYGLNRKWPVYLSTKNTILKKYDGRFKDLFQEVYEKEFIDKFKQRKITYEHRLIDDMVACAMKWNGNYIWACKNYDGDVQSDTIAQGFGSLGLMTSVLMSPDGKTIESEAAHGTVTRHFRMHQKGKETSTNPIASIFAWARGLYHRGKIDGNEDLKKFVKNLEKVCIETVENGSMTKDLAVLIGPSTKYLNTNEFLNELDINLKKKLN

SEQ ID NO: 86564 - protein, 146 aa, Unknown
  Bacterial polypetide isolated from the Sargasso Sea
MAKIKVKNPIVELDGDEMTRIIWDFIKKKLILPYLELKIEYFDLGVENRDKTSDKVTIESANAIRKIGVGIKCATITPDENRVKEFNLKKMWRSPNGTIRNILGGTVFREPIICKNIPKLVPSWTNPIVIGRHAFGDQYRATDFKV

SEQ ID NO: 86565 - protein, 180 aa, Unknown
  Bacterial polypetide isolated from the Sargasso Sea
MSKIKVKNAIVELDGDEMTRVIWDFIKKKLILPYLDLGIEYYDLGMKNRDATNDQITVDCANAIKKNGVGIKCATITPDESRVKEFNLKKMWRSPNGTIRNILGGTVFREPIICKNIPKLVPSWTNPICIGRHAFGDQYRATDFKVPGKGKLEIKWTSEDGNEKKEFEVFNFPRAWKIAI

SEQ ID NO: 86566 - protein, 144 aa, Unknown
  Bacterial polypetide isolated from the Sargasso Sea
MSKIIVKRPVVELDGDEMTRIIWDFIKKKLILPYLDLEIKYYDLGIKSRDSSSDQITIDSANAIKKFGVGIKCATITPDENRVKEFKLKKMWRSPNGTIRNILGGTVFREPIICKNIPKLVPSWTNPIVIGRHAFGDQYKATDF

SEQ ID NO: 86567 - protein, 240 aa, Unknown
  Bacterial polypetide isolated from the Sargasso Sea
IEHEVFNFDGPGVALSMYNLDNSIKDFARACMNYGLVRKWPVYFSTKNTILKAYDGRFKDIFEEVFQKEFKKKFEEVGINYEHRLIDDMVACAMKWSGKYIWACKNYDGDVQSDTVAQGYGSLGLMTSVLRTPDGKVAEAEAAHGTVTRHYRQHQAGKETSTNPIASIFAWTRGLSHRGNLDGNKELIKFAETLEKVCIETVESGSMTKDLAILVNKDQKFLTTNQFLEAINSNLKKKLN

SEQ ID NO: 86568 - protein, 127 aa, Unknown
  Bacterial polypetide isolated from the Sargasso Sea
MSKINVKNPIVELDGDEMTRIIWEFIKNKLILPYLDLGIEYYDLGMKSRDNTDDKITIDSANAIKKIGVGIKCATITPDEARVEEFDLKKMWRSPNGTIRNIIGGTVFREPIICKNIPKLVPSGQIL

SEQ ID NO: 86569 - protein, 235 aa, Unknown
  Bacterial polypetide isolated from the Sargasso Sea
FNFTGPGVALSMYNLDKSIQDFARSCFSYGLIKKWPVYMSTKNTILKQYDGRFKDIFQEIFENEYKEEFEKNNLTYEHRLIDDMVACAMKWSGKYIWACKNYDGDVQSDTMAQGYGSLGLMTSTLLTPDGKIMEAEAAHGTVTRHYRMHQQGKETSTNPIASIFAWTRGLAHRGKLDSNNELIKFAQTIEKVCIECVENGAMTKDLAILIGPSSKYLTTNQFLDEIDGNLKAKLN

SEQ ID NO: 86570 - protein, 258 aa, Unknown
  Bacterial polypetide isolated from the Sargasso Sea
LDLGIKYYDLGMKSRDNTDDQITIDSANAIKKIGVGIKCATITPDEARVEEFDLKKMWRSPNGTIRNIIGGTVFREPIICKNIPKLVPSWTDPVIIGRHAFGDQYRATDFKVPGKGKMEVKWTSEDGKDEIKYEVFNFTGPGVALSMYNLDKSIEDFARSCFSYGLIKKWPVYMSTKNTILKQYDGRFKDIFQEIFDKEYKQEFEKNNLTYEHRLIDDMVACAMKWSGKYIWACKNYDGDVQSDTMAQGYGSLGLMTS

SEQ ID NO: 86571 - protein, 250 aa, Unknown
  Bacterial polypetide isolated from the Sargasso Sea
RHAFGDQYRATDFEVPGRGKLEIKWSAEDGSDEIKYEVFNFPSSGIALSMYNLDKSIEDFAKSCFNYGLIKKWPVYLSTKNTILKKYDGRFKDIFQKIYENEFKSDFEKNNILYEHRLIDDMVACAMKWSGKYIWACKNYDGDVQSDTVAQGYGSLGLMTSVLLAPDGKTMEAEAAHGTVTRHFRMHQQGKETSTNPIASIFAWTRGLAHRGKLDFNDQLIEFSESLEKVCIDTVEDGHMTKDLAILIGP

SEQ ID NO: 86572 - protein, 117 aa, Unknown
  Bacterial polypetide isolated from the Sargasso Sea
GLMTSTLLTPDEKIMEAEAAHGTVTRHFRLHQQGKETSTNPIASIFAWTRGLAHRGKLDNNDSLIKFSNKIEEVCIECVESGAMTKDLAILIGPSSRYLTTNQFLDEIDGRLKKKLN

SEQ ID NO: 86573 - protein, 270 aa, Unknown
  Bacterial polypetide isolated from the Sargasso Sea
FGDQYRATDFQVPGKGKLEIKWTSEDGKEKKEFEVFNFPGPGVALSMYNLDQSIKDFARACMNYGLNRKWPVYLSTKNTILKEYDGRFKDLFQEIYENEFKKQFIEKGITYEHRLIDDMVACAMKWNGNYIWACKNYDGDVQSDTVAQGFGSLGLMTSILMSPDGKTIESEAAHGTVTRHYRLHQKGKETSTNPIASIFAWARGLYHRAKLDNNEDLKKFVKTLEKACVDCVENGSMTKDLAILVGPSTKYLTTNQFLDEIEGKLKQQLN

SEQ ID NO: 86574 - protein, 133 aa, Unknown
  Bacterial polypetide isolated from the Sargasso Sea
DGDVQSDTMAQGYGSLGLMTSTLLTPDGKIMEAEAAHGTVTRHYRMHQQGKETSTNPIASIFAWTRGLAHRGKLDSNDELIKFAQTIEKVCIECVENGAMTKDLAILIGPSSKYLTTNQFLDEIDGNLKAKLN

SEQ ID NO: 86575 - protein, 142 aa, Unknown
  Bacterial polypetide isolated from the Sargasso Sea
KYIWACKNYDGDVQSDTVAQGYGSLGLMTSVLRTPDGKVAEAEAAHGTVTRHYRQHQAGKETSTNPIASIFAWTRGLSHRGNTDGNQELIKFAETLENVCVETVEKGFMTKDLAILISKNQKFLTTNQFLEAIDSNLKKKLN

SEQ ID NO: 86576 - protein, 293 aa, Unknown
  Bacterial polypetide isolated from the Sargasso Sea
YEAYSGSRKINWVKVYAGEKAFDSTGEWLPQKTLDTILEHLIAIKGPLTTPVGGGIRSLNVALRQKLDLYACVRPVRWFNGVPSPVKEPGLVDMVIFRENTEDIYAGIEWMNGSNEVEKVKSFLMNEMGVTNIRFPNTSSLGVKPVSKEGTSRLVRAAIDYALKQKRDSVTLVHKGNIMKFTEGAFRDWGYELSKDEYGAKDLDGGPWQIIKKDGHELIIKDVIADAFLQQILLRPSEYDVIATLNLNGDYVSDALAAIVGGIGIAPGANINYVSGHAIFEATHGTAPKYAGK

SEQ ID NO: 86577 - protein, 295 aa, Unknown
  Bacterial polypetide isolated from the Sargasso Sea
GGKKKIEWMEIYCGEKSTVVYGEDNWLPPETLRALEIYLVGIKGPLTTPVGGGIRSLNVALRQELDLYVCQRPVRYFNGVPSPVISPEKTDMVIFRENSEDIYAGVEWEAGSEGAEKLIKFLTEEMGVNKIRFTEECGIGIKPISKQGTERLVDKAIQYAIANDRDSITFVHKGNIMKFTEGSFKDWGYQFAASEYGAVELDGGPWHTLTNPVTGREIVIKDVIADAFLQQILTRPDEYSVIATMNLNGDYISDALAAEVGGIGIAPGANLGDKIALFEATHGTAPKYAGLDKVN

SEQ ID NO: 86578 - protein, 205 aa, Unknown
  Bacterial polypetide isolated from the Sargasso Sea
DLGWPVYLSTKNTILKIYDGRFKDLFENVFNTELAEKFKEQNIVYEHRLIDDMVATALKWEGNFIWACKNYDGDVQSDSVAQGYGSLGLMTSVLMTPDGKTVEAEAAHGTVTRHFRNHQKGLETSTNPIASIFAWTRGLQFRGKFDENQDLINFANNLEDTCIDTVQSGKMTKDLAILIHSDQKWLNTQNFLETLKGNLEEKLKV

SEQ ID NO: 86579 - protein, 276 aa, Unknown
  Bacterial polypetide isolated from the Sargasso Sea
KPIIVARHAYGDQYKATDTLITKPGILKMKFEPTDGTEGFEKEVFTFNEEGIALSMYNLDQSIIDFARSCFNYGLNLRWPVYLSTKNTILKVYDGRFKDLFQKVFDQEFSEKFKEKSIVYEHRLIDDMVAAALKWEGNFIWACKNYDGDVQSDSVAQGFGSLGLMTSVLMTPDGKTVEAEAAHGTVTRHYRQHQQKKMTSTNPIASIFAWTRGLKFRGKFDENLELSNFAKLLEETCIETVESGKMTKDLAILISNNQKWLNTEEFLSVINENLRK

SEQ ID NO: 86580 - protein, 195 aa, Unknown
  Bacterial polypetide isolated from the Sargasso Sea
MSKIKVKNPVVELDGDEMTRIIWSFIKDKLIKPYLDIDLKYYDLGMENRDKTNDQVTIDCAKAIQKYGAGVKCATITPDEARVKEFKLKKMWRSPNGTIRNIVGGTIFREPIICKNVPRLVPHWTDSVIVGRHAFGDQYKATDFKVPGKGKMTVKWESENGKDKIEHEVFNFDGPGIALSMYNLDNSIKDFCKSV

SEQ ID NO: 86581 - protein, 255 aa, Unknown
  Bacterial polypetide isolated from the Sargasso Sea
VFCGEKSVKVYGSDEWLPKETLELCKEYIVSIKGPLTTPIGGGIRSLNVALRQELDLYVCLRPVKYFKGTPSPVKRPELVDMVIFRENSEDIYAGVEFESNTEEANKLIKVLKEQFDVQKIRFPENCGIGIKPVSEEGSKRLIRKSFEYAIKNDRKSVSLIHKGNIQKFTEGAFRDWGYELAEEEFDAKPIDGGPWHSMINPINGNEIIIKDVICDAFLQQILHRPAEYDVLASPNLNGDYISDALAAQVGGIGI

SEQ ID NO: 86582 - protein, 269 aa, Unknown
  Bacterial polypetide isolated from the Sargasso Sea
MAKIKVKNPVVELDGDEMTRIIWSFIKDKLIKPYLEVNLKYYDLGMESRDKSDDQITIDAAKAIKQYGVGVKCATITPDEARVEEFKLKKMWRSPNGTIRNILGGTVFREPIICKNVPKLVPGWTKPIVIGRHAYGDQYRATDFLVPGEGNLEVKWTSKDGKDKKEFKVFNFPGSGTALTMYNLDESIKNFARACMNYGLGRKWPVYLSTKNTILKAYDGRFKDLFQEVFEKEFSDKFKKVNITYEHRLIDDMVACAMKWNGGYVWACK

SEQ ID NO: 86583 - protein, 258 aa, Unknown
  Bacterial polypetide isolated from the Sargasso Sea
SMKSRDNTNDQITVDCAKAIKKNGVGIKCATITADELRVKEFNLKKMWRSPNGTIRNIIGGTVFREPIICKNIPKLVPSWTDPLIIGRHAFGDQYRATDFLVPGKGKLEIKWTSEDGKDQKNYEVFNFPGPGIALSMYNLDKSIEDFARSCFNYGLIKKWPVYLSTKNTILKKYDGRFKDIFQKIFDEDFKAEFNKNNITYEHRLIDDMVACAMKWSGKYIWACKNYDGDVQSDTVAQGYGSLGLMTSVLLAPDGRTM

SEQ ID NO: 86584 - protein, 162 aa, Unknown
  Bacterial polypetide isolated from the Sargasso Sea
MSKIKVKNPIVELDGDEMTRVIWEFIKNKLILPYLDLDIKYYDLGIKSRDNTSDNITIECAKAIKKYGVGIKCATITPDESRVKEFNLKKMWRSPNGTIRNILGGTVFREPILCKNIPKLVPSWTNPICIGRHAFGDQYRATDFKVPGKGKLEMKWTSEDGK

SEQ ID NO: 86585 - protein, 171 aa, Unknown
  Bacterial polypetide isolated from the Sargasso Sea
MSKIKVKNPIVELDGDEMTRIIWKFIKDKLIFPYLDLKVEYYDLGMKSRDETEDQITIDCANAIKKNGVGIKCATITPDEGRVKEFSLKKMWRSPNGTIRNILGGTVFREPIMCKNIPKLVPSWTNPICIGRHAFGDQYRATDFKVPGKGKLEMKWTSEDGKEKKNLKFLT

SEQ ID NO: 86586 - protein, 309 aa, Unknown
  Bacterial polypetide isolated from the Sargasso Sea
LIKTYLDIDIKYYDLGMENRDETNDQVTVDSARAIQKFGAGVKCATITPDEARVKEFNLKKMWRSPNGTIRNIVGGTIFREPIICKNVPRLVPHWTESVIVGRHAFGDQYKATDFKVPGKGKMTIKWESEDGKNKIEHEVFKFNDSGIALSMYNLDSSIKDFARACLNYGLVRKWPVYFSSKNTILKVYDGRFKDIFEDIYQKEFRKKFEEAGISYEHRLIDDMVACAMKWSGKYIWACKNYDGDVQSDTVAQGYGSLGLMTSVLRTPDGKIAEAEAAHGTVTRHYRQHQQGKETSTNPIASIFAWTRG

SEQ ID NO: 86587 - protein, 262 aa, Unknown
  Bacterial polypetide isolated from the Sargasso Sea
DFKVPGKGKMEVKWTSEDGKDEIKYEVFNFTGPGVALSMYNLDKSIEDFARSCFSYGLIKKWPVYMSTKNTILKQYDGRFKDIFQEIFDKEYKSEFEKNNLTYEHRLIDDMVACAMKWSGKYIWACKNYDGDVQSDTMAQGYGSLGLMTSTLLTPDGKIMEAEAAHGTVTRHYRMHQQGKETSTNPIASIFAWTRGLAHRGKLDDNGALIKFAQTLEKVCIECVESGSMTKDLAILIGPDRKYLTTNQFLDEIDGNLKKKLN

SEQ ID NO: 86588 - protein, 256 aa, Unknown
  Bacterial polypetide isolated from the Sargasso Sea
KGKMTVKWESENGKDKIEHEVFNFDGPGIALSMYNLDNSIKDFARACLNYGLARKWPVYFSSKNTILKVYDGRFKDIFEEVFQKEFKNKFNESGITYEHRLIDDMVACAMKWSGKYIWACKNYDGDVQSDTVAQGYGSLGLMTSVLRTPDGKVAEAEAAHGTVTRHYRQHQAGKETSTNPIASIFAWTRGLSHRGNLDGNQELIKFAVSLEKVCIETVESGSMTKDLAILISKDQKFLTTSQFLEAIDSNLKKKLN

SEQ ID NO: 86589 - protein, 235 aa, Unknown
  Bacterial polypetide isolated from the Sargasso Sea
MENRDKTNDQVTIDCAKAIQKYGAGVKCATITPDEARVKEFKLKKMWRSPNGTIRNIVGGTIFREPIICKNVPRLVPHWTDSVIVGRHAFGDQYRATDFKVPGKGKMMITWESEDGKNKIEHEVYSFKGPGIALSMYNLDDSIRDFARACMNYGLVRKWPVYFSTKNTILKAYDGRFKDIFEEIFKKEFEKKFNKAGITYEHRLIDDMVACAMKWSGKYIWACKNYDGDVQSDTV

SEQ ID NO: 86590 - protein, 262 aa, Unknown
  Bacterial polypetide isolated from the Sargasso Sea
LGMENRDKTNDQVTVDCAKAIQKFGAGVKCATITPDEARVKEFGLKKMWRSPNGTIRNIVGGTIFREPIICKNVPRLVPHWTESVIVGRHAFGDQYRATDFKVPGKGKMTIKWESEDGKNKIEHEVFKFKDAGIALSMYNLDSSIKDFARACLNYGLVRKWPVYFSSKNTILKVYDGRFKDIFEDIYQNEFKKKFDDAGITYEHRLIDDMVACAMKWSGKYIWACKNYDGDVQSDTVAQGYGSLGLMTSVLRTPDGKVAEAE

SEQ ID NO: 86591 - protein, 259 aa, Unknown
  Bacterial polypetide isolated from the Sargasso Sea
VPGKGKMEVKWTSEDGKDEIKYEVFNFTGPGVALSMYNLDKSIEDFARSCFSYGLIKNWPVYLSTKNTILKKYDGRFKDIFEEIYNKEFKDKFEKINITYEHRLIDDMVACAMKWSGKYIWACKNYDGDVQSDTMAQGYGSLGLMTSTLLTPDGKIMEAEAAHGTVTRHYRMHQQGKETSTNPIASIFAWTRGLAHRGKLDANNELIKFANTIEKVCIESVENGSMTKDLAILVGPSSKYLTTNQFLDVIDNNLKKKLN

SEQ ID NO: 86592 - protein, 273 aa, Unknown
  Bacterial polypetide isolated from the Sargasso Sea
RHAFGDQYRATDFQVPGKGKLEMKWVSEDGKQKKEFEVFNFPGPGVALSMYNLDQSIKDFARACMNYGLNRKWPVYLSTKNTILKKYDGRFKDLFEEIYENEFKEKFKERGLTYEHRLIDDMVACAMKWNGNYIWACKNYDGDVQSDTIAQGFGSLGLMTSVLMTPDGKTIESEAAHGTVTRHYRLHQQGKETSTNPIASIFAWARGLYHRAKIDNNDDLKRFVKTLERVCIETVESGSMTKDLAILIGHSTKYLTTNQFLDVINKNLKSKLK

SEQ ID NO: 86593 - protein, 189 aa, Unknown
  Bacterial polypetide isolated from the Sargasso Sea
KKYDGRFKDLFQEVYEKEFKEKFKERKITYEHRLIDDMVACAMKWNGNYIWACKNYDGDVQSDTVAQGFGSLGLMTSMLMSPDGKTIESEAAHGTVTRHYRLHQQGKETSTNPIASIFAWARGLYHRGKLDGNEDLKKFVKTLEKVCIETVENGSMTKDLAVLIGPSTKYLNTNEFLDLLSNNLSKKLN

SEQ ID NO: 86594 - protein, 140 aa, Unknown
  Bacterial polypetide isolated from the Sargasso Sea
KNYDGDVQSDTVAQGFGSLGLMTSVLMTPDGKTIEAEAAHGTVTRHYRLHQEGKQTSTNPIASIFAWSRGLKYRGKLDENDELIKFADKLEKVCVETVESGSMTKDLALLMPHEQDWHSTEDFLEIIERNLNKKLTVTYQ

SEQ ID NO: 86595 - protein, 104 aa, Unknown
  Bacterial polypetide isolated from the Sargasso Sea
TIEAEAAHGTVTRHYRLHQEGKATSTNPIASIFAWTRGLSYRGKMDDNSRLIDFAETIEKVCVDTVQSGFMTKDLAILVSKEQEWLNTQDFLEKINSNLQSALS

SEQ ID NO: 86596 - protein, 263 aa, Unknown
  Bacterial polypetide isolated from the Sargasso Sea
TIEMFDEFGIGIKGPLTTPVGGGIRSINVAIRQKLDLYACLRPLRWFKGVETPTKNPGNVDIALFRENTEDVYSGKELEVNSEDVGKLNKFLKEEFNWEIRHDSGIGIKPISKTASERLIRSALNYAVENNKKNLAIVHKGNIMKFTEGAFRAWGYELVKNEFSDVAISWEDCSGDAGDKILVQDVIADAFLQQVLIKPHEFDVIATTNLNGDYASDALAAQIGGIGISPGGNINYENGKSVFEATHGTAPKHAGQDKANPGS

SEQ ID NO: 86597 - protein, 256 aa, Unknown
  Bacterial polypetide isolated from the Sargasso Sea
GKLKMVFEPTDGSEGFVKEVFHFEKEGIALSMYNLDQSIIEFARACFNYGLNLGWPVYLSTKNTILKVYDGRFKDLFESVFQNEFANKFKKKNIVYEHRLIDDMVATALKWEGDFIWACKNYDGDVQSDSVAQGYGSLGLMTSVLMTPDGKTVEAEAAHGTVTRHFRNHQQGLETSTNPIASIFAWSRGLYFRGKFDDNQNLMNFSKKLEETCIETVESGKMTKDLAILVSENQKWLNTQDFLNTLKDNLEKKLGS

SEQ ID NO: 86598 - protein, 127 aa, Unknown
  Bacterial polypetide isolated from the Sargasso Sea
MAKIKVKNPVVELDGDEMTRIIWSFIKDKLIKPYLEIDLRYYDLGMESRDKTDDQITVDAANAIKQYGVGVKCATITPDEARVEEFKLKKMWRSPNGTIRNILGGTVFREPIICKNVPKLVPGWTNQ

SEQ ID NO: 86599 - protein, 122 aa, Unknown
  Bacterial polypetide isolated from the Sargasso Sea
QGFGSLGLMTSVLMTPDGKTIEAEAAHGTVTRHFRMHQEGKETSTNPIASIFAWTRGLFHRGKLDDNKDLMKFSQTIERVCIDTVESGAMTKDLAILISNNQRWQSTQQFLSTIDKNLQNNI

SEQ ID NO: 86600 - protein, 290 aa, Unknown
  Bacterial polypetide isolated from the Sargasso Sea
TPDEVRVKEFSLKKMWRSPNGTIRNIIGGTVFREPIICKNIPKLVPSWTDPLIIGRHAFGDQYRATDFVVPGKGKLEVKWTAEDGSDEKKYEVFNFPGPGIALSMYNLDKSIEDFARSCFNYGLIKKWPVYLSTKNTILKKYDGRFKDIFQKVYDQEFKSEFEKNNIIYEHRLIDDMVACAMKWSGKYIWACKNYDGDVQSDTVAQGYGSLGLMTSVLLAPDGKTMEAEAAHGTVTRHFRMHQQGKETSTNPIASIFAWTRGLAHRGKLDNNEELIKFAQSLETVCIDAV

SEQ ID NO: 86601 - protein, 252 aa, Unknown
  Bacterial polypetide isolated from the Sargasso Sea
MVFEPTDGSDGFIKDVYEFEKEGIALSMYNLDQSIIDFARACFTYALNLGWPVYLSTKNTILKVYDGRFKDIFENIFQNEFAQKFKQKNIVYEHRLIDDMVATALKWEGNFIWACKNYDGDVQSDSVAQGYGSLGLMTSVLMTPDGKTVEAEAAHGTVTRHYRNHQKDLETSTNPIASIFAWSRGLYFRGKFDKNDNLIQFTKKLEETCIETVESGKMTKDLAILINSDQNWLNTQDFLKTLKENLENKLKF

SEQ ID NO: 86602 - protein, 105 aa, Unknown
  Bacterial polypetide isolated from the Sargasso Sea
KIAEAEAAHGTVTRHYRQHQQGKETSTNPIASIFAWTRGLAHRGQLDGNDELIKFSDTLEKICIETVESGSMTKDLAILISKSQKFLTTNQFLEAIDSNLKKKLN

SEQ ID NO: 86603 - protein, 203 aa, Unknown
  Bacterial polypetide isolated from the Sargasso Sea
MTNSNSIKMENGKLNVPDQPIIPFIEGDGIGPDIWRASVNVFDSAVESAYDGGRKIDWLEILAGEKAHQQTGEWLPQKTLDLVTEHHVAIKGPLTTPVGGGIRSLNVALRQKLDLYACVRPVRWFEGVPSPVKEPGLVDMVIFRENTEDIYAGIEWMHGTDDVEKVKSFLMDEMGVTNIRFPDTSSLGVKPVSKEGTTRLVKA

SEQ ID NO: 86604 - protein, 180 aa, Unknown
  Bacterial polypetide isolated from the Sargasso Sea
FIKNKLILPYLDLGIEYYDLGMKSRDNTDDQITIDSANAIKKIGVGIKCATITPDEARVEEFDLKKMWRSPNGTIRNIIGGTVFREPIICKNIPKLVPSWTDPVIIGRHAFGDQYRATDFKVPGKGKMEVKWTSEDGKNEIKYEVFNFTGPGVALSMYNLDKSIQDFARSCFSYGLIKKW

SEQ ID NO: 86605 - protein, 291 aa, Unknown
  Bacterial polypetide isolated from the Sargasso Sea
EFIKNKLILPYLDLGIEYYDLGMKSRDDTDDQITIDCANAIKKNGVGIKCATITPDEARVKEFSLKKMWRSPNGTIRNIIGGTVFREPIICKNIPKLVPSWTDPLIIGRHAFGDQYRATDFVVPGKGKLEVKWTAEDGSDEKKYEVFNFPGPGIALSMYNLDKSIEDFARSCFNYGLIKKWPVYLSTKNTILKKYDGRFKDIFQKVYEHEFKSEFEKNHIIYEHRLIDDMVACAMKWSGKYIWACKNYDGDVQSDTVAQGYGSLGLMTSVLLAPDGKTMEAEAAHGTVTRH

SEQ ID NO: 86606 - protein, 150 aa, Unknown
  Bacterial polypetide isolated from the Sargasso Sea
MAKIKVKNPVVELDGDEMTRIIWSFIKDKLIKPYLDINLKYYDLGMENRDKTDDQITVDAANAIKEHGVGVKCATITPDEARVEEFKLKKMWRSPNGTIRNILGGTVFREPIICKNVPKLVPGWTQPIVIGRHAFGDQYRATDFLILGEG

SEQ ID NO: 86607 - protein, 145 aa, Unknown
  Bacterial polypetide isolated from the Sargasso Sea
WNGKYIWACKNYDGDVQSDTMAQGYGSLGLMTSTLLTPDGKIMEAEAAHGTVTRHYRMHQQGKETSTNPIASIFAWTRGLAHRGKLDNNDALIKFAQTLEKVCIECVESGLMTKDLAILIGPDSKYLTTNQFLDKIDGNLKKKLN

SEQ ID NO: 86608 - protein, 160 aa, Unknown
  Bacterial polypetide isolated from the Sargasso Sea
KNNLTYEHRLIDDMVACAMKWSGKYIWACKNYDGDVQSDTMAQGYGSLGLMTSTLLTPDGKIMEAEAAHGTVTRHYRMHQQGKETSTNPIASIFAWTRGLAHRGKLDSNNELIKFAQTIEKVCIECVENGAMTKDLAILIGPSSKYLTTNQFLDEIDGNL

SEQ ID NO: 86609 - protein, 125 aa, Unknown
  Bacterial polypetide isolated from the Sargasso Sea
MAKIKVKNPVVELDGDEMTRIIWSFIKDKLIKPYLDINLKYYDLGMESRDKTSDQITIDCANAIKKYGVGIKCATITPDEARVEEFKLKKMWRSPNGTIRNILGGTVFREPIICKNVPKLVPGWT

SEQ ID NO: 86610 - protein, 148 aa, Unknown
  Bacterial polypetide isolated from the Sargasso Sea
MAKIKVKNPVVELDGDEMTRIIWSFIKDKLIKPYLDIDLKYYDLGMENRDKTNDQVTIDCAKAIQNFGAGVKCATITPDEARMKEFNLKKMWRSPNGTIRNIVGGTIFREPIICKNVPRLVPHWTDSVIVGRHAFGDQYKATDFKVPG

SEQ ID NO: 86611 - protein, 225 aa, Unknown
  Bacterial polypetide isolated from the Sargasso Sea
MSKIKVKNPIVELDGDEMTRVIWNFIKNKLILTYLDLKIEYYDLGMESRDKTEDKITIECANAIKKNGVGIKCATITPDEARVKEFNLKKMWRSPNGTIRNIIGGTVFREPIICKNIPKLVPSWTDPLIIGRHAFGDQYRATDFTVPGKGKLEIKWTAEDGTDERKYEVFNFPGPGIALSMYNLDKSIEDFARSCFNYGLIKKWPVYLSTKNTILKRYDGRFKDI

SEQ ID NO: 86612 - protein, 202 aa, Unknown
  Bacterial polypetide isolated from the Sargasso Sea
KWPVYMSTKNTILKQYDGRFKDIFQEIFDKEYKSEFEKNNLTYEHRLIDDMVACAMKWSGKYIWACKNYDGDVQSDTMAQGYGSLGLMTSTLLTPDGKVMEAEAAHGTVTRHYRMHQQGKETSTNPIASIFAWTRGLAHRGKLDSNEELIKFAKTLEKVCIECVENGSMTKDLAILVGPNSKFLTTNQFLDEIDGNLKKKLN

SEQ ID NO: 86613 - protein, 244 aa, Unknown
  Bacterial polypetide isolated from the Sargasso Sea
KSLVKTLKTRFDVSKIRFDENVGIGVKPISKNGTSRLVKKAIDYAIDNNRSSVTLVHKGNIMKYTEGAFRDWGYELAKNEYGGIEIDEGPWQEIVNPNNGKKIVIKDVICDAFLQQILLRPTEYDVIATMNLNGDYISDALAAMVGGIGIAPGANISDEYAVFEATHGTAPKYAGQNKVNPGSLILSAEMMLRHMGWIEAADLIMSSMDRAIGAKKVTYDFARMMSDADLVSSSGFADEMIKRM

SEQ ID NO: 86614 - protein, 273 aa, Unknown
  Bacterial polypetide isolated from the Sargasso Sea
YSKTCASWTDPVIIGSSCCFGDQYRATDFQVPGKGKLEIKWTSENGKDEKKYEVFNFPGPGVALSMYNLDRSIEDFARSCFNYGLIKKWPVYLSTKNTILKTYDGRFKDIFQKVFNEEFKKDFDTNNITYEHRLIDDMVACAMKWSGKYIWACKNYDGDVQSDTVAQGYGSLGLMTSVLLAPDGKTMEAEAAHGTVTRHYRMHQEGKETSTNPIASIFAWTRGLAHRGKLDDNQELIKFSNTLEQICVGCVETGSMTKDLAILVGSSQKYLTT

SEQ ID NO: 86615 - protein, 268 aa, Unknown
  Bacterial polypetide isolated from the Sargasso Sea
DQYRATDFLVPGKGKLEVKWTSEDGSDEKKYEVFNFPGPGIALSMYNLDKSIEDFARSCFNYGLIKKWPVYLSTKNTILKKYDGRFKDIFQNVFEKDFKSEFEKNNITYEHRLIDDMVACAMKWHGKYIWACKNYDGDVQSDTVAQGYGSLGLMTSVLLAPDGRTMEAEAAHGTVTRHFRMHQQGKETSTNPIASIFAWTRGLAHRGKLDSNDELIKFAKTLEEVCVNSVESGSMTKDLAILIGPSTKYLTTNQFLDVIDGSLKQKLN

SEQ ID NO: 86616 - protein, 149 aa, Unknown
  Bacterial polypetide isolated from the Sargasso Sea
MAKIKVKNPIVELDGDEMTRIIWSFIKKKLIEPYLEIDIKYFDLGIESRDKTSDQITVDCAKAIKEFGVGIKCATITPDEARVEEFKLKKMWRSPNGTIRNILGGTVFREPIICKNVPKLVPGWTNPIIIGRHAFGDQYKATDFLFQEK

SEQ ID NO: 86617 - protein, 210 aa, Unknown
  Bacterial polypetide isolated from the Sargasso Sea
MSKIKVKNPVVELNGDEMTRVIWEFIKNKLILPYLDLGIDYYDLGIKNRDKTNDQITIDCAKAIKKNGVGIKCATITPDEARVKEFNLKKMWRSPNGTIRNILGGTVFREPILCKNIPKLVPSWTNPICIGRHAFGDQYRATDFKVPGKGKLEIKWTSEDGSEKKEYEVFNFPGPGIALSMYNLDKSIKDFARACMNYGLNRKWPVYLST

SEQ ID NO: 86618 - protein, 271 aa, Unknown
  Bacterial polypetide isolated from the Sargasso Sea
FGDQYRATDTIIPSAGKLSMTFEPSDGSEKIHKEIFDFPGSGIAMTMYNLDESIKGFARACFNYGLDLGWPVYLSTKNTILKVYDGRFKDIFNDIYENEFKTKFESKKITYEHRLIDDMVACALKWDGGFVWACKNYDGDVQSDTVAQGFGSLGLMTSVLLTPDGKTVESEAAHGTVTRHYRQHQAGNQTSTNPIASIFAWTRGLSYRAKFDNTPEVDRFAKTLENVCIETVESGYMTKDLALLVSKDQKWLTTTEFLNKIDENFKKVMSV

SEQ ID NO: 86619 - protein, 238 aa, Unknown
  Bacterial polypetide isolated from the Sargasso Sea
EIFTFKVPGIAMTMYNVDESIKGFARACFNYGLDLGWPVYLSTKNTILKVYDGRFKDIFNDIYEREFKSKFEKKKITYEHRLIDDMVACALKWDGGFVWACKNYDGDVQSDTVAQGFGSLGLMTSVLLTPDGKTVEAEAAHGTVTRHYRQHQAGKQTSTNPIASIFAWTRGLSYRAKFDNSEKVEQFAKNLEKVCIESVESGYMTKDLALLVGSDQPWLTTTEFLNKVDANFKKIMLN

SEQ ID NO: 86620 - protein, 161 aa, Unknown
  Bacterial polypetide isolated from the Sargasso Sea
MAFEHIQEPKSGSKISIDSSGKLIVPDNPIIPFIEGDGIGSDITPAMIRVVDSAVEKSYGGKKKIEWMEIYCGEKSTVVYGEDNWLPPETLRALEIYLVGIKGPLTTPVGGGIRSLNVALRQELDLYVCQRPVRYFNGVPSPVISPEKTDMVIFRENSEDI

SEQ ID NO: 86621 - protein, 212 aa, Unknown
  Bacterial polypetide isolated from the Sargasso Sea
MAKIKVKNPVVELDGDEMTRIIWSFIKEKLIKPYLEIDLKYYDLGIENRDKTNDQITIDCAKAIQKYGAGVKCATITPDEARVKEFRLKKMWRSPNGTIRNIVGGTIFREPIICKNVPRLVSHWTDSVIVGRHAFGDQYKATDFKIPGKGKMTVKWESEDGKNKIEHEVFNFDGPGIALSMYNLDNSIKDFARACMNYGLVRKWPVYFSSKN

SEQ ID NO: 86622 - protein, 107 aa, Unknown
  Bacterial polypetide isolated from the Sargasso Sea
MPKIKVKNPVVELDGDEMTRIIWSFIKDKLIKPYLDIDLKYYDLGMKNRDKTNDQVTIDCAKAIQKYGAGVKCATITPDEARVKEFNLKKMWRSPNGTIRNIVGGTI

SEQ ID NO: 86623 - protein, 276 aa, Unknown
  Bacterial polypetide isolated from the Sargasso Sea
GIGPDIWEASVNVFDSAVKHAYGNTKKIDWLEVLAGEKAYESKGEWLPQSTLDTIFEHLIAIKGPLTTPVGGGIRSLNVALRQKLDLYACVRPVRWFEGVPSPVKEPGLVDMVIFRENTEDIYAGIEWMHGGDGIEKVKSFLVNEMGVTNIRFPETSSLGVKPVSKEGTERLVRSALEMALKQKRKSLTLVHKGNIMKYTEGAFRDWGYELAKKEYGAQDLDGGPWQIINDNGHQLIVKDVIADAFLQQILLRPSEYDVIATLNLNGDYISDALAA

SEQ ID NO: 86624 - protein, 262 aa, Unknown
  Bacterial polypetide isolated from the Sargasso Sea
MAKIKVKNPVVELDGDEMTRIIWSFIKDKLIKPYLDVNLKYFDLGMESRDKTDDQITVDAANAIKQHGVGVKCATITPDEARVEEFKLKKMWRSPNGTIRNILGGTVFREPIICKNVPKLVPGWNKPIVIGRHAYGDQYRATDFLIPGEGNLEVKWTSKDGRDKKEFKVFDFPGSGTALTMYNLDDSIKNFARACMNYGLGRKWPVYLSTKNTILKAYDGRFKDLFQEVFEKEFSDKFKKNNISYEHRLIDDMVACAMKWNG

SEQ ID NO: 86625 - protein, 253 aa, Unknown
  Bacterial polypetide isolated from the Sargasso Sea
MEIKWTSEDGKDEIKYEVFNFTGPGIALSMYNLDKSIEDFARSCFSYGLIKKWPVYMSTKNTILKQYDGRFKDIFEEIFNKEYKKEFDKNNLTYEHRLIDDMVACAMKWSGKYIWACKNYDGDVQSDTMAQGYGSLGLMTSTLLTPDGKVMEAEAAHGTVTRHYRMHQQGKETSTNPIASIFAWTRGLAHRGKLDSNDELINFSKTIEKVCIDCVENGAMTKDLAILVGPSSKYLTTNQFLDEIDGNLKKKLN

SEQ ID NO: 86626 - protein, 254 aa, Unknown
  Bacterial polypetide isolated from the Sargasso Sea
MSKIKVKNPIVELDGDEMTRVIWEFIKKKLVLPYIDLGIEYYDLGMKSRDDTNDQITIDCANAIKKVGVGIKCATITPDEERVKEFNLKKMWRSPNGTIRNIIGGTVFREPIICKNVPKLVPSWTDPLIIGRHAFGDQYRATDFLVPGKGNLEIKWTSEDGKEEKKYEVFKFPGPGIALSMYNLDKSIGDFARSCFNYGLIKKWPVYLSTKNTILKNYDGRFKDIFQEIYEKEFKSEFIKNKIIYEHRLIDDHG

SEQ ID NO: 86627 - protein, 233 aa, Unknown
  Bacterial polypetide isolated from the Sargasso Sea
MKFEHIVEPKNGSKITVDKSGKLNIPDNPIIPFIEGDGIGSDITPAMIQVVDSAVEKSYNGKRKIEWMEIYCGEKSTVVYGEDNWLPPETLKALEIYLVGIKGPLTTPVGGGIRSLNVALRQELDLYVCQRPVRYFDGVPSPVTNPEKTDMVIFRENSEDIYAGIEWEAGSDEAKKVIEFLTKEMGVTKIRFPEDCGIGVKPVSKEGTERLVDKAIQYAIANNRDSVTLVHKG

SEQ ID NO: 86628 - protein, 254 aa, Unknown
  Bacterial polypetide isolated from the Sargasso Sea
LKMVFEPTDGSEGFVKEVFNFEKEGIALSMYNLDQSIIEFARACFNYGLNLGWPVYLSTKNTILKVYDGRFKDLFENVFQNEFADKFKEKNIVYEHRLIDDMVATALKWEGEFIWACKNYDGDVQSDSVAQGYGSLGLMTSVLMTPDGKTVEAEAAHGTVTRHFRNHQQGLETSTNPIASIFAWSRGLHFRGKFDDNQNLMNFSKKLEETCIETVESGKMTKDLAILISENQKWLNTQDFLNTLKDNLEKKLES

SEQ ID NO: 86629 - protein, 115 aa, Unknown
  Bacterial polypetide isolated from the Sargasso Sea
MTSVLRTPDGKIAEAEAAHGTVTRHYRQHQEGKETSTNPIASIFAWTRGLAHRGQLDGNKELIKFSNTLEKVCVETVESGNMTKDLAILISKDQKFLTTNQFLEAINSNLKKKLN

SEQ ID NO: 86630 - protein, 286 aa, Unknown
  Bacterial polypetide isolated from the Sargasso Sea
NTEDIYAGIEWAAQTDDVKKVLNFLIEEMKVSGIRFPESSGIGIKPVSEEGSKRLIIKAIEYAIDNDRKSVSLVHKGNIMKFTEGAFRNWGYELAVNEFNGQIIDDGPWCKIINPNNGNEIIVKDVIADNFLQQILLRPEDYDVIATLNLNGDYISDALAAQVGGIGIAPGANISNKVAVFEATHGSAPKYAGKNRVNPGSIILSAEMMLRYIGWTEAADKVMNGVAQAIANKTVTYDLARVRAGMQTLVKKHEHGQEIRKDLEELMPGATLVTCSGFGDAIIDCM

SEQ ID NO: 86631 - protein, 256 aa, Unknown
  Bacterial polypetide isolated from the Sargasso Sea
AGIEFAANSNDANKLVNILTKDFSVDQIRFPKNVGLGVKPISEEGSKRLISRAFEYAIEHDRSSVTLVHKGNIMKFTEGSFRDWGYELCREKFEGDDLDGGPWHYFVNPNTKRKIIVKDVITDAFLQQILLRPREYDVIATMNLNGDYLSDALAACVGGIGIAPGANIGDDSALFEATHGTAPKYAGLDKVNPLSLILSAEMMLRHIGWSEAADILIQSIESTIKEKYVTYDFERLMKKATLVSCSGFAKEMIKRM

SEQ ID NO: 86632 - protein, 276 aa, Unknown
  Bacterial polypetide isolated from the Sargasso Sea
GVPSPVKVPGDVDMVIFRENSEDIYAGVEFASDSNESAELVKILKDKFNVDQIRFPQNVGLGVKPISEEGTKRLVKRAFEYAIEQDRSSVTLVHKGNIMKFTEGAFRDWGYELCREEFDGDDLDGGPWHYFINPNNGRKIIVKDVICDAFLQQILLRPREYDVIATMNLNGDYLSDALAAMVGGIGIAPGANIGDEAAMFEATHGTAPKYAGLDKVNPLSLILSAEMMLRHINWNEAADLLINSIEKTIQDRYVTYDFERLMDNATLVSCSGLQKR

SEQ ID NO: 86633 - protein, 221 aa, Unknown
  Bacterial polypetide isolated from the Sargasso Sea
MTENTSKSYDKIKVPAGSWISLNDDGSLNVPNDPIIAFIRGDGIGMDITPVMIKVVDAAVEKAYGGEKKINWMEVYAGELANEVYGEGTWLPDETLTALKDTHVSIKGPLTTPVGGGFRSLNVALRQMLDLYICLRPVKYYEGTPSPLKNPEYTDMVIFRENSEDIYAGIEWEAGTSESRRLIQTLQEQFDVKKIRFTNNCGIGIKPISKEGTQRLVRKAI

SEQ ID NO: 86634 - protein, 152 aa, Unknown
  Bacterial polypetide isolated from the Sargasso Sea
MVACAMKWQGKYIWACKNYDGDVQSDTVAQGYGSLGLMTSVLLAPDGRTMEAEAAHGTVTRHFRMHQQGKETSTNPIASIFAWTRGLAHRGKLDSNNELIKFAKTLEEVCVNSVESGSMTKDLAILIGPSTKYLTTNQFLDVIDGSLKQKLN

SEQ ID NO: 86635 - protein, 193 aa, Unknown
  Bacterial polypetide isolated from the Sargasso Sea
NTILKQYDGRFKDIFQDIFDKEYKNEFEKNNLTYEHRLIDDMVACAMKWSGKYIWACKNYDGDVQSDTMAQGYGSLGLMTSTLLTPDGKVMEAEAAHGTVTRHYRMHQQGKETSTNPIASIFAWTRGLAHRGKLDGNEELIKFAQTLEKVCIECVESGSMTKDLAILVGPNSKFLTTNQFLDKIDSNLKKKLN

SEQ ID NO: 86636 - protein, 148 aa, Unknown
  Bacterial polypetide isolated from the Sargasso Sea
MSKINIKNPVVELDGDEMTRIIWKFIKEELILPYLDIDIKYYDLGVESRDKTNDQITIDSAEAIKKIGVGIKCATITPDEERVEEFNLKEMWRSPNGTIRNILGGTVFREPIICKNIPRLVPGWTDPIIIGRHAFGDQYRATDIKVQG

SEQ ID NO: 86637 - protein, 239 aa, Unknown
  Bacterial polypetide isolated from the Sargasso Sea
MSKIKVKNSIVELNGDEMTRVIWEFIKNKLILPYLDLGIEYYDLSMKSRDNTNDQITIDCAKAIKKNGVGIKCATITADELRVKEFNLKKMWRSPNGTIRNIIGGTVFREPIICKNIPKLVPSWTDPLIIGRHAFGDQYRATDFLVPGKGKLEIKWTSEDGKDQKNYEVFNFPGPGIALSMYNLDKSIEDFARSCFNYGLIKKWPVYLSTKNTILKKYDGRFKDIFQKIFDEDFKAEFD

SEQ ID NO: 86638 - protein, 248 aa, Unknown
  Bacterial polypetide isolated from the Sargasso Sea
YFNGVPSPVVSPEKTDMVIFRENSEDIYAGIEWEAGTEEAEKVIKFFTEEMGVTKIRFMENCGIGVKPVSKQGTERLVDKAIQYAINNDRDSVTLVHKGNIMKFTEGSFKDWGYQFLVSKYGAKELDGGPWHTLTNPITGREIVIKDVIADAFLQQILTRPDEYSVIATLNLNGDYISDALAAEVGGIGIAPGANLGEKIALFEATHGTAPKYAGLDKVNPGSLILSAEMMLRYMGWMEAADLIIEGL

SEQ ID NO: 86639 - protein, 227 aa, Unknown
  Bacterial polypetide isolated from the Sargasso Sea
MSKIKVNNPVVELDGDEMTRIIWEFIKNKLILPYLDLGIEYYDLGMKSRDNTDDQITIDCANAIKKIGVGIKCATITPDEARVEEFDLKKMWRSPNGTIRNIIGGTVFREPIICKNIPKLVPSWTDPVIIGRHAFGDQYRATDFKVPGKGKMEVKWTSEDGKDEIKHEVFNFTGPGVALSMYNLDKSIEDFARSCFSYGLIKKWPVYMSTKNTILKQYDGRFKDYSK

SEQ ID NO: 86640 - protein, 199 aa, Unknown
  Bacterial polypetide isolated from the Sargasso Sea
MAKLKVKNPVVELDGDEMTRIIWSFIKDKLIKPYLEIDLKYYDLGMESRDKTDDKITVDAANAIKKFGVGVKCATITPDEARVKEFKLKKMWRSPNGTIRNILGGTVFREPIICKNIPKLVPGWTQPIVIGRHAFGDQYRATDFLIPGEGNLEVKWTSKDGKDKKEFKVFDFPGSGTALTMYNLDDSIRNFARACMNYG

SEQ ID NO: 86641 - protein, 321 aa, Unknown
  Bacterial polypetide isolated from the Sargasso Sea
GVGVKCATITPDEARVEEFGLKKMWRSPNGTIRNILGGVVFRQPIICRNVPRLVPGWTSPIVVGRHAFGDQYKATDFTFPGKGQLTMKFVGEDGTEIEKVVYDAPSAGVFMGMYNLDQSIRDFARASFNYGLNLGWPVYLSTKNTILKAYDGRFKDIFQEVFEEEFEEQFKAKKIWYEHRLIDDMVACALKWNGKFVWALKNYDGDVQSDTVAQGFGSLGMMTSQLMTPDGKIIEAEAAHGTVTRHYRQHQEGKSTSTNSIASIYAWTGGLKHRAKLDQNTALMAFATTLEKVVVETVENGFMTKDLALLVGPDQGWLTTM

SEQ ID NO: 86642 - protein, 223 aa, Unknown
  Bacterial polypetide isolated from the Sargasso Sea
YNLDNSIKDFAKACLNYGLVRKWPVYFSTKNTILKAYDGRFKDIFEEVYQNEFKDKFDKVGITYEHRLIDDMVACAMKWNGKYIWACKNYDGDVQSDTVAQGYGSLGLMTSVLRTPDGKIAEAEAAHGTVTRHYRQHQAGKETSTNPIASIFAWTRGLSHRGNLDGNQELIKFSEALEKVCIETVENGSMTKDLAILISKDQKFLTTNQFLEAINSNLKKKLN

SEQ ID NO: 86643 - protein, 301 aa, Unknown
  Bacterial polypetide isolated from the Sargasso Sea
GGTVFREPIICSNIPKLVPSWSDPVVIGRHAFGDQYRATDFKVPGKGKMEVKWTSEDGNKEIKYEVFNFTGPGVALSMYNLDKSIEDFARSCFSYGLIKKWPVYLSTKNTILKKYDGRFKDIFEEVFNKEFKKKFEELKITYEHRLIDDMVACAMKWSGKYIWACKNYDGDVQSDTMAQGYGSLGLMTSTLLTPDGKIMEAEAAHGTVTRHYRMHQQGKETSTNPIASIFAWTRGLAHRGKLDNNNELIEFANTIEQVCIECVEGGFMTKDLAILVGPSSKYLTTNQFLDVIDQKLKKKLN

SEQ ID NO: 86644 - protein, 268 aa, Unknown
  Bacterial polypetide isolated from the Sargasso Sea
IYGNDEWLPDETLQACKDYKVSIKGPLTTPVGGGIRSLNVAIRQKLDLYVCLRPVKYFDGTPSPVRRPDLVDMVIFRENSEDIYAGVEFESNTDAANKLIKVLQDDFGVEKIRFTENCGIGIKPVSEEGTKRLVRKAYEYAIQNEKDSVTLIHKGNIQKFTEGAFMDWGYELAREEFGGEPLDGGPWHTFKNPNTGKDIIVKDVICDAFLQQCLLRPADYDVLATPNLNGDYLSDALAAQVGGIGIAPGANLGDEVAVFEATHGTAPK

SEQ ID NO: 86645 - protein, 211 aa, Unknown
  Bacterial polypetide isolated from the Sargasso Sea
SCMNYGLNRKWPVYLSTKNTILKKYDGRFKDLFQEIYEKEFKEKFEERKITYEHRLIDDMVACALKWNGNYIWACKNYDGDVQSDTVAQGFGSLGLMTSVLMTPDGKTIEAEAAHGTVTRHYRLHQEGKETSTNPIASIFAWARGLYHRGKIDGNEDLKKFIKTLEKVCIETVENGSMTKDLAMLIGPTTKYLNTNQFLSSIDGNLKKKLN

SEQ ID NO: 86646 - protein, 134 aa, Unknown
  Bacterial polypetide isolated from the Sargasso Sea
YDGDVQSDTMAQGYGSLGLMTSTLLTPDGKVMEAEAAHGTVTRHYRMHQQGKETSTNPIASIFAWTRGLAHRGKLDSNEELIKFAQILEKVCIECVENGSMTKDLAILVGPNSKFLTTNQFLDEIDGNLKKKLN

SEQ ID NO: 86647 - protein, 261 aa, Unknown
  Bacterial polypetide isolated from the Sargasso Sea
TIRNIIGGTVFREPIICKNIPKLVPSWTDPVIIGRHAFGDQYRATDFKVPGKGKMEVKWTSEDGKDEIKHEVFNFSGPGVALSMYNLDKSIEDFARSCFSYGLIKKWPVYMSTKNTILKQYDGRFKDIFQEIFDKEYKSDFEKNNLTYEHRLIDDMVACAMKWSGKYIWACKNYDGDVQSDTMAQGYGSLGLMTSTLLTPDGKIMEAEAAHGTVTRHYRMHQQGKETSTNPIASIFAWTRGLVHRGKLDNNNELIKFAKTL

SEQ ID NO: 86648 - protein, 161 aa, Unknown
  Bacterial polypetide isolated from the Sargasso Sea
MSKIKVKNPVVELDGDEMTRIIWSFIKEKLIKPYLDIELKYFDLGMENRDKTNDQVTIDCAKAIQKFGAGVKCATITPDEARVKEFKLKKMWRSPNGTIRNIVGGTIFREPIICKNVPRLVPHWTDSVIVGRHAFGDQYRATDFKVPGKGKMTVKWESEDE

SEQ ID NO: 86649 - protein, 167 aa, Unknown
  Bacterial polypetide isolated from the Sargasso Sea
FKEREITYEHRLIDDMVACAMKWNGNYIWACKNYDGDVQSDTVAQGFGSLGLMSSVLMTPDGNTIEAEAAHGTVTRHYRLHQQGKETSTNPIASIFAWARGLYHRGKMDNNEELKKFVKTLEKVCIETVESGLMTKDLAILVGPSSKYLTTNQFLDVIDGNLKNKLN

SEQ ID NO: 86650 - protein, 271 aa, Unknown
  Bacterial polypetide isolated from the Sargasso Sea
MKFEHISEPKNGSKITVDKSGKLNIPDNPIIPFIEGDGIGSDITPAMIQVVDSAVEKSYENKRKIEWMEIYCGEKSTVVYGEDNWLPPETLKALETYLVGIKGPLTTPVGGGIRSLNVALRQELDLYVCQRPVRYFDGVPSPVTNPEKTDMVIFRENSEDIYAGIEWEAGSDEAQKVIKFLTEEMGVTKIRFAEDCGIGVKPVSKQGTERLVDKAIRYAIDNDRDSVTLVHKGNIMKFTEGSFKDWGYQYAASEYGAVELDGGPWHSLKNP

SEQ ID NO: 86651 - protein, 202 aa, Unknown
  Bacterial polypetide isolated from the Sargasso Sea
KWPVYLSTKNTILKRYDGRFKDIFEEVFEKEFKDRFNQNKITYEHRLIDDMVACAMKWHGKYIWACKNYDGDVQSDTVAQGYGSLGLMTSVLLAPDGKTMEAEAAHGTVTRHFRMHQQGKETSTNPIASIFAWTRGLAHRGKLDGNEELIKFAETLEKVCVDCVEEGSMTKDLAILIGPSTKYLTTNQFLDTLDGKLRQKLN

SEQ ID NO: 86652 - protein, 300 aa, Unknown
  Bacterial polypetide isolated from the Sargasso Sea
DLSMKSRDDTNDQITVDCAKAIKKNGVGIKCATITADELRVKEFNLKKMWRSPNGTIRNIIGGTVFREPIICKNIPKLVPSWTDPLIIGRHAFGDQYRATDFLVPGKGKLEIKWTSEDGKDQKNYEVFNFPGPGIALSMYNLDKSIEDFARSCFNYGLIKKWPVYLSTKNTILKKYDGRFKDIFQKIFDEDFKTEFDKNNITYEHRLIDDMVACAMKWSGKYIWACKNYDGDVQSDTVAQGYGSLGLMTSVLLAPDGRTMEAEAAHGTVTRHFRLHQQGKETSTNPIASIFAWTRGWLIE

SEQ ID NO: 86653 - protein, 205 aa, Unknown
  Bacterial polypetide isolated from the Sargasso Sea
MSKIKVKNPVVELDGDEMTRVIWEFIKRKLILPYLDLGIEYYDLGMKSRDDTSDQITIDCANAIKKNGVGIKCATITPDEARVKEFNLKKMWRSPNGTIRNIIGGTVFREPIICKNVPRLVPSWTDPVIIGRHAFGDQYRATDFKVPGKGKLEVKWTSEDGKDNKSYEVFNFPGPGVALSMYNLDKSIEDFARSCFNYGLIKKWP

SEQ ID NO: 86654 - protein, 318 aa, Unknown
  Bacterial polypetide isolated from the Sargasso Sea
KNPIVELDGDEMTRVIWEFIKKKLIKPYLELDIKYYDLGIKSRDKTLDQITIDCANAIKKYNVGIKCATITPDEGRVEEFNLKKMWRSPNGTIRNILGGTVFREPILCKNIPKLVPSWENPICIGRHAFGDQYRATDFQVPGKGKLEIKWTSEDGKEKKEFEVFNFPGPGVAMSMYNLDQSIKDFARACMNYGLNRKWPVFLSTKNTILKKYDGRFKDIFQEIYEKEFVEKFKDRGITYEHRLIDDMVACAMKWNGNYIWACKNYDGDVQSDTVAQGFGSLGLMSSVLMSPDGKTIEAEAAHGTVTRHYRMHQQGKET

SEQ ID NO: 86655 - protein, 144 aa, Unknown
  Bacterial polypetide isolated from the Sargasso Sea
MEIIFWACKNYDGDVQSDTVAQGFGSLGLMTSILMSPDGKTIESEAAHGTVTRHYRLHQKGKETSTNPIASIFAWARGLYHRGKLDENDKLKKFVKTLEKVCIRTVENGHMTKDLAVLIGKNQKYLTTNQFLEAIDSNLKKSLK

SEQ ID NO: 86656 - protein, 142 aa, Unknown
  Bacterial polypetide isolated from the Sargasso Sea
DKITIECANAIKRNGVGIKCATITPDEARVREFNLKKMWRSPNGTIRNIIGGTVFREPIICKNIPKLVPSWTDPLIIGRHAFGDQYRATDFTVPGKGKLEIKWTAEDGSDERKYEVFNFPGPGIALSMYNLDKSIEDFARSC

SEQ ID NO: 86657 - protein, 142 aa, Unknown
  Bacterial polypetide isolated from the Sargasso Sea
MPKIKVKNPVVELDGDEMTRIIWDFIKKKLILPYLEIDIKYYDLGIKNRDKTLDKITIECANAIKKIGVGIKCATITPDENRVKEFDLKKMWRSPNGTIRNILGGTVFREPIICKNIPKLVPSWTNPIVIGRHAFGDQYRAT

SEQ ID NO: 86658 - protein, 227 aa, Unknown
  Bacterial polypetide isolated from the Sargasso Sea
ALSMYNLDNSIKDFARACMNYGLVRKWPVYFSSKNTILKAYDGRFKDIFEEIFQKEFKIKFDEAGITYEHRLIDDMVACAMKWSGKYIWACKNYDGDVQSDTVAQGYGSLGLMTSVLRTPDGKIAEAEAAHGTVTRHYRQHQAGKETSTNPIASIFAWTRGLSHRGNLDGNQDLIKFAESLEKVCIETVESGSMTKDLAILISKDQKYLTTNQFLEAIDSNLKKKLN

SEQ ID NO: 86659 - protein, 303 aa, Unknown
  Bacterial polypetide isolated from the Sargasso Sea
GVGIKCATITADELRVKEFNLKKMWRSPNGTIRNIIGGTVFREPIICKNIPKLVPSWTDPLIIGRHAFGDQYRATDFLVPGKGKLEVKWTSEDGKNQKNYEVFNFPGPGIALSMYNLDKSIEDFARSCFNYGLIKKWPVYLSTKNTILKKYDGRFKDIFQKVFDEDFKTEFDKNNITYEHRLIDDMVACAMKWSGKYIWACKNYDGDVQSDTVAQGYGSLGLMTSVLLAPDGRTMEAEAAHGTVTRHFRLHQQGKETSTNPIASIFAWTRGLAHRGKLDSNDELIKFSNTLEKVCIDCVENGS

SEQ ID NO: 86660 - protein, 138 aa, Unknown
  Bacterial polypetide isolated from the Sargasso Sea
ACKNYDGDVQSDTVAQGYGSLGLMTSVLRTPDGKIAEAEAAHGTVTRHYRQHQQGKETSTNPIASIFAWTRGLAHRGQLDSNDELIKFSDTLERVCIETVENGSMTKDLAILISESQKYLTTNQFLEAINSNLKKKLN

SEQ ID NO: 86661 - protein, 261 aa, Unknown
  Bacterial polypetide isolated from the Sargasso Sea
VEKTYKNDRKIIWIEVLAGQKAYDTTSEWLPDKTLETFNEYGVGIKGPLTTPVGEGIRSINVAIRQELDLYVCLRPIKYFKGIQTPTKNPQDVDITLFRENTEDVYAGKELENSSEDVEKLNNFLKQEFGWDIRIDSGIGIKPISQTASERLIRAALNYAVENDKKNVALVHKGNIMKFTEGAFRKWGYDLVKSEFSDVAVSWEDCGGDPGDKILVQDVIADAFLQQILIKPQMFDVIATTNLNGDYASDALAAQIGGIGI

SEQ ID NO: 86662 - protein, 246 aa, Unknown
  Bacterial polypetide isolated from the Sargasso Sea
DGSDGFIKDVYEFEKEGIALSMYNLDQSIIDFARACFTYGLNLGWPVYLSTKNTILKVYDGRFKDIFENIFQTEFAQKFKQKNIVYEHRLIDDMVATALKWEGNFIWACKNYDGDVQSDSVAQGYGSLGLMTSVLMTPDGKTVEAEAAHGTVTRHYRNHQKGLETSTNPIASIFAWSRGLYFRGKFDKNDNLIQFTKKLEETCIETVESGKMTKDLAILINSDQNWLNTEDFLRTLKENLENKLKF

SEQ ID NO: 86663 - protein, 170 aa, Unknown
  Bacterial polypetide isolated from the Sargasso Sea
MSKIKVKNPVVELDGDEMTRIIWEFIKNKLILPYLDLGIEYYDLGMKSRDNTDDQITIDSANAIKKIGVGIKCATITPDEARVEEFDLKKMWRSPNGTIRNIIGGTVFREPIICKNIPKLVPSWTDPVIIGRHAFGDQYRATDFKVPGKGKMEVKWTSEDGKDQIKYEVF

SEQ ID NO: 86664 - protein, 286 aa, Unknown
  Bacterial polypetide isolated from the Sargasso Sea
VGGTIFREPIICKNVPRLVPHWTESVIVGRHAFGDQYRATDFKVPGKGKMTIKWESEDGKKKIEHEVFKFNDSGIALSMYNLDSSIRDFARACLNYGLVRKWPVYFSSKNTILKVYDGRFKDIFEDIYQKEFKKKFDETGITYEHRLIDDMVACAMKWSGKYIWACKNYDGDVQSDTVAQGYGSLGLMTSVLRTPDGKIAEAEAAHGTVTRHYRQHQQGKETSTNPIASIFAWTRGLAHRGQLDDNDELIKFSNTLEKVCIETVESGLMTKDLAILISKSQNFLTT

SEQ ID NO: 86665 - protein, 240 aa, Unknown
  Bacterial polypetide isolated from the Sargasso Sea
IKYEVFNFTGPGVALSMYNLDKSIQDFARSCFSYGLMKKWPVYMSTKNTILKQYDGRFKDIFQEIFENEFKEEFEKNNLTYEHRLIDDMVACAMKWSGKYIWACKNYDGDVQSDTMAQGYGSLGLMTSTLLTPDGKIMEAEAAHGTVTRHYRMHQQGKETSTNPIASIFAWTRGLAHRGKLDSNNELIKFAQTIEKVCIECVENGAMTKDLAILIGPSSKYLTTNQFLDEIDGKLKAKLN

SEQ ID NO: 86666 - protein, 235 aa, Unknown
  Bacterial polypetide isolated from the Sargasso Sea
NIEWMEVYCGEKATKVYSKDDWLPDETIEALKEYVISIKGPLTTPVGGGIRSLNVSLRQILDLYVCLRPIRYFNGVPSPVKRPQDTDMVIFRENSEDIYCGVEFEGNSTASKNLIKTLKKDFKVKKIRFDKNVGIGIKPISEQGTSRLVKKAIDYAIDNNRSSITLVHKGNIMKYTEGAFRDWGYEIAKRDYGGIEIDDGPWQEIINPNNGKKIVIKDVICDAFLQQILTRPTEY

SEQ ID NO: 86667 - protein, 159 aa, Unknown
  Bacterial polypetide isolated from the Sargasso Sea
EHRLIDDMVACAMKWSGKYIWACKNYDGDVQSDTVAQGYGSLGLMTSVLRTPDGKIAKAEAAHGTVTRHYRLHQQGKETSTNPIASIFAWTRGLSHRGKLDGNNELIKFSDALEKVCIETVESGSMTKDLAILISKSQKFLTTNQFLEAIDSNLKKKLK

SEQ ID NO: 86668 - protein, 136 aa, Unknown
  Bacterial polypetide isolated from the Sargasso Sea
MLFLQQILLRPKEYSVIATMNLNGDYISDALAAIVGGIGIAPGANINYQSGHAIFEATHGTAPKYAGLNKVNPGSVILSGSMMLEHLGWNEAKDLIHKGLTKSIESGKVTYDFERLMDNATLLSCSDFAQEIVNNM

SEQ ID NO: 86669 - protein, 270 aa, Unknown
  Bacterial polypetide isolated from the Sargasso Sea
EARVEEFYLKKMWRSPNGTIRNIIGGTVFREPIICKNIPKLVPSWTDPVVIGRHAFGDQYRATDFKVPGKGKMEVKWTSEDGKDEIKYEVFNFTGPGVALSMYNLDKSIGDFARSCFSYGLIKKWPVYMSTKNTILKQYDGRFKDIFQEIFDNEYKEDFEKNNLTYEHRLIDDMVACAMKWSGKYIWACKNYDGDVQSDTMAQGYGSLGLMTSTLLTPDGKVMEAEAAHGTVTRHYRMHQQGKETSTNPIASIFAWTRGLAHRGKLDNND

SEQ ID NO: 86670 - protein, 296 aa, Unknown
  Bacterial polypetide isolated from the Sargasso Sea
MKFEHIREPKTGSKITVDKSGNLIIPDNPIIPFIEGDGIGSDITPAMIQVVDSAVEKSYEGKRKIEWMEIYCGEKSTEVYGKDNWLPSETLKALETYLVGIKGPLTTPVGGGIRSLNVALRQELDLYVCQRPVRYFEGVPSPVTNPEKTDMVIFRENSEDIYAGIEWEAGSEEAQKVINFLTKEMGVTKIRFSEDCGIGVKPVSKQGTERLVDKAIQYAIANDRDSVTLVHKGNIMKFTEGSFKDWGYQFAASKYGAVELDGGPWHSLKNPDTGREIIIKDVIADAFLQQNFNKTL

SEQ ID NO: 86671 - protein, 251 aa, Unknown
  Bacterial polypetide isolated from the Sargasso Sea
MWRSPNGTIRNIIGGTVFREPIICSNIPKLVPSWTDPVIIGRHAFGDQYRATDFKVPGKGKMEVKWTSEDGKDEIKYEVFNFTGPGVALSMYNLDKSIQDFARSCFSYGLIKKWPVYMSTKNTILKKYDGRFKDIFQEIFDKEYKKDFEKNKLTYEHRLIDDMVACAMKWSGKYIWACKNYDGDVQSDTMAQGYGSLGLMTSTLLTPDGKVMEAEAAHGTVTRHFRMHQQGKETSTNPIASIFAWTRGLAH

SEQ ID NO: 86672 - protein, 262 aa, Unknown
  Bacterial polypetide isolated from the Sargasso Sea
MTYKNIKVPKKGKKICYKKGKLVVPSNPIIPFIEGDGIGVDITPPMINVVDEAVKIAYNGEKKIEWMEVYCGEKATKVYSKDDWLPDETIQALKEFVISIKGPLTTPVGGGIRSLNVSLRQILDLYVCLRPIRYFNGVPSPVKRPQDTDMVIFRENSEDIYCGVEFEGNSKESKNLVNILKTDFNVEKIRFDKNVGIGIKPISQEGTSRLVKKAINYAIDNDRSSVTLVHKGNIMKYTEGAFRDWGYEIAKNDYKGIEIDEG

SEQ ID NO: 86673 - protein, 199 aa, Unknown
  Bacterial polypetide isolated from the Sargasso Sea
VYLSTKNTILKKYDGRFKDIFQKIFEEEFKTEFEKNNITYEHRLIDDMVACAMKWSGKYIWACKNYDGDVQSDTVAQGYGSLGLMTSVLLAPDGKTMEAEAAHGTVTRHFRMHQQGKETSTNPIASIFAWTRGLAHRGKLDNNHELINFSNTLEKVCIDCVESGSMTKDLAILVGPSTKYLTTNQFLDEIDRNLLKQLN

SEQ ID NO: 86674 - protein, 235 aa, Unknown
  Bacterial polypetide isolated from the Sargasso Sea
FNFPGPGIALSMYNLDKSIIDFARACMNYGLNRKWPVYLSTKNTILKKYDGRFKDLFQEVYEKEFKEKFKERKITYEHRLIDDMVACAMKWNGNYIWACKNYDGDVQSDTVAQGFGSLGLMTSMLMSPDGKTIESEAAHGTVTRHYRLHQQGKETSTNPIASIFAWARGLYHRGKLDGNEDLKKFVKTLEKVCIETVENGSMTKDLAVLIGPSTKYLNTNEFLDLLTNNLSKKLN

SEQ ID NO: 86675 - protein, 274 aa, Unknown
  Bacterial polypetide isolated from the Sargasso Sea
RNKSDDQVTIDAAEAVKKFGVGIKCATITPDEDRVKEFNLKKMWRSPNGTIRNILGGTIFRQPIICKNVPRIITNWNKPIVVARHAFGDQYRATDTLIKKPGKLKMVFEPTDGSDGFIKDVYEFEKEGIALSMYNLDQSIIDFARACFTYGLNLGWPVYLSTKNTILKVYDGRFKDIFENIFQTEFAQKFKQKNIVYEHRLIDDMVATALKWEGNFIWACKNYDGDVQSDSVAQGFGSLGLMTSVLMTPDGKTVEAEAAHGTVTRHYRNHQKGF

SEQ ID NO: 86676 - protein, 186 aa, Unknown
  Bacterial polypetide isolated from the Sargasso Sea
RDIQKFTEGAFRDWGYELAEEEFDAKPIDGGPWHSMINPNNGNEIIIKDVICDAFLQQILHRPAEYDVLASPNLNGDYISDALAAQVGGIGIAPGANLGDEIAIFEATHGTAPKYAGQDRVNPGSLILSAEMMLRHLGWTEAADMILVAMEKTIKKKTVTYDFARLIDDPIEVSCSDFGEHLIKKF

SEQ ID NO: 86677 - protein, 296 aa, Unknown
  Bacterial polypetide isolated from the Sargasso Sea
MWRSPNGTIRNIIGGTVFREPIICKNIPKLVPSWTNPICIGRHAFGDQYRATDFQVPGKGKLELKWTSEDGKEKKEFEVFNFPGPGVALSMYNLDQSIRDFARACMNYGLNRKWPVYLSTKNTILKKYDGRFKDLFEEIYEKEFKEKFKEREITYEHRLIDDMVACAMKWNGNYIWACKNYDGDVQSDTVAQGFGSLGLMTSILMSPDGKTIESEAAHGTVTRHYRMHQEGKETSTNPIASIFAWARGLYHRGKLDGNEDLKKFVKNLEKICIETVENGSMTKDLAILIGPSTKYL

SEQ ID NO: 86678 - protein, 327 aa, Unknown
  Bacterial polypetide isolated from the Sargasso Sea
KTLQKMIERINWIEVLAGQKAYDTTSEWLPDKTLETFNEYGVGIKGPLTTPVGEGIRSINVAIRQELDLYVCLRPIKYFKGIQTPTKNPQDVDITLFRENTEDVYAGKELENSSEDVEKLNNFLKQEFGWDIRIDSGIGIKPISRTASERLIRAALNYAVENDKKNVALVHKGNIMKFTEGAFRKWGYDLVKSEFSDVAVSWEDCGGDPGDKILVQDVIADAFLQQILIKPQMFDVIATTNLNGDYASDALAAQIGGIGISPGGNINYENGKAVFEATHGTAPKYAGQDKTNPGSLILSGVMMFRYMGWNSAADLIVKSMEKTILEG

SEQ ID NO: 86679 - protein, 284 aa, Unknown
  Bacterial polypetide isolated from the Sargasso Sea
KRKISWMEIYCGEKSVKIYGNDEWMPDETLQACKDYKVSIKGPLTTPVGGGIRSLNVAIRQKLDLYVCLRPVKYFDGTPSPVRRPDLVDMVIFRENSEDIYAGVEFESNTDAANKLIKVLQDDFGVEKIRFTENCGIGIKPVSEEGTKRLVRKAYEYAIQNEKDSVTLIHKGNIQKFTEGAFMDWGYELAREEFGGEPLDGGPWHTFKNPNTGKDIIVKDVICDAFLQQCLLRPADYDVLATPNLNGDYLSDALAAQVGGIGIAPGANLGDEVAVFEATHGTAP

SEQ ID NO: 86680 - protein, 143 aa, Unknown
  Bacterial polypetide isolated from the Sargasso Sea
VKDVIADAFLQQILLRPSEYDVIATLNLNGDYISDALAAIVGGIGIAPGANINYSSGHAIFEATHGTAPKYAGKDQVNPSSVILSGVMMLEYIGWQEAADLIVKGIEGAISNKRVTYDFHRLMDGATKLKCSEFGSEIIYNMS

SEQ ID NO: 86681 - protein, 271 aa, Unknown
  Bacterial polypetide isolated from the Sargasso Sea
VIGRHAFGDQYRATDFKIPGKGKLTVKWESENGNDKIEHEVFGFPSSGIAMTMYNLDDSIKDFARASMNYGLQRKWPVYMSTKNTILKAYDGRFRDIFQEIFDKEFKKEFEKNGLTYEHRLIDDMVACALKWSGKFVWACKNYDGDVQCDTVAQGYGSLGLMTSVLMTPDGKTVESEAAHGTVTRHFRQHQQGKETSTNPIASIFAWTRGLLHRGKLDGNDELTKFAKSLEEVCIETVENGEMTKDLAILIDKNSKFLTTNQFLEALDKNL

SEQ ID NO: 86682 - protein, 202 aa, Unknown
  Bacterial polypetide isolated from the Sargasso Sea
KWPVYLSTKNTFLKTYDGRFKDIFQVVFEKEFKSDFDKHNLTYEHRLIDDMVACAMKWSGKYIWACKNYDGDVQSDTVAQGYGSLGLMTSVLLAPDGRTMEAEAAHGTVTRHFRMHQQGKETSTNPIASIFAWTRGLAHRGKLDSNDELIKFSKTLEDVCINCVETGSMTKDLAILIDKNQKYLTTNQFLDAIDGNLKKKLN

SEQ ID NO: 86683 - protein, 237 aa, Unknown
  Bacterial polypetide isolated from the Sargasso Sea
MSYKNIKIPESGEKITLKNGVLTVPNNPIIPFIEGDGIGSDITPAMIDVVDAAVKNAYGEEKSISWMEIYCGEKSTKVYGKDEWLPDETLDALREYVVSIKGPLTTPVGGGIRSLNVSLRQILDLYVCLRPVRWFTGVPSPVKAPGDVDMVIFRENSEDIYAGVEFASDSKESADLVKILQDKFNVDQIRFPKNVGLGVKPISEEGTKRLVKRAFEYAIEQDRSSVTLVHKGNIMKF

SEQ ID NO: 86684 - protein, 270 aa, Unknown
  Bacterial polypetide isolated from the Sargasso Sea
FGDQYRATDFQVPGKGKLEIKWTSEDGKEKKEFEVFKFPGPGVALSMYNLDQSIKDFARACMNYGLNRKWPVYLSTKNTILKKYDGRFKDLFEEVYQKEFKEKFEEREITYEHRLIDDMVACAMKWNGNYIWACKNYDGDVQSDTVAQGFGSLGLMTSVLMSPDGKTIESEAAHGTVTRHYRLHQQGKETSTNPIASIFAWARGLYHRAKLDNNEDLKKFVKTLEKVCVDCVEKGSMTKDLAILVGPSTKYLTTNQFLDEIDGNLKKNLN

SEQ ID NO: 86685 - protein, 304 aa, Unknown
  Bacterial polypetide isolated from the Sargasso Sea
NIIGGTVFREPIICKNIPKLVPSWSDPVVIGRHAFGDQYRATDFKVPGKGIMEIKWTSEDGKKEIKHEVFNFTGPGVALSMYNLDRSIEDFARSCFSYGLIKKWPVYLSTKNTILKKYDGRFKDIFQEVFDKEFKKKFEDSRITYEHRLIDDMVACAMKWSGKYIWACKNYDGDVQSDTMAQGYGSLGLMTSTLLTPDGKIMEAEAAHGTVTRHFRMHQQGKETSTNPIASIFAWTRGLAHRGKLDNNEELIKFSNKIEEVCIECVESGSMTKDLAILIGPSSRYLTTNQFLDEIDGRLKKKLN

SEQ ID NO: 86686 - protein, 256 aa, Unknown
  Bacterial polypetide isolated from the Sargasso Sea
MTDIINGNKITFKKDHLLVPNNPIIPFIEGDGIGPDIWKASQHVFDQAVSKAYSGNKKIIWKEVFAGEKANDKYNNWLPDETISVIQDHLIAIKGPLTTPVGGGIRSLNVALRQILDLYACVRPVRWFSGVPSPVKKPELVDMVIFRENTEDIYAGIEWLHGTDEVEKVKRFFIDEMKVDTIRFPETSSLGVKPISVEGTERLVRSAINYAISHKRRSLTLVHKGNIMKFTEGKFKEWGYDLAKREIQSSDFEGGP

SEQ ID NO: 86687 - protein, 199 aa, Unknown
  Bacterial polypetide isolated from the Sargasso Sea
MTKINVKNPIVELDGDEMTRIIWDFIKKKLILPYLNINIQYYDLGIKNRDKTSDQVTIDCANAIKKFGVGIKCATITPDENRVKEFGLKKMWISPNGTIRNILGGTVFREPIICKNIPKLVPGWTNPIVIGRHAFGDQYRALDFKVPGKGKLKMKWISEDGKEIKEFDVFNFGGPGVALSMYNLDQSIKDFARACMNYG

SEQ ID NO: 86688 - protein, 115 aa, Unknown
  Bacterial polypetide isolated from the Sargasso Sea
MAKLKVKNPIVELDGDEMTRIIWSFIKDKLIKPYLEIDLKYYDLGMESRDKTDDQITVDAANAIKQHGVGVKCATITPDEARVEEFKLKKMWRSPNGTIRNILGGTVFRERNYCK

SEQ ID NO: 86689 - protein, 217 aa, Unknown
  Bacterial polypetide isolated from the Sargasso Sea
DRRFCKVLFHYGLIKKWPVYLSTKNTILKKYDGRFKDIFQKVYDQDFKSEFEKNHIIYEHRLIDDMVACAMKWSGKYIWACKNYDGDVQSDTVAQGYGSLGLMTSVLLAPDGKTMEAEAAHGTVTRHFRMHQQGKETSTNPIASIFAWTRGLAHRGKLDNNEELIKFAQSLETVCIDVVEQGHMTKDLAILIGPSNKYLTTNQFLEVIKSNLEKKLN

SEQ ID NO: 86690 - protein, 293 aa, Unknown
  Bacterial polypetide isolated from the Sargasso Sea
RALEIYLVGIKGPLTTPVGGGIRSLNVALRQELDLYVCQRPVRYFNGVPSPVVSPEKTDMVIFRENSEDIYAGIEWEAGTEEADKVIKFLTEEMGVNKIRFMENCGIGVKPVSKQGTERLVDKAIQYAINNDRDSVTLVHKGNIMKFTEGSFKDWGYQFAASKYNATELDGGPWHTLTNPITGKEIIIKDVIADAFLQQILTRPDEYSVIATLNLNGDYISDALAAEVGGIGIAPGANLGDKIALFEATHGTAPKYAGLDKVNPGSLILSAEMMLRYMGWMEAADLIIEGLAR

SEQ ID NO: 86691 - protein, 240 aa, Unknown
  Bacterial polypetide isolated from the Sargasso Sea
MSKIKVKNPVVELDGDEMTRIIWSFIKAKLIKPYLEVNLKYYDLGMESRDKSDDQITIDAAKAIKQYGVGVKCATITPDEARVEEFKLKKMWRSPNGTIRNILGGTVFREPIICKNVPKLVPGWTKPIVIGRHAYGDQYRATDFLIPGEGNLEVKWTSKDGKDKKEFKVFDFPGSGTALTMYNLDESIKNFARACMNYGLGRKWPVYLSTKNTILKAYDGRFKDLFQESFEKEFSDKLKK

SEQ ID NO: 86692 - protein, 117 aa, Unknown
  Bacterial polypetide isolated from the Sargasso Sea
GLMTSVLLAPDGKTMEAEAAHGTVTRHFRMHQQGKETSTNPIASIFAWTRGLAHRGKLDGNEELIKFAETLEKVCVDCVEEGSMTKDLAILIGPSTKYLTTNQFLDTLDGKLRQKLN

SEQ ID NO: 86693 - protein, 186 aa, Unknown
  Bacterial polypetide isolated from the Sargasso Sea
GNIMKYTEGAFRDWGYELAKNEFGGIEIDEGPWQEIVNPKNGKKIVIKDVICDAFLQQILLRPTEYDVIATMNLNGDYISDALAAMVGGIGIAPGANISDEYAVFEATHGTAPKYAGQNKVNPGSLILSAEMMLRHMGWIEAADLIMSSMDRAIGAKKVTYDFARMMSDADLVSSSGFADEMIKRM

SEQ ID NO: 86694 - protein, 239 aa, Unknown
  Bacterial polypetide isolated from the Sargasso Sea
MAKIKVKNPVVELDGDEMTRIIWSFIKDKLIKPYLDLDLKYYDLGMKSRDNTNDQITIDCAKAIQKYGAGVKCATITPDEARVKEFSLKKMWRSPNGTIRNIVGGTIFREPIICKNVPRLVPHWTESVIVGRHAFGDQYKATDFKVPGKGRMTVKWESENGKDKIEHEVFNFDGPGIALSMYNLDNSIRDFARACMNYGLVRKWPVYFSSKNTILKAYDGRFKDIFEEVFQKEFKKKFK

SEQ ID NO: 86695 - protein, 256 aa, Unknown
  Bacterial polypetide isolated from the Sargasso Sea
MENGSLNVPNHPIIPFIEGDGIGPDIWKASVNVFDSAVKHAYGNTKKIDWLEVLAGEKAYESKGEWLPQITLDTISENLVAIKGPLTTPVGGGIRSLNVALRQKLDLYACVRPVRWFEGVPSPVKEPQLVDMVIFRENTEDIYAGIEWMHGGDDIEKVKSFLVDEMGVTNIRFPDTSSLGVKPVSEEGTERLVRAAIEMALKQKRKSLTLVHKGNIMKFTEGAFRDWGYELARKEYGAQDLDGGPWQLINDNGHKL

SEQ ID NO: 86696 - protein, 220 aa, Unknown
  Bacterial polypetide isolated from the Sargasso Sea
DKSIQDFAKSCFSYGLIKKWPVYMSTKNTILKQYDGRFKDIFQEVFDNEYKEEFEKHNLTYEHRLIDDMVACAMKWSGKYIWACKNYDGDVQSDTMAQGYGSLGLMTSTLLTPDGKVMEAEAAHGTVTRHYRLHQQGKETSTNPIASIFAWTRGLAHRGKLDDNQELIKFAQTLEAVCIECVENGLMTKDLAILVGPNSKFLTTNQFLDEIDGNLKKKLN

SEQ ID NO: 86697 - protein, 292 aa, Unknown
  Bacterial polypetide isolated from the Sargasso Sea
HGYLDETIDALKEYIVSIKGPLTTPVGGGIRSLNVSLRQILDLYVCLRPIRYFAGVPSPVKNPSYVDMVIFRENSEDIYAGVEFEAGSSQSDAMVKVLQEQFGVTQIRFPSDVGLGVKPISKQGTERLVKQALDYAIKNDRSSVTLVHKGNIMKFTEGAFRDWGYELSMNSYNGELLDGGPWVTIKNPTNGKNIIIKDVICDAFLQQILTRPKEYDVIATMNLNGDYVSDALAACVGGIGIAPGANIGDESALFEATHGTAPKYAGQDKVNPGSLILSAEMMLRHLGWVEAA

SEQ ID NO: 86698 - protein, 320 aa, Unknown
  Bacterial polypetide isolated from the Sargasso Sea
LLIGGGIRSLNVALRQIFDLYSCVRPCKYYSGTPSPHKNPQNLDVIVYRENTEDIYMGIEWEAEDNNCLELINHLNNVVIPKSKNLKNRSIPEGSGIGIKPVSKSGSQRHIRKAIEHAKRLSGDKRHVTLVHKGNIMKYTEGAFRDWGYELAVNEFREDCITERESWILDNIQKNPEITIENNARKIEPGFDKLTNNKKAFICEEIKEVIASISNSHGDGKWKELILVDDRIADSIFQQIQTRPQEYSILATLNLNGDYVSDAAAAIVGGLGMAPGANIGDNAAIFEATHGTAPKHAGLNKINPGSVILSGVMMLEYFGW

SEQ ID NO: 86699 - protein, 134 aa, Unknown
  Bacterial polypetide isolated from the Sargasso Sea
YDGDVQSDTMAQGYGSLGLMTSTLLTPDGKIMEAEAAHGTVTRHYRMHQQGKETSTNPIASIFAWTRGLAHRGKLDSNNELIKFAQTIEKVCIECVENGAMTKDLAILIGPSSKYLTTNQFLDEIDGKLKAKLN

SEQ ID NO: 86700 - protein, 140 aa, Unknown
  Bacterial polypetide isolated from the Sargasso Sea
MSKIKVKNPIVELDGDEMTRIIWSFIKKKLITPYLDLKIEYFDLGIESRDRSSDQITIDCANAIKKYGVGIKCATITPDEARVKEFKLKKMWRSPNGTIRNILGGTVFREPIICKNVPKLVPGWIKPNYYWKTMLLVINI

SEQ ID NO: 86701 - protein, 223 aa, Unknown
  Bacterial polypetide isolated from the Sargasso Sea
YNLDNSIKDFARACMNYGLNRKWPVYLSTKNTILKKYDGRFKDLFQEVFEKEFEKKFKERKITYEHRLIDDMVACAMKWNGNYIWACKNYDGDVQSDTIAQGFGSLGLMTSVLMSPDGNTIESEAAHGTVTRHYRLHQQGKETSTNPIASIFAWARGLYHRGKLDNNEKLKKFVKTLEKVCIQTVEDGFMTKDLAVLVGKKQKYLTTNQFLDVIDSNLKKSLN

SEQ ID NO: 86702 - protein, 304 aa, Unknown
  Bacterial polypetide isolated from the Sargasso Sea
GTPSPHKRPQDLDVIVYRENTEDIYMGVEWEADDAVGQELRRHLNEVVIPANGKLGKRQIPEGSGIGIKPVSKHGSQRHIRKAIQHALRLEGNKRHVTLVHKGNIMKFTEGAFRDWGYELATTEFRDVCITERESWILGNLEKDSGLSVQANARMIEPGYDSLTPEKKADIDAEVQAVIDTIGSSHGGGKWKEMVLVDDRIADSIFQQIQTRPQEYSILATLNLNGDYISDAAAAMVGGLGMAPGANIGQNAAIFEATHGTAPKHAGLDRINPGSVILSGVMMLEFMGWQEAADLVTKGLRPPC

SEQ ID NO: 86703 - protein, 252 aa, Unknown
  Bacterial polypetide isolated from the Sargasso Sea
EIKWTSEDGKEKKEFEVFNFPGPGVALSMYNLDQSIRDFARACMNYGLNRKWPVYLSTKNTILKKYDGRFKDLFEEVFEKEFKEKFKERKITYEHRLIDDMVACAMKWNGNYIWACKNYDGDVQSDTVAQGFGSLGLMTSILMSPDGKTIESEAAHGTVTRHYRLHQEGKETSTNPIASIFAWARGLYHRGKLDDNEDLKKFVKTLEKVCIETVEGGSMTKDLAILIGPSTKYLNTNQFLDQIDHNLKKKLN

SEQ ID NO: 86704 - protein, 271 aa, Unknown
  Bacterial polypetide isolated from the Sargasso Sea
MSYNHISIPETGDMIVVNADNSLSVPDNPIVPYIEGDGIGVDISPVMMAVVDAAVAKAYDGVRQISWMEIYTGEKAAELYGGDWFPEETLNAIKTYSVAIKGPLTTPVGGGFRSLNVALRQELDLYTCLRPVRWFEGVPSPVKNPGDCNMVIFRENSEDIYAGIEYQAGTDEAQKVVDFIIKEMGATKIRFPQNVGIGIKPVSAEGTQRLVRKAIQYAVDQDLPSVTLVHKGNIMKFTEGAFRDWGYELARQEFDGELLESGPWVSIKNPR

SEQ ID NO: 86705 - protein, 239 aa, Unknown
  Bacterial polypetide isolated from the Sargasso Sea
MAKIKVKNPVVELDGDEMTRIIWSFIKEKLINPYLDIDLKYYDLGMENRDKTNDQVTIDCAKAIQKYGAGVKCATITPDEARVKEFNLKKMWRSPNGTIRNIVGGTIFREPIICKNVPRLVPHWTESVIVGRHAFGDQYRATDFKIPGKGKMTIKWESEDGKKQIEHEVFKFNESGIALSMYNLDSSIKDFARACLNYGLVRKWPVYFSSKNTILKVYDGRFKDIFEEIYEKEFKKKFN

SEQ ID NO: 86706 - protein, 283 aa, Unknown
  Bacterial polypetide isolated from the Sargasso Sea
FIKDKLINPYLDIDLRYYDLGMESRDKTDDQITIDAANAIKEHGVGVKCATITPDEARVEEFKLKKMWRSPNGTIRNILGGTVFREPIICKNVPKLVPGWTQPIVIGRHAFGDQYRATDFLIPGEGKMEVKWTSKDGKNKKEFEVFNFTGPGTALAMYNLDDSIKNFARACMNYGLERKWPVYLSTKNTILKAYDGRFKDLFQNVFDKEFKDKFDKESITYEHRLIDDMVACAMKWNGGYVWACKNYDGDVQSDTVAQGFGSLGLMTSVLMTPDGKTVESEAA

SEQ ID NO: 86707 - protein, 253 aa, Unknown
  Bacterial polypetide isolated from the Sargasso Sea
VGIKCATITPDEARVREFNLKKMWRSPNGTIRNIIGGTVFREPIICKNIPKLVPSWTDPLIIGRHAFGDQYRATDFTVPGKGKLEIKWTAEDGTDERKYEVFNFPGPGIALSMYNLDKSIEDFARSCFNYGLIKKWPVYLSTKNTILKRYDGRFKDVFEEVFEKEFKERFNENKITYEHRLIDDMVACAMKWHGKYIWACKNYDGDVQSDTVAQGYGSLGLMTSVLLAPDGKTMEAEAAHGTVTRHFRMHQQG

SEQ ID NO: 86708 - protein, 262 aa, Unknown
  Bacterial polypetide isolated from the Sargasso Sea
DFKVPGKGKMTIKWESEDGKNKIEHEVYDFKGSGIALSMYNLDDSIKDFARACMNYGLVRKWPVYFSTKNTILKAYDGRFKDIFEEIFQKEFKKKFDEVGITYEHRLIDDMVACAMKWSGKYIWACKNYDGDVQSDTVAQGYGSLGLMTSVLRTPDGKIAEAEAAHGTVTRHFRQHQQGKETSTNPIASIFAWTRGLSHRGQLDGNNELIKFANTLEKVCVETVESGSMTKDLAILISKNQKFLTTNQFLESIDSNLKKKLK

SEQ ID NO: 86709 - protein, 300 aa, Unknown
  Bacterial polypetide isolated from the Sargasso Sea
IPESGEKITLKDGTLTVPNNPIIPFIEGDGIGSDITPAMIDVVNAAVEKAYGEEKSISWMEIYCGEKSTKVYGKDEWLPDETLDALREYVVSIKGPLTTPVGGGIRSLNVSLRQILDLYVCLRPVRWFTGVPSPVKVPGDVDMIIFRENSEDIYAGVEFASDSNESEELVKILQDKFNVDQIRFPQNVGLGVKPISEEGTKRLVKRAFEYAIEHDRSSVTLVHKGNIMKFTEGAFRDWGYELCREGFDGDDLDGGPWHYFINPNNGRKIIVKDVICDAFLQQILLRPREYDVIATMKFKW

SEQ ID NO: 86710 - protein, 223 aa, Unknown
  Bacterial polypetide isolated from the Sargasso Sea
MTKIKVKNPVVELDGDEMTRIIWDLIKKKLILPYLDIDLHYYDLGVEYRDQTNDQVTIDAAEAIKKHGVGVKCATITPDEDRVEEFNLKEMWKSPNGTIRNILGGTVFREPIICSNIPRLVPGWTQPIVIGRHAFGDQYRATDFVVPAKGKLSMKWVSEDGSQKIEEDIYDFEDSGIAMGMYNHDKSIKDFARACFNYGINRKWPVYLSTKNTILKKYDGRFK

SEQ ID NO: 86711 - protein, 127 aa, Unknown
  Bacterial polypetide isolated from the Sargasso Sea
MSKIKVNNPVVELDGDEMTRIIWEFIKNKLILPYIDLGIEYYDLGMKSRDNTDDQITIDSANAIKKIGVGIKCATITPDEARVEEFDLKKMWRSPNGTIRNIIGGTVFREPIICKNIPKLVPSGQIQ

SEQ ID NO: 86712 - protein, 293 aa, Unknown
  Bacterial polypetide isolated from the Sargasso Sea
GTVFREPIICKNIPKLVPSWTDPVIIGRHAFGDQYRATDFKVPGKGKMEVKWTSEDGKDEIKYEVFNFTGPGVALSMYNLDKSIQDFARSCFSYGLIKKWPVYMSTKNTILKQYDGRFKDIFQEIFENEYKEDFDKNNLTYEHRLIDDMVACAMKWSGKYIWACKNYDGDVQSDTMAQGYGSLGLMTSTLLTPDGKIMEAEAAHGTVTRHYRMHQQGKETSTNPIASIFAWTRGLAHRGKLDNNDELIKFAQTIEKVCIECVENGAMTKDLAILIGPSSKYLTTNQFLDEIDG

SEQ ID NO: 86713 - protein, 248 aa, Unknown
  Bacterial polypetide isolated from the Sargasso Sea
LNIFDLGMKNRDHTNDQVTIDCANAIKKNGVGIKCATITPDEARVKEFNLKKMWRSPNGTIRNILGGTVFREPIMCKNVPKLVPSWTNPICIGRHAFGDQYRATDFKVPGKGKLEIKWTSEDGKKKKEFEVFNFPGPGIALSMYNLDQSIKDFARSCMNYGLNRRWPVYLSTKNTILKKYDGRFKDLFQEIYEKEFKEKFKERNITYEHRLIDDMVACAMKWNGNYIWACKNYDGDVQSDTIAQGFGS

SEQ ID NO: 86714 - protein, 159 aa, Unknown
  Bacterial polypetide isolated from the Sargasso Sea
EDGKEEIKHEVFNFTGPGVAFSMYNLDKSIEEFARSCFSYGLIKKWLVYLSTKNIILKKYDGRFKDIFEEVFNNEFKKKFENAKITYEHRLIDDMVACAMKWSGKYIWACKNYDGDVQSDTMAQGYGSLGLMTSTLLTPDGKVMEAEAAHGTVTRHYRM

SEQ ID NO: 86715 - protein, 280 aa, Unknown
  Bacterial polypetide isolated from the Sargasso Sea
MAKIKVKNPVVELDGDEMTRIIWSFIKKKLIEPYLDIDLKYYDLGMENRDKTNDQVTVDCAKAIQKFGVGVKCATITPDEARVKEFNLKKMWRSPNGTIRNIVGGTIFREPIICKNVPRLVPHWTESIIVGRHAFGDQYRATDFKVPGKGKMTIKWESEDGKKKIEHEVFKFNDSGIALSMYNLDSSIQDFARACLNYGLVRKWPVYFSSKNTILKVYDGRFKDIFEDIYQKEFKKKFNDAGITYEHRLIDDMVACAMKWSGKYIWACKNYDGDVQSDTV

SEQ ID NO: 86716 - protein, 270 aa, Unknown
  Bacterial polypetide isolated from the Sargasso Sea
VGIKCATITPDEARVEEFDLKKMWRSPNGTIRNIIGGTVFREPIICKNIPKLVPSWTDPVIIGRHAFGDQYRAIDFKVPGKGKMEIKWTSEDGKDEIKYEVFNFTGPGVALSMYNLDKSIEDFARSCFSYGLIKKWPVYMSTKNTILKQYDGRFKDIFQEIFDKEYKSEFEKNNLTYEHRLIDDMVACAMKWSGKYIWACKNYDGDVQSDTMAQGYGSLGLMTSTLLTPDGKIMEAEAAHGTVTRHYRMHQQGKETSTNPIASIFAWTRG

SEQ ID NO: 86717 - protein, 295 aa, Unknown
  Bacterial polypetide isolated from the Sargasso Sea
KSRDNTNDQITIDSANAIKKIGVGIKCATITPDEARVKEFDLKKMWRSPNGTIRNIIGGTVFREPIICSNIPKLVPSWTDPVVIGRHAFGDQYRATDFKVPGKGKMEVRWTSEDGKDEIKYEVFNFTGPGVALSMYNLDKSIEDFARSCFSYGLIKKWPVYMSTKNTILKKYDGRFKDIFQEIFDKEYKKDFEKYNLTYEHRLIDDMVACAMKWSGKYIWACKNYDGDVQSDTMAQGYGSLGLMTSTLLTPDGKIMEAEAAHGTVTRHYRLHQQGKKTSTNPIASIFAWTRRFSS

SEQ ID NO: 86718 - protein, 287 aa, Unknown
  Bacterial polypetide isolated from the Sargasso Sea
MAKIKVKNPIVELDGDEMTRVIWEFIKKKLIKPYLELDIKYYDLGIKSRDKTLDQITIDCANAIKKYNVGIKCATITPDEGRVEEFNLKKMWRSPNGTIRNILGGTVFREPILCKNIPKLVPSWENPICIGRHAFGDQYRATDFQVPGKGKLEIKWTSEDGKEKKEFEVFNFPGPGVAMSMYNLDQSIKDFARACMNYGLNRRWPVFLSTKNTILKKYDGRFKDIFQEIYEKEFVEKFKDRGITYEHRLIDDMVACAMKWNGNYIWACKNYDGDVQSDTVAQGFGSL

SEQ ID NO: 86719 - protein, 178 aa, Unknown
  Bacterial polypetide isolated from the Sargasso Sea
MSKIKVKNPVVELDGDEMTRIIWEFIKNKLILPYLDLSIQYYDLGMKSRDNTNDQITIDSANAIKKIGVGIKCATITPDEERVEEFDLKKMWRSPNGTIRNIIGGTVFREPIICKNIPKLVPSWTDPVIIGRHAFGDQYRATDFKVPGKGKMEVKWTSENGKDEIKYEVFNFTGPGIA

SEQ ID NO: 86720 - protein, 215 aa, Unknown
  Bacterial polypetide isolated from the Sargasso Sea
DFARSCFSYGLIKKWPVYMSTKNTILKQYDGRFKDIFQEIFDKEYKSEFEKNNLTYEHRLIDDMVACAMKWSGKYIWACKNYDGDVQSDTMAQGYGSLGLMTSTLLTPDGKVMEAEAAHGTVTRHYRMHQKGKETSTNPIASIFAWTRGLAHRGKLDGNEDLINFSQTLEKVCIECVEKGLMTKDLAILVGPSSKYLTTNQFLDEIDNTLKKKLN

SEQ ID NO: 86721 - protein, 237 aa, Unknown
  Bacterial polypetide isolated from the Sargasso Sea
MAKIKVKNPVVELDGDEMTRIIWAFIKDKLIKPYLDIDLKYYDLGMENRDKTNDQVTIDCAKAIQKYGAGVKCATITPDEARVEEFKLKKMWKSPNGTIRNIVGGTIFREPIICKNVPRLVPHWTESVIVGRHAFGDQYRATDFKVPGKGKMTIKWESEDGKNKIEHEVYEFKGSGIALSMYNLDDSIKDFARACMNYGLVRKWPVYFSSKNTILKAYDGRFKDIFEKSFSKRNLKK

SEQ ID NO: 86722 - protein, 166 aa, Unknown
  Bacterial polypetide isolated from the Sargasso Sea
EKNKITYEHRLIDDMVACAMKWSGKYIWACKNYDGDVQSDTVAQGYGSLGLMTSVLLAPDGRTMEAEAAHGTVTRHYRMHQQGKETSTNPIASIFAWTRGLAHRGKLDNNNKLIKFSDTLEKVCIDSVEDGSMTKDLAILLSPSTKFLTTNQFLNELDGRLKKKLN

SEQ ID NO: 86723 - protein, 238 aa, Unknown
  Bacterial polypetide isolated from the Sargasso Sea
EYYDLGMKSRDDTDDQITIDAANAIKKVGVGIKCATITPDEARVEEFKLKKMWRSPNGTIRNIIGGTVFREPIICSNIPKLVPSWSDPVVIGRHAFGDQYRATDFKVPGKGKMEVKWTSEDGNKEIKYEVFNFTGPGVALSMYNLDKSIEDFARSCFSYGLIKKWPVYLSTKNTILKKYDGRFKDIFEEVFNKEFKKKFEELKITYEHRLIDDMVACAMKWSGKYIWACKNYDGDVQS

SEQ ID NO: 86724 - protein, 114 aa, Unknown
  Bacterial polypetide isolated from the Sargasso Sea
MSKIKVKNPVVELDGDEMTRIIWEFIKNKLILPYLDLGIEYYDLGMKSRDNTDDQITIDSANAIKKIGVGIKCATITPDEARVEEFDLKKMWRSPNGTIRNIIGGTVFREPIIC

SEQ ID NO: 86725 - protein, 234 aa, Unknown
  Bacterial polypetide isolated from the Sargasso Sea
KNIPKLVPSWTNPIVIGRHAFGDQYRATDFKVPGKGKLEIKWTSENGKEKKEFEVFNFSGPGVALSMYNLDQSIKDFARACMNYGLNRKWPVYLSTKNTILKKYDGRFKDLFQEVFEKEFEKKFKERKITYEHRLIDDMVACAMKWNGNYIWACKNYDGDVQSDTIAQGFGSLGLMTSVLMSPDGKTIESEAAHGTVTRHYRLHQEGKETSTNPIASIFAWARGLYHRGKLDDN

SEQ ID NO: 86726 - protein, 287 aa, Unknown
  Bacterial polypetide isolated from the Sargasso Sea
INWFKVYAGDEACELYGTYNYLPQDTIEAIRHFGVAIKGPLTTPIGGGIRSLNVALRQIFDLYSCVRPCRYYSGTPSPHKNPQNLDVIVYRENTEDIYMGIEWEAEDNNCLELINHLNNVVIPNSKNLKNRSIPNGSGIGIKPVSKSGSQRHIRKAIEHAKRLSGDKRHVTLVHKGNIMKYTEGAFRDWGYELAVNEFREDCITERESWILDNIHKNPEITIENNARKIEPGFDKLTNNKKAFICEEIKEVITSISNSHGNGKWRELILVDDRIADSIFQQIQTRPQ

SEQ ID NO: 86727 - protein, 287 aa, Unknown
  Bacterial polypetide isolated from the Sargasso Sea
VGIKCATITPDEGRVKEFNLKKMWRSPNGTIRNILGGTVFREPIICKNIPKLVPSWTNPICIGRHAFGDQYRATDFKVPGKGKLEMKWTSEDGKEKKEFEIFNFPGPGVALSMYNLDQSIRDFARACMNYGLNRKWPVYLSTKNTILKKYDGRFKDLFQEVFEKEFEEKYKERGITYEHRLIDDMVACAMKWNGNYIWACKNYDGDVQSDTIAQGFGSLGLMTSVLMTPDGKTIESEAAHGTVTRHYRLHQQGKETSTNPIASIFAWARGLYHRGKLDGNEELKKFV

SEQ ID NO: 86728 - protein, 253 aa, Unknown
  Bacterial polypetide isolated from the Sargasso Sea
GDQYRATDFKVPGKGKMEVKWTSENGKDEIKYEVFNFTGPGVALSMYNLDKSIEDFARSCFSYGLIKKWPVYLSTKNTILKKYDGRFKDIFEDIFNKEFKKKFEETKITYEHRLIDDMVACAMKWSGKYIWACKNYDGDVQSDTMAQGYGSLGLMTSTLLTPDGKVMEAEAAHGTVTRHFRMHQEGKETSTNPIASIFAWTRGLAHRGKLDRNEELIKFAKTIEQVCIECVESGSMTKDLAILIGPSSKYLTT

SEQ ID NO: 86729 - protein, 208 aa, Unknown
  Bacterial polypetide isolated from the Sargasso Sea
MTKIKVKNPVVELDGDEMTRIIWDLIKKKLILPYLDIDLHYYDLGVEYRDQTNDQVTIDAAEAIQKHGVGVKCATITPDEDRVEEFNLKEMWKSPNGTIRNILGGTVFREPIICSNIPRLVPGWTQPIVIGRHAFGDQYRATDFVVPAKGKLSMKWVSEDGSQEIEEDIYDFEDSGIAMGMYNHDKSIKDFARACFNYGINRKWPVYL

SEQ ID NO: 86730 - protein, 263 aa, Unknown
  Bacterial polypetide isolated from the Sargasso Sea
EYYDLGMKSRDNTNDQITIDSANAIKKIGVGIKCATITPDEARVEEFDLKKMWRSPNGTIRNIIGGTVFREPIICKNIPKLVPSWTDPVIIGRHAFGDQYRATDFKVPGKGKMEVKWTSEDGKDEIKYEVFNFTGPGVALSMYNLDKSIEDFARSCFSYGLIKKWPVYMSTKNTILKQYDGRFKDIFQEIFDKEYKSEFEKNNLTYEHRLIDDMVACAMKWSGKYIWACKNYDGDVQSDTMAQGYGSLGLMTSTLLTPDGKVM

SEQ ID NO: 86731 - protein, 255 aa, Unknown
  Bacterial polypetide isolated from the Sargasso Sea
DNRVSEFNLKKMWRSPNGTIRNILDGTVFRQPIICKNIPRIVRTWDHPIVVGRHAFGDQYKATEMKIDKPGKLFMKFVDEDGKIDEKEVFQFSNQGVALSMYNVDESIRGFARACFNYGLKLKWPVYLSTKDTILKKYDGRFKEIFHEIFQNEFASDFENNKIVYEHRLIDDLVASSMKWSGKFIWACKNYDGDVQSDAVAQGFGSLGMMSSVLMTPNGKTIEAEAAHGTVTRHYRLHQKGEKTSTNPIASIFAW

SEQ ID NO: 86732 - protein, 130 aa, Unknown
  Bacterial polypetide isolated from the Sargasso Sea
DGDVQSDSVAQGFGSLGLMTSVLMTPDGKTVEAEAAHGTVTRHFRNHEKGQETSTNPIASIFAWTKGLQFRGKFDSNNELIEFTKKLEKTCIATVENGQMTKDLAILIDKDQKWLNTQDFLNAIKNNFSI

SEQ ID NO: 86733 - protein, 178 aa, Unknown
  Bacterial polypetide isolated from the Sargasso Sea
KRSIIKNSRKNFEDAKITYEHRLIDDMVACAMKWSGKYIWACKNYDGDVQSDTMAQGYGSLGLMTSTLLTPDGKTMEAEAAHGTVTRHYRMHQQGKETSTNPIASIFAWTRGLAHRGKLDGNDELIKFANTIEKVCIESVENGSMTKDLAILVGPSSKYLTTNQFLDVIDNNLKQKLN

SEQ ID NO: 86734 - protein, 148 aa, Unknown
  Bacterial polypetide isolated from the Sargasso Sea
MSKIKVKNPIVELDGDEMTRVIWDFIKNKLVLTYLDLKIEYYDLGMESRDKTEDKITIECANAIKRNGVGIKCATITPDEARVREFNLKKMWRSPNGTIRNIIGGTVFREPIICKNIPKLVPSWTDPLIIGRHAFGDQYRATDFTVPG

SEQ ID NO: 86735 - protein, 248 aa, Unknown
  Bacterial polypetide isolated from the Sargasso Sea
PCRYYAVPPSPHRRPQDLDVIVYRENTEDIYMGVEWEAEDAVGQELCKHLNEVVIPANGKLGKRQIPEGAGIGIKPVSKHGSQRHIRKAIQHALRLQGDKRHVTLVHKGNIMKFTEGAFRDWGYELATTEFRDVCITERESWILGNLEKDPNLSVQANGRMIEPGYDSLTPEKKADIDAEVQAVIDSIGASHGGVKWKQMVLVDDRIADSIFQQIQTRPQEYSILATLNLNGDYISDAAAAMVGGLGM

SEQ ID NO: 86736 - protein, 214 aa, Unknown
  Bacterial polypetide isolated from the Sargasso Sea
RGEQKRLVKGALKYAIDQDRSSVTLVHKGNIMKFTEGAFRDWGYELCREDFDGDDLDGGPWHYFINPNNGRKIIVKDVICDAFLQQILLRPREYDVIATMNLNGDYLSDALAAMVGGIGIAPGANIGDEAAMFEATHGTAPKYAGLDKVNPLSLILSAEMMLRHINWNEAADLLINSIEKTIQDRYVTYDFERLMDNATLVSCSGFAKEMIKRM

SEQ ID NO: 86737 - protein, 285 aa, Unknown
  Bacterial polypetide isolated from the Sargasso Sea
KKLIEPYLELDIKYYDLGISSRDKTSDQITVDCANAIKKFGVGIKCATITPDEARVKEFKLKKMWRSPNGTIRNILGGTVFREPIICKNVPKLVPGWTSPIIIGRHAFGDQYRATDFLVPGKGKLEMKWTSADGNQKKEFEVFNFPSSGVALSMYNLDNSIKDFARACMNYGLQRNYPVYLSTKNTILKGYDGRFKDLFQEVFDKEFKEKFQRNKLTYEHRLIDDMVACAMKWNGGYVWACKNYDGDVQSDTVAQGFGSLGLMTSVLMTPDGKTVESEAAHGTVT

SEQ ID NO: 86738 - protein, 129 aa, Unknown
  Bacterial polypetide isolated from the Sargasso Sea
QSDTVAQGYGSLGLMTSVLRTPDGKIAEAEAAHGTVTRHYRQHQQGKETSTNPIASIFAWTRGLAHRGQLDGNDELIKFSDTLEKVCIETVESGSMTKDLAILISKSQKFLTTNQFLEAIDSNLKKKLN

SEQ ID NO: 86739 - protein, 236 aa, Unknown
  Bacterial polypetide isolated from the Sargasso Sea
AAILNPQRVDFVLFRENTEDVYAGIEFENGSDEANKIIELMTEFNQSKKIRFPETSSFGIKPISKEGSIRLFDAALNYAIDNNRKSVTIVHKGNIMKFTEGYFKKWTYAHAEEQYGDKVFTWAQYDRIQEEKGTEEANTAQKKAILDGKIIIKDVIADAFLQQILLRPNEYDVIATMNLNGDYLSDSAAAAVGGIGIAPGANINYKTGHAIFEATHGTAPKYAGLDKVNPSSVILS

SEQ ID NO: 86740 - protein, 255 aa, Unknown
  Bacterial polypetide isolated from the Sargasso Sea
MSKIKVKNPIVELDGDEMTRVIWNFIKNKLILPYLDLKIEYFDLGIKSRDKTSDQITIDCAKAIKKNGVGIKCATITPDENRVKEFNLKKMWRSPNGTIRNIIGGTVFREPIICKNIPKLVPSWTDPLIIGRHAFGDQYRATDFQVPGKGKLEIKWTSEDGKDEKKYEVFNFPGPGIALSMYNLDKSIEDFARSCFNYGLIKKWPVYLSTKNTILKTYDGRFKDIFQKVFESEFESKFKKNNITYEHRLIDDMVA

SEQ ID NO: 86741 - protein, 192 aa, Unknown
  Bacterial polypetide isolated from the Sargasso Sea
TLIHKGNIQKFTEGAFMDWGYELARKEFGGEPLDGGPWHTFKNPNTGKDIIVKDVICDAFLQQCLLRPADYDVLATPNLNGDYLSDALAAQVGGIGIAPGANLGDEVAVFEATHGTAPKYAGQDKVNPGSLILSAEMMLRHMGWVEAADLIISAMEKTIGKKKVTYDFARLIDDAEEVSCSKFGELLIKKFK

SEQ ID NO: 86742 - protein, 253 aa, Unknown
  Bacterial polypetide isolated from the Sargasso Sea
MEVKWTSEDGKDEIKYEVFNFTGPGVALSMYNLDKSIQDFARSCFSYGLMKKWPVYMSTKNTILKQYDGRFKDIFQEIFEGEFKEEFEKNNLTYEHRLIDDMVACAMKWSGKYIWACKNYDGDVQSDTMAQGYGSLGLMTSTLLTPDGKIMEAEAAHGTVTRHYRMHQQGKETSTNPIASIFAWTRGLAHRGKLDSNNELIKFAQTIEKVCIECVENGAMTKDLAILIGPSSKYLTTNQFLDEIDGNLKAKLN

SEQ ID NO: 86743 - protein, 185 aa, Unknown
  Bacterial polypetide isolated from the Sargasso Sea
MSKIKVKNPVVELDGDEMTRIIWEFIKNKLILPYLDLSIEYYDLGMKSRDNTDDQITIESANAIKKIGVGIKCATITPDEARVEEFDLKKMWRSPNGTIRNIIGGTVFREPIICKNIPKLVPSWTDPVIIGRHAFGDQYRATDFKVPGKGKMEVKWTSEDEKDEIKYEVFNFTGPGVALSMYNLD

SEQ ID NO: 86744 - protein, 125 aa, Unknown
  Bacterial polypetide isolated from the Sargasso Sea
MAQGYGSLGLMTSTLLTPDGKIMESEAAHGTVTRHYRMHQQGKETSTNPIASIFAWTRGLAHRGKLDGNDELIKFANTIEKVCIESVENGSMTKDLAILVGPSSKYLTTNQFLDVIDNNLKQKLN

SEQ ID NO: 86745 - protein, 175 aa, Unknown
  Bacterial polypetide isolated from the Sargasso Sea
YENEFESDFKKLNLYYEHRLIDDMVASALKWNGDFVWACKNYDGDVQSDTVAQGFGSLGLMTSVLMTPNGKTIEAEAAHGTVTRHYRLHQEGKATSTNPIASIFAWSRGLSYRGKMDDNSKLINFAETIEKVCVDTVQSGFMTKDLAILISKEQEWLNTQDFLEKINSNLQSALS

SEQ ID NO: 86746 - protein, 320 aa, Unknown
  Bacterial polypetide isolated from the Sargasso Sea
RVLDAAVEKSYGSSKKIEWMEVYAGEKANDVYGENTWLPKETLDVIDEYLIAIKGPLTTPVGGGIRSINVALRQELDLYVCLRPVTWYEGAPTPVKNPHLIDMAIFRENTEDIYAGIEFEGGSEDSKKFLKLMKDNFGERFDKIRFPNTVGIGIKPVSKEGSQRLVWDAIEYAIRHKRKSVTLVHKGNIMKFTEGSFKEWGYAIAEKRFSDTTFTWAQYDRIVEQESKEVADKIYQEAIDSGKVIVKDVIADAFLQQILLRPKEYDVIATMNLNGDYISDALAAQVGGIGISPGANINFITGKAIFEATHGTAPKYAGQD

SEQ ID NO: 86747 - protein, 284 aa, Unknown
  Bacterial polypetide isolated from the Sargasso Sea
GEGIRSINVAIRQELDLYVCLRPIKYFKGIQTPTKNPQDVDITLFRENTEDVYAGKELENSSEDVEKLNNFLKQEFGWDIRIDSGIGIKPISQTASERLIRAALNYAVENDKKNVALVHKGNIMKFTEGAFRKWGYDLVKSEFSDVAVSWEDCGGDPGDKILVQDVIADAFLQQILIKPQMFDVIATTNLNGDYASDALAAQIGGIGISPGGNINYENGKAVFEATHGTAPKYAGQDKTNPGSLILSGVMMFRYMGWNSAADLIVNSMEKTILEGKVTYDLARG

SEQ ID NO: 86748 - protein, 297 aa, Unknown
  Bacterial polypetide isolated from the Sargasso Sea
FREPIICKNIPKLVPSWTNPICIGRHAFGDQYRATDFKVPGKGKLELKWTSEDGNEKKEFEVFNFPGPGVALSMYNLDQSIKDFARACMNYGLNRKWPVYLSTKNTILKNYDGRFKDLFQEVFDKEFKEKFEEREITYEHRLIDDMVACAMKWNGNYIWACKNYDGDVQSDTVAQGFGSLGLMTSVLMTPDGNTIEAEAAHGTVTRHYRLHQQGKETSTNPIASIFAWARGLYHRGKMDNNEELKKFVKTLEKVCIETVENGLMTKDLAILIGPSSKYLTTNQFLDVIDGNLKNKLN

SEQ ID NO: 86749 - protein, 203 aa, Unknown
  Bacterial polypetide isolated from the Sargasso Sea
DKRHVTLVHKGNIMKFTEGAFRDWGYELATTEFRDVCITERESWILGNLDKDSGLSVQANARMIEPGYDSLTPEKKADIDAEVQAVIDAIGSSHGGGKWRSMVLVDDRIADSIFQQIQTRPQEYSILATLNLNGDYISDAAAAMVGGLGMAPGANIGETAAIFEATHGTAPKHAGLDRINPGSVILSGVMMLEFLGWQEAADQ

SEQ ID NO: 86750 - protein, 302 aa, Unknown
  Bacterial polypetide isolated from the Sargasso Sea
MNSSKVKVPAKGEKISLKQGKLVVPDNPIIPFIEGDGIGIDITPVMKKVVDASVEAAYGSKRKISWMEVFCGEKSVKVYGADEWLPKETLELCKEYIVSIKGPLTTPVGGGIRSLNVALRQELDLYVCLRPVKYFKGTPSPVKHPELVDMVIFRENSEDIYAGVEFESNTEEAKKLIKVLKEQFDVQKIRFPENCGIGIKPVSEEGSKRLIRKSFEYAIKNDRKSVSLIHKGNIQKFTEGAFRDWGYELAEEEFDAKPIDGGPWHSMINPNNGNEIIVKDVICDAFLQQILHRPAEYDVLAS

SEQ ID NO: 86751 - protein, 221 aa, Unknown
  Bacterial polypetide isolated from the Sargasso Sea
MSGSKIKIPSKGEKISYKNGKLSVPENPIIPFIEGDGIGIDITPVMIDVVDAAIASAYGGKRKISWMEVYCGEKSVNVYGADEWLPEETLQACRDYVVSIKGPLTTPVGGGIRSLNVALRQVLDLYVCLRPVKYFDGTPSPVKRPDLVDMVIFRENSEDIYAGVEFESGSDESNKIIDILQSQFDVKKIRFTENCGIGIKPVSEEGSKRLIRKSFEYAIQN

SEQ ID NO: 86752 - protein, 217 aa, Unknown
  Bacterial polypetide isolated from the Sargasso Sea
IEDFARSCFIYGLIKKWPVYLSTKNTILKKYDGRFKDIFQSVFEKDFKSEFERYKITYEHRLIDDMVACAMKWHGKYIWACKNYDGDVQSDTVAQGYGSLGLMTSVLLAPDGRTMEAEAAHGTVTRHFRMHQQGKETSTNPIASIFAWTRGLAHRGKLDSNDELIKFSKTLEEVCVDSVESGSMTKDLAILIGPSTKYLTTNQFLDVIDGSLKQKLN

SEQ ID NO: 86753 - protein, 254 aa, Unknown
  Bacterial polypetide isolated from the Sargasso Sea
VDTFEEYLIGIKGPLTTPIGGGFRSLNVALRQLLDLYVCLRPVRWFEGVPSPVKQPELVDMVIFRENTEDIYAGIEAEAGSPEAETIREMIKEVFGREISEDSGLGIKPVSRTGSQRLQRAAIKYAVERGRKNIHWVHKGNIMKYTEGAFQKWGYELVKEEFDDVAVGWDDCGGDPGDKILVQDAIADIALQQVLTRPAEFDVIATMNLNGDYLSDALAAQVGGIGIAPGANINYVTGHGIFEATHGTAPKYAG

SEQ ID NO: 86754 - protein, 228 aa, Unknown
  Bacterial polypetide isolated from the Sargasso Sea
FALSMYNLDNSIEDFARSCFNYGLIKKWPVYLSTKNTILKRYDGRFKDIFQEVFEKEFREKFEKSKIIYEHRLIDDMVACAMKWHGKYIWACKNYDGDVQSDTVAQGYGSLGLMTSVLLAPDGKTMEAEAAHGTVTRHFRMHQQGKETSTNPIASIFAWTRGLAHRGKLDGNEELIKFAETLEKVCVDCVEEGSMTKDLAILIGPSTKYLTTNQFLDTIDGKLRQKLN

SEQ ID NO: 86755 - protein, 264 aa, Unknown
  Bacterial polypetide isolated from the Sargasso Sea
ENTEDIYAGIEWMHGTEELDQVKLFLTDKMNVKNIRFPKTSSLGVKPVSKEGSERLIRASVEYALKNNRNSVTLVHKGNIMKFTEGAFRDWGYELVRSDYNSKDYDGGPWQIIKKDGKEVIVKDVIADAFLQQIILRPEEYEVIATLNLNGDYISDALAAIVGGIGIAPGANINYDSGHAIFEATHGTAPKYANQNKVNPSSVILSGVMMLEYMGWNKAAELIISGIKGAIFNKRVTYDFHRLMDGATKLSCSEFGEEIISNMS

SEQ ID NO: 86756 - protein, 127 aa, Unknown
  Bacterial polypetide isolated from the Sargasso Sea
MSKIKVKNPIVELDGDEMTRIIWDFIKKKLILPYLDLGIEYYDLGMKSRDNSNDQITIDCANAIKKNGVGIKCATITPDEARVKEFSLKKMWRSPNGTIRNIIGGTVFREPIICKIYQNLYHPGPIL

SEQ ID NO: 86757 - protein, 270 aa, Unknown
  Bacterial polypetide isolated from the Sargasso Sea
NVSIRQIMDLYVCLRPIKYFNGIQTPTKNPQDVDITLFRENTEDVYAGKELEEGSEEVQKLNKFLKSEFGWEIREDSGIGIKPISKTATERLVRASLNYAVENNKKNLALVHKGNIMKFTEGAFRKWGYELVQEEFSDVAISWEDCNGDPGDKILIQDVIADAFLQQILVKPENFDVIATTNLNGDYASDALAAQIGGIGISPGGNINYENGKAVFEATHGTAPKYAGKDQANPGSLILSGEMMFRYMGWDEAADLTIKTMEKSILDGNV

SEQ ID NO: 86758 - protein, 255 aa, Unknown
  Bacterial polypetide isolated from the Sargasso Sea
MSKIKVKNPVVELDGDEMTRIIWEFIKNKLILPYLDLGIEYYDLGMKSRDNTDDQITIDSANAIKKIGVGIKCATITPDEARVEEFDLKKMWRSPNGTIRNIIGGTVFREPIICKNIPKLVPSWTDPVIIGRHAFGDQYRATDFKVPGKGKMEVKWTSEDGKDEIKYEVFNFTGPGVALSMYNLDKSIEDFARSCFSYGLIKKWPVYMSTKNTILKQYDGRFKDIFQEIFDKEYKSEFEKNNLTYEHRLIDDMVA

SEQ ID NO: 86759 - protein, 129 aa, Unknown
  Bacterial polypetide isolated from the Sargasso Sea
MGIEWEAEDNNCLELINHLNNVVIPKSKNLKNRSIPDGSGIGIKPVSKSGSQRHIRKAIEHAKRLSGDKRHVTLVHKGNIMKYTEGAFRDWGYELAVNEFREDCITERESWILDNIQKNPEITIENNAR

SEQ ID NO: 86760 - protein, 218 aa, Unknown
  Bacterial polypetide isolated from the Sargasso Sea
FIKDFARACLNYGLVRKWPVYFSSKNTILKIYDGRFKDIFEDIYQKEFKKKFDKAGITYEHRLIDDMVACAMKWSGKYIWACKNYDGDVQSDTVAQGYGSLGLMTSVLRTPDGKTAEAEAAHGTVTRHYRQHQQGKETSTNPIASIFAWTRGLAHRGQLDGNDELIKFSDTLEKVCIETVENGLMTKDLAVLISKSQKFLTTNQFLEAIDSNLKKKLN

SEQ ID NO: 86761 - protein, 195 aa, Unknown
  Bacterial polypetide isolated from the Sargasso Sea
VHKGNIMKFTEGAFKEWGYGVAKTEYGAVSLDGGEWMSFINPKTGRTIVIKDVIADSFLQQILTRPADYDVIATMNLNGDYISDALAAKVGGLGLAPGANVGDHIALFEATHGTAPKYAGEDKVNPSSLILSAGMMLNHIGWKEASDNVIKGISWAIKNKLVTYDLARLMKNATKLKCSEFADEVCKGMKMGYLK

SEQ ID NO: 86762 - protein, 288 aa, Unknown
  Bacterial polypetide isolated from the Sargasso Sea
NIPKLVPSWTDPLIIGRHAFGDQYRATDFKVPGKGKLEIKWTSEDGKDEKKYEVFNFPGPGIALSMYNLDKSIEDFARSCFNYGLIKKWPVYLSTKNTILKTYDGRFKDIFQQVFKSEFKSKFEKSNITYEHRLIDDMVACAMKWSGKYIWACKNYDGDVQSDTVAQGYGSLGLMTSVLLAPDGKTMEAEAAHGTVTRHFRMHQEGKETSTNPIASIFAWTRGLAHRGELDGNADLIKFSNTLEKICIDCVESGSMTKDLAILIGPSTEYLNTNQFLDKIDGNLKKKL

SEQ ID NO: 86763 - protein, 252 aa, Unknown
  Bacterial polypetide isolated from the Sargasso Sea
MSKIKVNNPIVELDGDEMTRVIWDFIKNKLILPYIDLGIEYYDLSMKNRDDTNDQITVDCAKAIKKNGVGIKCATITADELRVKEFNLKKMWRSPNGTIRNIIGGTVFREPIICKNIPKLVPSWTDPLIIGRHAFGDQYRATDFLVPGKGKLEVKWTSEDGKDEKNYEVFNFPGPGIALSMYNLDKSIEDFARSCFNYGLIKKWPVYLSTKNTILKKYDGRFKDIFQKIFDEDFKTDFDKNNITYEHRLIDD

SEQ ID NO: 86764 - protein, 157 aa, Unknown
  Bacterial polypetide isolated from the Sargasso Sea
GGPWVTIKNPNNEKNIIIKDVICDAFLQQILTRPKEYDVIATMNLNGDYVSDALAACVGGIGIAPGANIGDDSALFEATHGTAPKYAGQDKVNPGSLILSAEMMLRHLGWTEAADLIISSMEAALTAKMVTYDFERLMDGANLVSCSGFADEMIKRM

SEQ ID NO: 86765 - protein, 127 aa, Unknown
  Bacterial polypetide isolated from the Sargasso Sea
DTIAQGFGSLGLMTSVLMTPDGKTIESEAAHGTVTRHYKWHQEGKETSTNPIASIFAWTRGLAHRGKLDKNDQLVKFSDVLEKVCIQTVEDGLMTKDLAILISKNQKYLNTNQFLDAIDSNLNKSLK

SEQ ID NO: 86766 - protein, 224 aa, Unknown
  Bacterial polypetide isolated from the Sargasso Sea
MAKIKVKNPVVEMDGDEMTRIIWEYIKEQLILPYLDIDIKYFDLGVIKRDETNDQITIDAAEAVKKYGVGIKCATITPDENRVQEFKLKQMWRSPNGTIRNILGGTIFRQPIICKNVPRIITNWNHPIVVARHAFGDQYRATDTLINKPGTLKMVFEPKDGSEGFTKDVYEFEKPGVALSMYNLDNSIKDFARACFNYGLNLGWPVYLSTKNAILKVYDGRFKD

SEQ ID NO: 86767 - protein, 167 aa, Unknown
  Bacterial polypetide isolated from the Sargasso Sea
MTKIKVSNPVVEMDGDEMTRIIWEFIKQKLILPYLDIPLEYYDLGIEERDKTNDQVTIDAANATLKHGVAVKCATITPDEERVKEFNLKKMWRSPNGTIRNILGGVVFRAPIICQNVPRLVPGWNKPIVVGRHAFGDQYRATDFKFPGKGKLFMKFVSDDGEEMNTK

SEQ ID NO: 86768 - protein, 100 aa, Unknown
  Bacterial polypetide isolated from the Sargasso Sea
EAEAAHGTVTRHYRNHKKGMQTSTNPIASIFAWTRGLEFRGKFDKNNELIQFAKKLERTCINTVEKGQMTKDLAILVNKDQRWLNTEDFLSAINNNFQFN

SEQ ID NO: 86769 - protein, 139 aa, Unknown
  Bacterial polypetide isolated from the Sargasso Sea
WACKNYDGDVQSDTVAQGYGSLGLMTSVLLAPDGRTMEAEAAHGTVTRHFRLHQQGKETSTNPIASIFAWTRGLAHRGKLDSNNELIKFSNTLEKVCIDCVENGSMTKDLAILVGPSTKYLTTNQFLDEIDHSLLKSLN

SEQ ID NO: 86770 - protein, 293 aa, Unknown
  Bacterial polypetide isolated from the Sargasso Sea
GVGIKCATITPVEARVEEFDLKKMWRSPNGTIRNIIGGTVFREPIICKNIPKLVPSWTDPVIIGRHAFGDQYRATDFKVPGKGKMEVKWTSEDGKDEIKYEVFNFTGPGVALSMYNLDKSIEDFARSCFSYGLIKKWPVYMSTKNTILKQYDGRFKDIFHEIFENEYKEEFEKNNLTYEHRLIDDMVACAMKWSGKYIWACKNYDGDVQSDTMAQGYGSLGLMTSTLLTPDGKIMEAEAAHGTVTRHYRMHQQGKETFTNPIASIFAWTRGLAHRGKLDSNNELIKFAQTNEK

SEQ ID NO: 86771 - protein, 240 aa, Unknown
  Bacterial polypetide isolated from the Sargasso Sea
ILQSQFDVKKIRFTENCGIGIKPISEEGSKRLIRKSFEYAIQNNRDSVTLIHKGNIQKFTEGAFRDWGYELAREEFNGEPFDGGPWHTFLNPKTGKPIIIKDVICDAFLQQILHRPAEYDVIASPNLNGDYISDALAAQVGGIGIAPGANLGDSTAVFEATHGTAPKYAGQDKVNPGSLILSAEMMLRHLGWTEAADLIINSMEKTIQKKKVTYDFARLIDDANEVSCSEFGRLLIKKFK

SEQ ID NO: 86772 - protein, 114 aa, Unknown
  Bacterial polypetide isolated from the Sargasso Sea
MAKIKVKTPIVDLDGDEMTRIIWQFIKEKLILPYLDVDLKYYDLSVEYRDKTDDQVTVDAANAIKRYGVGVKCATITPDEARVTEFNLKKMWRSPNGTIRNILGGTVSASPLYA

SEQ ID NO: 86773 - protein, 325 aa, Unknown
  Bacterial polypetide isolated from the Sargasso Sea
SLIFPSDGTKIGHDGDKLVVPNNPIIPYIIGDGIGIDVTPVMKRVLDYAVNKAYGSDREIKWLELYAGSNSEDLYGSILPEETIEAMKEYRISIKGPLTTPIGKGHKSINVKIRQKLDLFACVRPIKYFPGTSTPMADSGNTDMVVFRENTEDLYSGIEWEPNSPGAKRIIDFINKELGGSPFRFEKNCGIGIKPVSEEGTKRLIRMAIDYSLELNKSSITIVHKGNIMKYTEGAFRDWAYDVVTKEYNGVAQKNNTYVIDNSKFNTEIIIKDCIADNFLQQIILAPEQHDVIATLNLNGDYISDALAAQVGGIGMAPGGNIGNG

SEQ ID NO: 86774 - protein, 258 aa, Unknown
  Bacterial polypetide isolated from the Sargasso Sea
VSIKWTPEDPNIEPIEKEVYEFQSSGVAMAMYNTDESIRDFAKSCMNYALMREWPVYLSTKNTILKQYDGRFKDLFQEVYENDFADKFKSLNLDYEHRLIDDMVASALKWNGKFVWACKNYDGDVQSDTVAQGFGSLGLMTSVLMTPDGKTIEAEAAHGTVTRHYRLHQEGKQTSTNPIASIFAWSRGLKYRGKLDENDELIKFADKLEKVCVETVESGSMTKDLALLMPHEQDWHSTEDFLEIIERNLNKKLTVTYQ

SEQ ID NO: 86775 - protein, 281 aa, Unknown
  Bacterial polypetide isolated from the Sargasso Sea
VPRLVPGWTRPIVIGRHAFGDQYRATDFVVQGAGKLTMTFTPADGSAPVTREVFDFPDGGVAMSMYNLDESIRGFARACMNYGLDLDWPVYLSTKNTIMKAYDGRFKDLFEEVFEAEFAEKFRAAGITYEHRLIDDMVACALKWNGGFVWACKNYDGDVQSDTVAQGFGSLGLMTSVLMTPDGKTVEAEAAHGTVTRHYRQHQQGKETSTNPIASIFAWTRGLGYRAKFDDTPDVAEFAATLEKVCIKTVESGQMTKDLALLVGKDQAFLKTNQFLDALDG

SEQ ID NO: 86776 - protein, 327 aa, Unknown
  Bacterial polypetide isolated from the Sargasso Sea
TDDQVTVDAANAIKQYGVGVKCATITPDEERVEEFKLKKMWRSPNGTIRNILGGTVFREPIICSNVPKLVPGWTKPIVIGRHAFGDQYRATDFLIPGEGNLEVKWTSKDGKNKKEFKVFDFPGSGTALTMYNLDESIKNFARACMNYGLGRKWPVYLSTKNTILKAYDGRFKDLFQEVFEKEFSDKFKEINITYEHRLIDDMVACAMKWNGGYIWACKNYDGDVQSDTVAQGFGSLGLMTSVLMTPDGKTVESEAAHGTVTRHFRMHQQGKETSTNPIASIFAWTRGLAHRGKLDGNQELIKFSSNIEEVCIETVESGSMTKDLAIL

SEQ ID NO: 86777 - protein, 285 aa, Unknown
  Bacterial polypetide isolated from the Sargasso Sea
LVPSWTNPICIGRHAFGDQYRATDFHVPGKGKLEIKWTSEDGKEKKEFEVFNFPGPGIALSMYNLDKSIIDFARACMNYGLNRKWPVYLSTKNTILKKYDGRFKDLFQEVYEKEFKEKFKERKITYEHRLIDDMVACAMKWNGNYIWACKNYDGDVQSDTVAQGFGSLGLMTSMLMSPDGKTIESEAAHGTVTRHYRLHQQGKETSTNPIASIFAWARGLYHRGKLDGNEDLKKFVKTLEKTCIETVENGSMTKDLAILIGPSTKYLNTNEFLDLLTNNLSKKLN

SEQ ID NO: 86778 - protein, 134 aa, Unknown
  Bacterial polypetide isolated from the Sargasso Sea
MSKIKVKNPVVELDGDEMTRIIWKFIKNKLILPYLDLGIEYYDLGMKSRDNTEDQITIDSANAIKKIGVGIKCATITPDEARVEEFDLKKMWRSPNGTIRNIIGGTVFREPIICKNIPKLVPSWTDPVIIGRHA

SEQ ID NO: 86779 - protein, 178 aa, Unknown
  Bacterial polypetide isolated from the Sargasso Sea
EEVFENEFKDRFDQNKITYEHRLIDDMVACAMKWHGKYIWACKNYDGDVQSDTVAQGYGSLGLMTSVLLAPDGRTMEAEAAHGTVTRHFRMHQQGKETSTNPIASIFAWTRGLAHRGKLDGNEELIKFAETLEKVCVDCVEEGSMTKDLAILIGPSTKYLTTNQFLDTLDGKLRQKLN

SEQ ID NO: 86780 - protein, 243 aa, Unknown
  Bacterial polypetide isolated from the Sargasso Sea
DEMTRIIWEFIKKKLILPYLDIGIEYYDLGMKSRDDTDDQITIDSANAIKKIGVGIKCATITPDEARVEEFNLKKMWRSPNGTIRNIIGGTVFREPIICSNIPKLVPSWSDPVVIGRHAFGDQYRATDFKVPGKGKMEVKWTSEDGKNEIKYEVFNFTGPGVALSMYNLDKSIEDFARSCFNYGLIKKWPVYLSTKNTILKKYDGRFKDIFEDVFNKEFKEKFDKEKITYEHRLIDDMVACAM

SEQ ID NO: 86781 - protein, 118 aa, Unknown
  Bacterial polypetide isolated from the Sargasso Sea
LGLMTSVLMSPDGKTVESEAAHGTVTRHYRMHQQGKETSTNPIASIFAWTRGLAHRGKLDNNNELIKFASSLEKVCVETVEKGSMTKDLAILIDKSSKYLTTNQFLEAINGNLRKELN

SEQ ID NO: 86782 - protein, 144 aa, Unknown
  Bacterial polypetide isolated from the Sargasso Sea
MVIILWACKNYDGDVQSDTVAQGFGSLGLMSSVLMTPDGKTIEAEAAHGTVTRHYRLHQQGKETSTNPIASIFAWARGLYHRGKIDNNDELKKFVKTLEKVCIETVENGLMTKDLAILIGPSSKYLTTNQFLDVIDQNLKKKLN

SEQ ID NO: 86783 - protein, 254 aa, Unknown
  Bacterial polypetide isolated from the Sargasso Sea
TNDQVTIDCAKAIQKYGAGVKCATITPDEARVKEFNLKKMWRSPNGTIRNIVGGTIFREPIICKNVPRLVPHWTESVIVGRHAFGDQYRATDFKVPGKGKMTIKWESEDGKDKIEHEVFKFNDSGIALSMYNLDSSIKDFARACLNYGLVRKWPVYFSSKNTILKVYDGRFKDIFEDVYEKEFKKKFNEAKITYEHRLIDDMVACAMKWSGKYIWACKNYDGDVQSDTVAQGYGSLGLMTSVLRTPDGKVAKAE

SEQ ID NO: 86784 - protein, 193 aa, Unknown
  Bacterial polypetide isolated from the Sargasso Sea
NTILKAYDGRFKDLFQEVFEKEFLDKFKKVNITYEHRLIDDMVACAMKWNGGYVWACKNYDGDVQSDTVAQGFGSLGLMTSVLMTPDGKTVESEAAHGTVTRHYRMHQEGKETSTNPIASIFAWTRGLAHRGKLDGNNELIKFSASIEEVCIKTVESGSMTKDLAILIDKSNKYLTTNQFLEAINGNLKKKLN

SEQ ID NO: 86785 - protein, 211 aa, Unknown
  Bacterial polypetide isolated from the Sargasso Sea
MSKIKVNNPVVELDGDEMTRIIWEFIKNKLILPYLDLGIEYYDLGIKSRDNTDDQITIDSANAIKKIGVGIKCATITPDEARVEEFDLKKMWRSPNGTIRNIIGGTVFREPIICKNIPKLVPSWTDPVIIGRHAFGDQYRATDFKVPGKGKMEVKWTSEDGKDEIKYEVFNFTGPGVALSMYNLDKSIEDFARSCFSYGLIKKWPVYMSTK

SEQ ID NO: 86786 - protein, 221 aa, Unknown
  Bacterial polypetide isolated from the Sargasso Sea
MTRIIWQFIKDKLILPYLDIDLDYYDLGVISRDRTNDKITVDSANAIKKYGVGVKCATITPDEDRVEEFKLKEMWRSPNGTIRNILGGTVFREPIVCNNVPRLVPGWTDPIVVGRHAFGDQYKATDFKVPGKGKLSIKWTPEDPNIEPIEKEVYEFQSSGVAMAMYNTDESIRDFAKSCMNYALMREWPVYLSTKNTILKQYDGRFKDLFQEVYENEFAEK

SEQ ID NO: 86787 - protein, 280 aa, Unknown
  Bacterial polypetide isolated from the Sargasso Sea
KEFNLKKMWRSPNGTIRNILGGTVFREPIICKNIPKLVPSWTNPICIGRHAFGDQYRATDFKVPGKGKLEIKWTSEDGSEKKEFEVFNFPGSGVALSMYNLDQSIKDFARACMNYGLNRKWPVYLSTKNTILKNYDGRFKDLFQEVFDKEFKEKFKEREITYEHRLIDDMVACAMKWNGNYIWACKNYDGDVQSDTVAQGFGSLGLMSSVLMTPDGNTIEAEAAHGTVTRHYRLHQQGKETSTNPIASIFAWARGLYHRGKMDNNEELKKFVKTLEKSLY

SEQ ID NO: 86788 - protein, 316 aa, Unknown
  Bacterial polypetide isolated from the Sargasso Sea
VLDYAVNKAYGNHREIKWLELYAGSNSNDLYGSILPDETLDAMKEYRISIKGPLTTPIGSGHKSLNVMIRQKLDLYACVRPIKYFPGTSTPMAESGNTDMVVFRENTEDLYSGIEWKPDSEGAKKIIDFISKELGTSPFRFEKNCGIGIKPVSEEGTKRLVRMAIDYSLELNKSSITIVHKGNIMKYTEGAFRDWAYNVVTSEYNGKILNDGTYLIENNKFNTELIIKDCIADNFLQQIILAPEQHDVIATLNLNGDYISDALAAQVGGIGMAPGGNIGDGVAVFEATHGSAEPFAGKSRVNPGSIILSGEMMLRY

SEQ ID NO: 86789 - protein, 170 aa, Unknown
  Bacterial polypetide isolated from the Sargasso Sea
MSKINVKNPVVELDGDEMTRIIWSFIKKKLILPYLNIDLKYYDLGMESRDKTNDQITIDCAKAIQTYGVGVKCATITPDEQRVEEFKLKKMWKSPNGTIRNILGGTVFREPIICKNVPKLVPTWTDSVVIGRHAFGDQYRATDFKVPGKGKLKVSWVSDDGKNRIEHDVY

SEQ ID NO: 86790 - protein, 165 aa, Unknown
  Bacterial polypetide isolated from the Sargasso Sea
MAKIKVKNPVVELNGDEMTRIIWAFIKDKLIKPYLDIELKYFDLGIESRDKTNDQITVDCAKAIQKYGVGIKCATITPDEARVKEFKLKKMWRSPNGTIRNILGGTVFREPIICKNVPKLVPGWTKPIIIGRHAFGDQYRATDFVVPGKGKLEVKWTSEDGKDKK

SEQ ID NO: 86791 - protein, 250 aa, Unknown
  Bacterial polypetide isolated from the Sargasso Sea
DEVTKVINFLKNEMGVEKIRFPETSGIGIKPVSREGTERIVRAAIHYSIENDKQSVTLVHKGNIMKFTEGGFRDWGYELAKSEFGAKELDDGPWCTFENPITGNIITVKDVIADAMLQQVLTRPSEYDVLATMNLNGDYISDALAAQVGGIGIAPGANINYDTGVAIFEATHGTAPKYTGQDKVNPGSLILSAEMMLRHMGWEEAADLIVKGMEGAISARTVTYDFERLMDEATLLSCSEFGNAIISHMN

SEQ ID NO: 86792 - protein, 277 aa, Unknown
  Bacterial polypetide isolated from the Sargasso Sea
MIIGRHAFVDQYRATDFTVPVKGKLEIKWTAEDGSDERKYEVFNFPGPGIALSMYNLDKSIEDFARSCFNYGLIKKWPVYLSTKNTILKRYDGRFKDIFEEVFENEFKDRFDQNKITYEHRLIDDMVACAMKWHGKYIWACKNYDGDVQSDTVAQGYGSLGLMTSVLLAPDGKTMEAEAAHGTVTRHFRMHQQGKETSTNPIASIFAWTRGLAHRGKLDGNEELIKFAETLEKVCVDCVEEGSMTKDLAILIGPSTKYLTTNQFLDTLDGKLRQKLN

SEQ ID NO: 86793 - protein, 295 aa, Unknown
  Bacterial polypetide isolated from the Sargasso Sea
EVKNPVVELDGDEMTRIIWDFIKKKLILPYLDIDIKYYDLGIKNRDKTSDKVTIESANAIKKFGVGIKCATITPDENRVKEFNLKKMWKSPNGTIRNILGGTVFREPIICKNIPKLVPSWTNPIVIGRHAFGDQYRATDFKVPGKGKLEMKWTSEDGKEKKEFEVFNFSGPGIALSMYNLDQSIKDFARACMNYGLNRKWPVYLSTKNTILKNYDGRFKDLFEEVYENEFKEKFNERKITYEHRLIDDMVACAMKWNGNYIWACKNYDGDVQSDTIAHGFGSLGLMTSVLMSPDG

SEQ ID NO: 86794 - protein, 194 aa, Unknown
  Bacterial polypetide isolated from the Sargasso Sea
KNTILKNYDGRFKDLFQEVFDKEFKEKFKEREITYEHRLIDDMVACAMKWNGNYIWACKNYDGDVQSDTVAQGFGSLGLMSSVLMTPDGNTIEAEAAHGTVTRHYRLHQQGKETSTNPIASIFAWARGLYHRGKMDNNEELKKFVKTLEKVCIETVESGLMTKDLAILVGPSSKYLTTNQFLDVIDGNLKNKLN

SEQ ID NO: 86795 - protein, 123 aa, Unknown
  Bacterial polypetide isolated from the Sargasso Sea
QGYGSLGLMTSVLRTPDGKIAEAEAAHGTVTRHYRQHQQGKETSTNPIASIFAWTRGLSHRGQLDGNNELIKFANTLEKVCVETVENGSMTKDLAILISKSQKFLTTNQFLEAIDSNLKKKLN

SEQ ID NO: 86796 - protein, 257 aa, Unknown
  Bacterial polypetide isolated from the Sargasso Sea
ATITPDEARVREFNLKKMWRSPNGTIRNIIGGTVFREPIICKNIPKLVPSWTDPLIIGRHAFGDQYRATDFTVPGKGKLEIKWTAEDGSDERKYEVFNFPGPGIALSMYNLDKSIEDFARSCFNYGLIKKWPVYLSTKNTILKRYDGRFKDIFEEVFEKEFKDRFDQNKITYEHRLIDDMVACAMKWHGKYIWACKNYDGDVQSDTVAQGYGSLGLMTSVLLAPDGKTMEAEAAHGTVTRHFRMHQQGKETSTNPIA

SEQ ID NO: 86797 - protein, 259 aa, Unknown
  Bacterial polypetide isolated from the Sargasso Sea
NGIQTPTKNPQDVDITLFRENTEDVYAGKELEEGSEEVQKLNKFLKSEFGWEIREDSGIGIKPISKTATERLVRASLNYAVENNKKNLALVHKGNIMKFTEGAFRKWGYELVQEEFSDVAISWEDCNGDSGDKILIQDVIADAFLQQILVKPENFDVIATTNLNGDYASDALAAQIGGIGISPGGNINYENGKAVFEATHGTAPKYAGKDQANPGSLILSGEMMFRYMGWDEAADLTIKTMEKSILDGNVTYDLARGRE

SEQ ID NO: 86798 - protein, 239 aa, Unknown
  Bacterial polypetide isolated from the Sargasso Sea
CKNIPKLVPSWTDPLIIGRHAFGDQYRATDFTVPGKGKLEIKWTAEDGSDERKYEVFNFPGPGIALSMYNLDKSIEDFARSCFNYGLIKKWPVYLSTKNTILKRYDGRFKDIFEEVFEKEFKDRFEQNKITYEHRLIDDMVACAMKWHGKYIWACKNYDGDVQSDTVAQGYGSLGLMTSVLLAPDGKTMEAEAAHGTVTRHFRMHQQGKETSTNPIASIFAWTRGLAHRGKLDGNEELI

SEQ ID NO: 86799 - protein, 255 aa, Unknown
  Bacterial polypetide isolated from the Sargasso Sea
MAKIKVKNPIVELDGDEMTRIIWSFIKKKLIEPYLELDIKYYDLGIESRDKTSDKITVDCANAIKEYGVGIKCATITPDEARVEEFKLQKMWRSPNGTIRNILGGTVFREPIICKNVPKLVPGWTNPIIIGRHAFGDQYKATDFLVPGKGKLEMKWTSADGKQKKEFDVFNFPSSGVALSMYNLDNSIKDFAKACMNYGLQRNYSVYMSTKNTILKGYDGRFKDLFQEVFDKEFKEKFEKNKLTYEHRLIDDMVA

SEQ ID NO: 86800 - protein, 192 aa, Unknown
  Bacterial polypetide isolated from the Sargasso Sea
QYDGRFKDLFQEVYEKDFAEKFKSLNLDYEHRLIDDMVASALKWNGKFVWACKNYDGDVQSDTVAQGFGSLGLMTSVLMTPDGKTIEAEAAHGTVTRHFRLHQEGKQTSTNPIASIFAWSRGLKYRGKLDENDELVKFADKLEKVCVETVESGSMTKDLALLMPHEQDWHSTEDFLEIIERNLNKKLTVTYQ

SEQ ID NO: 86801 - protein, 300 aa, Unknown
  Bacterial polypetide isolated from the Sargasso Sea
WYNFREPIICKNVQRLVPHWTESVIVGRHAFGDQYRATDFKVPGKGKMTIKWESEDGKNKIEHEVYDFKSSGIALSMYNLDDSIKDFARACMNYGLVRKWPVYFSTKNTILKAYDGRFKDIFEEIFQKEFKKKFEEIGITYEHRLIDDMVACAMKWSGKYIWACKNYDGDVQSDTVAQGYGSLGLMTSVLRTPDGKIAEAEAAHGTVTRHYRQHQQGKETSTNPIASIFAWTRGLSHRGQLDGNQELIKFSNTLEKVCVETVESGSMTKDLAILVSKNQKFLTTNQFLEAINSNLKKKLN

SEQ ID NO: 86802 - protein, 142 aa, Unknown
  Bacterial polypetide isolated from the Sargasso Sea
NYIWACKNYDGDVQSDTVAQGFGSLGLMTSVLMSPDGKTIESEAAHGTVTRHYRLYQQGKETSTNPIASIFAWARGLYHRGKMDQNEELKKYVKTLEKVCIETVEKGLMTKDLAILIGPSSKYLTTNQFLDVINENLKKSLN

SEQ ID NO: 86803 - protein, 254 aa, Unknown
  Bacterial polypetide isolated from the Sargasso Sea
KMTIKWESEDGKNKIEHEVYNFKGSGIALSMYNLDDSIKDFARACMNYGLVRKWPVYFSTKNTILKAYDGRFKDIFEEIFQKEFKKKFDESGITYEHRLIDDMVACAMKWSGKYIWACKNYDGDVQSDTVAQGYGSLGLMTSVLRTPDGKIAEAEAAHGTVTRHYRQHQQGKETSTNPIASIFAWTRGLSHRGQLDGNTQLIKFTNTLEKVCVETVESGSMTKDLAILISKDQKFLTTNQFLEAINSNLKKKLN

SEQ ID NO: 86804 - protein, 252 aa, Unknown
  Bacterial polypetide isolated from the Sargasso Sea
EQGSKECQSFLDLLNQNYPELYKKVRFPSTSGIGIKPVSQEGTSRLVRAAIRYAIDNKRESLTFVHKGNIMKFTEGAFRNWGYELAETEFPNDTYTWDQYDRTAADKGKEAANNEQHQAIANGKIVVKDAIADITLQQVLTRPKEFDVIATMNLNGDYLSDALAAQVGGIGIAPGGNINYDTGHAIFEATHGTAPKYAGQDKVNPGSVLLSGEMMLRYLGWTEAADRIISSMDKTISSKVVTYDFARLMDGA

SEQ ID NO: 86805 - protein, 235 aa, Unknown
  Bacterial polypetide isolated from the Sargasso Sea
MSYKNIKIPESGEKITLKDGNLNVPNNPIIPFIEGDGIGSDITPAMIDVVDAAVEKAYGDEKSISWMEIYCGEKSTKVYGKDEWLPDETLDALREYVVSIKGPLTTPVGGGIRSLNVSLRQILDLYVCLRPVRWFAGVPSPVKVPGNVDMVIFRENSEDIYAGVEFASDSKESAELVKILQDKFNVDQIRFPQNVGLGVKPISEEGSKRLVKRAFEYAIEQDRSSVTLVHKGNIM

SEQ ID NO: 86806 - protein, 278 aa, Unknown
  Bacterial polypetide isolated from the Sargasso Sea
VELDGDEMTRVIWKFIKNKLILPYLDLDIKYYDLGLENRDKTNDQITIECANAIKKFGVGIKCATITPDEERVKEFNLKKMWRSPNGTIRNILGGTVFREPIICKNVPKLVPSWTNPICIGRHAFGDQYRATDFNVPGKGKLEIKWTSEDGKEKKEFEVFNFPGPGVALSMYNLDQSIKDFARSCMNYGLNRKWPVYLSTKNTILKKYDGRFKDLFQEVYEKEFIDKFKQRKITYEHRLIDDMVACAMKWNGNYIWACKNYDGDVQSDTIAQGFGSLG

SEQ ID NO: 86807 - protein, 256 aa, Unknown
  Bacterial polypetide isolated from the Sargasso Sea
KGKMEVKWTSEDGKDEIKYEVFNFTGPGVALSMYNLDKSIEDFARSCFSYGLIKKWPVYMSTKNTILKQYDGRFKDIFQEIFNKEYKSEFEKNNLTYEHRLIDDMVACAMKWSGKYIWACKNYDGDVQSDTMAQGYGSLGLMTSTLLTPDGKVMEAEAAHGTVTRHYRMHQQGKETSTNPIASIYAWTRGLAHRGKLDGNEELIKFAQTLEKVCIECVESGSMTKDLAILIGPNSKFLTTNQFLDEIDGNLKKKLN

SEQ ID NO: 86808 - protein, 109 aa, Unknown
  Bacterial polypetide isolated from the Sargasso Sea
LMTPDGKTVEAEAAHGTVTRHYRNHQKGIETSTNPIASIFAWTRGLSFRGEFDGNNELINFAKKLEETCIKTVENGEMTKDLAILINKDQKWLNTQDFLSAIKNNFKIN

SEQ ID NO: 86809 - protein, 286 aa, Unknown
  Bacterial polypetide isolated from the Sargasso Sea
PSWKNPFCIGRHAFGDQYRVTDFQVPGKGKLEIKWTSEDGKEKKEYEVFNFPGPGVALSMYNLDQSIRDFARACMNYGLNRKWPVYLSTKNTILKKYDGRFKDLFQEVFEAEFKEKFKERNITYEHRLIDDMVACAMKWNGNYIWACKNYDGDVQSDTVAQGFGSLGLMTSVLMTPDGKTIEAEAAHGTVTRHYRMHQQGKETSTNPIASIFAWARGLYHRAKLDDNQDLKKFVKSLEKTCIQVVENGSMTKDLAILIGPDAKFLTTNQFLDVIDKNLKEKLNQTF

SEQ ID NO: 86810 - protein, 132 aa, Unknown
  Bacterial polypetide isolated from the Sargasso Sea
QQVLTRPREYGVLATMNLNGDYISDALAAQVGGIGIAPGANINYDTGIAIFEATHGTAPKYTGQDKVNPGSLILSAEMMLRHMGWTEAADLIVKGMEGAISSKTVTYDFERLMDDATLLSCSDFGNAVVSHM

SEQ ID NO: 86811 - protein, 261 aa, Unknown
  Bacterial polypetide isolated from the Sargasso Sea
MSKIKVKNPVVELNGDEMTRVIWDFIKNKLILSYLDLGIEYYDLGIKNRDKTNDQVTIDCANAIKKNGVGIKCATITPDELRVKEFNLKKMWRSPNGTIRNILGGTVFREPILCKNIPKLVPSWTNPICIGRHAFGDQYRATDFKVPGKGKLEIKWTSEDGSQKKEYEVFNFPGPGVALSMYNLDQSIKDFARACMNYGLNRKWPVYLSTKNTILKKYDGRFKDLFQEVYEHEFKKKFEERKITYEHRLIDDMVACAMKWN

SEQ ID NO: 86812 - protein, 305 aa, Unknown
  Bacterial polypetide isolated from the Sargasso Sea
EFIKNKLILPYLDLEIEYYDLGMKSRDDTDDQITIDSANAIKKIGVGIKCATITPDEARVKEFKLKKMWRSPNGTIRNIIGGTVFREPIICSNIPKLVPSWTDPVIIGRHAFGDQYRATDFKVPGKGKMEVKWTSEDGIKEIKYEVFNFTGPGVALSMYNLDRSIEDFARSCFSYGLIKKWPVYLSTKNTILKKYDGRFKDIFQEVFDKEFKNKFEENKITYEHRLIDDMVACAMKWSGKYIWACKNYDGDVQSDTMAQGYGSLGLMTSTLLTPDGKVMEAEAAHGTVTRHYRMHQQGKRNINKS

SEQ ID NO: 86813 - protein, 100 aa, Unknown
  Bacterial polypetide isolated from the Sargasso Sea
EAAHGTVTRHYIMHQQGKETSTNPIASIFAWTRGLAHRGKLDGNDELIKFANTIEQVCIGCVESGSMTKDLAILIGPSSKYLTTNQFLDEIDENLKKKLN

SEQ ID NO: 86814 - protein, 244 aa, Unknown
  Bacterial polypetide isolated from the Sargasso Sea
MGKIKVENPIVEIDGDEMTRIIWDYIKQKLIVPYLDVDLKYFDLGIEERDRTNDQITIDAAEAIKEIGVGVKCATITPDEARVDEFKLKSMWRSPNGTIRNILGGVVFRAPIICKNVPRLVPGWNKPIVIGRHAYADQYRATDFLFPGKGKLSLKFVGDDGKIIEKEVFEAPSAGITMAMYNLDQSIIDFARASLNYGLRMNWPVYLSTKNTILKAYDGRFKDLFQKVYEEEFEEQFKKSNITY

SEQ ID NO: 86815 - protein, 209 aa, Unknown
  Bacterial polypetide isolated from the Sargasso Sea
MNYGLGRKWPVYLSTKNTILKAYDGRFKDLFQDVFEKEFKNKFEKASITYEHRLIDDMVACAMKWNGGYVWACKNYDGDVQSDTVAQGFGSLGLMTSVLMTPDGKTVESEAAHGTVTRHYRVHQQGKETSTNPIASIFAWTRGLTHRGKLDNNTELVKFASTLEKVCIETVESGSMTKDLAILIEQSAKYLTTNQFLEAIDGNLKKKLN

SEQ ID NO: 86816 - protein, 218 aa, Unknown
  Bacterial polypetide isolated from the Sargasso Sea
MAKIKVKNPVVELDGDEMTRIIWSFIKDKLIKPYLEIDLKYYDLGMENRDKTNDQITIDCAKAIQKYGAGVKCATITPDEARVKEFKLKKMWRSPNGTIRNIVGGTIFREPIICKNVPRLVPHWTESVIVGRHAFGDQYKATDFKVPGKGKMTVKWESENGKDKIEHEVFNFDGPGIALSMYNLDSSIKDFARACMNYGLVRKWPVYFSSKNTIFKSL

SEQ ID NO: 86817 - protein, 150 aa, Unknown
  Bacterial polypetide isolated from the Sargasso Sea
MVASALKWEGNFIWACKNYDGDVQSDSVAQGFGSLGLMTSVLMTPDGKTLEAEAAHGTVTRHYRNHQKGLETSTNPIASIFAWTRGLSFRGEFDGNNELINFAKKLEETCIKTVESGEMTKDLAILINKDQKWLNTQDFLSAIKNNFQIN

SEQ ID NO: 86818 - protein, 236 aa, Unknown
  Bacterial polypetide isolated from the Sargasso Sea
TRIIWSFIKEKLILPYLDIELKYYDLGMDSRDKTNDQITIDSAEAIKKYNVGVKCATITPDEDRVEEFNLKKMWKSPNGTIRNILGGTVFREPIICKNVPRLVPGWTDPIVIGRHAFGDQYRATDFKVPGKGKLTIKFEPEDNSEIIEEIVYNFPGSGIGLAMYNVDDSIRGFARACMNYGLQRKWPVYLSTKNTILKAYDGRFKELFAEVYENEFKDKFLENKIDYEHRLIDDMV

SEQ ID NO: 86819 - protein, 196 aa, Unknown
  Bacterial polypetide isolated from the Sargasso Sea
QKIQFLKVYDGRFKDLFEKIFKSEFSAKFKEKNIIYEHRLIDDMVASALKWEGNFIWACKNYDGDVQSDSVAQGYGSLGLMTSVLMTPDGKTIEAEAAHGTVTRHYRNHQIGLETSTNPIASIFAWSRGLHFRGKFDDNKNLINFSKKLEETCIETVESGKMTKDLAILISSDQKWLNTQDFLDTLKENLETKLKV

SEQ ID NO: 86820 - protein, 294 aa, Unknown
  Bacterial polypetide isolated from the Sargasso Sea
YYDLGMENRDKTGDQVTVDCAKAIQKYGAGVKCATITPDEARVKEFKLKKMWRSPNGTIRNIVGGTIFREPIICKNVPRLVPHWTDSVIVGRHAFGDQYKATDFKVPGKGKMTVKWESENGNDKIEHEVFNFDGPGIALSMYNLDSSIKDFARACMNYGLVRKWPVYFSSKNTILKAYDGRFKDIFEEVFQKEFKIKFDESGITYEHRLIDDMVACAMKWSGKYIWACKNYDGDVQSDTVAQGYGSLGLMTSVLRTPDGKIAEAEAAHGTVTRHYRQHQAGKETSTNPIASIFA

SEQ ID NO: 86821 - protein, 164 aa, Unknown
  Bacterial polypetide isolated from the Sargasso Sea
MSKIKVNNPVVELDGDEMTRIIWEFIKNKLILPYIDLGIEYYDLGMKSRDNTDDQITIDSANAIKKIGVGIKCATITPDEARVEEFNLKKMWRSPNGTIRNIIGGTVFREPIICKNIPKLVPSWTDPVIIGRHAFGDQYRATDFKVPGKGKMEVKWTSEDGKEE

SEQ ID NO: 86822 - protein, 281 aa, Unknown
  Bacterial polypetide isolated from the Sargasso Sea
MILYVCLRPIKYFKGIQTPTKNPQDVDITLFRENTEDVYAGKELENSSEDVEKLNNFLKQEFGWDIRIDSGIGIKPISQTASERLIRAALNYAVENDKKNVALVHKGNIMKFTEGAFRKWGYDLVKSEFSDVAVSWEDCGGDPGDKILVQDVIADAFLQQILIKPQMFDVIATTNLNGDYASDALAAQIGGIGISPGGNINYENGKAVFEATHGTAPKYAGQDKTNPGSLILSGVMMFRYMGWNSAADLIVKSMEKTILEGKVTYDLARGRSVKKILSSSE

SEQ ID NO: 86823 - protein, 212 aa, Unknown
  Bacterial polypetide isolated from the Sargasso Sea
MAKIKVKNPVVELDGDEMTRIIWSFIKDKLIKPYLEIDLKYYDLGMESRDKTDDQITVDAANAIKQHGVGVKCATITPDEARVKEFKLKKMWRSPNGTIRNILGGTVFREPIICKNVPKLVPGWTKPIVIGRHAFGDQYRATDFLIPGEGNLEVKWTSKDGKDKKEFKVFDFPGSGTALTMYNLDDSIKNFARACMNYGLGRKWPVYLSTKN

SEQ ID NO: 86824 - protein, 123 aa, Unknown
  Bacterial polypetide isolated from the Sargasso Sea
QGYGSLGLMTSVLRTPDGKIAEAEAAHGTVTRHYRQHQQGKETSTNPIASIFAWTRGLAHRGQLDGNNELVKFSNTLEKVCVETVESGSMTKDLAILIGKSQKYLTTNQFLEAIDSNLKKKLN

SEQ ID NO: 86825 - protein, 242 aa, Unknown
  Bacterial polypetide isolated from the Sargasso Sea
MAKIKVKNPVVELDGDEMTRIIWSFIKDKLIKPYLDIELKYFDLGIQNRDKTNDQVTIDCAKAIQKYGAGVKCATITPDEARVKEFKLKKMWRSPNGTIRNIVGGTIFREPIICKNVPRLVPHWTESVIVGRHAFGDQYKATDFKVPGKGKMTIKWQSEDGKEKIEHEVFKFNDSGIALSMYNLDSSIKDFARACLNYGLDRKWPVYFSSKNTILKIYDGRFKDIFEDIYQKEFKKKFDEAG

SEQ ID NO: 86826 - protein, 295 aa, Unknown
  Bacterial polypetide isolated from the Sargasso Sea
LFACVRPVRWFDGTPSPVKDPSTTDMVIFRENTEDIYAGIEFENGTKENQKIKSLLKENFEQRFNKIRFPESSGIGLKPISEEGTSRLVRSAIDYAIKNKRDSVTFVHKGNIMKYTEGAFRDWGYNIAKEEFGAKDLDGGPWQEINIENRKIIIKDVIADAFLQQILLRPKEYSVVATMNLNGDYISDALAAIVGGIGIAPGANINYETGHAIFEATHGTAPKYAGKNKVNPGSVILSGAMMLEHLGWVEAKDLIHKGITKSISSKKVTYDFERLMDEATLLSCSEFGEEIIKNM

SEQ ID NO: 86827 - protein, 263 aa, Unknown
  Bacterial polypetide isolated from the Sargasso Sea
TDFKFPGKGKLEIKWTSEDGKEKKEFEVFDFPGPGIALSMYNLDRSIRDFARACMNYGLNRRWPVYLSTKNTILKKYDGRFKDLFQEIYEKEFKEKFKERKITYEHRLIDDMVACAMKWNGNYIWACKNYDGDVQSDTVAQGFGSLGLMTSVLMTPDGKTIESEAAHGTVTRHYRLHQEGKETSTNPIASIFAWARGLYHRGKIDGNEDLKKFVKTLEKVCVETVESGSMTKDLAILVGPSTKYLTTTQFLNVLDINLKKKLN

SEQ ID NO: 86828 - protein, 675 aa, Unknown
  Bacterial polypetide isolated from the Sargasso Sea
MSTPSKIIYTFTDEAPALATYSLLPIVEAFAASADISVETRDISLAGRILASFADRLDADKRIDDDLAKLAELTLQPDANIIKLPNISASVPQLKAAIAELQAQGYNIPDFPEDPQSDEDKEVRARYAKILGSAVNPVLREGNSDRRAPAAVKAYARKHPHSMGKWSMASQSHADYMRGGDFFSSEQSITMAKAGDVRIEFVGKDGKVEVKKQLALQEGEVFDSMFMSCRKLRDFFEKTLQDCKETGVMWSLHVKATMMKVSHPIVFGHAVSVYYKDVFDKYGELFKELGVNPNNGISSVYDKIKSLPASQQEEILHDIHEVYAHRPEMAMVDSVKGITNLHIPSDVIVDASMPAMIRNSGQMWGKDGKQKDTKAVMPESTYARIYQEMINFCKTNGAFDPTTMGTVPNVGLMAQKAEEYGSHDKTFEMTADGTMRVVAADGTVLMQHQVEAGDIWRACQTKDAPIRDWVKLAVTRARQSNTPAIFWLDPERAHDRELQKKVELYLKDYDLTGLDIRMMGYNEAIRVSMERMIRGQDTISVTGNVLRDYLTDLFPIMELGTSAKMLSIVPLMAGGGMYETGAGGSAPKHVQQLVEENYLRWDSLGEFLALAVSLEETGIKTNNAKAKVLGKTLDQATGKLLDNNKSPARKVGEIDNRGSHFYLALYWAQALAEQN

SEQ ID NO: 86829 - protein, 384 aa, Unknown
  Bacterial polypetide isolated from the Sargasso Sea
IIWEFIKNKLILPYLDLGIEYYDLGMKSRDNTDDQITIDSANAIKKIGVGIKCATITPDEARVEEFDLKNMWRSPNGTIRNIIGGTVFREPIICKNIPKLVPSWTDPVIIGRHAFGDQYRATDFKVPGKGKMEVKWTSEDGKDEIKYEVFNFTGPGVALSMYNLDKSIEDFARSCFSYGLIKKWPVYMSTKNTILKQYDGRFKDIFQEIFDKEYKSEFEKNNLTYEHRLIDDMVACAMKWSGKYIWACKNYDGDVQSDTMAQGYGSLGLMTSTLLTPDGKVMEAEAAHGTVTRHYRMHQQGKETSTNPIASIFAWTRGLAHRGKLDSNEELIKFAQILEKVCIECVESGSMTKDLAILVGPNSKFLTTNQFLDEIDGNLKRKLN

SEQ ID NO: 86830 - protein, 172 aa, Unknown
  Bacterial polypetide isolated from the Sargasso Sea
KENITYEHRLIDDMVAAAIKWKGGFVWACKNYDGDVQSDVVAQGFGSLGLMTSTLVTPDGKTLEAEAAHGTVTRHFRRHQKGEETSTNPIASIFAWTRGLMHRGKLDNNNELIKFCKALEEVCIETVEDGKMTKDLALLVFRDDLVDSNFLTTQQFLAELKKNLDLKLNSKE

SEQ ID NO: 86831 - protein, 404 aa, Unknown
  Bacterial polypetide isolated from the Sargasso Sea
MPKIKVKNPVVELDGDEMTRIIWSFIKDKLIKPYLDIDLKYYDLGMENRDKTNDQVTIDCAKAIQKYGAGVKCATITPDEARVKEFNLKKMWRSPNGTIRNIVGGTIFREPIICKNVPRLVPHWTESVIVGRHAFGDQYKATDFKVPGKGKMTIKWESADGKDKIEHEVFKFNDSGIALSMYNLDSSIKDFARACLNYGLVRKWPVYFSSKNTILKVYDGRFKDIFEDIYEKEFKKKFNEAGITYEHRLIDDMVACAMKWSGKYIWACKNYDGDVQSDTVAQGYGSLGLMTSVLRTPDGKVAEAEAAHGTVTRHYRQHQQGKETSTNPIASIFAWTRGLAHRGQLDGNDELIKFSNTLEKVCIETVESGSMTKDLAILISKSQKYLTTNQFLEEIDSNLKKKLN

SEQ ID NO: 86832 - protein, 404 aa, Unknown
  Bacterial polypetide isolated from the Sargasso Sea
MPKIKVKNPVVELDGDEMTRIIWSFIKDKLIKPYLEIDLKYYDLGMENRDKTNDQVTVDCAKAIQKYGVGVKCATITPDEARVKEFNLKKMWRSPNGTIRNIVGGTIFREPIICKNVPRLVPHWTESVIVGRHAFGDQYRATDFKVPGKGKMTIKWESEDGKNKIEHEVFKFNDSGIALSMYNLDSSIKDFARACLNYGLVRKWPVYFSSKNTILKIYDGRFKDIFEDIYEKEFKQKFNQVGITYEHRLIDDMVACAMKWSGKYIWACKNYDGDVQSDTVAQGYGSLGLMTSVLRTPDGKIAEAEAAHGTVTRHYRQHQQGKETSTNPIASIFAWTRGLAHRGQLDGNNELVKFSNTLEKVCIETVESGSMTKDLAILIGKSQKYLTTNQFLEAIDSNLKKKLN

SEQ ID NO: 86833 - protein, 194 aa, Unknown
  Bacterial polypetide isolated from the Sargasso Sea
MAFEHIQEPKSGSKISIDSSGKLIVPDNPIIPFIEGDGIGSDITPAMIRVVDSAVEKSYGGKKKIEWMEIYCGEKSTVVYGEDNWLPPETLRALEIYLVGIKGPLTTPVGGGIRSLNVALRQELDLYVCQRPVRYFNGVPSPVISPEKTDMVIFRENSEDIYAGVEWEAGSEGAEKLIKFLTEEMGVNKIRYRR

SEQ ID NO: 86834 - protein, 239 aa, Unknown
  Bacterial polypetide isolated from the Sargasso Sea
MIFRRMELQWGMYNIDSSIYGFARSCMNRALDKKWPLYLSTKNTILKAYDGRFKDIFQEVFENEFKELFRNEKITYEHRLIDDMVAAAMKWEGGFVWACKNYDGDVQSDTVAQGFGSLGLMTSTLVTPDGKTMEAEAAHGTVTRHYRKYLKGESTSTNPIASIFAWTRGLAFRGKLDSNHDLINFCALLERVCIETVESGKMTKDLAMLVFNQDLTKENYQTTEEFLNEIKLNLEKKLS

SEQ ID NO: 86835 - protein, 404 aa, Unknown
  Bacterial polypetide isolated from the Sargasso Sea
MSKIKVKNPIVELDGDEMTRIIWKFIKEKLIFPYLDLKIEYYDLGMKSRDETEDQITINCANAIKKNGVGIKCATITPDEGRVKEFNLKKMWRSPNGTIRNILGGTVFREPIMCKNIPKLVPSWTNPICIGRHAFGDQYRATDFKVPGKGKLEMKWTSEDGKEKKEFEVFNFPGPGVALSMYNLDQSIKDFARACMNYGLNRKWPVYLSTKNTILKKYDGRFKDLFQEIYEKEFKKKFEERKITYEHRLIDDMVACAMKWNGNYIWACKNYDGDVQSDTVAQGFGSLGLMTSVLMTPDGKTLEAEAAHGTVTRHYRLHQQGKETSTNPIASIFAWAKGLYHRGKLDGNDELKKFVKNLERVCIETVESGSMTKDLAILIGPSTKYLTTNQFLDKIDKNLKKKLN

SEQ ID NO: 86836 - protein, 372 aa, Unknown
  Bacterial polypetide isolated from the Sargasso Sea
MAQFEKLTAPSQGTPIRFENGQPVVADNPIIPFIRGDGTGVDIWPATQKVLDAALAKAYGGSKSIEWFKVYAGDEACDLYGTYQYLPEDTLEAIRTYGVAIKGPLTTPVGGGIRSLNVALRQIFDLYSCVRPCRYYEGTPSPHKRPQDLDVIVYRENTEDIYMGVEWEADDAVGQELRKHLNEVVIPANGKLGKRQIPEGSGIGIKPVSKAGSQRHIRKAIQHALRLQGDKRHVTLVHKGNIMKFTEGAFRDWGYELATTEFRDVCITERESWILGNLEKDPNLSVQANARMIEPGYDSLTPEKKADIDAEVKAVIDAIGSSHGGGKWKEMVLVEDRIADSIFQQIQTRPQEYSILATLNLNGDYISDAAAA

SEQ ID NO: 86837 - protein, 396 aa, Unknown
  Bacterial polypetide isolated from the Sargasso Sea
MSYKKIKVPNKGKKISYVDGKLNVPSNPIIPFIEGDGIGVDITPPMIKVVDEAVKIAYSGKRKIEWMEVYCGEKATNVYSKNDWLPDETIEALKEFIVSIKGPLTTPVGGGIRSLNVSLRQMLDLYVCLRPIRYFNGVPSPVKKPQNVDMIIFRENSEDIYCGVEFESNSKETKSLIRTLKTRFDVSKIRFDQNVGIGIKPISKEGTTRLVREAIKYAIDNNRSSVTLVHKGNIMKFTEGAFRDWGYELAKDSFGGIEIDEGPWQEIINPNNGKKIVIKDVICDAFLQQILLRPTEYDVIATMNLNGDYISDALAAMVGGIGIAPGANISDKYAVFEATHGTAPKYAGQNRVNPGSLILSAEMMLRHMEWTEAADIIMKSMDRAIGAKKLHMILLE

SEQ ID NO: 86838 - protein, 404 aa, Unknown
  Bacterial polypetide isolated from the Sargasso Sea
MSKIKVKNPIVELDGDEMTRVIWDFIKNKLILPYLEVDIKYYDLGIKSRDNTSDKITVDCAHAIKKYGVGIKCATITPDEARVKEFNLKKMWRSPNGTIRNILGGTVFREPILCKNIPKLVPSWENPICIGRHAFGDQYRATDFQVPGKGKLEIKWTSEDGKDKKEFEVFNFPGPGVALSMYNLDQSIIDFARSCMNYGLNRKWPVFLSTKNTILKKYDGRFKDLFQEVYENEFKEKFKERGITYEHRLIDDMVACAMKWNGNYIWACKNYDGDVQSDTVAQGFGSLGLMSSVLMSPDGKTIEAEAAHGTVTRHYRLHQQGKETSTNPIASIFAWARGLYHRAKLDNNEDLKKFVKNLEKTCIQTVESGSMTKDLAILVGPSTKHLTTNQFLDVIDANLKKRLN

SEQ ID NO: 86839 - protein, 404 aa, Unknown
  Bacterial polypetide isolated from the Sargasso Sea
MSKINVKNPVVELDGDEMTRIIWEFIKKKFILPYLDLGIEYYDLGMKSRDKTNDQITIDAANAIKKFGVGIKCATITPDEVRVKEFDLKKMWRSPNGTIRNIIGGTVFREPIICKNIPKLVPSWKDPVVIGRHAFGDQYRATDFKVPGKGKMEIKWTSENGKDVIKYEVFDFTGPGVALSMYNLDKSIEDFARSCFSYGLIKKWPVYLSTKNTILKKYDGRFKDIFEEVFNKEFKKKFEEAKITYEHRLIDDMVACAMKWSGKYIWACKNYDGDVQSDTMAQGYGSLGLMTSTLLTPDGKIMEAEAAHGTVTRHYRMHQEGKETSTNPIASIFAWTRGLAHRGKLDENTELIKFANTIEQVCIECVESGSMTKDLAILIGPSSKFMTTNQFLDEIDKNLKKKLN

SEQ ID NO: 86840 - protein, 285 aa, Unknown
  Bacterial polypetide isolated from the Sargasso Sea
MPYKKIKVPKKGSKISYKDGKINVPDNPIIPFIEGDGIGVDITPPMIKVVNEAVKIAYKGNKKIEWMEVFCGEKATKIYTKDTWLPDETIDALKEFVVSIKGPLTTPVGGGIRSLNVSLRQILDLYVCLRPIRYFDGVPSPVKKPENVDMVIFRENSEDIYCGVEFESNSKEAKNLVKTLKSRFAVSKIRFDENVGIGVKPISKAGTYRLVKKAIDYAIDNNRSSVTIVHKGNIMKFTEGAFRDWGYDLAKSKYGGQEIDEGPWQEITNPNNGKKIVIKDVICDA

SEQ ID NO: 86841 - protein, 404 aa, Unknown
  Bacterial polypetide isolated from the Sargasso Sea
MKKIIVDTPVVEIDGDEMTKIIWELIRERLIKPYLDIETLYFDLSIENRDKTSDQVTIDSANAIKKYGVGVKCATITPDEQRVEEFNLQKMWRSPNGTIRNILGGTVFRQPIICKNIPRYVPGWTKPIVIGRHAYGDQYRATDFLIPGSGKLLMKFIPDNGEDTIEHEVNQYDGPGIAMGMYNIDESIRGFARACFNYGLNLNWPVYLSTKNTILKAYDGRFKDLFQDIFDTEFKDKFKNKNITYEHRLIDDMVAAAMKWEGGFVWACKNYDGDVQSDVVAQGFGSLGLMTSVLMTPDGNTIESEAAHGTVTRHYRAYERGEATSTNPIASIFAWTRGLWYRGKFDKNIELQNFSEKLEKVCISTIESGAMTKDLALLVGNNQGWMETIEFLEELEKNLKSEIS

SEQ ID NO: 86842 - protein, 263 aa, Unknown
  Bacterial polypetide isolated from the Sargasso Sea
NTEDIYAGIEWMSGSNEIEKVKDFLIKEMGVTNIRFPDSSSLGLKPISKEGTDRLVRSAIEYAITNKRDSLTLVHKGNIMKFTEGAFRDWGYQLAKDEYSSEDYEGGPWQIIRKNGHDLIIKDVIADAFLQQILLRPSEYDVIATMNLNGDYISDALAAIVGGIGIAPGANINYTSGHAIFEATHGTAPKYAGQDKVNPSSVILSGVMMLEYLGWQEAADLIIKGVEGAISSKRVTYDFNRLMDGATELKCSEFGHEIVSNMD

SEQ ID NO: 86843 - protein, 404 aa, Unknown
  Bacterial polypetide isolated from the Sargasso Sea
MSKIKVKNPIVELDGDEMTRVIWDFIKNKLVLTYLDLKIEYYDLGMESRDKTEDKITIECANAIKRNGVGIKCATITPDETRVREFNLKKMWRSPNGTIRNIIGGTVFREPIICKNIPKLVPSWTDPLIIGRHAFGDQYRATDFTVPGKGKLEIKWTAEDGSDERKYEVFNFPGPGIALSMYNLDKSIEDFARSCFNYGLIKKWPVYLSTKNTILKRYDGRFKDIFEEVFENEFKDRFDQSKITYEHRLIDDMVACAMKWHGKYIWACKNYDGDVQSDTVAQGYGSLGLMTSVLLAPDGKTMEAEAAHGTVTRHFRMHQQGKETSTNPIASIFAWTRGLAHRGKLDGNEELIKFSETLEKVCVDCVEEGSMTKDLAILIGPSTKYLTTNQFLDTLDGKLRQKLN

SEQ ID NO: 86844 - protein, 114 aa, Unknown
  Bacterial polypetide isolated from the Sargasso Sea
MAKIKVKNPIVELDGDEMTRIIWSFIKKKLIEPYLELDIKYFDLGIESRDKTSDKITVECANAIKEYGVGVKCATITPDEARVEEFKLQKMWRSPNGTIRNILGGTVFREPNYL

SEQ ID NO: 86845 - protein, 207 aa, Unknown
  Bacterial polypetide isolated from the Sargasso Sea
MGLIRKWSVYFSSKNTILKVYDGRFKDIFEEIYQKEFKKKFEEVGITYEHRLIDDMVACAMKWSGKYIWACKNYDGDVQSDTVAQGYGSLGLMTSVLRTPDGKIAEAEAAHGTVTRHYRQHQQGKETSTNPIASIFAWTRGLAHRGQLDGNDELTKFSDTLEKVCIETVESGSMTKDLAILIGNKQKFLTTNQFLEAIDSNLKKKLN

SEQ ID NO: 86846 - protein, 404 aa, Unknown
  Bacterial polypetide isolated from the Sargasso Sea
MSKIKVKNPIVELDGDEMTRVIWEFIKNKLILPYLDLGIEYYDLGMKSRDDTDDKITIDCANAIKKNGVGIKCATITPDEARVEEFKLKKMWRSPNGTIRNIIGGTVFREPIICKNIPKLVPSWTDPLIIGRHAFGDQYRATDFLVPGKGKLEVKWTSEDESDEKKYEVFNFPGPGIALSMYNLDKSIEDFARSCFNYGLIKKWPVYLSTKNTILKKYDGRFKDIFQNVFEKDFKSEFEKNNITYEHRLIDDMVACAMKWHGKYIWACKNYDGDVQSDTVAQGYGSLGLMTSVLLAPDGRTMEAEAAHGTVTRHFRMHQQGKETSTNPIASIFAWTRGLAHRGKLDSNDELIKFAKTLEEVCVESVESGSMTKDLAILIGPSTKYLTTNQFLDVIDGSLKQKLN

SEQ ID NO: 86847 - protein, 201 aa, Unknown
  Bacterial polypetide isolated from the Sargasso Sea
MSKIKVKNLVVELDGDEMTRIIWEFIKNKLILPYLDLGIEYYDLGMKSRDNTDDQITIDSANAIKKIGVGIKCATITPDEARVEEFDLKKMWRSPNGTIRNIIGGTVFREPIICKNIPKLVPSWTDPVIIGRHAFGDQYRATDFKVPGKGKMEVKWTSEDGKDEIKYEVFNFTGPGVALSMYNLDKSIEDFARSCFSYGLI

SEQ ID NO: 86848 - protein, 283 aa, Unknown
  Bacterial polypetide isolated from the Sargasso Sea
MAKIKVKNPVVELDGDEMTRIIWSFIKDKLIKPYLEIDLKYYDLGMKSRDKTDDQITVDAANAIKQHGVGVKCATITPDEARVEEFKLKKMWRSPNGTIRNILGGTVFREPIICKNVPKLVPGWTKPIVIGRHAFGDQYRATDFLIPGEGNLEVKWTSKDGKDKKEFKVFDFPGSGTALTMYNLDDSIKNFARACMNYGLGRKWPVYLSTKNTILKAYDGRFKDLFQEVFEKEFSDKFKKANITYEHRLIDDMVACAMKWIGGYVWACKNYDGDVQSDTVAQG

SEQ ID NO: 86849 - protein, 339 aa, Unknown
  Bacterial polypetide isolated from the Sargasso Sea
KNGVGIKCATITPDEARVEEFKLKKMWRSPNGTIRNIIGGTVFREPIICKNIPKLVPSWTDPLIIGRHAFGDQYRATDFLVPGKGKLEVKWTSEDGSDEKKYEVFNFPGPGIALSMYNLDKSIEDFARSCFNYGLIKKWPVYLSTKNTILKKYDGRFKDIFQNVFEKDFKSEFEKNNITYEHRLIDDMVACAMKWHGKYIWACKNYDGDVQSDTVAQGYGSLGLMTSVLLAPDGRTMEAEAAHGTVTRHFRMHQQGKETSTNPIASIFAWTRGLSHRGKLDNNDELIKFAKILEEVCVETVESGSMTKDLAILIGPSTKYLTTNQFLDVIDGSLKQKLN

SEQ ID NO: 86850 - protein, 399 aa, Unknown
  Bacterial polypetide isolated from the Sargasso Sea
FENIKLVVPNYPVIPFIEGDGIGPDIWKASQMVFDSAVTKAYGKDRSIIWKEIYAGEKAFELKKSWLPDETLADIKEYLIAIKGPLTTPVGGGMRSLNVTLRQILDLYACVRPVAWFEGVPSPVKDPSLVDMVIFRENTEDIYAGIEWPHGSDDLDKVKNFLVNEMNVNNIRFPDTVSLGVKPVSVEGTERIVRSAINYAIAHGRESVTLVHKGNIMKFTEGKFKEWGYSLAKNEYDSVDYEGGPWQLINQNGKQLIIKDVIADAFLQQILLRPAEYDVICTLNLNGDYISDALAAIVGGIGIAPGANINYNTGHAIFEATHGTAPKYAGKDMVNPSSVILSGVMMLEHLGWQEAADLIVKGLGKSIQNKTVTYDFHRLMDQAKKVSCSGFGESIINNM

SEQ ID NO: 86851 - protein, 404 aa, Unknown
  Bacterial polypetide isolated from the Sargasso Sea
MSKIKVKNPIVELDGDEMTRVIWEFIKKKLVLPYIDLDIKYYDLGMKSRDDTNDQITIDCANAIKKVGVGIKCATITPDEERVKEFNLKKMWRSPNGTIRNIIGGTVFREPIICKNVPKLVPSWTDPLIIGRHAFGDQYRATDFLVPGKGNLEIKWTSEDGKEEKKYEVFKFPGPGIALSMYNLDKSIGDFARSCFNYGLIKKWPVYLSTKNTILKNYDGRFKDIFQEIYEKEFKSEFIKNKIIYEHRLIDDMVACAMKWHGNYIWACKNYDGDVQSDTVAQGYGSLGLMTSVLLAPDGKTMEAEAAHGTVTRHFRMHQQGKETSTNPIASIFAWTRGLSHRGKLDGNSELIKFSEVLEKVCVECVENGFMTKDLAILIGPSTKYQTTNQFLDEIDGNLKKKLN

SEQ ID NO: 86852 - protein, 411 aa, Unknown
  Bacterial polypetide isolated from the Sargasso Sea
MSKIKVANPIVEIDGDEMARIIWKFIKEKLILDYLDLNIIYYDLGIKSRDKTDDQITIDAANAIKKHNVGIKCATITPDEKRVEEFSLNRMYKSPNGTIRNIVGGTVFREPIICRSIPRYVQGWSRPICIGRHAFGDQYRATDVTTNGPGKLEMKFTPSDGSESKTWEVYNFEEDGIAMSMYNIDSSIYGFARSCMNMALTKRWPLYLSTKNTILKAYDGRFKDIFEEVFKNEFKDKFEKENITYEHRLIDDMVAAAIKWKGGFVWACKNYDGDVQSDVVAQGFGSLGLMTSTLVTPDGKTLEAEAAHGTVTRHYRRHQQGEETSTNPIASIFAWTRGLMHRGKLDDNKELIKFCKILEEVCIETVEDGKMTKDLALLVFREDLVDSNFLTTQEFLGELKKNLDFKLNSKE

SEQ ID NO: 86853 - protein, 368 aa, Unknown
  Bacterial polypetide isolated from the Sargasso Sea
LDIDLLYYDLGIEERDNTNDEITINAANAIKKYGVGVKCATITPDEARVEEFNLKQMWKSPNGTIRNILGGVVFRAPIICKNVPRLVPGWTDPIVIGRHAFGDQYKATDFLFPGKGKLTIKFEPENGEVIEKEVFNAPSSGIALGMYNLDSSIIDFARASFNYGLKLGWPVYLSTKNTILKAYDGRFKDLFQKVYEEEFEEEFKKRNIVYEHRLIDDMVAAALKWSGSFVWACKNYDGDVQSDTVAQGFGSLGLMTSQLMTPNGSILEAEAAHGTVTRHYREHQKGNVTSTNSIASIYAWTGGLKHRAKLDNNKELEEFALKLESIVIKTVESGYMTKDLAMLIGNNHKWLSTTQFIDKVEENLLKAI

SEQ ID NO: 86854 - protein, 404 aa, Unknown
  Bacterial polypetide isolated from the Sargasso Sea
MSKIKVNNPVVELDGDEMTRIIWEFIKNKLILPYIDLGIEYYDLGMKSRDNTDDQITIDSANAIKKIGVGIKCATITPDEARVEEFDLKKMWRSPNGTIRNIIGGTVFREPIICKNIPKLVPSWTDPVIIGRHAFGDQYRATDFKVPGKGKMEVKWTSEDGKEEIKYEVFNFTGPGVALSMYNLDKSIQDFARSCFSYGLIKKWPVYMSTKNTILKQYDGRFKDIFQEVFDNEYQEEFEKHNLTYEHRLIDDMVACAMKWSGKYIWACKNYDGDVQSDTMAQGYGSLGLMTSTLLTPDGKVMEAEAAHGTVTRHYRMHQQGKETSTNPIASIFAWTRGLAHRGKLDNNQELIKFAQTLEVVCIECVENGSMTKDLAILVGPNSKFLTTNQFLDEIDGNLKKKLN

SEQ ID NO: 86855 - protein, 252 aa, Unknown
  Bacterial polypetide isolated from the Sargasso Sea
MSKGGSKIQMDNGKLLVPDNPVIPFIEGDGIGPDIWKASVRVFDAAVEKAYSGERKIDWLEVYAGEKAFNKFNNWLPDETIEQCREYLVSIKGPLTTPIGGGMRSLNVALRQLLDLYVCLRPVRWYKGVPSPVKSPENVDMVIFRENTEDIYAGIEFEEGTKSNQKFLSLFKESFPEEYSKIRFPESSGIGIKTVSIEGSERLLRSAFEYAIENKRKSVTLVHKGNIMKYTEGAFRNWGYELAEREFGDHVY

SEQ ID NO: 86856 - protein, 407 aa, Unknown
  Bacterial polypetide isolated from the Sargasso Sea
MNHGKKIVFEKNKLVVPNYPIIPFIEGDGIGPDIWKASQMVFDSAVTKAYGKDRSIIWKEIYAGEKAFELKKSWLPDETLDDIKEYLIAIKGPLTTPVGGGMRSLNVTLRQVLDLYACVRPVAWFEGVPSPVKDPSLVDMIIFRENTEDIYAGIEWPHGTDDLDKVKTFLVNEMNVNNIRFPDTVSLGVKPVSVEGTERIVRSAINYAIAHGRESVTLVHKGNIMKFTEGKFKEWGYSLAKKEYDSVDYEGGPWQLINQNGNQLIIKDVIADAFLQQILLRPAEYDVICTLNLNGDYISDALAAIVGGIGIAPGANINYDTGHAIFEATHGTAPKYAGKDMVNPSSVILSGVMMLEHLGWQEAADLIVKGLGKSIQNKTVTYDFHRLMDEAKKVSCSGFGESIINNM

SEQ ID NO: 86857 - protein, 367 aa, Unknown
  Bacterial polypetide isolated from the Sargasso Sea
MLLLKKLMGKKNLYLGWKYICGEKSTKVYGKDEWLPDETLDALREYVVSIKGPLTTPVGGGIRSLNVSLRQILDLYVCLRPVRWFTGVPSPVKVPGDVDMVIFRENSEDIYAGVEFASDSNESAELVKILQEKFNVDQIRFPQNVGLGVKPISEEGTKRLVKRAFEYAIEHDRSSVTLVHKGNIMKFTEGAFRDWGYELCREGFEGDDLDGGPWHYFINPNNGRKIIVKDVICDAFLQQILLRPREYDVIATMNLNGDYLSDALAAMVGGIGIAPGANIGDEAAMFEATHGTAPKYAGLDKVNPLSLILSAEMMLRHINWNEAADLLINSIEKTIQDSYVTYDFERLMDNATLVSCSGFAKEMIKRM

SEQ ID NO: 86858 - protein, 246 aa, Unknown
  Bacterial polypetide isolated from the Sargasso Sea
KEKKEFEVFNFPGPGVAMSMYNLDQSIKDFARACMNYGLNRRWPVFLSTKNTILKKYDGRFKDIFQEIYENEFIDKFKERGITYEHRLIDDMVACAMKWNGNYIWACKNYDGDVQSDTVAQGFGSLGLMSSVLMSPDGKTIEAEAAHGTVTRHYRMHQQGKETSTNPIASIFAWARGLYHRAKLDENEDLKKFVKNLEKTCIETVESGSMTKDLAILVGSDTKFLTTNQFLDVIDSNLRKRLDQNF

SEQ ID NO: 86859 - protein, 404 aa, Unknown
  Bacterial polypetide isolated from the Sargasso Sea
MSKIKVNNPIVELDGDEMTRIIWEFIKNKLILPYIDLGIEYYDLGIKSRDNTDDQITIESANAIKKIGVGIKCATITPDEARVEEFELKKMWRSPNGTIRNIIGGTVFREPIICKNIPKLVPSWTDPVIIGRHAFGDQYRATDFKVPGKGKMEVKWTSEDGKDEIKYEVFNFTGPGVALSMYNLDKSIEDFARSCFSYGLIKKWPVYMSTKNTILKQYDGRFKDIFQEIFDKEYKNDFEKSNLTYEHRLIDDMVACAMKWSGKYIWACKNYDGDVQSDTMAQGYGSLGLMTSTLLTPDGKIMEAEAAHGTVTRHYRLHQQGKETSTNPIASIFAWTRGLAHRGKLDNNDTLIKFAETLEKVCIECVENGSMTKDLAILISPDSKYLTTNQFLDEIDGNLKKKLN

SEQ ID NO: 86860 - protein, 350 aa, Unknown
  Bacterial polypetide isolated from the Sargasso Sea
MSKSNIKVPTTGEKITYKNNKLVVPDNPIIPYIEGDGIGVDITPVMLNVIDAAVEKAYDGKRKISWMEIYCGEKSVKIYGNDEWLPDETLQACKDYKVSIKGPLTTPVGGGIRSLNVAIRQKLDLYVCLRPVKYFDGTPSPVRRPDLVDMVIFRENSEDIYAGVEFESNTDAANKLIKVLQDDFGVEKIRFTENCGIGIKPVSEEGTKRLVRKAYEYAIQNEKDSVTLIHKGNIQKFTEGAFMDWGYELAREEFGGEPLDGGPWHTFKNPNTGKDIIVKDVICDAFLQQCLLRPADYDVLATPNLNGDYLSDALAAQVGGIGIAPGANLGDEVAVFEATHGTAPKYAGQD

SEQ ID NO: 86861 - protein, 388 aa, Unknown
  Bacterial polypetide isolated from the Sargasso Sea
IPYIEGDGIGIDITPPMINVVNEAVKIAYGNKKKIEWMEVYCGEKATKVYTKDTWLPDETIDALKEFVVSIKGPLTTPVGGGIRSLNVSLRQMLDLYVCLRPIRYFNGVPSPVKRPQDVDMVIFRENSEDIYCGVEFEGNTKEATSLIKTLKSKFNVTKIRFDENVGIGVKPISKEGTSRLVRKAIDYAIENNRSSVSLVHKGNIMKYTEGAFRDWGYELAKNKYNGIEIDEGPWQEIINPKNGKKIIIKDVICDAFLQQILLRPTEYDVIATMNLNGDYISDALAAMVGGIGIAPGANISDEYAVFEATHGTAPKYAGQNKVNPGSLILSAEMMLRHMGWTEAADIIMTSMERTIGAKKVTYDFARMMSDADLVTSSGFADEMIKRM

SEQ ID NO: 86862 - protein, 439 aa, Unknown
  Bacterial polypetide isolated from the Sargasso Sea
MLKYTRPEGGEEISFKNGVVSTPDYPIIPYIIGDGIGIDVTPVMKRVLDYAVKKAYDDKKEIKWLEILAGKQAFDMTRQLLPRETLDALKKYRVSIKGPLTTPIGSGHKSLNVLIRQNLDLYACVRPIRYFPGTSSPMVDSSLTDMIVFRENTEDLYSGIEWQADTDGAKKIIEFIKQELKSSPFRFEENCGIGIKPVSKEGSERLIKMAISYALKEKKDFLTIVHKGNIMKYTEGAFRDWAFSLVKSEFNGVENNDNTYSITSNESDHELIIKDCIADNFLQEIILSPEQHEVIATLNLNGDYISDALAAQVGGIGVAPGGNIGDGIAVFEATHGSAESFAGKNRVNPGSIILSGEMLLRYIGWHEAADLVLNGVKSAIQKKQLTFDLARARAGKRIIRTKSKHKHTEQEVKEEFTRLVPGATLVTTSGFGDAVINNM

SEQ ID NO: 86863 - protein, 224 aa, Unknown
  Bacterial polypetide isolated from the Sargasso Sea
MYNLDKSIEDFARSCFNYGLIKKWPVYLSTKNTILKTYDGRFKDIFQAVFEKEFKSDFDKHNLNYEHRLIDDMVACAMKWSGKYIWACKNYDGDVQSDTVAQGYGSLGLMTSVLLAPDGRTMEAEAAHGTVTRHFRMHQQGKETSTNPIASIFAWTRGLAHRGKLDSNDELIKFSKTLEDVCINCVETGLMTKDLAILIDKNQKYLTTNQFLDAIDGNLKKKLN

SEQ ID NO: 86864 - protein, 404 aa, Unknown
  Bacterial polypetide isolated from the Sargasso Sea
MSKIKVKNPIVELNGDEMTRIIWEFIKNKLILPYLDLDIQYYDLGIKNRDKTNDQATIDSANAIKKVGVGIKCATITPDEIRVKEFNLKKMWRSPNGTIRNIIGGTVFREPIICKNIPKLVPSWTDPVVIGRHAFGDQYRATDFKVPGKGKMEVKWTSEDGKDEIKYEVFNFTGPGVALSMYNLDKSIEDFARSCFSYGLIKKWPVYLSTKNTILKQYDGRFKDIFQEVFDKEYKEEFAKNNLTYEHRLIDDMVACAMKWSGKYIWACKNYDGDVQSDTMAQGYGSLGLMTSTLLTPDGKVMESEAAHGTVTRHYRLHQQGKETSTNPIASIFAWTRGLAHRGKLDGNDELINFSKTIEKVCIDCVENGAMTKDLAILIGPSSKYLTTNQFLDEIDGNLKKKLN

SEQ ID NO: 86865 - protein, 417 aa, Unknown
  Bacterial polypetide isolated from the Sargasso Sea
MSYKNIKIPESGEKITLKDGVLTVPNNPIIPFIEGDGIGSDITPAMIDVVNAAVEKAYGEEKSISWMEIYCGEKSTKVYGKDEWLPDETLEALREYVVSIKGPLTTPVGGGIRSLNVSLRQILDLYVCLRPVRWFTGVPSPVKVPGDVDMVIFRENSEDIYAGVEFASDSNESAELVKILQDKFNVDQIRFPQNVGLGVKPISEEGTKRLVKRAFEYAIEQDRSSVTLVHKGNIMKFTEGAFRDWGYELCREEFDGDDLDGGPWHYFVNPNNGRKIIVKDVICDAFLQQILLRPREYDVIATMNLNGDYLSDALAAMVGGIGIAPGANIGDEAAMFEATHGTAPKYAGLDKVNPLSLILSAEMMLRHINWNEAADLLINSIEKTIQDRYVTYDFERLMDNATLVSCSGFAKEMIKRM

SEQ ID NO: 86866 - protein, 137 aa, Unknown
  Bacterial polypetide isolated from the Sargasso Sea
MAKIKVKNPVVELDGDEMTRIIWSFIKKKLIEPYLDIDLKYYDLGMENRDKTNDQVTIESAKAIQKFGAGVKCATITPDEARVKEFNLKKMWRSPNGTIRNIVGGTIFREPIICKNVPRLVPHWTESVIVGRHAFGD

SEQ ID NO: 86867 - protein, 361 aa, Unknown
  Bacterial polypetide isolated from the Sargasso Sea
MPYKKIKVPKKGSKITFKNGKINIPDNPIIPYIEGDGIGVDITPPMINVVNEAVKIAYKDKKKIEWMEVYCGEKATQVYSKDTWLPDETIDALKEFVVSIKGPLTTPVGGGIRSLNVSLRQILDLYVCLRPIRYFDGVPSPVKRPQDVDMVIFRENSEDIYCGVEFEGNSKEAKSLVKTLKTRFDVSKIRFDENVGIGVKPISKSGTSRLVKKAIDYAIDNNRSSVTLVHKGNIMKYTEGAFRDWGYELAKNEYGGIEIDDGPWQEIVNPNNGKKIVIKDVICDAFLQQILLRPTEYDVIATMNLNGDYISDALAAMVGGIGIAPGANISDEYAVFEATHGTAPKYAGQNKVNPGSLILSA

SEQ ID NO: 86868 - protein, 267 aa, Unknown
  Bacterial polypetide isolated from the Sargasso Sea
MSKITVKNPVVELDGDEMTRIIWNFIKNKLILPYLNLGIEYYDLGMKSRDNTDDQITIESAKAIKKIGVGIKCATITPDEDRVKEFNLKKMWRSPNGTIRNIIGGTVFREPIICSNIPKLVPSWSDPVVIGRHAFGDQYRATDFKVPGKGRMEVKWTSEDGKDEIKYEVFNFTGPGIALSMYNLDKSIEDFARSCFSYGLIKNWPVYLSTKNTILKKYDGRFKDIFEEIFNKEFKEKFNKAKITYEHRLIDDMVACAMKWSGKYIWA

SEQ ID NO: 86869 - protein, 391 aa, Unknown
  Bacterial polypetide isolated from the Sargasso Sea
NPIIPFIEGDGIGVDITPAMKNVVDNAVKIAYDNKKKIEWMEVYCGEKSTKVYTKDTWLPDETIEALKEFIVSIKGPLTTPVGGGIRSLNVSLRQIMDLYVCLRPIRYFNGVPSPVKKPENVDMVIFRENSEDIYIGIEFKAKSAESKKIVKVLEKDFGVYQMRYPENVGIGVKPISYGGTNRLVKKAIDYAIDNNKSSVTLVHKGNIMKYTEGAFRDWGYEVAKRDYGAEDLDGGPWQIIKNPSTGKDIVVKDVICDAFLQQILLRPKDYDVIATMNLNGDYISDALAACVGGIGIAPGANLSDNYAVFEATHGTAPKYAGQNRVNPGSLILSAEMMLRHLGWTEAADLIISSMEKTIAAKKVTYDFERMMNDADLVTCSGFADEMIKRM

SEQ ID NO: 86870 - protein, 426 aa, Unknown
  Bacterial polypetide isolated from the Sargasso Sea
MSENGSKIRMDNGKLQVPNDPIIPFIEGDGIGPDIWKASVRVFDAAVEKAYQGERKINWLEVYAGEKAFNKFNNWLPDDTIEKCKEYLVSIKGPLTTPIGGGMRSLNVALRQLLDLYVCLRPVRWYQGVPSPVKNPENVDMVIFRENTEDIYAGIEFEQGTEPNQKFLSLFKESFPDEFSKIRFPESSGIGIKPVSLEGSERLLRSAFDYAIENGRKSVTFVHKGNIMKFTEGAFRNWGYELAEREYGDHVYTWDQWERTKSEKGEEAANQEQNEAIENGAILVKDAIADITLQQVLTRPAEFDVIATMNLNGDYLSDALAAQVGGIGIAPGGNMNNTTGHAIFEATHGTAPKYTDLDKVNPGSVILSGEMMLRYMGWTEAADLIVQSMDATIQKKTVTYDFARLMGNITPVKCSEFGDELIKNMI

SEQ ID NO: 86871 - protein, 282 aa, Unknown
  Bacterial polypetide isolated from the Sargasso Sea
LDRSSNYLEDIAFGDQYRATDFKVPGKGKMEVKWTSENGKDEIKYEVFNFTGPGVALSMYNLDKSIKDFARSCFSYGLIKKWPVYMSTKNTILKQYDGRFKDIFQEIFDKEYKSEFEKNNLTYEHRLIDDMVACAMKWSGKYIWACKNYDGDVQSDTMAQGYGSLGLMTSTLLTPDGKIMEAEAAHGTVTRHYRMHQQGKETSTNPIASIFAWTRGLAHRGKLDGNEELIKFAQTLEKVCIECVESGSMTKDLAILIGPDSKYLTTNQFLDEIDGNLKKKLN

SEQ ID NO: 86872 - protein, 342 aa, Unknown
  Bacterial polypetide isolated from the Sargasso Sea
AIKKNGVGIKCATITPDEARVKEFNLKKMWRSPNGTIRNIIGGTVFREPIICKNVPRLVPSWTDPVIIGRHAFGDQYRATDFKVPGKGKLEIKWTSEDGKDTKNYEVFNFPGSGVALSMYNLDKSIEDFARSCFNYGLIKKWPVYLSTKNTILKTYDGRFKDIFQSVFEKEFKSSFEKNNLTYEHRLIDDMVACAMKWSGKYIWACKNYDGDVQSDTVAQGYGSLGLMTSVLLAPDGRTMEAEAAHGTVTRHYRMHQQGKETSTNPIASIFAWTRGLAHRGKLDANDELIKFANTLENVCIDCVETGSMTKDLAILIDSNQKYLTTNQFLDAIDGNLKKKLN

SEQ ID NO: 86873 - protein, 385 aa, Unknown
  Bacterial polypetide isolated from the Sargasso Sea
MPKFEKLTLPNEGEIITFNQGKPNVPNNPIVPFIRGDGTGVDIWPATQIVLDSAIKKSYGDERKINWFKVYAGDEACELYGTYNYLPQDTIEAIKLFGVAIKGPLTTPIGGGIRSLNVALRQIFDLYSCVRPCKYYSGTPSPHKNPQNLDVIVYRENTEDIYMGIEWEAEDNNCLELINHLNNIVIPKSKNLKNRSIPNGSGIGIKPVSKSGSQRHIRKAIEHAKRLSGDKRHVTLVHKGNIMKYTEGAFRDWGYELAVNEFREDCITERESWILDNIQKNPDITIENNARKIEPGFDKLTNNKKAFICEEIKEVIASISNSHGDGKWRELILVDDRIADSIFQQIQTRPQEYSILATLNLNGDYVSDAAAAIVGWPRYGSWCKY

SEQ ID NO: 86874 - protein, 410 aa, Unknown
  Bacterial polypetide isolated from the Sargasso Sea
MSKIKVANPIVEIDGDEMARIIWKYIKNDLILDYVDLDIKYFDLSIKSRDKTDDQITVDAANAIKKYNVGIKCATITPDEDRVKEFSLKRMYKSPNGTIRNIVGGTVFREPIIVKTIPRYVQGWTRPICIGRHAFGDQYRATDIVTKGKGKLTMTFTPEGGGKPESWEVYNFQEDGVAMSMYNIDSSIYGFARSCMNRALDKKWPLYLSTKNTILKAYDGRFKDIFQEVYDNEFKDKFEKENISYEHRLIDDMVAAAIKWKGGFVWACKNYDGDVQSDIVAQGFGSLGLMTSTLVTPDGQTMESEAAHGTVTRHFRRHEKGEETSTNPIASTFAWTRGLMHRGKLDNNQELIDFCKLLESVCIETIEEGKMTKDLALLVFRDDMVSSNYLTTEQFFEELKSNLERKIKGT

SEQ ID NO: 86875 - protein, 474 aa, Unknown
  Bacterial polypetide isolated from the Sargasso Sea
MPKFEKLTLPNEGEIITFNQGKPNVPNNPIVPFIRGDGTGVDIWPATQIVLDSAIKKSYGDERKINWFKVYAGDEACELYGTYNYLPQDTIEAIKHFGVAIKGPLTTPIGGGIRSLNVALRQIFDLYSCVRPCKYYSGTPSPHKNPQNLDVIVYRENTEDIYMGIEWEAEDNNCLELINHLNNVVIPKSKNLKNRSIPDGSGIGIKPVSKSGSQRHIRKAIEHAKRLSGDKRHVTLVHKGNIMKYTEGAFRDWGYELAVNEFREDCITERESWILDNIQKNPEITIENNARKIEPGFDKLTNNKKAFICEEIKEVIASISNSHGDGKWRELILVDDRIADSIFQQIQTRPQEYSILATLNLNGDYVSDAAAAIVGGLGMAPGANIGDNAAIFEATHGTAPKHAGLNKINPGSVILSGVMMLEYFGWDEAANLITNGLSKAIEQKKVTYDLARLMEPKVEPLSCSSFAEEIISNF

SEQ ID NO: 86876 - protein, 418 aa, Unknown
  Bacterial polypetide isolated from the Sargasso Sea
MPYQHIKVPEGGDKITVNKDFSLNVSDQPIIPYIEGDGTGFDITPVMIKVVDAAVAHAYKGQRKIHWMEIFAGEKATKVYGPDVWLPDETLQVLKEYVVSIKGPLTTPVGGGIRSLNVALRQELDLYVCLRPVQYFKGVPSPVREPQKIDMVIFRENSEDIYAGIEWAAGSEQAKKVIKFLQDEMGVKKIRFPETSGIGVKPVSTEGTERLVRKAIQYAIDNDRKSVTLVHKGNIMKFTEGLFRDAGYALAQKEFGGELIDGGPWMRVKNPKTGNEIVIKDSIADAFLQQILLRPAEYDVIATLNLNGDYISDALAAQVGGIGIAPGANLSDSVAMFEATHGTAPKYAGKDYVNPGSEILSAEMMLRHLGWTEAADTIIAAMEKSILQKRVTYDFARLMEGATQVSCSGFGEVLIENM

SEQ ID NO: 86877 - protein, 404 aa, Unknown
  Bacterial polypetide isolated from the Sargasso Sea
MAKIIVKNPVVELDGDEMTRIIWSFIKNKLIKPYLDINLKYYDLSIENRDKTNDQVTIDCAKAIQKYGAGVKCATITPDEARVKEFKLKKMWRSPNGTIRNIVGGTIFREPIICKNVPRLVPHWTDSVIVGRHAFGDQYKATDFKVPGKGKMTVKWESENGKDKIEHEVFNFDGPGIALSMYNLDNSIKDFARACMNYGLVRKWPVYFSSKNTILKAYDGRFKDIFEEIYQNEFKNKFEKADIFYEHRLIDDMVACAMKWSGKYIWACKNYDGDVQSDTVAQGYGSLGLMTSVLRTPDGKVAEAEAAHGTVTRHYRQHQAGKETSTNPIASIFAWTRGLSHRGNLDGNQELIKFSQSLEKVCIETVESGSMTKDLAILIGKDQKFLTTNQFLEAIDSNLKKKLN

SEQ ID NO: 86878 - protein, 174 aa, Unknown
  Bacterial polypetide isolated from the Sargasso Sea
TIEFKTDFENNEIVYEHRLIDDLVASSMKWSGNFIWACKNYDGDVQSDAVAQGFGSLGMMSSVLMTPDGKTIEAEAAHGTVTRHYRLHQKGEKTSTNPIASIFAWTKGLNFRGEFDGNDELIKFSKALEETCIETVESGQMTKDLAILVDKNSPWMNTEDFLNCLDKNLQTKLN

SEQ ID NO: 86879 - protein, 332 aa, Unknown
  Bacterial polypetide isolated from the Sargasso Sea
MSKIKVNNPVVELDGDEMTRIIWEFIKNKLILPYIDLGIEYYDLGMKSRDNTDDQITIDSANAIKKIGVGIKCATITPDEARVEEFDLKKMWRSPNGTIRNIIGGTVFREPIICKNIPKLVPSWTDPVIIGRHAFGDQYRATDFKVPGKGKMEVKWTSEDGKDEIKYEVFNFTGPGVALSMYNLDKSIQDFARSCFSYGLIKKWPVYMSTKNTILKQYDGRFKDIFQEVFDNEYKKEFEKHNLTYEHRLIDDMVACAMKWSGKYIWACKNYDGDVQSDTMAQGYGSLGLMTSTLLTPDGKVMEAEAAHGTVTRHYRMHQQGKETSTNPIASI

SEQ ID NO: 86880 - protein, 420 aa, Unknown
  Bacterial polypetide isolated from the Sargasso Sea
MSKSKIKVPTKGEQITYKNNTLVVPDNPIIPYIEGDGIGVDITPVMLDVINAAVAKAYEGKREISWMEIYCGEKSVELYGNDEWLPDETLQACKDYKVSIKGPLTTPVGGGIRSLNVAIRQKLDLYVCLRPVKYFDGTPSPVRRPDLVDMVIFRENSEDIYAGVEFESNTDAANKLIKVLQDDFGVEKIRFTENCGIGIKPVSEEGTKRLVRKAFEYAIQNEKDSVTLIHKGNIQKFTEGAFMDWGYELAREEFDGKPLDGGPWHTFKNPNTGKDIVIKDVICDAFLQQCLLRPADYDVLATPNLNGDYLSDALAAQVGGIGIAPGANLGDEVAVFEATHGTAPKYAGQDRVNPGSLILSAEMMLRHMGWVEAADLIIEAMQKTISKKRVTYDFARLIDDAEEVSCSKFGDLLIKRIQKQ

SEQ ID NO: 86881 - protein, 306 aa, Unknown
  Bacterial polypetide isolated from the Sargasso Sea
MEFEHIIEPKGGSKISMDSSGKLVVPDNPIVPFIEGDGIGSDITPAMISVVDSAVDKSYGGKKKIEWMEIYCGEKSTMVYGEDNWLPPETLRALEIYLVGIKGPLTTPVGGGIRSLNVALRQELDLYVCQRPVRYFNGVPSPVVSPEKTDMVIFRENSEDIYAGIEWEAGTEEADKVIKFFTEEMGVTKIRFMENCGIGVKPVSKQGTERLVDKAIQYAINNDKDSVTLVHKGNIMKFTEGSFKDWGYQFAVSKYDAKELDGGPWHALTNPITGKEIVIKDVIADAFLQQILTRPDEYSVIATLNL

SEQ ID NO: 86882 - protein, 404 aa, Unknown
  Bacterial polypetide isolated from the Sargasso Sea
MSKIKVNNPVVELDGDEMTRIIWEFIKNKLILPYLDLGIEYYDLGMKSRDNTDDQITIDSANAIKKIGVGIKCATITPDEARVEEFDLKKMWRSPNGTIRNIIGGTVFREPIICKNIPKLVPSWTDPVIIGRHAFGDQYRATDFKVPGKGKMEVKWTSEDGKDEIKYEVFNFTGPGVALSMYNLDKSIEDFARSCFSYGLIKKWPVYMSTKNTILKQYDGRFKDIFQEIFENEYKEEFEKNNLTYEHRLIDDMVACAMKWSGKYIWACKNYDGDVQSDTMAQGYGSLGLMTSTLLTPDGKIMEAEAAHGTVTRHYRMHQQGKETSTNPIASIFAWTRGLAHRGKLDSNNELIKFAQTIEKVCIECVENGAMTKDLAILIGPSSKYLTTNQFLDEIDGNLKAKLN

SEQ ID NO: 86883 - protein, 353 aa, Unknown
  Bacterial polypetide isolated from the Sargasso Sea
MEKIKVKNPVVEMDGDEMTRIIWEFIKDKLILPYIDIDIKYYDLGVQNRDSSEDQITIDSAEAVKKYGVGIKCATITPDEDRVKEFNLKKMWRSPNGTIRNILGGTIFRQPIICKNVPRIVTNWNKPIVVARHAFGDQYRATDTLISKPGKLKMVFEPTDGSEGFEKEVFNFERKGIALSMYNLDQSIIDFARACFNYGLNLGWPVYLSTKNTILKVYDGRFKDLFENVFQNEFADKFNDKNIVYEHRLIDDMVATALKWEGNFIWACKNYDGDVQSDSVAQGYGSLGLMTSVLMTPDGKTVEAEAAHGTVTRHFRNHQKGLETSTNPIASIFAWSRGLHFRGKFDDNERFNE

SEQ ID NO: 86884 - protein, 418 aa, Unknown
  Bacterial polypetide isolated from the Sargasso Sea
MSQEEKIPEDGEIISIENGKLVVPNKPIIPFIEGDGIGPDVWRASKRIIDAAIKKTYEGEKEIKWVEVFAGEKANKLTGSWLPDETIDMCNKFLVAIKGPLTTPIGGGIRSLNVALRQILDLYVCLRPVRWFEGVPSPVKNPELINMVIFRENTEDIYAGIEFEQGTENNEKFLALLKKEFPNYYKKIRFPKTSGIGIKPISSEGTNRLTRAALNYAIQNKQKSITFVHKGNIMKFTEGAFRNWGYKLAETEFKNMTYSWDMWEKTCAKKGQEKANAEMEQAKKDGKVLIKDSIADITLQQVLTRPEEFDVIATMNLNGDYLSDALAAQVGGIGIAPGGNINYETGHAIFEATHGTAPKYANQDKVNPGSLLLSGEMMLRYLGWTEAADNIIKAMDKTIANKTVTYDFARLMNNAKEI

SEQ ID NO: 86885 - protein, 419 aa, Unknown
  Bacterial polypetide isolated from the Sargasso Sea
MKFEHIVEPSEGSKITIDKKGNLVIPDNPIIPFIEGDGIGSDITPAMIQVVDSAVEKSYKGKRKIEWMEIYCGEKSTEVYGEDNWLPPETLRALEIYLVGIKGPLTTPVGGGIRSLNVALRQELDLYVCQRPVRYFDGVPSPVTNPEKTDMVIFRENSEDIYAGIEWEAGSDDAKKVITFLRKEMGVTKIRFPEECGIGVKPVSKEGTERLVDKAIQYAIANDRDSVTLVHKGNIMKFTEGSFKDWGYQFAASKYDAIELDGGPWHSLKNPNTGKEIIIKDVIADAFLQQILTRPDEYSVIATLNLNGDYISDALAAEVGGIGIAPGANLGDEVALFEATHGTAPKYTGLDKVNPGSLILSAEMMLRYMGWIEAADLIIDGLAKTISQKTVTYDFERLMSGASLLKCSEFGEAIIKNMD

SEQ ID NO: 86886 - protein, 418 aa, Unknown
  Bacterial polypetide isolated from the Sargasso Sea
MKFKNIVEPTDGSKITYKGEQLIVPNNPIIPFIEGDGIGSDITPAMIDVVDAAVAKAYDNKRKISWMEIYCGEKSVEVYGDDNWLPKETLKALEEYLVGIKGPLTTPVGGGIRSLNVALRQELDLYVCQRPVRYFEGVPSPVVSPEKTDMVIFRENSEDIYAGIEWEAGSEGSEKIIKFLVEEMGVTKIRFPDFCGIGVKPVSKEGTQRLVDKAIQYAIANDRDSVTFVHKGNIMKFTEGSFKDWGYQLAAEKYGAEELDGGPWHLLKNPKTGNEIIIKDVIADAFLQQILTRPDEYSVIATLNLNGDYISDALAAEVGGIGIAPGANLGDKVALFEATHGTAPKYTGLDKVNPGSLILSAEMMLRYMGWQEAADLIILGLSRTIESKTVTYDFERLMQGASLVKCSEFGKAIIDNME

SEQ ID NO: 86887 - protein, 404 aa, Unknown
  Bacterial polypetide isolated from the Sargasso Sea
MSKIKVNNPVVELDGDEMTRIIWEFIKNKLILPYLDLGIEYYDLGMKSRDNTDDQITIDSANAIKKIGVGIKCATITPDEARVEEFDLKKMWRSPNGTIRNIIGGTVFREPIICKNIPKLVPSWTDPVVIGRHAFGDQYRATDFKVPGKGKMEVKWTSEDGKDEIKYEVFNFTGPGVALSMYNLDKSIQDFARSCFSYGLMKKWPVYMSTKNTILKQYDGRFKDIFQEIFENEFKEEFEKNNLTYEHRLIDDMVACAMKWSGKYIWACKNYDGDVQSDTMAQGYGSLGLMTSTLLTPDGKIMEAEAAHGTVTRHYRMHQQGKETSTNPIASIFAWTRGLAHRGKLDSNNELIKFAQTIEKVCIECVENGAMTKDLAILIGPSSKYLTTNQFLDEIDGNLKAKLN

SEQ ID NO: 86888 - protein, 262 aa, Unknown
  Bacterial polypetide isolated from the Sargasso Sea
LMSKKIIELMNDFGQGKKIRFPDSSSFGLKPISKEGSIRLFDAALNYAIENNRRSVTIVHKGNIMKFTEGYFKKWTYAHAEEQYGDKVFTWAQYDRIQEEKGTEAANMAQKKAVLDGKIIIKDVIADAFLQQILLRPNEYDVIATMNLNGDYLSDSAAAAVGGIGIAPGANINYKSGHAIFEATHGTAPKYAGQDKVNPSSVILSAVMMLNYMGWKEAANSIEYALEKAIFNKKVTYDFHRLMDNATLLKCSEFGDEIISKF

SEQ ID NO: 86889 - protein, 404 aa, Unknown
  Bacterial polypetide isolated from the Sargasso Sea
MSKIKVKNPIVELDGDEMTRVIWEFIKKKLILQYLDLGIEYYDLGMKSRDATNDQITIDCAKAIKKNGVGIKCATITPDEARVKEFNLKKMWRSPNGTIRNILGGTVFREPIICKNIPKLVPSWTNPICIGRHAFGDQYRATDFKVPGKGKLEIKWTSEDGTEKKEFEVFNFPGSGVALSMYNLDQSIKDFARACMNYGLNRKWPVYLSTKNTILKNYDGRFKDLFQEVFDKEFKEKFKEREITYEHRLIDDMVACAMKWNGNYIWACKNYDGDVQSDTVAQGFGSLGLMSSVLMTPDGNTIEAEAAHGTVTRHYRLHQQGKETSTNPIASIFAWARGLYHRGKMDNNEELKKFVKTLEKVCIETVESGLMTKDLAILVGPSSKYLTTNQFLDVIDGNLKNKLN

SEQ ID NO: 86890 - protein, 301 aa, Unknown
  Bacterial polypetide isolated from the Sargasso Sea
MSKIKVNNPVVELDGDEMTRIIWDFIKNKLILPYLDLGIEYYDLGMKSRDDTDDQITIDSANAIKKIGVGIKCATITPDEARVEEFDLKKMWRSPNGTIRNIIGGTVFREPIICKNIPKLVPSWTDPVVIGRHAFGDQYRATDFKVPGKGKMEVKWTSEDGKDEIKYEVFNFTGPGVALSMYNLDKSISDFARSCFSYGLIKKWPVYMSTKNTILKQYDGRFKDIFQEIFDNEYKEDFEKNNLTYEHRLIDDMVACAMKWSGKYIWACKNYDGDVQSDTMAQGYGSLGLMTSTLLTPDGKV

SEQ ID NO: 86891 - protein, 404 aa, Unknown
  Bacterial polypetide isolated from the Sargasso Sea
MSKIKVNNPIVELDGDEMTRVIWDFIKNKLILPYVDLGIEYYDLSMKSRDDTNDQITIDCAKAIKKNGVGIKCATITADELRVKEFNLKKMWRSPNGTIRNIIGGTVFREPIICKNIPKLVPSWTDPLIIGRHAFGDQYRATDFLVPGKGKLEVKWTSDDGKDEKNYEVFNFPGPGIALSMYNLDKSIEDFARSCFNYGLIKKWPVYLSTKNTILKKYDGRFKDIFQKIFEEEFKTEFENNKITYEHRLIDDMVACAMKWSGKYIWACKNYDGDVQSDTVAQGYGSLGLMTSVLLAPDGRTMEAEAAHGTVTRHFRMHQQGKETSTNPIASIFAWTRGLAHRGKLDNNNELIKFSNTLEKVCIDCVENGSMTKDLAILVGPSTKYLTTNQFLDEIDRNLLKQLN

SEQ ID NO: 86892 - protein, 258 aa, Unknown
  Bacterial polypetide isolated from the Sargasso Sea
MSKIKVKNPIVELDGDEMTRVIWEFIKNKLILPYLDLGIEYYDLGIKNRDKTSDQITIDSARAIKKIGVGIKCATITPDEGRVKEFNLKKMWRSPNGTIRNILGGTVFREPILCKNIPKLVPSWENPICIGRHAFGDQYRATDFQVPGKGKLEIKWTSEDGKEKKEFEVFNFPGPGVALSMYNLDQSIKDFARSCMNYGLNRKWPVFLSTKNTILKKYDGRFKDLFQEVYDNEFKEKFKERGISYEHRLIDDMVACAM

SEQ ID NO: 86893 - protein, 404 aa, Unknown
  Bacterial polypetide isolated from the Sargasso Sea
MTKIKVKNPVVELDGDEMTRIIWDLIKKKLILPYLDIDLHYYDLGVEYRDQTNDQVTIDAAEAIQKHGVGVKCATITPDEDRVEEFNLKEMWKSPNGTIRNILGGTVFREPIICSNIPRLVPGWTQPIVIGRHAFGDQYRATDFVVPAKGKLSMKWVSEDGSQEIEEDIYDFEDSGIAMGMYNHDKSIKDFARACFNYGINRKWPVYLSTKNTILKKYDGRFKDLFQEVYEKEYKEQMDALNIEYEHRLIDDMVACALKWSGAFIWACKNYDGDVQSDTVAQGFGSLGLMSSALMTPDGKTVEAEAAHGTVTRHYRLHQKGEETSTNSIASIFAWTRGLAHRAKLDDNEELQSFSNLLEKVCIKTVEKGFMTKDLALLVGSNQSWLNTHDFIDKIDSNLQSEMS

SEQ ID NO: 86894 - protein, 417 aa, Unknown
  Bacterial polypetide isolated from the Sargasso Sea
MTYKKIKVPKKGQKISYKNGKLNVPDNPVIPYIEGDGIGVDITPPMIKVVDEAVKIAYSGTKKIEWMEVFCGEKATKVYTKDTWLPDETIDALKEYVVSIKGPLTTPVGGGIRSLNVSLRQLLDLYVCLRPIRYFDGVPSPVKKPEEVDMVIFRENSEDIYCGVEFEGNSKEAKNLLKVLKSKFDVTKIRFEENVGIGVKPISEEGTHRLVKKAIDYAIDNNRSSVTLVHKGNIMKFTEGAFRDWGYELSKNSYGGIEIDDGPWQEIINPNNGKKIVIKDVICDAFLQQILLRPTEYDVIATMNLNGDYISDALAAMVGGIGIAPGANISDQYAVFEATHGTAPKYAGQNKVNPGSLILSAEMMLRHMGWIEAADLIIKSMDRTISAKKVTYDFARMMTDADMVSSSGFGDEMIKRM

SEQ ID NO: 86895 - protein, 182 aa, Unknown
  Bacterial polypetide isolated from the Sargasso Sea
MSKIKVNNPVVELDGDEMTRIIWKFIKDKLILPFVNIDIKYYDLGIKNRDFTDDQVTVDAANAIKKFNVGIKCATITPDEERVKEYTLKKMWRSPNGTIRNIVGGTVFREPIIIKNVPRYVQGWTKPICIGRHAFGDQYKATDIVTHGKGKLTMTFTPDNGKDSKSWEIYDFQEDGVAMGNV

SEQ ID NO: 86896 - protein, 120 aa, Unknown
  Bacterial polypetide isolated from the Sargasso Sea
MSQDGSKIRMDNGKLQVPNDPIIPFIEGDGIGPDIWKASVRVFDAAVEKAYHGERKINWLEVYAGEKAFNKFNNWLPDDTIEKCREYLVSIKGPLTTPIGGGMRSLNVALRQLLDLYVCL

SEQ ID NO: 86897 - protein, 217 aa, Unknown
  Bacterial polypetide isolated from the Sargasso Sea
MSKIKVKNPVVELDGDEMTRIIWSFIKKKLITPYLDLKIEYFDLGIESRDKTSDQITIDCANAIKKCGVGIKCATITPDEARVKEFKLKKMWRSPNGTIRNILGGTVFREPIICKNVPKLVPGWTKPIIIGRHAFGDQYRATDFVVPGKGKLEVKWTSEDGKDKKEFEIFNFTGPGVSLSMYNLDNSIKDFARACMNYGLERKYPVYMSTKNTILKS

SEQ ID NO: 86898 - protein, 411 aa, Unknown
  Bacterial polypetide isolated from the Sargasso Sea
MKENLNREELSAAISDTRKSFDTDNPIIPFIEGDGIGIDIWPASQKVFDSAVEKAYNNQRKIEWMEVLAGQKAYDNENEWLPEKTIEMFDKYGIGIKGPLTTPVGGGIRSINVSIRQKLDLYACVRPLRWFKGVETPTKNPGDVDIALFRENTEDVYSGKELEMGSEEVKTLNNFLKSEFGWEIREDSGIGIKPISQTASERLIRAALNYAVENGKKNLAIVHKGNIMKFTEGAFRGWGYELVKNEFSDVAVSWEDCKGEPGDKILVQDVIADAFLQQILIKPHEFDVIATTNLNGDYASDALAAQIGGIGISPGGNINYENGKSVFEATHGTAPKYAGQDKANPGSLILSGEMMFRYMGWNEAADLVIKAMEKSISEGNVTYDLARGRSDARTLPSSEFSKSLIENIESF

SEQ ID NO: 86899 - protein, 319 aa, Unknown
  Bacterial polypetide isolated from the Sargasso Sea
FGLKRMYRSPNGTIRNILGGTVFRQPILCSNVPRLVPGWKKPIVIGRHAFGDQYRATDIPIPGPGKVVMRYEPADGGEVIEHEVFDFEGRGVALAMYNLDESIRGFARASLNYGLELGWPVYMSTKNTILKVYDGRFKDIFEKVYEEEFKERFVEQGLTYEHRLIDDMVAAALKWDGGFVWACKNYDGDVQSDTVAQGFGSLGLMTSVLMTPDGNVIEAEAAHGTVTRHFREHQAGRETSTNPIASIFAWTRGLYHRGRFDETSSVQHFANTLEEVCIETVESGLMTKDLALLVGPSQEWLSTSQFLDALDDRLRNKFA

SEQ ID NO: 86900 - protein, 404 aa, Unknown
  Bacterial polypetide isolated from the Sargasso Sea
MSKIKVKNPIVELDGDEMTRVIWEFIKNKLILPYLDLGIEYYDLGIKNRDKTNDQVTIECANAIKKNGVGIKCATITPDELRVKEFELKKMWRSPNGTIRNILGGTVFREPIICKNVPKLVPSWTNPICIGRHAFGDQYRATDFKVPGKGKLEMKWTSEDGKEKKEFEVFEFPGPGVALSMYNLDRSIKDFARACMNYGLNRKWPVYLSTKNTILKKYDGRFKDLFEEVYDQEFKKKFEERNITYEHRLIDDMVACAMKWNGNYIWACKNYDGDVQSDTVAQGFGSLGLMTSVLMTPDGKTIESEAAHGTVTRHYRLHQQGKETSTNPIASIFAWARGLYHRGKIDGNEDLKKFVKNLEKVCVETVESGSMTKDLAILIGPSTKYLTTNQFLDVLDGNLKKKLN

SEQ ID NO: 86901 - protein, 402 aa, Unknown
  Bacterial polypetide isolated from the Sargasso Sea
MAKIKVKNPVVEMDGDEMTRIIWEYIKEQLILPYLDIDIKYFDLGVIKRDETNDQITIDAAEAVKKYGVGIKCATITPDENRVEEFKLKQMWRSPNGTIRNILGGTIFRQPIICKNVPRIITNWNHPIVVARHAFGDQYRATDTLINKPGTLKMVFEPKDGSEGFTKDVYEFEKSGVALSMYNLDNSIKDFARACFNYGLNLGWPVYLSTKNTILKIYDGRFKDLFQDVFDTEFKNKFKEKDIVYEHRLIDDMVASALKWEGNFIWACKNYDGDVQSDSVAQGFGSLGLMTSVLMTPDGKTVEAEAAHGTVTRHYRNHQKGIETSTNPIASIFAWTRGLSFRGEFDGNNELINFAKKLEETCIKTVESGEMTKDLAILINKDQKWLNTQDFLSAIKNNFQIN

SEQ ID NO: 86902 - protein, 315 aa, Unknown
  Bacterial polypetide isolated from the Sargasso Sea
MSKIKVKNPIVELDGDEMTRVIWNFIKNKLVLTYLDLKIEYYDLGMESRDKTEDRITIECANAIKKNGVGIKCATITPDEARVREFNLKKMWRSPNGTIRNIIGGTVFREPIICKNIPKLVPSWTEPLIIGRHAFGDQYRATDFMVPGKGKLEIKWTAEDGSDERKYEVFNFPGPGIALSMYNLDKSIEDFARSCFNYGLIKKWPVYLSTKNTILKRYDGRFKDIFQEVFEKEFKNKFDQSKITYEHRLIDDMVACAMKWHGKYIWACKNYDGDVQSDTVAQGYGSLSLMTSVLLAPDGKNMEAEAAHGTVTRHF

SEQ ID NO: 86903 - protein, 404 aa, Unknown
  Bacterial polypetide isolated from the Sargasso Sea
MSKIKVKNPIVELDGDEMTRVIWDFIKNKLILTYLDLKIEYYDLGMVSRDKTEDKITVECANAIKKNGVGIKCATITPDEARVREFNLKKMWRSPNGTIRNIIGGTVFREPIICKNIPKLVPSWTDPLIIGRHAFGDQYRATDFTVPGKGKLEIKWTAEDGSDERKYEVFNFPGPGIALSMYNLDKSIEDFARSCFNYGLIKKWPVYLSTKNTILKRYDGRFKDIFQDVFEKEFKNKFEQNKITYEHRLIDDMVACAMKWHGKYIWACKNYDGDVQSDTVAQGYGSLGLMTSVLLAPDGKTMEAEAAHGTVTRHFRMHQQGKETSTNPIASIFAWTRGLAHRGKLDGNEELIKFAETLENVCVDCVEEGSMTKDLAILIGPSTKYLTTNQFLDTLDGKLRQKLN

SEQ ID NO: 86904 - protein, 184 aa, Unknown
  Bacterial polypetide isolated from the Sargasso Sea
RFKDIFQEVFDKEYKKDFEKQKLTYEHRLIDDMVACAMKWSGKYIWACKNYDGDVQSDTMAQGYGSLGLMTSTLLTPDGKIMEAEAAHGTVTRHYRMHQQGKETSTNPIASIFAWTRGLAHRGKLDGNQELIKFANTIEEVCIGCVESGSMTKDLAILVGPSSKYLTTNQFLDVIDGNLKKKLN

SEQ ID NO: 86905 - protein, 355 aa, Unknown
  Bacterial polypetide isolated from the Sargasso Sea
KIEWMEVYCGEKATQVYDKDTWLPDETIEALKEYVVSIKGPLTTPVGGGIRSLNVSLRQLLDLYVCLRPIRYFDGVPSPVKRPQDVDMVIFRENSEDIYCGVEFEGNSKEAKKLVKTLKNDFEVSKIRFEENVGIGVKPISQAGTTRLVKKAIDYAIANNRTSVTLVHKGNIMKFTEGAFRDWGYEVAKNDYGGVEIDEGPWQEITNPKNGKKIIIKDVICDAFLQQILLRPTEYDVIATMNLNGDYISDALAAMVGGIGIAPGANISDDYAVFEATHGTAPKYAGKNQVNPGSIILSAEMMLRHMGWVEAADILMESMDRTISAKKVTYDFHRMMDNAEKVTSSGFADEMIKRM

SEQ ID NO: 86906 - protein, 327 aa, Unknown
  Bacterial polypetide isolated from the Sargasso Sea
PDEARVEEFKLKKMWRSPNGTIRNILGGTVFREPIICKNVPKLVPGWTNPIIIGRHAFGDQYKATDFLIPGKGKLEMKWTSDDGKQKKEFEVFNFPSSGVALSMYNLDDSIRDFARACMNYGLQRNYPVYMSTKNTILKGYDGRFKDLFQEVFDKQFKEKFQKAKLTYEHRLIDDMVACAMKWNGGYVWACKNYDGDVQSDTVAQGFGSLGLMTSVLMTPDGKTVESEAAHGTVTRHYRMHQQGKETSTNPIASIFAWTRGLAHRGKLDNNDELIKFSKSLEEVCINTVESGTMTKDLAILIDKSTKYLTTNQFLEAIDSNLKKKLN

SEQ ID NO: 86907 - protein, 99 aa, Unknown
  Bacterial polypetide isolated from the Sargasso Sea
MAKLKVKNPIVELDGDEMTRIIWSFIKDKLIKPYLEIDLKYYDLGMESRDKTDDQITVDAANAIKQHGVGVKCATITPDEARVEEFKLKKMWRSHKWYY

SEQ ID NO: 86908 - protein, 320 aa, Unknown
  Bacterial polypetide isolated from the Sargasso Sea
MDLYACVRPIRYFPGTTTPMRSSSATNMVIFRENTEDIYAGIEWQAETPDVKKVLSFLIDQMNVDGIRFPNTSGIGIKPVSKEGSERLIRKAINYAIDNDRESVSLVHKGNIMKYTEGAFMNWGYELVKNEFDGELIDGGPWCSFINPKSGKTILVKDIIADNFLQQILLKPEDYDVIATLNLNGDYISDALAAQVGGIGIAPGANMADAVAVFEATHGSAPKYAGKDRVNPGSIILSAEMMLRYLGWTEAADLIIKGVAGAIANKTVTYDLARARAGMKAFVKTHQSSKEIIQDLQELMPGATLVSCSGFGKAIINCME

SEQ ID NO: 86909 - protein, 246 aa, Unknown
  Bacterial polypetide isolated from the Sargasso Sea
EVEKVKNFLINEMNVTNIRFPNTVSLGVKPVSVEGTERIVRAALEYAITHNRKSVTLVHKGNIMKFTEGKFKEWGYALAKKEFNSSDYEGGPWQVIDNNGNEIIIKDVIADAFLQQILLRPSEYDVICTLNLNGDYISDALAAIVGGIGIAPGANINYTTGHAIFEATHGTAPKYAGKDMVNPSSVILSGVMMLEYMGWQEAADLIINGIEKSINNKTVTYDFHRLMKDAEKVSCSGFGKAIIDNM

SEQ ID NO: 86910 - protein, 379 aa, Unknown
  Bacterial polypetide isolated from the Sargasso Sea
ILPFLEIDIKYYDLSIQKRDETNDQITLDAAKAVKKYNIGIKCATITPDEERVKEFGLKKMWRSPNGTIRNYLGGTIFRAPIICKNVPRLVKAWNKPIVVGRHAHADQYKASDFTVPGAGTLKMTFTPDDGGESLEWVINEFEGSGIGLGMYNTYESIRDFARSCMSYSLSLGYPLYLSTKNTILKTYDGTFRDIFRQIFDEEFADKFKKAGLTYEHRLIDDMVAQVLKWEGGIVWACKNYDGDVQSDTVAQGFGSLGLMTSVLVCPDGNTFESEAAHGTVTRHYRQHQQGKSTSTNPVASIFAWTSGLIHRGKLDRNQALIDFCKKLEKVCVDTVEGGTMTKDLASAIHSSSNPDPSTYVSTQEFMDALTAGLQKAVN

SEQ ID NO: 86911 - protein, 404 aa, Unknown
  Bacterial polypetide isolated from the Sargasso Sea
MTKIKVKNPVVEIDGDEMTRIIWDLIKNKLILPYLDIDLHYYDLGVEYRDQTNDQVTIDAAEAIQKYGVGVKCATITPDEDRVEEFNLKEMWKSPNGTIRNILGGTVFREPIICSNIPRLVPGWTQPIVIGRHAFGDQYRATDFVVPGKGKLSMKWVSEDGSKEIEEDIYDFETSGIAMGMYNHDESIKDFARACFNYGINREWPVYLSTKNTILKKYDGRFKDLFQEVYEREYKEKMDSLNIEYEHRLIDDMVACALKWSGAFIWACKNYDGDVQSDTVAQGFGSLGLMSSVLMTPDGKTVEAEAAHGTVTRHYRLHQKGEETSTNSIASIFAWTRGLAHRAKLDDNEELKSFSESLEKVCIKTVEKGFMTKDLALLVGSNQSWLNTQEFIDKIDTNLQSAMS

SEQ ID NO: 86912 - protein, 137 aa, Unknown
  Bacterial polypetide isolated from the Sargasso Sea
CKNYDGDVQSDTVAQGYGSLGLMTSVLLAPDGKTMEAEAAHGTVTRHFRMHQQGKETSTNPIASIFAWTRGLAHRGKLDGNEELIKFAETLEKVCVDCVEEGSMTKDLAILIGPSTKYLTTNQFLDTLDGKLRQKLN

SEQ ID NO: 86913 - protein, 409 aa, Unknown
  Bacterial polypetide isolated from the Sargasso Sea
MSKIKVKTPLVEIDGDEMTRIIWQFIKDKLILPYLDIDLEYYDLGVENRDKTNDKVTVDSANAIKKYGVGVKCATITPDEDRVKEFKLKEMWRSPNGTIRNILGGTVFREPIVCENVPRLVPGWTDPIVVGRHAFGDQYRATDFKVPGKGKLSIKWTPDDPNQEPIEKEVYEFQSSGVAMAMYNTDESIRDFARSCMNYALMREWPVYLSTKNTILKKYDGRFKDLFQEIYDKEFADQFKSLELDYEHRLIDDMVASALKWNGKFVWACKNYDGDVQSDTVAQGFGSLGLMTSVLMTPDGKTIEAEAAHGTVTRHYRLHQEGKQTSTNPIASIFAWSRGLKYRGKLDDNDELIQFADTLEKVCVKTVERGSMTKDLALLMPHEQDWHSTEDFLEIIERNLNKALNPTYQ

SEQ ID NO: 86914 - protein, 426 aa, Unknown
  Bacterial polypetide isolated from the Sargasso Sea
MSKGGSKIQMDNGKLLVPDNPVIPFIEGDGIGPDIWKASVRVFDAAVEKAYSGERKIDWLEVYAGEKAFNKFNNWLPDETIEQCREYLVSIKGPLTTPIGGGMRSLNVALRQLLDLYVCLRPVRWYKGVPSPVKSPENVDMVIFRENTEDIYAGIEFEEGTKSNQKFLSLFKESFPEEYSKIRFPESSGIGIKTVSIEGSERLLRSAFEYAIENKRKSVTFVHKGNIMKYTEGAFRNWGYELAEREFGDHVYTWDQWERTKAEKGEDAANQEQSEAIESGAILVKDAIADITLQQVLTRPSEFDVIATMNLNGDYLSDALAAQVGGIGIAPGGNLNYITGHAVFEATHGTAPKYTDLDKVNPGSVILSGEMMLRYMGWSEAADLIVQSMDATIQKKTVTYDFARLMGNIDPIKCSEFGDELIKNMN

SEQ ID NO: 86915 - protein, 316 aa, Unknown
  Bacterial polypetide isolated from the Sargasso Sea
KKMWRSPNGTIRNILGGTVFREPIICKNIPKLVPSWTNPICIGRHAFGDQYRATDFKVPGKGKLEIKWTSEDGSEKKEFEVFNFPGSGVALSMYNLDQSIKDFARACMNYGLNRKWPVYLSTKNTILKNYDGRFKDLFQEIYDKEFKEKFKEKSITYEHRLIDDMVACAMKWNGNYIWACKNYDGDVQSDTVAQGFGSLGLMTSVLMTPDGNTIEAEAAHGTVTRHYRLHQQGKETSTNPIASIFAWARGLYHRGKMDNNEELKKFVKILEKVCIETVESGLMTKDLAILIGPSSKYLTTNQFLDVIDGNLKKKLN

SEQ ID NO: 86916 - protein, 403 aa, Unknown
  Bacterial polypetide isolated from the Sargasso Sea
MIEDILADKITINEDHSLNVSDNPIIPFIEGDGTGVDIWPAAKLVLDAAAKKYGRTIEWVEVLAGEKAFNETGDWLPQETVDTFQEYLIGIKGPLTTPIGGGFRSLNVALRQLLDLYVCLRPVRWFEGVPSPVKQPELVDMVIFRENTEDIYAGIEAEAGSPEAATIREMIREVFGRDISEDSGIGIKPVSRTGSQRLQRAAMKYAVERDRKTVHWVHKGNIMKYTEGAFQKWGYELVREEFSDVAVGWDDCGGDPGDKILVQDAIADIALQQVLTRPAEFDVIATMNLNGDYLSDALAAQVGGIGIAPGANINYVTGHGIFEATHGTAPKYAGQDKVNPSSVLLSGVLMFEHLGWREAADDIIKAVEQTIGEKIVTYDFARLMDGATQVKCSEFASAIVDRL

SEQ ID NO: 86917 - protein, 409 aa, Unknown
  Bacterial polypetide isolated from the Sargasso Sea
MSKIKVANPIVEIDGDEMARIIWKFIKEKLILDYLDLDIVYYDLGIESRDKTDDQITIDAANAIKEHNVGIKCATITPDEQRVEEFSLSRMYKSPNGTIRNIVGGTVFREPIICRSIPRYVQGWSRPICIGRHAFGDQYRATDVITHGPGKLEMKFTPKDGEESTTWEVYNFEEDGIAMSMYNIDSSIYGFARSCMNMALTKRWPLYLSTKNTILKAYDGRFKDIFQEVYDNEFKDRFEKENITYEHRLIDDMVAAAIKWKGGFVWACKNYDGDVQSDIVAQGFGSLGLMTSTLVTPDGKTLEAEAAHGTVTRHFRRHQKGEQTSTNPIASIFAWTRGLMHRGKLDNNERLINFCKTLEEVCIETVEDGKMTKDLALLVFRDDLVNSNFLTTQEFLDELKSNLDKKLDI

SEQ ID NO: 86918 - protein, 308 aa, Unknown
  Bacterial polypetide isolated from the Sargasso Sea
GGIRSLNVSLRQILDLYVCLRPIRYFEGVPSPVKRPQDVDMVIFRENSEDIYCGVEFEANSKESDKLLQILKKDFDVTKVRFDENVGIGVKPISKSGTERLVKKAIDYAIDNNRSSVTLVHKGNIMKFTEGAFRDWGYDLAKRDYGGVEIEEGPWQEIINPNNGKKIIIKDVICDAFLQQIVLRPTDYDVIATMNLNGDYISDALAAMVGGIGIAPGANISDSYAVFEATHGTAPKYAGKNQVNPGSLILSAEMMLRHMGWIEAADILVNSMDRTIGAKKVTYDFARMMTDADKVTSSGFADEMIKRM

SEQ ID NO: 86919 - protein, 330 aa, Unknown
  Bacterial polypetide isolated from the Sargasso Sea
GVKCATITPDEKRVREYKLQKKYPSPNGTIRNILKGTIFREPIMIDKIPKIVNHWNQPVIIARHAFGDIYRSREISTKSKGKLTLCFEDENGNREETLIHNFDSGGVGLAYFNVFDSIYDFAYSCFNFALKRKVPLFLSTKNTILQKYDEAFKEIFDDVFKKFKHKFQESGLTYQHRLIDDMVACLMKWSGGFIWACKNYDGDVMSDLVAQGFGSLGLMSSVLQSPDGKIIKTEAAHGTVTSHFRQHQQGKETSTNPIASIFAWSKALKHRAIIDDNSSLKRFSVNLENICINTLNEGYMTKDLALMCGPEQKWVTTNEFFDIIKNRIEN

SEQ ID NO: 86920 - protein, 192 aa, Unknown
  Bacterial polypetide isolated from the Sargasso Sea
TILKKYDGRFKDIFEEIFNKEFKEKFNKAKITYEHRLIDDMVACAMKWNGKYIWACKNYDGDVQSDTMAQGYGSLGLMTSTLLTPDGKIMEAEAAHGTVTRHYRIHQEGKETSTNPIASIFAWTRGLAHRGKLDGNDELIRFARTIEKVCIECVESGSMTKDLAILIGPSSKYLTTNQFLDVIDKNLKKKLN

SEQ ID NO: 86921 - protein, 409 aa, Unknown
  Bacterial polypetide isolated from the Sargasso Sea
MSEGEQISISNGELEVPNNPVIHFIEGDGIGVDITPVMIDVVDSSVELAYSGDRKIHWREVLAGQKAFDSTGEWLPEETKKSMRENLISIKGPLTTPVGGGIRSLNVALRQQLDLFACVRPVRWFDGTPSPVKDPGSVDMVIFRENSEDVYAGIEWEAGSPEVARVIDFLQNEMGVDKIRFPDTSGLGIKPISEQGTSRIVRAAIKYAIENDRGSVTLVHKGNIMKFTEGGFRDWGYDIAKTEFGASEIDGGPWCSFPNPNTGTEIIVKDVIADAMLQQILTRPREYEVLATMNLNGDYISDALAAQVGGIGIAPGANINYDTGVAIFEATHGTAPKYAGQNKVNPGSLILSAEMMLRHMGWTESADLIVKGMEGAISSKKVTYDFERLMEDATLLSCSDFGRAIVSHM

SEQ ID NO: 86922 - protein, 115 aa, Unknown
  Bacterial polypetide isolated from the Sargasso Sea
MTSVLLAPDGKTMEAEAAHGTVTRHFRMHQQGKETSTNPIASIFAWTRGLAHRGKLDGNDELIKFSETLEKVCVDCVEEGSMTKDLAILIGPSTKYLTTNQFLDTLDGKLRQKLN

SEQ ID NO: 86923 - protein, 210 aa, Unknown
  Bacterial polypetide isolated from the Sargasso Sea
CFNYGLIKKWPVYLSTKNTILKRYDGRFKDIFQEVFEKEFKDKFEQTKITYEHRLIDDMVACAMKWHGKYIWACKNYDGDVQSDTVAQGYGSLGLMTSVLLAPDGKTMEAEAAHGTVTRHFRMHQQGKETSTNPIASIFAWTRGLAHRGKLDGNEDLIKFAETLENVCVDCVEEGSMTKDLAILIGPSTKYLTTNQFLDTLDGKLRQKLN

SEQ ID NO: 86924 - protein, 320 aa, Unknown
  Bacterial polypetide isolated from the Sargasso Sea
MPYKKIKVPKKGSKITFKNGKINIPDNPIIPYIEGDGIGVDITPPMINVVNEAVKVAYKDKKKIEWMEVYCGEKATQVYSKDTWLPDETIDALKEFVVSIKGPLTTPVGGGIRSLNVSLRQILDLYVCLRPIRYFDGVPSPVKRPQDVDMVIFRENSEDIYCGVEFEGNSEEAKSLVKTLKTRFDVSKIRFDENVGIGVKPISKSGTSRLVKKAIDYAIDNNRSSVTIVHKGNIMKYTEGAFRDWGYELAKNEYGGIEIDDGPWQEIVNPHNGKKIVIKDVICDAFLQQILLRPTEYDVIATMNLNGDYISDALAAMVGG

SEQ ID NO: 86925 - protein, 404 aa, Unknown
  Bacterial polypetide isolated from the Sargasso Sea
MSKIKVKNPIVELDGDEMTRVIWEFIKNKLILPYLDLGIEYYDLGMKSRDDTSDQITIDCANAIKKNGVGIKCATITPDEARVKEFNLKKMWRSPNGTIRNIIGGTVFREPIICKNVPRLVPSWTDPVIIGRHAFGDQYRATDFKVPGKGKLEIKWTSEDGKDTKNYEVFNFPGSGVALSMYNLDKSIEDFARSCFNYGLIKKWPVYLSTKNTILKTYDGRFKDIFQGVFEKEFKSSFEKNNLTYEHRLIDDMVACAMKWSGKYIWACKNYDGDVQSDTVAQGYGSLGLMTSVLLAPDGRTMEAEAAHGTVTRHFRMHQQGKETSTNPIASIFAWTRGLAHRGKLDANDELIKFANTLEKICIDCVETGSMTKDLAILIDTNQKYLTTNQFLDAIDGNLKKKLN

SEQ ID NO: 86926 - protein, 404 aa, Unknown
  Bacterial polypetide isolated from the Sargasso Sea
MSKIKVKNPIVELDGDEMTRVIWDFIKNKLILTYIDLKIEYYDLGMESRDKTNDKITIECANAIKKNGVGIKCATITPDEARVKEFNLKKMWRSPNGTIRNIIGGTVFREPIICKNIPKLVPSWTDPLIIGRHAFGDQYRATDFTVPGKGKLEIKWTAEDGNDERKYEVFNFPGPGIALSMYNLDKSIEDFARSCFNYGLIKKWPVYLSTKNTILKRYDGRFKDIFQEVFEKEFKEKFEQNKITYEHRLIDDMVACAMKWHGKYIWACKNYDGDVQSDTVAQGYGSLGLMTSVLLAPDGKTMEAEAAHGTVTRHFRMHQQGKETSTNPIASIFAWTRGLAHRGKLDGNEELIKFAETLEKVCVDCVEEGSMTKDLAILIGPSTKYLTTNQFLDTLDGKLKQKLN

SEQ ID NO: 86927 - protein, 333 aa, Unknown
  Bacterial polypetide isolated from the Sargasso Sea
KCATITPDEARMEEFKLKKMWRSPNGTIRNIIGGTVFREPIICSNIPKLVPSWSDPVVIGRHAFGDQYRATDFKVPGKGKMEVKWTSEDGKDEIKYEVFNFTGPGVALSMYNLDKSIEDFARSCFSYGLIKKWPVYLSTKNTILKKYDGRFKDIFESVFNKEFKKKFEEAKITYEHRLIDDMVACAMKWSGKYIWACKNYDGDVQSDTMAQGYGSLGLMTSTLLTPDGKIMEAEAAHGTVTRHYRMHQQGKETSTNPIASIFAWTRGLAHRGKLDGNDELIKFANTIEKVCIDSVENGSMTKDLAILVGPLSKYLTTSQFLDVIDNNLKKKLN

SEQ ID NO: 86928 - protein, 221 aa, Unknown
  Bacterial polypetide isolated from the Sargasso Sea
MDKSIEDFARSCFNYGLIKKWPVYLSTKNTILKKYDGRFKDIFQKVFDEDFKTEFDKNNITYEHRLIDDMVACAMKWSGKYIWACKNYDGDVQSDTVAQGYGSLGLMTSVLLAPDGRTMEAEAAHGTVTRHFRLHQQGKETSTNPIASIFAWTRGLAHRGKLDSNDELIKFSNTLEKVCIDCVENGSMTKDLAILLGPSTKYLTTNQFLDEIDHNLLKSLN

SEQ ID NO: 86929 - protein, 202 aa, Unknown
  Bacterial polypetide isolated from the Sargasso Sea
MTKIKVKNPVVELDGDEMTRIIWDLIKKKLILPYLDIDLHYYDLGVEYRDQTNDQVTIDAAEAIQKHGVGVKCATITPDEDRVEEFNLKEMWKSPNGTIRNILGGTVFREPIICSNIPRLVPGWTQPIVIGRHAFGDQYRATDFVVPGKGKLSMKWVSEDGSQEIEEDIYDFEDSGIAMGMYNHDKSIKDFARACFNYGINR

SEQ ID NO: 86930 - protein, 402 aa, Unknown
  Bacterial polypetide isolated from the Sargasso Sea
MAKIKVKNPVVEMDGDEMTRIIWEYIKEQLILPYLDIDIKYFDLGVIKRDETNDQITIDAAEAVKKYGVGIKCATITPDENRVEEFKLKQMWRSPNGTIRNILGGTIFRQPIICKNVPRIITNWNHPIVVARHAFGDQYRATDTLINKPGTLKMVFEPKDGSEGFTKDVYEFEKSGVALSMYNLDNSIKDFARACFNYGLNLGWPVYLSTKNTILKVYDGRFKDLFQDVFDTEFKNKFKEKDIVYEHRLIDDMVASALKWEGNFIWACKNYDGDVQSDSVAQGFGSLGLMTSVLMTPDGKTVEAEAAHGTVTRHYRNHQKGIETSTNPIASIFAWTRGLSFRGEFDGNNELINFAKKLEETCIKTVESGEMTKDLAILINKDQKWLNTQDFLSAIKNNFQIN

SEQ ID NO: 86931 - protein, 103 aa, Unknown
  Bacterial polypetide isolated from the Sargasso Sea
MEAEAAHGTVTRHFRMHQQGKETSTNPIASIFAWTRGLAHRGKLDGNEELIKFAETLEKVCVDCVEEGSMTKDLAILIGPSTKYLTTNQFLDTLDGKLRQKLN

SEQ ID NO: 86932 - protein, 295 aa, Unknown
  Bacterial polypetide isolated from the Sargasso Sea
EPIICKNIPKLVPSWTNPICIGRHAFGDQYRATDFKVPGKGKLEIKWTSEDGNEKKEFEVFNFPGSGVALSMYNLDQSIKDFARACMNYGINRKWPVYLSTKNTILKNYDGRFKDLFQEVFDKEFKEKFKEREITYEHRLIDDMVACAMKWNGNYIWACKNYDGDVQSDTVAQGFGSLGLMTSVLMTPDGNTIEAEAAHGTVTRHYRLHQQGKETSTNPIASIFAWARGLYHRGKMDNNEELKKFVKILEKVCIETVESGLMTKDLAILVGPSSKYLTTNQFLDVIDGNLKNKLN

SEQ ID NO: 86933 - protein, 230 aa, Unknown
  Bacterial polypetide isolated from the Sargasso Sea
MKKSGVALSMYNLDNSIKDFARACFNYGLNLGWPVYLSTKNTILKVYDGRFKDLFQDVFDFEFKDKFKEKDIVYEHRLIDDMVASALKWEGNFIWACKNYDGDVQSDTVAQGFGSLGLMTSVLMTPNGKTVEAEAAHGTVTRHYRNHQKGIETSTNPIASIFAWTRGLSFRGKFDGNIELINFAKNLEDTCIKTVENGEMTKDLAILINKDQKWLNTQDFLSAIKNNFSN

SEQ ID NO: 86934 - protein, 195 aa, Unknown
  Bacterial polypetide isolated from the Sargasso Sea
MTSPTSIRMENGSLNVPNHPIIPFIEGDGIGPDIWEASVNVFDSAVKHAYGNTKKIDWLEVLAGEKAYESKGEWLPQSTLDTISEHLVAIKGPLTTPVGGGIRSLNVALRQKLDLYACVRPVRWFEGVPSPVKEPGLVDMVIFRENTEDIYAGIEWMHGGDDVEKVKSFLVDQMGVTNIRFPDTSSLGIKPSIKR

SEQ ID NO: 86935 - protein, 253 aa, Unknown
  Bacterial polypetide isolated from the Sargasso Sea
MSKIKVKNPIVELDGDEMTRVIWDFIKNKLILTYLDLKIEYYDLGMVSRDKTEDKITVECANAIKKNGVGIKCATITPDEARVREFNLKKMWRSPNGTIRNIIGGTVFREPIICKNIPKLVPSWTDPLIIGRHAFGDQYRATDFTVPGKGKLEIKWTAEDGSDERKYEVFDFPGPGIALSMYNLDKSIEDFARSCFNYGLIKKWPVYLSTKNTILKRYDGRFKDIFQDVFEKEFKNKFEQNKITYEHRLIDDM

SEQ ID NO: 86936 - protein, 155 aa, Unknown
  Bacterial polypetide isolated from the Sargasso Sea
PWQEVINPKNGKKIVIKDVICDAFLQQILLRPKDYDVIATMNLNGDYISDALAAMVGGIGIAPGANLSDKYAVFEATHGTAPKYAGKNQVNPGSLILSAEMMLRHMGWNEAADLIITSMDRTIAAKHVTYDFARMMDDAIKVSSSGFADEMIKRM

SEQ ID NO: 86937 - protein, 144 aa, Unknown
  Bacterial polypetide isolated from the Sargasso Sea
SGKYIWACKNYDGDVQSDTMAQGYGSLGLMTSTLLTPDGKIMEAEAAHGTVTRHYRMHQQGKETSTNPIASIFAWTRGLAHRGKLDGNNELIKFANTIEQVCIGCVESGSMTKDLAILIGPSSKYLTTNQFLDEIDKNLKKKLN

SEQ ID NO: 86938 - protein, 203 aa, Unknown
  Bacterial polypetide isolated from the Sargasso Sea
RRWPVYLSTKNTILKKYDGRFKDLFEEVYEKEFKEKFKERKITYEHRLIDDMVACAMKWNGNYIWACKNYDGDVQSDTIAQGFGSLGLMTSVLLSPDGKTIEAEAAHGTVTRHYRLHQQGKETSTNPIASIFAWARGLYHRGKMDQNEELKKFVKTLEKVCIETVEKGLMTKDLAILIGPNSKYLTTNQFLEEIDGNLKKKLN

SEQ ID NO: 86939 - protein, 240 aa, Unknown
  Bacterial polypetide isolated from the Sargasso Sea
KEFKVFDFPGSGTALTMYNLDESIKNFARACMNYGLGRKWPVYLSTKNTILKAYDGRFKDLFQEVFEKEFSDKFKKANITYEHRLIDDMVACAMKWNGGYVWACKNYDGDVQSDTVAQGFGSLGLMTSVLMTPDGKIVESEAAHGTVTRHYRMHQQGKETSTNPIASIFAWTRGLAHRGKLDGNDELIKFSINVEAVCVKTVESGSMTKDLAILTDKSSNYLTTNQFLEAIDGNLKKKLN

SEQ ID NO: 86940 - protein, 170 aa, Unknown
  Bacterial polypetide isolated from the Sargasso Sea
KKKFEELKITYEHRLIDDMVACAMKWSGKYIWACKNYDGDVQSDTMAQGYGSLGLMTSTLLTPDGKIMEAEAAHGTVTRHYRMHQQGKETSTNPIASIFAWTRGLAHRGKLDNNNELIEFANTIEQVCIECVEGGFMTKDLAILVGPSSKYLTTNQFLDVIDQKLKKKLN

SEQ ID NO: 86941 - protein, 198 aa, Unknown
  Bacterial polypetide isolated from the Sargasso Sea
YLSTKNTILKNYDGRFKDLFQEVYDKEFKVKFKEREITYEHRLIDDMVACAMKWNGNYIWACKNYDGDVQSDTVAQGFGSLGLMTSVLMTPDGNTIEAEAAHGTVTRHYRLHQQGKETSTNPIASIFAWARGLYHRGKIDNNEELKKFVKTLEKVCIETVESGLMTKDLAILIGPSSKYLTTNQFLDVIDGNLKKSLN

SEQ ID NO: 86942 - protein, 411 aa, Unknown
  Bacterial polypetide isolated from the Sargasso Sea
MGENLKRTDLESAIQRTRESFDTDNPTVPYIEGDGIGVDIWPAAQGVFDAVVEKAYKGQRKINWLEVLAGQKAFDNVNEWLPEETTNKFEEYGVGIKGPLTTPVGEGIRSINVSIRQIMDLYVCLRPIKYFNGIQTPTKNPQDVDITLFRENTEDVYAGKELEEGSEEVQKLNKFLKSEFGWEIREDSGIGIKPISKTATERLVRASLNYAVENNKKNLALVHKGNIMKFTEGAFRKWGYELVQEEFSDVAISWEDCNGDPGDKILIQDVIADAFLQQILVKPENFDVIATTNLNGDYASDALAAQIGGIGISPGGNINYENGKAVFEATHGTAPKYAGKDQANPGSLILSGEMMFRYMGWDEAADLTIKTMEKSILDGNVTYDLARGREEAKTLKSSEFANSLIDNLDKF

SEQ ID NO: 86943 - protein, 127 aa, Unknown
  Bacterial polypetide isolated from the Sargasso Sea
MAKIKVKNPIVELDGDEMTRIIWSFIKDKLIRPYLDIDLKYYDLGIESRDKTNDQITVDAAKAIQKYGAGVKCATITPDEARVKEFNLKKMWRSPNGTIRNIVGGTIFREPIICKNVPRLVPHGQKV

SEQ ID NO: 86944 - protein, 404 aa, Unknown
  Bacterial polypetide isolated from the Sargasso Sea
MAKIKVKNPVVELDGDEMTRIIWSFIKKKLIEPYLDIDLKYYDLGMENRDKTNDQVTIDCAKAIQKFGAGVKCATITPDEARVKEFNLKKMWRSPNGTIRNIVGGTIFREPIICKNVPRLVPHWTESVIVGRHAFGDQYRATDFKVPGKGKMTIKWESEDGKKKIEHEVFKFNDSGIALSMYNLDSSIRDFARACLNYGLVRKWPVYFSSKNTILKVYDGRFKDIFEDIYQKEFKKKFDEAGITYEHRLIDDMVACAMKWSGKYIWACKNYDGDVQSDTVAQGYGSLGLMTSVLRTPDGKIAEAEAAHGTVTRHYRQHQQGKETSTNPIASIFAWTRGLAHRGQLDGNDELIKFSDTLEKVCIETVESGSMTKDLAILISKSQKFLTTNQFLEAIDSNLKKKLN

SEQ ID NO: 86945 - protein, 116 aa, Unknown
  Bacterial polypetide isolated from the Sargasso Sea
MTSVLMTPDGKTVEAEAAHGTVTRHFRNHQQGLETSTNPIASIFAWSRGLYFRGKFDDNQNLMNFSKKLEETCIETVETGKMTKDLAILISEKQKWLNTQDFLNTLKDNLEKKLGS

SEQ ID NO: 86946 - protein, 376 aa, Unknown
  Bacterial polypetide isolated from the Sargasso Sea
KLILPYLDLGIEYYDLGMKSRDDTDDKITIDCANAIKKNGVGIKCATITPDEARVEEFKLKKMWRSPNGTIRNIIGGTVFREPIICKNIPKLVPSWTDPLIIGRHAFGDQYKATDFLVPGKGKLEVKWTSEDGSDEKKYEVFDFPGPGIALSMYNLDKSIEDFARSCFNYGLIKKWPVYLSTKNTILKKYDGRFKDIFQNVFEKDFKSEFEENNITYEHRLIDDMVACAMKWHGKYIWACKNYDGDVQSDTVAQGYGSLGLMTSVLLAPDGRTMEAEAAHGTVTRHFRMHQQGKETSTNPIASIFAWTRGLAHRGKLDSNNELIKFAKTLEEVCVNSVESGSMTKDLAILIGPSTKYLTTNQFLDVIDGSLKQKLN

SEQ ID NO: 86947 - protein, 268 aa, Unknown
  Bacterial polypetide isolated from the Sargasso Sea
MVIFRENSEDIYAGIEWPAGSEDAKKVIKFLREEMGVKKIRFPETSGIGVKPVSREGTERLVRKAIQYAIDNERRSVTLVHKGNIMKFTEGAFRDYGYALAQKEFAAELIDGGPWMKIKNPKTGGDIVVKDVIADAFLQQILLRPAEYDVIATLNLNGDYVSDALAAQVGGIGIAPGANMSDSVAMFEATHGTAPKYAGKDYVNPGSEILSAEMMLRHLGWTEAADLIIKSMEKSILQKRVTYDFARLMEGATQVSCSGFGQVLIENM

SEQ ID NO: 86948 - protein, 405 aa, Unknown
  Bacterial polypetide isolated from the Sargasso Sea
MAKKIKAKGPVVELDGDEMTRIIWEFIKEKLILQYVDVDLRYFDLSVQSRDSTDDQITVDAAHAIQECGVGVKCATITPDEARVEEFGLKKMWRSPNGTIRNILGGVIFREPIIIGNIPRLVPGWTKPIVVGRHAFGDQYRATDLKIPGPGKLTLTYAPADGSAPMEMNVYDFPSSGVAMAMYNRDDSIRDFARASFRYGLARNYPVYLSTKNTILKAYDGRFKDLFQEVFDAEFKEEFAAKGITYEHRLIDDMVACAMKWEGGYVWACKNYDGDVQSDIVAQGFGSLGLMTSVLMTPDGKTVEAEAAHGTVTRHYRQHQQGKPTSTNPIASIFAWTRGLAHRGKLDQTPDVTAFAETLEKVCIGTVEQGKMTKDLALLVGKDQPYLQTQEFLDAIDENLQSAMA

SEQ ID NO: 86949 - protein, 262 aa, Unknown
  Bacterial polypetide isolated from the Sargasso Sea
MSKIKVKKPIVELDGDEMTRVIWDFIKNKLILPYIDLGIEYFDLGIKSRDKTNDQITIDCAKAIKKNGVGIKCATITPDEERVKEFNLKKMWRSPNGTIRNIIGGTVFREPIICKNIPKLVPSWTNPICIGRHAFGDQYRATDFQVPGKGKLELKWTSEDGKEKKEFEVFNFPGPGVALSMYNLDQSIKDFARACMNYGLNRKWPVYLSTKNTILKKYDGRFKDLFEEVFQKEFKEKFKERKITYEHRLIDDMVACAMKWNG

SEQ ID NO: 86950 - protein, 419 aa, Unknown
  Bacterial polypetide isolated from the Sargasso Sea
MYIKRRNSINKIHQKMSKIKVKNPIVELDGDEMTRVIWEFIKKKLILPYIDLGIEYYDLSMKNRDDTNDQITIDCAKAIKKNGVGIKCATITADETRLEEFKLKKMWRSPNGTIRNIIGGTVFREPIICKNIPKLVPSWTNPLIIGRHAFGDQYRATDFLVPGKGKLEIKWTSEDGNEEKKYEVFDFPGPGIALSMYNLDKSIEDFARSCFNYGLIKKWPVYLSTKNTILKKYDGRFKDIFQKIFENEFKSKFDNINITYEHRLIDDMVACAMKWSGKYIWACKNYDGDVQSDTVAQGYGSLGLMTSVLLAPDGKTMEAEAAHGTVTRHFRMHQQGKQTSTNPIASIFAWTRGLSHRGKLDNNDKLINFANILENICIECVENGSMTKDLAILIGPSTKYLTTNQFLDEIDLSLKNKLN

SEQ ID NO: 86951 - protein, 409 aa, Unknown
  Bacterial polypetide isolated from the Sargasso Sea
MSEGEQISISNGELEVPNNPLIHFIEGDGIGVDITPVMIDVVDSSVELAYSGDRKIHWREVLAGQKAFDSTGEWLPEETKKSMRENLISIKGPLTTPVGGGIRSLNVALRQQLDLFACVRPVRWFEGTPSPVKDPGSVDMVIFRENSEDVYAGIEWEAGSPEVAKVIDFLQNEMGVDKIRFPDTSGLGIKPISEQGTSRIVRAAIKYAIENDRNSVTLVHKGNIMKFTEGGFRDWGYGIAKTEFGASEIDGGPWCSFTNPNTGTEIIVKDVIADAMLQQILTRPREYEVLATMNLNGDYISDALAAQVGGIGIAPGANINYDTGVAIFEATHGTAPKYAGQNKVNPGSLILSAEMMLRHMGWTESADLIVKGMEGAISSKKVTYDFERLMEDATLLSCSDFGRAIVSHM

SEQ ID NO: 86952 - protein, 404 aa, Unknown
  Bacterial polypetide isolated from the Sargasso Sea
MSKIKVKNPIVELDGDEMTRVIWDFIKNKLVLTYLDLKIEYYDLGMESRDKTEDKITIECANAIKRNGVGIKCATITPDEARVREFNLKKMWRSPNGTIRNIIGGTVFREPIICKNIPKLVPSWTDPLIIGRHAFGDQYRATDFTVPGKGKLEIKWTAEDGSDERKYEVFNFPGPGIALSMYNLDKSIEDFARSCFNYGLIKKWPVYLSTKNTILKRYDGRFKDIFEEVFEKEFKDRFDQNKITYEHRLIDDMVACAMKWHGKYIWACKNYDGDVQSDTVAQGYGSLGLMTSVLLAPDGKTMEAEAAHGTVTRHFRMHQQGKETSTNPIASIFAWTRGLAHRGKLDGNEELIKFAETLEKVCVDCVEEGSMTKDLAILIGPSTKYLTTNQFLDTLDGKLRQKLN

SEQ ID NO: 86953 - protein, 408 aa, Unknown
  Bacterial polypetide isolated from the Sargasso Sea
MSKIKVKNPVVELDGDEMTRIIWDYIKQKLILPYIDLDIKYYDLGIKNRDFTDDQVTVDAANAIKKYNVGIKCATITPDEQRVKEYTLKKMWKSPNGTIRNIIGGTVFREPIIMKNIPRYVQGWVKPICIGRHAFGDQYRATDFVTHGKGKLTMTFTPENGDDEKTWEIYNFQEDGIAMGMYNIESSIYGFARSCMNRAVSKQWPLYLSTKNTILKAYDGRFKDIFHEVFENEFKDKFYELGITYEHRLIDDMVAAAMKWEGGFVWACKNYDGDVQSDTVAQGFGSLGLMTSTLLTPDGKTMEAEAAHGTVTRHYRLHQKGKETSTNPIASIFAWTRGLIHRAELDSNDKLLIFCNLLEKVCIETVESGKMTKDLALLIHGSNLKRQHYLNTQEFLNAIKINLDSKVS

SEQ ID NO: 86954 - protein, 283 aa, Unknown
  Bacterial polypetide isolated from the Sargasso Sea
PSWTQPIVIGRHAFGDQYRATDFLVPGEGSLEVKWISKDGKNKKEFKVFDFSGSGTALAMYNLDDSIKNFARACMNYGLERKWPVYLSTKNTILKAYDGRFKDLFQEIFEKEFSDKFKKANITYEHRLIDDMVACAMKWNGGYIWACKNYDGDVQSDTVAQGFGSLGLMTSVLMTPDGKTVESEAAHGTVTRHYRMHQQGKETSTNPIASIFAWTRGLAHRGKLDSNEQLIKFSKNVEDVCIQTVESGSMTKDLSILIDKSNKYLTTNQFLEAIDGNLKKKLN

SEQ ID NO: 86955 - protein, 397 aa, Unknown
  Bacterial polypetide isolated from the Sargasso Sea
ELYGTYQYLPEDTLEAIRRFGVAIKGPLTTPVGGGIRSLNVALRQIFDLYSCVRPCRYYAGTPSPHKRPQDLDVIVYRENTEDIYMGVEWEADDAVGQELRKHLNEVVIPANGKLGQRQIPEGSGIGIKPVSKHGSQRHIRKAIQHALRLEGNKRHVTLVHKGNIMKFTEGAFRDWGYELATSEFRDVCITERESWILGNLEKDSSLSVEANARMIEPGYDSLTPEKKSDIDAEVQAVIDSIGSSHGGGKWKQMVLVDDRIADSIFQQIQTRPQEYSILATLNLNGDYISDAAAAMVGGLGMAPGANIGENAAIFEATHGTAPKHAGLDRINPGSVILSGVMMLEFLGWQDAADLVTKGLSAAIADKQVTYDLARLMEPQVDPVSCSGFAEAIIQRF

SEQ ID NO: 86956 - protein, 335 aa, Unknown
  Bacterial polypetide isolated from the Sargasso Sea
GIKCATITPDEARVEEFKLKKMWRSPNGTIRNIIGGTVFREPIICSNIPKLVPSWSDPVVIGRHAFGDQYRATDFKVPGKGKMEVKWTSEDGKDEIKYEVFNFTGPGVALSMYNLDKSIEDFARSCFSYGLIKNWPVYLSTKNTILKKYDGRFKDIFEEVYNKEFKKKFEDAKITYEHRLIDDMVACAMKWSGKYIWACKNYDGDVQSDTMAQGYGSLGLMTSTLLTPDGKIMEAEAAHGTVTRHYRMHQQGKETSTNPIASIFAWTRGLAHRGKLDGNDELIKFANTIEKVCIESVENGSMTKDLAILVGPSSKYLTTNQFLDVIDNNLKQKLN

SEQ ID NO: 86957 - protein, 240 aa, Unknown
  Bacterial polypetide isolated from the Sargasso Sea
KILKSKFDVTKIRFEENVGFGIKPISEEGTHRLVKKAIDYAIDNNRSSVTLVHKGNIMKFTEGAFRDWGYELSKNSYGGVEIDDGPWQEIVNPNNGKKIVIKDVICDAFLQQILLRPTEYDVIATMNLNGDYISDALAAMVGGIGIAPGANISDQYAVFEATHGTAPKYAGQNKVNPGSLILSAEMMLRHMGWIEAADLIIKSMDRTISAKKVTYDFARMMTDSDMVSSSGFADEMIKRM

SEQ ID NO: 86958 - protein, 296 aa, Unknown
  Bacterial polypetide isolated from the Sargasso Sea
ILDLYVALRPIRYFNGVPSPVKRPQDTDMVIFRENSEDIYCGVEFEGNSSASKNLVKTLKKDFKVKKIRFDKNVGIGIKPISEEGTSRLVKKAIDYAVDNNRSSVTLVHKGNIMKYTEGAFRDWGYEIAKKDYGGIEIDDGPWQEIINPNNGKKIVIKDVICDAFLQQILTRPTEYDVIATMNLNGDYISDALAAIVGGIGIAPGANISDDYAVFEATHGTAPKYAGKNKVNPGSLILSAEMMLRHMGWTEAADLIISSMDRAIGAKKVTYDFERMMDNADLVTSSGFADEMIKRM

SEQ ID NO: 86959 - protein, 345 aa, Unknown
  Bacterial polypetide isolated from the Sargasso Sea
EKSTQVYDADTWLPDETIEALKEYIVSIKGPLTTPVGGGIRSLNVSLRQILDLYVCLRPIRYFSGVPSPVKNPSHVDMVIFRENSEDIYAGVEFEAGSPESDAMVKVLQEQFGVTQIRFPSEVGLGVKPISKQGTERLVKQAVDYAIKNDRSSVTLVHKGNIMKFTEGAFRDWGYELSMNSYNGELLDGGPWVTIKNPNTGKNIIVKDVICDAFLQQILTRPKEYDVIATMNLNGDYISDALAACVGGIGIAPGANIGDDSALFEATHGTAPKYAGQDKVNPGSLILSAEMMLRHMGWVEAADLIISSMEAAITDKMVTYDFERLMDGANLVSCSGFAKEMIKRM

SEQ ID NO: 86960 - protein, 223 aa, Unknown
  Bacterial polypetide isolated from the Sargasso Sea
YNLDDSIKNFARACMNYGLGRKWPVYLSTKNTILKAYDGRFKDLFQEVFVKEFSGKFKKANITYEHRLIDDMVACAMKWNGGYIWACKNYDGDVQSDTVAQGFGSLGLMTSVLMTPDGNTVESEAAHGTVTRHYRMHQQGKETSTNPIASIFAWTRGLAHRGKLDGNEELIKFSKNVEDVCVKTVESGSMTKDLSILIDKSNKFLTTNQFLEVIDGNLKKKLN

SEQ ID NO: 86961 - protein, 425 aa, Unknown
  Bacterial polypetide isolated from the Sargasso Sea
IQDGSIVTPDKPIVPYIIGDGIGIDVTPVMKRVLNYAIGKAYGVSKEIKWMEIYAGQQALDICGQLLPQETIDAMKKYRVSIKGPLTTPIGNGFKSINVSIRQQLDLFACVRPIRYFPGTNSPMVESNLTDMVVFRENTEDLYSGIEWKPDSDGAKKIIEFIKNELGESPFRFEKNCGIGIKPVSKEGSERLINMAIDFALNEKRDSLTIVHKGNIMKYTEGAFRDWAYELVKNKYHGSVNKNGTYTIKCPKSNHVLTIKDCIADNFLQQIILVPEQHEVIATLNLNGDYISDALAAQVGGIGIAPGANIGDGYGVFEATHGSAESFAGKNRVNPSSIILSGEMMLRYMGWDEAADYVLKGVIGAIQKKQLTFDLARARAGKKFIRPKSKEKNTAEEIKQELMKLVPGATLVSTQGFGDAVIDNM

SEQ ID NO: 86962 - protein, 279 aa, Unknown
  Bacterial polypetide isolated from the Sargasso Sea
GRHAFGDQYRATDFKVPGKGKLSIKWTPDDPNQEPIEKEVYEFQSSGVAMAMYNTDESIRDFARSCMNYALMREWPVYLSTKNTILKKYDGRFKDLFQEIYDKEFADQFKSLELDYEHRLIDDMVASALKWNGKFVWACKNYDGDVQSDTVAQGFGSLGLMTSVLMTPDGKTIEAEAAHGTVTRHYRLHQEGKQTSTNPIASIFAWSRGLKYRGKLDGNDELIKFADTLEKVCVKTVERGSMTKDLALLMPHEQDWHSTEDFLEIIERNLDKALNPTYQ

SEQ ID NO: 86963 - protein, 285 aa, Unknown
  Bacterial polypetide isolated from the Sargasso Sea
EDVVDLLDVPRKILLFVPAGDPVSETVARLSEILDSNDILVDCGNSHYLDSIDRERAARLDQVHFVGLGVSGGASGALNGPSMMYGGNENTWKELSPILMTIAAEGQSGPCVHRFGDAGAGHFVKMVHNGIEYADMQIIAEAHDLMSRGLHLSQADQSEFFRKANKGSLSSFLIELAGRVLDSETTDLDNIIDAAEQKGTGSWSVKAALELGVSTPCIDAAVGARLVSSFWAERQQLASVLSISANESPSLSFELYQLEQAIWFAKICAYIQGFDLIKQGSQVYG

SEQ ID NO: 86964 - protein, 285 aa, Unknown
  Bacterial polypetide isolated from the Sargasso Sea
FVNKLERPRRILMMVKAGPATDAVIDNISGYLEEGDLLIDGGNSQFKDTERRVNTLESKSFGYIGMGVSGGAKGALEGPSMMPGGTKASYDAIESLLTKMAAKVEDGPCVAYVGPGGSGHFVKTVHNGIEYGIEQILAEAYDLMKRVKGMNGQQMSEVFGIWNNTDELASYLVEITEICLNTKDEITGDDVVEKILDKAGQKGTGLWTVVSALELGVSVPTIYASLNARVMSSLKEQRSEIEKTIPSKEIGDFDLGNISDGMKPLFDAVVLATIASYAQGMDILR

SEQ ID NO: 86965 - protein, 66 aa, Unknown
  Bacterial polypetide isolated from the Sargasso Sea
MSKQQIGVVGMAVMGRNLALNIESRGYTVSIFNRSREKTEEVVAENPRKKLVPYYTVKEFVESLKP

SEQ ID NO: 86966 - protein, 278 aa, Unknown
  Bacterial polypetide isolated from the Sargasso Sea
NGFSSVVFNRTYSKTQEFLEGRGLGKNVEGAKTLQEFVNKLERPRRILMMVKAGAATDAVIDNISEYLEEGDLLIDGGNSQFKDTERRVATLESKSFGYIGMGVSGGAKGALEGPSMMPGGTKASYDAIESLLTKMAAKVEDGPCVAYVGPGGSGHFVKTVHNGIEYGIEQILAEAYDLMKRVKNMNGSQMAEVFGLWNNTDELASYLVEITQICLNTKDELTGEDVVEKILDKAGQKGTGLWTVVSALELGISVPTIYASLNARVMSSLKVQRSEIE

SEQ ID NO: 86967 - protein, 120 aa, Unknown
  Bacterial polypetide isolated from the Sargasso Sea
MKYDFGLVGLGVMGRNFILNVAENGFSAIGLSSRNESIEKLENDGKDFVVKGTSDTKVFIESLTIPRKIMLLVPAGNPVDSVLDNFLPHLSPGDIIIDGGNSHYFDTERRFEKLDKLNIH

SEQ ID NO: 86968 - protein, 170 aa, Unknown
  Bacterial polypetide isolated from the Sargasso Sea
MDDAQKAVLIDALERALYCAKVCCYAQGFQLMAMTAQEQKWQLDFAEIAKIWRAGCIIRATFLQSITQAYQANADLSCLLMADTFATTLSEKQTEWRSAVAAAVMQGIPVPCISSALAYYDSYRSETLPANLLQGQRDFFGAHTFERLDKPAGEKYHLDWSAPNRVLIKL

SEQ ID NO: 86969 - protein, 246 aa, Unknown
  Bacterial polypetide isolated from the Sargasso Sea
GPGGSGHLVKTVHNGIEYGIEQILAEGYDLMKRVKGMTGVQMADVLAQWNATEELSSYLVEITEVCLRTKDPEDGTDLVEKITDQAGQKGTGLWTVVTALQMGASVPTIYASLNARVMSSMRPQRMAAESILKGPAIKDFDLGTSDDAMAPLMDATVLSCIASYAQGMELLRIASQDLDYELHMPSIAQIWKGGCIIRARLLKRIQDAFDADPQLPNLMVDPWFAEQINRRLPGLAKVVAGVQKLA

SEQ ID NO: 86970 - protein, 205 aa, Unknown
  Bacterial polypetide isolated from the Sargasso Sea
MAGRGAGKQIQPAYSLQEFVDKLERPRRILMMVKAGGAVDAVIDQISPYLEAGDLLIDGGNSEYKDTERRVAKLESQSFGFIGMGVSGGAKGALEGPSMMPGGTKASYDAIESLVTKMAAQVEDGPCVTYIGPGGSGHFVKTVHNGIEYGIEQILAEAYDLMKRVKGMNGEQIADVFKAWNATEELNSYLVEITEVCLRTKIPMT

SEQ ID NO: 86971 - protein, 307 aa, Unknown
  Bacterial polypetide isolated from the Sargasso Sea
KPTFDMAKKVINYLEPNDILIDGGNAYYLDSNRLGALCAEKEIDFIGMGVSGGEEGARNGPALMIGSEKSINSELKDSLSSIAASYENSPSIGFYKGYGTGHFIKMLHNGIEYAEMQIITEAYHILKRANYTNIEISEFFKEFSTQNRSSYLIEITSEILLKKNDSGYLLDQIQSNANHKGTGKLTVETSLNYGFPLPSVFEAFNARVESNYENLWSKNVGEQLIDISSESLNNAIYFARLATMIQGLLFIQHVSNKEQLDIDLKEILQNWAAGCIIRSDLLNELGNAKLLNPITTTNSIQDLLQNN

SEQ ID NO: 86972 - protein, 236 aa, Unknown
  Bacterial polypetide isolated from the Sargasso Sea
MVPSGEATENTLNELSSIMDAGDIIIDGGNSYYKDSIKKYHSLAKKNISLLDSGTSGGVWGEKDGYCLMIGGDKGSYDYCEPIFLALSSNGKGYGFMGPSGSGHFVKMIHNGIEYGMMQSMAEGIEILNQKKEFDLNLVKITSLWQHGSVVRSWLLDLLKEALDENPKLEGIAPYVEDSGEGRWTIQEAIDLDVPAHSITSSLYSRFYSRNNDSFGFKVLSSLRNQFGGHKIKKSN

SEQ ID NO: 86973 - protein, 250 aa, Unknown
  Bacterial polypetide isolated from the Sargasso Sea
HQTFTQWNKGKLNSYMIEITADIFKAKDVETGEYLVDLILDKAKQKGTGKWTSQSAMDFGVAVPTIDSAVSMRIISSFKETRRSGEKIFSKPKSITGDIEVNDIENALLYGFTMCYAQGLSQLKITSKEKKYNLNYEEVCKIWRGGCIIRAKMLENFMTAFQRKPDLDNLVFDSGISQTIKETDYYARKVSVFAINNKIPSLALNSSISYLDSLSTEKLPMNLIQAQRDCFGEHTFERIDMDGTFHNENW

SEQ ID NO: 86974 - protein, 472 aa, Unknown
  Bacterial polypetide isolated from the Sargasso Sea
MSKAHFGLIGLGVMGENLVLNAERNGFSSVVFNRTYSKTEEFLQGRGLGKNIEGAETLQEFVNKLERPRRILMMVKAGPATDAVIDNISGYLEEGDLLIDGGNSQFKDTERRVNTLESKSFGYIGMGVSGGAKGALEGPSMMPGGTKASYDAIESLLTKMAAKVDDGPCVAYVGPGGSGHFVKTVHNGIEYGIEQILAEAYDLMKRVKGMNGPQMSEVFGIWNNTDELASYLVEITEICLNTKDEITGDDVVEKILDKAGQKGTGLWTVVSALELGVSVPTIYASLNARVMSSLKEQRSEIEKTIPSKEIEDFDLGNISDGMKPLFDAVVLATIASYAQGMDILREASEVYDYGLNMPSIAQIWKGGCIIRSKLLSKIQDAYNKDPNLKNLIFDDWFNNEIATRLDNLAKIVSLSTKAGIPVPCLSSTLDYLNSYRTNRLPQNLVQAMRDCFGSHTYERIDREGSFHTEWMK

SEQ ID NO: 86975 - protein, 472 aa, Unknown
  Bacterial polypetide isolated from the Sargasso Sea
MSKAHFGLIGLGVMGENLVLNAERNGFSSVVFNRTYSKTQEFLEGRGLGKNVEGAKTLQEFVNKLERPRRILMMVKAGAATDAVIDNISEYLEEGDLLIDGGNSQFKDTERRVATLESKSFGYIGMGVSGGAKGALEGPSMMPGGTKASYDAIESLLTKMAAKVEDGPCVAYVGPGGSGHFVKTVHNGIEYGIEQILAEAYDLMKRVKNMNGSQMADVFGLWNNTDELASYLVEITQICLNTKDELTGEDVVENILDKAGQKGTGLWTVVSALELGISVPTIYASLNARVMSSLKVQRSEIEKTIPMAAIEDFDLGEISNGMKPLFDAVVLATIASYAQGMDILSEASSVYNYELNMPSIAQIWKGGCIIRSKLLKKIQDAYQKDPNLKNLIFDDWFNNEISTRIDNLASVVSSSTKAGIPVPCLSSTLDYLNSYRTNRLPQNLVQAMRDCFGSHTYERVDKEGSFHTEWMK

SEQ ID NO: 86976 - protein, 472 aa, Unknown
  Bacterial polypetide isolated from the Sargasso Sea
MSKAHFGLVGLGVMGENLVLNAERNGFSSVVFNRTYSKTEEFLQGRGLGKNIEGAETLQEFVNKLERPRRILMMVKAGPATDAVIDNISGYLEEGDLLIDGGNSQFKDTERRVNTLESKSFGYIGMGVSGGAKGALEGPSMMPGGTKASYDAIESLLTKMAAKVEDGPCVAYVGPGGSGHFVKTVHNGIEYGIEQILAEAYDLMKRVKGMNGEQMSEVFGIWNNTDELASYLVEITEICLNTKDDITGDDVVEKILDKAGQKGTGLWTVVSALELGVSVPTIYASLNARVMSSLKEQRSEIEKTIPSKEIEDFDLGNVSDGMKPLFDAVVLATIASYAQGMDILREASAVYNYGLNMPSIAQIWKGGCIIRSKLLSKIQDAYNKDPDLKNLIFDDWFNNEIATRLDNLAKVVSLSTKAGIPVPCLSSTLDYLNSYRTNRLPQNLVQAMRDCFGSHTYERIDREGSFHTEWMK

SEQ ID NO: 86977 - protein, 431 aa, Unknown
  Bacterial polypetide isolated from the Sargasso Sea
MSKAHFGLIGLGVMGENLVLNAERNGFSSVVFNRTYSKTEEFLEGRGLGKNIEGAETLQEFVNKLEKPRRILMMVKAGPATDAVIDNISGYLEEGDLLIDGGNSQFKDTERRVNTLESKSFGYIGMGVSGGAKGALEGPSMMPGGTKASYDAIESLLTKMAAKVEDGPCVAYVGPGGSGHFVKTVHNGIEYGIEQILAEAYDLMKRVKGMNGQQMSEVFGIWNNTDELASYLVEITEICLKTKDKITGDDVVEKILDKAGQKGTGLWTVVSALELGVSVPTIYASLNARVMSSLKEQRSEIEKTIPSKEIEDFDLGNISDGMKPLFDAVVLATIASYAQGMDILREASSVYNYGLNMPSIAQIWKGGCIIRSKLLSKIQNAYNKDPNLKNLIFDDWFNNEIATRLDNLAKVVSLSTKAGIPVPCLSSTLDY

SEQ ID NO: 86978 - protein, 288 aa, Unknown
  Bacterial polypetide isolated from the Sargasso Sea
MQKKGGNSHEDKSCDIGFIGLGVMGSNLTMNLVDHGYRVACFDLDQNKVESILAKDASERAENTEPRVEGCSSYTELLSKLKAPHLIIISVPAGDPVDHVCNHLIDAGIHADDIVVDTGNSLWTDSVAREEQYKGKFIFFSTAVSGGEVGARFGPSLMPSGNPYAWTRIEPVLKAIAAKVDPETGKPLESHTPGQPVLEGEPCATYIGPVGAGHYVKMVHNGIEYADMQLICETYHVMREALHMAPAEIAEVFRRWNEGKLNSYLMEISAEVLEQMDPETQQPLVDVI

SEQ ID NO: 86979 - protein, 157 aa, Unknown
  Bacterial polypetide isolated from the Sargasso Sea
MEIGVVGLGKMGSQIAQKLSDSSFKVFGYDQDEELSKNLDSSYEIDNNLSSLMDRFTSKKIIWLMVPSGDPTNSLVRELSKLMNNGDIIIDGGNSYYKDSIKNSDICSQNGISFLDCGTSGGVWGLKNGFCLTIGGSENTYKEVLEIFNTLSTVETK

SEQ ID NO: 86980 - protein, 494 aa, Unknown
  Bacterial polypetide isolated from the Sargasso Sea
NAQTWVNLHLLFTHGNGVVMSPVTEKSPEGLPSFYLQDIPPVAHGGPVIREPRLYFGEGGEGYVIVKSSVPEFDYPKGKDNVYTTYSGRDGIAIGSIARRSLFAWHFGDLNILLTGYITHASRILLHRNIQDRVRTIAPFLRLDHDPYLVTSNGRLFWMQDAYTTSNWFPYAQADFDNGANTIRNAVKVVIDAYNGTVDFYVSDPADPILRTYQRIFPGLFKPLAAMPQDLQQHIRYPEDLFQVQAQLYRAYHMDAPEVFYNREDLWQFPRELVGIDGGNSPGTPMTPYYMIMRLPHESREEFVLMLPMVPSQRDNMIAWLAARCDPPNYGKLVVYSFPKDKLVYGPFQIEARIQQNTEISQQISLWNQMGSRVIRGHLLVVPIENSLLYVSPLYLRAESGQLPELKRVIAAYGDRVVMKETLGEALAALFEESAPLASPPQGTADARAREALAHYDRAIARLKAGDWSGFGAELDALRPLLEALGGGRSDGQQ

SEQ ID NO: 86981 - protein, 282 aa, Unknown
  Bacterial polypetide isolated from the Sargasso Sea
MKKLDDIKKEFSNEFIGYTNLEEFVESLETPKTILLMVPSGKATKEVIERLADLLEEGSMIIDGGNSFYVDSIDNGKYLSEKSIHFIGMGVSGGEDGARNGPALMVGSDLSLETSLLNTLKNIAAKSEVECLGVYQGHGTGHFIKMVHNGIEYAEMQTIAEIYLILKNLNKTNEDMSNFFSSQTEKSKSSYLIEITSEILQKKDGDKFIIDQIKPVAQNKGTGRLTIQTSLALNVSIPSIAASYDARVQSSNQYATKINQELVSEDISTKELSDALYFSRVC

SEQ ID NO: 86982 - protein, 204 aa, Unknown
  Bacterial polypetide isolated from the Sargasso Sea
TITSAVFARSISSLKDERLAASKVLAGPDAPSFSDDEKMSIINKLEQALYCSKICAYAQGFQLMAMAGKEHGWTLEFGEIAKIWRAGCIIRAVFLQSISQAYENNEDLANLLMDPFFAEQITQYQSDWRESIAQATLAGVPCPAMMSALSYYDSYRTAVLPANLLQGQRDYFGAHTYQRVDKPAGKKYHIEWSDPARPQTAIKK

SEQ ID NO: 86983 - protein, 113 aa, Unknown
  Bacterial polypetide isolated from the Sargasso Sea
LADVGLIGLAVMGQNLILNMNDKGFKVCAYNRTVAKVDHFLANEAKGTNVIGAHSVKELCSKLKRPRRIILLVKAGKAVDDFIAQLEPYLEKGDIIIDGGNSHYPDSIRRTHE

SEQ ID NO: 86984 - protein, 132 aa, Unknown
  Bacterial polypetide isolated from the Sargasso Sea
GWQLNFAEIAKIWRAGCIIRAVFLQSITEAYERNDDLQNLLLDPFFSKQISVNQMNWRRAVAEAAMTGIPVSALSSALSYYDSYRTAVLPANLLQGQRDYFGAHTFERTDKAKGKTFHVDWSHNDRPMQKIK

SEQ ID NO: 86985 - protein, 267 aa, Unknown
  Bacterial polypetide isolated from the Sargasso Sea
LTNAELAAAFSDWNAAELDSFLIEISGLILAKEDDQKPGEGYLVDKILDKTGMKGTGKWTVQQAAELSVAIPTVASSLDARFLSGLKDERVAAEKAYVAAGLAPADASAPSLTAEEKQLLVDDVRAALYASKICSYAQGMNLIRAKSDEQGWDLDLGEMARIWKGGCIIRARFLDRIKQAYDRDAALPSLLVDGEFAAELVARNDGWRRVVTRAVDAGIATPSMSGSLAYFDSYRRGRLPANLVQAQRDFFGSHTYERTDMEGWHHT

SEQ ID NO: 86986 - protein, 185 aa, Unknown
  Bacterial polypetide isolated from the Sargasso Sea
MSEKSNIGLIGLAVMGENLVLNMESNGFSVSVFNRTVNRVEAFLKGRGSGKKIRGSKSIEEFCAQLETPRKIMMLVKAGAAVDDLIEQILPYLDEGDIIIDGGNSYYKDTIRRTAYVEKKGFLYLGAGVSGGEEGALKGPSVMPGGSEAAWLIMKPILQKISAKTESGDPCCDWVSRDGSGHFVK

SEQ ID NO: 86987 - protein, 300 aa, Unknown
  Bacterial polypetide isolated from the Sargasso Sea
MSKSHFGLIGLGVMGENLVLNAERNGFSSVVYNRTYAKTEDFLNGRGQGKNIQGATDLQDFVGKLERPRRILMMVKAGPAVDAVVDQISPYLEEGDLLIDGGNSDYHDTERRVKQLESKSFGFIGMGVSGGAKGALEGPSMMPGGTKSSYDAIESLVNKMAAQVEDGPCVTYIGPGGSGHLVKTVHNGIEYGIEQILAEGYDLMKRVKGMTGVQMADVLGQWNATEELSSYLVEITEVCLRTKDPEDGADLVEKIMDQAGQKGTGLWTVVTALQMGASVPTIYASLNGRVMSSLKPERGR

SEQ ID NO: 86988 - protein, 271 aa, Unknown
  Bacterial polypetide isolated from the Sargasso Sea
MPGGDKDSYEIIKPIFESVSAKINGEPCVTYLGNTSSGHYVKMIHNGIEYGIMQLISESYHILKNGLKKENFDIYNIFKKWNKGMLNSYLIEITRDIFNVKDKNSDNYLIDLILDKAKQKGTGKWTSQSAMDFGISIPTIDSSVSMRIISSFKDTRIRAEKIYDKKIVPSSSSIKTEDIENALKFSFIITFAQGLSQLKVVSEEKSYNLNYEKICKIWRGGCIIRAKMLDDFMRAYNKNSSLENLIFDKNISEIIKETDSSIRKVSIFCIE

SEQ ID NO: 86989 - protein, 128 aa, Unknown
  Bacterial polypetide isolated from the Sargasso Sea
FGEIAKIWRAGCIIRAVFLQSISKAYENNEDLANLLMDPYFAEQITEYQADWRESIAQSALAGIPCPAMMSALSYYDSYRSAVLPANLLQGQRDYFGAHTYQRVDKPAGKKYHIEWSDPARPETAIKR

SEQ ID NO: 86990 - protein, 311 aa, Unknown
  Bacterial polypetide isolated from the Sargasso Sea
FASQGHTVALYNRFVKGKEENIALKCTQEYSELKNALAFEELDLFVSALKFPRKILLMIPSGLALEKILEELIPMLSQGDVLIDGGNSHYNDTEKRASLLNEKKIHFLGMGVSGGKIGALNGPSLMIGGNLDGYKVVNRDLESIAAKDIYGTRCCSYLGLGGAGHYIKMVHNGIEYAEMQLLAEIFELSMTSPALNFTSIHKELSVWQKSFSQSYLLEITSEILTYNDDGIPFINKILDKASNKGTVAWAIANGALLGSPNSLMASALHARFTSSLKSKREKLSKSYKIQKGKYETPLKKIKKVYDVSPFN

SEQ ID NO: 86991 - protein, 472 aa, Unknown
  Bacterial polypetide isolated from the Sargasso Sea
MSKSHFGLIGLGVMGENLVLNAERNGFSSVVYNRTYAKTEEFLNGRGQGKNIQGASDLEDFVGKLERPRRILMMVKAGPAVDAVVDQISPHLEEGDLLIDGGNSDYHDTERRVKQLESKSFGFIGMGVSGGAKGALEGPSMMPGGTKASYDAIESLVNKMAAQVEDGPCVTYIGPGGSGHLVKTVHNGIEYGIEQILAEGYDLMKRVKGMNGDQMADVLGQWNATEELSSYLVEITEVCLRTKDPEDGQDLVEKIMDQAGQKGTGLWTVVTALQMGASVPTIYASLNGRVMSSMKEQRVKAENVLKGPAIKDFDLGTPADAMSPLMDATVLSCVASYAQGMELLRIASNDLDYDLHMPSIAQIWKGGCIIRARLLKRIQDAFNKDPQLPNLMLDPWFAEQVNRRLPGLAKVVAGAAECGIPVPCFSSTLDYINSYRTGRLPQNLVQAMRDCFGSHTYKRVDKEGTFHTEWLS

SEQ ID NO: 86992 - protein, 386 aa, Unknown
  Bacterial polypetide isolated from the Sargasso Sea
MLKEIGLIGLGVMGKNIALNLSDNGVAIKAFNDSKEKLEEIKKEFSDTFEGHTDVNNLINSLSKPRTILLMVPSGKATKDVIEKIKDLLDEGDLVIDGGNSFYLDSEENGLALEQKKIKFMGMGVSGGEEGARNGPAIMVGYKNKISEDLKNTLSAISAKTDQDCIGFYEGYGSGHFIKMVHNGIEYAEMQLIAEIYEILRRSKKTNEEIANFFDNLKEENRSSYLIEITSKILRQKKDEVYVLDEIKPFASNKGTGKLTVETSLNLKVPTPSIYAAYDARVQSNNKNDWDEINMESEVTSEEDLSNCLYFGRVASMIQGLELIAKHMVNINFGTVLNNWMGGCIIRSNLLKELNVLSSASKDFLGDSKLKKIFKDNLVSTKKIIF

SEQ ID NO: 86993 - protein, 449 aa, Unknown
  Bacterial polypetide isolated from the Sargasso Sea
MLNEIGLVGLGVMGKNIALNLSDKGITIKSFNDSMKKLDDIKKEFSNEFIGYTNLEEFVESLETPKTILLMVPSGKATKEVIERLADLLEEGSMIIDGGNSFYVDSIDNGKYLSEKSIHFIGMGVSGGQDGARNGPALMVGSDLSLETSLLDTLKNIAAKSEVECLGVYQGPETGHFIKMVHNGIEYAEMQTIAEIYLILKNLNKTNEDMSNFFSSQTEKNKSSYLIEITSEILQKKDGDKFIIDQIKPVAQNKGTGRLTIQTSLELNVSIPSIAASYDARVQSSNQYTTKINQELISENISTKELSDALYFSRVCSMIQGLELISKFSNDEKHNISILEVLDNWSGGCIIRSNLLSELKKEFGESNDVFNLNTIFSTLNKNRASISNVLQITTKYNIPTPVLSASLNWFNNVTSVDNPSNMIQAQRDYFGRHKVQLIDSSNDINIDWD

SEQ ID NO: 86994 - protein, 449 aa, Unknown
  Bacterial polypetide isolated from the Sargasso Sea
MLKEIGLIGLGVMGKNIALNLSDNGVIIKAFNNSENKLNDVKKEFKNDFIPFDNLEQFVENLEDPKTILLMVPSGEATKEVIEKLVSLLGEGGTIIDGGNSFYLDSIENGEYLKKNSINFIGMGVSGGEDGARNGPALMVGSETSIETSLFDTLKNIAAKAEVECLGIYQGPGTGHFIKMVHNGIEYSEMQSIAEMYLILKKLNKTNKEISSFFSSQSENNNSSYLIEITSKILQKKDGDEFVIDQIKPIAQNKGTGRLTIQTSLDLDVSIPSISAAYDARLQSNNQYTTKTSMESIDEDISDKNLSDALYFSRVCSMIQGLELITKFSESENHEISIVEVLENWRGGCIIRSNLLLDLKKEFSENNSFYSLDNIFNNLQQNRAAISKVLQITTKNNIPTPVLSASFNWFNNLTSVDNPSNLIQAQRDFFGRHKVQKVDSSEDINIDWD

SEQ ID NO: 86995 - protein, 345 aa, Unknown
  Bacterial polypetide isolated from the Sargasso Sea
MQLGMIGLGRMGADMVRRLTKGGQQCIAYDVQPAAVDKLKQEGVAGAASLEDLVAQLQKPRAVWLMVPAAVVDQTLDKLVPLLEPGDIVIDGGNSYYHDDIRRGAELAKRQLHYVDVGTSGGVAGRERGYCLMIGGEAEVVKRLEPIFSTLAPGAGAAPATPGRAAGASTADQGFLHCGPQGAGHFVKMVHNGIEYGMMAAYAEGLNILRHADAGKHAREADAETSPLRRPELYQYDLDLAEVAEVWRRGSVIGSWLLDLIAGSLAGDADLQSYAGRVSDSGEGRWTVAAAIDEGVPTPVLSAALFARFSSRGDADFANRVLSAMRHDFGGHVEKAATPVDGHKS

SEQ ID NO: 86996 - protein, 445 aa, Unknown
  Bacterial polypetide isolated from the Sargasso Sea
MGSALAEAFVRADYEVYAVDPAVTGKHFSLKGLIVKPNLLTMIKAMVRPRRIFLMVTAGQPVDSAIDELVPLLDTGDVIIDGGNSNFTDTMRRATRVKELGLMYVGTGISGGEAGARNGAAVMAGGTAEAFDQSRDVLETVAAKHGEGLCCAHVGSDGAGHFVKMVHNGIEYGIMQAIGEAHFIINHGLRLTHAESATVFRSWNKGQLESFLISVTARILDRMDENSGDPLIDFLDDAAEQTGTGQWMVGAAMELGVPVPTIAEAVSARSLSGGNDVRRVIQNGTPRHLKEITFSIDGIRDALIATILCCYAQGFAVLAAGATEYGWPRKEAEIARIWQKGCIIRADILETVRQAFMQRADLPHLFANKSIASIVDHKTKNWRSTVSTAIAAGIPVPTLASAISYAEALKTKRLWTALTQAQRDAFGAHGYRRIDRDGTFHSDWS

SEQ ID NO: 86997 - protein, 457 aa, Unknown
  Bacterial polypetide isolated from the Sargasso Sea
MQVALVGLGVMGKNLALNLIEKGITLVAYDKNPHAGEELISCAKSQGMADKLHIVSDLGDMVRRLEAPRSILLLVPAGELVDTVCNELVNAGVECDDIIVDCGNSNYKDGITRKLKYQNKFEFATMGISGGAEGARHGPAMMASGSEGGWERIEPWFEKVAASYNGSSCFARVGQSASGHFVKMVHNGIEYALMQLIAEMYQLLRSGTNRSPKEVAAIFDEWSQGQLNSYLLSISSHILTLENDKNEPLVDLIDNKVGAKGTGLWTAQNALELGIAVPSLVAAVQARHLTNACDTTAAQEMTYASKSTNIVDIDLEELKDAFTLASLLAYRQGLALIKGASRTHQWKVDLSKTLQTWRAGCIIRADYLDSVAQGVEFIDSLDKEANALRKITGQAVMSGLAFPVLSSTQTYLATLTTPSNGHLVQAQRDYFGEHGIKTHSGETCHLTDLVEIDAKVR

SEQ ID NO: 86998 - protein, 444 aa, Unknown
  Bacterial polypetide isolated from the Sargasso Sea
MLKEIGLIGLGVMGKNIALNLSDNGVSIKAFNDSKEKLEEIKKEFSDTFEGHTDINNLINSLSKPRTILLMVPSGKATKDVIEKIKDLLDEGDLVIDGGNSFYLDSEENGLALEQKKINFMGMGVSGGEEGARNGPAIMVGYKNKISEDLKNTLSAISAKTDQDCIGFYKGHGSGHFIKMVHNGIEYAEMQLIAEIYEILRRSKKTNEEIANFFDNLKEENRSSYLIEITSKILRQKKDEVYVLDEIKPFASNKGTGKLTVETSLNLKVPTPSIYAAYDARVQSNNKNDWEEINIESEITSEIDLSNCLYFGRVASMIQGLELIAKHMVNIDFGIVLNNWMGGCIIRSNLLKELNVVSSASKDFLGDLKLNKIFKDNLVSTKKIISEAVLNDISTPVLSASLNWYLNLSSSSNPSNLIQAQRDFFGRHKVQLVDSEEDVNIDWD

SEQ ID NO: 86999 - protein, 170 aa, Unknown
  Bacterial polypetide isolated from the Sargasso Sea
GPKQPALEDPDVFIEQVRHALYASKIASYAQGFAQLAAAAQEHDWELDYKSIAMLWRGGCIIRAQFLDRIAAAYGENATLENLMLAPYFSAALTESQTAWRTVVATAAAHGIPTPALMTALAYYDGYRSSHLPANLLQAQRDYFGAHTYERTDKEGSFHSEWLELRRPVT

SEQ ID NO: 87000 - protein, 176 aa, Unknown
  Bacterial polypetide isolated from the Sargasso Sea
MSLAAAVPGGSAGAWPHVKAIMQGISAKAGAGDEPCCQWVGNDGAGHYVKMVHNGIEYGDMQLICEAYHLMGSALGMGCDEMAAVFAEWNQGELDSFLIEITASILKFKDGDGQPLVEKISDTAGQKGTGKWTSSVRGPSTQDSASSACMHHLKARGAPTHPGAPPEQPGSLPWPQ

SEQ ID NO: 87001 - protein, 257 aa, Unknown
  Bacterial polypetide isolated from the Sargasso Sea
ILNSYLMEISAEVLATKDSETGLPLVDVILDKAGQKGTGLWTAVSSLELGCPAPTISEAVFARSMSTLKDQRVLASTLLAGPVREHCTNQTAEQMIKQLHDALYCAKICVYAQGFDLMKTAAAEHGWQLNFAEIAKIWRAGCIIRAVFLQSITDAYERNDDLQNLLLDPFFSKQISVNQMNWRRAVAEAAMTGIPVSALSSALSYYDSYRTAVLPANLLQGQRDYFGAHTFERTDKAKGKTFHVDWSHNDRPMQKIK

SEQ ID NO: 87002 - protein, 272 aa, Unknown
  Bacterial polypetide isolated from the Sargasso Sea
NGIEYGDMQLIAEAYSLLKGGLNLSNEELASTFTEWNNGELSSYLIDITKDIFTKKDEEGKYLVDVILDEAANKGTGKWTSQSSLDLGEPLSLITESVFARYISSLKDQRVAASKVLTGPKAQPAGDKVEFIEKVRRALYLGKIVSYAQGFSQLRAASDEYNWDLNYGEIAKIFRAGCIIRAQFLQKITDAYAKNAGIANLLLDPYFKNIADEYQQALRDVVAYAVQNGIPVPTFSAAVAYYDSYRAEVLPANLIQAQRDYFGAHTYKRTDK

SEQ ID NO: 87003 - protein, 233 aa, Unknown
  Bacterial polypetide isolated from the Sargasso Sea
DRILDKAGAKGTGKWMSQLALDLGVPSTLVTEAVYARCLSALKDARVRASKVLSGPDLNTHDDPLTFIEQVRQALYASKIASYAQGYVQLAAAAKEHDWSLNYGDIAMMWRGGCIIRAQFLERIHEAYQNQPDLENLMLAPYFRKALTDTQKSWRHVVATAATIGIPVPAFMTALAYYDGYRHANLPANLLQAQRDYFGAHTYERIDNPGTFHTEWLELRRPVETSSHSKENA

SEQ ID NO: 87004 - protein, 104 aa, Unknown
  Bacterial polypetide isolated from the Sargasso Sea
IIRAQFLQKITDAYAQNKGIANLLLAPYFKNIADEYQQALRDVVAYAVQNGIPVPTFSAAIAYYDSYRSAVLPANLIQAQRDYFGAHTYKRTDKEGVFHTEWLD

SEQ ID NO: 87005 - protein, 259 aa, Unknown
  Bacterial polypetide isolated from the Sargasso Sea
MPPIGANQAPTLPSLVAELEPPRKILLMVKAGSGVDEIINQLTGYLEKGDIIIDGGNSHFSDTERRVSALKRLGLGYIGAGISGGEQGALSGASIMVGGPKECFKAVREFLEAIAAADDKKIYCKHFGSGGVGHFIKMVHNGIEYGLLQAIGEAYLLLNQGLRLNHVDCASVFDDWQQGALNSYLIGITAEILKKEEESGDHLIAFIDDSADQTGTGRWMVNEAMNLGIPVPSIYEAVAARSLSGNQKERREIVKIGWE

SEQ ID NO: 87006 - protein, 494 aa, Unknown
  Bacterial polypetide isolated from the Sargasso Sea
MQNHSNLNDIGVIGLGVMGKNLALNIADNQYSVSAFDLDPVKVNGVLQQEKQERVGQELRITGCANLSEMLASLAHPRILVLSVPAGAPVDGVCHALISAGIEADDIVIDTGNSLWTDTVEREKRYQGKFIFFSSAVSGGEVGARFGPSLMPSGDLGAWQHVAPIWKAIAAKVDPQTGLPIERFEPGNPVTEGEPCTTYIGPAGAGHYVKMVHNGIEYADMQLICEAYQLMHDGLGMSAAQVGEVFERWNKGSLNSYLMGISAEVLKQADPLTGQPLVEMILDKAGQKGTGLWTAVSSLQIGCPAPTIAEAVYARAVSTQKSLRVELSKKLAGPASVAMDDAQKASLIDALESALYCAKVCCYAQGFQLMAMTAQEQKWQLDFAEIAKIWRAGCIIRATFLQSITQAYQADADLSCLLMADTFATTLSEKQTEWRSAVAAAVMQGIPVPCISSALAYYDSYRSETLPANLLQGQRDFFGAHTFERLDKPAGEKN

SEQ ID NO: 87007 - protein, 317 aa, Unknown
  Bacterial polypetide isolated from the Sargasso Sea
SGNFVKMVHNGIEYGDMQLISEAYDVLKTVGGLNNSELAAAFNEWNAAELDSFLIEISALILAKEDDQKPGEGFLVDKILDKTGMKGTGKWTVQQAAELSVAIPTVASSLDARFISGVKDERVAAQATYMSAGLEPADAKVAALTPEEKQQLVDDVRAALYASKICSYAQGMNLIRAKSNEQGWNLDLGEMARIWKGGCIIRARFLDRIKKAYDRDADLPSLLVDGEFAKELVERNDAWRRVVTSAINAGVATPSMSSSLAYFDSYRRGRLPANLVQAQRDFFGSHTYERVDMDGWHHTVWSDMNSADSITTSGYSA

SEQ ID NO: 87008 - protein, 508 aa, Unknown
  Bacterial polypetide isolated from the Sargasso Sea
MQNHSNFNEIGVIGLGVMGKNLALNIADNQYRVSAFDLDPVKVNGVLQQEKQERVGQDLRITGCANLSEMLASLAQPRILVLSVPAGAPVDGVCHALISAGIEADDIVIDTGNSLWTDTVEREKRYQGKFIFFSSAVSGGEVGARFGPSLMPSGDLGAWQHVAPIWKAIAAKVDPKTGLPIERFEPGNPVTEGEPCTTYIGPAGAGHYVKMVHNGIEYADMQLICEAYQLMHDGLGMSAAQVGEVFERWNKGSLNSYLMGISAEVLKQADPLTGKPLVEMILDKAGQKGTGLWTAVSSLQIGCPAPTIAEAVYARAVSTQKSLRVELSKKLAGPLSPAMDENQKATLIDALESALYCAKVCCYAQGFQLMAMTAQEQKWQLDFAEIAKIWRAGCIIRATFLQSITQAYQADADLSCLLMADTFATTLSEKQTAWRSAVAAAVMQGIPVPCISSALAYYDSYRSETLPANLLQGQRDFFGAHTFERLDKPAGEKYHLDWSATNRVLIKL

SEQ ID NO: 87009 - protein, 347 aa, Unknown
  Bacterial polypetide isolated from the Sargasso Sea
IGTGVSGGEEGALKGPSIMPGGQRDAYDLVAPILTEIAAKAPDGEPCVAYMGPDGAGHFVKMVHNGIEYGDMQLIAESYAVLKQVVGLSNEELGEVYTEWNKGELDSYLIEITSKIFDKKDEETGKDLVDVILDRAAQKGTGKWTSQNALDLGAPLPLITEAVFARVLSSLKTQRVAASKVLEGPAAKPLGVERDAFIESVRRALYFSKVISYAQGFAQLRAASEEYKWDLDYGTIAKIFRAGCIIRARFLQKITDAYTKDKAIANLLLDPYFRDIAKNYQSALREVVIAAVNAGVPVPAFASAVAYFDAYRSERLPANLVQAQRDFFGAHTFERIDKPGSFHANWN

SEQ ID NO: 87010 - protein, 508 aa, Unknown
  Bacterial polypetide isolated from the Sargasso Sea
MQNHSNLNDIGVIGLGVMGKNLALNIADNQYRVSAFDLDPVKVNGVLQQEKQERVGQDLRITGCANLSEMLASLAQPRILVLSVPAGAPVDGVCHALISAGIEADDIVIDTGNSLWTDTVEREKRYQGKFIFFSSAVSGGEVGARFGPSLMPSGDLGAWQHVAPIWKAIAAKVDPQTGLPIERFEPGNPVTEGEPCTTYIGPAGAGHYVKMVHNGIEYADMQLICEAYQLMHDGLGMSAAQVGEVFERWNKGSLNSYLMGISAEVLKQADPLTGQPLVEMILDKAGQKGTGLWTAVSSLQIGCPAPTIAEAVYARAVSTQKSLRVELSKKLSGPASVAMDDAQKAVLIDALESALYCAKVCCYAQGFQLMAMTAQEQKWQLDFAEIAKIWRAGCIIRATFLQSITQAYQANADLSCLLMADTFATTLSEKQTEWRSAVAAAVMQGIPVPCISSALAYYDSYRSETLPANLLQGQRDFFGAHTFERLDKPAGEKYHLDWSAPNRVLIKL

SEQ ID NO: 87011 - protein, 509 aa, Unknown
  Bacterial polypetide isolated from the Sargasso Sea
MSETSVLCDIGFVGAGVMGKNLILNLADHGYRVAAFDLDHKKLEAVIAQDKAERGDKPARVISCSSYTELLSRLSSPHLVILSVPAGKPVDDVCLKLIDAGIQADDIIVDTGNSLWTDTVRREKHYEGKFIFFSTAVSGGEVGARFGPSLMPSGDPYAWTRIEPIWRAIAAKVDPATGRPLERHEPGNPVTEGESCATYIGPGGSGHYVKMVHNGIEYADMQLICEVYQVMRDALGMSAEQVSKVFKEWNQGILNSYLMEISAEVLATKDSETGLPLVDVILDKAGQKGTGLWTAVSSLELGCPAPTISEAVFARSMSTLKDQRVLASTLLSGPVREHCTNQTAEQMIKQLHDALYCAKICVYAQGFDLMKTAAAEHGWQLNFAEIAKIWRAGCIIRAVFLQSITEAYERNDDLQNLLLDPFFSKQISVNQMNWRRAVAEAAMTGIPVSALSSALSYYDSYRTAVLPANLLQGQRDYFGAHTFERTDKAKGKTFHVDWGHTDRPMQKIK

SEQ ID NO: 87012 - protein, 178 aa, Unknown
  Bacterial polypetide isolated from the Sargasso Sea
TTETYVAMKLFVDNWRWQGVPFYVRTGKRLAKRLSEVVLTFREAPVHLFDAATGGPTANQLILRIQPDEGAEFRFEVKSPGSGMRSRPIDMEFSYDESFGEPSDEGYVRLLADAMLSDPTLFTRSDEVEAAWRLYTPLLELIEDSPWQLPIHPYESRTWGPAAADALLARDGLLWRRP

SEQ ID NO: 87013 - protein, 191 aa, Unknown
  Bacterial polypetide isolated from the Sargasso Sea
MGKSIGAKACDFVLFGTKGDLARRKLLPSLYQLDKAELLDKETKVIGVAKDAFTRDEFIALVTKALNTFVKDDICPTTLERFLSRCHYIGTNFTEPEGYQAFHDLLEPSKRVMVNYFATPPSIFGAICRCLHEQGLIKPDTRVVLEKPIGTDLASSHVINDQVAEFFNENQVYRIDHYLGKETVQNLIALR

SEQ ID NO: 87014 - protein, 157 aa, Unknown
  Bacterial polypetide isolated from the Sargasso Sea
FYLRTGKRLPKRLGEIVLTFKDVPVHLFESTIINPAPNQLILRIQPNEGATFKFEVKSPGSGMKSRPVEMEFSYDESFGEPSDEGYVRLLADAMLSDPTLFTRSDEVEAAWKLYTPLIELMDNSPWKLPIYNYESMTWGPPESDQLLSKDNIFWRRP

SEQ ID NO: 87015 - protein, 188 aa, Unknown
  Bacterial polypetide isolated from the Sargasso Sea
VLEKPLGHDLQSNQAINDTLRRVLKEEQVFRIDHYLGKPSVQNLFALRFGNALFEPLWRRETIANIQITIAEELGVESRGAFYDQTGALRDMVQNHALQLLCAIGMEPPINSSANAIRDEKLKVLQSLKPWTLETIGQHVIRGQYAAGNHQGQPVPGYAQEKGVAPSSTTETFVALRTEISNWRWAGV

SEQ ID NO: 87016 - protein, 215 aa, Unknown
  Bacterial polypetide isolated from the Sargasso Sea
DDISIGQYGSKTIKKKDKIPSYLQDSGNYESNTESFAALKVNVNNWRWTGVPFFLRTGKRLKRRSSEIVITFKPVKHFIFDESVEKLIKPNQLIIRLQPDEGLKLLLMSKEPGPGGMRIAPSYLNLSFSDTFKKRVPDAYERLLMDVVRGNQTLFMRKDEVEAAWNWIDPIIEMIRKNNLKPEIYNPGSWGPVSSNTLISKNEFEWHEPDSKGLN

SEQ ID NO: 87017 - protein, 198 aa, Unknown
  Bacterial polypetide isolated from the Sargasso Sea
ALVLGQYEDYTDELGTSSTTETFVAMKLAIDNWRWAGVPFYIRTGKKLRQRASEIIITFKDRPHDIFSNSRDGTILGQPNRLIIRLQPSEGLRLQMTSKQPGPGGMRLFPSDLNLSFDETFEERLPDAYERLLMDTARGNQTLFMRVDEVLAAWEFIDPILALAKTRTPVSYKLGSMGPTDDLLQADGRSWIDPHEDW

SEQ ID NO: 87018 - protein, 153 aa, Unknown
  Bacterial polypetide isolated from the Sargasso Sea
MEKSGLLHADSQVIGVARDELSLDGYKDLVETNLQKFIKEPLDADVLARLKAKLQYVQVDLTKEDAYKALKNVTDPKKRIPVSYFATAPSLFGNICKGLSIAGLSAQPARVVLEKPIGHDLASSKVINDEVAKYFGECQIYRIDHYLGKETST

SEQ ID NO: 87019 - protein, 545 aa, Unknown
  Bacterial polypetide isolated from the Sargasso Sea
MKNIVPYLVALIIVACSAPEPPKSDINSNAMAVDSIQSNQNVSSNKNNTEMNSALDNNGNNNDDKGDDFRSHWGQMGDSEKQYFINQLNKNMGTSFDFKKINENPNELFSVISGLQNVMDIGALRDMVPKSDTKDTFELIQEQSAGFSVPALDFFATNKSDRFLVDFEDIIAGHPLVGANSPRPHNDAQVYFSNTDSRWVNATQPEDYPPIYAVADGYVNLPKLSFYNVVDHSNSDPPWWHVAYVFTLRIATDDGSNVEFLYQMEPYMIPDLVGKPKDFYRQFIKVENGQFVKKGDILGYMYVPALEEMVGNKEASSHIAFSLMKQPSTVFSPSIFSEDVVRQFGNLYRNPSEGWESKSFGYDWNRARGLPDSMGWMINGAENPFSDNDLGVLIHDGIKDQDLDHRAMVKPQDLGFESDRILYSEFGWGNTVLRDIEINGDWQLLFAGMGGPMRLTFSMEDNGQMRESKVFELREGQNFRLDHKDKFTGNADKFDISIVDANSWGWSLAFADAEASYTVPGTTRDIKSVCPPGCPPSPNPYKLKK

SEQ ID NO: 87020 - protein, 291 aa, Unknown
  Bacterial polypetide isolated from the Sargasso Sea
QHAVRAAVNAQYVDHIQITVAETVGVGGRGEYYDKSGAMRDMVQNHLMQLLCLIAMEPPAKFDHDAVRDEKLKVIRALDQVPLDDVVRGQYLADGPDKKGYLEHVENPESKTESFIAMKLQVSNWRWAGTPIYLRTGKRLKARSSEIAVVFKETPHSIFGADAGRHRNVLTIRLQPNEGMDLFVTIKEPGPGGMRLVDVPLDMTFAEALGPDAEDVPDAYERLIMDVIRGNQTLFMRGDEVEAAWAWADPLIESWEERGDRPVPYETGSTGPEEALALMHRDGRRWREIRA

SEQ ID NO: 87021 - protein, 201 aa, Unknown
  Bacterial polypetide isolated from the Sargasso Sea
SEIQIGQYENYTQELEQESKTETFVAMKVNVDNWRWAGVPFYIRTGKKLGLRASEIVITFKNRPHDIFAKNGAAVAEDYPNRLVIRVQPQEGLRLHLTSKKPGPGGMRLFPSELNLSFDEAFAERLPDAYERLLMDIARGNQTLFMRSDEVLAAWDYIDPIISMVRNKTPEIYSHNKMGPEDKILKREGRHWFNPELDKDI

SEQ ID NO: 87022 - protein, 223 aa, Unknown
  Bacterial polypetide isolated from the Sargasso Sea
GSSSFKLADENEPWNCCIRGQYGEGGNISNRLKGYRQEDGVNCNSTTETYIATKVFVDNWRWQGVPFYLRTGKRLPKRLGEIVLTFKDVPVHLFESTIINPAPNQLILRIQPNEGATFKFEVKSPGSGMKSRPVEMEFSYDESFGEPSDEGYVRLLADAMLSDPTLFTRSDEVEAAWKLYTPLIELMDNSPWKLPIYNYESMTWGPPESDQLISKDNMFWRRP

SEQ ID NO: 87023 - protein, 169 aa, Unknown
  Bacterial polypetide isolated from the Sargasso Sea
VFVDNWRWQGVPFYLRTGKRLPKRLGEIVLTFKDVPVHLFESTIINPAPNQLILRIQPNEGATFKFEVKSPGSGMKSRPVEMEFSYDESFGEPSDEGYVRLLADAMLSDPTLFTRSDEVEAAWKLYTPLIELMDNSPWKLPIYNYESMTWGPPESDQLISKDNIFWRRP

SEQ ID NO: 87024 - protein, 264 aa, Unknown
  Bacterial polypetide isolated from the Sargasso Sea
NDLQSSIDINESLALYFNENQIFRIDHYLGKEAVQNLLALRFGNILFEKIWSNVAVDHVQITVAETLGLEKRGSYYDQTGAIKDMLQNHLLQILCLVAMEPPTNINSESIRDEKLKVLRSLRPFRTNETSDHLVIGQYKDGAINSKTITSYIDEIGVNQESNTETFVALKLWIDNWRWSGVPFFLRTGKRMAEKRSEIVIQFKSVPHNIFDSKSKQKDNQLIIRLQPEESIKLKIMIKKPSASGFHLQELPLDLLFDDYYEDDH

SEQ ID NO: 87025 - protein, 168 aa, Unknown
  Bacterial polypetide isolated from the Sargasso Sea
MRLLRSHPQVQLLFKEDLGTGGRGGYFDTFGIIRDIMQNHLLQAFMWLAMEPPSSMTGDAITAAKCELLRSVKTLALDPSECFLGQFAAHGDDSGYLDDPTVPAGSKCPTFASLVLSVDTPRWRGVPFLFTAGKGMDERVCELRVRTAGGKCRLRCLTTAPHLPPWTF

SEQ ID NO: 87026 - protein, 244 aa, Unknown
  Bacterial polypetide isolated from the Sargasso Sea
MNNALPETAITHDSDFIIFGGSGDLSVRKIFPALFWRFLNGQITENFRLISCMRTVVTTKQFANKFRPFCEQAFESGIADEQSWENFLKLIQILELDIVNDIGGEKLYNTLKSELSEERPCIFYLAVAPKLFGVSCELLHRNNLVLPQSRVVVEKPFGHDKASALALNQEILHVFDEGQIYRIDHYLGKETVQNLMALRFANVIFESQWNNHYIDHIQITTAETVGVGQRASYYDSYGALRDMV

SEQ ID NO: 87027 - protein, 260 aa, Unknown
  Bacterial polypetide isolated from the Sargasso Sea
VGAARSSLSQKTFNDLVENSIKSFAEINFKGDDLKNFLNCLNYIQIDATGSNGWNELKTALRPKKIRAFYFSVSPSLFGSLAERLHKHEITTENSRIVVEKPFGRNLKTSKQLNAILAEHFSEEQIYRIDHYLGKETVQNLMAIRFGNMLFEPLWNAQYVDHIQITVSETVGVGDRGEYYDHSGAMRDMVQNHLMQLLCLIAMEPPARFEPDSVRDEKLKVIRALDPVAPHHIVRGQYGPGVDHPDYRTGVGNKNSKTES

SEQ ID NO: 87028 - protein, 184 aa, Unknown
  Bacterial polypetide isolated from the Sargasso Sea
MVSRVIPVESFDLVIFGATGDLAKRKIFPGLFRRFLAGQMPTDSQVVGAARSNLSQKKFSDLVENSIKSFTEINFRDDDLKNFLNCLNYIQIDATGSNGWSALKSALRPKKILAFYFSVSPSLFGSLAERLHEHAITTENSRIVVEKPFGRDLATSKQLNAILAEHFTEKQIYRIDHYLGKETV

SEQ ID NO: 87029 - protein, 191 aa, Unknown
  Bacterial polypetide isolated from the Sargasso Sea
FEPIIHYQPGDIESTADFEKLQQRLCSLEEGNPTPRVYYLATAPRFYTPAIAALGNLNMASEDHGDRRIVIEKPFGTDLATAQALNNYIHTVFQESQVYRIDHYLGKESVQNILALRFANTIFEPIWNRRYIDHVQITVAEEVPVGRRGSYYDSAGVLRDMFQNHLLQLLMVTAMEAPVRFNADAVRNEKS

SEQ ID NO: 87030 - protein, 221 aa, Unknown
  Bacterial polypetide isolated from the Sargasso Sea
MLSFVVFGASGDLAKKKIYPALFALYFDGRLPENFMIYGYARSSMTTEEFRDKIGASLTCRIDWDRAGGSSCAEKTEEFFSRCVYVPGQYDQANDFRSLDALMTENERGAEKVKRVFYLSIPPSIFVPVAQNAARECQTGDTRVIVEKPFGRDLQSSRELTAALASELSEEQTYRIDHYLGKELIENLTVLRFSNIMFQPLGTETTFATYRSTLAKTWHRS

SEQ ID NO: 87031 - protein, 235 aa, Unknown
  Bacterial polypetide isolated from the Sargasso Sea
FEPEAIRNEKAKVLQASKLADENEPWNCCIRGQYVEGGNISNRLKGYRQEDGVHCNSTTETYLAAKVFVDNWRWQGVPFYLRTGKRLPKRLGEIVLTFKDVPVHLFESTIINPAPNQLVLRIQPNEGATFKFEVKSPGSGMKSRPVEMEFSYDESFGEPSDEGYVRLLADAMLSDPTLFTRSDEVEAAWKLYTPLIELMDNSPWKLPIYNYESMTWGPPESDQLLSKDNIFWRRP

SEQ ID NO: 87032 - protein, 298 aa, Unknown
  Bacterial polypetide isolated from the Sargasso Sea
RSELTSEQFREHADKALKEHLKDGEYDKDEVAKFLARIEYVPVDATSNKGWDALKKMLEPGKDRVRAFYMAVAPSIFGPICDGIRDHKLITKQTRIVVEKPLGRDLASALELNNMIAKTFHEEQVFRIDHYLGKETVQNLMALRFANMLYAPLWNANHIDHIQITVGEEVGLEGRAGYYDKSGALRDMVQNHILNVLCMVAMETPSSMEAEAVRDEKLKVLRSLKPITEDNASAMTVRGQYRAGASKGGAVKGYLEELGGESDTETFVAIKAEIENWRWGGACLLHPHRQAARQPAFR

SEQ ID NO: 87033 - protein, 224 aa, Unknown
  Bacterial polypetide isolated from the Sargasso Sea
MPSTLSNPLRLGLRQERVISPQCLVIFGASGDLTHRKLIPALFELYLQRRIPSEFGIVGCARRPWTDNEFREKMKVKLSNQISGKEREWEQFSNYLFYEPVDLQQSDHVVRLSRRLNEIDKTQATHGNRTFYLSVSPNFYASGCKALKVAGLLDDPKKSRLVIEKPFGRDYSSAKKLNKIVQSCAEESQIYRIDHYLGKETVQNILVLRFANTIFEPIWNRNYI

SEQ ID NO: 87034 - protein, 260 aa, Unknown
  Bacterial polypetide isolated from the Sargasso Sea
MEFRHSLLRENNLANNKTRIIVEKPIGKDLISAIDINKAINSYFDEDQIYRIDHYLGKETVQNLMVMRFANQLFEAHWNNNSISNVQITVSEEIGIKGRENYYDSYGAIKDMMQNHILQLVCLVAMEPPSKFDAKLIRDEKLKVLQSLKKIENLNEICIGQYGLKNDNEDQIASYTQDSKKHDSKTETFVALIAKIDNWRWAGVPFFLRNWKRLKIRASEIVITFKPIQHFIFDKNRKNNTLPNQLIIRLSPDEGLKFYY

SEQ ID NO: 87035 - protein, 207 aa, Unknown
  Bacterial polypetide isolated from the Sargasso Sea
MIHPNSEISEFDIIIIGATGDLSIRKIIPALFKRYADGQIPEKSKIYCLARQKLDNSSFTQKICQQNKIDLKNSKILKEFLKKINYLCIDIKSPDSKNLFSLQKMLSKDRVRLFYLATAPELFGVSAQFISENNLENNKTRIIVEKPIGKDLISAIDINKVLNSYFDEDQIYRIDHYLGKETVQNLMIMRFANQLFEAHWNNNSISN

SEQ ID NO: 87036 - protein, 242 aa, Unknown
  Bacterial polypetide isolated from the Sargasso Sea
IIVEKPIGKDLISAIDINKALNSYFDEDQIYRIDHYLGKETVQNLMVMRFANQLFEAHWNNNSISNVQITVSEEIGIKGRENYYDSYGAIKDMMQNHILQLVCLVAMEPPSKFDANLVRDEKLKVLQSLKKIEDLNEICIGQYGLKNDDEDQIASYTQDSKKHDSKTETFVALIAKIDNWRWAGVPFFLRTGKRLKTRASEIVITFKPIQHFIFDKTEKINTLPNQLIIRLQPDEGLKILLM

SEQ ID NO: 87037 - protein, 246 aa, Unknown
  Bacterial polypetide isolated from the Sargasso Sea
MTENTSSTIVIFGASGDLTSRKLVPALYNLHRTGELPAHTRIVGFSRTPMSDEAWRQSLRETTANHTDDFDEPSWITFANNIFYQPGDIQKRSDFDSLQHKLDTIEQKRLATRVYYLATAPQFYWPVASNLGSLGMNDESHGPRRIVVEKPFGTDLSSAQILNSKLHSVFDESQIYRIDHYLGKESVQNILALRFANTIFEPVWNRRYIDHVQITVAEKVSVGRRGDYYDKSGVLRDMFQNHLLQL

SEQ ID NO: 87038 - protein, 209 aa, Unknown
  Bacterial polypetide isolated from the Sargasso Sea
NVCIRGQYGKGGNISNRLKGYRQEDGVNSNSTTETYIATKVFVDNWRWQGVPFYLRTGKRLPKRLGEIVLTFKDVPVHLFESTIINPSSNQLILRIQPNEGATFKFEVKSPGSGMKSRPVEMEFSYDESFGEPSDEGYVRLLADAMLSDPTLFTRSDEVEAAWKLYTPLIELMDNSPWKLPIYNYESMTWGPPESDQLLSKDNIFWRRP

SEQ ID NO: 87039 - protein, 240 aa, Unknown
  Bacterial polypetide isolated from the Sargasso Sea
MVATATNPLRVGLRQERVIAPQCLVIFGASGDLTHRKLVPALFELFKQRRLPSEFALLGCARRPWSDEEFRGKMAEALASKIAENQEAWDQFASKLFYEPVDLQKPEDVVRLGGRLETIDQQCATRGNRTFYLSVSPKFYGSGCRALADAGLLKDPQRSRVVIEKPFGRDYGSAQALNRVVKSCGQENQIFRIDHYLGKETVQNIMVLRFANTIFEPIWNRNYISSVQITAAETVGVEER

SEQ ID NO: 87040 - protein, 172 aa, Unknown
  Bacterial polypetide isolated from the Sargasso Sea
KVNISNYRWAGVPFYLRTGKRLKARTSEIAVIFKEKPHSIFGPEAGNHQNALIIRLQPDEGITMDVTIKEPGPGGMRLIDVPLDMTFSETLGIEENAVPDAYERLIMDVIRGNQTLFMRGDEVEAAWEWTDPIINGWVDRNDVPKPYDSGSSGPQDSLTLLEREGRKWREIH

SEQ ID NO: 87041 - protein, 73 aa, Unknown
  Bacterial polypetide isolated from the Sargasso Sea
WQGVPFYLRTGKRLPKRLGEIVLTFKDVPVHLFESTIINPAPNQLILRIQPNEGATFKFEVKSPGSGMKSRPV

SEQ ID NO: 87042 - protein, 256 aa, Unknown
  Bacterial polypetide isolated from the Sargasso Sea
MIHPNSEISEFDIIIIGATGDLSIRKIIPALFKRYTDGQIPEKSKIYCLARQKLDNSSFTQKISQQNKIDFKNSKILKKFFDKINYLCIDIKSPDSKNLFSLQKRLTKDRVRLFYLATAPELFGVSAKFIRENNLANNKTRIIVEKPIGKDLISAIDINKALNSYFDEDQIYRIDHYLGKETVQNLMVMRFANQLFEAHWNNNSISNVQITVSEEIGIKGRENYYDSYGAIKDMMQNHILQLVCLVAMEPPSKLTR

SEQ ID NO: 87043 - protein, 170 aa, Unknown
  Bacterial polypetide isolated from the Sargasso Sea
KVFVDNWRWQGVPFYLRTGKRLPKRLGEIVLTFKDVPVHLFESTIINPAPNQLILRIQPNEGATFKFEVKSPGSGMKSRPVEMEFSYDESFGEPSDEGYVRLLADAMLSDPTLFTRSDEVEAAWKLYTPLIELMDNSPWKLPIHNYESMTWGPPESDQLLSKDNIFWRRP

SEQ ID NO: 87044 - protein, 213 aa, Unknown
  Bacterial polypetide isolated from the Sargasso Sea
MDNSYEPCDFVLFGTLGDLSRRKLLPSLYQLEKANLMHPDTTIVGVARQEMELDAYIEEVHANLIKFGEKNLCEATWEKMKARLHYACVDMKDVESYCVLDDHVDPSRTMVCYLATPPAIYGDICRGLHSCKIIDSSVRVVLEKPIGHDLASSKVINEQVAEYFDEKQIYRIDHYLGKETVLNLVSLRFANSIFATNWDHNCIDHVQISVAES

SEQ ID NO: 87045 - protein, 247 aa, Unknown
  Bacterial polypetide isolated from the Sargasso Sea
MVATATNPLRVGLRQERVIAPQCLVIFGASGDLTHRKLVPALFELFKQRRLPSEFALLGCARRPWSDDEFRGKMAEALASKIVENQEAWDQFATKLFYEPVDLQQPEDVVRLGGRLETIDQQCATRGNRTFYLSVSPKFYGSGCRALADAGLLKDPQRSRVVIEKPFGRDYGSAQALNRVVKSCGQENQIFRIDHYLGKETVQNIMVLRFANTIFEPIWNRNYISSVQITAAETVGVEERAGYYETS

SEQ ID NO: 87046 - protein, 294 aa, Unknown
  Bacterial polypetide isolated from the Sargasso Sea
MRFANTIFEPIWNRNYISSVQITSSETVGVEDRAGYYESSGALRDMLQNHMTQMLAVTAMEPPGKFEPEAIRNEKAKVLQASKLSDENEPWNCCIRGQYGEGGNISNRLKGYRQEDGVNSNSTTETYIATKVFVDNWRWQGVPFYLRTGKRLPKRLGEIVLTFKDVPVHLFESTIINPAPNQLVLRIQPNEGATFKFEVKSPGSGMKSRPVEMEFSYDESFGEPSDEGYVRLLADAMLSDPTLFTRSDEVEAAWKLYTPLIELMDNSPWKLPIYNYESMTWGPAESDQLIQKII

SEQ ID NO: 87047 - protein, 325 aa, Unknown
  Bacterial polypetide isolated from the Sargasso Sea
LLSNPLRLGLRQERVISPQCLVIFGASGDLTHRKLIPALFELYLQRRIPSEFGIVGCARRPWTDNEFREKMKVKLSNQISGKEREWDQFSNYLFYEPVDLQQSDHVVRLSRRLNEIDKTQATHGNRTFYLSVSPNFYASGCKALKGAGLLDDPKKSRLVIEKPFGRDYSSAKKLNKIVQSCAEESQIYRIDHYLGKETVQNILVLRFANTIFEPIWNRNYISSVQITSSETVGVEDRAGYYESSGALRDMLQNHMTQMLAVTAMEPPGKFEPEAIRNEKAKVLQASKLADENEPWNCCIRGQYGEGGNISNRLKGYRQEDGVNTN

SEQ ID NO: 87048 - protein, 320 aa, Unknown
  Bacterial polypetide isolated from the Sargasso Sea
GCRALADAGLLKDPKRSRVVIEKPFGRDYGSAQSLNRVVQSCGQEIQIFRIDHYLGKETVQNILVLRFANTIFEPIWNRNYISSVQITAAETVGVEERAGYYETSGALRDMVQNHLTQMLAITAMEAPGRFDQEAIRTEKAKVLQAARLADELEPWNCCIRGQYGPGGSQESPLAGYRQEPGVDPNSTTETYVALKLFIDNWRWQGVPFYVRTGKRLAKRVSEVVLTFREAPVHLFDAANGGPTSNQLILRIQPDEGAEFRFEVKSPGSGMRSRPIDMEFSYDESFGEPSDEGYVRLLADAMLSDPTLFTRSDEVEAAWR

SEQ ID NO: 87049 - protein, 227 aa, Unknown
  Bacterial polypetide isolated from the Sargasso Sea
DYLRLAEAARGDAIRVFYLSTSPELFTTICDNLSAAHLVDKHSRVVLEKPLGHDLASAKAINDAVGKHFEESQIYRIDHYLGKETVQNLMVLRFGNPIFGPLWQAPSIRSVQITVAETVGVGSRAGFYDHTGALRDMVQNHLLQLLCIVAMEPPVSLDPDAVRDEKLKVLRSLRPMAQLQEVLPEYTAPGQTLWAVYLSRSYQQALVRAFIDFTAQQWQLDINKWTA

SEQ ID NO: 87050 - protein, 324 aa, Unknown
  Bacterial polypetide isolated from the Sargasso Sea
HSSQCLVIFGASGDLTHRKLIPALFELYLQRRIPSEFGIVGCARRPWTDNEFREKMKVKLSNQISGKEREWDQFSNYLFYEPVDLQQSDHVVRLSKRLNEIDKTQATHGNRTFYLSVSPNFYASGCKALKAAGLLDDPKKSRLVIEKPFGRDYSSAKKLNKVVQSCAEESQIYRIDHYLGKETVQNILVMRFANTIFEPIWNRNYISSVQITSSETVGVEDRAGYYESSGALRDMLQNHMTQMLAVTAMEPPGKFEPEAIRNEKAKVLQASKLADENEPWNCCIRGQYGAGGNISKSLKGYRREDGVNSISTTETYIATKVFVD

SEQ ID NO: 87051 - protein, 275 aa, Unknown
  Bacterial polypetide isolated from the Sargasso Sea
AIYGDICRGLHSCKIIDSSVRVVLEKPIGHDLASSKVINEQVAEYFDEKQIYRIDHYLGKETVLNLVSLRFANSIFATNWDHNCIDHVQISVAESVGIEGRWGYFDDAGQMRDMVQNHLLQILSLVAMEPPTTLDADSIRDEKLKVLKALRPINSFNINESTVRGQYTSGFVKGEEVPGYLEEEAANTQSKTETFVAIKAEIDNWRWAGVPFYLRTGKRMPTKVSEVVIYFKRQPHNLFGDSFKNLPPNKLVIRLQPDEGVEITVMNKVPGLTSS

SEQ ID NO: 87052 - protein, 276 aa, Unknown
  Bacterial polypetide isolated from the Sargasso Sea
SETVGVEDRAGYYESSGALRDMLQNHMTQMLAVTAMEPPGKFEPEAIRNEKAKVLQASKLADENEPWNCCIRGQYGEGGNISNRLKGYRQEDCVNFNSTTETYIATKVFVDNWRWQGVPFYLRTGKRLPKRLGEIVLTFKDVPVHLFESTIINPAPNQLILRIQPNEGATFKFEVKSPGSGMKSRPVEMEFSYDESFGEPSDEGYVRLLADAMLSDPTLFTRSDEVEAAWKLYTPLIELMDNSPWKLPIYNYESMTWGPPESDQLLSKDNIFWRRP

SEQ ID NO: 87053 - protein, 318 aa, Unknown
  Bacterial polypetide isolated from the Sargasso Sea
VDLQQSDHVVRLSKRLNEIDKTQATHGNRTFYLSVSPNFYASGCKVLKAAGLLDDPKKSRLVIEKPFGRDYSSAKKLNKIVQSCAEESQIYRIDHYLGKETVQNILVLRFANTIFEPIWNRNYISSVQITSSETVGVEDRAGYYESSGALRDMLQNHMTQMLAVTAMEPPGKFEPEAIRNEKAKVLQASKLANENEPWNCCIRGQYVEGGNISNRLKGYRQEDGVHCNSTTETYLAAKVFVDNWRWQGVPFYLRTGKRLPKRLGEIVLTFKDVPVHLFESTIINPAPNQLVLRIQPNEGATFKFEVKSPGSGMKSQTL

SEQ ID NO: 87054 - protein, 253 aa, Unknown
  Bacterial polypetide isolated from the Sargasso Sea
MATAEALNACLLKVMSEKQIYRIDHYLGKETVQNILVSRFSNVLFEAFWNNHYIDHVQITAAETVGVETRGNFFEKTGTLRDMVPNHLFQLLAMVAMEPPAAFGADAVRGEKAKVVGAIRPWSLEDARANSVRGQYTAGEIAGKPLPGYREEANVAPDSSTETFVALKVMIDNWRWVGVPFYLRTGKRMSIRDTEIVICFKQAPYAQFRDTEVDELKPTYLKIQIQPNEGMWFDLLAKQPGPTLEMANIELGF

SEQ ID NO: 87055 - protein, 263 aa, Unknown
  Bacterial polypetide isolated from the Sargasso Sea
VAEYFDEKQIYRIDHYLGKETVLNLVSLRFANSIFATNWDHNCIDHVQISVAESVGIEGRWGYFDDAGQMRDMVQNHLLQILSLVAMEPPTTLDADSIRDEKLKVLKALRPINSFNINDSTVRGQYTSGFVKGEEVPGYLEEEGANTQSKTETFVAIKAEIDNWRWAGVPFYLRTGKRMPTKVSEVVIYFKRQPHNLFGDSFKNLPPNKLVIRLQPDEGVEITVMNKVPGLTSSGSMDLQKSKLNLSFSEAFADERIPDAYEK

SEQ ID NO: 87056 - protein, 320 aa, Unknown
  Bacterial polypetide isolated from the Sargasso Sea
LALRKLFPALYEMERTGRFDDETRIFGASRSEHSDEDFRAKLEEAGKKFIPKGEFEPETWAKFASRIAYVQVSAGDESGFKVLYEKLSDQPGRDRVFYFSTSPSLFADMAFNLKKAGLVTPNSRVVLEKPLGHDLDSCREINGQIGEVFEENQIFRIDHYLGKETVQNLMILRFANAMFEPLWNSAHIDHVQITVGEEVGVEGRWSYYDDAGAMRDMVQNHMLQLLCLVAMEPPYVLDQDAVRDEKVKVLKALQPINDSNIDSSTVRGQYRNGAVGGKEVPGYLEEEGANTDSTTETFVAIRAELDNWRWSGVPFYLRTG

SEQ ID NO: 87057 - protein, 291 aa, Unknown
  Bacterial polypetide isolated from the Sargasso Sea
SLYYDRHLPENVLVFGYARSKMTNEEFKEKIRESLPCRISAAGNCDDVIESFLERLHYVSGLYDDPKDFKALDQAMAAEEAKMGKKAMRIFYLSIPPSIFVPVAQNAARECSSSPGETRVIVEKPFGRDLESSRELTSSLAEVLAEENTYRIDHYLGKELIENITVLRFSNIMFQPLWSRAYIRNVQICFSENFGTEGRGGYFDNYGIIRDVMQNHLLQVMALFAMEEPASLDAEDIRDEKVKVIRCIRPIEMDNVVLGQYKGRRDGDKQLPAYLDDETVPPGSKCPTFAA

SEQ ID NO: 87058 - protein, 294 aa, Unknown
  Bacterial polypetide isolated from the Sargasso Sea
MVKILKEKFDPNRPIIFYLAIASSLFGNSCRFIRDSGLNVPQSRLVIEKPIGQNKSTAIQINNEISSVFKESQIYRIDHYLGKETVQNLMALRFANTFFENQWNNKNVDNVQITVSETVGVEDRISYYNEYGAIRDMLQNHLLQLVCLIAMEPPSFYEADQLRDEKLRVLKALKPITEEEIQTGQYRSFSDELGENSNTETFVSLKVVINNWRWAGVPFYIRTGKKLSTRASEIIITFKNKPHDIFSKFTADAHDEPNRLIIRVQPEEGLKLKLTSKAPGPGGMRFFPSELNLS

SEQ ID NO: 87059 - protein, 309 aa, Unknown
  Bacterial polypetide isolated from the Sargasso Sea
LVVEKPLGHDRASSREINDELLAAFKEDQIYRIDHYLGKETVQNLMALRFANVIFEALWNNRYIDNIQITVAETLGVGSRAAYYDNYGAIRDMLQNHLLQLLCLVAMEPPARFNADQVRNEKLRVLQALRPVNAENCVLGQYQEYPHEVGASTSTETYVALKVLIDNWRWAGVPFYIRTGKKLKTRASEIVITFKNRPHDIFAGDDVTDKEVEIPNRLIIRVQPHEGLRLLLTSKEPGPGGMRLFPSELNLSFGETFNERLPDAYERLLMDIARGNQTLFMRLDEVLAAWDFIDPLVDMAAKRFPLLYN

SEQ ID NO: 87060 - protein, 286 aa, Unknown
  Bacterial polypetide isolated from the Sargasso Sea
EFGIVGCARRPWTDNEFREKMKVKLSNQISGKEREWEHFSNYLFYEPVDLQQSDHVVRLSKRLNEIDKTQATHGNRTFYLSVSPNFYASGCKALKASGLLDDPKKSRLVIEKPFGRDYSSAKKLNKVVQSCAEESQIYRIDHYLGKETVQNILVLRFANTIFEPIWNRNYISNVQITSSETVGVEDRAGYYESSGALRDMLQNHMTQMLAVTAMEPPGKFEPEAIRDEKAKVLQASKLADENEPWNCCIRGQYGAGGNISNQVKGYRREDGVNSNSTTETYIATKV

SEQ ID NO: 87061 - protein, 490 aa, Unknown
  Bacterial polypetide isolated from the Sargasso Sea
MGKTTSGAKACDFVLFGTKGDLARRKLLPSLYQLDKAELLDKNTKVIGVAKDEFSQDEFRELVILALKTFVKEALCEETVQRFLSRCHYVGTNFTESAGYSAFHELLKPEERVMVSYFATPPAIFGDICRCLHEQNLIHSDSRVVLEKPIGSDLASSRVINDQVSAYFKENQVYRIDHYLGKETVQNLIALRFANSLFASKWDNRTIDHVQITVAEEVGIEGRWGYFDKAGQMRDMIQNHLLQVLTLVAMDPPVNLDADSIRDEKVKVLKSLRPINADNVYENTVRGQYSAGFLKGSPVPGYLEEEGANLQSHTETFVALRVDIDNWRWAGVPFYLRSGKRMPFKSSEIVVYFKNPPHNLYRSSYRNLPPNKLTIRLQPHEGVEIQMMNKVPGLEQKQRLQTTKLDLSFSDTFKNERIADAYERLLLEAMLGNQALFVRRDEVEQAWTWVDGIIQSWEQSNEKPKPYPAGTWGPVASVALITKDGRSWDE

SEQ ID NO: 87062 - protein, 490 aa, Unknown
  Bacterial polypetide isolated from the Sargasso Sea
MGKTSSGAKACDFVLFGTKGDLARRKLLPSLYQLDKAELLDKDTKVIGVAKDEFSQDEFRELVILALNTFVKEPLCEETLNRFVSRCHYVGTNFTDSAGYSAFHELLKPEERVMVSYFATPPSIFGDICRCLHEQNLIHSDSRVVLEKPIGSDLASSRVINDQVSAYFKESQVYRIDHYLGKETVQNLIALRFANSLFASKWDNRTIDHVQITVAEEVGIEGRWGYFDKAGQMRDMIQNHLLQVLTLVAMDPPVNLDADSIRDEKVKVLKSLRPINADNVYENTVRGQYSAGFLKGSPVPGYLEEEGANVHSHTETFVALRVDIDNWRWAGVPFYLRSGKRMPFKSSEIVVYFKNPPHNLYRSSYRNLPPNKLTIRLQPHEGVEIQMMNKVPGLEQKQRLQTTKLDLSFSDTFKNERIADAYERLLLEAMLGNQALFVRRDEVEQAWTWVDGIIQAWEQSNEKPKPYPAGTWGPVASVALITKDGRSWDE

SEQ ID NO: 87063 - protein, 471 aa, Unknown
  Bacterial polypetide isolated from the Sargasso Sea
MTTTAPLNKACDLILFGTKGDLARRKLLPALYQLEKSGLLHADSKVIGVARDELSLDGYKELVETNLQKFIKEPLDADVLVRLKAKLEYVQVDLTKEDAYKALKQVTDPKKRIPVSYFATAPSLFGNICKGLSIAGLSAEPARVVLEKPIGHDLASSKVINDEVAKYFAECQIYRIDHYLGKETVLNLLALRFANSIFAANWDHNAIDHVQITVAEEVGVEGRWGYYDDAGQMRDMVQNHLLQVLSLIAMEPPARLDADSIRDEKLKVLKALRPINVSNVQEKTVRGQYAGGYVAGTPVPGYLDEEDARPNSKTETFVAIKVDIDNWRWAGVPFYLRTGKRMPKKMSELVICFKPQPHNIFFETYKQLPANKLIIRLQPDEGVEIQIMNKIPGLGESMQLQQTKLDLSFDETFKSQRIADAYERLLLEAMLGNQYLFVRRDEVEQAWKWVDGILDAWKVTNEPPKPYQAGT

SEQ ID NO: 87064 - protein, 290 aa, Unknown
  Bacterial polypetide isolated from the Sargasso Sea
MVATMTNPLRVGLRQERVIAPQCLVIFGASGDLTHRKLVPALFELFKQRRLPSEFALLGCARRPWSDKEFRGKMAEALASTIEDDPQAWEQFVGKLFYEPVDLQQPQDVVRLGTRLEQIDQQCATRGNRTFYLSVSPKFYGSGCRSLADAGLLKDPKRSRVVIEKPFGRDYGSAQALNRVVQACGQENQIFRIDHYLGKETVQNIMVLRFANTIFEPIWNRNYISSVQITAAETVGVEERAGYYESAGALRDMVQNHLTQMLAITAMEPPGRFDPEAIRNEKAKVLQAAR

SEQ ID NO: 87065 - protein, 507 aa, Unknown
  Bacterial polypetide isolated from the Sargasso Sea
MPSTLSNPLRLGLRQERVISPQSLVIFGASGDLTHRKLIPALFELYLQRRIPSEFGIVGCARRPWTDNEFREKMKVKLSNQISGKEREWEQFSNYLFYEPVDLQQSDHVVRLSRRLNEIDKTQATHGNRTFYLSVSPNFYASGCKALKAAGLLDDPKKSRLVIEKPFGRDYSSAKKLNKIVQSCAEESQIYRIDHYLGKETVQNILVLRFANTIFEPIWNRNYISSVQITSSETVGVEDRAGYYESSGALRDMLQNHMTQMLAVTAMEPPGKFEPEAIRNEKAKVLQASKLADENEPWNCCIRGQYGEGGNISNRLKGYRQEDGVNCNSTTETYIATKVFVDNWRWQGVPFYLRTGKRLPKRLGEIVLTFKDVPVHLFESTIINPAPNQLILRIQPNEGATFKFEVKSPGSGMKSRPVEMEFSYDESFGEPSDEGYVRLLADAMLSDPTLFTRSDEVEAAWKLYTPLIELMDNSPWKLPIYNYESMTWGPPESDQLISKDNIFWRRP

SEQ ID NO: 87066 - protein, 289 aa, Unknown
  Bacterial polypetide isolated from the Sargasso Sea
MQTDSSFTFVLFGGTGDLSMRKILPALFEAHRAGGMLAESGKIFAVARHVADRAGYLEWVNEHVKPHVSKNGLDETAWASFLDRIEFVKIDLGKPEDFVLLRDAISGLPGIRVFYLATGPSLFVPICHALASVGLNENSRIVLEKPLGYDLKSSNAINDAVGEIFAEEQIYRIDHYLGKEPVQNLLALRFGNVLFEPLWRREWVESIQITIAEELGVEARGDFYDNTGALRDMVQNHLLQLLSIVAMEPPHSMDSDSVRDEKLRVLRALKPIDPRDIGKVAVRGQYHAG

SEQ ID NO: 87067 - protein, 482 aa, Unknown
  Bacterial polypetide isolated from the Sargasso Sea
MVSRVIPVKAFDLVVFGGTGDLARRKILPSLFRRFVAGQMPDNAYVIGVARSEFDTNGYQDLVIAALQEFEPELSASGELKSFIKQIQYVQIDAQGDLGWSDLAGIVRKDAIQAFYFSVSPSLFGPLAEKLHQYSISSKSSRIVLEKPFGRDLNSARALNAVLKEHFSEEQIYRIDHYLGKETVQNLMAVRFGNMLFEPLWNSQYIDHIQVTVAESVGVEGRGSYYDQAGAMRDMVQNHLMQLLCLIAMEPPAKFSPDAVRDEKLKVIRALDPINSKDIVRGQYSTVGTEKGYLEAVDNPSSKTESFIALKVQISNWRWAGTPFYLRTGKKLKARCSEIAVVFKETPHSIFGPDAGSHRNALVIRLQPDEGMTMDLTIKEPGPGGMRLIDVPLDMTFAEALGPEIGAVPDAYERLIMDVIRGNQTLFMRGDEVEAAWSWTDPVINQWVSKGTSPVSYDAGSSGPEDSMMLMHRDGRKWREIS

SEQ ID NO: 87068 - protein, 332 aa, Unknown
  Bacterial polypetide isolated from the Sargasso Sea
SLESPRAITPAIGAVFDEARVFRIDHNLAKETVQNLMALRFANALFEPVWRAGHIDHVQISVCETLGVENRGAYYDHAGAMRDMIQNHLLQLLCLVAMEAPVRFDAEAVRNEKVKILEALKPISGLDVQDKTVRGQYTAGKIGGHDVPAYYFEKNVDNDSDTETFVAVQVEIDNWRWAGVPFYLRTGKRLAKKTSEILIQFKPVPHRLFHEGEANQLLIRLQPEERISLQLMAKNPGKGMHLKPVELDLNLANAFNQQRRWDAYERLLLDVIDGDSTLFMRRDEVEAAWQWVDPILQGWHQHYQSPRPYPAGSDGPEQLQHLLERHGRQWAE

SEQ ID NO: 87069 - protein, 270 aa, Unknown
  Bacterial polypetide isolated from the Sargasso Sea
VSETVGVGDRGEYYDHSGAMRDMVQNHLMQLLCLIAMEPPARFEPDSVRDEKLKVIRALDPVAPHHIVRGQYGPGVDHPDYRTGVDNKTSKTESFVALKVNISNYRWAGVPFYLRTGKRLKARTSEIAVIFKEKPHSIFGPEAGNHQNALIIRLQPDEGITMDVTIKEPGPGGMRLIDVPLDMTFSETLGIEENTVPDAYERLIMDVIRGNQTLFMRGDEVEAAWEWTDPIINGWIDRNDVPKPYDSRSSGPQDSLTLLEREGRKWREIP

SEQ ID NO: 87070 - protein, 291 aa, Unknown
  Bacterial polypetide isolated from the Sargasso Sea
AFVDWQVDLLNEHTDLNAGVVIVRPIESTFPPSLSTQDGLYTTIIRGLNEKGEAVSDARLIRSVNREISVYSEYDVFLKLAHNPDMRFVFSNTTEAGISYHAGDKFDDAPAVSYPAKLTRLLFERFSYFNGALDKGWIIIPCELIDYNGDALRELVLRYAQEWMLPEAFIQWLDQANAFCSTLVDRIVTGYPRDEVAKLEAELGYHDAFLDTAEHFYLFVIQGPKSLAAELRLDKYPLNVLIVDDIKPYKERKVAILNGAHTALVPVAWQAGLDTVGEAMNDAEICAFVKK

SEQ ID NO: 87071 - protein, 56 aa, Unknown
  Bacterial polypetide isolated from the Sargasso Sea
MQISLQVRKLSEIINTDHENVKYLPDIKLPANVKAVPDLKTAVEGAHLLVWVFFEG

SEQ ID NO: 87072 - protein, 117 aa, Unknown
  Bacterial polypetide isolated from the Sargasso Sea
MPEKVALVGSGNWGSSIATKMGVNTAACADFDDEIMMWVFEEYVKQEDGKWVRPARGAKPPEGKTWVDEGYSPLTAVINKLHENVRKEPLPRSRLRRRMCMRPSPGAARALPRWLAA

SEQ ID NO: 87073 - protein, 354 aa, Unknown
  Bacterial polypetide isolated from the Sargasso Sea
MKTFDYLIIGAGSAGCVLANRLATNNKSIAIFESGGSSNTWKVDMPSALLYTMHDPKMNWKYYSEPEPYLNNRRIFCPRGKMIGGCSSHNGMVFVRGHPKDYDRWASYGLKNWSYEKVLPYFKKLETWSGGENQYRGANGPLKVNRSKINDKFPLFQAVLNSASEAGFELFEDSNGYNQEGFGTFDVTINKGKRVGVGKAYLGEIKNKSNVKIFTNSNVTKILFKDKVAIGIEVSINNKKEKYFTNKEVLLSAGAINSSKILLLSGLGEPKEIKKFDIEVIHDLPGVGQNLQDHLEIYIQHKSKKRETLYDLSTNYISQGIEGLKWFLFKKGKLANSHLELGGFVKTNEKYLIQ

SEQ ID NO: 87074 - protein, 106 aa, Unknown
  Bacterial polypetide isolated from the Sargasso Sea
MDSKTIKANVDSYMTKLAKTAQIEKLQVCIVGSGNWGSTAAKIAGENILAGGAAAKCFQEEVRMWVFEEEVKQKDGSVRSRNRNDPYPGLASPDQMQICRGLSFWL

SEQ ID NO: 87075 - protein, 99 aa, Unknown
  Bacterial polypetide isolated from the Sargasso Sea
MGSGNWGTAVARLVAENVARQPQLFTSRVKMWVVEEIIEGRKLTHLINFNHENVKYLPEIKLPENLVAVPDLVDVVSNATVLIFVIPHQFLERLLPTIN

SEQ ID NO: 87076 - protein, 212 aa, Unknown
  Bacterial polypetide isolated from the Sargasso Sea
MSKKNIFIFPGDEIGPEITTEAIKIIDFLNESKATDIHYEFGDIGGASLDKYNKPITDETLEKARKSDAVLLASVGTPKYDNNTRELKPEHGLLVLRKHLNLYINIRPIFVFNTLSEFSSLKSELINDLDLVIIRELIGDVYFGEPRGFKDVNGDKVGYNTMQYSESEVQRITKFAIDIALKRNKHITSVDKANVLECSHLWRQTVDRVIQG

SEQ ID NO: 87077 - protein, 42 aa, Unknown
  Bacterial polypetide isolated from the Sargasso Sea
MAQHRVVLLPGDGIGPEITAVARQLLEAVSQRHGFELCFDEQ

SEQ ID NO: 87078 - protein, 272 aa, Unknown
  Bacterial polypetide isolated from the Sargasso Sea
MKEYKIASIAGDGIGKEVVPEALKIIKEVANQHQFKLMIDEFDFSSCDYYEKHGKMLPDDWKQQIGNHDAIFFGAVGMPDKYPDHITLWGSLLQFRREFDQFINLRPVKLFEGVNAPLANKKPGDIDMMIVRENTEGEYSSVGGKMYQNTEREIVIQETIMSKHGIDRVQKFAFELAKTRDRKKLTNATKSNGISITMPYWDQRFYENKKDFPEIKTDQFHIDILAARFVLTPEWFDVVVASNLFGDILSDLGPACTGTIGIAPSGNINPTN

SEQ ID NO: 87079 - protein, 273 aa, Unknown
  Bacterial polypetide isolated from the Sargasso Sea
MKEYKIASIAGDGIGKEVVPEAQKILKEVANQHQFKLRIDEFDFSSCDYYEKHGKMLPDDWKDKIGSHDAIFFGAVGMPDRYPDHVTLWGSLLQFRREFDQFINLRPVKLFEGVNAPLANKKPGDIDMMIVRENTEGEYSSVGGKMYQNTEREIVIQETIMSKHGIDRVQKFAFELAKKRKRKKLTNATKSNGISITMPYWDERFNENKKSYPEIETDQFHIDILTARFVLTPEWFDVVVASNLFGDILSDLGPACTGTIGIAPSGNINPTNK

SEQ ID NO: 87080 - protein, 30 aa, Unknown
  Bacterial polypetide isolated from the Sargasso Sea
MAQHRVVLLPGDGIGPEITAVARQLLEAVS

SEQ ID NO: 87081 - protein, 135 aa, Unknown
  Bacterial polypetide isolated from the Sargasso Sea
MEFLSYIRSLFLLSLPLIGGHVAQILIGVGDTLIVGRYSTEALAALVLGTTIFFIIFIFGAGFSFAAMALVSTTKTEGDTTKIRRITRMALWLSLAFGLLVSPIFVFSERLLLLLGQEFNLAALASEYLIFSGIA

SEQ ID NO: 87082 - protein, 46 aa, Unknown
  Bacterial polypetide isolated from the Sargasso Sea
MIKVKKRKILLLPGDGIGPEVIGEVRKIINWFNDKKSLDFEIDEDL

SEQ ID NO: 87083 - protein, 202 aa, Unknown
  Bacterial polypetide isolated from the Sargasso Sea
MGASEGRFAAKIITRPGTEQVARFACELALQRSGRLTVSAKTNMLPATDRWFCEIAREISEEYAGVEYEEFIVDDMAHRLVVRPQDIDVLLLPNLYGDILSDLGAGTIGGLGLAPSGCYGHEFAYFESAHGTAPDLAGKGTINPTATLLSAAMMLRHLHLKDAADRLERALEHVYLSNSDLTPDQGGAASTERFADAVIGAL

SEQ ID NO: 87084 - protein, 47 aa, Unknown
  Bacterial polypetide isolated from the Sargasso Sea
MIKVKKRKILLLPGDGIGPEVIGEVKKIIKWFNDKKSLDFEIDEDLA

SEQ ID NO: 87085 - protein, 81 aa, Unknown
  Bacterial polypetide isolated from the Sargasso Sea
MKEKVNLLLLPGDGIGPEVCIPVKRIINCLNNFTNIEFSIEEELVGGSSYDEFKLPITEKVISKAKASDGILLGAVGAPQV

SEQ ID NO: 87086 - protein, 167 aa, Unknown
  Bacterial polypetide isolated from the Sargasso Sea
LRSMVFFRKIFDERALLFPDIQSDHNYVDAQALDLIRRPWEFDVLVMENMFADILSDLGGGLVGGMGMAPCAEIGLKHGLFQPAHGSAPDIMGKDLANPTAMFLSAAMMLEWLGQKYQNESLMNAAKLLKSKIEEGFRLKRTQPKEFGGPHGCSEHTRNLLEIIEDL

SEQ ID NO: 87087 - protein, 241 aa, Unknown
  Bacterial polypetide isolated from the Sargasso Sea
MNITELIVCISIGMCLGSFASVLIYRIPRNINLLLPRSHCPYCNNTLKAMHLVPIFSYVLLRGKCAFCSSKISRLYPVNEFFITAMVVIITYHAGPYSIHGWLAITLILCLYAQAVIDFKTLSLSTYLSVIIGLLGFAFNYLHFFTSIIDSLAGLILGYCSLWLINYIYKKIKGTDGIGSGDYLLLGAVGGVFGSSSLGIILLSSSIISIGLHFFTRTIHGERIPLGTGIALSSIIFLVLI

SEQ ID NO: 87088 - protein, 132 aa, Unknown
  Bacterial polypetide isolated from the Sargasso Sea
KKPGDIDMMIVRENTEGEYSYVGGRMYKNTDREIAIQETIMSAHGIDRVQKFAFELAKIRKRKKLTNATKSNGISITMPFWDERFEKMKKNYPEINIDQFHIDILVARFVLNHEWFDVVVASNLFGDILSDL

SEQ ID NO: 87089 - protein, 285 aa, Unknown
  Bacterial polypetide isolated from the Sargasso Sea
MKEYSIASIAGDGIGKEVVPEAQKILKEISQQHQFKLNIEDYDFASCDYYEKHGKMMPDDWKDKLTKHDAIFFGAVGMPDKYPDHITLWGSLLKFRREFDQFINLRPVKLFEGVNAPLANKKPGDIDMIIVRENTEGEYSSVGGRMYQGSDREVVIQETIMSKYGIDRVQQFAFELAKKRKRKKLTSATKSNGISITMPYWDERFNENKKNYPDVETDQYHIDILAARFVLSPERFDVIVASNLFGDILSDLGPACTGTIGIAPSGNINPTNKYPSLFEPVHGSA

SEQ ID NO: 87090 - protein, 179 aa, Unknown
  Bacterial polypetide isolated from the Sargasso Sea
QKKHVTCVHKSNVMRKTDGLFAKSCKSVSEEFPDVKFDEMYVDACSMNLIRQPQEFDVIVTTNLFGDILSDQSSQVVGGLGMAPAANLGDNFGLFEPVHGAAFDIAGKQIANPTSFILSIKMMLQWLGSKNNDQNSISVAQTLEQTVLELVKSGITTKDVGGDKSTKEFTKEITNRLVS

SEQ ID NO: 87091 - protein, 75 aa, Unknown
  Bacterial polypetide isolated from the Sargasso Sea
MKLKIAVLPGDGIGPEVTNQSIKVLNCIADKYNHEVELTEGLVGAIAIDKHNDPYPDSTHKLCKDSDAILFGAIG

SEQ ID NO: 87092 - protein, 158 aa, Unknown
  Bacterial polypetide isolated from the Sargasso Sea
VVNDVSKEYPDVDLRHLYADNCAYQLAKNPKQFDVILTDNLFGDFLSDLAGALTGSLGMLPSASLSSLTNDLAINAPGIYEPVHGTAPDIEGQGIVNPLGMLLSVGMMFEYGFGYSSAAVKLRSSVDIALSRGVRTPDIGGNASTIEMTDAVIHAWKN

SEQ ID NO: 87093 - protein, 189 aa, Unknown
  Bacterial polypetide isolated from the Sargasso Sea
MPRIALIPGDGIGVEVVREARRVLEFVRETEGVNFELVEWDLGADRFLRDGITITDDEFVSLDQDHDAVLLGALGDPRVPSNKHAKDILLGMRFKLDLYVNFRPCVLISPELSPLASVSSLRLEIFRENTEGEYTGMGGVTRKNTPAEVAIEENLATRHGVERIIRAAFQFADSRGRDRVTLVDKANVM

SEQ ID NO: 87094 - protein, 58 aa, Unknown
  Bacterial polypetide isolated from the Sargasso Sea
MIKVKKRKILLLPGDGIGPEVIGEVRKIINWFNDKKSLDFEIDEDLAGGCSYDKHGTH

SEQ ID NO: 87095 - protein, 72 aa, Unknown
  Bacterial polypetide isolated from the Sargasso Sea
DIAGQDKANPMAMVLSAAMMLRIGLKQTEAAADLEAAVDKVLAAGFRTGDLMAEGCTALGCRAMGDALLKAL

SEQ ID NO: 87096 - protein, 294 aa, Unknown
  Bacterial polypetide isolated from the Sargasso Sea
ESKRDYYEVLGVSKGASESELKKAYRKLAIKYHPDKNPDDKEAEEKFKEAAEAYEVLNNPQKRQQYDQFGHAGMGQGGFGGGGMNMDDIFSQFGSIFGDSFGGGSFGGGRGRSQTVKGSNLRVKMKLSLEEIAEGVSKKIKLNKLVNASGVTYKTCESCKGSGRITRMAQTFLGAMQTQSVCNTCQGSGKFIDKKPSGADSNGLIRKEEIIDLDIPAGVVDGMQLSVTGKGNAGPFDGIPGDLIIVIEEKEHENLRRDGENLHYDAIISFVDAALGSSIEIPTLTGKSKIKIEP

SEQ ID NO: 87097 - protein, 250 aa, Unknown
  Bacterial polypetide isolated from the Sargasso Sea
MKKIILKGKYALVTGAGKGLGRACSIALAEAGATIIGLSRTSSDLDRLEKDIKKVKSKLIKINCDVMNYSELQEKLKKIKIIDILVNNAGTNIPEPFEKIKQQSMNYLVDLNLKAAFNVAQLVVKKMIKNKKRAGSIINMSSQLGHVGMSGRNIYNMTKFGIEGLTKGMGVELATKNIRVNTVAPTFVETPMVKKFFKNKKFKNLALGNIPMGKAAKESDVATAVCFLASDAAAMITGSSILIDGGWTAK

SEQ ID NO: 87098 - protein, 80 aa, Unknown
  Bacterial polypetide isolated from the Sargasso Sea
MDIIVVSKKKRKLLLLPGDGIGPEVIRETKKVIDWFNKEKSLDFEVEEELIGGASIDVHKTPITDEVFYKSLECDAIILG

SEQ ID NO: 87099 - protein, 53 aa, Unknown
  Bacterial polypetide isolated from the Sargasso Sea
MIKVKKRKILLLPGDGIGPEVIAEVKKIINWFNDKKSKDFEIDQELVGGVLMI

SEQ ID NO: 87100 - protein, 76 aa, Unknown
  Bacterial polypetide isolated from the Sargasso Sea
WALLATTLRHCLAWSARPWWLASLLGAVGGPLSYYAGSQLAGVSFAYGTAPTLIGLALLWAMLFPLLHGVAQRLEH

SEQ ID NO: 87101 - protein, 84 aa, Unknown
  Bacterial polypetide isolated from the Sargasso Sea
YEPIHGTAPDIAGQGKANPIATILSVALLLRYSLGLPEEAKEIEAAVDTVLAQGYRTADIGKEEEQIVTTEELANKIIELATNY

SEQ ID NO: 87102 - protein, 69 aa, Unknown
  Bacterial polypetide isolated from the Sargasso Sea
MNKINNRQLLLLPGDGIGPEVVGEVKKIIEWLNKNKSLDFRIEEGLVGGASYEKNKNPITDEVFYKALE

SEQ ID NO: 87103 - protein, 135 aa, Unknown
  Bacterial polypetide isolated from the Sargasso Sea
MNLLLLPGDGIGPEISRVVADVIDCLNSKLDLGIDLKEKDAGFKALESHGTTFPADVANEAETSDGIILGPSDSAAYPLPEQGGINLSAAFRRKFDLFANIRPAKSWTGIKSNASSMDMIVVRENTEGFYADRNM

SEQ ID NO: 87104 - protein, 55 aa, Unknown
  Bacterial polypetide isolated from the Sargasso Sea
MIKVKKRKILLLPGDGIGPEVIAEVKKIISWLNKNRSLDFEIDEDLVGGAAYDKH

SEQ ID NO: 87105 - protein, 101 aa, Unknown
  Bacterial polypetide isolated from the Sargasso Sea
MSNKKILILPGDGIGNEVMAEVLKIIDWMEKTKSMSFDISEKLVGGAAYDKEGNSISDETMQIALDSDAVLFGAVGGPKWENVEREKRPEAALLRLRKDLD

SEQ ID NO: 87106 - protein, 245 aa, Unknown
  Bacterial polypetide isolated from the Sargasso Sea
FKLKIDEFDFSSCDYYEKYGKMLPDDWTQQIGSHDAIFFGAVGMPDKYPDHITLWGSLLQFRREFDQFINLRPVKLFEGVNAPLANKKPGDIDMMIVRENTEGEYSSVGGKMYQNTEREIVIQETIMSKHGIDRVQKFAFELARTRDRKKLTNATKSNGISITMPYWDQRFYENKKDFPEIKTDQFHIDILAARFVLTPEWFDVVVASNLFGDILSDLGPACTGTIGIAPSGNINPTNKHPSLFE

SEQ ID NO: 87107 - protein, 230 aa, Unknown
  Bacterial polypetide isolated from the Sargasso Sea
IVIEEFPGLEGEVEWDPRPISRKGSERVINFAFDLARHRHRKMGVTQSVTCVDKSNVTRGCRLFRGIFNEISEQNPDIETHAAYIDAFTMWLMRDPEDLDVVVLPNMFGDIATDLASVLQGGLGMAASANLGPKHMMFEPVHGSAPKYTGKNVVNPIATLQSVQMMFEALAYRKKDDDLDKCADILQQAIQQHFEEGGVVTYDLGGDASTSEVGQAIADRCTAMLEQEFQ

SEQ ID NO: 87108 - protein, 73 aa, Unknown
  Bacterial polypetide isolated from the Sargasso Sea
MIKVKKRKILLLPGDGIGPEVIGEVRKIINWFNDKKSLDFKIDEDLAGGCSYDKHGVPITDEVFYKALESAVV

SEQ ID NO: 87109 - protein, 279 aa, Unknown
  Bacterial polypetide isolated from the Sargasso Sea
AAYSPADQGGINPSATFRRELDLYANIRPTRTRQGVPALTEMDLVVVRENTEGFYADRTMFAGNGEFMPTPDLALAVRKITRHGSERVVRAACDIAMTRQKRLTIVHTGNVLKQSDGLFRAAAQNVLVDYPEIDAEEVLVDAMASMLVREPGAYDVMVSTNMFGDILSNEAAELSGGLGLAPSINAGDEHAIAQASHGAAPDIAGTDTANPVALIVSAAMLLDWKGRRLGENVLIEAAAAAGRAVDDLLAVPETRTPDLDGALGTRAFGDALAARIGDA

SEQ ID NO: 87110 - protein, 123 aa, Unknown
  Bacterial polypetide isolated from the Sargasso Sea
MSKKILVLPGDGIGQEVTASAMQIFDFIIKKFSLNFSMDTLDVGGTAYEKSGSPIPENVLKAAKKADAVLFGAVGAPQWDGLSWEDRPENALLTLRKELNLFANLRPAFLFNELSNASPIKGK

SEQ ID NO: 87111 - protein, 253 aa, Unknown
  Bacterial polypetide isolated from the Sargasso Sea
MKEYKIASIAGDGIGKEVVPEALKILKEVANQHQFKLKIDEFDFSSCDYYEKHGKMLPDDWKQQIGNHDALFFGAVGMPDKYPDHITLWGSLLQFRREFDQFINLRPVKLFEGVNAPLANKKPGDIDMMIVRENTEGEYSSVGGKMYQNTEREIVIQETIMSKHGIDRVQKFAFELAKTRDRKKLTNATKSNGISITMPYWDQRFYENKKDFPEIKTDQFHIDILAARFVLTPEWFDVVVASNLFGDILSDLG

SEQ ID NO: 87112 - protein, 222 aa, Unknown
  Bacterial polypetide isolated from the Sargasso Sea
MSNKKILILPGDGIGNEVMAEVLKIIDWMEKTKSLSFDISERLVGGTAYDKEGNSISDETMQVAMDCDAVLFGAVGGAKWDNVERDKRPEAALLRLRKDLDLFANLRPAVVLDALSDSSSLKSDLVKGLDILIIRELTSGVYFGQPRGISKISETESKAVDTQLYTTSEVNRVSRVAFDLAKLRNNKVTSVEKSNVMETGLFWKQTVTDLHKKEYSDVNLEH

SEQ ID NO: 87113 - protein, 115 aa, Unknown
  Bacterial polypetide isolated from the Sargasso Sea
MPNNKKILVLPGDGIGKEVMAEVLNIINWMEKNKSISFDISERLVGGAAYDQEGDSISDETMEEAIKSDAVLFGAVGGSKWDNVDRSKRPEAALLKLRKELDLFANLRPSCCIEA

SEQ ID NO: 87114 - protein, 119 aa, Unknown
  Bacterial polypetide isolated from the Sargasso Sea
MFGDILSDLASELSGSLGLSGSLNVGDTIPMAQAQHGAAIDIMNKGIANPISLIFSVAMLLKWLGKQKCQMEYIKANELVFKVIENILEENKYLTPDLGGTSSSQTLTNHIIDKIENYE

SEQ ID NO: 87115 - protein, 72 aa, Unknown
  Bacterial polypetide isolated from the Sargasso Sea
MAQHRVVLLPGDGIGPEITTVARQLLDAVSQRHGFELCFDEQLIGGSAIDACGEPLPASTLDACKAADAVLL

SEQ ID NO: 87116 - protein, 257 aa, Unknown
  Bacterial polypetide isolated from the Sargasso Sea
MKEYKIASIAGDGIGKEVVPEALKILKEVANQHQFKLKIDEFDFSSCDYYEKYGKMLPDDWKQQIGSHDAIFFGAVGMPDKYPDHITLWGSLLQFRREFDQFINLRPVKLFEGVNAPLANKKPGDIDMMIVRENTEGEYSSVGGKMYQNTEREIVIQETIMSKHGIDRVQKFAFELARTRNRKKLTNATKSNGISITMPYWDQRFYENKKDFPEIKTDQFHIDILAARFVLTPEWFDVVVASNLFGDILSDLGPACT

SEQ ID NO: 87117 - protein, 155 aa, Unknown
  Bacterial polypetide isolated from the Sargasso Sea
MKKYKIVLLSGDGIGPEISEVSKKVLKKLSKNHNFDIEIIEKLFGGIAYEKYGTPAPDETLDQCKKSDAVLLACVGDIKYDSLAREFRPESGLLKLRSALNLFANIRPVKIRKSLLDASTLKKEIVEHVDLIVVRELIGGIYFGKPRGHITNTKI

SEQ ID NO: 87118 - protein, 141 aa, Unknown
  Bacterial polypetide isolated from the Sargasso Sea
FMQWLTRTPEHYDVVVCSNMFGDIATDLGAVLQGGMGMAASGNIGTDHAFFEPVHGSAPKHAGLNKVNPIASITSIQLMVEWLGRRNQIDDFKTIGKMIDQSVAEHLKQGKLLTYDLGGNAGCSHVGESIASILATKLSEV

SEQ ID NO: 87119 - protein, 177 aa, Unknown
  Bacterial polypetide isolated from the Sargasso Sea
MAEVLNIIDWLSKTRSMSFDISERLVGGTAYDKEGDSISDSTMQEALDSDAVLFGAVGGPQWDNVEREKRPEAALLRLRKELDLFANLRPAVVLDALAESSSLKLDLVKGLDILIVRELTSGVYFGQPRGISKISDTESKAIDTQAYTTSEIERVSRVAFELAKLRKNKVSSAEKSN

SEQ ID NO: 87120 - protein, 517 aa, Unknown
  Bacterial polypetide isolated from the Sargasso Sea
MFKGNFVQNLPKIYGTYTGGFIVFIILMAIAEQAGMTAKTIGILFVAFTVCIYAFIGYLSRTVQVDAYYVAGRQVPTVFNGMATAADWMSGASFVAMAGGIYFGGYTYMAFLVGWTGGYVLVSSLLAPYLRKFGCYTVPDFIGTRYGGNLARFCAVVVLSLASFTYVTAQINATGTIASRALGIPFELGVWVGLVSILLCSMLGGMRAVTWTQVAQYIVLIIAYLIPIFWISNKGGFGVFPHLMLGEEVARLSELEAQFGLVKNSAADIKAAGVPGGLKSIAVAHSEVPDGGMAAWKFISLALCMMVGTASLPHILMRYFTTPSVKAARKSVAWSLFFIAILYTSAPMLATLSKLSLMDPSLATGIIGKPIADVMSIEWVNQWVNVKQAFIADFNGDGILQLNEWFMRGDVVVLSTPEVAGLPYVISGLVAAGGMAAAMSTADGLILAIANALSHDVYYKIIDPKADVRKRLLVARALLVVIGAAGAYVASMRLTSILGASAWAFDFAMSGLFFPLI

SEQ ID NO: 87121 - protein, 314 aa, Unknown
  Bacterial polypetide isolated from the Sargasso Sea
MDTISDKFDIKFNVNSLVAGDAALEKTGKALPDDVFESIKSSDACLKAPVGESAKDVIVALRQKLDLYANIRPAKSYPNTPALRDDVDLVIVRENTEDLYTGEEFQVDDTAVALRIISEKASKRIAKHAFETAMDRSQQKRVTCVHKSNVMKITDGLFSRVCEDVSKDYPDVTFDQMYVDACAMNLIRAPHEFDVIVTTNLFGDILSDESSQVVGGLGMAPAANLGDNFGLFEPVHGAAFDIAGKQIANPSSFILSTKMMLDWLGSKHNDSECISAGKKLEDVVLDLIKSGITTKDIGGEKSTQEFTKEITNRL

SEQ ID NO: 87122 - protein, 270 aa, Unknown
  Bacterial polypetide isolated from the Sargasso Sea
CLKAPVGESAKDVIVALRQKLDLYANIRPAKSYPNTPALRDDIDLVIVRENTEDLYTGQEFQVDDTAVALRIISEKASKRIAKHAFETAMDRNQQKRVTCVHKSNVMKMTDGLFARACEDVSKDYPDVTFDQMYVDACSMNLIRAPHEFDVIVTTNLFGDILSDESSQVVGGLGMAPAANLGDNFGLFEPVHGAAFDIAGKQIANPSSFILSTKMMLDWLGSKHNDSECISAGKKLETVVLDLIKSGITTKDIGGEKSTQEFTKEITSRL

SEQ ID NO: 87123 - protein, 229 aa, Unknown
  Bacterial polypetide isolated from the Sargasso Sea
FLITLRNSIYGVAYIITFSITNITFVLSIQNTNVANTLVMIALAPMLSAIFGAIFLKEKPDRNTLVAIAITFLSVLYIFYDSVKLGNIFGDILGFITACGLAAGATIIRAGKSLNLVPSAVVGKLVVALVALFFIDTFELKDNDIYIIPAMCILCVAIPFVLVTLAPRYITGAEVNLFFLMETVLGPIWVWMVVKEQPSMDTIQGGVIIILTIAIHSFLAIKKTQTKTT

SEQ ID NO: 87124 - protein, 47 aa, Unknown
  Bacterial polypetide isolated from the Sargasso Sea
MIKIKKRKFLLLPGDGIGPEVIGEVKKIIQWFNKNKSLDFEIEEGLA

SEQ ID NO: 87125 - protein, 142 aa, Unknown
  Bacterial polypetide isolated from the Sargasso Sea
MSKEFNITLLPGDGTGPEVVNEAVKVLENTSEQYKIKFNFTNNDLGGDRYLNTGELVTEKDIKQFKNSDAVLLGAIGHPDVKPGILEQGILLKLRKEFDQYINLRPVVLYPGVETPLANKSPEDIDFVVVRENTEGLYAGAG

SEQ ID NO: 87126 - protein, 42 aa, Unknown
  Bacterial polypetide isolated from the Sargasso Sea
MKNYKIAVLAGDGIGPEVMVQALKVLAVVSDKFGFSIQSTEA

SEQ ID NO: 87127 - protein, 124 aa, Unknown
  Bacterial polypetide isolated from the Sargasso Sea
MSHKIAVIGGDGIGPEVTAVALDVMAAAGADLATTEFRLGGFRYLEDGVVLPDDTLEELRAYDAILLGAVGTPEVPPGVIERGLLLKARFELDLYVNLRPFVLKDGHEFVVIRENTEGTYAGEG

SEQ ID NO: 87128 - protein, 395 aa, Unknown
  Bacterial polypetide isolated from the Sargasso Sea
MAPYRLALLPGDGTGREVMAEVKRILSTFQDSGAISLETTEIPCGGQHYLDTGEEWPAGSFEFCRDESDAIVVGAVGWPGATLPNGDIAGGQALLGLRSALDLYANVRPVKLYKGVKHKVHGSFIDVWDNELVDIVMVRENTEGLYHALLRRSGMAARGEERDEPLVIDGFPGLEGEVGWDVRPISRKGSERVIRFSFELAKRRKSRLGSVQKVTCVDKSNVTRGCRLFRDVFREVSSEYQGIVTNEAFIDAFTMWLVRSPEDLDVVVLPNMFGDIATDLASVLQGGMGMAASANIGDEHMLFEPVHGSSPKYAGQNKVNPIAAISSVQLMFDSLGLKNEDQEATLCAEVIERAISEHMSSGGPVTYDLGGKASTTEVGEAIASRCAAILSELGS

SEQ ID NO: 87129 - protein, 284 aa, Unknown
  Bacterial polypetide isolated from the Sargasso Sea
SAGVPDIPDHLTLWGLRLKICQGLDQYANLRPVKLLPGISSPLKNVEEKDIDWSFIRENSEGEYSGIGGRSHKGYSNDTAMDVTLFTKQGVERIQRFAFEIARSRPRKLLTLVTKSNAQRHGMVMWDEIFKEISEDYRDVNTDKMLVDAMTTRMVLDPKSIDTVVASNLHADILTDLAASLSGSMGIAPTANLDPDKRHPSMFEPIHGSAFNIMGKGIANPIGSYWSAVMMLENLGELQAAQKLMFAIEKLTADKKVLPKDLGGKSTTKQITKAMIDILSGKNN

SEQ ID NO: 87130 - protein, 60 aa, Unknown
  Bacterial polypetide isolated from the Sargasso Sea
MSNKTRKILLLPGDGIGPEVVAEVRRILEWMNKTKSLDFVLSQDLIGGASIDANKVQLLM

SEQ ID NO: 87131 - protein, 170 aa, Unknown
  Bacterial polypetide isolated from the Sargasso Sea
MRSSNHFRIAVLPGDGIGKEVMSACVEVLDTIQRRVGGFKLDLEYIYAGAEYFLEQGVDITEEAMDKVNQADAILLGAMGLQDVRLPNGTEIAPHLKIRTELGLFAGVRPVKAYPNTPQRLADARSQEIDFVVLRESTEGLFAEREKGVILEDREARDTMVITRQTCENL

SEQ ID NO: 87132 - protein, 240 aa, Unknown
  Bacterial polypetide isolated from the Sargasso Sea
MEFFRYIRSLFLLSLPLIGGHIAQILIGVGDTLIVGRYSTEALAALVLGTTIFFIIFIFGAGFSFAAMALVSTANSEAKTTKIRRITRMALWLSLAFGLVVLPIFIFAERILLFLGQEFNLAVLASQYLVFSGFAMFPALSASVLRCYLAGMEYVKVTFYISIIAVALNLLINFLLVFGVFGLPELGIVGAGVATVFVNLFMFISFLIYAKIKLPQHNLFVRFWRLDRGVIGVVLKMGSA

SEQ ID NO: 87133 - protein, 263 aa, Unknown
  Bacterial polypetide isolated from the Sargasso Sea
MKKNKYSIAVIPGDGIGKEVIPEGLRCLETVGPKFGINFEFTEYTFSSVEYYEEHGQMLPDDWEERLKSHDAIFFGAVGWPEKLPDHISLWGSLIKFRRTFDQYVNLRPVKLMPGVPSPLAGRKPGDIDFMIVRENTEGEYSSLGGRMFDGTEREFVVQETVMTRTGVDRILDYAFKLAQKRKEKHLTSATKSNGISISMPYWDERVDEMKINFPDVRVDQYHIDILAAHFVLNPDKFDVVVAFNLFGDILSDLGPACTGTIG

SEQ ID NO: 87134 - protein, 364 aa, Unknown
  Bacterial polypetide isolated from the Sargasso Sea
MKTYRIATIPGDGIGKEVVPAGQRVLEAIAARSDAFRFEFENFGWGGDFYREHGVMMPADGLDAIRNKDAILFGSAGDPHIPDHVTLWGLRLKICQGFDQYANVRPTRILAGIDAPLKRCGPKDLDWVIVRENSEGEYSGVGGRAHQGHPIEVATDVSMMTRAGVERILRFAFRLAQSRPRKLLTVITKSNAQRHAMVMWDEIALEVSKEFPDVKWDKELVDAATARMVNRPATLDTIVATNLHADILSDLAAALAGSLGIAPTANLDPERRYPSMFEPIHGSAFDIMGKGLANPVGTFWSVVMMLEHLGEVAAAQQLMSAIERITDDPALHTGDLGGTATTVQVTDAVCAILAAEPAAQFKAA

SEQ ID NO: 87135 - protein, 58 aa, Unknown
  Bacterial polypetide isolated from the Sargasso Sea
MSKKKTILFLPGDGIGPEVSNSAKSILESINEIYNLDFVIEEALVGGSAYDLTGVLYP

SEQ ID NO: 87136 - protein, 395 aa, Unknown
  Bacterial polypetide isolated from the Sargasso Sea
MAPYRLALLPGDGTGREVMEEVKRILSTFHDSGVISLETTEIPCGGQHYLDTGEEWPTGSFEYCRDESDAIVVGAVGWPGATLPNGDIAGGQALLGLRSALDLYANVRPVKLYKGVKHKVHGSFIDVWDDELVDIVMVRENTEGLYHALLRRSGMAARGEERDEPLVIDGFPGLEGEVGWDVRPISRKGSERVIRFSFELAKRRESRLGSVQKVTCVDKSNVTRGCRLFRDVFREVSSEYQSIVTNEAFIDAFTMWLVRSPEDLDVVVLPNMFGDIATDLASVLQGGMGMAASANIGDEHMLFEPVHGSSPKYAGQNKVNPIAAISSVQLMFDSLGLKNDDQEATLCAEVIERAISEHMSSGGPVTYDLGGKASTTEVGEAIASRCVGILTELGS

SEQ ID NO: 87137 - protein, 68 aa, Unknown
  Bacterial polypetide isolated from the Sargasso Sea
MIKVKKRKILLLPGDGIGPEVIGEVKKIINWFNDKKSLDFEMDEDLAGGCSYDKHGTPITDEVFYKAL

SEQ ID NO: 87138 - protein, 27 aa, Unknown
  Bacterial polypetide isolated from the Sargasso Sea
MIKVKKRKILLLPGDGIGPEVIEEVKK

SEQ ID NO: 87139 - protein, 252 aa, Unknown
  Bacterial polypetide isolated from the Sargasso Sea
MYLKKINLKNKYALVTGAGKGLGRACSIALAEAGATIIGLSRTSSDLDKLEKDIKKVKSKLIKINCDVMNYSELQEKLKKIKIIDILVNNAGTNIPEPFEKIKQQSMNYLVDLNLKAAFNVAQLVVKKMIKNKKRGGSIINMSSQLGHVGMSGRNIYNMTKFGIEGLTKGMGVELATKNIRVNTVAPTFVETPMVKKFFKNKKFKNLALGNIPMGKAAKESDVATAVCFLASDAAAMITGSSILIDGGWTAK

SEQ ID NO: 87140 - protein, 179 aa, Unknown
  Bacterial polypetide isolated from the Sargasso Sea
AGALVEDASLPLFEQGGLIANTLSDVEAAHTHRHWLREQPNDYDFATRRRLMAASLISGAMYTKLSRFRMLMRRDVMSALHQFDVIVTPAQAGGAPLIANETNLTSKEAVISQFFGLRSHRSPFNLSGVPAMAIPCGFTGDGMPVSIQIAGQPFAENLLFQFGLEFQNRTDWHLQRPDL

SEQ ID NO: 87141 - protein, 138 aa, Unknown
  Bacterial polypetide isolated from the Sargasso Sea
MSNKKILILPGDGIGNEVMAEVLKIIDWMEKTKSLSFDISERLVGGTAYDKEGNSISDETMQLAMDCDAVLFGAVGGAKWDNVERDKRPEAALLRLRKDLDLFANLRPAVVLDALSDSSSLKSDLVKGLDILIIRELT

SEQ ID NO: 87142 - protein, 245 aa, Unknown
  Bacterial polypetide isolated from the Sargasso Sea
MNITELIVCISIGMCLGSFASVLIYRIPRNINLLLPRSHCPYCNNTLKAMHLVPIFSYVLLRGKCAFCSSKISRLYPVNEFFITAMVVIITYHAGPYSIHGWLAITLILCLYAQAVIDFKTLSLSTYLSVIIGLLGFAFNYLHFFTSIIDSLAGLILGYCSLWLINYIYKKIKGTDGIGSGDYLLLGAVGGVFGSSSLGIILLSSSIISIGLHFFTRTIHGERIPLGTGIALSSIIFLVLIILNK

SEQ ID NO: 87143 - protein, 437 aa, Unknown
  Bacterial polypetide isolated from the Sargasso Sea
MFLKIAGTNEFFRYIRSLFLLSLPLIGGHIAQILIGVGDTLIVGRYSTEALAALVLGTTIFFIIFILGAGFSFAAMALVSTANTEGDNTKIRRITRMALWLSLAFGLIVSPIFVFSERLLLFLGQEFNLAALASDYLIFSGIAIFPALSASVLRCYLAGMEYIKVTFYISIIAVLLNLLVNYLLVFGMFGLPELGIVGAGIATVFVNLFMFISFVIYAKIKLPQHNLFVRFWRPDRGVIGLVLKMGSAIGITSLAEAGLFSASSIMMGWVGQLELAAHGIALQLASITFMLHLGLSDAATIRVCSALGKKDKIEIIIECWAAIVISLGLSFLAILIFLGFPKFLISAFLNSEELNANLIVELGISLLALAALFQLVDGGQALAIHLLRGLHDTTIPMYLAVISYWIIGLPSGYILTFHYNFDAQGIWLGLVIGLAFA

SEQ ID NO: 87144 - protein, 95 aa, Unknown
  Bacterial polypetide isolated from the Sargasso Sea
MNLKIALLPGDGIGPEVIKEAVKICNAISKKFNHSITWQEGLVGAAAIDKTGDPYPDTTHEICINSDAVLFGAVGDPKFDNNPSLSVRPEEGLLR

SEQ ID NO: 87145 - protein, 252 aa, Unknown
  Bacterial polypetide isolated from the Sargasso Sea
MYLKRINLKNKYALVTGAGKGLGRACSIALAEAGATIIGLSRTSSDLDKLEKDIKKVKSKLIKINCDVMNYNELQEKLKKIKIIDILVNNAGTNIPEPFEKIKQQSMNYLVDLNLKAAFNVAQLVVKKMIKNKKRGGSIINMSSQLGHVGMSGRNIYNMTKFGIEGLTKGMGVELATKNIRVNTVAPTFVETPMVKKFFKNKKFKNLALGNIPMGKAAKESDVATAVCFLASDAAAMITGSSILIDGGWTAK

SEQ ID NO: 87146 - protein, 160 aa, Unknown
  Bacterial polypetide isolated from the Sargasso Sea
MVAIITYHAGPYSIHGWLAITLILCLYVQAVIDFKILSLSTYLSGIIGLLGFALNYLNFFTSIIDSLLGLTLGYCSLWLINFIYKKLKGFDGIGSGDYLLLGAVGGVFGSSSLGIILLSSSIISIGLHFFTKIIHGERIPLGTGISLSSIIFLVLIILNK

SEQ ID NO: 87147 - protein, 360 aa, Unknown
  Bacterial polypetide isolated from the Sargasso Sea
MKTYRIATIPGDGIGKEVVPAAKQVLEALARGSDRFAFEFEDFDWGADYYRQHGAMMPADGLDALRGKDAILFGSAGDPDVPDHVTLWGLRLKICQGFDQYANVRPTRILPGIDAPLKRCGPDDLNWVIVRENSEGEYAGVGGRVHQGHPIEAATDVSILTRAGVERIMRFAFRLAQSRPRKLLTVITKSNAQRHAMVMWDEIAKQIAREFPDVTWDKELVDAATARMVNRPASLDTIVATNLHADILSDLAAALAGSLGIAPTGNIDPERRYPSMFEPIHGSAFDIMGKGLANPVGTFWSVVMLLEHLGETAAAARVMQAIEAVTADPSLHTRDLGGSATTAQVTAAVCERVANAVVAA

SEQ ID NO: 87148 - protein, 60 aa, Unknown
  Bacterial polypetide isolated from the Sargasso Sea
MIKVKKRRILLLPGDGIGPEVIAEVRKIIEWLNKNRSLDFEIDEDLVGGAAYDKHGTTNY

SEQ ID NO: 87149 - protein, 211 aa, Unknown
  Bacterial polypetide isolated from the Sargasso Sea
MKKYKIVLLSGDGIGPEISEVSKKVLKKLSKNHNFDIEIIEKLFGGIAYEKYGTPAPDETLDQCKKSDAVLLACVGDIKYDSLERELRPESGLLKLRSALNLFANIRPVKIRKSLLDSSTLKKEIVEHVDLIVVRELIGGIYFGKPRGHITNTKIPKAFNTMVYDSAEIERIAEIAIKIANQRNKKICSVDKSNVLEGSQLWRDTVSNITS

SEQ ID NO: 87150 - protein, 95 aa, Unknown
  Bacterial polypetide isolated from the Sargasso Sea
MDHKILALGGDGIGPEVLDFGLHLIYKIQDIFGINIKIEHDLIGGACWDKFQVFCKNETVEKAKNADAILVGAVGGPKWDNIKIKGTPEEQDGLM

SEQ ID NO: 87151 - protein, 107 aa, Unknown
  Bacterial polypetide isolated from the Sargasso Sea
MIKVKKRKILLLPGDGIGPEVIAEVKKIINWFNDKKSLDFEIDQELVGGCSYDKHGTPITDEVFYKALESEVIMLGAVGGPTWDNLRIFQKTRKSIIKTQKRIKAFC

SEQ ID NO: 87152 - protein, 239 aa, Unknown
  Bacterial polypetide isolated from the Sargasso Sea
TPLLNKSPEDINFTVVRENTEGLYAGAGGYIHYGTESEVATQESINTWKAINRCIVYAFEYAKQNDRKKITLCAKTNVLTYAHDLWERIFYDVAENYPEIETDYGHVDAVCMWMVKNPEWFDVIVTDNMFGDIITDLGAMIQGGMGIAAGGNINPQGVSMFEPIGGSAPKYTGKNIINPLASIAAASMMLNQLGEEKYADDIENAIISTAQKLDSLSAGKMGMSTSEVGDTVLNSILNN

SEQ ID NO: 87153 - protein, 289 aa, Unknown
  Bacterial polypetide isolated from the Sargasso Sea
MRKNKYSIAVIEGDGIGKEVMPEGIRCLEAVSSKYGINLEFKNYDFSSVDYYEKHGVMLPEDWKEKLSSHDAIFFGAVGWPEKVPDHISLWGSLLKFRREFDQYINLRPVKLMPGVPSPLSGKKPGDIDFLIVRENTEGEYSSIGGKMFEGTEREFVVQETVMTKVGIERVLDFAFKLAQKRKPKHITSATKSNGISITMPYWDELFEKMSKSYPDIKTDQYHIDILCAHFVLNPDKFDVIVASNLFGDILSDLGPACTGTIGIAPSGNINPENNHPSLFEPVHGSAPD

SEQ ID NO: 87154 - protein, 96 aa, Unknown
  Bacterial polypetide isolated from the Sargasso Sea
MIKVKKRKILLLPGDGIGPEVITEVKKIINWFNDKKSLDFEIDQELVGGCSYDKHGTPITDEVFYKALESEVIMLGAVGGPTWDNLEFSKKPERAL

SEQ ID NO: 87155 - protein, 190 aa, Unknown
  Bacterial polypetide isolated from the Sargasso Sea
MSNKKILVLPGDGIGNEVMAEVLNIIDWLSKTRSMSFDISERLVGGTAYDKEGDSISDSTMQEALDSDAVLFGAVGGPQWDKVEREKRPEAALLRLRKELDLFANLRPAVVLDALAESSSLKLDLVKGLDILIVRELTSGVYFGQPRGISKISDTESKAIDTQAYTTSEIERVSRVAFELAKLRKNKVSS

SEQ ID NO: 87156 - protein, 137 aa, Unknown
  Bacterial polypetide isolated from the Sargasso Sea
AVTALLVREPEEFDVIVTTNMFGDILSDLTAELAGSLGMGAALNAGSLKAMAQAAHGSAPSLSGKNLANPCGLILSSAMLLQWLGNRDQNPELIQAADAIESTVYRTLEFRGRSQDLGGSLSTRELTDAMLMELQNS

SEQ ID NO: 87157 - protein, 296 aa, Unknown
  Bacterial polypetide isolated from the Sargasso Sea
MEYIHAGAEYFLEQGVDITEEAMGKVKQADAILLGAMGLQDVRLPNGTEIAPHLKIRTELGLFAGLRPVKAYPNTPQSLADARSQEIDFVVLRESTEGLFAEREKGVILEDREARDTLVITRQTCENLFDFAFKLSQRRKQKGGKGRVTCVDKSNVLRSMVFFRKIFDERALLFPDIKSDYNYVDAQALDLIRKPWEFDVLVMENMFADILSDLGGGLVGGMGMAPCAEIGLKHGLFQPAHGSAPDIMGKDLANPTAMFLSAAMMLEWLGQKYQNESLMNAARLLESKIDEGFRLK

SEQ ID NO: 87158 - protein, 281 aa, Unknown
  Bacterial polypetide isolated from the Sargasso Sea
MSKEFNITLFPGDGTGPEVVNEAVKVLENTSEQYKIKFNFTNNNLGGDRYLNTGELVTEKDIEQFKNSDAVLLGAIGHPDVKPGILEQGILLKLRKEFDQYINLRPVVLYPGVETPLANKSPEDINFVVVRENTEGLYAGAGGYIHYGTENEIATQESINSYYAIHRCIKYAFEYTKNNNRKKITLCAKTNVLTYAHDLWERIFYDVAKDYPEIETDYGHVDAVCMWMVKNPEWFDVIVTDNMFGDIITDLGAMIQGGMGIAAGGNINPEGVSMFEPIGGS

SEQ ID NO: 87159 - protein, 78 aa, Unknown
  Bacterial polypetide isolated from the Sargasso Sea
DIAGQGIANPIAQILSAAMMLRFSMNLNDAADAIEKAVVATLEAGVLTGELLPSDKRSQAASTSQVGDEIVKQLMAQE

SEQ ID NO: 87160 - protein, 233 aa, Unknown
  Bacterial polypetide isolated from the Sargasso Sea
MSNKKVLILPGDGIGNEVMAEVLKIIDWMEKTKSMSFDISERLVGGAAYDKEGNSISDETMQIALNSDAVLFGAVGGSKWDNVEREKRPEAALLRLRKDLDLFANLRPAVVLDALAESSTLKLDLVKGLDILIVRELTSGVYFGQPRGISKISDTESKAIDTQVYTTSEIERVSRVAFDLAKLRRNKVSSAEKSNVMETGLFWRNIVTDLHKKEYASVNLEHILADNCAMQLV

SEQ ID NO: 87161 - protein, 100 aa, Unknown
  Bacterial polypetide isolated from the Sargasso Sea
MIKVKDRKLLLLPGDGIGPEVIKEVKKIIEWFNKHKSLDFKIEEGLVGGASYDKHKNPITDEVFYKALESEAVILGAVGGPKYDNLEFSKRPERALFKIK

SEQ ID NO: 87162 - protein, 110 aa, Unknown
  Bacterial polypetide isolated from the Sargasso Sea
MTQQRITVIRGDGIGPDIIDATTKILDKVGCDFAYDYADAGLVALEEHGELLPQETLDLIAKNKVALKGPLTTPVGEGFTSINVSLRKQFKLYANLRPVMSFKGTKARYE

SEQ ID NO: 87163 - protein, 128 aa, Unknown
  Bacterial polypetide isolated from the Sargasso Sea
MKDIDLLLLSGDGVGPEIMESAISLLEKIQSSFKINFNLIEGLIGGASIDAHGLPVSDETLNQASQADSILFGAVGGPKWDSLPPNEKPEKGLLELRSSLGLFANLRPAILFDSSLEASSLKPDIIKD

SEQ ID NO: 87164 - protein, 84 aa, Unknown
  Bacterial polypetide isolated from the Sargasso Sea
PAICFKQLVDSSTLKPEIVSGLDIMIVRELTGGLYFGEPRGIEPMENIQRKGVNTHTYTTSEIHRIARVAFDLAKKRRNKVTSC

SEQ ID NO: 87165 - protein, 230 aa, Unknown
  Bacterial polypetide isolated from the Sargasso Sea
DINFTVVRENTEGLYAGAGGYIHYGTESEVATQESINTWKAINRCIVYAFEYAKQNGRKKITLCAKTNVLTYAHDLWERIFYDVAENYPDIETDYGHVDAVCMWMVKNPEWFDVIVTDNMFGDIITDLGAMIQGGMGIAAGGNINPEGVSMFEPIGGSAPKYTGKNIINPLASIAAASMMLNQLGEEKYADDIENAIISTAQKLDSLSAGKMGMSTSEVGDTVLNSILNN

SEQ ID NO: 87166 - protein, 76 aa, Unknown
  Bacterial polypetide isolated from the Sargasso Sea
IAGTDSANPLATILSAAMLLRYSLNAPEAAAAIEGAVAAVLTQGYRTADLIVDGNHAAAIGTRAMGDAVVAALQGH

SEQ ID NO: 87167 - protein, 128 aa, Unknown
  Bacterial polypetide isolated from the Sargasso Sea
SFDVIVTTNMFGDILSDLATELSGSLGLAGSLNAGDNYAMAQAQHGSATDIAGQNIANPISLILSSAMLLNWLGKKRKVENLVLASSLIDKSVTKLLENQTRLTKDLGGTSSTAEVTKNLINILKHLI

SEQ ID NO: 87168 - protein, 285 aa, Unknown
  Bacterial polypetide isolated from the Sargasso Sea
RDGTVLPDSVLEEWRDLYVLYLGAVGTPDVPPGLIERGLLLKMRFELDLYINLRPFVVTGGEGDSGHDFMVIRENTEGTYAGEGGFLRKGTPQEIATQGSVNTRHGVERCIRYAFELASTREQKHLTLVHKTNVLTFAGDLWERTFHMVGEEYPNIETAYNHVDAACIYFVENPQRYDVIVTDNLFGDILTDLGGAISGGIGLASSANLNPEKTSPSMFEPVHGSAPDIVGTGKANPTAAILSGALMLDFLNENEAAQRIEKACADPKTQSGTTTEIGDAIAAQV

SEQ ID NO: 87169 - protein, 218 aa, Unknown
  Bacterial polypetide isolated from the Sargasso Sea
MSNKKILILPGDGIGNEVMSEVLKIIDWMEKTKSMSFDISERLVGGTAYDKEGDSISDETMQVAMDSDAVLFGAVGGSKWDNVEREKRPEAALLRLRKDLDLFANLRPAVVLDALAEASSLKLDLVKGLDILIVRELTSGVYFGQPRGISKISDTESKAIDTQVYTTSEIDRVSRVAFDLAKVRRNKVSSAEKSNVMETGLFWRKTVTELHKKEYESV

SEQ ID NO: 87170 - protein, 238 aa, Unknown
  Bacterial polypetide isolated from the Sargasso Sea
NFDLVIVRENTEGFYADRNMHLGIGEFMPHPDTALAVGVFTRNACERIARTAFELAMIRKKKVSLIHKANVLRTTYGLFLECCEKVSRNFPEVVINDFHIDAVAALLVREPEEFDVIVTTNMFGDILSDLTAELAGSLGMGAALNAGNLKAMAQAAHGSAPSLRGKNLANPCGLILSSAMLLQWLGNRDQNPELIQAADAIERTVYRTLEFRGRSQDLGGSLGTRELTDAMLMELQNS

SEQ ID NO: 87171 - protein, 86 aa, Unknown
  Bacterial polypetide isolated from the Sargasso Sea
MRAMYEPIHGSAPDIAGKGIANPIATILSFAMALKYSLNLHKEANALQKAVQDVLNEGLRTRDIISKGKKEISTSRMGDAIISKLQ

SEQ ID NO: 87172 - protein, 214 aa, Unknown
  Bacterial polypetide isolated from the Sargasso Sea
MKSENILILPGDGVGPEIMKEAIKIIDTLNTSKICKIEYESADIGGVAIDNHNTPLPNDTLKKAKASSSILLGAVGTKKHESNSNEMKPETGLLKIRKNLDLFINIRPVFLFDALLESSSLKKEYVSGLDIVIIRELVSDIYFGEPRGFSDDNTSAFNTMRYTKEEIERIATFAFELSQKRSSNLTSVDKANVLETSQLWRKVVSDIGENIKVL

SEQ ID NO: 87173 - protein, 295 aa, Unknown
  Bacterial polypetide isolated from the Sargasso Sea
RIIMKKHHYKIAVIAGDGIGKEVMPEAIRVLEKIAKRYNISFDFDHKDWSCERYHQFGSMMPENGLDEIQNHDSILLGAVGFPGVPDHISLWGLLIPIRRKFQQYVNLRPVYLLEGMKCPLAGREPGDIDFWIVRENNEGEYSEVGGRMFEGTDEEFAVQQSIFTRRGIDRIMRYAFELAKTRNRKHVTSATKSNGIIHSMPFWDERFDEISKDYPDIQTDKYHIDILTAHFVRNPDWFDVVVGSNLFGDILSDLGPAITGTIGIAPSANINPEREFPSCFEPVHGSAPRYSWKR

SEQ ID NO: 87174 - protein, 198 aa, Unknown
  Bacterial polypetide isolated from the Sargasso Sea
FDICSYNKDEIKRLAKKGFEMAMNRSKKLCCVDKANVLETSRLWRETVQEMEKDFPKVKVSYEFVDAVAMRLVQWPNSYDVLITENLFGDILTDEASVISGSMGLMPSASIGDKTSLFEPIHGSYPEVAGKYIANPLATILSAAMMFEDAFGLLEEGRAIRDAVNDSLKSKIVTKDLAIDKENFYKTNEVGEWICEKI

SEQ ID NO: 87175 - protein, 286 aa, Unknown
  Bacterial polypetide isolated from the Sargasso Sea
SPGGNTIAAAEHTIAMMLALSRNIPIANSSTFLGKWERKKFVGNELFKKKLGVVGLGKIGTHVAKVANALGMDVYGYDPFVSSERAQQLQVRLSELKTLFEESDYLTLHLPRTSETENLVNMKVLKSMKKNAKLINCARGGIIDEEALAEALNNSLIGGAAIDVFAKEPLDSNSPLLKVDKNLILTPHLGASTREAQENVAVDVAEQIRDVLLGLSARTAVNIPGLSPDIMDSLKPHLQLAETMGLLISQLSGGQIQKLEVRLQGEFVQHPSQPLIIASLKGLLSK

SEQ ID NO: 87176 - protein, 310 aa, Unknown
  Bacterial polypetide isolated from the Sargasso Sea
ESLGKHFQGSFEWIELPVGWQALEQNKPPLPRETLDELEKCDAWVMGPHDSASYPEAFQQSLNPSGAIRKHFDLYANIRPARTVKGLGDSRKNFDLVIVRENTEGFYADRNMHLGIGEFMPHPDTALAVGVFTRNACERIARTAFELAMIRKKKVSLIHKANVLRTTYGLFLECCEKVSRDFPEVVVNDFHIDAVAALLVREPQEFDVIVTTNMFGDILSDLTAELAGSLGMGAALNAGSLKAMAQAAHGSAPSLRGKNLANPCGLILSSAMLLQWLGNRDQNPGLIQASDAIESTVYRTLEFRGRSQDL

SEQ ID NO: 87177 - protein, 143 aa, Unknown
  Bacterial polypetide isolated from the Sargasso Sea
MNLKIALLPGDGIGPEVIKEAVKICNAISKKFNHSITWQEGLVGAAAIDKTGDPYPDTTHEICVNSDAVLFGAVGDPKFDNNPSLSVRPEEGLLRMRKKLGLYANLRPTFTFEYLLEMSPIKKSIVKRTDLIFVRELIGGIYL

SEQ ID NO: 87178 - protein, 150 aa, Unknown
  Bacterial polypetide isolated from the Sargasso Sea
KIKKKDIISKLKIINYFYRKKLKKKPKIAILGLNPHSHTTLKFSEEKKIILPAIKKLNKLSISVVGPLSPDTSFMFFKKNKIDVIFGMYHDQVLTPFKALYKFDAINITLGLPFIRVSPDHGTAKNIAGKNIANPKSLIESIKFFNSINI

SEQ ID NO: 87179 - protein, 168 aa, Unknown
  Bacterial polypetide isolated from the Sargasso Sea
MSKKKILILPGDGIGNEVMAEVFKIIDWMEKTKSMSFDISERLVGGTAYDKEGNSISDETMNVAMDSDAVLFGAVGGSKWDNVEREKRPEAALLRLRKELDLFANLRPAVVLDALVEASSLKLELVKGLDILIVRELTSGVYFGQPRGISKISDTESKAIDTQLYTTS

SEQ ID NO: 87180 - protein, 279 aa, Unknown
  Bacterial polypetide isolated from the Sargasso Sea
DILSQVAQVDQRIGISNSELASIIHDYDALMIRSGTQVTGDIINSSKKLRIIGRAGVGVDNVDVKAATQKGVLVVNSPGGNTIAAAEHTIAMMLALSRNIPIANSSTFLGKWERKKFVGNELFKKKLGVVGLGKIGTHVAKVANALGMDVYGYDPFVSSERAQQLQVKLSELKTLFAESDYVTLHLPRTSETENLVDIKVLKSMKNNAKLINCARGGIIDEEALAEALNNSLIGGAAIDVFSEEPLGSNSPLLKVDKNLILTPHLGASTREAQENVAVD

SEQ ID NO: 87181 - protein, 275 aa, Unknown
  Bacterial polypetide isolated from the Sargasso Sea
DAIFLGAIGLPEIRMNDGTEIAPHLRFREKFDLYAGVRPVKAYPNSPQKLKDENSDKINLVILRECTEGLFYTASVHNRNPVANNNEVHDVMKITRKTSTKLHKFAFNLARKRKLKGTLGKVTCVDKANVFKSQALFRKVFEEVKNNFPEVNSETCYVDAMALNLIRCPWEYDVLVMENIFGDILSDMGGGLVGGMGMASCAEIGDNHGLFQPAHGSAPDIMGKNMANPIATILSACMMLEYLAEKKNNQSANKAAQLIEKAIEYGFEKNLLRPQ

SEQ ID NO: 87182 - protein, 234 aa, Unknown
  Bacterial polypetide isolated from the Sargasso Sea
PEDINFVVVRENTEGLYAGAGGYIHYGTENEIATQESINSYYAIHRCIKYAFEYTKNNNRKKITLCAKTNVLTYAHDLWERIFYNVAKDYPDIETDYGHVDAICMWMVKNPEWFDVIVTDNMFGDIITDLGAMIQGGMGIAAGGNINPEGVSMFEPIGGSAPKYTNENVINPLACIGAAAMMVKQLGEPHYAENIEKAIIKTAIKLDSLSAGKMGMSTNEVGDSVVNYMQKIND

SEQ ID NO: 87183 - protein, 87 aa, Unknown
  Bacterial polypetide isolated from the Sargasso Sea
MPSNQRKILLLPGDGIGPEVVRETKKVIDWFNKKKSLDFKLDQGLIGGAAIDEHGVPITDEVFYKALESDAVIFGACGGPKYDKLEF

SEQ ID NO: 87184 - protein, 97 aa, Unknown
  Bacterial polypetide isolated from the Sargasso Sea
QLKRVPTLGLYEPAGGTAPDIAGKGIANPIAQILSAALMLRYSFAEEAAARAIEQAVASTLEQGIVTRDINSASNYGTADVGAAVIAALNAIDTKRA

SEQ ID NO: 87185 - protein, 199 aa, Unknown
  Bacterial polypetide isolated from the Sargasso Sea
CENLFDFAFKLSRRRKQKRGKGRVTCVDKSNVLRSMVFFRRIFDERALLFPDIQSEHNYVDAQALDLIRRPWEFDVLVMENMFADILSDLGGGLVGGMGMAPCAEIGINHGLFQPAHGSAPDIMEKDLANPTAMFLSAAMMLEWLGQKYQNESLLNAARLLENKIEEGFRLKRTQPKEFGGPHGCFEHTRNLLEIIENL

SEQ ID NO: 87186 - protein, 60 aa, Unknown
  Bacterial polypetide isolated from the Sargasso Sea
MDLFANLRPAMVFPALVDASSLKSSIISGLDILILRELTGGIYFAEPRGIEKSIPLQKKV

SEQ ID NO: 87187 - protein, 89 aa, Unknown
  Bacterial polypetide isolated from the Sargasso Sea
IGESMGLFEPIHGSFPQATNKNIANPVAAILSVSMMLNYLNLGKGAKMIEKAVENSLINKVSTADINDISPSKTSEVGDYISNFIRENN

SEQ ID NO: 87188 - protein, 84 aa, Unknown
  Bacterial polypetide isolated from the Sargasso Sea
MIKVKKRKILLLPGDGIGPEVIAEVKKIINWFNDKKSLDFEIDQELVGGCSYDKHGTPITDEVFYKALESEVIMLGAVGGPTWD

SEQ ID NO: 87189 - protein, 115 aa, Unknown
  Bacterial polypetide isolated from the Sargasso Sea
MTKAKKRKILLLPGDGIGPEVIGEVKKVIEWFNKNKSLDFVFEEELIGGASIDANKIPITDEVFYKSLESDAVILGACGGPKWDNLEFSKKPERALLKLRKELKLFANLRPANLF

SEQ ID NO: 87190 - protein, 278 aa, Unknown
  Bacterial polypetide isolated from the Sargasso Sea
LKLCSEVDGIILGPVDHNNYPPKSEGGFNPSGELRTKLKLYSNIRPAKAFKGTKCILDKIDLVIVRENTEGFYADRNMFSGNGELEIEEGTGISIRKITKKASENIAKRGFEIAKLMNKNKKVNVHAIHKANVLRLTDGIFLNACRNISKKYPEINYHEMLVDAATAHMVRNPEQFDVLITTNMFGDILSDLASELSGSLGLSGSLNVGDTIPMAQAQHGAATDIVNKGIANPISLIFSTAMLLDWLGKQKGQEIYIKANQLIYRVVENILEENKYLT

SEQ ID NO: 87191 - protein, 90 aa, Unknown
  Bacterial polypetide isolated from the Sargasso Sea
KDGEMRAMYEPIHGSAPDIAGKGLANPIATILSFAMALKYSLDLDNEADALEKAVQDVLNDGLRTKDILSKGKKEVSTSEMGSAIISKLQ

SEQ ID NO: 87192 - protein, 200 aa, Unknown
  Bacterial polypetide isolated from the Sargasso Sea
MSNKKILILPGDGIGNEVMAEVFKIIDWMEKTKSMSFDISERLVGGTAYDKEGDSISDETMQVALSSDAVLFGAVGGAKWDNVEREKRPEAALLRLRKDLDLFANLRPAVVLDALAEASSLKVDLVKGLDILIVRELTSGVYFGQPRGISKISDTESKAIDTQVYTTSEIERVSRVAFDLAKLRSNKVSSAEKSNVMETG

SEQ ID NO: 87193 - protein, 143 aa, Unknown
  Bacterial polypetide isolated from the Sargasso Sea
MNFKIALLSGDGIGPEVTDESLKILDAVSKKYGHKFEYDYQDVGGISIDKHNTAITEEALSRCLESQAVLFGSVGGPKWDDPNSDVRPEDGILKLRKELDLFANIRPAKVYPALSNSSPLKKEILENVDFIIIRRINFGIIFW

SEQ ID NO: 87194 - protein, 78 aa, Unknown
  Bacterial polypetide isolated from the Sargasso Sea
MPSNSRKILLLPGDGIGPEVVSETKKVIDWFNKKKSLDFKIDQGLIGGAAIDEHGVPITDEVFYQALESDAVIFGACG

SEQ ID NO: 87195 - protein, 114 aa, Unknown
  Bacterial polypetide isolated from the Sargasso Sea
YRDQASMLTGSLGLLPSASLGAKNKDGEMRAMYEPIHGSAPDIAGKGVANPIATILSFAMALRYSLDLDKEAEALEKAVQSVLNEGLRTKDILSKGMKEVSTSEMGDAIISKLQ

SEQ ID NO: 87196 - protein, 145 aa, Unknown
  Bacterial polypetide isolated from the Sargasso Sea
YLEIETDYGHVDAVCMWMVKNPEWFDVIVTDNMFGDIITDLGAMIQGGMGIAAGGNINPQGISMFEPIGGSAPKYTNKNVINPLACIGAAAMMVKQLGGENYAEDIEKAIIETAIKLDSLSAGKMGMSTSEVGDSVVNYMQQIND

SEQ ID NO: 87197 - protein, 139 aa, Unknown
  Bacterial polypetide isolated from the Sargasso Sea
MKILVLPGDGVGPEITLEARKVINKISNIFNLNIEIEEALFGGIAVDKFDSPYPEETKIKVKESDAVLLGAVGGIKYDILPKEKKPESGLLSLRKESNLFINIRPIISFPELANSSSVKSEYINNLDIIIIRELISGLY

SEQ ID NO: 87198 - protein, 126 aa, Unknown
  Bacterial polypetide isolated from the Sargasso Sea
MSNKKILILPGDGIGNEVMSEVLKIIDWMEKTKSMSFDITERLVGGTAYDKEGDSISDETMQIALDSDAVLFGAVGGSKWDNVERDKRPEAALLRLRKDLDLFANLRPAVVLDALAGASSLKFRFS

SEQ ID NO: 87199 - protein, 298 aa, Unknown
  Bacterial polypetide isolated from the Sargasso Sea
VNETIKVLEHTKSKFNIEFDFVENDLGGDRYLKSGDLVTDSDIEQLSKSDSILLGAIGHPDVKPGILEQGILLKLRKEFDQYINLRPVVLYEGVETPLANKTPDDINFVVVRENTEGLYAGAGGYIHYGTDKEVATQESINTRSAIQRCIEYAFDYTSKNNRKKITLCAKTNVLTYAHDLWERVFYEVAEKYPDIETDYGHVDAVCMWMVKNPEWFDVIVTDNMFGDIITDLGAMIQGGMGIAAGGNINPNGVSMFEPIGGSAPKYTGKNVINPLACIAAASMMLDVLGEKEYASDIE

SEQ ID NO: 87200 - protein, 75 aa, Unknown
  Bacterial polypetide isolated from the Sargasso Sea
MTTNQKKILLLPGDGIGPEVVGETGKVIDWFNKKKSLDFKIDQDLIGGAAIDKHGVPITDEVFYKALESDAVIVG

SEQ ID NO: 87201 - protein, 140 aa, Unknown
  Bacterial polypetide isolated from the Sargasso Sea
MTKAKKRKILLLPGDGIGPEVIGEVKKVIEWFNKNKSLDFVFEEELIGGASIDANKIPITDEVFYKSLESDAVILGACGGPKWDNLEFSKKPERALLKLRKELKLFANLRPAICFKQLVDSSTLKTRNSVWFRHYDCKRV

SEQ ID NO: 87202 - protein, 146 aa, Unknown
  Bacterial polypetide isolated from the Sargasso Sea
SVDYPEIETNSLLIDAACMDFIRKPKDFDVVVASNLFGDILTDIGAMITGGLGLASSGNISLNKNNPSMFEPTHGSAPDIAGKNLANPIAQILTGAMMLSHLGEDKAANDIREAVVKTLKDGNHLTSDLGGTSKTDQCTNEIIRNI

SEQ ID NO: 87203 - protein, 141 aa, Unknown
  Bacterial polypetide isolated from the Sargasso Sea
MSNKKILILPGDGIGNEVMREVLNIIDWLTKKRSMSFDISERLVGGTAYDKEGDSISETTMQEALDSDAVLFGAVGGPKWDNVEREKRPEAALLKLRKELDLFANLRPAVVFNALAESSPLKLNLVKDLDILILRELTSGV

SEQ ID NO: 87204 - protein, 38 aa, Unknown
  Bacterial polypetide isolated from the Sargasso Sea
LTGGIYFGEPRGIKPIENGERRGVNTHVYTTKKIKRIA

SEQ ID NO: 87205 - protein, 41 aa, Unknown
  Bacterial polypetide isolated from the Sargasso Sea
MGKSSLLILPGDGIGPEVMVEVRKIIDWFGSNRGLDFDVIE

SEQ ID NO: 87206 - protein, 265 aa, Unknown
  Bacterial polypetide isolated from the Sargasso Sea
MTQTITVIRGDGIGPEIMDATLFVLDKLGAGLSYEFADAGLAALEKHGELIPASTLESIKKNKVALKSPLTTPVGGGFSSINVALRRQFDLYANVRPAISFPNTKSRYENVDLITVRENTEGAYLSEGQEVSADGETAFSGTRITRKGSERIVRYAFELARSTGRKKVTAVHKANIIKSTSGLFLNVAREVAAKYPEIEFQEMIVDNACMQLVMRPEQFDVIVTTNLFGDIISDLCAGLVGGLGLAPGANIGETAAIFEAVHGTA

SEQ ID NO: 87207 - protein, 121 aa, Unknown
  Bacterial polypetide isolated from the Sargasso Sea
MSKIFKLLILPGDGIGPEVMAEVTKLILAVEQSSGVKFEITYDDIGGAAYDRYGKPLADTTLEIAKQSHAVLLGAVGGEKWDDLDFSLKPEQGLLRIRKELELFATYDQLCALSLWLKHHH

SEQ ID NO: 87208 - protein, 96 aa, Unknown
  Bacterial polypetide isolated from the Sargasso Sea
TIGIAPSGNIIQKNKYPSLFEPVHGSAPDIAGKGVANPVGQIWSGAMMLDYLGEKEAANSIVTAIEKSLKNEKNRTKDLGGESNTIECSKSILSNL

SEQ ID NO: 87209 - protein, 60 aa, Unknown
  Bacterial polypetide isolated from the Sargasso Sea
MDYLNQLLYEPVHGSAPDIYGQGIANPLASILSFSMALKYSFGRNKDSKLLEDSISQSFR

SEQ ID NO: 87210 - protein, 121 aa, Unknown
  Bacterial polypetide isolated from the Sargasso Sea
VIVASNLFGDILSDIAATLTGSIGMLPSASLDSSFKGMYEPCHGSAPDIANQDLANPLAMIGSLSMALRYSLEEETVANKIDTAIKKFIQKGFRTRDIATDVNYLKTSEVAEKIIEILENE

SEQ ID NO: 87211 - protein, 150 aa, Unknown
  Bacterial polypetide isolated from the Sargasso Sea
MTSNKKIMVLPGDGVGPEVVDETKKILDWFAKHQGLNFDIQESLVGGAAYEKYGVPLTDETLSDAMEADAILFGSVGVPQYDEIDFEKRPERGLLKLRKEMDLFANLRPAIVFPALANSSTLKSEIVSGLDILILRELTGGIYFAEPRGI

SEQ ID NO: 87212 - protein, 149 aa, Unknown
  Bacterial polypetide isolated from the Sargasso Sea
YPEVEIEEIIVDAMAALLVRRPESFDVLVTTNLFGDILSDEAAELSGGLGLGGSINASNDYAVAQAAHGSAPDIAGQNKANPTALMISAQMLLKWHANQSGNNQLASAAAHLESALDEVLADPANHTVDMGGSVGTDKFGEVLAHVVDQ

SEQ ID NO: 87213 - protein, 86 aa, Unknown
  Bacterial polypetide isolated from the Sargasso Sea
MSNKKILVLPGDGIGNEVMHEVLNIIDWLSKTRSMSFDISQRLVGGTAYDKEGDSISDETMQEALDSDAVLFGAVGGPKWDNVKEK

SEQ ID NO: 87214 - protein, 196 aa, Unknown
  Bacterial polypetide isolated from the Sargasso Sea
MSNKKILILPGDGIGNEVMAEVLKIIDWMEKTKSMSFDISERLVGGAAYDKEGNSISDETMQIALDADAVLFGAVGGSKWDNVEREKRPEAALLRLRKDLDLFANLRPAVVLDALAESSSLKSDLVKGLDILIVRELTSGVYFGRPRGISKISDTESKAIDTQVYTTSEIERVSRVAFDLAKLRRNKVSSAEKSNV

SEQ ID NO: 87215 - protein, 353 aa, Unknown
  Bacterial polypetide isolated from the Sargasso Sea
MNEYKIAVIPGDGIGKEVVREACKVLDSVSTLNNFSLSYEFFNWGSDYYFKNNTMMPIDGLEILSQFDAIFLGAVGDPKIQDHITLNGLLLPIRRKFDQFVCLRPSSLFEGVNSPLNGINPGEIDLVVVRENTEGEYANVGGFQYEDFDDEIAIQSAVFTRKGTERVIRYAFNLAMERKKKLTSITKSNAQGYSMVLWDKVFKEVSKDYPEVKTNSLLIDAACMDFIRKPSEFDVVVASNLFGDILTDIAAMITGGLGLASSGNISENKDNPSMFEPTHGSAPDIEGKNIANPLAQILTGAMMLSYLGENTTADSIRGAVKGVLKTGNSITSDLGGNATTTECTEEVIKKLNE

SEQ ID NO: 87216 - protein, 181 aa, Unknown
  Bacterial polypetide isolated from the Sargasso Sea
MIEVDKVISIISSMFDVQFDIEKDDIGGSAYDRYGVPLADETLEKAKSSHAVLLGAVGGEKWDNLDFSLKPEQGLLKIRKELDLFANLRPALCFESMVEASSLKPHLVSGLDIMIVRELTGGVYFGKPRGIETKSDGSRVGINTQVYATHEIRRVARIAFELAQKRDNRVVSCEKSNVMES

SEQ ID NO: 87217 - protein, 205 aa, Unknown
  Bacterial polypetide isolated from the Sargasso Sea
MKSENILILPGDGVGPEIMKEAIKIIDTLNSSKICNIEYESADIGGVALDNHNTPLPDDTLHKAKASSSILLGAVGTKKHESNLNEMKPETGLLKIRKNLDLFINIRPVFLFDALLESSSLKKEYVTGLDIIIIRELVSDIYFGEPRGFNDDNTSAFNTMRYTKKEIERIATFAFELSQKRSSNLTSVDKANVLETSQLWRKVVS

SEQ ID NO: 87218 - protein, 221 aa, Unknown
  Bacterial polypetide isolated from the Sargasso Sea
MFTGSGEFMPTPDLALAVRKISRDGSRRIGQVAAKIASERPRQKITIITKSNVLKLSDGLFRDECIEAAKKYSGLEVDEIHVDAAASLFVRTPDNFDVVVTSNMFGDILSNLANELSGGLGLGGSLNAGHNKAVAQASHGSAPDIADKNIANPSALLLSTGMLFDWLAERNDSNALKEAARLIRSSMEQVFSQSDNLTVDLNGSLGTKEFGMQLKKKIEEL

SEQ ID NO: 87219 - protein, 207 aa, Unknown
  Bacterial polypetide isolated from the Sargasso Sea
MKRYKVVLLSGDGIGPEISEISITILKKLSKKYGFNLDIKEEYFGGIAYEKHNDPAPKETLDQCKASDAVLLACVGDVKYDTLPRELRPESGLLKLREALNLFANIRPVKIRKSLLDSSSLKKEVIENVDLIVVRELIGGIYFGQPRGEITNTKIKKAFNTMVYDSNEIERITEVAIKIANQRNKKICSVDKSNVLEVSQLWRDTVS

SEQ ID NO: 87220 - protein, 337 aa, Unknown
  Bacterial polypetide isolated from the Sargasso Sea
MYNISLITGDGIGPELSESVKTILDSIHDKLNVKFNVTSLVAGDSALEKTGKALPDDVFESIKSSDACLKAPVGESAKDVIVALRQKLDLYANIRPAKSYPNTPALRDDIDLVIVRENTEDLYTGQEFQVEDTAVALRIISEKASKRIAKYAFETAMDRNQQKRVTCVHKSNVMKMTDGLFARACEDVSKDYPDVTFDQMYVDACSMNLIRSPHEFDVIVTTNLFGDILSDESSQVVGGLGMAPAANLGDNFGLFEPVHGAAFDIAGKQIANPSSFILSTKMMLDWLGSKNNDSDCIFAGKKLEDIVLDLIKSGITTKDIGGEKSTQEFTKEITNRL

SEQ ID NO: 87221 - protein, 354 aa, Unknown
  Bacterial polypetide isolated from the Sargasso Sea
MKKYNISVIGGDGTGPEVVDEALKVLEQTKSKFDIDFNFIINDLGGDRYLKSGDLVTESDIDELGNSDSILLGAIGHPNVKPGILEQGILLKLRKEFDQYINLRPVVLYPGVETPLANKTPKDINFVVVRENTEGLYAGAGGYIHYGTDKEVATQESINTRSAIERCIEYAFEYTVKNNRKKITLCAKTNVLTYAHDLWERVFYEVAEKYPDIETDYGHVDAVCMWMVKNPEWFDVIVTDNMFGDIITDLGAMIQGGMGIAAGGNINPQGVSMCEPIGGSAPKYTGKNVINPLACIAAASMMLDVLGEEKYANKIENAVIKTAQQLDSLSAGKMGMGTSEVGDMVKDFILNDEE

SEQ ID NO: 87222 - protein, 180 aa, Unknown
  Bacterial polypetide isolated from the Sargasso Sea
MEARVCVLAGDGVGKEVTTESMKVLEAICRKFDHNFEFIHALVGGAAIDKYNNPIPSESMNLALGSDAILFGAVGGPKWDNPSADVRPEDAILALRKRLGLYANMRPVKVYPELIHSSPLRPEYLDGVDFVIVRELTGGLYFGRPKRRSASTRGRRAVDTLAYSEKEIARVVRVAFELAK

SEQ ID NO: 87223 - protein, 34 aa, Unknown
  Bacterial polypetide isolated from the Sargasso Sea
MILNNFRKSLYEPVHGSAPDIAGKGVANPIASIL

SEQ ID NO: 87224 - protein, 354 aa, Unknown
  Bacterial polypetide isolated from the Sargasso Sea
MKKYKISIIGGDGTGPEVVDETIKVLEHTKSKFNVEFDFVENDLGGDRYLKSGDLVTDLDIEQLGNSDSILLGAIGHPDVKPGILEQGILLKLRKEFDQYINLRPVVLYEGVETPLANKTPDDINFVVVRENTEGLYAGAGGYIHYGTDKEVATQESINTRSAIQRCIEYAFEFTSKNNRKKITLCAKTNVLTYAHDLWERVFYEVAEKYPDIETDYGHVDAVCMWMVKNPEWFDVIVTDNMFGDIITDLGAMIQGGMGIAAGGNINPNGVSMFEPIGGSAPKYTGKNVINPLACIAAASMMLDVLGEKEYANEIEKSIIKTAQNLDSLSAGKMGMSTSEVGDMVKEFILTNGE

SEQ ID NO: 87225 - protein, 96 aa, Unknown
  Bacterial polypetide isolated from the Sargasso Sea
MFSEKNILVLQGDGVGPECIAEALKILEWFDSKLNIKFNLIEELVGGSCIDVHGIPITNETLKLAKESSAILFGSVGGPKWDKVERSKRPENGLLK

SEQ ID NO: 87226 - protein, 80 aa, Unknown
  Bacterial polypetide isolated from the Sargasso Sea
VHGSAPDIAGKNLANPIATILSFSMALRYSLNLEKEAKELDLAVQSVLNMGLRTKDIYSKGNKEVSTSEMGDAIIAQLQK

SEQ ID NO: 87227 - protein, 111 aa, Unknown
  Bacterial polypetide isolated from the Sargasso Sea
YWSRLNWFIGMAPGLCLGDNIAMAQATHGSAPDIAGKNVANPYAMIMSTSMLLSWMGSKYSEDKLIMASNIIEESALEVIKERKYLTADIGGKSSTIDMTNAIIEKVKTRQ

SEQ ID NO: 87228 - protein, 123 aa, Unknown
  Bacterial polypetide isolated from the Sargasso Sea
MIKVKKRKILLLPGDGIGPEVIAEVKKIINWFNDKKSLDFEIDQELVGGCSYDKHGTPITDEVFYKALESEVIMLGAVGGPTWDNLEFSKKPERALLKLRKELKLFANLRPAICFKQLVDAST

SEQ ID NO: 87229 - protein, 64 aa, Unknown
  Bacterial polypetide isolated from the Sargasso Sea
MSTNKRKILLLPGDGIGPEVVGETKKVIDWFNKKKSLDFKIDEGLIGGAAIDKHGVPITDESVL

SEQ ID NO: 87230 - protein, 82 aa, Unknown
  Bacterial polypetide isolated from the Sargasso Sea
KDCAIFEAVHGSAPDIAGKNLANPSSVILASIQMLEYLGMKDKAEKILAALTDVIASGDRTTRDLGGSHGTTDFTAAMLERL

SEQ ID NO: 87231 - protein, 352 aa, Unknown
  Bacterial polypetide isolated from the Sargasso Sea
MNNYNISLLPGDGTGPEVINETVKILEKTETKYDVKFNFTNNDLGGDRFIKSNELVTSKDLDDLGSSDAILLGAIGHPDVKPGILEQGILLNLRKEFDQYINLRPVVLYPGVETPLANKGPEDINFTVVRENTEGLYAGAGGYIHYGTESEVATQESINTWKAINRCIVYAFEYAKQNDRKKITLCAKTNVLTYAHDLWERIFYDVAENYPEIETDYGHVDAVCMWMVKNPEWFDVIVTDNMFGDIITDLGAMIQGGMGIAAGGNINPEGVSMFEPIGGSAPKYTGKNIINPLASIAAASMMLNQLGEEKYGDDIENAIISTAQKLDSLSAGKMGMSTSEVGDTVLNSILNN

SEQ ID NO: 87232 - protein, 140 aa, Unknown
  Bacterial polypetide isolated from the Sargasso Sea
MHALCNLVQSPSRFDVIVAENTFGDILTDEAAILTASMGLLPSASLSGVPQIGKKTPGLYEPIHGTAPDIAGKGIANPTGSILSTALMLRYSLGLNEEAITIEKAVEQVLSEGFRTAELNGPNIKLLSTTEFADEIVKKV

SEQ ID NO: 87233 - protein, 149 aa, Unknown
  Bacterial polypetide isolated from the Sargasso Sea
MESSYSNVEVSYEFVDAVAMRLIQWPSEYDVLVTSNLFGDILTDEASVISGSMGLMPSASIGSNNALYEPIHGSYPEAAGKNIANPLGSILSLAMMFEHSFSLEEESKIIKKAVDNSLKEKITTKDISGNNKPHTTTDVGNFICDYINS

SEQ ID NO: 87234 - protein, 355 aa, Unknown
  Bacterial polypetide isolated from the Sargasso Sea
MSKTFNISLLPGDGTGPEVVNEAVKVLNKTSSYYDTQFNFSQNDLGGDRYLKTGDLVTDNDIKQFQDSDAVLLGAIGHPDVKPGILEQGILLKLRKEFDQYINLRPVVLYPGVETPLANKEPEDINFIVVRENTEGLYAGAGGYIHYGTENEIATQESINSYHAIHRCIKYAFEYTKNNNRKKITLCAKTNVLTYAHDLWERIFYDVAKDYPEIETDYGHVDAICMWMVKNPEWFDVIVTDNMFGDIITDLGAMIQGGMGIAAGGNINPSGTSMFEPIGGSAPKYTGKNIINPLACIGAGAMMVKELGEEKYASDIEKAIINTAIKLDSLSAGKMGMSTEEVGDSVVEELSNLNE

SEQ ID NO: 87235 - protein, 120 aa, Unknown
  Bacterial polypetide isolated from the Sargasso Sea
MSNKKILVLPGDGIGNEVMHEVLNIIDWLSKTRSMSFDISQRLVGGTAYDKEGDSISDETMQEALDSDAVLFGAVGGPKWDNVEREKRPEAALLRLRKELDLFANLRPAVVLMLLLIHLL

SEQ ID NO: 87236 - protein, 277 aa, Unknown
  Bacterial polypetide isolated from the Sargasso Sea
MKTYRIGIMPADGIGPEISESTKRVVDESLGKHFQVSFDWIELPVGWQALEQNKPPLPQETLDELEKCDAWVMGPHDSASYPEAFQHSLNPSGAIRKHFDLYANIRPARTVKGLGDSRKDFDLVIVRENTEGFYADRNMHLGIGEFMPHPDTALAVGVFTRNACERIARTAFELAMIRKKKVSLIHKANVLRTTYGLFLECCEKVSRDFPEVAVNDFHIDAVAALLVREPEEFDVIVTTNMFGDILSDLTAELAGSLGMGAALNAGRLKAMAQAAHG

SEQ ID NO: 87237 - protein, 311 aa, Unknown
  Bacterial polypetide isolated from the Sargasso Sea
DWGSNYYKNNKLMMPKDGLEKLKKHDAIFFGAVGDEKIADDITLWGLRLNICQGLDQFANVRPSKYIEGINSPLKKEIAKKIDWIIVRENSEGEYAGSGGIVHKGLPIEIGSEVAVFTREGCRRIHDYAFKLALKRPKKHLTLITKSNAQKHGMKLWDRVFYEVKKNYPQVKTNKLLVDAATAVMVNNPEKIDVMVATNLHADILSDLASALTGSLGIGATANITTDKNLPSMFEPIHGSAFDIVGKNIANPIGAIFSGMMMLNHLGEKKSANRIDKALKLYANNSGPFTPDLGGIASTRKVIDKIINLIK

SEQ ID NO: 87238 - protein, 135 aa, Unknown
  Bacterial polypetide isolated from the Sargasso Sea
MVQHRVVLLSGDGIGPEITAVARRLLEVVSERHGFSLTFDEQLIGGAAIDVTGEPLPSTTLEACQAADAVLLAAIGSPRFDSLPRDKRPETGLLALRSGLKLFANLRPVKIVPSLIEASTLRPEVIEGGGSDGGA

SEQ ID NO: 87239 - protein, 308 aa, Unknown
  Bacterial polypetide isolated from the Sargasso Sea
MIKVKKRKILLLPGDGIGPEVIAEVRKIIEWFNKNKSLDFEIDEDLVGGSSYDKNGTPITDEVFYKALECEAVILGAVGGPKWDNLDFSKKPERALLKLRKELKLFANLRPAICFKQLVNASSLKPEIVSGLDIMIVRELTGGIYFGEPRGIKLVDNGERKGINTHVYTSNEIQRVAKVAFDLAKKRNNKVTSCEKSNVMEAGQLWKEEVQTLHEKEYKEVKLEHMLADNCAMQLLRNPKQFDVIVTDNLFGDILSDEAAMLTGSLGLLPSASLGAKDKNGNIRSMYEPVHGSAPDIAGKGLANPNSY

SEQ ID NO: 87240 - protein, 251 aa, Unknown
  Bacterial polypetide isolated from the Sargasso Sea
RPVKIRKSLLDASTLKKEIVEHVDLIVVRELIGGIYFGKPRGHITNTKIPKAFNTMIYDSTEIERITEIAIKIANQRNKKICSVDKSNVLEVSQLWRDTVLNITSKDKNISLSNMYVDNAAMQLVRDPSQFDVILTSNLFGDILSDLAAMLTGSIGMLPSASLNNNGPGVFEPVHGSAPDIAGKNIANPIAMLLSASMMLKIGLNEEEAAENLETAIDKVLSKGFRTADLADGSTEVLSCSEIGDKIMDEI

SEQ ID NO: 87241 - protein, 238 aa, Unknown
  Bacterial polypetide isolated from the Sargasso Sea
MNKKNNILVLPGDGIGPEVCNEAIKVINHLNEIYKLDILIEEFAVGGSAYEEFGNPLPEDTLKAAKEADAILLGAVGGPKWDNIDYELRPERALLRLRAELDLFANLRPAILSKYLSDSSSLKSDKVQDLNLLIVRELTGGIYFGEPRGRSKSGDSAFNTMIYSKTEIARIGRIAFEAAQKRNKNLCSVDKANVLEVSVLWREVISQLSEEYPDVELSHMLVDNAAMQLVRDPKTNLM

SEQ ID NO: 87242 - protein, 160 aa, Unknown
  Bacterial polypetide isolated from the Sargasso Sea
MVVLHGITLEFSKKPERALLKLRKELKLFANLRPAICFKQLVDASTLKPEIVSGLDIMIVRELTGGIYFGEPRGIKPIENGERKGINTHTYTTSEITRVARIAFDLARKRSNKVTSCEKSNVMEAGQLWKEEVQELHEKEYKDVELSHMLADQLCYAAFK

SEQ ID NO: 87243 - protein, 248 aa, Unknown
  Bacterial polypetide isolated from the Sargasso Sea
MHLKIALLAGDGIGPEVIEQAVKVSDAIAEKFNHKIEWIHALTGASAIDAVGDPYPEETHEICLSADAVLFGAIGHPRFDNDPSAKVRPEQGLLKMRKKLGLFANVRPTFTFPSLLDKSPLKKERIEGTDLIFLRELTGGIYFGERGRKDAGNTAFDTCTYTREEIKRLALKGFELSMKRSRKLCCVDKANVLESSRLWRETVQELEKEYPQVEVSYEFVDAVAMRLVQWPNSYDVLITENLFGDILT

SEQ ID NO: 87244 - protein, 261 aa, Unknown
  Bacterial polypetide isolated from the Sargasso Sea
MKEVRKVIDWYGANLGLAFDVSEDLVGGVAYDAHGTPLHDSTLAKAQEVDAVLLGAVGGPDYDNLDFSVKPERGLLRLRKEMDLFANLRPAQCFNALADFSSLKTEVVSGLDIMIVRELTSGIYFGEPRGIIEEGNERVGINTQRYTESEIDRVARSAFELARRRGNKVCSMEKANVMESGVLWREVVQKVHDEDYQDVELSHMYADAGAMQLCRWPKQFDVIVTDNLFGDLLSDAAAMLTGSLGMLPSASLGAPMAKWSA

SEQ ID NO: 87245 - protein, 186 aa, Unknown
  Bacterial polypetide isolated from the Sargasso Sea
ISEKRQNKVTSCEKSNVMEAGLLWREEVQELHDKEFKDVELNHMLADNCAMQLLRNPKQFDVIVTDNLFGDMLSDQASMLTGSLGLLPSASLGAKNKEGQMRAMYEPIHGSAPDIAGKGVANPIATILSFAMALRYSLDLDKEASTLEKAVQDVLDEGLRTKDIISKGKKEVSTSQMGDAIISKLQ

SEQ ID NO: 87246 - protein, 272 aa, Unknown
  Bacterial polypetide isolated from the Sargasso Sea
GGIAYEKYGTPAPDETLDQCKKSDAVLLACVGDIKYDSLARELRPESGLLKLRSALNLFANIRPVKIRKSLLDASTLKKEIVEHVDLIVVRELIGGIYFGKPRGNITNTKIPKAFNTMVYDSTEIERITEIAIKIANQRNKKICSVDKSNVLEVSQLWRDTVLNITSKDKNISLSNMYVDNAAMQLVRDPGQFDVILTSNLFGDILSDLAAMLTGSIGMLPSASLNNNGPGVFEPVHGSAPDIAGKNIANPIAMLLSASMMLKIGLNEEEAA

SEQ ID NO: 87247 - protein, 266 aa, Unknown
  Bacterial polypetide isolated from the Sargasso Sea
LKLFANLRPAICFKQLVQASSLKPEIISGLDIMIVRELTGGIYFGEPRGIEPIKNNERKGVNTHVYTSSEIQRVAKVAFELAKKRKNKVTSCDKSNVMEAGVLWREEVQALKEKDYKKIELEHMLADNCAMQLLRNPKQFDVIVTDNLFGDMLSDEAAMLTGSLGLLPSASLGEKDKNGKTRSMYEPIHGSAPDIAGKNIANPIATVLSFSMALRFSLDLDKEANLLDAAVQKVLDDGLRTKDIMSEGKKEVTTSDMGDAIISKLK

SEQ ID NO: 87248 - protein, 207 aa, Unknown
  Bacterial polypetide isolated from the Sargasso Sea
TNTKIPKAFNTMVYDSTEIERITEIAIKIANQRNKKICSVDKSNVLEVSQLWRDTVLNITSKDKNISLSNMYVDNAAMQLVRDPGQFDVILTSNLFGDILSDLAAMLTGSIGMLPSASLNNNGPGVFEPVHGSAPDIAGKNIANPIAMLLSASMMLKIGLNEEEAAENLETAIDKVLSKGFRTADLADGSTEVLSCSEIGDKIMDEI

SEQ ID NO: 87249 - protein, 150 aa, Unknown
  Bacterial polypetide isolated from the Sargasso Sea
MELNIAVLPGDGIGPEVTNEAIKVLDIISKKYNHKVNLSEGLVGAVAIDKTGNPYPDETHQICEKSDAVLFGAIGDPRYDNDPTAKVRPEQGLLQMRKKLGLYANLRPTIVFESLIDNSPLRKDRIVDTDLIFVRELTGGIYFGERGRKD

SEQ ID NO: 87250 - protein, 303 aa, Unknown
  Bacterial polypetide isolated from the Sargasso Sea
KDERIQNRLNCWRWYEKEVVPEALKILKEVANQHQFKLKIDEFDFSSCDYYEKHGKMLPDDWKQQIGNHDAIFFGAVGMPDKYPDHITLWGSLLQFRREFDQFINLRPVKLFEGVNAPLANKKPGDIDMMIVRENTEGEYSSVGGKMYQNTEREIVIQETVMSKHGIDRVQKFAFELARTRNRKKLTNATKSNGISITMPYWDQRFYENKKDFPEIKTDQFHIDILAARFVLTPEWFDVVVASNLFGDILSDLGPACTGTIGIAPSGNINPTNKYPSLFEPVHGSAPDIAGKGIANPIGQIWS

SEQ ID NO: 87251 - protein, 249 aa, Unknown
  Bacterial polypetide isolated from the Sargasso Sea
KWDNLDFSKKPERALLKLRKELKLFANLRPAICFKQLVDASSLKPELVSDLDLLFVRELTGGIYFGEPRGIKPIDNGERKGINTHIYTSSEIQRVARVAFDLARKRNNKVTSCEKSNVMEAGQLWKEEVQSIHEKEYSDVELNHMLADNCAMQLVRNPKQFDVIVTDNLFGDMLSDEAAMLTGSLGLLPSASLGAKDKNGNMRSLYEPVHGSAPDIAGQGIANPIATILSFAMALRYSLDLDKEADSLE

SEQ ID NO: 87252 - protein, 304 aa, Unknown
  Bacterial polypetide isolated from the Sargasso Sea
MKEYSIASIAGDGIGKEVVPEAQKILKEISQQHQFKLKIENYDFASCDYYEKHGKMMPDDWKDKLIKHDAIFFGAVGMPDKYPDHITLWGSLLKFRREFDQFINLRPVKLFEGVNAPLAKKKPGDIDMIIVRENTEGEYSSVGGRMYQGTDREVVIQETVMSKYGIDRVQQFAFELAKKRKRKKLTSATKSNGISITMPYWDERFNENKKNYPDVETDQYHIDILAARFVLSPERFDVIVASNLFGDILSDLGPACTGTIGIAPSGNINPTNKYPSLFEPVHGSAPDIAGQGIANPVGQIGQLR

SEQ ID NO: 87253 - protein, 253 aa, Unknown
  Bacterial polypetide isolated from the Sargasso Sea
ERALLKLRKELKLFANLRPAICFKQLVSASTLKPEIVSGLDIMIVRELTGGIYFGEPRGIKPIENGERKGVNTHTYTSSEIIRVAKVAFDLAKKRSNKVTSCEKSNVMEAGQLWKEEVQALHEKEYKDVELDHMLADNCAMQLLRNPKQFDVIVTDNLFGDMLSDQASMLTGSLGLLPSASLGAKNKDGEMRAMYEPIHGSAPDIAGKGIANPIASILSFAMALKYSLDLNKESEVLEKAVQDVLNEGLRTKD

SEQ ID NO: 87254 - protein, 255 aa, Unknown
  Bacterial polypetide isolated from the Sargasso Sea
MTSNRKLMIMPGDGIGPEVMKETLRLIDWLAKNKTLNFDTIERDVGGKSYDLHGTPLTDEALSDSLECDAILFGAVGGPKYDDLSFELKPERGLLTLRKELDLFANLRPAIVFPPLVDSSTLKPDVVRGLDIMILRELTGGVYFAEPRGIDVLPDGNKKGYDTNLYTTPEIQRIGRVAFDLAKKRNSKVTSVEKSNVMLSGVLWKEVMTELHINEGQGIDLQHMFADNCAMQLVRAPKQFDVIVCDNLFGDMLSD

SEQ ID NO: 87255 - protein, 250 aa, Unknown
  Bacterial polypetide isolated from the Sargasso Sea
MKKYKIVLLSGDGIGPEISEVSKLVLKKLSKNHNFDIEIIEKLFGGIAYEKYGTPAPDETLDQCKKSDAVLLACVGDIKYDSLARELRPESGLLKLRSALNLFANIRPVKIRKSLLEASTLKKEIVENVDLIVVRELIGGIYFGKPRGHITNTKIPKAFNTMVYDSTEIERITEIAIKIANQRNKKICSVDKSNVLEVSQLWRDTVLNITSKDKNISLSNMYVDNAAMQLVRDPGQFDVILTSNLFGDIL

SEQ ID NO: 87256 - protein, 239 aa, Unknown
  Bacterial polypetide isolated from the Sargasso Sea
MIKVKKRKILLLPGDGIGPEVIHEVKKIINWFNDKKSLDFEIDEDLAGGCSYDKHGTPITDEVFYKALESEVVMLGAVGGPKWDEVEFSKKPERALLKLRKELKLFANLRPAICFEQLVSASTLKPEVVSGLDIMIVRELTGGIYFGEPRGIKPIENGERKGINTHTYTTNEIARVARIAFDLARKRSNKVTSCEKSNVMEAGQLWKEEVQELHDKEFKDVELSHMLADNCAMQLLRNP

SEQ ID NO: 87257 - protein, 282 aa, Unknown
  Bacterial polypetide isolated from the Sargasso Sea
MNKKILILPGDGIGPEVTSSAMEILRFIKDLYSLDLDIEIQDVGGAAYDKTGYPLPEKTLEIARKSDAILFGAVGGPEWEDLDWDKRPEQALLGLRKELGLFANLRPAFLFNELASASPIKEEIINDLDILIVRELTGGIYFGEPRGIDTSSNPAHAFNTMIYDEKEIERIGRVAFESAQKRNRKLCSVEKANVLEVSKFWREIITNLSKDYPDVELTHQLADNTAMQLVLDPNQFDVIVSSNLFGDILSDIAATLTGSIGMLPSASLNSSSQGMYEPCHGS

SEQ ID NO: 87258 - protein, 239 aa, Unknown
  Bacterial polypetide isolated from the Sargasso Sea
MIKIKKRKFLLLPGDGIGPEVLGEVKKIIHWFNKNKSLDFEIDEDLAGGISYDKHGTPITDEVFYKALESEAVILGAVGGPKWDNVEFSKKPERALLKLRKELKLFANLRPAICFKQLVESSTLKPEIVSGLDIMIVRELTGGIYFGEPRGIKPIDNGERKGINTHTYTSSEIQRVARVAFDLAKKRQNKVTSCEKSNVMEAGLLWREEVQDLHDKEFNDVELHHMLADNCAMQLLRNP

SEQ ID NO: 87259 - protein, 213 aa, Unknown
  Bacterial polypetide isolated from the Sargasso Sea
VGGRMYQNTDREIAIQETIMSAHGIDRVQEFAFELAKKRKRKKLTNATKSNGISITMPFWDERFNKIKNKYPEIETDQFHIDILAARFVLNPEWFDVVVASNLFGDILSDLGPACTGTIGIAPSGNINPENKYPSLFEPVHGSAPDIAGKGVANPVGQIWSGAMMLDYLGEKEASNSIVSAIEKSLSVQKNRTKDLGGESNTIECSNSILSNL

SEQ ID NO: 87260 - protein, 147 aa, Unknown
  Bacterial polypetide isolated from the Sargasso Sea
KRFFPEIKTDQFHIDILAARFVLTPEWFDVVVASNLFGDILSDLGPACTGTIGIAPSGNINPTNKHPSLFEPVHGSAPDIAGKGIANPIGQIWSGAMMLDYLGEKEAATRIVSSIEKTLLEKQNRTKDLDGDSNTKECANKILDNIN

SEQ ID NO: 87261 - protein, 269 aa, Unknown
  Bacterial polypetide isolated from the Sargasso Sea
MIKVKKRKILLLPGDGIGPEVIDEVKKIINWFNDKKSLDFEIDQELVGGCSYDKHGTPITDEVFYKALESEVIMLGAVGGPTWDNIEFSKKPERALLKLRKELKLFANLRPAICFKQLVDASTLKPEVVSGLDIMIVRELTGGIYFGEPRGIKPIENGERKGINTHTYTTGEIIRVARIAFDLARKRSNKVTSCEKSNVMEAGQLWKEEVQELHDKEYKDVELSHMLADNCAMQLLRNPKQFDVIVTDNLFGDMLSDQASMLTGSLGLL

SEQ ID NO: 87262 - protein, 201 aa, Unknown
  Bacterial polypetide isolated from the Sargasso Sea
MSKEILILPGDGVGQEVMASASDVLDFVINEYNLDFLVASMSVGGTAYNECGSPIPKEVLDSAKKADAILFGAVGGTEWDNLDWEDRPENALLTLRKELNLFANLRPAFLFNELSEASPLKKEVINDLDILIVRELTGGIYFGEPRGIVSNEEPNYAFNTMIYNEEEIRRIAKVAFESAQKRNKKLCSVEKANVLGKFLNL

SEQ ID NO: 87263 - protein, 208 aa, Unknown
  Bacterial polypetide isolated from the Sargasso Sea
MSKNQKKILLLPGDGIGPEVVRETKKVIDWFNNKKSLDFKIDQDLIGGAAIDKHGVPITDEVFYNALESDAVIVGACGGPQYDKLEFSKKPERALLKLRKELKLFANLRPAICFKQLVDSSSLKPEIVSGLDILIVRELTGGIYFGEPRGIKPIENGERRGVNTHVYTTKEIKRIARVAFELAQKRNNKVTSCEKSNVMEAGVLWREE

SEQ ID NO: 87264 - protein, 120 aa, Unknown
  Bacterial polypetide isolated from the Sargasso Sea
FDVVVGSNLFGDILSDLGPAVVGGIGIAPSANLNPDGDMPSMFEPVHGSAPDIAGSGIANPIGQIWSGAMMLQHLGYPKAAAAVEAAIETVLAEGMAVTRDLGGTATTEEAGRAIADAIE

SEQ ID NO: 87265 - protein, 152 aa, Unknown
  Bacterial polypetide isolated from the Sargasso Sea
MDNLDWKDRPENALLTLRKELNLFANLRPAFLFNELSEASPLKKEVINDLDILIVRELTGGIYFGEPRGIVSNEEPNYAFNTMIYNEEEIRRIAKVAFESAQKRNKKLCSVEKANVLEVSKFWRSIVSEMSTDYPDVELSHQLADNTAMQLV

SEQ ID NO: 87266 - protein, 126 aa, Unknown
  Bacterial polypetide isolated from the Sargasso Sea
FDVIVSSNLFGDILSDIAATLTGSIGMLPSASLNSSSQGMYEPCHGSAPDIAGKNLANPLAMILSLAMAFKYSLENSEAASIIEKSVKEFISRGFRTKDLTDDSSFLETDEVASELISIIKEKSNV

SEQ ID NO: 87267 - protein, 95 aa, Unknown
  Bacterial polypetide isolated from the Sargasso Sea
IGIAPSGNINPERDFPSMFEPVHGSAPDIAGKNIANPIGQIWSGAMMLEHLGEEDASKNIITAIENVLSEKRSLTPDMGGNASTEELGKAIEESI

SEQ ID NO: 87268 - protein, 258 aa, Unknown
  Bacterial polypetide isolated from the Sargasso Sea
PAICFEQLVEASTLKPEIVSGLDIMIVRELTGGIYFGEPRGIKPIDNGERKGINTHTYTSSEIQRVARVAFDLAKKRENKVTSCEKSNVMEAGLLWREEVQDLHDKEFKDVKLDHMLADNCAMQLLRNPKQFDVIVTDNLFGDMLSDQASMLTGSLGLLPSASLGAKNKEGQMRAMYEPIHGSAPDIAGKGIANPIATILSFAMALRYSLDLDKEANALEKAVQDVLNDGLRTKDIISKGKKEVSTSQMGDAIISKLQ

SEQ ID NO: 87269 - protein, 202 aa, Unknown
  Bacterial polypetide isolated from the Sargasso Sea
MNKKNNILVLPGDGIGPEVCDEAIKVLKHLNDIYKLDIVIEESAVGGSAYEEFGNPLPEDTLQAAKEADAILLGAVGGPQWDDIDYELRPERALLGLRAELDLFANLRPAILSKYLSDSSSLKPEKVQDLNLLIVRELTGGIYFGEPRGRSKSGDSAFNTMIYSKNEIERIGRIAFEAAQKRNKNICSVDKANVLEVKVFYG

SEQ ID NO: 87270 - protein, 316 aa, Unknown
  Bacterial polypetide isolated from the Sargasso Sea
DKHGTPITDEVFYKALESAVVMLGAVGGPKWEKVEFSKKPERALLKLRKELKLFANLRPAICFKQLVDASTLKPEIVSGLDIMIVRELTGGIYFGEPRGIKPIENGERRGINTHTYTSNEIIRVARIAFDLAKKRSNKVTSCEKSNVMEAGQLWKEEVQILHDKEYKDVELSHMLADNCAMQLLKNPKQFDVIVTDNLFGDMLSDQASMLTGSLGLLPSASLGAKNKDGEMRAMYEPIHGSAPDIAGKGIANPIATILSFAMALRYSLDLDSEAEAVEKAVQDVLNDGLRTKDILSNGMKEISTSEMGDAIISKLQ

SEQ ID NO: 87271 - protein, 218 aa, Unknown
  Bacterial polypetide isolated from the Sargasso Sea
EYSSVGGKMYQNTEREIVIQETIMSKHGIDRVQKFAFELAKTRDRKKLTNATKSNGISITMPYWDQRFYENKKDFPEIKTDQFHIDILAARFVLTPEWFDVVVASNLFGDILSDLGPACTGTIGIAPSGNINPTNKHPSLFEPVHGSAPDIAGKGIANPIGQIWSGAMMLDYLGEKEAATRIVSSIEKTLLEKQNRTKDLDGDSNTKECANKILDNIN

SEQ ID NO: 87272 - protein, 220 aa, Unknown
  Bacterial polypetide isolated from the Sargasso Sea
TEGEYSSVGGKMYQNTDREIAIQETIMSAHGVDRVQKFAFELAKKRKRKKLTNATKSNGISITMPFWDERFNKMKKKYSEIETDQFHIDILAARFVLNPEWFDVVVASNLFGDILSDLGPACTGTIGIAPSGNINPENKFPSLFEPVHGSAPDIAGKGIANPVGQIWSGAMMLDYLGEKEASSSIVSAIEKSLNVQKNRTKDLGGESNTVECSNTILSNL

SEQ ID NO: 87273 - protein, 130 aa, Unknown
  Bacterial polypetide isolated from the Sargasso Sea
MQLVRDPRQFDVLLTGNLFGDILSDEAAMLTGSIGMLPSASLGSDGPGLFEPVHGSAPDIAGQDKANPMAMVLSAAMMLRIGLKQSAAAADLERAVDTVLASGLRTGDLMAEGCTPVGCSAMGRALIEAL

SEQ ID NO: 87274 - protein, 256 aa, Unknown
  Bacterial polypetide isolated from the Sargasso Sea
MKIAVLPGDGIGPEIVKEAVKVLNVLGEKFELEEAPVGGAGYEAKGHPLPDSTLALAKEADAILFGAVGDWKYDSLERALRPEQAILGLRKHLHLFANFRPAICYPQLTGASSLKEEIVSGLDILIVRELNGDIYFGAPRGVRSSPDGLFEGAKEGFDTMRYSEPEVRRIAHVAFQAAQKRQKRLTSVDKANVLETSQFWRDVMIDVSKEYADVELSHMYVDNAAMQLVKAPKAFDVVVTGNMFGDILSDEAAMLT

SEQ ID NO: 87275 - protein, 119 aa, Unknown
  Bacterial polypetide isolated from the Sargasso Sea
MFGDILSDCASMLTGSLGMLPSASIGINSKGQKKAMYEPVHGSAPDISGQGVSNPLAMILSVGMMFEYSLDKKVIAEKINDAVRSVLEKGFRTKDIYSQNKILLSTTEMGDKVLEEMKE

SEQ ID NO: 87276 - protein, 160 aa, Unknown
  Bacterial polypetide isolated from the Sargasso Sea
EVQALHEKEYKDVELNHMLADNCAMQLLRNPKQFDVIVTDNLFGDMLSDQASMLTGSLGLLPSASLGAKNKDGEMRAMYEPIHGSAPDIAGKGVANPIATILSFAMALRYSLELDKEAEELEKAVQNVLNEGLRTKDILSKGMKEVSTSQMGDAIISKLQ

SEQ ID NO: 87277 - protein, 303 aa, Unknown
  Bacterial polypetide isolated from the Sargasso Sea
MSIDRKILLLPGDGIGPEVILEAERVLECLNSKYSLGISIEKALLGGVAYEESGDPLPQETLEKADWSDAILLGAVGGPRWDDLPSEKKPEKGLLRIRAEYDFFANLRPAILSKYLVSASTIKKELVSDLDLLIVRELTGGIYFGEPRGFIEKNKAINTMVYDEEEIIRIGKVGFEAALKRNKKLCSVDKSNVLEVSMLWREVITELAKDYEEVQLSHMLVDNAAMQLVREPKQFDVIVTGNLFGDILSDISAMLTGSIGMLPSASLNESGKGLYEPVHGSAPDIAGKDLANPIAAILSVAMM

SEQ ID NO: 87278 - protein, 235 aa, Unknown
  Bacterial polypetide isolated from the Sargasso Sea
MSKKKTILFLPGDGIGPEVSNSAKSILELINDIYNLDYVIEEALVGGSAYDQTGVPLPEDTLNAARNSDAILLGAVGGPKWDDIDYQYRPERALLGLRSELDLFANFRPAILSKYLTASSSLKPEKVENLDLLIIRELTGGIYFGEPRGRREDNQDAFNTMIYSHDEIERIGRVAFEAAQKRNKNLCSVDKANVLEVSVLWREVITDLSKEYPDVNLSHMLVDNAAMQLVRQPKQ

SEQ ID NO: 87279 - protein, 305 aa, Unknown
  Bacterial polypetide isolated from the Sargasso Sea
VIDWFEQRRNLKFNFEIDLIGGCAYDKHGTPLSDLTMEKAKSVDAVLLGAVGGPAYENLDFDKQPERGLLRLRKEMDLFANLRPAQCFDALTNFSSLKKNIVSGLDIMIVRELTSGIYFGEPRGIEGSGENRVGINTNRYTTNEIRRVARSAFDLAAKRNNRLCSMEKANVMESGVLWREEVTHVHKSEYPQVELSHMYADAGAMQLVRWPKQFDVIVTDNLFGDILSDCAAMLTGSLGMLPSASLGAPMESGLPRALYEPVHGSAPDIAGYGQANPCASILSFAMALRYSFNKINEATYLETAV

SEQ ID NO: 87280 - protein, 200 aa, Unknown
  Bacterial polypetide isolated from the Sargasso Sea
YPSEIHRIARLAFDLAKKRRNKVTSCEKSNVMEAGLLWREEVQTIKDKEFKKVELDHMLADNCAMQLLRYPKQFDVILADNLFGDMLSDEAAMLTGSIGLLPSASLGAKDKNGRTRSLFEPVHGSAPDIEGKNIANPIAAILSLSMALRYSLDLGKEADQLDNAVQSVLDEGFRTKDIISKNMKEVSTTDMGDAIIAKLK

SEQ ID NO: 87281 - protein, 240 aa, Unknown
  Bacterial polypetide isolated from the Sargasso Sea
MIKVKKRKILLLPGDGIGPEVISEVKKIIEWFNVKKSLDFQVDQDLVGGASYEKHKIPITDEVFYKALESEAVILGAVGGPKWDNLEFSKRPERALLKLRKELKLFANLRPAICFKQLVDASSLKPEIVSGLDIMIVRELTGGIYFGEPRGIKPIENGERKGVNTHVYTSGEIIRVAKVAFDLAQKRKKKVTSCEKSNVMEAGILWREEVQKVKDEEYQNIELNHMLADNCAMQLLKNPK

SEQ ID NO: 87282 - protein, 293 aa, Unknown
  Bacterial polypetide isolated from the Sargasso Sea
NLDFSINTLDVGGTAYEKTGSPIPHEVLQAAKEADAVLFGAVGAPQWDTLSWDDRPENALLTLRKELNLFANLRPAFLFKELSEASPIKEKIIEGLDILIVRELTGGIYFGEPRGVVEDETPNYAFNTMIYNEDEIRRIAKIAFESAQKRSGKLCSVEKANVLEVSKFWRSIVTEMSAEYPDVELSHQLADNTAMQLVLNPNQFDVIVASNLFGDILSDIAATLTGSIGMLPSASLDSSFKGMYEPCHGSAPDIANQDIANPLAMIGSLSMALKYSLDEEAVSHKIDAAIKTL

SEQ ID NO: 87283 - protein, 150 aa, Unknown
  Bacterial polypetide isolated from the Sargasso Sea
MAQHRVVLLPGDGIGPEITAVARQLLETVSERHGFQLSFEEQPIGGSAIDATGEPLPASTLEACRQADAVLLAAIGSPRFDSLPREKRPETGLLGLRAGMQLFANLRPVKIVPALIGASSLRPEVIEGVDLMVVRELTGGIYFGQPKGRI

SEQ ID NO: 87284 - protein, 174 aa, Unknown
  Bacterial polypetide isolated from the Sargasso Sea
EKSNVMEAGQLWKEEVKALHEKEYKDIELKHMLADNCAMQLVRYPKQFDVIVTDNLFGDMLSDEAAMLTGSLGLLPSASLGAKDKNGNMRSLYEPVHGSAPDIAGNGIANPIATILSFAMALKYSLDLDKESKTLEKAVQSVLDEGLRTKDILSKGTKEVSTSEMGDAIISKLQ

SEQ ID NO: 87285 - protein, 268 aa, Unknown
  Bacterial polypetide isolated from the Sargasso Sea
MSNKKILVLPGDGIGNEVMAEVLKIIDWLSKTQSMSFDISERLVGGTAYDKEGDSISDETMQEALDADAVLFGAVGGPKWDNVEREKRPEAALLRLRKELDLFANLRPAVVFDALAEASPLKLNLVKGLDILILRELTSGVYFGQPRGVSKINDNEEKAIDTQSYTTSEITRITRVAFDLAKLRDNKVTSVEKSNVMETGMFWKNTVSNIHQKDFQDVELFHMLADNCAMQLVRNPKQFDVILTDNLFGDLLSDIAAMLPGSLGMLPS

SEQ ID NO: 87286 - protein, 174 aa, Unknown
  Bacterial polypetide isolated from the Sargasso Sea
EKSNVMEAGVLWREEVQSLKDKDFKNVELQHMLADNCAMQLLRDPKQFDVILADNLFGDMLSDEAAMLTGSLGLLPSASLGSKDKNGRIRSLYEPVHGSAPDITGKNIANPIATILSLSMALRYSLNLDKEADLLDLAVQRVLDDGLRTKDIVSKGKKEVSTSQMGDAIIAKLK

SEQ ID NO: 87287 - protein, 241 aa, Unknown
  Bacterial polypetide isolated from the Sargasso Sea
MKDIDLLLLSGDGVGPEIMESAISLLEKIQSSFKINFNLIEGLIGGASIDAHGLPVSDETLNQASQADSILFGAVGGPKWDSLPPNEKPEKGLLELRSSLGLFANLRPAILFDSSLEASSLKPDIIKDLDMLIVRELTGGIYFGEPREKKSSSAFNTMIYERHEVERIARVAFDSASLRNKKVCSVDKSNVLEVSEFWREVVIDVSKDYPDIELSHMLVDNAAMQLVKNPKQFDVILSSNL

SEQ ID NO: 87288 - protein, 188 aa, Unknown
  Bacterial polypetide isolated from the Sargasso Sea
AKIGFETAMKRRKKLTSVDKANVLESTEFWREIVTDMGTDFPEVELNHMYVDNAAMQIIRDPKQFDTMVTTNMFGDIISDAAAMMTGSLGMLPSASIGGGIGMYEPVHGSAPDITGQDKANPLAMILSAGMMMRYSFNLSEADEMIKKAVVDTLEKYRTIDIMAEGKIQIGCREMGEKVLQTLEENNS

SEQ ID NO: 87289 - protein, 195 aa, Unknown
  Bacterial polypetide isolated from the Sargasso Sea
IRVAKVAFELAQKRSKKVTSCEKSNVMEAGILWREEVQKVKDEEYQNIELNHMLADNCAMQLLRDPKQFDVIVTDNLFGDILSDEAAMLTGSLGLLPSASLGSKDKNGKMRSMYEPVHGSAPDIAGTGKANPIATILSFSMALRYSLDLDKEADNLDQAVQKVLDDGLRTKDILSKGKKEVSTSQMGDAIISKLK

SEQ ID NO: 87290 - protein, 204 aa, Unknown
  Bacterial polypetide isolated from the Sargasso Sea
VVIQETVMSKYGIDRVQQFAFELAKKRKRKKLTSATKSNGISITMPYWDERFNENKKNYSDVETDQYHIDILAARFVLSPERFDVIVASNLFGDILSDLGPACTGTIGIAPSGNINPTNKYPSLFEPVHGSAPDIAGQGIANPVGQIWSAAMMLDYLGEKEASDRIVKSIELTLKDKDSRTKDLQGSSNTEQCSKKILDNLSSV

SEQ ID NO: 87291 - protein, 282 aa, Unknown
  Bacterial polypetide isolated from the Sargasso Sea
FGAIGHPDIRWPDGTEIAPHLRMRKEYGLIAGLRPVKAFPGLPIPLKDPRAQEIDIVIIRESTEGLFASLGKGTVEDDRIAKETLVITRDVCEPLFDEAFRLARQRKPKGGPGRVTCVDKSNVFTAMAFFRKIFDERAALNADITADYSYVDAAALDLVRKPWEFDVMVMENMFGDILSDLGAGIVGGMGFAPCAELGPNHGLFQPAHGTAPDIAGQDKANPTAMLFSAKMMLDWLGERHDVQACRDAADDLANTIEDLFAAGDVVPMELGGTDGTTSYANK

SEQ ID NO: 87292 - protein, 206 aa, Unknown
  Bacterial polypetide isolated from the Sargasso Sea
INTHTYTSSEIIRVAKVAFELAQKRNKKVTSCEKSNVMEAGILWREEVQKVKDEEYQNIELNHMLADNCAMQLLRDPKQFDVIVTDNLFGDILSDEAAMLTGSLGLLPSASLGAKDKNGKMRSMYEPVHGSAPDIAGTGKANPIATILSFSMALRYSLELDKEADNLDQAVQKVLDECLRTKDILSKGKKEVSTSQMGDAIISKLK

SEQ ID NO: 87293 - protein, 158 aa, Unknown
  Bacterial polypetide isolated from the Sargasso Sea
AEEVAKDYPDVELDHIYIDNATMQIMKNPAQFDVMLCSNLFGDIVSDECAMMTGSMGLLPSASMNEEGFGLYEPAGGSAPDIAGQGIANPIAQILSAAMMLRFSMNLNDAADAIEKAVVATLEAGVLTGELLPSDKRSQAASTSQVGDEIVKQLMAQE

SEQ ID NO: 87294 - protein, 257 aa, Unknown
  Bacterial polypetide isolated from the Sargasso Sea
LYANLRPAVIYGDLVDASTLKRDVVEDADLMVIRELTGGIYFGEPRGVEERNGERVGFNTLVYSESEIRRVGKMACEIAMKRNKKLTSVDKANVLESTELWRGVMTDVVKDFPEIDLNHMYADNAAMQLIRDPKQFDTMVTTNMFGDILSDAAAMMTGSIGMLPSASLGGNIGLYEPVHGSAPDIAGQNLANPLAMILSTGMMLRYSFDLGQADDLIQKAVVQTIETFRTVDIMSPGKTQIGCRQMGGKVLETIKTL

SEQ ID NO: 87295 - protein, 266 aa, Unknown
  Bacterial polypetide isolated from the Sargasso Sea
MDFEVEEDLAGGASYDKHGTPITDEVFYKALESKAVMLGAVGGPKWDNLEFSKKPERALLKLRKELKLFANLRPAICFKQLVDASTLKPEIVSDLDIMIVRELTGGIYFGEPRGIKPIDKGERKGINTHVYTSSEITRVARVAFDLAKKRKKKVTSCEKSNVMEAGQLWKEEVQALHEKEYKDIELKHMLADNCAMQLLRNPKQFDVIVTDNLFGDMLSDEASMLTGSLGLLPSASLGAKNKDGDMRAMYEPIHGSAPDIAGKRNC

SEQ ID NO: 87296 - protein, 191 aa, Unknown
  Bacterial polypetide isolated from the Sargasso Sea
MIKVKKRKFLLLPGDGIGPEVINEVKKIINWFNNKKSLDFEMDEDLAGGISYDKHGTPITDEVFYKALECEAVILGAVGGPKWDNVEFSKKPERALLKLRKELKLFANLRPAICFKQLVDASTLKPEIVSGLDIMIVRELTGGIYFGEPRGIKPIDNGERKGINTHTYTSSEIKRVAKIAFDLAKKRHNKV

SEQ ID NO: 87297 - protein, 169 aa, Unknown
  Bacterial polypetide isolated from the Sargasso Sea
SNVLKSSVLWNEVIEEVGSDYPDVNVVHILVDAAATYLCLNPTQFDVMVMENMFGDILSDQGGGILGSLGLMPSACVGPNKAYYEPSHGSAPDIAGKGIANPYSMIGSVAMMLEMSFNMDEESKKVWQAMQSVFSQGFSTPDLSKPESNLELISTARFGDLVLAELKKS

SEQ ID NO: 87298 - protein, 180 aa, Unknown
  Bacterial polypetide isolated from the Sargasso Sea
MATNQKKIFLLPGDGIGPEVVGETKKVIDWFNKKKSLDFKIDQDLIGGAAIDKHGVPITDEVFYKALESDAVIVGACGGPQYDKLEFSKKPERALLKLRKELKLFANLRPAICFKQLVDSSTLKPEIVSGLDILIVRELTGGIYFGEPRGVKPIENGERRGVNTHVYTTKEIKRIAKVAF

SEQ ID NO: 87299 - protein, 190 aa, Unknown
  Bacterial polypetide isolated from the Sargasso Sea
RIAFDVARKRNCKVCSVDKANVLEATGFWREVVTNLHTKYSDIELSHMYVDNCAMQLVRNPKQFDVILTTNMFGDILSDEASMLTGSIGMLPSASLGEKYAMYEPIHGSAPDIASKELANPLATILSVGMLFKYSLDQEKPNVWIEEAVESVLGQGVRTADIMSDGMKQVGTREMGDLVAAELEKKVDQQ

SEQ ID NO: 87300 - protein, 206 aa, Unknown
  Bacterial polypetide isolated from the Sargasso Sea
MIKIKKRKILLLPGDGIGPEVIAEVKKIIEWFNSNKSLDFEIDQDLVGGAAYDKHGTPITDEAFYKAQESAAVILGAVGGPKWDNIDFSKKPERALLKLRKELKLFANLRPAICFKQLVDASSLKPEFVSNLDILFVRELTGGIYFGEPRGIKPIDNGERKGINTHVYTTSEIKRVARVAFDLARKRNNKVTSCEKSNVMEAGQLW

SEQ ID NO: 87301 - protein, 286 aa, Unknown
  Bacterial polypetide isolated from the Sargasso Sea
DEQNKIFRFCLNQELIGGASIDVNKVPITDEVFYKSLESDAVILGACGGPKWDNLEFSKKPERALLKLRKELKLFANLRPAICFKQLVDSSTLKPEIVSGLDIMIVRELTGGIYFGEPRGIEPIENNQRKGVNTHTYTTSEIHRIARVAFELAKKRRNKVTSCEKSNVMEAGVLWREEVQATKDKEFKKVELNHMLADNCAMQLLRYPKQFDVILADNLFGDMLSDEAAMLTGSLGLLPSASLGSKDKNGRVRSLYEPVHGSAPDIEGQNIANPIATILSLSMALR

SEQ ID NO: 87302 - protein, 180 aa, Unknown
  Bacterial polypetide isolated from the Sargasso Sea
MNKKKIVVTPGDGIGPEVTEQALIILKEVATRFQLELEVEEMPVGGTAYDQTGTPIPDETLKACLDADAVLLGAVGGPKWEPLDFSVRPERGLLKLRSELQLYANLRPAVIYGDLVDASTLKRDVVEGADLMVIRELTGGIYFGEPRGVEERNGERVGIHTLVYSESEIRRVGEMACEIA

SEQ ID NO: 87303 - protein, 250 aa, Unknown
  Bacterial polypetide isolated from the Sargasso Sea
VDASSLKPEIVSGLDIMIVRELTGGIYFGEPRGIKPIENGERKGINTHTYTSSEIIRVAKVAFELALKRKKKVTSCEKSNVMEAGILWREEVQKVKDEEYSNIELNHMLADNCAMQLLRNPKQFDVIVTDNLFGDILSDEAAMLTGSLGLLPSASLGAKDKNGKMRSMYEPVHGSAPDIAGTGKANPIASILSFSMALRYSLDLNKEADNLDNAVQKVLDDGLRTADILSKGKKEVSTSQMGDAIISKLK

SEQ ID NO: 87304 - protein, 266 aa, Unknown
  Bacterial polypetide isolated from the Sargasso Sea
MQFAVDSDAVLFGAVGGSKWDDVEREKRPEAALLRLRKDLDLFANLRPAVVLDALAEASSLKLDLVKGLDILIVRELTSGVYFGQPRGISKINETESKAIDTQLYTTSEVNRVSRVAFDLAKLRKNKVTSAEKSNVMETGLFWRNTVTDLHKKEYSSVDLEHMLADNCAMQLVRYPKQFDVILTDNLFGDLLSDTAAMLTGSLGMLPSAALGSIKENGTRAAMYEPVHGSAPDIAGQSKANPLAMIMSFAMMLKYSFDMKEDSKLI

SEQ ID NO: 87305 - protein, 153 aa, Unknown
  Bacterial polypetide isolated from the Sargasso Sea
KEYKKIELNHMLADNCAMQLLRNPKQFDVILADNLFGDMLSDEAAMLTGSLGLLPSASLGLRDKNGKIRSLYEPVHGSAPDIAGKNVANPIATILSLSMALRYSLDLDKEADLLDVAVQKVLDDGLRTKDIMSDGKKEVTTTDMGDAIISKLK

SEQ ID NO: 87306 - protein, 226 aa, Unknown
  Bacterial polypetide isolated from the Sargasso Sea
MIVRENTEGEYSSVGGKMYQNTEREIVIQETIMSKHGIDRVQKFAFELAKKRKRKKLTNATKSNGISITMPYWDERFNENKKSYPEIETDQFHIDILTARFVLTPEWFDVVVASNLFGDILSDLGPACTGTIGIAPSGNINPTNKYPSLFEPVHGSAPDIAGKGIANPIGQIWSGAMMLDYLGEKEAASRIVKSIEKTLLEKNNRTKDLDGDSNTTECASKVLSNL

SEQ ID NO: 87307 - protein, 209 aa, Unknown
  Bacterial polypetide isolated from the Sargasso Sea
RKGINTHSYTSSEIQRVARVAFDLAKKRQNKVTSCEKSNVMEAGLLWKEEVQDLHDKEFSEVELNHMLADNCAMQLLRNPKQFDVIVTDNLFGDMLSDQASMLTGSLGLLPSASLGAKNKEGQMRAMYEPIHGSAPDIAGKGMANPIATILSFAMALRYSLDLDKEANVLEKAVQDVLDDGLRTKDIISKGKKEISTSQMGDAIISKLQ

SEQ ID NO: 87308 - protein, 149 aa, Unknown
  Bacterial polypetide isolated from the Sargasso Sea
DVALTHFFADNAAYQLSCNPGDFDVILADNLFGDILSDQSAAVSGSLGMLPSACLSELPQSGRSERPAIYEPVHGSAPDIAGAGIANPIGTILSVAMLLEYSAGESVGARKISTAVEAVLQAGFTTPDLGGKHTTQQMTDEVIRQVRRI

SEQ ID NO: 87309 - protein, 241 aa, Unknown
  Bacterial polypetide isolated from the Sargasso Sea
QPQAEKVENLDLLIIRELTGGIYFGEPRGRKEDKKEAFNTMIYSHEEIERIGRVAFEAAQKRNKKLCSVDKANVLEVSVLWREVITDLSKDYPDVSLSHMLVDNAAMQLVREPKQFDVVVTGNLFGDILSDIAAMMTGSIGMLPSASINSENKGMFEPVHGSAPDIAGQGLANPIATILSVAMMLRYSFSLEEPASKIEEAIEKVLKEGYRTNDLEGPEDMKLNTDQMSQKILENLRGFNE

SEQ ID NO: 87310 - protein, 115 aa, Unknown
  Bacterial polypetide isolated from the Sargasso Sea
MIKIKKRKFLLLPGDGIGPEVVGEVKKIINWFNSKKSLDFEIEEGLAGGVSYDKHGTPITDEVFYKALECEAVILGAVGGPKWDNLEFSKKPERALLKLRKELKLFANLRPANLL

SEQ ID NO: 87311 - protein, 244 aa, Unknown
  Bacterial polypetide isolated from the Sargasso Sea
MLLPGDGIGPEVIAEVKKIIEWFNSNKSLDFEIDQDLVGGEAYDKHGTPITDEAFYKAQESAAVILGAVGGPKWDNIDFSKKPERALLKLRKELKLFANLRPAICFKQLVDASSLKPEFVSNLDILFVRELTGGIYFGEPRGIKPIDNGERKGINTHIYTTSEIERVARVAFDLARKRNNKVTSCEKSNVMEAGQLWKEEVQAIHEKEYSDVELKHMLADNCAMQLVRNPKQFDVIVTDNLFCD

SEQ ID NO: 87312 - protein, 102 aa, Unknown
  Bacterial polypetide isolated from the Sargasso Sea
MIKVKKRKILLLPGDGIGPEVITEVKKIIQWFNKNKSLDFEIDEDLVGGAAYDKYKTPITDEVFYKALESEAVILGAVGGPKWDKLEFSKKPERALLKLRKE

SEQ ID NO: 87313 - protein, 202 aa, Unknown
  Bacterial polypetide isolated from the Sargasso Sea
QQAIFTRRGTDRILRYAFDFARRSGRRHVTSATKSNGLYHSMPFWDERFAAIGAEYPDVAADQYHVDILAARFVMSPERFNVVVGSNLFGDILSDLGPGITGTIAVAPSANLNPERRFPSMFEPVHGSAPDIAGQGIANPIGQIWSGAMMLEHLGETEPAALVMRALETALIAPDIARTPDLGGNGTTAGFAQAVRNTLLGL

SEQ ID NO: 87314 - protein, 257 aa, Unknown
  Bacterial polypetide isolated from the Sargasso Sea
KNRKILLLPGDGIGPEVVREVQKIIEWFNENKSLDFSFEEELIGGASIDVNKIPITDEVFYKSLESEAVILGACGGPKWDNLEFSKKPERALLKLRKELKLFANLRPAICFKQLVDSSTLKPEIVSGLDIMIVRELTGGIYFGEPRGIEPIENNERKGVNTHSYTTSEIQRIAKVAFDLAKKRKNKVTSCEKSNVMEAGVLWREEVQALKDKEYKKIELNHMLADNCAMQLLRNPKQFDVILADKIFGDMLSDEAAM

SEQ ID NO: 87315 - protein, 136 aa, Unknown
  Bacterial polypetide isolated from the Sargasso Sea
MQLLRNPKQFDVFVTDNLFGDMLSDQASMLTGSLGLLPSASLGAKNKDGEMRAMYEPIHGSAPDIAGKSIANPIATILSFAMALRYSLDLDKEAEALEKAVQDVLNDGLRTKDILSKGSKEVTTSQMGDAIISKLQ

SEQ ID NO: 87316 - protein, 258 aa, Unknown
  Bacterial polypetide isolated from the Sargasso Sea
DALAESSTLKLDLVKGLDILIVRELTSGVYFGQPRGISKISDTESKAIDTQVYTTSEIERVSRVAFDLAKLRRNKVSSAEKSNVMETGLFWRNIVTDLHKKEYASVNLEHILADNCAMQLVRYPKQFDVILTDNLFGDLLSDTAAMLTGSLGMLPSASLGPLRENGSRAAMYEPVHGSAPDIAGQSKANPLAMVMSFAMMLKYSFDMQEDSKLVEKAVQNVLLKGLRTADIKDGAKKIVSTKEMGDSVIEELKILSGN

SEQ ID NO: 87317 - protein, 167 aa, Unknown
  Bacterial polypetide isolated from the Sargasso Sea
TKSNGISITMPYWDQRFYENKKDFPEIKTDQFHIDILAARFVLTPEWFDVVVASNLFGDILSDLGPACTGTIGIAPSGNINPTNKHPSLFEPVHGSAPDIAGKGIANPIGQIWSGAMMLDYLGEKEAAKRIVSSIEKTLLEKQNRTKDLDGDSNTKECANKILDNIN

SEQ ID NO: 87318 - protein, 152 aa, Unknown
  Bacterial polypetide isolated from the Sargasso Sea
MIKIKKRKFLLLPGDGIGPEVVGEVKKIILWFNKNKSLDFEIDEDLAGGVSYDKHGTPITDEVFYKALESEAVILGAVGGPKWDNVEFSKKPERALLKLRKELKLFANLRPAICFEQLVEASTLKPEIVSGLDIMIVRELTGGIYFGEPKRH

SEQ ID NO: 87319 - protein, 159 aa, Unknown
  Bacterial polypetide isolated from the Sargasso Sea
VQELHDKEFKDVQLNHMLADNCAMQLLRNPKQFDVIVTDNLFGDMLSDQASMLTGSLGLLPSASLGAKNKDGKIRAMYEPIHGSAPDIAGKGVANPIATILSFAMALKYSLNLDKEADVLEKAVQTVLDEKLRTKDILSPGMKEVSTSEMGDAIISKLQ

SEQ ID NO: 87320 - protein, 153 aa, Unknown
  Bacterial polypetide isolated from the Sargasso Sea
KEYKDVELSHMLADNCAMQLLRNPKQFDVIVTDNLFGDMLSDQASMLTGSLGLLPSASLGAKNKDGEMRAMYEPIHGSAPDIAGQGIANPIASILSFAMALRYSLDLDKEADVLEKAVQDVLNDGLRTKDIMSEGMKETSTSAMGDAIISKLQ

SEQ ID NO: 87321 - protein, 189 aa, Unknown
  Bacterial polypetide isolated from the Sargasso Sea
PAAIYGDLVNASTLKAEVVDGADLMVVRELTGGIYFGNPRGVEERDGERVGFNTLVYSEYEIRRIAKIGFETAMKRRKKLTSVDKANVLESTEFWREIVIDVGTNFPEVELSHMYVDNAAMQIIRDPKQFDTMVTTNMFGDIISDAAAMMTGSLGMLPSASIGGEIGMYEPVHGSAPDITGQDKANPLA

SEQ ID NO: 87322 - protein, 141 aa, Unknown
  Bacterial polypetide isolated from the Sargasso Sea
MDALITILPGDGIGPEVAKSGKEILQLIANKYNHNFKFEEKLIGGSAIDQCSSALPQETIDACKDSNAVVLGAVGGPKWDNPNAKVRPEQGLLGIRESLGVFANIRPVIIYPSLAKASPLKEEKLIDVDLIVIRELTGGIY

SEQ ID NO: 87323 - protein, 132 aa, Unknown
  Bacterial polypetide isolated from the Sargasso Sea
MIKVKKRKILLLPGDGIGPEVIAEVKKVINWLNKNRSLDFEVDEDLVGGVAYDKHGTPITDEVFYKALESEAVILGAVGGPKWDNLDFSKKPERALLKLRKELKLFANLRPAICFKQLVDASSLKPEIVSGL

SEQ ID NO: 87324 - protein, 194 aa, Unknown
  Bacterial polypetide isolated from the Sargasso Sea
RVARVAFDLARKRNNKVTSCEKSNVMEAGQLWKEEVKALHEKEYQDVELQHMLADNCAMQLVRNPKQFDVIVTDNLFGDMLSDEAAMLTGSLGLLPSASLGAKDKIGNMRSLYEPVHGSAPDIAGKGIANPIAIILSFAMALKYSLDLDKEAKMLEKSVQSVLDEGLRTKDILSKGTKEVSTSEIGDAIISKLQ

SEQ ID NO: 87325 - protein, 303 aa, Unknown
  Bacterial polypetide isolated from the Sargasso Sea
MDFETEEGLVGGASYEKHKKPITDEVFYKALESEAVILGAVGGPKWDNLEFSKRPERALLKLRKELKLFANLRPAICFKQLVEASSLKPEIVSGLDIMIVRELTGGIYFGEPRGIKPIENGERKGINTHTYTSSEIIRVAKVAFELAQKRNKKVTSCEKSNVMESGILWREEVQKIRDEEYSNIELNHMLADNCAMQLLRNPKQFDVIVTDNLFGDILSDEAAMLTGSLGLLPSASLGAKDKNGKMRSMYEPVHGSAPDIAGTGKANPIATILSFSMALRYSLDLDKEADNLDLSVQKVLMTV

SEQ ID NO: 87326 - protein, 241 aa, Unknown
  Bacterial polypetide isolated from the Sargasso Sea
MKKFKIITLPGDGIGPEITSSAVEILNAISDLNDIEFEIVEKYVGGISIDKYGIPLTKETLSECLDADSVFLGAVGGPKWDNVEHSNKPEQALLKLRKSLNLFSNLRPATIFKPLIDSSSLKSNIIENTDILIVRELTGGIYFGEPRGFDKDRALNTLVYNRFEVERIARVSFELAQNRTGRLVSVHKSNVLESSQFWQDIVHEVHKDYKDVELSDMYVDNAAMQIIQNPKQFDVIVTQNL

SEQ ID NO: 87327 - protein, 106 aa, Unknown
  Bacterial polypetide isolated from the Sargasso Sea
TGSLGLLPSASLGAKNKDGELRAMYEPIHGSAPDIAGKGIANPIATILSFAMALRYSLDLDKEAEALEKAVQEVLNEGLRTKDILSKGMKEISTSKMGDAIISKLQ

SEQ ID NO: 87328 - protein, 216 aa, Unknown
  Bacterial polypetide isolated from the Sargasso Sea
YFGNPRGHITNTKLPKAFNTMVYDSAEIERITEIAIKIANQRNKKICSVDKSNVLEVSQLWRDTVLNITSKDKNISLSNMYVDNAAMQLVRDPGQFDVILTSNLFGDILSDLAAMLTGSIGMLPSASLNINGPGVFEPVHGSAPDIAGKNMANPIAMLLSASMMLKIGLNEEKASENLETAIDKVLSKGFRTADLADGSSEVLSCSGIGDKIIEEI

SEQ ID NO: 87329 - protein, 270 aa, Unknown
  Bacterial polypetide isolated from the Sargasso Sea
TLRSHFDLFSNLRPARIYPGLESLSPLREDIAKSGVDVLVVRELTSGIYFGQPKGREGEGEEEFAYDTMRYSKREIRRIAIAAFEAAQKRRGKVTSVDKANVLVTSRLWREIAEEVAKDYPDVELDHIYIDNATMQIMKNPAQFDVMLCSNLFGDIVSDECAMMTGSMGLLPSASMNEDGFGLYEPAGGSAPDIAGQGIANPIAQILSAAMMLRFSMNLNDAADAIEKAVVATLEAGVLTGELLPADKRSQAASTSQVGDEIVKQLMAQE

SEQ ID NO: 87330 - protein, 225 aa, Unknown
  Bacterial polypetide isolated from the Sargasso Sea
IYFGEPRGIKPIDNGERKGINTHTYTTSEIQRVARVAFDLAKKRQNKVTSCEKSNVMEAGLLWKEEVQDLHDKEFKDVELNHMLADNCSMQLLRNPKQFDVIVTDNLFGDMLSDQASMLTGSLGLLPSASLGAKNKEGQMRAMYEPIHGSAPDIAGKGIANPIATILSFAMALKYSLNLDKEANALEKAVQDVLDEGLRTRDIISKGKKEISTSQMGDAIISKLQ

SEQ ID NO: 87331 - protein, 239 aa, Unknown
  Bacterial polypetide isolated from the Sargasso Sea
MAEVEKIIKWFNSNKSLDFEIDKDLVGGAAYDKHGSPITDEAFYKAQESEAVILGAVGGPKWDNLDFAKKPERALLKLRKELKLFANLRPAICFKQLVDASSLKPELVSDLDILFVRELTGGIYFGEPRGIKPIDNGERKGINTHVYTTSEITRVARVAFDLAKKRNNKVTSCEKSNVMEAGQLWKEEVQAVHDKDYKDVELNHMLADNCAMQLVRNPKQFDVIVTDNLFGDMLSDEAA

SEQ ID NO: 87332 - protein, 313 aa, Unknown
  Bacterial polypetide isolated from the Sargasso Sea
KVKKRKILLLPGDGIGPEVITEVKKIINWFNDKKSLDFEIDQELVGGCSYDKHGTPITDEVFYKALESEVIMLGAVGGPTWDNLEFSKKPERALLKLRKELKLFANLRPAICFKQLVDASTLKPEVVSGLDIMIVRELTGGIYFGEPRGIKPIENGERKGINTHSYTTSEITRVARIAFDLARKRSNKVTSCEKSNVMEAGQLWKEEVQELHEKEYKDVELSHMLADNCAMQLLRNPKQFDVIVTDNLFGDMLSDQASMLTGSLGLLPSASLGAKNKDGEMRAMYEPIHGSAPDIAGTGIANPIASILSFAMA

SEQ ID NO: 87333 - protein, 157 aa, Unknown
  Bacterial polypetide isolated from the Sargasso Sea
SLHDKEFKDVELSHMLADNCAMQLLRNPKQFDVIVTDNLFGDILSDQASMLTGSLGLLPSASLGAKNKDGEMRAMYEPIHGSAPDIAGKGLANPIATILSFAMALRYSLNLDNEADSIENAVQSVLDDGLRTKDILSKGKKEVSTSQMGDAIISKLK

SEQ ID NO: 87334 - protein, 104 aa, Unknown
  Bacterial polypetide isolated from the Sargasso Sea
LGLLPSASLGAKDKEENMRSMYEPVHGSAPDIAGKGLANPIATILSFSMALKYSLNLDKEAKELENAVQKVLDEGLRTKDIMSKGNKEVSTKAMGDAVIAYLQK

SEQ ID NO: 87335 - protein, 284 aa, Unknown
  Bacterial polypetide isolated from the Sargasso Sea
NGDEVEFSKKPERALLKLRKELKLFANLRPAICFEQLVGASTLKPEVVSGLDIMIVRELTGGIYFGEPRGIKPIENGERKGINTHTYTTNEIVRVARIAFDLAKKRSNKVTSCEKSNVMEAGQLWKEEVQELHDKEFKDVELSHMLADNCAMQLLRNPKQFDVIVTDNLFGDMLSDQASMLTGSLGLLPSASLGAKNKDGEMRAMYEPIHGSAPDIAGKSIANPIASILSFAMALRYSLDLDNEADALEKAVQQVLNDGLRTKDILSDGMKEVSTTAMGDAIIS

SEQ ID NO: 87336 - protein, 276 aa, Unknown
  Bacterial polypetide isolated from the Sargasso Sea
MNEVLKVASCIEEMSSVNFEIDQDEIGGAAYDKYGTPLSDETLKKAKSSHAVLLGAVGGSKWDNLDFSLKPEQGLLRIRKELDLFANLRPALCFESMVEASSLKPELVSGLDIMIVRELTGGVYFGEPRGIKELSDGTRQGTNTQTYNTNEIRRVARIAFELAQKRNKKVTSCEKSNVMESGILWREEVEYVHKNEFKDIELSHMYADNCAMQLVRNPKQFDVIVTDNLFGDILSDEAAMLTGSLGMLPSASLGEIDENNFRKSLYEPVHGSAPDI

SEQ ID NO: 87337 - protein, 77 aa, Unknown
  Bacterial polypetide isolated from the Sargasso Sea
EPVHGSAPDIAGKGIANPIGQIWSGAMMLDHLGEKEAAKSILNSIEKTLSIKENRTKDLQGTSNTAQCAKAVLNNIN

SEQ ID NO: 87338 - protein, 195 aa, Unknown
  Bacterial polypetide isolated from the Sargasso Sea
QRVARVAFDLARKRQNKVTSCEKSNVMEAGLLWKEEVEQLHDKEYKDVQLNHMLADNCSMQLLRNPKQFDVIVTDNLFGDMLSDQASMLTGSLGLLPSASLGAKNKEGKIRAMYEPIHGSAPDIAGKGIANPIATILSFAMALRYSLDLDKEADALDKAVQTVLDEGLRTKDILSKGMKEVSTSEMGDAVISKLQ

SEQ ID NO: 87339 - protein, 239 aa, Unknown
  Bacterial polypetide isolated from the Sargasso Sea
MSKSKKRKILLLPGDGIGPEVIGEVKKIINWFNEKKSLDFEIDEDLAGGCSYDKHGTPITDEVFYKAVESAFVMLGAVGGPKWDNVEFSKKPERALLKLRKELKLFANLRPAICFKQLVDASTLKPEIVSGLDIMIVRELTGGIYFGEPRGIKLIENGERKGVNTHTYTSNEIIRVARIAFDLAKKRSNKVTSCEKSNVMEAGQLWKEEVQTLHDNEYKDVELSHMLADNCSMQLLRNP

SEQ ID NO: 87340 - protein, 105 aa, Unknown
  Bacterial polypetide isolated from the Sargasso Sea
GSLGLLPSASLGAKNKDGEMRAMYEPIHGSAPDIAGKGIANPIASILSFAMALKYSLELDKEAEALEKAVQEVLNDGLRTKDILSNGMKEVSTSQMGDAIISKLQ

SEQ ID NO: 87341 - protein, 230 aa, Unknown
  Bacterial polypetide isolated from the Sargasso Sea
MSQYSIAVLAGDGIGPEVMQEANKVLDAVEKKFKVTLNRTAYPVGGYAIDTEGEALPSKTLLGCEQSDAILFGSIGGPKWDTLPLEQRPERAALLTLRSHFDLFSNLRPARIYPGLESLSPLREDIAKSGVDVLVVRELTSGIYFGQPKGREGEGEEEFAYDTMRYSKREIRRIAIAAFEAAQKRRGKVTSVDKANVLVTSRLWREIAEEVAKDYPDVELDHIYIDNATM

SEQ ID NO: 87342 - protein, 205 aa, Unknown
  Bacterial polypetide isolated from the Sargasso Sea
AFNTMIYDEKEIERIGRVAFESAQKRNKKLCSVEKANVLEVSKFWREIITNLSKEYPDIELTHQLADNTAMQLVLDPNQFDVIVSSNLFGDILSDIAATLTGSIGMLPSASLNSSSQGMYEPCHGSAPDIAGKNLANPLAMILSLAMAFRYSLENHEAANIIEESVKEFISRGFRTKDLTEDTSFLETGEVASELIPIIKEKSDV

SEQ ID NO: 87343 - protein, 206 aa, Unknown
  Bacterial polypetide isolated from the Sargasso Sea
MAFNTLIYDEKEIKRIGRVSFESAQKRNKKLCSVEKANVLEVSKFWREIITNLSKEYPDVELTHQLADNTAMQLVLDPNQFDVIVSSNLFGDILSDIAATLTGSIGMLPSASLNSSSQGMYEPCHGSAPDIAGKNLANPLAMILSLAMAFRYSLENSEAASIIEKSVKEFISRGFRTKDLTDDSSFLETDEVSSKLISIIKEKSNV

SEQ ID NO: 87344 - protein, 261 aa, Unknown
  Bacterial polypetide isolated from the Sargasso Sea
YDNLEFSKKPERALLKLRKELKLFANLRPAICFKELVDASSLKPEIVSGLDILIVRELTGGIYFGEPRGVKPIENGERRGVNTHVYTTKEIKRIAKVAFDLAAKRKNKVTSCEKSNVMEAGVLWREEVQLLKDKDYKKIELNHMLADNCAMQLLRNPKQFDVILADNLFGDMLSDEAAMLTGSLGLLPSASIGDKDKNGRMRSLYEPVHGSAPDIAGKNISNPIATILSFSMALKYSLGLEKESTLLDKAVEKTLEDGLRT

SEQ ID NO: 87345 - protein, 218 aa, Unknown
  Bacterial polypetide isolated from the Sargasso Sea
GIKPIENGERKGINTYTYTTSEITRVARVAFDLAKKRSNKVTSCEKSNVMEAGQLWKEEVQELHDKEYKDVELSHMLADNCAMQLLRNPKQFDVIVTDNLFGDMLSDQASMLTGSLGLLPSASLGAKNKDGEMRSMYEPIHGSAPDIAGKGIANPIASILSFAMALRYSLDLDNEADILEKAVQKVLNDGLRTKDILSEGKKEVSTSAMGDAIISKLQ

SEQ ID NO: 87346 - protein, 104 aa, Unknown
  Bacterial polypetide isolated from the Sargasso Sea
SLGLLPSASLGAKDKNGNMRSLYEPVHGSAPDIAGQGIANPIATILSFAMALRYSLDLDKEADSLEKAVQGVLDEGLRTKDIISKGMKEVSTSVMGDAIISKLQ

SEQ ID NO: 87347 - protein, 287 aa, Unknown
  Bacterial polypetide isolated from the Sargasso Sea
MPEAIRVLEKIAKRYNISFDFDHKDWSCERYHQFGSMMPENGLDEIQNHDSILLGAVGFPGVPDHISLWGLLIPIRRKFQQYVNLRPVYLLEGMKCPLAGREPGDIDFWIVRENNEGEYSEVGGRMFQGTDEEFAVQQSIFTRRGVDRIIRYAFELAKTRNRKHVTSATKSNGIIHSMPFWDERFDEISKDYPDIETDKYHIDILTAHFVRNPDWFDVVVGSNLFGDILSDLGPAITGTIGMAPSANINPERVFPSCFEPVHGSAPDIAGKGISNPIGQIWSASNDA

SEQ ID NO: 87348 - protein, 227 aa, Unknown
  Bacterial polypetide isolated from the Sargasso Sea
GIYFGEPRFIKKVNKKRIGGNTLVYDEDEIRRIARMAFIYAKKRKNKVTSLDKANVLEVMQLWRDVVNEVHDSEFRDVELEHLYIDNAAMQVIKRPSTFDVILAGNLFGDIISDEIAELTGSLGMLPSASIGNKAGIYEPVHGSAPDIAGKDIANPIAAIMSLAMLFKYSLNLDNISELIDTAISNTLNSGIRTKDIHNDKDEEVVSCSQMGDIILTNIDEIKSKFI

SEQ ID NO: 87349 - protein, 230 aa, Unknown
  Bacterial polypetide isolated from the Sargasso Sea
MNKTLNISLLPGDGIGQEISTEASKVLEWFNEKTDLKINIKEELVGGVSIDKYNAPLTDETLDNISHSDAILLGAVGGPKWEGLDFEKRPERGLLKIRKELDLFANFRPAIVFDALASSSTLKTEIIQGLDILIIRELTSGIYFGEPRGVSQIDEENKRGFNTLAYTTKEIKRIAKVGFETAQARSKKLCSVDKANVLESTELWRDVVTEVSKDYPDVELSHMYVDNASM

SEQ ID NO: 87350 - protein, 269 aa, Unknown
  Bacterial polypetide isolated from the Sargasso Sea
LLALRKSLELFANLRPAFLFNELASASPLKNNIIENLDILIVRELTGGIYFGEPRGIVENESPKYGFNTMIYNENEIRRIAKVAFEAAMNRNKKLCSVEKANVLEVSKFWRSIVTEMSSEYPEVELSHQLADNTAMQLVLNPNQYDVIVSSNLFGDILSDIAATLSGSIGMLPSASLNSSSQGMYEPCHGSAPDIAGQGIANPIAMIASLAMAFEYSLDRVDLARRIESAIKTFISKGFRTKDIVTSEEFVKTHEVAPIIISILKDGHE

SEQ ID NO: 87351 - protein, 231 aa, Unknown
  Bacterial polypetide isolated from the Sargasso Sea
MSSYRIAVLPGDGIGPEVMAEAVKVLEKVQAKFGFTLDYERHDVGGIAIDNHGTPLPQSTIAGCEAADAVLFGSVGGPKWEHLPPNDQPERGALLPLRAHFKLFCNLRPARIYTGLEQFSPLRADISDRGFDIACVRELTGGIYFGQPKGREGEGPTEKAFDTEVYHRFEIERIAKIAFESARVRRGKVTSIDKANVLASSILWREVVTQVAKSYPDVALNHMYIDNATMQ

SEQ ID NO: 87352 - protein, 245 aa, Unknown
  Bacterial polypetide isolated from the Sargasso Sea
LEVVDDQFSLELSFSERRLGGIAIDEEGAAYPDATRALARDADAILLGAVGGPQWDALPAADRPERGLLAIRADLDLFCNHRPALLFPDLAEASSLRAELVAGLDVLIVRELTGGIYFGEPRGITTDADGVREGHNTDRYNETEIRRIGRLAFEAAQKRSGRLCSVDKANVLEVTMLWRETMEALSTDYPDVVLSHMYVDNAAMQLVREPKQFDVLVTGNLFGDILSDIAAMLTGSIGMLPSASL

SEQ ID NO: 87353 - protein, 212 aa, Unknown
  Bacterial polypetide isolated from the Sargasso Sea
GGKMFPDTEREIVMQETIMSRVGVDRVLKFAFELANKTEKKHLTSATKSNGISITMPYWDERVEEMAKQYSEVIWDKYHIDILCAHFVLNPDKFNVVVASNLFGDILSDLGPACTGTIGIAPSGNINPEKKFPSLFEPVHGSAPDIAGKGIANPVGQIWAGAMMLEHLGFKEASEHIVRVIEEVLEKEEYRTIDLGGKANTISCGSAIADAI

SEQ ID NO: 87354 - protein, 218 aa, Unknown
  Bacterial polypetide isolated from the Sargasso Sea
MIKVKKRKVLLLPGDGIGPEVTTEVKKVINWFNDKKSLDFEIDEDLVGGSSFDKHGTPLTDEVFYKALESAVIMLGAVGGPKWDGVEFSKKPERALLKLRKELKLFANLRPAICFEQLVNASTLKPEIVSGLDILIVRELTGGVYFGEPRGIKPIENGERKGVNTHTYTSSEIIRVARIAFDLAKKRSNRVISCEKSNVMEAGQLGKKKCNHYMIKNI

SEQ ID NO: 87355 - protein, 111 aa, Unknown
  Bacterial polypetide isolated from the Sargasso Sea
LFGDILSDLGPACTGTIGIAPSGNINPENNFPSLFEPVHGSAPDIAGKNIANPIGQIWAGAMMLDHFGFNEAHDKILNSIKDILLKKEFRTKDLGGTASTQECGDAIADNI

SEQ ID NO: 87356 - protein, 116 aa, Unknown
  Bacterial polypetide isolated from the Sargasso Sea
MNKKKTILFLAGDGIGPEVSSSAKSILESIDEIYNLDLVIEEALVGGSAYDQTGLPLPEETLNAARKSDAILLGAVGGPKWDDLDYQYRPERALLGLRYELDLFANFRPRTPLKAL

SEQ ID NO: 87357 - protein, 205 aa, Unknown
  Bacterial polypetide isolated from the Sargasso Sea
THTYTTKEIERVARVAFDLAKKRGNKVTSCEKSNVMEAGQLWKEEVQILHDKEYKDVELTHMLADNCAMQLLRNPKQFDVIVTDNLFGDILSDEAAMLTGSLGLLPSASLGAKDKDGNMRSMYEPVHGSAPDITGKGIANPIATILSFSMALKYSLNLDKESKALDNAVQKVLDDGLRTKDIISKGKKEVSTSEMGDAIIACLQK

SEQ ID NO: 87358 - protein, 166 aa, Unknown
  Bacterial polypetide isolated from the Sargasso Sea
NVLEVSKFWRNVVAEVHSSDFEVCELSNMLADNAAMQLILNPNQFDVVLASNLFGDILSDIAATLTGSIGMLPSASLNDSLKGMYEPCHGSAPDIAGKGIANPIAMILSLAMALRYSLNFDELASQIEVAVKKYITAGFRTKDISIDGKFLTTNETTEKIISFLNE

SEQ ID NO: 87359 - protein, 178 aa, Unknown
  Bacterial polypetide isolated from the Sargasso Sea
MDKQKRITLTILPGDGIGSEVMDAALLVLDAISKKKGFNFDLKHEHAGGVSIDKHNSPLTDSVLQTCYDSDAVLLGALGGPKWDDLPQDQKPEMGFLKLRKGLDLFANLRPAIPFDALLNSSSLKKEVIKDTNIMIVRELAGGIYFGEPRSYGEEEAYNTLRYNRHEIERISKMAFEL

SEQ ID NO: 87360 - protein, 83 aa, Unknown
  Bacterial polypetide isolated from the Sargasso Sea
MQKKKVLLLPGDGIGQEVTASAGRILEKIVQLEGVEIELLEGLIGGAAIDSTGDPLPKETLELAKECDAVLLGGVGGPKWDDC

SEQ ID NO: 87361 - protein, 175 aa, Unknown
  Bacterial polypetide isolated from the Sargasso Sea
CEKSNVMEAGLLWREEVQDLHDKEFKDVELDHMLADNCAMQLLRNPKQFDVIVTDNLFGDMLSDQASMLTGSLGLLPSASLGAKNKEGQMRAMYEPIHGSAPDIAGKGIANPIATILSFAMALRYSLDLDKQANVLEKAVQEVLNDGLRTKDIISKGKKEVSTSQMGDAIISKLQ

SEQ ID NO: 87362 - protein, 269 aa, Unknown
  Bacterial polypetide isolated from the Sargasso Sea
LGAVGGPKWDKLEFSKKPERALLKLRKELKLFANLRPAICFKQLVDASSLKPEIVSGLDIMIVRELTGGIYFGEPRGIKPIDNGERKGINTHTYTTKEIERVARVAFDLAKKRDNKVTSCEKSNVMEAGQLWKEEVQILHDKEYKDVELTHMLADNCAMQLLRNPKQFDVIVTDNLFGDILSDEAAMLTGSLGLLPSASLGAKDKDGNMRSMYEPVHGSAPDITGKGIANPIATILSFSMALKYSLNLDKESKALDNAVQKVLDDGLRT

SEQ ID NO: 87363 - protein, 218 aa, Unknown
  Bacterial polypetide isolated from the Sargasso Sea
LTGGIYFGNPREINAESAFNTMIYSSNEVERIAEVAFEAAMKRNKKICSVDKANVLEVSEFWRKIMIKVSKKYPEVILEHMLVDNAAMQLVQNPKQFDVIVSSNLFGDILSDISSVLSGSIGMLPSASLNSASKGLYEPVHGTAPDIAGKSIANPLASILSIGMMFKYSFSQEDISIKIENAVKKVISDGYVTKDIAVNNSKVVSTQEMGDLIIANLN

SEQ ID NO: 87364 - protein, 203 aa, Unknown
  Bacterial polypetide isolated from the Sargasso Sea
MIKVKKRKILLLPGDGIGPEVISEVKKIINWFNDFKSLDFEIDQELVGGCSYDKHGTPITDEVFYKALESEVIMLGAVGGPKWDNLEFSKKPERALLKLRKELKLFANLRPAICFKQLVDASTLKPEVVSGLDIMIVRELTGGIYFGEPRGIKPIENGERKGINTHTYTTSEITRVARIAFDLDRKRSNKVTSCEKSNVMKQD

SEQ ID NO: 87365 - protein, 244 aa, Unknown
  Bacterial polypetide isolated from the Sargasso Sea
RALLKLRKELKLFANLRPAICFKQLVDASTLKPEIVSGLDIMIVRELTGGIYFGEPRGIKPIENGERKGINTHTYTSNEIIRVARIAFDLAKKRSNKVTSCEKSNVMEAGQLWKEEVQALHDKEYKDIELSHMLADNCAMQLLRNPKQFDVIVTDNLFGDMLSDQASMLTGSLGLLPSASLGAKNKDGEMRAMYEPIHGSAPDIAGKGIANPIATILSFAMALRYSLDLDKEAEALEKAVQDVL

SEQ ID NO: 87366 - protein, 222 aa, Unknown
  Bacterial polypetide isolated from the Sargasso Sea
MNRELSIVALPGDGIGNEIFNEARKVLNWINNNSHYKLNITEELIGGSSIDASGEPLTNNVLEKLRVTDAILLGAVGGPKWEDLTFDKRPERGLLKIRKELDLFANFRPAIVFDSLASSSSLKPEIINGLDLMIIRELTGGIYFGEPRGVEKLNENNYKGFNTLVYTSEEIRRIASVAFETAQSRSKKLCSVDKANVLESTELWRKVIIEVSKDYPDVELNH

SEQ ID NO: 87367 - protein, 227 aa, Unknown
  Bacterial polypetide isolated from the Sargasso Sea
MIVRENTEGEYSSVGGKMYQNTEREIVIQETIMSKHGIDRVQKFAFELAKTRDRKKLTNATKSNGISITMPYWDQRFYENKKDFPEIKTDQFHIDILAARFVLTPEWFDVVVASNLFGDILSDLGPACTGTIGIAPSGNINPTNKHPSLFEPVHGSAPDIAGKGIANPIGQIWSGAMMLDYLGEKEAATRIVSSIEKTLLEKQNRTKDLDGDSNTKECANKILGNIN

SEQ ID NO: 87368 - protein, 304 aa, Unknown
  Bacterial polypetide isolated from the Sargasso Sea
GIPITDEVFYKALECEAVILGAVGGPKWDDVEFSKKPERALLKLRKELKLFANLRPAICFKQLVDASTLKPEIVSGLDIMIVRELTGGIYFGEPRGIKPIDNGERKGINTHTYTTSEIQRVARVAFDLAKKRKNKVTSCEKSNVMEAGLLWKEEVQEIHDKEFKDVELNHMLADNCAMQLLRNPKQFDVIVTDNLFGDMLSDQASMLTGSLGLLPSASLGAKNKDGKIRAMYEPIHGSAPDIAGQGIANPIATILSFAMALRYSINLDKEADALEKAVQNVLDEGLRTKDILSKGTKEVSTSEM

SEQ ID NO: 87369 - protein, 152 aa, Unknown
  Bacterial polypetide isolated from the Sargasso Sea
MSINQKKILLLPGDGIGPEVVGETKKVIDCFNKKKSLDFKIDQDLIGGAAIDQHGVPITDEVFYKALESDAVIVGACGGPQYDKLEFSKKPERALLKLRKELKLFANLRPAICFKQLVDSSTLKPEIVSGLDILIVRELTGGIYFGEPKGSE

SEQ ID NO: 87370 - protein, 177 aa, Unknown
  Bacterial polypetide isolated from the Sargasso Sea
TSCEKSNVMEAGVLWREEVQTLKDKEYKKIELNHMLADNCAMQLLRNPKQFDVILADNLFGDMLSDEAAMLTGSLGLLPSASLGDKDKNGRTRSLYEPVHGSAPDIAGKNISNPIATILSFSMALKYSLGLEKESALLDKAVEKTLENGLRTPDIMSPGKKKVSTSDMGDAIISNLN

SEQ ID NO: 87371 - protein, 223 aa, Unknown
  Bacterial polypetide isolated from the Sargasso Sea
MGEPRGIKPIENGERKGINTHTYTSSEIIRVARIAFDLAKKRSNKVTSCEKSNVMEAGQLWREEVQTLHDKEYKDVELSHMLADNCAMQLLRNPKQFDVIVTDNLFGDMLSDQASMLTGSLGLLPSASLGAKNKDGEMRAMYEPIHGSAPDIAGKSVANPIATILSFAMALRYSLDLDKEAEALEKAVQEVLNDGLRTKDIFSGGTKEVSTSQMGDAIISKLQ

SEQ ID NO: 87372 - protein, 248 aa, Unknown
  Bacterial polypetide isolated from the Sargasso Sea
KKDIIDGLDILIIRELTSGVYFGEPKKIDILEDGSKVAIDTQKYTSLEIERVAEVAFELSLKRNKKLCSTEKANVMETGVLWREVVSKVHKNKYQDVELSHMYADACSMELVRNPKQFDVILADNLFGDMLSDQASTLTGSIGMLPSASLGNKLDKGIQNSLYEPIHGSAPDIAGQGIANPIAQILSLAMMLSYSFNLSKEEKMINKAISNCLSKGMRTKDIFQKGCKEVSTSEMGNFIVDELNNLIK

SEQ ID NO: 87373 - protein, 99 aa, Unknown
  Bacterial polypetide isolated from the Sargasso Sea
SASLGSKDKNGNMRSMYEPVHGSAPDIAGKGIANPIATILSFSMALRYSLNLDKEANELDNAVQKILDDGLRTKDIFSKGNKEVSTQVMGDAIIACLQK

SEQ ID NO: 87374 - protein, 177 aa, Unknown
  Bacterial polypetide isolated from the Sargasso Sea
MPSNKRKILLLPGDGIGPEVVRETKKVIEWFNKKKSLDFNLDEGLIGGAAIDKHGVPITDEVFYKALESDAVIFGACGGPKYDKLEFSKKPERALLKLRKELKLFANLRPAICFKQLVDASSLKPEIVSGLDILIVRELTGGIYFGEPRGVKPIENGERRGVNTHVYTTKEIKRIAK

SEQ ID NO: 87375 - protein, 270 aa, Unknown
  Bacterial polypetide isolated from the Sargasso Sea
VTLWGSLLQFRREFDQFINLRPVKLFEGVNAPLANKKPGDIDMMIVRENTEGEYSSVGGKMYQNTEREIVIQETIMSKHGIDRVQKFAFELAKKRKRKKLTNATKSNGISITMPYWDERFNENKKSYPEIETDQFHIDILTARFVLNPEWFDVVVASNLFGDILSDLGPACTGTIGIAPSGNINPTNKYPSLFEPVHGSAPDIAGKGIANPVGQIWSGAMMLDYLGEKEAARRIVSSIEKTLLEKQNRTKDLDGDSNTKECANKILDNIN

SEQ ID NO: 87376 - protein, 154 aa, Unknown
  Bacterial polypetide isolated from the Sargasso Sea
DKEYKDVELSHMLADNCSMQLLRNPKQFDVIVTDNLFGDMLSDQASMLTGSLGLLPSASLGAKNKDGEMRAMYEPIHGSAPDIAGKGIANPIASILSFAMALRYSLDLDKEAEALEKAVQDVLNDGFRTKDILSDGMKEVSTSQMGDAIISKLQ

SEQ ID NO: 87377 - protein, 204 aa, Unknown
  Bacterial polypetide isolated from the Sargasso Sea
LHDFAFKLARQRKKKGKLGKVTCVDKANVFRSQAFFRKIYDERKHKFKDIEADYCYVDAMALNLIRNPWQYDVMVMENIFGDILSDLGGGLIGGMGMASCAEIGDNHGLFQPAHGSAPDILGKDKANPLATILSASMMLEYLSDKKNCESTSLGSRLIEAAIEIGFEKNELRPIEFGGDMGTKAVTESLSGLLKDNEIQKQILT

SEQ ID NO: 87378 - protein, 214 aa, Unknown
  Bacterial polypetide isolated from the Sargasso Sea
IKNNERRGINTHSYTSSEIQRIARTAFELAKKRKNKVTSCEKSNVMEAGVLWREEVQALKDKEFKKIELSHMLADNCAMQLLRNPKQFDVILADNLFGDMLSDEAAMLTGSLGLLPSASLGAKDKNGKIRSLYEPVHGSAPDITGKNIANPIATILSFSMALKYSLDLDKEANLLDLAVQKVLDEGLRTKDIMSAGKKEVSTTDMGDAIISKLK

SEQ ID NO: 87379 - protein, 292 aa, Unknown
  Bacterial polypetide isolated from the Sargasso Sea
KETAKKHQFKIQFDDFEFASCDYYKKHGKMLPDDWKEKIGSHDAIFFGAVGDPDKVPDHISLWGSLLKFRREFDQYVNLRPVKLFNGVPCPLANKKPGDIDMLIVRENTEGEYSSVGGRMYKDTEREIAVQETIMSRQGVDRVQKYAFELAKSKGRKKVTNATKSNGISITMPFWDERFDIMKKNYPEIKTDQFHIDILTARFVLTPEWFDVVVASNLFGDILSDLGPACTGTIGIAPSGNINPENKYPSLFEPVHGSAPDIAGKGIANPIGQIWSGALMLDHLGEKEAAKS

SEQ ID NO: 87380 - protein, 104 aa, Unknown
  Bacterial polypetide isolated from the Sargasso Sea
MGPACTGTIGIAPSGNINPTNKHPSLFEPVHGSAPDIAGKGIANPIGQIWSGAMMLDYLGEKEAATRIVSSIEKTLLEKQNRTKDLDGNSNTKECANKILDNIN

SEQ ID NO: 87381 - protein, 282 aa, Unknown
  Bacterial polypetide isolated from the Sargasso Sea
LLGAVGFPGVPDHVSLWGLLIPIRREFQQYVNLRPVRLFEGMPCPLKGRDPGSIDFWIVRENNEGEYSEVGGRMYSGTAEELVVQQSIFTRRGTDRIIDFAFNLARTRDQKHVTSATKSNGIIHSMPFWDERFDVIAKNYPECKTDKYHIDILTAHFVRNPDWFDVVVGSNLFGDILSDLGPAVTGTIGIAPGGNINPERNFPSCFEPVHGSAPDIAGRGIANPIGQIWSAAMMLEHLGEKTAADHIVTSIEAVIKDGSVLTPDMGGLANTRELGEAIRSVM

SEQ ID NO: 87382 - protein, 86 aa, Unknown
  Bacterial polypetide isolated from the Sargasso Sea
MNKKKIVVTSGDGIGPEVTEQALIILKEVSSRFQLELEIEEMSVGGTAYDQTGTPIPDETLKACLDADAVLLGAVGGPKWEPLDFS

SEQ ID NO: 87383 - protein, 269 aa, Unknown
  Bacterial polypetide isolated from the Sargasso Sea
MIKVKKRKILLLPGDGIGPEVINEVKKIIEWFNKNRSLDFEVDQDLVGGAAYDKFKTPITDEVFFKALECEAVILGAVGGPKWDNLDFSKKPERALLKLRKELKLFANLRPAICFKQLVEASSLKPEIVSGLDIMIVRELTGGIYFGEPRGIKPIDNGERKGINTHTYTSKEIERVSRVAFELAKKRNNKVTSCEKSNVMEAGQLWKEEVTALHKKDYKDVNLEHMLADNCAMQLLRNPKQFDVIVTDNLFGDILSDEAAMLTGSLGLL

SEQ ID NO: 87384 - protein, 155 aa, Unknown
  Bacterial polypetide isolated from the Sargasso Sea
MSDNRTLLFLPGDGIGPEIMTEVRRVIDWMDKRRSVSFEITEGLIGGAAIDETGVPLPDETLEAAHAADAILMGAVGGPKWEVLPFEIQPERGLLGIRKELGLFANLRPAIVFDALAEASTLKTDVVKGLDIMIIRELTGGIYFGEPAWNRKDRW

SEQ ID NO: 87385 - protein, 181 aa, Unknown
  Bacterial polypetide isolated from the Sargasso Sea
KPVVHAIHKANVMKLTDGIFLDACRQVSKKHKDIIYKEMLVDACAAHIIRDPSQFDIIVTTNMFGDILSDLATEFSGSLGLAGSLNAGENYAMAQAQHGSAPDIAGQNTANPISLILSTSMLLNWLGKRRKIKDLILASSLIDKSVTNLFENKNNLTKDLGGTASTEKITENLIHILNHLI

SEQ ID NO: 87386 - protein, 192 aa, Unknown
  Bacterial polypetide isolated from the Sargasso Sea
GSEIDRIAKVAFELATERRGHLCSVDKANVLDVSQLWRDRVDAMASGYGGVEVSHMYVDNAAMQLVRDPRQFDVLLTGNLFGDILSDEAAMLTGSIGMLPSASLGSDGPGLFEPVHGSAPDIAGQDKANPMAMVLSAAMMLRIGLKQSAAAAALEQAVDRVLAEGFRTGDLLSEGCTAVGCSAMGEQLLKAL

SEQ ID NO: 87387 - protein, 193 aa, Unknown
  Bacterial polypetide isolated from the Sargasso Sea
MIKVKKRKILLLPGDGIGPEVIAEVKKIIDWLNKKKSLDFQTEEGLVGGASYEKYKKPITDEVFYKALESEAVVLGAVGGPKWDNLEFSKRPERALLKLRKELKLFANLRPAICFKQLVDASSLKPEIVSGLDIMIVRELTGGIYFGEPRGIKPIENGERKGINTHVYTSSEIVRVAKVAFELAQKRNKKVTS

SEQ ID NO: 87388 - protein, 281 aa, Unknown
  Bacterial polypetide isolated from the Sargasso Sea
MAANKKLLFLPGDGIGPEVMGQVRKVIDWLDNRRHVSFDLDEDLVGGAAIDTHGTSLTDATLDKAMNVDAVLLGAVGGPKWDNVARDIRPEAGLLTLRKDMDLFANLRPANCLPAMAEASSLKEDLVSGLDILIVRESTGGAYFGQPKMIENIEGGQRAVDTQVYTTAEIERVCRVAFDLAGKRNGKLHSVEKANVMETGVLWRQVATEIGEEFPEIELEHMYADNCAMQLVRAPKQFDVIVTDNLFGDILSDCAAMLTGSLGMLPSATLSGADQSGRRRA

SEQ ID NO: 87389 - protein, 211 aa, Unknown
  Bacterial polypetide isolated from the Sargasso Sea
GEKNRTENKASDLCVYHDFEVERIIKIAADLASKRKNQLCSVDKANVLETSRFWRNITDNIIAKDYPHIDLEHILVDAAAMYLINRPSDFDVIVTENMFGDILTDEVSMLSGSLGMLPSASLSDNKVGLYEPIHGSAPDIAGKGIANPCGMISSIAMLLRYSLNLQEEAIDVENAIYNVIDNGARTADIATADDKISSTEEITKLIIDEIT

SEQ ID NO: 87390 - protein, 296 aa, Unknown
  Bacterial polypetide isolated from the Sargasso Sea
KVKKRKILLLPGDGIGPEVINEVRKVITWLNSKKSLDFEIDEDLAGGASYDKHGTPITDEVFYKALESKIVMLGAVGGPKWDNLEFQKKPERALLKLRKELKLFANLRPAICFKQLVHASTLKPEIVSGLDIMIVRELTGGIYFGEPRGIKPIDNGERKGINTHTYTSSEIIRVAKVAFDLAKKRSNKVTSCEKSNVMEAGQLWKEEVQTLHDAEYKEVELNHMLADNCSMQLLRNPKQFDVIVTDNLFGDILSDQASMLTGSLGLLPSASLGEKNKDGEMRAMYEPIHGSAPDIA

SEQ ID NO: 87391 - protein, 296 aa, Unknown
  Bacterial polypetide isolated from the Sargasso Sea
YKIASIAGDGIGKEVVPEALKILKEVANQHQFKLKIDEFDFSSCDYYEKHGKMLPDDWKQQIGNHDAIFFGAVGMPDKYPDHITLWGSLLQFRREFDQFINLRPVKLFKGVNAPLANKKPGEIDMMIVRENTEGEYSSVGGKMYQNTEREIVIQETIMSKHGIDRVQKFAFELAKTRDRKKLTNATKSNGISITMPYWDQRFYENKKDFPEIKTDQFHIDILAARFVLTPEWFDVVVASNLFGDILSDLGPACTGTIGIAPSGNINPTNKHPSLFEPVHGSAPDIAGKGIANPIGQ

SEQ ID NO: 87392 - protein, 226 aa, Unknown
  Bacterial polypetide isolated from the Sargasso Sea
VVRENNEGEYSEIGGRLHRGTDHEVAIQESIFTKFGTDRILRYAFDLCKQLGLEKVTSATKSNGIIHTMPYWDERFSVIAEEYPMLTTDQYHIDILTANFVLHPDWFDVVVGSNLFGDILSDLGPAVAGSIAIAPSANINPDGDLPSMFEPVHGSAPDIAGKGIANPIGQIWSGSMMLEHHGYKEAADEIVRTIEEVISEGGPKTPDLGGQANTKELGQAIADSIR

SEQ ID NO: 87393 - protein, 276 aa, Unknown
  Bacterial polypetide isolated from the Sargasso Sea
DYQYRPERALLGLRSELDLFANFRPAILSKYLTASSSFKAEKVENLDLLIIRELTGGIYFGEPRGRKADKKEAFNTMIYSHEEIERIGRVAFEAAQKRNKKLCSVDKANVLEVSVLWREVITDLSKDYPDVSLSHMLVDNASMQLVREPKQFDVVVTGNLFGDILSDIAAMMTGSIGMLPSASINSENKGMFEPVHGSAPDIAGKGLANPLAAILSVAMMLRYSFGLEEPASKIEEAIEKVLKDGYRTFDLEGLENMKLNTDQMSQKILENLRGFN

SEQ ID NO: 87394 - protein, 120 aa, Unknown
  Bacterial polypetide isolated from the Sargasso Sea
LFGDILSDEAAMLTGSLGLLPSASLGAKDKNGNMRSMYEPVHGSAPDIEGKGIANPIASILSFSMALRYSLNLDKEAGELDKAVQNVLNDGLRTKDIFSKGNKEVSTKQMGDAIIAHLQK

SEQ ID NO: 87395 - protein, 86 aa, Unknown
  Bacterial polypetide isolated from the Sargasso Sea
ALFEPVHGSAPDIAGKNLADPRATLLSLAMTLEWLAHHHPALGNAAQHLHDTVNADLAKEGDTSPQHRQEKGTLETGQRLYALLAQ

SEQ ID NO: 87396 - protein, 143 aa, Unknown
  Bacterial polypetide isolated from the Sargasso Sea
MFLPGDGIGAEVMAQVKRVIEWMDQKRSVNFDIQEELIGGVAIDAKGVPLPEETLEAAKNSDAILMGAVGGPKWEKLPFEIQPERGLLGIRKELGLFANLRPALVFDALVGASSLKENIVKGLDIMIVRELTGGIYFGEPRGV

SEQ ID NO: 87397 - protein, 170 aa, Unknown
  Bacterial polypetide isolated from the Sargasso Sea
LTNATKSNGISITMPFWDERFNEMKKNYTDIETDQFHIDILVARFVLNPEWFDVVVASNLFGDILSDLGPACTGTIGIAPSGNINPENKFPSLFEPVHGSAPDIAGKGIANPVGQIWSGAMMLDYLGEKEASNSIVEAIEKSLSDKSNRTKDLGGDADTTKSSNSILANL

SEQ ID NO: 87398 - protein, 155 aa, Unknown
  Bacterial polypetide isolated from the Sargasso Sea
MKEVRKVIDWYGAKLGLVFDVSEDLVGGIAYDTHGTPLHDSTLARAQEVDAVLLGAVGGPDYDNLDFSVKPERGLLKLRKEMDLFANLRPAQCFNALAEFSSLKTEVVSGLDIMIVRELTSGIYFGEPRGIIEEGNERVGINTQRYTESEIDRVA

SEQ ID NO: 87399 - protein, 144 aa, Unknown
  Bacterial polypetide isolated from the Sargasso Sea
KKEKIKLPPCEKSNVMEAGVLWREEVQFIKDKEFKTVELNHMLADNCAMQLLRYPKQFDVILADNLFGDMLSDEAAMLTGSLGLLPSASLGLKDQKGRIRSLYEPVHGSAPDIEGKNIANPIATILSLSMALRYSLDLDKEADE

SEQ ID NO: 87400 - protein, 292 aa, Unknown
  Bacterial polypetide isolated from the Sargasso Sea
QLVVLNGDNVEFSKKPERALLKLRKELKLFANLRPAICFEQLVDASTLKPEIVSGLDIMIVRELTGGIYFGEPRGIKPIENGERKGVNTHTYTSSEIIRVARIAFDLAKKRSNKVTSCEKSNVMEAGQLWKEEVQTLHEKEYKDVELSHMLADNCAMQLLRNPKQFDVIVTDNLFGDMLSDQASMLTGSLGLLPSASLGAKNKDGEMRAMYEPIHGSAPDIAGKGIANPIATILSFAMALRYSLDLDKEAETLEKAVQDVLNDGLRTKDILSNGMKEVSTSQMGDAIISKLQ

SEQ ID NO: 87401 - protein, 222 aa, Unknown
  Bacterial polypetide isolated from the Sargasso Sea
GEPRGIKPIDNGERKGINTHTYTSSEILRVARVAFDLAKKRSNKVTSCEKSNVMEAGQLWKEEVQELHDKEYKEVELSHMLADNCAMQLLRNPKQFDVIVTDNLFGDMLSDQASMLTGSLGLLPSASLGAKNKDGEMRAMYEPIHGSAPDIAGKGIANPIASILSFAMALRYSLDLDDEADILEKAVQEVLNDGLRTKDILSEGMKDISTSAMGDAIISKLQ

SEQ ID NO: 87402 - protein, 232 aa, Unknown
  Bacterial polypetide isolated from the Sargasso Sea
MIKLKKRKILLLPGDGIGPEVVKEVKKIITWLNGKKSLDFEIDEDLAGGCSYDTHGTPITDEVFYKALESAVVILGAVGGPKWDNVEFSKKPERALLKLRKELKLFANLRPAICFKQLVDASTLKPEIVSGLDIMIVRELTGGIYFGEPRGIKPIENGERKGINTHTYTSSEIIRVAKIAFDLAKKRSNKVTSCEKSNVMEAGQLWKEEVQALHEKEYKDVELTHMLADNCA

SEQ ID NO: 87403 - protein, 141 aa, Unknown
  Bacterial polypetide isolated from the Sargasso Sea
DVEFNKFHIDILCAHFVLNPQMFNVVVGSNLFGDILSDLGPACTGTIGIAPSGNINPENNFPSLFEPVHGSAPDIAGKNIANPIGQIWAGAMMLNHFGYKNAHDCILESIETVLSKKEHRTNDLGGDANTQECGDAIAKNI

SEQ ID NO: 87404 - protein, 307 aa, Unknown
  Bacterial polypetide isolated from the Sargasso Sea
MPGDGIGPEIIDQALKVTEAVCNKYGHELSYEKALTGAAAIDAVGTPYPEDTHQLCMDSDAVLFGAIGNPKFDNDPNAKVRPEQGLLAMRKKLGLYGNIRPLTTFKSLIHKSPLRQDLVDGADFVCIRELTGGIYFGRPQGRTEDGNTAYDTCIYTREEIERILKVGFEFAGKRNKKLTVVDKANVLASSRLWREVAQQMAPQYPDINVEYMFVDNAAMQIIQWPKNFDVIVTENMFGDILTDEASVISGSLGLLPSASIGIHTSVFEPIHGSYPQAAGKNIANPCATILSAAMMFEYAFNLSEASR

SEQ ID NO: 87405 - protein, 261 aa, Unknown
  Bacterial polypetide isolated from the Sargasso Sea
NLRPAICFKQLVDSSTLKPEIVSGLDIMIVRELTGGIYFGEPRGIEPIENNQRKGINTHTYTTSEIHRIARVAFDLAKKRRNKVTSCEKSNVMEAGVLWREEVQAIKDKEFKKVELNHMLADNCAMQLLRHPKQFDVILADNLFGDMLSDEAAMLTGSLGLLPSASLGSKDKNGRIRSLYEPVHGSAPDIEGKNIANPIATILSLSMALRYSLDLGKEADQIEKAVQTVLDDGLRTKDIMSKNMKEVSTTDMGDAIIAKLK

SEQ ID NO: 87406 - protein, 169 aa, Unknown
  Bacterial polypetide isolated from the Sargasso Sea
SVDKANVLETSQFWRDVMIDVSKEYADVELSHMYVDNAAMQLVKAPKAFDVVVTGNMFGDILSDEAAMLTGSIGMLPSASLDKNNKGLYEPSHGSAPDIAGKGVANPLATILSAAMMLRYSLNKAEQADRIENAVKKVLEQGFRTGDILTPGCKQVGTVAMGDAVVAAL

SEQ ID NO: 87407 - protein, 220 aa, Unknown
  Bacterial polypetide isolated from the Sargasso Sea
QGELNPIENGERRGVNTHVYTTKEIKRIAKVAFELAGKRKNKVTSCEKSNVMEAGVLWREEVQSLKEKEYKKIELNHMLADNCAMQLLRNPKQFDVILADNLFGDMLSDEAAMLTGSLGLLPSASLGDKDKNGRTRSLYEPVHGSAPDIAGKNISNPIATILSFSMALKYSLNLEKESEMLNKAVEKALENGLRTPDIMSKGKKNVSTSDMGDAIISNLN

SEQ ID NO: 87408 - protein, 270 aa, Unknown
  Bacterial polypetide isolated from the Sargasso Sea
IGPEISNEANKVLLYVSQKHDFDVEVTDRLIGGIAIDEEGSPISDSTIEIAKESDAVFLGGVGGPKWDSLEPANKPEKGLLKIRSELDLFANLRPSMAFPGLEDTSSLKKEVIEGLNILIVRELTGGIYFGTPREIKSDSAFNTMIYSTSEVERIAEVAFKSAMKRGKKLCSVDKANVLEVSEFWRGIVNKVSKKYPEVKLEHMLVDNAAMQLVQNPKQFDVILSSNLFGDILSDISSILSGSIGMLPSASLDLNSKGLFEPVHGTAPDI

SEQ ID NO: 87409 - protein, 99 aa, Unknown
  Bacterial polypetide isolated from the Sargasso Sea
MIKVKKRKILLLPGDGIGPEVISEVKKIINWFNDKKSLDFEIDQDLAGGCSYDKHGTPITDEVFYKALESEVIMLGAVGGPKWDDLDFSKKPERALLKL

SEQ ID NO: 87410 - protein, 185 aa, Unknown
  Bacterial polypetide isolated from the Sargasso Sea
MIKVKDRKLLLLPGDGIGPEVVREVKKIIEWFNKNKSLDFKIEEDLVGGASYDKHKNPITDEVFYKALESEAVILGAVGGPNYDNLEFSKRPERALLKLRKELKLFANLRPAICFKQLVDASSLKPEIISGLDIMIVRELTGGIYFGEPRGIEPIENNERKGINTHTYTTSEIQRVARVALISKK

SEQ ID NO: 87411 - protein, 190 aa, Unknown
  Bacterial polypetide isolated from the Sargasso Sea
AFKLAMKRKKSLTNVHKSNVLKSSVLWNEILDEVHRDYSEVSVDHVLVDAAATYLCLDPARFDVMVMENMFGDILSDQCGGILGSLGLMPSACVGPEQSYYEPSHGSAPDIAGKGIANPYSMLGSVAMMLEMSFNLDAEATNLWKAMQSVFSDGFTTPDLARRGDAEKQISTSEFGDRVLAALAAMPKAG

SEQ ID NO: 87412 - protein, 224 aa, Unknown
  Bacterial polypetide isolated from the Sargasso Sea
ISGEPRGIKPIDNGERKGVNTHVYTSSEIERVARVAFDLARKRSKKVTSCEKSNVMESGQLWKEEVKVLHEKEYKDIELNHMLADNCAMQLVRYPKQFDVIVTDNLFGDMLSDEAAMLTGSLGLLPSASLGAKDKNGNMRSLYEPVHGSAPDIAGKGIANPIASILSFAMALKYSLDLDKESNSLEKAVQSVLDEGLRTKDILSKGAKEVSTSEMGDAIISKLQ

SEQ ID NO: 87413 - protein, 136 aa, Unknown
  Bacterial polypetide isolated from the Sargasso Sea
MQLLRNPKQFDIILSDNLFGDILSDEAAMLTGSLGLLPSASLGEKDKNGKTRSLYEPVHGSAPDIAGKNISNPIATILSFSMALKYSLGFEKESNLLNKAVEKTLDEGLRTTDIMSKGKKKVSTSEMGDAIISNLN

SEQ ID NO: 87414 - protein, 155 aa, Unknown
  Bacterial polypetide isolated from the Sargasso Sea
MIKVKKRKILLLPGDGIGPEVIAEVKKIINWFNDKKSLDFEIDQELVGGCSYDKHGTPITDEVFYKALESEVIMLGAVGGPKWDNLEFSKKPERALLKLRKELKLFANLRPAICFKQLVDASTLKPEVVSGLDIMIVRELTGGIYFGEPRGIKPN

SEQ ID NO: 87415 - protein, 239 aa, Unknown
  Bacterial polypetide isolated from the Sargasso Sea
MIKVKKRKILLLPGDGIGPEVIAEVKKIINWFNDKKSLDFEIDQELVGGCSYDKHGTPITDEVFYKALESEVIMLGAVGGPTWDNLEFSKKPERALLKLRKELKLFANLRPAICFKQLVDASTLKPEVVSGLDIMIVRELTGGIYFGEPRGIKPIENGERKGINTHTYTTSEIIRVARVAFDLARKRSNKVTSCEKSNVMEAGQLWKEEVKELHEKEYKDVELSHMLADNWCYAAFKKP

SEQ ID NO: 87416 - protein, 156 aa, Unknown
  Bacterial polypetide isolated from the Sargasso Sea
MNYKIAVLPGDGIGPEVTDQAIRVLQSIGTRFGHSFELETALVGGIAIDQTGSALPNQTLEIAKKSDSILFGAVGGPKWDDPAAKTRPEAGLLALRKSLQLFANLRPVTAHPDLIGASPIRQNLISGVDLIVVRELTGGLYFANPKKKVGQQPRGR

SEQ ID NO: 87417 - protein, 286 aa, Unknown
  Bacterial polypetide isolated from the Sargasso Sea
ILGAVGGPKWDDVEFSKKPERALLKLRKELKLFANLRPAICFKQLVDASTLKPEIVSGLDIMIVRELTGGIYFGEPRGIKPIDNGERKGINTHTYTTSEIQRVARVAFDLAKKRKNKVTSCEKSNVMEAGLLWKEEVQELHDKEFKDVELNHMLADNCAMQLLRNPKQFDVIVTDNLFGDMLSDQASMLTGSLGLLPSASLGAKNKDGKIRAMYEPIHGSAPDIAGQGLANPIATILSFAMALRYSLDLDKEGDALEKAVQNVLDEGLRTKDILSKGMKQVSTSEM

SEQ ID NO: 87418 - protein, 161 aa, Unknown
  Bacterial polypetide isolated from the Sargasso Sea
MTSNKKIIILAGDGVGPEVIDETKKILDWFAKFQGLNFNIQESLVGGAAYEKYGVPLTEETLSDAVEADAILFGSVGGPQYDDVDFEKKPERGLLKLRKEMDLFANLRPAMVFPALANSSTLKEEIISGLDILILRELTGGIYFAEPRGIENVGKGEKKGF

SEQ ID NO: 87419 - protein, 246 aa, Unknown
  Bacterial polypetide isolated from the Sargasso Sea
MIKVKKRKFLLLPGDGIGPEVVGEVKKIIKWFNKNKSLDFEIDEDLAGGASYDKHGTPITDEVFYKALECEAVILGAVGGPKWDDVEFSKKPERALLKLRKELKLFANLRPAICFKQLVDASTLKPEIVSGLDIMIVRELTGGIYFGEPRGIKPIDNGERKGINTHTYTSSEIKRVARVAFDLAKKRKNKVTSCEKSNVMEAGLLWKEEVQELHENEFKDVELNHMLADNCSMQLLRNPKQFDVIV

SEQ ID NO: 87420 - protein, 246 aa, Unknown
  Bacterial polypetide isolated from the Sargasso Sea
RKSLLDASTLKKEIVEHVDLIVVRELIGGIYFGKPRGHITNTKIPKAFNTMVYDSAEIERITEIAIKIAKQRNKKICSVDKSNVLEVSQLWRDTVLNITSKDKNISLSNMYVDNAAMQLVKDPGQFDVILTSNLFGDILSDLAAMLTGSIGMLPSASLNNNGPGVFEPVHGSAPDIAGKNIANPIAMLLSASMMLKIGLNEEEAAENLETAIDKVLSKGFRTADLADGSSEVLSCSEIGEKIMDEI

SEQ ID NO: 87421 - protein, 299 aa, Unknown
  Bacterial polypetide isolated from the Sargasso Sea
FGFQIDQDLIGGAAIDKHGTPITDEVFYKALESDAVIVGACGGPQYDKLEFSKKPERALLKLRKELKLFANLRPAICFKQLVDSSTLKPEIVSGLDILIVRELTGGIYFGEPRGVKPIENGERRGVNTHVYTTKEIKRIAKVAFELAAKRNNKVTSCEKSNVMEAGVLWREEVQSLKDKEYKKIELNHMLADNCAMQLLRNPKQFDVILADNLFGDMLSDEAAMLTGSLGLLPSASLGDKDKNGRTRSLYEPVHGSAPDIAGKNISNPIATILSFSMALKYSLGLLKESAMLDKAVEKP

SEQ ID NO: 87422 - protein, 280 aa, Unknown
  Bacterial polypetide isolated from the Sargasso Sea
AVGDWKYDSLERALRPEQAILGLRKHLELFANFRPAICYPQLVDASPLKPELVAGLDILIVRELNGDIYFGQPRGVRAAPDGLFAGEREGFDTMRYSEPEVRRIAHVAFQAARKRAKKLLSVDKANVLETSQFWRDIMIDVSKEYADVELSHMYVDNAAMQLAKAPKQFDVIVTGNMFGDILSDEASMLTGSIGMLPSASLDKNNKGLYEPSHGSAPDIAGKGIANPLATILSAAMMLRYSLNRAEQADRIERAVKTVLEQGYRTGDIATPGCRQVGTTA

SEQ ID NO: 87423 - protein, 249 aa, Unknown
  Bacterial polypetide isolated from the Sargasso Sea
MSNKKILILPGDGIGNEVMAEVLKIIDWMEKTKSMSFDISERLVGGAAYDKEGNSISDETMQIALDSDAVLFGAVGGPKWDNVEREKRPEAALLRLRKDLDLFANLRPAVVLDALAESSSLKSDLVHGLDILIVRELTSGVYFGQPRGISKISDTESKAIDTQAYTTSEIERVSRVAFDLAKLRRNKVSSAEKSNVMETGLFWRNIVTDLHKKEYDSVNLEHILADNCAMQLVRYPKQFDVILTDNLFW

SEQ ID NO: 87424 - protein, 138 aa, Unknown
  Bacterial polypetide isolated from the Sargasso Sea
VRNPKQFDVILTDNLFGDLLSDVSAMLTGSLGMLPSASLGSISKTGTRAAMYEPVHGSAPDIAGKGLANPLAMIMSFAMMLKYSFNMIEDSDLIEKAVQNVLSGGFRTADIKQDGKTILSTSQMGQKVIEELSKLDGK

SEQ ID NO: 87425 - protein, 233 aa, Unknown
  Bacterial polypetide isolated from the Sargasso Sea
MKQNILSLAGDGIGQEVVPVSIEVLKAVTSLAGRDIEIVHGLVGGDAIDKVGSPLPDETLSLARESDAILLGGVGGPKWDHLPTQERPERGLLGLRQSLGLYANLRPALVSPALVDSSSLKHEIVNNLDILIIRELTGGIYFGQPRGTDVRNNERVGFNTLIYSESEIERIARTAFELAEKRNGKLCSVDKANVLEVSQLWREVVEALSSQYPAVQLSHMYVDNAAMQLVRNP

SEQ ID NO: 87426 - protein, 204 aa, Unknown
  Bacterial polypetide isolated from the Sargasso Sea
MKEVRKVIAWYGQNIGLVFDVSEDLVGGIAYDTHGTPLHDTTLEKAQEVDAVLLGAVGGPAYDNLDFGLKPERGLLRLRKEMDLFANLRPAQCFNALAEFSSLKKEVVSGLDIMIVRELTSGIYFGEPRGIIEQGNERVGINTQRYTEREIDRVARSAFELARRRGNKVCSMEKANVMESGVLWREVVQKVHDEDYQDVELSHM

SEQ ID NO: 87427 - protein, 246 aa, Unknown
  Bacterial polypetide isolated from the Sargasso Sea
ILGACGGPKWDNLEFSKRPERALLKLRKELKLFANLRPAICFKQLVDSSSLKPEIVSGLDIMIVRELTGGIYFGEPRGIEPIENNERRGINTHSYTTGEIQRIARVAFDLAKKRKNKVTSCEKSNVMEAGVLWREEVQALKDKEYKKVELNHMLADNCAMQLLRNPKQFDIILADNLFGDMLSDEAAMLTGSLGLLPSASLGLRDKKGKIRSLYEPVHGSAPDIAGKNVANPIATILSLSMALRYS

SEQ ID NO: 87428 - protein, 292 aa, Unknown
  Bacterial polypetide isolated from the Sargasso Sea
LFGAVGDWKYDSLERALRPEQAILGLRKHLELFANFRPAICYPQLVDASPLKPELVAGLDILIVRELNGDIYFGQPRGVRAAPDGLFAGEREGFDTMRYSEPEVRRIAHVAFQAARKRAKKLLSVDKANVLETSQFWRDIMIDVSKEYADVELSHMYVDNAAMQLAKAPKQFDVIVTGNMFGDILSDEASMLTGSIGMLPSASLDKNNKGLYEPSHGSAPDIAGKGIANPLATILSAAMMLRYSLNRAEQADRIERAVKTVLEQGYRTGDIATPGCRQVGTTAMGDAVVAAL

SEQ ID NO: 87429 - protein, 144 aa, Unknown
  Bacterial polypetide isolated from the Sargasso Sea
TLKGCEAADAILFGSVGGPKWEKLPPNEQPERGALLPLRGHFKLFCNLRPAKLHDGLEHMSPLRSDISARGFDVLCVRELTGGIYFGKPKGRQGEGESEEAFDTMRYTRREISRIARIAFEAARGRRKKVTSVDKANVLAYRPK

SEQ ID NO: 87430 - protein, 293 aa, Unknown
  Bacterial polypetide isolated from the Sargasso Sea
MIKIKKRKILLLPGDGIGPEVINEVKKIIDWLNKNKSLDLETEQGLVGGASYDKHGTPITDEVFYKALESEVVLLGAVGGPKWNNIDFTKKPERALLKLRKELKLFANLRPAICFSQLVDASSLKPEIVSGLDIMIVRELTGGIYFGEPRGIKHIDNGQRKGINTHTYTSNEIQRVARVAFDLAKKRNNKVTSCEKSNVMEAGQLWKEEVESLHKAEYNDVSLEHMLADNCAMQLLRNPKQFDVIVTDNLFGDILSDEASMLTGSLSLLPSASLGAKDKNGNMKSMYEPVHGS

SEQ ID NO: 87431 - protein, 205 aa, Unknown
  Bacterial polypetide isolated from the Sargasso Sea
MIKIKKRKILLLPGDGIGPEVIAEVKKIIEWFNSNKSLDFEIDQDLVGGAAYDKHGTPITDEAFYKAQESAAVILGAVGGPKWDNIDFSKKPERALLKLRKELKLFANLRPAICFKQLVDASSLKPEFVSNLDILFVRELTGGIYFGEPRGIKPIDNGERKGINTHVYTTSEIERVARVAFDLARKRSNKVTSCEKSNVMEAGQL

SEQ ID NO: 87432 - protein, 221 aa, Unknown
  Bacterial polypetide isolated from the Sargasso Sea
KKLIIIEEKAIDTQSYTTSEIIRIGKVAFDLSKKRLSKVTSVEKSNVMETGMFWKKTISNLHQNEFKDVELNHMLADNCAMQLVRNPKQFDVILTDNLFGDLLSDIAAMLTGSLGMLPSASLGPVNESGMRNAMYEPVHGSAPDIAGQGKANPLAMMMSFAMMLKYSLGMIDDSKLIEEAIQNVLLKGLRTPDIKQKNETAISTQEMGKAVINELNILSGK

SEQ ID NO: 87433 - protein, 132 aa, Unknown
  Bacterial polypetide isolated from the Sargasso Sea
MAANRKILVLPGDGIGPEVMAQVQRVIDWFDNKGSVRFEVTEDLVGGACYDSHGVSIREETMEVAVSTDAVLFGAVGGPRWDDVPREHRPEAGLLRLRKDLDLFANLRPAIVLDAMVEASTLKSEVVKGLDI

SEQ ID NO: 87434 - protein, 208 aa, Unknown
  Bacterial polypetide isolated from the Sargasso Sea
YRGYNTLEYTSNEIRRIAEVAFETAMSRSKKLCSVDKANVLESTELWRKVMIETSKKYPDVELSHMYVDNASMQLVRNPKQFDVIVTTNMFGDILSDCASMLTGSLGMLPSASIGINANGQKKAMYEPVHGSAPDISGQGVSNPLAMILSVGMMFEYSLDKKIIAEKINDAVRSVLKKGFRTKDIFSENKVLLSTSEMGDKVLEEMKE

SEQ ID NO: 87435 - protein, 192 aa, Unknown
  Bacterial polypetide isolated from the Sargasso Sea
DMPRARNRKVTSVEKANVMMSGVLWREVITNLHKKEGSDILINHMYADNCAMQLVRDPKQFDVIVTDNLFGDILSDCAAMLTGSLGMLPSASLGSVDQNTGKRHAMYEPVHGSAPDIAGKELANPLAELLSLSMLFRYSFEMKEEADLIDEAVSRALDAGPRTQDIMASGRVKVGTKGMMDSVINKLEELTK

SEQ ID NO: 87436 - protein, 242 aa, Unknown
  Bacterial polypetide isolated from the Sargasso Sea
VGDIKYDSLARELRPESGLLKLRSALNLFANIRPVKIRKSLLDSSTLKKEIVEHVDLIVVRELIGGIYFGKPRGNITNTKIPKAFNTMVYDSTEIERITEIAIKIANQRNKKICSVDKSNVLEVSQLWRDTVLNITSKDKNISLSNMYVDNAAMQLVRDPGQFDVILTSNLFGDILSDLAAMLTGSIGMLPSASLNNNGPGVFEPVHGSAPDIAGKNIANPIAMLLSASMMLKIGLNEEEAA

SEQ ID NO: 87437 - protein, 272 aa, Unknown
  Bacterial polypetide isolated from the Sargasso Sea
VAMDCDAVLFGAVGGAKWDNVERDKRPEAALLRLRKDLDLFANLRPAVVLDALSDSSSLKSDLVKGLDILIIRELTSGVYFGQPRGISKISENESKAVDTQLYTTSEINRVSRVAFDLAKLRNNKVTSVEKSNVMETGLFWKQTVTDLHKKEYSDVNLEHMLADNCAMQLVRYPKQFDVILTDNLFGDLLSDTAAMLTGSLGMLPSAALGPVKENGTRAAMYEPVHGSAPDIAGQSKANPLAMIMSFAMMLKYSFDMQEDSQMVEKAVQNVY

SEQ ID NO: 87438 - protein, 251 aa, Unknown
  Bacterial polypetide isolated from the Sargasso Sea
MTKSKSRKLLLLPGDGIGPEVVNEVKKIIEWLNKNKSLDFIIEEELIGGASIDKHKIPITDEVFYKSLECDAVILGACGGPKWDNLEFSKKPERALLKLRKELKLFANLRPAICFEQLVDSSTLKPEIVSGLDIMIVRELTGGIYFGEPRGIEPIKNNERKGINTHSYTTTEIKRIAKVAFDLAKKRKNKVTSCEKSNVMEAGVLWREEVQKLKEQEYNDVELEHMLADNCAMQLLRNPKQFDVILADNLL

SEQ ID NO: 87439 - protein, 277 aa, Unknown
  Bacterial polypetide isolated from the Sargasso Sea
PERALLKLRKELKLFANLRPAICFKQLVDASTLKPEIVSGLDIMIVRELTGGIYFGEPRGIKPIDNGERKGINTHTYTSNEIIRVARVAFDLAKKRSNKVTSCEKSNVMEAGQLWREEVQSLHEKDYKDVELNHMLADNCAMQLLRNPKQFDVIVTDNLFGDILSDQASMLTGSLGLLPSASLGAKNADGKMRAMYEPIHGSAPDIAGKGIANPIASILSFGMALKHSLNLDNEAAALENAVQEVLNDGLRTKDIVSKGTKEVSTTKMGDAIISKLK

SEQ ID NO: 87440 - protein, 282 aa, Unknown
  Bacterial polypetide isolated from the Sargasso Sea
MPWGAKFDWHRFAAGMSAFEINGDPLPKDMLENIKKTKLALKAPLETPIGEGFRSANVRLREKFKLYANVRPAISFIHDKRITDKIDLVLIRENTEGLYVGVEHFIPIGDDPKAVAEASGIITRNGCRRIAKFTFDYAIKTGRKKITIVHKANILKALTGLFLETAMEVGKEYGKELEIEERIVDNTAMQLVINPTQFNIILTTNMFGDILSDEIAGLIGGLGLAPGGNIGEDVAIFEAVHGTAPDIAGKGIANPTALFLASAMMLEHINEKNMADNLRNAI

SEQ ID NO: 87441 - protein, 208 aa, Unknown
  Bacterial polypetide isolated from the Sargasso Sea
MIKVKKRKILLLPGDGIGPEVIREVKKIIQWFNNKKSLDFEIDEDLVGGAAYDKHDIPITDEVFYKALESEAVILGAVGGPKWDNLDFSKKPERALLKLRKELKLFANLRPAICFKQLVDSSSLKPEIVSGLDIMIVRELTGGIYFGEPRGIKPIDNGERKGINTHTYTSNEIIRVAKVAFDLAKKRNNKVTSCEKSNVRKQDNLEGR

SEQ ID NO: 87442 - protein, 195 aa, Unknown
  Bacterial polypetide isolated from the Sargasso Sea
MTKVGIERVLDFAFKLAQKRKSKHLTSATKSNGISITMPYWDELFEKMSQSYPDIKTDQYHIDILCAHFVLNPDKFDVIVASNLFGDILSDLGPACTGTIGIAPSGNINPENNHPSLFEPVHGSAPDIAGKGIANPIGQIWAGAMMLNHFGFDDASNEILNAIKHSLSEPKLRTKDLAGSADTQTVGKAIEQIIQ

SEQ ID NO: 87443 - protein, 219 aa, Unknown
  Bacterial polypetide isolated from the Sargasso Sea
RGIKPIDNGERKGINTHTYTSSEIVRVARVAFDLAKKRSNKVTSCEKSNVMEAGQLWKEEVQTLHDEEFKEVELNHMLADNCAMQLLRNPKQFDVIVTDNLFGDMLSDQASMLTGSLGLLPSASLGAKNKDGEMRAMYEPIHGSAPDIAGKGIANPIATILSFAMALRYSLDLDKEADNLEKAVQDVLNDGLRTKDIISDGKKEVSTTQMGDAIISKLQ

SEQ ID NO: 87444 - protein, 108 aa, Unknown
  Bacterial polypetide isolated from the Sargasso Sea
MIKVKKRKILLLPGDGIGPEVIKEVRKIIQWFNKNKSLDFEIDEDLAGGAAYDKHGTPITDEVFYKALESEVVMLGAVGGPKWDNLEFSKKPERALLKIRKELKLLQI

SEQ ID NO: 87445 - protein, 98 aa, Unknown
  Bacterial polypetide isolated from the Sargasso Sea
MIKVKKRKILLLPGDGIGPEVINEVKKVIKWLNSKKSLDFEIDEDLAGGASYDKHGTPITDEVFYKALESEVVMLGAVGGPKWDNLEFSKKPERALLN

SEQ ID NO: 87446 - protein, 257 aa, Unknown
  Bacterial polypetide isolated from the Sargasso Sea
MIKVKKRKILLLPGDGIGPEVIDEVKKIINWFNKKKSMDFQIEEGLVGGASYEKNKNPITDEVFYKALESEAVILGAVGGPKWDNLEFSKRPERALLKLRKELKLFANLRPAICFKQLVNASSLKPEIVSGLDIMIVRELTGGIYFGEPRGIKPIENGERKGINTHIYTSSEIIRVAKVAFELAQKRNKKVTSCEKSNVMEAGILWREEVQKLKDEEYPNIELTHMLADNCAMQLLRDPKQFDVIVTDNLFGDILSD

SEQ ID NO: 87447 - protein, 261 aa, Unknown
  Bacterial polypetide isolated from the Sargasso Sea
MIKVKKRKILLLPGDGIGPEVVSEVKKIINWLNSKRSLDFEIDEDLVGGAAYDKHGTPITDEVFYKALESEAVILGAVGGPKWDNLDFSKKPERALLKLRKELKLFANLRPAICFKQLVDASSLKPEIVSGLDIMIVRELTGGIYFGEPRGIKPIDNGERKGINTHTYTSSEIARVARVAFDLAKKRNNKVTSCEKSNVMEAGQLWKEEVTETHKNEFKEVKLEHMLADNCAMQLLRNPKQFDVIVTDNLFGDILSDEAAM

SEQ ID NO: 87448 - protein, 297 aa, Unknown
  Bacterial polypetide isolated from the Sargasso Sea
MIKIKKRKILLLPGDGIGPEVIAEVKKIIEWLNSNKSLDFEIDQDLVGGAAYDKHGTPITDEAFYKAQESAAVILGAVGGPKWDNIDFSKKPERALLKLRKELKLFANLRPAICFKQLVDASSLKPEFVSNLDILFVRELTGGIYFGEPRGIKPIDNGERKGINTHVYTTSEIERVARVAFDLARKRNNKVTSCEKSNVMEAGQLWKEEVQAIHEKEYSDVELKHMLADNCAMQLVRNPKQFDVIVTDNLFGDMLSDEAAMLTGSLGLLPSASLGAKDKNGNMRSLYEPVHGSAPDI

SEQ ID NO: 87449 - protein, 222 aa, Unknown
  Bacterial polypetide isolated from the Sargasso Sea
MSSNILVLPGDGIGVEVADQAIRVIEKLNEQGLNASYEKDLVGGSSYDVNGEPLTNSVLEKAKNSDAILLGAVGGSKWDDVERSKRPEAGLLGLRKELELFANLRPALVFDALVSASTLKNEVVNNLDIMIVRELTGGVYFGQPRGIENTPNGKKAIDTQIYHDYEIDRIARVAFDLARKRNNKVTSVEKANVMETGVLWREIVKETHKDFSDITLENMLAR

SEQ ID NO: 87450 - protein, 94 aa, Unknown
  Bacterial polypetide isolated from the Sargasso Sea
GAKNKEGQMRAMYEPIHGSAPDIAGKGIANPIATILSFAMALRYSLDLDKEANALEKAVQDVLDEGLRTKDIISAGKKEVSTSQMGDAIISKLQ

SEQ ID NO: 87451 - protein, 281 aa, Unknown
  Bacterial polypetide isolated from the Sargasso Sea
DAVLFGAVGGSKWDNVEREKRPEAALLRLRKDLDLFANLRPAVVLDALTESSSLKSELVKGLDILIVRELTSGVYFGHPRGISKISETESKAIDTQVYTTSEIERVSRVAFDLAKLRRNKVSSAEKSNVMETGLFWRNIVTDLHKNEYASVNLEHILADNCAMQLVRYPKQFDVILTDNLFGDLLSDTAAMLTGSLGMLPSASLGPLKENGSRAAMYEPVHGSAPDIAGQSKANPLAMVMSFAMMLKYSFDMQEDSELVEKAVQNVLLQGVRTADIKDGAK

SEQ ID NO: 87452 - protein, 295 aa, Unknown
  Bacterial polypetide isolated from the Sargasso Sea
GLVALEEHGELLPQETLDLIAKNKVALKGPLTTPVGEGFTSINVSLRKQFKLYANLRPVMSFKGTKARYEDIDIITVRENTQGMYSGLGQVVSEDGNEAEAMSKITRDGAEKIVTFAYELARREGRKKVTAVHKANILKSTSGLFLKVAREVGERYPDIESAEMIVDNCCMQLVMNPHQFDVIVTTNLFGDILSDLCAGLVGGLGMAPGANIGEDCAIFEAVHGSAPDIAGKNLANPTSVVLAAAQMLEYLNMGDKAEKIRAALKDVIESGDRTTRDLGGEAGTTEFTQALLDRL

SEQ ID NO: 87453 - protein, 256 aa, Unknown
  Bacterial polypetide isolated from the Sargasso Sea
DLFANLRPAILSKYLSDSSSLKSDKVQDLNLLIVRELTGGIYFGEPRGRSKSGDSAFNTMIYSKAEIARIGRIAFEAAQKRNKNLCSVDKANVLEVSVLWREVISQLSEEYPDVELSHMLVDNAAMQLVRDPKQFDVIVTGNLFGDILSDIAAMLTGSIGMLPSASLNSENKGMYEPVHGSAPDISGKELANPIAAILSVAMMLKYSFNMNEASSAIENSIQEVLSEGYRTYDLEGSKKNKLSTSEMGNKIIEKIK

SEQ ID NO: 87454 - protein, 148 aa, Unknown
  Bacterial polypetide isolated from the Sargasso Sea
EEYPDVELSHMLVDNAAMQLVRDPKQFDVIVTGNLFGDILSDIAAMLTGSIGMLPSASLNSENKGMYEPVHGSAPDISGKELANPIAAILSVAMMLKYSFNMNEASSAIENSIQEVLSQGYRTYDLEGSEKNKLSTSEMGNKIIEKIK

SEQ ID NO: 87455 - protein, 205 aa, Unknown
  Bacterial polypetide isolated from the Sargasso Sea
NTHTYTTTEIQRIAKTAFELAKKRKNKVTSCEKSNVMEAGVLWREEVQALKDKDFKDVELQHMLADNCAMQLLRNPKQFDVILADNLFGDMLSDEAAMLTGSLGLLPSASLGSRDKNGKMRSLYEPVHGSAPDIAGKNIANPIATILSLSMAFRYSLDLDKEADSLDQAVQLVLDEGLRTKDIISKGKKEVTTSQMGDAIISKLK

SEQ ID NO: 87456 - protein, 204 aa, Unknown
  Bacterial polypetide isolated from the Sargasso Sea
THSYTTNEIHRIAKVAFDLAKKRKNKVTSCEKSNVMEAGVLWREEVQLVKDKDYKSVELNHMLADNCAMQLLRNPKQFDVILADNLFGDMLSDEAAMLTGSLGLLPSASLGAKDKNGKIRSLYEPIHGSAPDIAGKNLANPIATILSLSMALRYSLNLDKEADLLDGAVQKVLDDGLRTKDIISKGKKEVTTSDMGDAIISKLK

SEQ ID NO: 87457 - protein, 189 aa, Unknown
  Bacterial polypetide isolated from the Sargasso Sea
RMPKIAFESAQKRKGRLCSVEKANVLEVSKFWRSIVTEMSEEYPDVELSHQLADNAAMQLVLNPNQFDVIVASNLFGDILSDIAATLTGSIGMLPSASLDSSFKGMYEPCHGSAPDIANQDLANPLAMIGSLSMALKYSLDEETVANKIDTAIKKFIQQGFRTKDITTDENYLNTSEVAEKIIEILENE

SEQ ID NO: 87458 - protein, 145 aa, Unknown
  Bacterial polypetide isolated from the Sargasso Sea
MIKVKKRKILLLPGDGIGPEVITEVKKIINWFNDKKSLDFEIDQELVGGCSYDKHGTPITDEVFYKALESEVIMLGAVGGPTWDNLEFSKKPERALLKLRKELKLFANLRPAICFKQLVDASTLKPEVVSGLDIMIVRELTGGIY

SEQ ID NO: 87459 - protein, 276 aa, Unknown
  Bacterial polypetide isolated from the Sargasso Sea
MGQKLSGEVKKIINWFNKNKSLDFETEEEMVGGASYEKHGTPITDEVFYKALESEAVILGAVGGPKWDDLEFSKKPERALLKLRKELKLFANLRPAICFKQLVDASSLKPELVSDLDIMFVRELTGGIYFGEPRGIKPIDNGERKGINTHVYTSSEIERVARVAFDLAKKRNNKVTSCEKSNVMEAGQLWKEEVKALHEKEYQDVELQHMLADNCAMQLVRNPKQFDVIVTDNLFGDMLSDEAAMLTGSLGLLPSASLGAKDKNGNMRSLYEPVHG

SEQ ID NO: 87460 - protein, 300 aa, Unknown
  Bacterial polypetide isolated from the Sargasso Sea
YLGAVGGAKWDNVERDKRPEAALLRLRKDLDLFANLRPAVVLDALSDSSSLKSDLVKGLDILIIRELTSGVYFGQPRGISKISETESKAVDTQLYTTSEVNRVSRVAFDLAKLRNNKVTSVEKSNVMETGLFWKQTVTDLHKKEYSDVNLEHMLADNCAMQLVRYPKQFDVILTDNLFGDLLSDTAAMLTGSLGMLPSAALGPVKENGTRAAMYEPVHGSAPDIAGQSKANPLAMIMSFAMMLKYSFDMQEDSQMIEKAVQNVLLKGLRTADIKDGAEKIISTQEMGNAVIEELKILSGN

SEQ ID NO: 87461 - protein, 237 aa, Unknown
  Bacterial polypetide isolated from the Sargasso Sea
MIKVKKRKILLLPGDGIGPEVIGEVKKIINWFNDKKSLDFEIDEDLAGGCSFDKHGTPITDEVFYKALESAVIMLGAVGGPKWDNVEFSKKPERALLKLRKELKLFANLRPAICFKQLVDASTLKPEIVSGLDIMIVRELTGGIYFGEPRGIKPIENGERKGINTHTYTSSEIIRVAKIAFDLAKKRSNKVTSCEKSNVMESGQLWKEEVQALHDKEYKDIELRHMLADNCAMQLLR

SEQ ID NO: 87462 - protein, 108 aa, Unknown
  Bacterial polypetide isolated from the Sargasso Sea
MLTGSLGLLPSASLGAKNKDGEMRAMYEPIHGSAPDIAGKGIANPIATILSFAMALKYSLDLDKEANALEKAVQNVLDQGLRTKDIISQGKKEVSTSQMGDAIISKLQ

SEQ ID NO: 87463 - protein, 148 aa, Unknown
  Bacterial polypetide isolated from the Sargasso Sea
MYADNCAMQLVRDPNQFDVIVTDNLFGDILSDCAAMLTGSLGMLPSASLGSVDKNTGKRYAMYEPVHGSAPDIAGKGLANPLAELLSLSMLLRYSFDMKEEADLIDKAVSKALDAGPRTPDIMAKGREKVGTTGMMDLVIHKLEELTN

SEQ ID NO: 87464 - protein, 137 aa, Unknown
  Bacterial polypetide isolated from the Sargasso Sea
MIKVKDRKLLLLPGDGIGPEVVKEVRKIVEWFNKKKSLDFKIEEGLVGGASYEKYKKPITDEVFYKALESEAVILGAVGGPKYDNLEFSKRPERALLKLRKELKLFANLRPAICFKQLVEASSLKPEIISGLDIMIV

SEQ ID NO: 87465 - protein, 272 aa, Unknown
  Bacterial polypetide isolated from the Sargasso Sea
LDFEIEEELVGGASYEKHGIPITDEVFYKALESEAVILGAVGGPKWDDLEFSKKPERALLKLRKELKLFANLRPAICFKQLVDASSLKPELVSDLDILFVRELTGGIYFGEPRGIKPINNGERKGINTHVYTSSEIERVARVAFDLARKRSKKVTSCEKSNVMEAGQLWKEEVKSLHEKEYKDIELKHMLADNCAMQLVRYPKQFDVIVTDNLFGDMLSDEAAMLTGSLGLLPSASLGAKDKNGNMRSLYEPVHGSAPDIAGNGIANPIATI

SEQ ID NO: 87466 - protein, 168 aa, Unknown
  Bacterial polypetide isolated from the Sargasso Sea
SDKSNGISITMPYWDELFEKMSKSYPDIKTDQYHIDILCAHFVLNPDKFDVIVASNLFGDILSDLGPACTGTIGIAPSGNINPENNHPSLFEPVHGSAPDIAGKGIANPIGQIWAGAMMLNHFGFDDASNEILNAIKHSLSNPKLRTKELAGSADTQTVGKAIEKIIK

SEQ ID NO: 87467 - protein, 115 aa, Unknown
  Bacterial polypetide isolated from the Sargasso Sea
MLSDQASMLTGSLGLLPSASLGAKNKDGEMRAMYEPIHGSAPDIAGKGISNPIATILSFAMALRYSLDLDKEAEDLEKAVQDVLNDGYRTKDILSEGMKEVSTSQMGDAIISKLQ

SEQ ID NO: 87468 - protein, 187 aa, Unknown
  Bacterial polypetide isolated from the Sargasso Sea
DVMVLPGDGIGPEVVEQGVKLLNAISKKSGHTFNFEQDIIGGAAIDSYGVALKAETAEKSSKADAILFGAVGGPKWDDPTAKVRPEDGLLAIRKALGVYANIRPVKSYSFLRDSIPLKSELVDDIDLIMIRELTGGLYFGKPKKQWTNSRGRVAVDTLKYTEKEITRILRVGFELARGRNKKLTSVD

SEQ ID NO: 87469 - protein, 221 aa, Unknown
  Bacterial polypetide isolated from the Sargasso Sea
EPRGIKPIDNGERKGINTHTYTTSEIQRVARVAFDLAKKRQNKVTSCEKSNVMEAGLLWKEEVQDLHDKEFKDVELNHMLADNCAMQLLRNPKQFDVIVTDNLFGDMLSDQASMLTGSLGLLPSASLGAKNKEGQMRAMYEPIHGSAPDIAGKGIANPIATILSFAMALKYSLNLDKEANALEKAVQDVLDEGLRTRDIISKGKKEISTSKMGDAIISKLQ

SEQ ID NO: 87470 - protein, 192 aa, Unknown
  Bacterial polypetide isolated from the Sargasso Sea
MIKVKKRKILLLPGDGIGPEVIGEVKKIIKWFNDKKSLDFEIDEDLAGGCSYDKHGSPITDEVFYKALESEVVMLGAVGGPKWDNVDFSKKPERALLKLRKELKLFANLRPAICFEQLVSASTLKPEIVSGLDIMIVRELTGGIYFGEPRGIKPIENGERKGINTHTYTTSEITRVARIAFDLARKRSNKVT

SEQ ID NO: 87471 - protein, 273 aa, Unknown
  Bacterial polypetide isolated from the Sargasso Sea
WFNNKKSLDFEIDEDLAGGSSFDKYGTPITDEVFYKALESAVIMLGAVGGPKWDNVEFSKKPERALLKLRKELKLFANLRPAICFKQLVDASTLKPEIVSGLDIMIVRELTGGIYFGEPRGIKPIENGERKGINTHTYTSSEIIRVARIAFDLAKKRSNKVTSCEKSNVMEAGQLWKEEVQTLRDKEYRDIDLSHMLADNCSMQLLRNPKQFDVIVTDNLFGDMLSDQASMLTGSLGLLPSASLGAKNKEGEMRAMYEPIHGSAPDIAGKGIA

SEQ ID NO: 87472 - protein, 116 aa, Unknown
  Bacterial polypetide isolated from the Sargasso Sea
DMLSDEAAMLTGSLGLLPSASLGDKDKNGRTRSLYEPVHGSAPDIAGKNISNPIATILSFSMALKYSLGLQKESAMLDKAVEKTLEDGLRTPDIMSKGKKKVSTSDMGDAIISNLN

SEQ ID NO: 87473 - protein, 196 aa, Unknown
  Bacterial polypetide isolated from the Sargasso Sea
RYDADEINRIAKIAFEASQKRKNKVCSVDKANVLEVSRFWRETVSDLHDKNFSSQELSHMLADNAAMQLVIDPNQFDVILASNLFGDVLSDIAATLTGSIGMLPSASLNEKNVGMYEPCHGSAPDIAGKDLANPLAMILSLSMAFRYSLNLDGLADELDKAVRCLISNGARTKDIANESTFLKTSEVAKELIEILK

SEQ ID NO: 87474 - protein, 220 aa, Unknown
  Bacterial polypetide isolated from the Sargasso Sea
PRGVKPIENGERRGVNTHVYTTKEIKRIAKVAFELAAKRNNKVTSCEKSNVMEAGVLWREEVQLLKDKEYKKIELNHMLADNCAMQLLRNPKQFDVILADNLFGDMLSDEAAMLTGSLGLLPSASLGDKDKNGKIRSLYEPVHGSAPDIAGKNISNPIATILSFSMALKYSLGLEKESTLLDKAVEKTLEDGLRTPDIMSNGKKKVSTSDMGDAIISNLN

SEQ ID NO: 87475 - protein, 234 aa, Unknown
  Bacterial polypetide isolated from the Sargasso Sea
MEARISVLGGDGIGPEVTLEAVKVLDSIAKRFGHDFTYVAGDVGGIAIDKTGTALPQDTMNIVMGSDAVLFGAVGGPKWDDPKNKVRPEDGILGLRKSLGLYANLRPCIVYDQLIESSPLKPHLIKDVDFIIVRELTGGLYFGKPKRRWENSRGRRAVDTLAYSEKEIERVLRVAFELAKSRKGVLHSLDKANVMESSRLWRQIAMEVAGDYPDIKLHHMLADSAAMQIITNPS

SEQ ID NO: 87476 - protein, 84 aa, Unknown
  Bacterial polypetide isolated from the Sargasso Sea
MFSLLILPGDGIGPEVMTEVKRVITWFQDRRGLKINIEEGLVGGASYDKHGSPLTEEMLKKALEVDAVLLGAVGGPDYDNLSFD

SEQ ID NO: 87477 - protein, 107 aa, Unknown
  Bacterial polypetide isolated from the Sargasso Sea
MIKVKKRKFLLLPGDGIGPEVIGEVKKIINWFNKNKSLDFEMDEELVGGASYEKHGTPITDEVFYKALESEAVILGAVGGPKWDDLEFSKKPERALLKLKERVKIIC

SEQ ID NO: 87478 - protein, 174 aa, Unknown
  Bacterial polypetide isolated from the Sargasso Sea
EKSNVMEAGQLWREEVQTLHDEEYKEVELNHMLADNCAMQLLRNPKQFDVIVTDNLFGDMLSDQASMLTGSLGLLPSASLGEKNKDGEMRAMYEPIHGSAPDIAGKGISNPIATILSFAMALRYSLDLDKEADNLEKAVQEVLNDGLRTKDIISKGKKEVSTSQMGDAIISKLQ

SEQ ID NO: 87479 - protein, 255 aa, Unknown
  Bacterial polypetide isolated from the Sargasso Sea
MIKVKKRKILLLPGDGIGPEVVNEVKKIIEWFNKNRSLDFELDQDLVGGAAYDKFKTPITDEVFFKALECEAVILGAVGGPKWENLDFSKKPERALLKLRKELKLFANLRPAICFKQLVEASSLKPEIVSGLDIMIVRELTGGIYFGEPRGIKPIDNGERKGINTHTYTSKEIERVAKVAFELAKKRNNKVTSCDKSNVMEAGQLWKEEITALHKKDYKDVNLEHMLADNCAMQLLRNPKQFDVIVTDNLFGEYI

SEQ ID NO: 87480 - protein, 221 aa, Unknown
  Bacterial polypetide isolated from the Sargasso Sea
SPTRGIDNAGENRRAYDLNEYTEAEIVRFARIGFEVARRRTGKLLSVDKANVFMAGKLWREVVQEIGESEFPDVTLTHFFADNAAYQLSCNPGDFDVILADNLFGDILSDQSAAVSGSLGMLPSACLSQLPQSGRSERPAIYEPVHGSAPDIAGAGIANPIGTILSAAMLLEYSAGESAGARKISTAVEAVLQAGFATPDLGGKHTTQQMTDEVIRQVRRI

SEQ ID NO: 87481 - protein, 268 aa, Unknown
  Bacterial polypetide isolated from the Sargasso Sea
MAEVEKIIEWFNSKKSLDFEIDKDLVGGVAYDKHGSPITDEAFYKAQESAAVILGAVGGPKWDNLDFSKKPERALLKLRKELKLFANLRPAICFKQLVDASSLKPELVSDLDLLFVRELTGGIYFGEPRGIKPIDNGERKGINTHVYTSSEIQRVARVAFDLARKRNNKVTSCEKSNVMEAGQLWKEEVQSIHEKEYSDVELNHMLADNCAMQLVRNPKQFDVIVTDNLFGDMLSDEAAMLTGSLGLLPSASLGAKDKNGNMRSLYEP

SEQ ID NO: 87482 - protein, 129 aa, Unknown
  Bacterial polypetide isolated from the Sargasso Sea
VRNPSQFDVILTGNLFGDILSDIAAMLTGSIGMLPSASLTTDGPGVFEPVHGSAPDIAGKDLANPIAMLLSAAMMLKIALNEKEAATFLENAINEILNDGYRTSDLMSNQTTKQVGCSQMGELLAKKLK

SEQ ID NO: 87483 - protein, 271 aa, Unknown
  Bacterial polypetide isolated from the Sargasso Sea
WYKQIIDSLGLDIQWDILTNPINDKKKISEELEKSLSITKVGLKGPLTTPIGDGFRSINVEIRKRFELFANVRPIKTLQGFKTNYKDLDMIIIRENTEDLYAGKELEIAKGVTQSMKIVTTAASDRVAKFAFQYALENKRKKITVLHKANIMKLTDGLFLDRVRRISRRKIYKDIEYEELIIDNACMQLVMNPNRFDIILTGNLFGDIVSDLCAGLVGGLGAASGANLGSNYAVFEPVHGTAPDIAGKGIANPLATILSSINDVKSYRNGR

SEQ ID NO: 87484 - protein, 190 aa, Unknown
  Bacterial polypetide isolated from the Sargasso Sea
MIKVKKRKILLLPGDGIGPEVIAEVKKVIEWLNKNRSLDFDLDEGLVGGAAYDKYGTPITDEVFYKALESEAVILGAVGGPKWDNLEFSKKPERALLKLRKELKLFANLRPAICFKQLVQASSLKPEIVSGLDIMIVRELTGGIYFGEPRGIKPIDNGERKGINTHTYTSSEIERVARVAFDLAKKRKNK

SEQ ID NO: 87485 - protein, 204 aa, Unknown
  Bacterial polypetide isolated from the Sargasso Sea
THVYTTSEIERVARVAFDLARKRNNKVTSCEKSNVMEAGQLWKEEVQAIHDKEYSDVELKHMLADNCAMQLVRNPKQFDVIVTDNLFGDMLSDEAAMLTGSLGLLPSASLGAKDKNGNMRSLYEPVHGSAPDIAGQGIANPIATILSFAMALRYSLDLDKEADSLENAVQGVLDEGLRTKDIISKGMKEVSTSVMGDAIISKLQ

SEQ ID NO: 87486 - protein, 229 aa, Unknown
  Bacterial polypetide isolated from the Sargasso Sea
LTGGIYFGEPRGIKPIDNGERKGINTHVYTTSEIERVARVAFDLARKRNNKVTSCEKSNVMEAGQLWKEEVQAIHEKEYSDVELKHMLADNCAMQLVRNPKQFDVIVTDNLFGDMLSDEAAMLTGSLGLLPSASLGAKDKNGNMRSLYEPVHGSAPDIAGQGIANPIATILSFAMALRYSLDLDKEADSLEKAVQGVLDEGLRTKDIISKGMKEVSTSVMGDAIISKLQ

SEQ ID NO: 87487 - protein, 143 aa, Unknown
  Bacterial polypetide isolated from the Sargasso Sea
MLADNCAMQLVRYPKQFDVIVTDNLFGDMLSDEAAMLTGSLGLLPSASLGAKDKNGNMRSLYEPVHGSAPDIAGNGIANPIATILSFAMALKYSLDLDKESKTLEKAVQTVLDEGLRTKDILSKGTKEVSTSEMGDAIISKLQ

SEQ ID NO: 87488 - protein, 150 aa, Unknown
  Bacterial polypetide isolated from the Sargasso Sea
MTEVKRVISWFQHKRELEIDIEEGSVGGASYDKHGTPLTEEMLKKALEVDAVLLGAVGGPDYDNLNFDLKPERALLKLRKELDLFANIRPAQCFDALASFSSLKKEIVSGLDIVIVRELTSGIYFGEPRGIHTDGFNEKSWYKYSKIHRI

SEQ ID NO: 87489 - protein, 314 aa, Unknown
  Bacterial polypetide isolated from the Sargasso Sea
MELQLTDEAFYKAQESAAVILGAVGGPKWDNIDFSKKPERALLKLRKELKLFANLRPAICFKQLVDASSLKPEFVSNLDILFVRELTGGIYFGEPRGIKPIDNGERKGINTHVYTTSEIERVARVAFDLARKRNNKVTSCEKSNVMEAGQLWKEEVQAIHEKEYSDVELKHMLADNCAMQLVRNPKQFDVIVTDNLFGDMLSDEAAMLTGSLGLLPSASLGAKDKNGNMRSLYEPVHGSAPDIAGQGIANPIATILSFAMALRYSLDLDKEADSLEKAVQGVLDEGLRTKDIISKGMKEVSTSVMGDAIISKLQ

SEQ ID NO: 87490 - protein, 212 aa, Unknown
  Bacterial polypetide isolated from the Sargasso Sea
MAISNTRKLLLLPGDGIGPEVVREVKKIIEWLNKNKSLDFKIEEELIGGASIDAHKIPITDEVFYKSLECDAVILGACGGPKWDKLEFSKKPERALLKLRKELKLFANLRPAICFEQLVDSSTLKPEIVSGLDIMIVRELTGGIYFGEPRGIEPIKNNERKGINTHTYTTTEIKRIAKVAFDLAKKRKNKVTSCEKSNVMEAGVLWREEVQD

SEQ ID NO: 87491 - protein, 290 aa, Unknown
  Bacterial polypetide isolated from the Sargasso Sea
MIKVKKRKILLLPGDGIGPEVIAEVKKIINWFNDKKSLDFEIDQELVGGCSYDKHGTPITDEVFYKALESEVIMLGAVGGPTWDNLEFSKKPERALLKLRKELKLFANLRPAICFKQLVDASTLKPEIVSGLDIMIVRELTGGIYFGEPRGIKPIENGERKGINTHTYTTSEITRVASIAFDLARKRSNKVTSCEKSNVMEAGQLWKEEVQELHEKEYKDVELTHMLADNCAMQLLRNPKQFDVIVTDNLFGDMLSDQASMLTGSLGLLPSASLGAKNKDGEMRAMYEPI

SEQ ID NO: 87492 - protein, 272 aa, Unknown
  Bacterial polypetide isolated from the Sargasso Sea
MIKVKKRKILLLPGDGIGPEVVAEVKKIIEWFNKKKSLDFETEEDLVGGASYEKHKKPITDEVFYKALESEAVILGAVGGPKWDNLEFSKRPERALLKLRKELKLFANLRPAICFKQLVEASSLKPEIVSGLDIMIVRELTGGIYFGEPRGINPIENGERKGINTHTYTSGEIIRVAKVAFELAQKRNKKVTSCEKSNVMESGILWREEVQKLKDEEYSNIELNHMLADNCAMQLLRDPKQFDVIVTDNLFGDILSDEAAMLTGSLGLLPSA

SEQ ID NO: 87493 - protein, 208 aa, Unknown
  Bacterial polypetide isolated from the Sargasso Sea
GVNTHTYTSSEIARVARVAFDLAKKRNNKVTSCEKSNVMEAGQLWKEEVAEIHKNEFKEVKLEHMLADNCAMQLLRNPKQFDVIVTDNLFGDILSDEAAMLTGSLGLLPSASLGAKDKNGNMRSMYEPVHGSAPDIAGKNLANPIATILSFSMALRYSLNLEKEAKELDTAVQSVLDMGLRTKDIYSKGNKEVSTTAMGDAIIAQLQK

SEQ ID NO: 87494 - protein, 137 aa, Unknown
  Bacterial polypetide isolated from the Sargasso Sea
AMQLLRNPKQFDVIVTDNLFGDILSDEAAMLTGSLGLLPSASLGTKDKNGKVRSMYEPVHGSAPDIAGKGIANPIATILSFSMALRYSLDLDKEANNLDQAVQKVLDDGLRTKDILSEGKKEVSTEQMGDAIISKLK

SEQ ID NO: 87495 - protein, 120 aa, Unknown
  Bacterial polypetide isolated from the Sargasso Sea
HYDVVVASNLFGDILSDLGPACTGTIGIAPSANINPSGEFPSMFEPVHGSAPDIFGKKIANPIGMIWAGAMMLQHLGYPEAYDTIIGAIETILSSGMNLTPDMGGNGNTSDIGKAIADAV

SEQ ID NO: 87496 - protein, 197 aa, Unknown
  Bacterial polypetide isolated from the Sargasso Sea
MSKTRKILLLPGDGIGPEVIAEVRKILDWMNKTKSLDFVLSQELIGGASIDANKVPITDEVFYKSLESDAVILGACGGPKWDNLEFSKKPERALLKLRKELKLFANLRPAICFKQLVDSSTLKPEIVSGLDIMIVRELTGGIYFGEPRGIEPMENNQRKGINTHTYTTSEIHRIARVAFDLAKKRRNKVTSCEKSNV

SEQ ID NO: 87497 - protein, 170 aa, Unknown
  Bacterial polypetide isolated from the Sargasso Sea
MIKVKKRKILLLPGDGIGPEVVSELKKIINWLNSKRSLDFEIDEDLVGGAAYDAHGTPITDEVFYKALESEAVILGAVGGPKWDNLDFSKKPERALLKLRKELKLFANLRPAICFKQLVDASSLKPEIVSGLDIMIVRELTGGIYFGEPRGIKPIDNGERKGVNTHTYTS

SEQ ID NO: 87498 - protein, 146 aa, Unknown
  Bacterial polypetide isolated from the Sargasso Sea
MIKVKKRKILLLPGDGIGPEVIAEVKKIINWFNDKKSLDFEIDQELVGGCSYDKHGTPITDEVFYKALESEVIMLGAVGGPKWDGLEFSKKPERALLKLRKELKLFANLRPAICFEQLVGASTLKPEVVSGLDIMIVRELTGGIYF

SEQ ID NO: 87499 - protein, 254 aa, Unknown
  Bacterial polypetide isolated from the Sargasso Sea
MANKTRKILLLPGDGIGPEVIAEVRKILEWMNKTKSLDFVLNQELIGGASIDANKVPITDEVFYKSLESDAVILGACGGPKWDNLEFSKKPERALLKLRKELKLFANLRPAICFKQLVESSTLKPEIVSGLDIMIVRELTGGIYFGEPRGIEPIENNQRKGVNTHTYTTSEIHRIARVAFDLAKKRRNKVTSCEKSNVMEAGVLWREEVQVIKDKEFKKVELNHMLADNCAMQLLRYPKQFDVILADNLLEICV

SEQ ID NO: 87500 - protein, 303 aa, Unknown
  Bacterial polypetide isolated from the Sargasso Sea
GLPRFPQAAAKEADAILLGAVGGPQWDTLPAAERPERGLLAIRADLDLFCNLRPALLFPELAGASSLRKERVAGLDLLIVRELTGGIYFGEPRGISVREDGVREGVNTDRYDENEIRRIGRLAFEAARKRGGRLCSVDKANVLEVTMLWREVMESLRPEFPDVSLSHIYVDNAAMQLVREPKQFDVIVTGNLFGDILSDIAAMLTGSIGMLPSASLNASSVGLYEPVHGSAPDIAGEDKANPLATILSAAMLLRYSLDELEAASDIERAVADVLSAGKRTGDIAADGAEEAVMGTRAMGDAVV

SEQ ID NO: 87501 - protein, 164 aa, Unknown
  Bacterial polypetide isolated from the Sargasso Sea
EVMSDLHAKEGQGIELQHMYADNCAMQLVRAPKQFDVIVCDNLFGDMLSDCAAMLTGSLGMLPSASLGAPNKEGIRKAMYEPVHGSAPDITGKGIANPLAQVLSLTMMLRYSFDYIEEADLIESSVSDALSTGSRTPDLGGGTKKVSTSEMIDIVIEFMNKRIN

SEQ ID NO: 87502 - protein, 177 aa, Unknown
  Bacterial polypetide isolated from the Sargasso Sea
MKNYKIAVLAGDGIGPEVMVQALKVLAVVSDKFGFNIQSTEALIGGAAIDATGVALPDDTLKLCKNSDAILFGSVGGPKWTSLPPAQQPERASLLPLRKTFDLFCNLRPGQIYPAFAELSPLHPKISSQGMDILCVRELTGGIYFGEKGRTEDAAFDTQKYSVSEIERISRVAFEAA

SEQ ID NO: 87503 - protein, 153 aa, Unknown
  Bacterial polypetide isolated from the Sargasso Sea
RGIEEIDAQIKKGYDTNLYTTPEIERIGRVAFDMARATNGKVTSVEKANVMMSGVLWREVMTNLYEKEGSDISINHMYADNCAMQLVRDPKQFDVIVTDNLFGDILSDCAAMLTGSLGMLPSASLGSVDQNTGKRHAMYEPVHGSAPDIAGQE

SEQ ID NO: 87504 - protein, 294 aa, Unknown
  Bacterial polypetide isolated from the Sargasso Sea
MKEYSIASIAGDGIGKEVVPEAQKILEEISQQHQFKLNIEDYDFASCDYYEKHGKMMPDDWKDKLTKHDAIFFGAVGMPDKYPDHITLWGSLLKFRREFDQFINLRPVKLFEGVNAPLANKKPGDIDMIIVRENTEGEYSSVGGRMYQGTDREVVIQETIMSKYGIDRVQQFAFELAKKRKRKKLTSATKSNGISITMPYWDERFNENKKNYPDVETDQYHIDILAARFVLSPERFDVIVASNLFGDILSDLGPACTGTIGIAPSGNINPTNKYPSLFEPVHGSAPDIAGQGIA

SEQ ID NO: 87505 - protein, 155 aa, Unknown
  Bacterial polypetide isolated from the Sargasso Sea
MIKVKKRKILLLPGDGIGPEVIGEVKKIITWLNNKKSLDFEIEEDLAGGSSYDKHGTPITDEVFYKALESEVVMLGAVGGPKWDNVEFSKKPERALLKLRKELKLFANLRPAICFKQLVDSSTLKPEIVSGLDIMIVRELTGGKYFGEPKRNKTN

SEQ ID NO: 87506 - protein, 272 aa, Unknown
  Bacterial polypetide isolated from the Sargasso Sea
DSLERALRPEQAILGLRKHLELFANFRPAICYPQLVDASPLKPELVAGLDILIVRELNGDIYFGQPRGVRAAPDGLFAGEREGFDTMRYSEPEVRRIAHVAFQAARKRAKKLLSVDKANVLETSQFWRDIMIDVSKEYADVELSHMYVDNAAMQLAKAPKQFDVIVTGNMFGDILSDEASMLTGSIGMLPSASLDKNNKGLYEPSHGSAPDIAGKGIANPLATILSAAMMLRYSLNRAEQADRIERAVKTVLEQGYRTGDIATPGCRQVGTT

SEQ ID NO: 87507 - protein, 234 aa, Unknown
  Bacterial polypetide isolated from the Sargasso Sea
MIVRELTGGIYFGEPRGIKPIDNGERKGINTHSYTSNEIIRVARVAFDLAKKRSNKVTSCEKSNVMEAGQLWKEEVQALHDKEFKEVELKHMLADNCSMQLLRNPKQFDVIVTDNLFGDMLSDQASMLTGSLGLLPSASLGAKNKDGEMRAMYEPIHGSAPDIAGKGLANPIATVLSFAMALRYSLDLDKEADDLEKAVQEVLNDGLRTKDIVSKGTKEVTTSQMGDALISKLQ

SEQ ID NO: 87508 - protein, 155 aa, Unknown
  Bacterial polypetide isolated from the Sargasso Sea
KDKEYKKIELNHMLADNCAMQLLRNPKQFDVILADNLFGDMLSDEAAMLTGSLGLLPSASLGDKDKNGRTRSLYEPVHGSAPDIAGKNISNPIATILSFSMALKYSLGLEKESNLLNKAVEKTLEGGLRTPDIMSKGKKKVSTSDMGDAIISNLN

SEQ ID NO: 87509 - protein, 249 aa, Unknown
  Bacterial polypetide isolated from the Sargasso Sea
VDASTLKPEIVSGLDIMIVRELTGGIYFGEPRGIKPIDNGERRGINTHTYTTSEIERVAKVAFDLARKRKNKVTSCEKSNVMEAGLLWKEDVQALHDREYKDVELSHMLADNCAMQLLRNPKQFDVIVTDNLFGDMLSDEASMLTGSLGLLPSASLGAKNKDGEMRAMYEPIHGSAPDIAGKGLANPIATILSFAMALRYSLDLDKEADLLEKSVQDVLDKGLRTKDIMSQGTKEVSTSQMGDAIIACC

SEQ ID NO: 87510 - protein, 140 aa, Unknown
  Bacterial polypetide isolated from the Sargasso Sea
KTDQYHIDILCAHFVLNPDKFDVIVASNLFGDILSDLGPACTGTIGIAPSGNINPENNHPSLFEPVHGSAPDIAGKGIANPIGQIWAGAMMLNHFGFDDASNEILNAIKHSLSEPKLRTKDLAGSADTQTVGKAIEQIIK

SEQ ID NO: 87511 - protein, 242 aa, Unknown
  Bacterial polypetide isolated from the Sargasso Sea
GVPSPLTNKNSEDIDFYIVRENTEGEYSSIGGKMFPNTEREFVVQETVMTKIGVDRVLKFAFDLAKKTKKKHLTSATKSNGISITMPYWDERVEEIAKNYPEVEYNKFHIDILCAHFVLNPQMFNVVVGSNLFGDILSDLGPACTGTIGIAPSGNINPENNFPSLFEPVHGSAPDIAGQNIANPIGQIWAGAMMLDHFGYKEAHDEILNSIKDILSKKEFRTRDLGGSASTRKCGDAIADNI

SEQ ID NO: 87512 - protein, 238 aa, Unknown
  Bacterial polypetide isolated from the Sargasso Sea
ANRGPGDVDMMIVRENTEGEYSSVGGRMFPGTDREFVTQQTVMTRIGVDRVLKFAFELAQSRPRKHLTSATKSNGISITMPYWDERVEEMAKSFKDVSWDKYHIDILTANFVLHPDWFDVVVASNLFGDILSDLGPACTGTIGVAPSGNINPERLFPSLFEPVHGSAPDIAGKGIANPVGQIWAGAMMLEHLGFVEAAACITDAIDAALSTPEMRTGDLNGTANTVSCGKAIAKIVAG

SEQ ID NO: 87513 - protein, 288 aa, Unknown
  Bacterial polypetide isolated from the Sargasso Sea
KKRKILLLPGDGIGPEVIEEVRKIINWFNSKKSLDFEIDEDLAGGCSYDKHGAPITDEVFYKALESAVVMLGAVGGPKWDNVEFSKKPERALLKLRKELKLFANLRPAICFKQLVDASTLKPEIVSGLDIMIVRELTGGIYFGEPRGIKPIENGERKGINTHTYTSSEIIRVAKIAFDLAKKRSNKVTSCEKSNVMEAGQLWREEVQTLHDKDYKDVELSHMLADNCSMQLLRNPKQFDVIVTDNLFGDMLSDQASMLTGSLGLLPSASLGAKNKEGEMRAMYEPIHG

SEQ ID NO: 87514 - protein, 291 aa, Unknown
  Bacterial polypetide isolated from the Sargasso Sea
PGDGIGQEVTASAMQILDFIIKKFSLNFSIDTLDVGGTAYEKFGSPIPENVLKTAKKVDAVLFGAVGAPQWDGLSWEDRPENALLTLRKELNLFANLRPAFLFNELSDASPLKEKIIEGLDILIVRELTGGIYFGEPRGVVNDKSPNYAFNTMIYNEDEIRRIAKIAFESAQKRKGRLCSVEKANVLEVSKFWRSIVTEMSKEYPDVELSHQLADNAAMQLVLNPNQFDVIVASNLFGDILSDIAATLTGSIGMLPSASLDSSFKGMYEPCHGSAPDIANQDLANPLAMIG

SEQ ID NO: 87515 - protein, 287 aa, Unknown
  Bacterial polypetide isolated from the Sargasso Sea
PGDGIGKEVIPEGIKVLEKVSKKFDINLHFEQFEFSSCDYFKKHGQMMPDDWKSKISNHDAIYFGAVGWPETVPDHISLWGSLLKFRREFDQYINLRPVKLMPGVPSPLANKKPGDIDFYIVRENTEGEYSSIGGKMFPQTEREFVVQETVMTKIGVDRVLKYAFNLAKNTKKKHLTSATKSNGISITMPYWDERVEDISKQYPDVNYNKFHIDILCAHFVLNPQMFNVVVGSNLFGDILSDLGPACTGTIGIAPSGNINPENNSPSLFEPVHGSAPDIAGKNIANP

SEQ ID NO: 87516 - protein, 257 aa, Unknown
  Bacterial polypetide isolated from the Sargasso Sea
MKIAVLPGDGIGPEIVKEAVKVLNVLGEKFELEEAPVGGAGYEAKGHPLPDSTLALAKEADAILFGAVGDWKYDSLERALRPEQAILGLRKHLHLFANFRPAICYPQLTGASSLKEEIVSGLDILIVRELNGDIYFGAPRGVRSSPDGLFEGAKEGFDTMRYSEPEVRRIAHVAFQAAQKRQKRLTSVDKANVLETSQFWRDVMIDVSKEYADVELSHMYVDNAAMQLVKAPKAFDVVVTGNMFGDILSDEAAMLTV

SEQ ID NO: 87517 - protein, 282 aa, Unknown
  Bacterial polypetide isolated from the Sargasso Sea
YKSLESDAVILGACGGPKWDNLEFSKKPERALLKLRKELKLFANLRPAICFKQLVDSSTLKPEIVSGLDIMIVRELTGGIYFGEPRGIEPMENNQRKGVNTHTYTTSEIHRIARVAFDLAKKRRNKVTSCEKSNVMEAGVLWREEVQVIRDKEFKKVELNHMLADNCAMQLLRYPKQFDVILADNLFGDMLSDEAAMLTGSLGLLPSASLGSKDKNGRIRSLYEPVHGSAPDIEGKNIANPIATILSLSMALRYSLDLGKEADQIEKAVQSVLDEGLRTKDI

SEQ ID NO: 87518 - protein, 141 aa, Unknown
  Bacterial polypetide isolated from the Sargasso Sea
MQLVRYPKQFDVILTDNLFGDLLSDTAAMLTGSLGMLPSAALGPVKENGTRAAMYEPVHGSAPDIAGQSKANPLAMIMSFAMMLKYSFDMQEDSKSIEKAVQNVLLKGLRTADIKDGADKVISTQDMGDAVIEELKILSGN

SEQ ID NO: 87519 - protein, 92 aa, Unknown
  Bacterial polypetide isolated from the Sargasso Sea
KDKNGNMRSLYEPVHGSAPDIAGQGIANPIATILSFAMALRYSLDLDKEADSLEKAVQDVLDEGLRTKDIISKRMKEVSTSVMGDAIISKLQ

SEQ ID NO: 87520 - protein, 161 aa, Unknown
  Bacterial polypetide isolated from the Sargasso Sea
RRSASLKDKEYKKIDLHHMLADNCAMQLLRNPKQFDVILADNLFGDMLSDEAAMLTGSLGLLPSASLGSKDKNGKIRSLYEPIHGSAPDIAGKNIANPIATILSLSMALRYSLNLDKEAVLLDTAVQQVLDDGLRTKDIMSNGKKEVSTTDMGDAIISKLK

SEQ ID NO: 87521 - protein, 206 aa, Unknown
  Bacterial polypetide isolated from the Sargasso Sea
NTHTYTTKEIERVARVAFDLAKKRDNKVTSCEKSNVMEAGQLWKEEVQILHDKEYKDVELTHMLADNCAMQLLRNPKQFDVIVTDNLFGDILSDEAAMLTGSLGLLPSASLGTKDKDGNLRSMYEPVHGSAPDITGKGIANPIATILSFSMALKYSLNLDKESKALDNAVQKVLDDGLRTKDIISKGKKEVSTSQMGDAIIACLQK

SEQ ID NO: 87522 - protein, 246 aa, Unknown
  Bacterial polypetide isolated from the Sargasso Sea
MIKVKKRKILLLPGDGIGPEVIGEVRKIINWFNDKKSLDFEIDSDLAGGCSFDKHGTPITDEVFYKALESAVIMLGAVGGPKWDGVEFSKKPERALLKLRKELKLFANLRPAICFEQLVDASTLKPEIVSGLDIMIVRELTGGIYFGEPRGIKPIENGERKGINTHTYTSSEIIRVARTAFDLAKKRSNKVTSCEKSNVMEAGQLWKEEVQTLHDKEYKDVELNHMLADNCSMQLLRNPKQFDVIV

SEQ ID NO: 87523 - protein, 175 aa, Unknown
  Bacterial polypetide isolated from the Sargasso Sea
MIKVKKRKILLLPGDGIGPEVVAEVKKIIEWFNKKKSLDFETEEGLVGGASYEKHKKPITDEVFYKALESEAVILGAVGGPKWDNLEFSKRPERALLKLRKELKLFANLRPAICFKQLVDASSLKPEIVSGLDIMIVRELTGGIYFGEPRGIKPIENGERKGINTHSYTSSEIIR

SEQ ID NO: 87524 - protein, 268 aa, Unknown
  Bacterial polypetide isolated from the Sargasso Sea
MIKKILVLPGDGIGQEVTASAMQILDFIIKKFSLNFSIDTLDVGGTAYEKFGSPIPENVLKTAKKADAVLFGAVGAPQWDGLSWEDRPENALLTLRKELNLFANLRPAFLFNELSNASPLKEKIIEGLDILIVRELTGGIYFGEPRGVVDDKSPNYAFNTMIYNEDEIRRIAKIAFESAQKRKGRLCSVEKANVLEVSKFWRSIVTEMSKDYPDVELSHQLADNAAMQLVLNPNQFDVIVASNLFGDILSDIAATLTGSIGMLPSASL

SEQ ID NO: 87525 - protein, 304 aa, Unknown
  Bacterial polypetide isolated from the Sargasso Sea
KKPLEKALEVDAVLLGAVGGPKYDSLDFNLKPERALLKLRKELDLYANIRPAQCFDALASFSSLKREIVSGLDIVIVRELTSGIYFGEPRGIKKNDANERVGINTQRYTETEIKRVAISAFELAKKRSGKVCSMEKANVMESGVLWRDVVTEVHRGYQDIELSHMYADNGAMQLVRDPKQFDVIVTDNLFGDILSDCAAMLTGSLGMLPSASLGNIMENGKPRAMYEPVHGSAPDITGQLKANPIACILSFSMALRYSYSELESANLLESCIEKVLAKGYRTPDLMMGEEGELVSTAGMTDKIL

SEQ ID NO: 87526 - protein, 315 aa, Unknown
  Bacterial polypetide isolated from the Sargasso Sea
KHGTPITDEVFYKALESAVVMLGAVGGPKWDNVEFSKKPERALLKLRKELKLFANLRPAICFKQLVDASTLKPEIVSGLDIMIVRELTGGIYFGEPRGIKPIENGERKGVNTHTYTSSEIIRVARIAFDLAKKRSNKVTSCEKSNVMEAGQLWKEEVQTLHDKEYKDVELNHMLADNCAMQLLRNPKQFDVIVTDNLFGDMLSDQASMLTGSLGLLPSASLGAKNKDGEMRAMYEPIHGSAPDIVGKGVANPIATILSFAMALRYSLDLDKEAEALEKAVQDVLNDGFRTKDILSKGMKEVSTSQMGDAIISKLQ

SEQ ID NO: 87527 - protein, 217 aa, Unknown
  Bacterial polypetide isolated from the Sargasso Sea
DSESKAVDTQVYTTSEIDRVSRVAFDLAKLRRNKVSSAEKSNVMETGLFWRKTVTELHKKEYASIDLEHILADNCAMQLVRYPKQFDVILTDNLFGDLLSDTAAMLTGSLGMLPSAALGPVKENGTRAAMYEPVHGSAPDIAGQSKANPLAMIMSFAMMLKYSFDMQEDSKLIEKAVQNVLLKGLRTADIKDSADKVISTQQMGDAVIEELKILSGN

SEQ ID NO: 87528 - protein, 204 aa, Unknown
  Bacterial polypetide isolated from the Sargasso Sea
THIYTTSEIQRLARVAFDLAKKRKNKVTSCEKSNVMEAGLLWKEEVQELHDKEFKDVELNHMLADNCAMQLLRNPKQFDVIVTDNLFGDMLSDQASMLTGSLGLLPSASLGSKNKDGKIRAMYEPIHGSAPDIAGQGVANPIASILSFAMALRYSLDLDKEADALEKAVQDVLDEGLRTKDILSKGMKQVSTSEMGNAIISKLQ

SEQ ID NO: 87529 - protein, 113 aa, Unknown
  Bacterial polypetide isolated from the Sargasso Sea
SDEAAMLTGSLGLLPSASLGAKDKNGNMRSLYEPVHGSAPDIAGKGISNPIATILSFAMALKYSLDLDKESNTLEKAVQSVLDEGLRTKDILSKGTKEVSTSEMGDAIISKLQ

SEQ ID NO: 87530 - protein, 113 aa, Unknown
  Bacterial polypetide isolated from the Sargasso Sea
SDEAAMLTGSLGLLPSASLGDKDKNGRTRSLYEPVHGSAPDIAGKNISNPIATILSFSMALKYSLSLEKESTALNKAVEKTLEDGLRTPDIMSKGKKKVSTSEMGDAIISNLN

SEQ ID NO: 87531 - protein, 225 aa, Unknown
  Bacterial polypetide isolated from the Sargasso Sea
MIKIKKRKILLLPGDGIGPEVIAEVKKIIQWFNSNKSLDFEIDQDLVGGAAYDKHGTPITDEAFYKAQESAAVILGAVGGPKWDNIDFSKKPERALLKLRKELKLFANLRPAICFKQLVDASSLKPEFVSNLDILFVRELTGGIYFGEPRGIKPIDNGERKGINTHVYTSSEIERVARVAFDLARKRNNKVTSCEKSNVMEAGQLWKEEVQAIHEKEYSDVELKH

SEQ ID NO: 87532 - protein, 197 aa, Unknown
  Bacterial polypetide isolated from the Sargasso Sea
MIYSKTEIRRIGRIAYEAAQKRNKNLCSVDKANVLEVSVLWREVISELSEEYPDVELSHMLVDNAAMQLVRDPKQFDVIVTGNLFGDILSDIAAMLTGSIGMLPSASLNSKNKGMYEPVHGSAPDISGKGLANPIAAILSVAMMLKYSFNMNEASSAIENSIQEVLSEGYRTYDLEGSKKNKLSTSEMGNKIIEKIK

SEQ ID NO: 87533 - protein, 202 aa, Unknown
  Bacterial polypetide isolated from the Sargasso Sea
METEFNIAVFPGDGIGPEVIVEAIKVIKIIESKLHLKMNLNEALVGGAAYDATGHPLPDSTLDLAKKADAVLLGAVGGPKWEAIDFSLRPERALLGLRSSLGLYANLRPAKIFPALLDASTLKPEVVDGLDLLVVRELTGGIYFGEPRGIGTNDKGLRHAFNTLVYSEPEIQRIGKIAFDVAKKRCGKVCSVDKANVLEATG

SEQ ID NO: 87534 - protein, 191 aa, Unknown
  Bacterial polypetide isolated from the Sargasso Sea
MIKVKKRKILLLPGDGIGPEVITEVKKIINWFNDKKSLDFEIDQDLAGGCSYDKHGTPITDEVFYKALESAVVILGAVGGPKWDKVEFSKKPERALLKLRKELKLFANLRPAICFEQLVDASTLKPEVVSGLDIMIVRELTGGIYFGEPRGIKPIENGERKGINTHTYTTKEIARVARVAFDLAKKRSNKV

SEQ ID NO: 87535 - protein, 256 aa, Unknown
  Bacterial polypetide isolated from the Sargasso Sea
IKEGLVGGASFDKYGTPLSDETLSDAVDADAILFGAVGSPKYDGVEFDRRPENGLLRLRKEMDLFANLRPAMVFPALVDASSLKPNIISGLDILILRELTGGIYFAEPRGIEEINTQIKKGYDTNLYTTPEIERIGRVAFDMARARNGKVTSVEKANVMMSGVFWREVMTNLHKKEGSDILINHMYADNCAMQLVRNPKQFDVIVTDNLFGDILSDCAAMLTGSLGMLPSASLGSVDQNTGKRQAMYEPSSMDQLP

SEQ ID NO: 87536 - protein, 267 aa, Unknown
  Bacterial polypetide isolated from the Sargasso Sea
MIKIKKRKFLLLPGDGIGPEVVGEVKKIILWFNKNKSLDFEIDEDLAGGVSYDKHGTPITDEVFYKALESEAVILGAVGGPKWDNVEFSKKPERALLKLRKELKLFANLRPAICFKQLVEASTLKPEIVSGLDIMIVRELTGGIYFGEPRGIKPIDNGERKGINTHTYTSSEIQRVARVAFDLAKKRQNKVTSCEKSNVMEAGLLWREEVQDLHDKEFKEVELNHMLADNCAMQLLRNPKQFDVIVTDNLFGDMLSDQASMLTGSLG

SEQ ID NO: 87537 - protein, 263 aa, Unknown
  Bacterial polypetide isolated from the Sargasso Sea
KIINWFNNKKSLDFEIDRDLIGGSALDKHGSPITDEAFYKSLESEAVILGAVGGPKWDNLEFSKKPERALLKLRKELKLFANLRPAICFKQLVDASSLKPELVSDLDILFVRELTGGIYFGEPRGIKPIDNGERKGINTHIYTTSEIHRVARVAFDLAKKRSNKVTSCEKSNVMEAGQLWKEEVQYIHEKEYNDVELNHMLADNCAMQLVRNPKQFDVIVTDNLFGDMLSDEAAMLTGSLGLLPSASLGAKDKNGNMRSLYEP

SEQ ID NO: 87538 - protein, 200 aa, Unknown
  Bacterial polypetide isolated from the Sargasso Sea
TTKEIKRIAKVAFELASKRKNKVTSCEKSNVMEAGVLWREEVQSLKDKEYKKIELNHMLADNCAMQLLRNPKQFDVILADNLFGDMLSDEAAMLTGSLGLLPSASLGDKDKNGKTRSLYEPVHGSAPDIAGKNISNPIATILSFSMALKYSLGLEKDSKMLDKAVEKTLEDGLRTPDIMSKGKKKVSTSEMGDAIISNLN

SEQ ID NO: 87539 - protein, 237 aa, Unknown
  Bacterial polypetide isolated from the Sargasso Sea
MIKIKKRKILLLPGDGIGPEVIAEVKKIIEWFNSNKSLDFEIDQDLVGGAAYDKHGTPITDEAFYKAQESAAVILGAVGGPKWDNIDFSKKPERALLKLRKELKLFANLRPAICFKQLVDASSLKPEFVSNLDILFVRELTGGIYFGEPRGIKPIDNGERKGINTHVYTTSEIERVARVAFDLARKRNNKVTSCEKSNVMEAGQLWKEEVQAIHEKEYSDVELKHMLADNCAMQLVR

SEQ ID NO: 87540 - protein, 180 aa, Unknown
  Bacterial polypetide isolated from the Sargasso Sea
MEFEIAVLPGDGIGPEVTQESVKILKAIETQFGHKFNLSYGDIGGVSIDKYGTALTDEVEQIISKSDAVLFGAVGGPKWDDPTADTRPEDGLLKMRANLEAFANIRPVKVYPELVNTSVLKPEVLDNVDIVVVRELTGGLYYGQPKGRGTQDGAETATDTLFYTAPEIERVLRVGFELAK

SEQ ID NO: 87541 - protein, 300 aa, Unknown
  Bacterial polypetide isolated from the Sargasso Sea
MIKVKKRKFLLLPGDGIGPEVIGEVKKIINWFNSNKSLDFDMEEALVGGASYDKHGTPITDEVFYKSLECEAVILGAVGGPKYDNLDFSKRPERALLKLRKELKLFANLRPAICFKQLVEASTLKSEVVSGLDIMIVRELTGGIYFGEPRGIKPIDNGERKGINTHSYTSSEIIRVARVAFDLAKKRSNKVTSCDKSNVMEAGQLWKEEVQNLHDSEYKYVELNHMLADNCAMQLLRNPKQFDVIVTDNLFGDMLSDEASMLTGSLGLLPSASLGAKNKDGEMRAMYEPVHGSAPDIAGK

SEQ ID NO: 87542 - protein, 179 aa, Unknown
  Bacterial polypetide isolated from the Sargasso Sea
EKSNVMETGMFWKNTVSNIHQKDFQDVELFHMLADNCAMQLVRNPKQFDVILTDNLFGDLLSDIAAMLTGSLGMLPSASLGPVAENGSRAAMYEPVHGSAPDIAGQGKANPLAMIMSFAMMLKYSFNMQEDSVLVENAVQAVLSNGLRTADISDGADKIVSTQDMGKAVIEELKNLLGS

SEQ ID NO: 87543 - protein, 281 aa, Unknown
  Bacterial polypetide isolated from the Sargasso Sea
FQKRPERALLKLRKELKLFANLRPAICFKQLVDASSLKPEIVSGLDIMIVRELTGGIYFGEPRGIKPIENGERKGINTHVYTSSEIIRVAKVAFELAQKRNKKVTSCEKSNVMEAGILWREEVQKVKDEEYQNIELNHMLADNCAMQLLRNPKQFDVIVTDNLFGDILSDEAAMLTGSLGLLPSASLGAKDKNGKMRSMYEPVHGSAPDIAGIGKANPIATILSFSMALKYSFDLDKEADNLDQAVQKVLDEGLRTQDILSKGKKEVSTSQMGDAIISKLK

SEQ ID NO: 87544 - protein, 279 aa, Unknown
  Bacterial polypetide isolated from the Sargasso Sea
DEFEFASCDYYKKHGKMIPDDWKEKIGSHDAIFFGAVGDPAKVPDHISLWGSLLKFRREFDQYVNLRPVKLFNGVPCPLANKKPGDIDMLIVRENTEGEYSSVGGRMYKDTEREIAVQETIMSRQGVDRVQKYAFELAKSKGRKKVTNATKSNGISITMPFWDERFDIMKKNYPEIKTDQFHIDILTARFVLTPEWFDVVVASNLFGDILSDLGPACTGTIGIAASGNINPENKYPSLFEPVHGSAPDIAGKGIANPIGQIWSGALMLDHLGEKEAAKS

SEQ ID NO: 87545 - protein, 274 aa, Unknown
  Bacterial polypetide isolated from the Sargasso Sea
LESAVVMLGAVGGPKWDNVDFSKKPERALLKLRKELKLFANLRPAICFKQLVDASTLKPEIVSGLDIMIVRELTGGIYFGEPRGIKPIENGERKGINTHTYTSSEITRVARVAFDLAKKRSNKVTSCEKSNVMEAGQLWKEEVQALHDKEYKDVELSHMLADNCAMQLLRNPKQFDVIVTDNLFGDMLSDQASMLTGSLGLLPSASLGAKNKDGEMRAMYEPIHGSAPDIAGKSVANPIATILSFAMALRYSLDLDKEAEALEKAVQSVLNEGL

SEQ ID NO: 87546 - protein, 300 aa, Unknown
  Bacterial polypetide isolated from the Sargasso Sea
MVLPGDGVGPEVMKETLRVVDWFAKNKSISFNIKEGLVGGASFDKYGTPISDETLSDAVDADAILFGAVGSPKYDGVEFEKRPENGLLRLRKEMDLFANLRPAMVFPALVDASSLKPNIISGLDILILRELTGGIYFAEPRGIEEIDTQIKKGYDTNLYTTPEIERIGRVAFDMARARNGKVTSVEKANVMMSGVLWREVITNLHKKEGSDILINHMYADNCAMQLVRDPKQFDVIVTDNLFGDILSDCAAMLTGSLGMLPSASLGSVDQNTGKRHAMYEPVHGSAPDIAGKELANPWQN

SEQ ID NO: 87547 - protein, 217 aa, Unknown
  Bacterial polypetide isolated from the Sargasso Sea
IQPIENNERKGINTHSYTTKEIKRIARVAFELAKKRKNKVTSCEKSNVMEAGVLWREEVENLKNKEFQKVELEHMLADNCAMQLLRNPKQFDVILADNLFGDMLSDEAAMLTGSLGLLPSASLGEKDKDGKIRSLYEPVHGSAPDIAGKNIANPIATILSLSMALRYSLDLDKEADLLETAVQSVLDEDIRTKDIMSPGKKEVSTSDMGDAIISKLK

SEQ ID NO: 87548 - protein, 216 aa, Unknown
  Bacterial polypetide isolated from the Sargasso Sea
ILLLPGDGIGPEVVGEVKKIIEWFNKYKSLDFSFEEELIGGASIDKNKIPITDEVFYKSLESDAVILGACGGPKWDNLEFSKRPERGLLKLRKELKLFANLRPAICFKQLVNSSSLKPEIVSGLDIMIVRELTGGIYFGEPRGIEPIENNQRRGINTHSYTTGEIQRIARVAFDLAKKRKNKVTSCEKSNVMEAGVLWREEVQALKDKEYKKIELN

SEQ ID NO: 87549 - protein, 212 aa, Unknown
  Bacterial polypetide isolated from the Sargasso Sea
MNKKILVLPGDGIGQEVTASTMQILDFIIKKFSLNFSIDKLDVGGTAYEKFGSPIPENVLTAAKKADAVLFGAVGAPQWDGLSWEDRPENALLTLRKELNLFANLRPAFLFNELSNASPLKEKIIEGLDILIVRELTGGIYFGEPRGVVDDQSPNYAFNTMIYNEDEIRRIAKIAFESAQKRKGRLCSVEKANVLEVSKFWRSIVTEMSEEY

SEQ ID NO: 87550 - protein, 290 aa, Unknown
  Bacterial polypetide isolated from the Sargasso Sea
MIKVKDRKLLLLPGDGIGPEVVREVRKIIEWFNKNKSLDFKIEEGLVGGASYDKHKNPITDEVFYKALESEAVILGAVGGPKYDNLEFSKRPERALLKLRKELKLFANLRPAICFKQLVEASSLKPEIISGLNIMIVRELTGGIYFGEPRGIEPIENNERKGVNTHTYTTSEIQRVARVAFDLAKKRKNKVTSCEKSNVMEAGILWREEVQALRDKEYKKIELSHMLADNCAMQLLRDPKQFDVIVTDNLFGDILSDEAAMLTGSLGLLPSASLGAKDKNGKIRSMYEPV

SEQ ID NO: 87551 - protein, 164 aa, Unknown
  Bacterial polypetide isolated from the Sargasso Sea
MSKKILVLPGDGIGQEVTASAIQILDFIIKKFSLNFSIDTLDVGGTAYEKFGSPIPENVLKTAKKADAVLFGAVGAPQWDGLSWEDRPENALLTLRKELNLFANLRPAFLFNELSDASPLKEKIIEGLDILIVRELTGGIYFGEPRGVVDDQSPNYAFNTMIYN

SEQ ID NO: 87552 - protein, 164 aa, Unknown
  Bacterial polypetide isolated from the Sargasso Sea
ELWRNIMIETSKKYPDVELSHMYVDNASMQLIKNPKQFDVIVTTNMFGDILSDCASMLTGSLGMLPSASIGISPDGKNKAMYEPVHGSAPDISGKGIANPLAMILSIGMMFKFSFNDQSVSKLINNAVKSVLKKGFRTKDIFSNDKILLSTQEMGDKVLEEIKK

SEQ ID NO: 87553 - protein, 268 aa, Unknown
  Bacterial polypetide isolated from the Sargasso Sea
KELKLFANLRPAICFKQLVDASTLKPEIVSGLDIMIVRELTGGIYFGEPRGIKPIENGERKGINTHTYTSSEIIRVARIAFDLAKKRSNKVTSCEKSNVMEAGQLWKEEVQTLHDKEYKDVELTHMLADNCAMQLLRNPKQFDVIVTDNLFGDMLSDQASMLTGSLGLLPSASLGAKNKDGEMRAMYEPIHGSAPDIAGKGIANPIATILSFAMALRYSLDLDKESEALEKAVQDVLNDGLRTKDILSDGMKEVSTSQMGDAIISKLQ

SEQ ID NO: 87554 - protein, 222 aa, Unknown
  Bacterial polypetide isolated from the Sargasso Sea
MLLPGDGIGPEVIAEVKKIIEWFNSNKSLDFEIDQDLVGGAAYDKHGTPITDEAFYKAQESAAVILGAVGGPKWDNIDFSKKPERALLKLRKELKLFANLRPAICFKQLVDASSLKPEFVSNLDILFVRELTGGIYFGEPRGIKPIDNGERKGINTHVYTTGEIERVARVAFDLARKRNNKVTSCEKSNVMEAGQLWKEEVQAIHEKEYSDVELNHMLADNC

SEQ ID NO: 87555 - protein, 169 aa, Unknown
  Bacterial polypetide isolated from the Sargasso Sea
MWREVMTNLHEKEGSDISINHMYADNCAMQLVRDPKQFDVIVTDNLFGDILSDCAAMLTGSLGMLPSASLGSIDQNTGKRHAMYEPVHGSAPDIAGKELANPLAELLSLSMLFRYSFEMKEEADLIDEAVSKALDAGPRTQDIMASGRVKVGTKGMMDSVINKLEELTK

SEQ ID NO: 87556 - protein, 215 aa, Unknown
  Bacterial polypetide isolated from the Sargasso Sea
PIDNGERKGINTHIYTSSEIERVARVAFDLARKRSKKVTSCEKSNVMEAGQLWKEEVKALHEKEYKDIELKHMLADNCAMQLVRYPKQFDVIVTDNLFGDMLSDEAAMLTGSLGLLPSASLGAKDKNGNMRSLYEPVHGSAPDIAGKGIANPIATILSFAMALKYSLDLDKESKILEKAVQSVLDEGLRTKDILSKGKKEVSTSEMGDAIISKLQ

SEQ ID NO: 87557 - protein, 228 aa, Unknown
  Bacterial polypetide isolated from the Sargasso Sea
LKLRKELKLFANLRPAICFKQLVDASSLKPEIVSGLDIMIVRELTGGIYFGEPRGIKPIDNGERKGVNTHTYTSSEIARVARVAFDLAKKRNNKVTSCEKSNVMEAGQLWREEVTETHKNEFKEVKLEHMLADNCAMQLLRNPKQFDVIVTDNLFGDILSDEAAMLTGSLGLLPSASLGAKDKNGNIRSMYEPVHGSAPDIAGKNLANPIATILSFSMALRYSLNLEK

SEQ ID NO: 87558 - protein, 305 aa, Unknown
  Bacterial polypetide isolated from the Sargasso Sea
TDEVFYKALESEAVILGAVGGPKWDDLEFSKRPERALLKLRKELKLFANLRPAICFKQLVDASSLKPEIVSGLDIMIVRELTGGIYFGEPRGIKPIENGERKGINTHVYTSSEIIRVAKVAFELAQKRNKKVTSCEKSNVMEAGILWREEVQKLKDAEYSNIELNHMLADNCAMQLLRNPKQFDVIVTDNLFGDILSDEAAMLTGSLGLLPSASLGAKDKNGKMRSMYEPVHGSAPDIAGTGKANPIASILSFSMALRYSLDLDKEADNLDLAVQKVLDDGLRTKDILSKGKKEVSTSQMGGCNN

SEQ ID NO: 87559 - protein, 178 aa, Unknown
  Bacterial polypetide isolated from the Sargasso Sea
KQLGLEKVTSATKSNGIIHTMPYWDERFSVIAEEYPMLTTDQYHIDILTANFVLHPDWFDVVVGSNLFGDILSDLGPAVAGSIAIAPSANINPDGDLPSMFEPVHGSAPDIAGKGIANPIGQIWSGSMMLEHHGYKEAADEIVRAIEEVISEGGPKTPDLGGQANTKELGQAIADSIR

SEQ ID NO: 87560 - protein, 284 aa, Unknown
  Bacterial polypetide isolated from the Sargasso Sea
MSKKILILPGDGIGQEVTSSAIQILEFIIDKFNLDFSTKILDVGGTAYEKFGSPIPEDVLVSAKEADAILFGAVGAPQWDNLSWEDRPENALLTLRKELNLFANLRPAFLFEELSNASPLKEKIIQGLDILIVRELTGGIYFGEPRGVVKDKNPNYAFNTMVYNEDEIRRIAKIAFESAQKRKGRLCSVEKANVLEVSKFWRSIVTEMSEDYPDVELSHQLADNAAMQLVLDPNQFDVIVASNLFGDILSDIAATLTGSIGMLPSASLDSSFKGMYEPCHGQCS

SEQ ID NO: 87561 - protein, 159 aa, Unknown
  Bacterial polypetide isolated from the Sargasso Sea
MIKVKRRKILLLPGDGIGPEVIAEVKKIIQWFNKKKSLDFETEEDLVGGASYEKHKKPITDEVFYKALESEAVILGAVGGPKWDNLEFSKRPERALLKLRKELKLFANLRPAICFKQLVEASSLKPEIVSGLDIMIVRELTGGIYFGEPRGIKPIENGE

SEQ ID NO: 87562 - protein, 176 aa, Unknown
  Bacterial polypetide isolated from the Sargasso Sea
MSYQIAVLSGDGIGPEVMAEARKVLSAVETRFGLDIQYTEYDVGGIAIDNHGCPLPDATLKGCEAADAILFGSVGGPKWEHLPPNDQPERGALLPLRGHFELFCNLRPAKLHDGLEHMSPLRSDISARGFDVLCVRELTGGIYFGKPKGRQGEGESEEAFDTMRYSRREISRIARI

SEQ ID NO: 87563 - protein, 167 aa, Unknown
  Bacterial polypetide isolated from the Sargasso Sea
RKTVTELHKKEYSSVDLEHILADNVQMQLVRYPKQFDVILTDNLFGDLLSDTAAMLTGSLGMLPSAALGPVKENGTRAAMYEPVHGSAPDIAGQSKANPLAMIMSFAMMLKYSFDMHEDSQLVEKAVQNVLLKGLRTADIKDGAEKIISTQEMGNAVIQELKILTGN

SEQ ID NO: 87564 - protein, 212 aa, Unknown
  Bacterial polypetide isolated from the Sargasso Sea
MPRTILMLPGDGIGPEIVAEAEKVLNKINDQFNLGLNFESGLVGGAAIDETDTPLPDETLEKATRADAILLGAVGGPQWDSLPMAKRPEKGLLGLRSNLELFANLRPAILYPQLASASSLKPEVVSGLDIMIVRELTGGIYFGQPRGVRELESGERQGYNTYAYTESEIRRIGRVAFEAAQQRGKKLCSVDKANVLEVTVLWREIMNDLRPG

SEQ ID NO: 87565 - protein, 294 aa, Unknown
  Bacterial polypetide isolated from the Sargasso Sea
MSNKKILVLPGDGIGNEVMAEVLKIIDWLSKTRSMSFDISERLVGGTAYDKEGNSISDETMQEALDSDAVLFGAVGGPQWDNVEREKRPEAALLRLRKELDLFANLRPAVVFDALAEASPLKLNLVKGLDILILRELTSGVYFGQPRGVSKINDNEEKAIDTQSYTTSEITRITRVAFDLAKLRDNKVTSVEKSNVMETGMFWKNTVSNIHQKDFQDVELFHMLADNCAMQLVRNPKQFDVILTDNLFGDLLSDIAAMLTGSLGMLPSASLGPVAENGSRAAMYEPVHGSAPDM

SEQ ID NO: 87566 - protein, 178 aa, Unknown
  Bacterial polypetide isolated from the Sargasso Sea
RPAICFSSLSDSSSLKKEIVEDLDILIVRELTGGVYFGEPRGIEELENGNRRGTNTQVYETWEIQRIAEVAFELARKRKNKVTSSEKRNVMESGLLWYEEVKKIHQEKYNDVELDHMLADNCGMQLVRWPKQFDVIVTDNLFGDMLSDVAAMLTGSLGMLPSASLGKAVNGLFESAPI

SEQ ID NO: 87567 - protein, 144 aa, Unknown
  Bacterial polypetide isolated from the Sargasso Sea
MLADNCAMQLLRIPKQFDVIVTDNLFGDMLSDEAAMLQGSLDLLPSASLGAKDKNGNLRSMYEPVHGSAPDIAGKGIANPIATVLSFSMALRYSLNLEKEADDLDKAVQKVLDDGLRTKDILSKGNKEVSTKDMGNAIIACLQK

SEQ ID NO: 87568 - protein, 284 aa, Unknown
  Bacterial polypetide isolated from the Sargasso Sea
NQPERGLLRLRKEMDLFANLRPAQCFDALADFSSLKRDIVSGLDIMIVRELTSGIYFGEPRGIEGFGDNRVGYNTNRYTTEEIRRVARAAFDLAKKRDNKVCSMEKANVMESGILWRDEVRFVHEKEYPEVELSHMYADAGAMQLVRWPKQFDVIVTDNLFGDILSDCAAMLTGSLGMLPSASLGSLMESGRPKAMYEPVHGSAPDIAGSGQANPCASILSFAMALRYSFNRGGDADLIEKAVENVLSRGLRTKDLIQMSGGTPVSTSQMGDAILDSLEEFHKS

SEQ ID NO: 87569 - protein, 138 aa, Unknown
  Bacterial polypetide isolated from the Sargasso Sea
MLVDNAAMQLVRDPQQFDVIVTGNLFGDILSDIAAMLTGSIGMLPSASLNSENKGMYEPVHGSAPDISGKEIANPIAAILSVAMMLKYSFNMNEASSAIENSIEEVLSEGYRTYDLEGSKKNKLSTSEMGNKIIEKIK

SEQ ID NO: 87570 - protein, 284 aa, Unknown
  Bacterial polypetide isolated from the Sargasso Sea
LDHNLKPEKGLLTLRKELGTFANLRPGKVFPALANASSLKSEVLKGTDIFVVRELTGGIYFGEPRYSKIIDKKRVASNPLIYNEDEIARVAHEAFKISLKRNKKVTSLDKANVLEVMQLWRDVVTEVHEKYYKDEVELEHLYIDNAAMQVIKRPSTFDVILASNLFGDIISDEVAELTGSLGMLPSASTGNTKGIYEPVHGSAPDIAGKNIANPIAAILSLGMMFKYSFNEDKISDLIDHSISEVLNAGHRTKDIAKQNDTTLSCDEMGDLILGEIKKSQSNFI

SEQ ID NO: 87571 - protein, 153 aa, Unknown
  Bacterial polypetide isolated from the Sargasso Sea
MIKVKKRKILLLPGDGIGPEVITEVKKIINWFNDKKSLDFEIDQELVGGCSYDKHGTPITDEVFYKALESEVIMLGAVGGPTWDNLEFSKKPERALLKLRKELKLFANLRPAICFKQLVDASTLKPEVVSGLDIMIVRELTGGIYFGEPRGIK

SEQ ID NO: 87572 - protein, 138 aa, Unknown
  Bacterial polypetide isolated from the Sargasso Sea
MIKIKKRKILLLPGDGIGPEVIAEVKKIIEWFNSNKSLDFEIDQDLVGGAAYDKHGIPITDEAFYKAQESAAVILGAVGGPKWDNIDFSKKPERALLKLRKELKLFANLRPAICFKQLVDASSLKPEFVSNLDILFVR

SEQ ID NO: 87573 - protein, 130 aa, Unknown
  Bacterial polypetide isolated from the Sargasso Sea
PAQFDVLLTTNMFGDILSDLASELSGSLGLAGSINVGDRIPMAQAQHGSAPDIAGKGMANPISMILSVGMMFGWLGIKKNNDVFIKANDFLHQAIDEHLMEQHCLTPDLGGKATTQEVTSSILTKLDLLF

SEQ ID NO: 87574 - protein, 310 aa, Unknown
  Bacterial polypetide isolated from the Sargasso Sea
HGTPITDEVFYKALDCEAVILGAVGGPKWDDVEFSKKPERALLKLRKELKLFANLRPAICFKQLVDASTLKPEIVSGLDIMIVRELTGGIYFGEPRGIKPIDNGERKGINTHSYTTNEIKRVARVAFDLAKKRKNKVTSCEKSNVMEAGLLWKEEVQELHDKEFKDVELNHMLADNCAMQLLRNPKQFDVIVTDNLFGDMLSDQASMLTGSLGLLPSASLGAKNKEGRIRAMYEPIHGSAPDIAGQGVANPIATILSFAMALRYSLDLDKESDALEKAVQSVLDEGLRTKDILSKGMKLVSTSEMGDAII

SEQ ID NO: 87575 - protein, 317 aa, Unknown
  Bacterial polypetide isolated from the Sargasso Sea
GAGYEASGHPLPDATLKLAKEADAILFGAVGDWKYDSLERALRPEQAILGLRKHLELFANFRPAICYPQLVDASPLKPELVAGLDILIVRELNGDIYFGQPRGVRAAPDGLFAGEREGFDTMRYSEPEVRRIAHVAFQAARKRAKKLLSVDKANVLETSQFWRDIMIDVSKEYADVELSHMYVDNAAMQLAKAPKQFDVIVTGNMFGDILSDEASMLTGSIGMLPSASLDKNNKGLYEPSHGSAPDIAGKGIANPLATILSAAMMLRYSLNRAEQADRIERAVKTVLEQGYRTGDIATPGCRQVGTTAMGDAVVAAL

SEQ ID NO: 87576 - protein, 83 aa, Unknown
  Bacterial polypetide isolated from the Sargasso Sea
MYEPIHGSAPDIAGKGIANPIASILSFAMALKYSLELDKEAEALEKAVQDVLNDGLRTKDILSNGMKKVSTSQMGDAIISKLQ

SEQ ID NO: 87577 - protein, 274 aa, Unknown
  Bacterial polypetide isolated from the Sargasso Sea
NPSLSVRPEEGLLRMRKKLGLYANLRPTFTFESLLEMSPIKKSIVKGTDLIFVRELIGGIYFGKRGKSPENDYAFDTCEYKKEEVERIAKIGFELARKRSKKLCCIDKANVLETSRLWRKTVQSMERNYKDVEVSYEFVDAVAMRLIHSPNKYDVLITSNLFGDILTDEASVISGSMGLMPSASIGSQTSVYEPIHGSFPEAKGKNIANPLATILSASMMFERSFNLTKEAEMIRKIVSDSIEKKIVTEDLAENNKSFSTSQVGDWIKERIEKE

SEQ ID NO: 87578 - protein, 269 aa, Unknown
  Bacterial polypetide isolated from the Sargasso Sea
MANKTRKILLLPGDGIGPEVVSEVRKILEWMNKTKSLDFVLSQELIGGASIDANKVPITDEVFFKSLESDAVILGACGGPKWDNLEFSKKPERALLKLRKELKLFANLRPAICFKQLVDSSTLKPEIVSGLDIMIVRELTGGIYFGEPRGIEPMENNQRKGVNTHSYTTSEIHRIARVAFDLAKKRKNKVTSCEKSNVMEAGILWREEVQVIKDKEFKNVELNHMLADNCAMQLLRYPKQFDVILADNLFGDMLSDEAAMLTGSLGLLP

SEQ ID NO: 87579 - protein, 236 aa, Unknown
  Bacterial polypetide isolated from the Sargasso Sea
RELTSGVYFGQPRGISKISDTESKAIDTQVYTTSEIDRVSRVAFDLAKVRRNKLSSAEKSNVMETGLFWRKTVTELHKKEYSSVNLEHILADNCAMQLVRYPKQFDVILTDNLFGDLLSDTAAMLTGSLGMLPSAALGSIKENGTRAAMYEPVHGSAPDIAGQSKANPLAMIMSFAMMLKYSFNMHEDSQMVEKAVQNVLLKGFRTADIKDGAKKIISTQEMGNAVIEELKILSGN

SEQ ID NO: 87580 - protein, 178 aa, Unknown
  Bacterial polypetide isolated from the Sargasso Sea
QKRSSNLTSVDKANVLETSQLWRKVVSDIGEKYKSVKLSHMYVDNAAMQLVRSPKQFDVLLTGNIFGDILSDEASMLTGSIGMLPSASLSSKYGMYEPIHGSAPDIAGDNTVNPIAMILSVAMMFEYTFQNKNISSIIRNSINDVLNEGAFTKDLSPNDYISTSDMGNKIVNQIKKNV

SEQ ID NO: 87581 - protein, 165 aa, Unknown
  Bacterial polypetide isolated from the Sargasso Sea
VLWREEVQALKDKEYKKIELNHMLADNCAMQLLRNPKQFDVILADNLFGDMLSDEAAMLTGSLGLLPSASLGSRDKNGKIRSLYEPVHGSAPDIAGKNFANPIAAILSLSMALKYSLDLDKEANLLETAVQKVLDDGLRTKDIMSNSKKEVTTADMGDAIISKLK

SEQ ID NO: 87582 - protein, 140 aa, Unknown
  Bacterial polypetide isolated from the Sargasso Sea
MIKIKKRKILLLPGDGIGPEVISEVKKIIIWLNKNKSLDFEIDEDLAGGCSYDKHGTPITDEVFYKALESEAVMLGAVGGPKWDNLDFSKKPERALLKLRKELKLFANLRPAICFKQLVDASTLKPEIVSGLDIMIVREL

SEQ ID NO: 87583 - protein, 245 aa, Unknown
  Bacterial polypetide isolated from the Sargasso Sea
PSLLNISPLKKEIIQGTDFVFLRELTGGIYFGEKGRKDNDNSAFDVCFYNKKEIKRLAKKGFEMAMKRNKKLCCIDKANVLETSRLWRETIKEMEKNYPKVTVSYEFVDAVAMRLIQWPKSYDVLITENLFGDILTDEASVISGSMGLMPSASIGEKIALFEPIHGSFPQVAGLDIANPLAMILSAAMMFEEAFELKKEGETIRNAVNDSLDSKIITKDLANMKEKFYNTSYVGTWIENKILNSI

SEQ ID NO: 87584 - protein, 147 aa, Unknown
  Bacterial polypetide isolated from the Sargasso Sea
MIKVKKRKILLLPGDGIGPEVISEVKKIITWFNKKKSLDFEIDEDLAGGCSFDKHGTPITDEVFYKALESAAVMLGAVGGPKWDNVEFSKKPERALLKLRKELKLFANLRPAICFKQLVDASTLKPEIVSGLDIMIVRELTGGIYFG

SEQ ID NO: 87585 - protein, 256 aa, Unknown
  Bacterial polypetide isolated from the Sargasso Sea
ISLWGSLLKFIREFDQYINLRPVKLMPGVPSPLSGKKPGDIDFLIVRENTEGEYSSIGGKMFEGTEREFVVQETVMTKVGIERVLDFAFKLAQNRKSKHVTSATKSNGISITMPYWDELFEKMSKTYPDIKTDQYHIDILCAHFVLNPDKFDVIVASNLFGDILSDLGPACTGTIGIAPSGNINPENNHPSLFEPVHGSAPDIAGKGIANPIGQIWAGAMMLNHFGFDDASNEILNAIKHSLSEPKLRTKDLGWKC

SEQ ID NO: 87586 - protein, 306 aa, Unknown
  Bacterial polypetide isolated from the Sargasso Sea
SPIPENVLKTAKKADAVLFGAVGAPQWDGLSWKDRPENALLTLRKELNLFANLRPAFLFNELSNASPLKEKIIEGLDILIVRELTGGIYFGEPRGVVNDKSPNYAFNTMIYNEDEIRRIAKIAFESAQKRKGRLCSVEKANVLEVSKFWRSIVTEMSKEYPGVELSHQLADNAAMQLVLNPNQFDVIVASNLFGDILSDIAATLTGSIGMLPSASLDSSFKGMYEPCHGSAPDIANQDLANPLAMIGSLSMALRYSLDEETVANKIDTAIKKFIQQGFRTKDIATDENYLKTSEVAEKNIEILENE

SEQ ID NO: 87587 - protein, 160 aa, Unknown
  Bacterial polypetide isolated from the Sargasso Sea
MNKKNNILVLPGDGIGPEVCDEAIKVLNHLNDIYKLNIVIEESAVGGSAYEEFGNPLPEDTLKAAKGADAILLGAVGGPQWDDIDYHLRPERALLGLRAELDLFANLRPAILSKYLSDSSSLKPDKVQDLNLLIVRELTGGIYFGEPRGRSKTGDSAFNT

SEQ ID NO: 87588 - protein, 212 aa, Unknown
  Bacterial polypetide isolated from the Sargasso Sea
MGERKGINTHTYTSSEIIRVAKVAFELAKKRKNKVTSCEKSNVMEAGQLWKEEVQALHDEEYKEVELNHMLADNCSMQLLRNPKQFDVIVTDNLFGDMLSDQASMLTGSLGLLPSASLGAKNKDGKMRAMYEPIHGSAPDIAGKGLANPIATILSFAMALRYSLDLDKDAGDLEKAVEDVLNDGLRTKDIAEKGKKEVSTKEMGDAIISKLK

SEQ ID NO: 87589 - protein, 269 aa, Unknown
  Bacterial polypetide isolated from the Sargasso Sea
LPDATLKLAKEADAILFGAVGDWKYDSLERALRPEQAILGLRKHLELFANFRPAICYPQLVDASPLKPELVAGLDILIVRELNGDIYFGQPRGVRAAPDGLFAGEREGFDTMRYSEPEVRRIAHVAFQAARKRAKKLLSVDKANVLETSQFWRDIMIDVSKEYADVELSHMYVDNAAMQLAKAPKQFDVIVTGNMFGDILSDEASMLTGSIGMLPSASLDKNNKGLYEPSHGSAPDIAGKGIANPLATILSAAMMLRYSLNRAEQADRI

SEQ ID NO: 87590 - protein, 225 aa, Unknown
  Bacterial polypetide isolated from the Sargasso Sea
HEKTLEKALEVDAVLLVAVGGPKYDSLDFNLKPERALLKLRKELDLYANIRPAQCFDALASFSSLKREIVTGLDIVIVRELTSGIYFGEPRGIQKTESNERVGINTQRYTESEIKRVAISAFELAKKRSGKVCSMEKANVMESGVLWREVVSEVHRDYQEIELSHMYADNGAMQLVRDPKQFDVIVTDNLFGDILSDCAAMLTGSLGMLPSASLGSIMESGKPRA

SEQ ID NO: 87591 - protein, 254 aa, Unknown
  Bacterial polypetide isolated from the Sargasso Sea
KMLPDDWKDKIGSHDAIYFGAVGDPEKVPDHISLWGSLLKFRREFDQYINLRPVKLFDGVPCPLANKKPGDIDMLIVRENTEGEYSSVGGRMYKDTDREIAIQETVMSSHGVDRVQKYAFELARSKGRKKVTNATKSNGISITMPFWDERFNKIKKKYPEIKTDQFHIDILTARFVLTPEWFDIVVASNLFGDILSDLGPACTGTIGIAPSGNINPENKYPSLFEPVHGSAPDIAGMGIANPIGQIWSGALMLD

SEQ ID NO: 87592 - protein, 223 aa, Unknown
  Bacterial polypetide isolated from the Sargasso Sea
FWRTRGIEPIENNERKGINTHSYTTSEIQRIARVAFDLAKKRKNKVTSCEKSNVMEAGVLWREEVQKLKDKDFKKVELNHMLADNCAMQLLRNPKQFDVILADNLFGDMLSDEAAMLTGSLGLLPSASLGAKDKNGKIRSLYEPVHGSAPDIAGKNIANPIATILSLSMALKYSLNLDKEANLLDEAVQQVLDDGLRTKDIMSADKKEVTTTDMGDAIISKLK

SEQ ID NO: 87593 - protein, 195 aa, Unknown
  Bacterial polypetide isolated from the Sargasso Sea
KRVAKVAFELAKKRKNKVTSCEKSNVMEAGVLWREEVQALKEKEYKKVELEHMLADNCAMQLLKNPKQFDVIVTDNLFGDMLSDEAAMLTGSLGLLPSASLGEKDKNGKTRSMYEPVHGSAPDIAGKNIANPIATILSFSMALRFSLDLDKEANLLDAAVQKVLDDGLRTKDIMSKGKKEVTTSDMGDAIISKLK

SEQ ID NO: 87594 - protein, 150 aa, Unknown
  Bacterial polypetide isolated from the Sargasso Sea
ADIELKHMLADNCAMQLVRYPKQFDVIVTDNLFGDMLSDEAAMLTGSLGLLPSASLGAKDKNGNMRSLYEPVHGSAPDIAGKGIANPIATILSFAMALKYSLDLDKESNTLEKAVQSVLDEGLRTKDILSKGTKEVSTSEMGDAIISKLQ

SEQ ID NO: 87595 - protein, 140 aa, Unknown
  Bacterial polypetide isolated from the Sargasso Sea
DNAQMQLLRNPKQFDVILADNLFGDMLSDEAAMLTGSLGLLPSASLGDKDKNGRTRSLYEPVHGSAPDIAGKNVSNPIATILSFSMALKYSLGLQKESKLLDKAVEKTLEDGLRTSDIMSKGKKKVSTSDMGDAIISNLN

SEQ ID NO: 87596 - protein, 88 aa, Unknown
  Bacterial polypetide isolated from the Sargasso Sea
NINPEKSFPSLFEPVHGSAPDIAGKGIANPIGQIWAGAMMLEHLGHKQASDNIVSAIEEVLEKKEYRTGDLGGKANTHSCGSAIADAI

SEQ ID NO: 87597 - protein, 295 aa, Unknown
  Bacterial polypetide isolated from the Sargasso Sea
CLDADAVLLGAVGGPKWEPLDFSFRPERGLLKLRSELQLYANLRPAVIYGDLVDASTLKRAVVEGADLMVIRELTGGIYFGEPRGVEERNGERVGFNTLVYSESEIRRVGKMACEIAMKRNKKLTSVDKANVLESTELWREVMTDVVEDFPEIELNHMYADNAAMQLIRDPKQFDTMVTTNMFGDILSDAAAMMTGSIGMLPSASLGGNIGLYEPVHGSAPDIAGQNLANPLAMILSTGMMLRYSFDLGQADDLIQKAVVQTIETFRTGDIMSPGKTKIGCRQMGCKVLETIKTL

SEQ ID NO: 87598 - protein, 239 aa, Unknown
  Bacterial polypetide isolated from the Sargasso Sea
MDEVCRIIEWFEKKLKIQFETKFDLVGGSAYDEYGTPLSDETLKIANEVDAILLGAVGGPKYDNLEFSLKPERGLLKLRKELDLFSNLRPAQCFDALSDYSSLKPNIVSGLDIMIVRELSSGSYFGEPRGIEINKKSGERYAINTTYYSESEIERVAISAFEIAKKRNKKVCSMEKANVMEVGVLWRDVVQKIRDKSYPEIELSHMYADAGAMQLVRWPKQFDVIVTDNLFGDLLSDCA

SEQ ID NO: 87599 - protein, 188 aa, Unknown
  Bacterial polypetide isolated from the Sargasso Sea
DRVLKFGFELANKTEKKHLTSATKSNGISITMPYWDERVEEMAKQYSEVKWDKYHIDILCAHFVLNPDKFNVVVASNLFGDILSDLGPACTGTIGIAPSGNINPEKKFPSLFEPVHGSAPDIAGQGIANPVGQIWAGAMMLEYLGFKEASEHVVRAIEEVLEKEEYRTGDLGGKANTISCGSAIADAI

SEQ ID NO: 87600 - protein, 128 aa, Unknown
  Bacterial polypetide isolated from the Sargasso Sea
MQLVKQPSQFDVLLCDNLFGDILSDECAMITGSMGLLPSASLNQSGFGLYEPAGGSAPDIAGKGVANPIAQILSAALMLRYSLGQDEAARTIEKAVAEAVEAGVGTPDIYPQGGYSTSDVAAAIVSRI

SEQ ID NO: 87601 - protein, 190 aa, Unknown
  Bacterial polypetide isolated from the Sargasso Sea
MSNKTRKILLLPGDGIGPEVIAEVRKILEWMNKTKSLDFVLNQELIGGASIDANKVPITDEVFYKSLESDAVILGACGGPKWDNLEFSKKPERALLKLRKELKLFANLRPAICFKQLVNSSTLKPEIVSGLDIMIVRELTGGIYFGEPRGIEPMENNQRKGVNTHTYTTSEIHRIARVAFDLAKKRKNKV

SEQ ID NO: 87602 - protein, 275 aa, Unknown
  Bacterial polypetide isolated from the Sargasso Sea
ACVGDIKYDSLARELRPESGLLKLRSALNLFANIRPVKIRKSLLDASTLKKEIVENVDLIVVRELIGGIYFGKPRGHITNTKIPKAFNTMVYDSAEIERITEIAIKIANQRNKKICSVDKSNVLEVSQLWRDTVLNITSKDKNITLSNMYVDNAAMQLVRDPGQFDVILTSNLFGDILSDLAAMLTGSIGMLPSASLNNNGPGVFEPVHGSAPDIAGKNIANPIAMLLSASMMLKIGLNEEEAAENLEIAIDKVLSKGFRTADLADGSSRSIILQ

SEQ ID NO: 87603 - protein, 367 aa, Unknown
  Bacterial polypetide isolated from the Sargasso Sea
MANKTRKILLLPGDGIGPEVVAEVRKILEWMNKTKSLDFVLSQELIGGASIDANKVPITDEVFYKSLESDAVILGACGGPKWDNLEFSKKPERALLKLRKELKLFANLRPAICFKQLVDSSTLKPEIVSGLDIMIVRELTGGIYFGEPRGIEPMENNQRKGINTHSYTTSEIHRIARVAFDLAKKRKNKVTSCEKSNVMEAGILWREEVQAIKDKEFKKVELNHMLADNCAMQLLRYPKQFDVILADNLFGDMLSDEAAMLTGSLGLLPSASLGAKDKNGRVRSLYEPVHGSAPDIEGKNIANPIATILSLSMALRYSLDLGKEADKLDKAVQSVLDDSLRTKDIMSKNMKEVSTTEMGDAIIAKLK

SEQ ID NO: 87604 - protein, 223 aa, Unknown
  Bacterial polypetide isolated from the Sargasso Sea
LTGGIYFGEPRGIVKDKNPNYAFNTMVYNEDEIRRIAKIAFESAQKRKGKLCSVEKANVLEVSKFWRSIVTEMSVDYPDVELSHQLADNAAMQLVLDPNQFDVIVASNLFGDILSDIAATLTGSIGMLPSASLDSSFKGMYEPCHGSAPDIAHQDVANPLAMIGSLSMALKYSLGEEIVASKIDLAIKNLIKQGYRTKDISNDENYLKTSEVAQKIIENIENE

SEQ ID NO: 87605 - protein, 368 aa, Unknown
  Bacterial polypetide isolated from the Sargasso Sea
MIKVKKRKILLLPGDGIGPEVIAEVKKIINWFNDKKSLDFEIDQDLAGGCSIDKHGTPITDEVFYKALESAVVMLGAVGGPKWDNIDFSKKPERALLKLRKELKLFANLRPAICFKQLVDASTLKPEIVSGLDIMIVRELTGGIYFGEPRGIKPIENGERKGINTHTYTSSEIIRVAKIAFDLAKKRSNKVTSCEKSNVMEAGQLWKEEVQALHEKEYKDVELSHMLADNCAMQLLRNPKQFDVIVTDNLFGDMLSDQASMLTGSLGLLPSASLGAKNKDGEMRAMYEPIHGSAPDIAGKGIANPIATILSFAMALRYSLDLDKEAEALEKAVQDVLNDGLRTKDILSDGMKEVSTSQMGDAIISKLQ

SEQ ID NO: 87606 - protein, 268 aa, Unknown
  Bacterial polypetide isolated from the Sargasso Sea
MSSKILVLPGDGIGVEVADQAIRVIEKLNEQGLNASYEKDLVGGASYDANGEPLTNSVLEKAKNSDAILLGAVGGSKWDDVERSKRPEAGLLGLRKELELFANLRPALVFDALVSASTLKNEVVNNLDIMIVRELTGGVYFGQPRGIEETPNGKKAIDTQIYHDYEIDRIARVAFDLARKRNNKVTSVEKANVMETGVLWREIVKETHREFSDITLENMLADNCAMQLVRNPKQFDVIVTDNLFGDLLSDCAAMLTGSLGMLPSASLG

SEQ ID NO: 87607 - protein, 111 aa, Unknown
  Bacterial polypetide isolated from the Sargasso Sea
PPNLFGDILSDLCAGLVGGLGMAPGANIGDGAAIFEAVHGSAPDIAGKNIANPTSVILASIQMLEYLGMQDKAERIREAVRATIESGDRVTRDLGGTASTSEFTQSIIERL

SEQ ID NO: 87608 - protein, 312 aa, Unknown
  Bacterial polypetide isolated from the Sargasso Sea
SDETLEKAKNSHAVLLGAVGGEKWDNLDFSLKPEQGLLRIRKELDLFANLRPALCFESMVDASSLKPDLVSGLDILIVRELTGGIYFGQPRGIEDKGNGNRVGINTQCYSTEEVRRVARIAFELASKRGNRVTSCEKSNVMESGILWREEVSHVHKNEYSNVELSHMYADNCAMQLVRNPKQFDVIVTDNLFGDILSDEAAMLTGSLGMLPSASLGAVDSNNFRKSLYEPVHGSAPDIAGKGIANPIASILSFAMCLKYSFNMDKESDLINKAVNNVLASGFKTADLIGNDNKNLSTVEMGDQILNQIKENF

SEQ ID NO: 87609 - protein, 224 aa, Unknown
  Bacterial polypetide isolated from the Sargasso Sea
MTKAKKRKILLLPGDGIGPEVVREVKKIIEWFNKNKSLDFSFEEELIGGASIDANKIPITDEVFYKSLESDAVILGACGGPKWDNLEFSKKPERALLKLRKELKLFANLRPAICFKQLVDSSTLKPEIVSGLDIMIVRELTGGIYFGEPRGIEPIENNERKGINTHSYTTGEIQRIARVAFDLAKKRKNKVTSCEKSNVMEAGVLWREEVAALKDKEYKKIDLN

SEQ ID NO: 87610 - protein, 269 aa, Unknown
  Bacterial polypetide isolated from the Sargasso Sea
MSSKILVLPGDGIGVEVADQAIRVIEKLNEQGLNASYEKDLVGGASYDVNGEPLTNSVLEKAKNSDAVLLGAVGGSKWDDVERSKRPEAGLLGLRKELELFANLRPALVFDALVSASTLKNEVVNNLDIMIVRELTGGVYFGQPRGIENTPNGKKAIDTQIYHDYEIDRIARVAFDLARKRNNKVTSVEKANVMETGVLWREIVKETHKDFSDITLENMLADNCAMQLVRNPKQFDVIVTDNLFGDLLSDCAAMLTGSLGNVPSASLGE

SEQ ID NO: 87611 - protein, 354 aa, Unknown
  Bacterial polypetide isolated from the Sargasso Sea
MKEYNIASIPGDGIGKEVLPEGLKVLKDAALKHQFKINFTEYDFASCDYYEKHGKMLPDDWKEQLRKHDAIFFGAVGMPDKVPDHISLWGSLLQFRREFDQYINLRPVKLFPGINPPLANKKPGDIDMLIVRENTEGEYSTVGGRVYKNTDREIAIQETIMSAHGIDRVQKFAFELAKQRIRKKLTNATKSNGISITMPFWDERFNEMKKNYPEIETDQFHIDILVARFVLNPEWFDVVVASNLFGDILSDLGPACTGTIGIAPSGNINPENKFPSLFEPVHGSAPDIAGKGIANPIGQIWSGAMMLDYLGEKEASHSIVEAIEKSLSEKENRTKDLGGDADTIKSSNSILANL

SEQ ID NO: 87612 - protein, 335 aa, Unknown
  Bacterial polypetide isolated from the Sargasso Sea
MSSQTITVIKGDGIGPSIVEAAIQVLDKVGCNFNYEYVEAGLTALETTGELLPQTTLDAIARNKITLKGPLTTPVGEGFTSINVTLRKKFNLYSNVRPVISFKGTKARYENIDIITVRENTEGMYSGAGQIVKNEGELAEAMSVVTREGSERIVEFAFELARRENRKKVTIVHKANILKSTSGLFLKTAREVALRYPDIQASEMIVDNACMQLVMNPQQFDVIVTTNLFGDILSDLCAGLVGGLGMAPGANIGKDCAIFEAVHGSAPDIAGKNLANPSSVILASIQMLEYLGMKDKAEKILAALTDVIASGDRTTRDLGGSHGTTDFTAAMLERL

SEQ ID NO: 87613 - protein, 190 aa, Unknown
  Bacterial polypetide isolated from the Sargasso Sea
MIKVKKRKILLLPGDGVGPEVINEVKKIISWFNKNKSLDFEIDQDLVGGAAYDKHGTPITDEVFYKALESEAVILGAVGGPKWDKLEFSKKPERALLKLRKELKLFANLRPAICFKQLVEASTLKPEVVSGLDIMIVRELTGGIYFGEPRGIKPIDNGERKGINTHTYTSSEIQRVARVAFDLAKKRQNK

SEQ ID NO: 87614 - protein, 234 aa, Unknown
  Bacterial polypetide isolated from the Sargasso Sea
MIVRELTGGIYFGEPRGIEPMENNQRKGINTHSYTTSEIHRIARVAFDLAKKRKNKVTSCEKSNVMEAGILWREEVQTIKDKEFKKVELNHMLADNCAMQLLRYPKQFDVILADNLFGDMLSDEAAMLTGSLGLLPSASLGAKDKNGRIRSLYEPVHGSAPDIEGKNIANPIATILSLSMALRYSLDLGKEADQLDQAVQNVLDDGLRTKDIMSKNMKEVSTTDMGDAIIAKLQ

SEQ ID NO: 87615 - protein, 244 aa, Unknown
  Bacterial polypetide isolated from the Sargasso Sea
MIKVKKRKFLLLAGDGIGPEVVSEVKKIIQWFNINKSLDFEIDEDLAGGVSYDKHGTPITDEVFYKALECEAVILGAVGGPKWDDVEFSKKPERALLKLRKELKLFANLRPAICFKQLVDASTLKPEIVSGLDIMIVRELTGGIYFGEPRGIKPIDNGERKGINTHSYTSSEIQRVARVAFDLAKKRKNKVTSCEKSNVMEAGLLWKEEVQELHDKEFNDVELNHMLADNCAMQLLRNQNSLML

SEQ ID NO: 87616 - protein, 204 aa, Unknown
  Bacterial polypetide isolated from the Sargasso Sea
IGYNTMSYSTSEVERIADYAFNVAAKRSSKVVSVDKANVLESSQLWRETVDKLHSDKYSDIILSHMYVDNAAMQLVKDPKQFDVILTGNIFGDILSDEASMLTGSIGMLPSASISKSQGVYEPIHGSAPDIAGKGIVNPIAMILSVAMMFEYSLNSKKISMLIKNSIDNVLKSGYRTKDISTTSEFINTSEMGDAIIQEIKSNV

SEQ ID NO: 87617 - protein, 347 aa, Unknown
  Bacterial polypetide isolated from the Sargasso Sea
MSQYSIAVLAGDGIGPEVMQEANKVLDAVEKKFNVTLNRTAYPVGGYAIDTEGEALPSKTLLGCEQADAILFGSIGGPKWDTLPLEQRPERAALLTLRSHFDLFSNLRPARIYPGLESLSPLREDIAKSGVDVLVVRELTSGIYFGQPKGREGEGEEEFAYDTMRYSKREIRRIAIAAFEAAQKRRGKVTSVDKANVLVTSRLWREIAEEVAKDYPDVELDHIYIDNATMQIMKNPAQFDVMLCSNLFGDIVSDECAMMTGSMGLLPSASMNEEGFGLYEPAGGSAPDIAGQGIANPIAQILSAAMMLRFSMNLNDAADAIEKAVVATLEAGVLTGELLPSDKRSQA

SEQ ID NO: 87618 - protein, 358 aa, Unknown
  Bacterial polypetide isolated from the Sargasso Sea
MTKKILILPGDGIGQEVIASAVEVLDFIVEKFNLQFSINSMEVGGTAYDEFGSPIPSNVLNAAKEADAVLFGAVGGPKWDDLGWDDRPENALLTLRKELNLFANLRPAFLFDELSGASPLKENVIKGLDILIVRELTGGIYFGEPRGVIEHQKPNYAFNTMIYNEDEIRRIAKIAFESAQKRNGRLCSVEKANVLEVSKFWRSIVTEMSSDYPDVELSHQLADNTAMQLVLDPNQFDVIVASNLFGDILSDIAATLTGSIGMLPSASLDSSFKGMYEPCHGSAPDIAGKDIANPIAMISSLSMALRYSLNEEDISDKIDLAIKKFVEQGYRTVDIATEENYLKTSEVSKKIIEIIENE

SEQ ID NO: 87619 - protein, 256 aa, Unknown
  Bacterial polypetide isolated from the Sargasso Sea
QQYVNLRPVRLLPGITPPVHGYETGDIDMYVVRENNEGEYSNIGGRMYEGTDLEMCMQENIFTKRGCERIMRYAFELAQSRPRKKLTSATKSNGISHTMPYWDEKFAEVGKEYPDIETDQFHIDILTAHFVRHPDWFDVVVGSNLFGDILSDLGPAVTGTIAVAPGANINPEKDFPSMFEPVHGSAPDIAGQGIANPIGQIWSGAMMLEHLGEQEAADAIVKAIETVLSDKNAPLTPDMGGTATTEDLGKAIADAV

SEQ ID NO: 87620 - protein, 368 aa, Unknown
  Bacterial polypetide isolated from the Sargasso Sea
MIKIKKRKFLLLPGDGIGPEVVGEVKKIIYWFNKNKSLDFEIEEDLAGGVSYEKHGTPITDEVFYKALECEAVILGAVGGPKWDNVEFSKKPERALLKLRKELKLFANLRPAICFKQLVEASTLKPEIVSGLDIMIVRELTGGIYFGEPRGIKPIDNGERKGINTHTYTSSEIQRVARVAFDLAKKRQNKVTSCEKSNVMEAGQLWKEEVQDLHDKEFNDVELIHMLADNCAMQLLRNPKQFDVIVTDNLFGDMLSDQASMLTGSLGLLPSASLGSKNKEGQMRAMYEPIHGSAPDIAGKGIANPIATILSFAMALRYSLDLDKEANALEKAVQDVLDEGLRTKDIISKGKKEVSTSQMGDAIISKLQ

SEQ ID NO: 87621 - protein, 252 aa, Unknown
  Bacterial polypetide isolated from the Sargasso Sea
FFIIKKEIVEDLDILIVRELTGGVYFGEPRGIEELENGNRRGTNTQVYETWEIQRIAEVAFELARKRKNKVTSSEKRNVMESGLLWYEEVKKIHQEKYNDVELDHMLADNCGMQLVRWPKQFDVIVTDNLFGDMLSDVAAMLTGSLGMLPSASLGKAVNGLFESALYEPVHGSAPDISGQGIANPLASILSFSMALKYSFGRNKESRLLEDSISKVLDDGSRTKDIADDGDFISTSEMGNKVIENLEILNKE

SEQ ID NO: 87622 - protein, 231 aa, Unknown
  Bacterial polypetide isolated from the Sargasso Sea
RELTGGIYFGEPRGIKPIDKGERKGINTHTYTSSEIQRVARVAFDLAKKRQNKVTSCEKSNVMEAGLLWREEVQDLHDKEFKDVKLDHMLADNCAMQLLRNPKQFDVIVTDNLFGDMLSDQASMLTGSLGLLPSASLGSKNKEGQMRAMYEPIHGSAPDIAGKGIANPIATILSFAMALRYSLDLDKEANALERAVQHVLNDGLRTKDIISKGKKEVSTSQMGDAIISKLQ

SEQ ID NO: 87623 - protein, 237 aa, Unknown
  Bacterial polypetide isolated from the Sargasso Sea
KRINKWEFTFGQPRGISKVSDTESKAIDTQLYTTSEIDRVAKVAFDLAKLRKNKVTSAEKSNVMETGLLWRKTVTELHKKEYTSVNLEHMLADNCAMQLVRYPKQFDVILTDNLFGDLLSDTAAMLTGSLGMLPSASLGPLKENGTRAAMYEPVHGSAPDIAGQSKANPLAMIMSFAMMLKYSFDMQEDSQLVENAVQNVLLKGLRTADIKDGAEKIISTKEMGDAVIEELKILSGQ

SEQ ID NO: 87624 - protein, 364 aa, Unknown
  Bacterial polypetide isolated from the Sargasso Sea
MDHKILALGGDGIGPEVLDFGLHLIYKIQDLFGIKIKIEHDLIGGACWDKFQVFCKNETVEKAKNSDAILVGAVGGPKWDNIKIKGTSEEQDGLMRLRKELDAYLGIRPAKVFSGLNDQSPIKEKKLKGTDILVLREMTSGIMFAQPRGNKIENGLRYAFDTAAYREDEIERFVNAGFDLARKRKKKICSIDKANVMESYKLWRDIVNEVSKNYSDVELNHYYADNCAYQLIMNPSKFDIILGCNLLGDIFSDLVAVFSGGLGLLPSACLCGPPKNFVKGIYEPVHGSAPDIAGTGKANPIGMFLSIAMMFEYSFERKDISTIIEKAIDKLIYKVNLTPDLNGKLSTEEVFLKFIDELNNEARV

SEQ ID NO: 87625 - protein, 239 aa, Unknown
  Bacterial polypetide isolated from the Sargasso Sea
LDILIIRELTGGIYFGEPRGVEKINEKISRGFNTLVYTTPEIERIAEVAFETALQRGKKLCSVDKANVLESTELWREIIISTSKKFPDVELSHMYIDNASMQLVRNPKQFDVIVTTNMFGDILSDCASMLTGSLGMLPSASIGYDHSGNKKAMYEPVHGSAPDISGKGVANPLAMILSVGMMFKYSFSRDDISDLISKVVNSILEKGYRTKDINNQNGKEVSTSEMGDLVLKELENEKI

SEQ ID NO: 87626 - protein, 228 aa, Unknown
  Bacterial polypetide isolated from the Sargasso Sea
MANRRGISKINDSEEKAVDTQSYTTSEVSRITRVAFDLARLRNNKVTSVEKSNVMETGMFWKKIVSNVHQNEFQDMDLHHMLADNCAMQLVRNPKQFDVILTDNLFGDLLSDIAAMLTGSLGMLPSASLGPLSENGSRSAMYEPVHGSAPDIAGQGKANPLAMIMSFAMMLKYSFNMIEDSNLIERAVQSVLSLGLRTSDISDGANKVVSTQDMGKAVIEELKKLTGN

SEQ ID NO: 87627 - protein, 368 aa, Unknown
  Bacterial polypetide isolated from the Sargasso Sea
MIKVKKRKILLLPGDGIGPEVIGEVKKIIKWFNDKKSLDFEIDEDLAGGCSYDKHGSPITDEVFYKALESEVVMLGAVGGPKWDDVEFSKKPERALLKLRKELKLFANLRPAICFEQLVSASTLKPEVVSGLDIMIVRELTGGIYFGEPRGIKPIENGERKGINTHTYTTSEIARVARIAFDLARKRSNKVTSCEKSNVMEAGQLWKEEVQELHDKEFKDVELSHMLADNCAMQLLRNPKQFDVIVTDNLFGDMLSDQASMLTGSLGLLPSASLGAKNKDGEMRAMYEPIHGSAPDIAGKSIANPIASILSFAMALRYSLDLDNEADALEKAVQHVLNDGLRTKDILSDGMKEVSTSAMGDAIISKLQ

SEQ ID NO: 87628 - protein, 360 aa, Unknown
  Bacterial polypetide isolated from the Sargasso Sea
MTKNILILPGDGIGQEVSSSMKEVLHYLIEEQNLNFKITERNVGGSSYDEFGTPLTEETLKVAKDSDAILFGAVGGPQWDNLEWDNRPEQALLALRKSLSLFANLRPAFLFNELASASPLKNNIIENLDILIVRELTGGIYFGEPRGIVENESPKYSFNTMIYNEDEIRRIAKVAFEAAMNRNRKLCSVEKANVLEVSKFWRSIITEMGSEYPEVELSHQLADNTAMQLVLNPNQYDVIVSGNLFGDILSDIAATLSGSIGMLPSASLNSSSQGMYEPCHGSAPDIAGKGVANPIAMIASLAMAFEYSLDRIDIAKRIESAIKIFISNGFRTKDIATSEEFVRTQDVAPALINILKDGHE

SEQ ID NO: 87629 - protein, 272 aa, Unknown
  Bacterial polypetide isolated from the Sargasso Sea
FKLRKELKLFANLRPAICFKQLVESSTLKPEIVSGLDIMIVRELTGGIYFGEPRGIEPIENNQRKGVNTHTYTTSEIHRIARVAFDLAKKRRNKVTSCEKSNVMEAGVLWREEVQVIKDKEFKKVELNHMLADNCAMQLLRYPKQFDVILADNLFGDMLSDEAAMLTGSLGLLPSASLGSKDKNGRIRSLYEPVHGSAPDIEGKNIANPIATILSLSMALRYSLDLSKEADQIDKAVQSVLDEGLRTKDIMSKNMKEVSTTDMGDAIIAKLK

SEQ ID NO: 87630 - protein, 178 aa, Unknown
  Bacterial polypetide isolated from the Sargasso Sea
TSCEKSNVMEAGQLWREEVEALHKKEFKDVKLDHMLADNCAMQLLRNPKQFDVIVTDNLFGDILSDEASMLTGSLGLLPSASLGSKDKDGNMRAMYEPVHGSAPDIAGKGIANPIATILSFSMSLRYSLNLEKEANSLENAVHKVLDDGLRTKDIMSDGKKEVSTSTMGDAIIACLQK

SEQ ID NO: 87631 - protein, 360 aa, Unknown
  Bacterial polypetide isolated from the Sargasso Sea
MAKTYRIAVIPGDGIGVEVMPEAIRVLDTVKKRFGIELEYQHIEWASCDYYAKHGKMMPDDWKAQLQSADAILFGAVGWPDTVPDHISLWGSLLKFRREFDQYINLRPARLFAGVPSPLAGRKAGDIDFWIVRENTEGEYSSVGGVMFEGTEREFVLQESVFTRHGSERVLKFAFDLAQRRERKKITVATKSNGIAISMPWWDKCAAGIAAQYPDVTWDKQHIDILCARFVLNPDRFDVVVATNLFGDILSDLGPACTGTIGLAPSGNLNPDRKFPSLFEPVHGSAPDIAGKNIANPIAMIWSAAMMLDFLGNHEGKEREAHDAILAAIEATLIEGPHTGDLGGKANTTEVGEAIAAKLA

SEQ ID NO: 87632 - protein, 357 aa, Unknown
  Bacterial polypetide isolated from the Sargasso Sea
MPGDGVGPEVTNEVKKIITWLNSKKSLDFEIDEDLAGGASYDAHGTPITDEVFYKALESEVVILGAVGGPKWDNLEFSKKPERALLKLRKELKLFANLRPAICFKQLVDASTLKPEIVSGLDIMIVRELTGGIYFGEPRGIKPIDNGERKGINTHTYTSSEIVRVARVAFDLAKKRSNKVTSCEKSNVMEAGQLWKEEVQTLHDEEFKEVELNHMLADNCAMQLLRNPKQFDVIVTDNLFGDMLSDQASMLTGSLGLLPSASLGAKNKDGEMRAMYEPIHGSAPDIAGKGIANPIATILSFAMALRYSLDLDKEADNLEKAVQDVLNDGLRTKDIISKGKKEVSTSQMGDAIISKLQ

SEQ ID NO: 87633 - protein, 360 aa, Unknown
  Bacterial polypetide isolated from the Sargasso Sea
MNILILPGDGIGKEICFEVEKLFKELNSIFSIDINFETSDFGGSAIKKYNNPFPKHTSENVIASDAVILGAVGGPMFDHLEGEMKPESGLLKLRKNNNLYINLRPIFSFTHAIESSPLKKEIISNLDILIIRELVGGLYFGEPRGFNSDRTEGYNTMRYTKTHINKILKFAFEVSSLRNKKLCSVDKANVLEVSQLWRSEAIELNKSYKDVALENMYVDNAAMQLVLNPSQFDVIVTENLFGDILSDLASVLTGSIGLLSSASLNDDHFGVYEPIHGSAPDIAGKNIANPCAIILSVGLMFLHTFNRKDIYDAINNAVENTINSGTKTKDISLKGDKAATTQEMGDCIITNLRKYANEKL

SEQ ID NO: 87634 - protein, 364 aa, Unknown
  Bacterial polypetide isolated from the Sargasso Sea
MSYQIAVLAGDGIGPEVMAEARKVLKAVEARFGLNIEYSEYDVGGIAIDNHGCPLPEATLKGCEAADAILFGSVGGPKWEKLPPNEQPERGALLPLRGHFELFCNLRPAKLHDGLEHMSPLRSDISARGFDVLCVRELTGGIYFGKPKGRQGEGESEEAFDTMRYSRREIARIARIAFEAARGRRKKVTSVDKANVLACSVLWRQVVEEVAVDFPDVELEHIYIDNATMQLLRRPDEFDVMLCSNLFGDILSDEIAMLTGSMGLLSSASMNSTGFGLFEPAGGSAPDIAGKGIANPIAQILSAALMLRHSLKQEEAASAIERAVSKALNSGYLTGELLSSDQRHKAKSTVEMGDFIADAVKAGV

SEQ ID NO: 87635 - protein, 336 aa, Unknown
  Bacterial polypetide isolated from the Sargasso Sea
MEKVQAKFGFALDYERHDVGGIAIDNHGTPLPQSTIAGCEAADAVLFGSVGGPKWEHLPPNDQPERGALLPLRAHFKLFCNLRPARIYTGLEQFSPLRADISDRGFDIACVRELTGGIYFGQPKGREGEGPTEKAFDTEVYHRFEIERIAKIAFESARVRKAKVTSIDKANVLASSILWREVVTQVAKSYPDVALNHMYIDNATMQLIKDPSQFDVLLCSNLFGDILSDECAMITGSMGLLPSASLNESGFGLFEPAGGSAPDIAGKGIANPIAQILSAALMLRYSLGQEAAAQAIEQAVAQTLAEGYFTADLHQASARHPVQSTAEMGSQIAARI

SEQ ID NO: 87636 - protein, 369 aa, Unknown
  Bacterial polypetide isolated from the Sargasso Sea
MTTSYKLLVLPGDGIGPEVMSEVLKVASCIEDLSSVNFEIEQDEIGGAAYDKYGTPLSEETLKKAKNSHAVLLGAVGGSKWDNLDFSLKPEQGLLRIRKELDLYANLRPALCFESMVGASSLKPELVSGLDIMIVRELTGGVYFGEPRGIKELSDGTRQGTNTQTYNTNEIRRVARIAFELAQKRNKKVTSCEKSNVMESGILWREEVEHVHQSEFEDLELSHMYADNCAMQLVRNPKQFDVIVTDNLFGDILSDEAAMLTGSLGMLPSASLGEIDENNFRKSLYEPVHGSAPDISGQGIANPIASILSFAMCLKYSFGMDNESDLINNSVNKVLSEGFKTADLIGDDDKNLSTEEMGNQIIKVIKGLG

SEQ ID NO: 87637 - protein, 183 aa, Unknown
  Bacterial polypetide isolated from the Sargasso Sea
FELAMKRSNKLCCVDKANVMESSRLWRETVQSLEKNYPKVNVSYELVDAVAMRLIQWPNSYDVLITENLFGDILTDEASVISGSMGLMPSASIGDGIALYEPIHGSFPQATNKNIANPIATILSAAMMFEMSFSLKKESDLIRKAVNISLEKGIVTEDISSTRKPYKTSEVGDFLVNQILISN

SEQ ID NO: 87638 - protein, 268 aa, Unknown
  Bacterial polypetide isolated from the Sargasso Sea
ELKLFANLRPAICFKQLVDASSLKPEIVSGLDIMIVRELTGGIYFGEPRGIKPIDNGERKGVNTHTYTSSEIARVARVAFDLAKKRNNKVTSCEKSNVMEAGQLWREEVEEIHKNEFKEVKLEHMLADNCAMQLLRNPKQFDVIVTDNLFGDILSDEAAMLTGSLGLLPSASLGAKDKNGKMRSMYEPVHGSAPDIAGKGLANPIATILSFSMALRYSLDLGKEADELDKAVQNVLDMGLRTKDIFSKGNKEVSTNTMGDAIIAQLQN

SEQ ID NO: 87639 - protein, 365 aa, Unknown
  Bacterial polypetide isolated from the Sargasso Sea
MANKTRKILLLPGDGIGPEVVAEVRRILEWMNKTKSLDFVLSQELIGGASIDANKVPITDEVFYKSLESDAVILGACGGPKWDNLEFSKKPERALLKLRKELKLFANLRPAICFKQLVDSSTLKPEIVSGLDIMIVRELTGGIYFGEPRGIEPIENNQRKGINTHSYTTSEIHRIARVAFDLAKKRKNKVTSCEKSNVMEAGILWREEVQAIKDKEFKKVELNHMLADNCAMQLLRYPKQFDVILADNLFGDMLSDEAAMLTGSLGLLPSASLGAKDKNGRIRSLYEPVHGSAPDIEGKNIANPIATILSLSMALRYSLDLGKEADQLDNAVQSVLDDGLRTKDIMSKNMKEVSTTEMGDAIIAK

SEQ ID NO: 87640 - protein, 358 aa, Unknown
  Bacterial polypetide isolated from the Sargasso Sea
MSKSILILPGDGIGQEVTASMVEVLNFLIGKYNLDFDVTTMSVGGTAYNEYGTPLPNKVLEKAKESDAILFGAVGGTEWDHLDWDDRPENALLSLRKELNLFANLRPALSYKELSEASPLKGEIVSNLDILIVRELTGGIYFGEPRGIVENKNPNYAFNTMVYNEDEIRRIAKVAFESAQKRNGRLCSVDKANVLEVSKFWRSIVAEMSNDYPDVELSHQLADNAAMQLVLNPNQYDVIVASNLFGDILSDIAATLTGSIGMLPSASLDSSFKGMYEPCHGSAPDIAGKNLANPIAMIASLSMALKYSLGEESVSDKIDKAISNFIKAGFRTKDISTDQNFLNTSEVANKLISIIEDE

SEQ ID NO: 87641 - protein, 368 aa, Unknown
  Bacterial polypetide isolated from the Sargasso Sea
MIKVKKRKFLLLPGDGIGPEVVGEVKKVVEWFNKNKSLDFEIDEDLAGGASYDKHGTPITDEVFYKALECEAVILGAVGGPKWDDVEFSKKPERALLKLRKELKLFANLRPAICFKQLVDASTLKPEIVSGLDIMIVRELTGGIYFGEPRGIKPIDNGERKGINTHTYTTSEIQRVARVAFDLAKKRKNKVTSCEKSNVMEAGLLWKEEVQELHDKEFKDVELNHMLADNCSMQLLRNPKQFDVIVTDNLFGDMLSDQASMLTGSLGLLPSASLGARNKDGKIRAMYEPIHGSAPDIAGQGLANPIATILSFAMALRYSLDLDKEADSLENAVQRVLDEGLRTKDILSKGMKQVSTSEMGDAIISKLQ

SEQ ID NO: 87642 - protein, 339 aa, Unknown
  Bacterial polypetide isolated from the Sargasso Sea
MIKIKKRKILLLPGDGIGPEVIAEVKKIIEWFNSNKSLDFEIDQDLVGGAAYDKHGTPITDEAFYKAQESAAVILGAVGGPKWDNIDFSKKPERALLKLRKELKLFANLRPAICFKQLVDASSLKPEFVSNLDILFVRELTGGIYFGEPRGIKPIDNGERKGINTHVYTTSEIERVARVAFDLARKRNNKVTSCEKSNVMEAGQLWKEEVQAIHEKEYSDVELNHMLADNCAMQLVRNPKQFDVIVTDNLFGDMLSDEAAMLTGSLGLLPSASLGAKDKNGNMRSLYEPVHGSAPDIAGQGIANPIATILSFAMALRYSLDLDKEADSLEKAVQGVLDE

SEQ ID NO: 87643 - protein, 293 aa, Unknown
  Bacterial polypetide isolated from the Sargasso Sea
MSNKKILILPGDGIGNEVMVEVLKIIDWMEKTKSLSFDISERLVGGTAYDKEGNSISDETMQIAMDCDAVLFGAVGGAKWDNVERDKRPEAALLRLRKDLDLFANLRPAVVLDALSDSSSLKPDLVKGLDILIIRELTSGVYFGQPRGISKISETESKAVDTQLYTTSEVNRVSRVAFDLAKLRNNKVTSVEKSNVMETGLFWKETVTDLHKKEYSDVNLEHMLADNCAMQLVRYPKQFDVILTDNLFGDLLSDTAAMLTGSLGMLPSAALGQLKKMELEQQCMSPCMVVHQI

SEQ ID NO: 87644 - protein, 350 aa, Unknown
  Bacterial polypetide isolated from the Sargasso Sea
MKEVIKVAKSIGELSKVKFEIEEDDIGGSAYDRYGTPLSDETLEKAKNSHAVLLGAVGGEKWDNLDFSLKPEQGLLRIRKELDLFANLRPALCFESMVDASSLKPDLVSGLDILIVRELTGGIYFGEPRGIEDKGNGNRVGINTQSYSTEEVRRVARIAFELASKRGNRVTSCEKSNVMESGILWREEVSHVHENEYSNVELSHMYADNCAMQLVRNPKQFDVIVTDNLFGDILSDEAAMLTGSLGMLPSASLGAVDSNNFRKSLYEPVHGSAPDIAGKGIANPIASILSFAMCLKYSFNMDKESDLINKAVNNVLASGFKTADLIGDDNKNLSTVEMGDQILNQLKENF

SEQ ID NO: 87645 - protein, 369 aa, Unknown
  Bacterial polypetide isolated from the Sargasso Sea
MIKVKKRKFLLLPGDGIGPEVIGEVKKIITWFNVNKSLDFDMEEALVGGASYDKHGTPITDEVFYKSLECEAVILGAVGGPKYDNLDFSKRPERALLKLRKELKLFANLRPAICFKQLVEASTLKPEIVSGLDIMIVRELTGGIYFGEPRGIKPIDNGERKGINTHTYTSSEIKRVARVAFDLAKKRNNKVTSCEKSNVMEAGQLWKEEVQNLHDKEFKDVELNHMLADNCAMQLLRNPKQFDVIVTDNLFGDMLSDEASMLTGSLGLLPSASLGAKNKDGEMRAMYEPVHGSAPDIAGKGIANPIATILSFAMALRYSLDLDKEADDLEKAVQNVLDDGLRTIDIMSKGTKEISTSGMGDAIIAYLQK

SEQ ID NO: 87646 - protein, 360 aa, Unknown
  Bacterial polypetide isolated from the Sargasso Sea
MSSKILVLPGDGIGVEVADQTIRVIEKLNEQGLDAIYEKDLVGGASYDVNGEPLTEAVLEKAKNSDAILLGAVGGSKWDDVERSKRPEAGLLGLRKELELFANLRPALVFDALVDASTLKNDVVNNLDIMIVRELTGGVYFGQPRGIEDTSNGKKAIDTQVYHDYEIDRIARVAFDLASKRNNKVTSVEKANVMETGVLWREVVKETHKDFSDITLENMLADNCAMQLVRNPKQFDVIVTDNLFGDLLSDCAAMLTGSLGMLPSASLGAEKNGKRHGLFEPVHGSAPDIAGQDKANPIATILSLSMMLKYNLNKPELSNKVENAVQQILSEGYRTGDIYTDENQTLVSCSKMGDLIIERI

SEQ ID NO: 87647 - protein, 252 aa, Unknown
  Bacterial polypetide isolated from the Sargasso Sea
MLLPGDGIGPEVIAEVKKIINWFNKNKSLDFEIEEEMVGGASYEKHGTPITDEVFYKALESEAVILGAVGGPKWDDLEFSKKPERALLKLRKELKLFANLRPAICFKQLVDASSLKPDLVSDLDIMFVRELTGGIYFGEPRGIKPIDNGERKGINTHIYTSSEIERVARVAFDLARKRNNKVTSCEKSNVMEAGQLWKEEVQLLHEKEFKDVELNHMLADNCAMQLVRNPKQFDVIVTDNLFGDMLSEKRQC

SEQ ID NO: 87648 - protein, 355 aa, Unknown
  Bacterial polypetide isolated from the Sargasso Sea
MKEYKIASIAGDGIGKEVVPEALKILKEVANQHQFKLKIDEFDFSSCDYYEKHGKMLPDDWKQQIGNHDAIFFGAVGMPDKYPDHITLWGSLLQFRREFDQFINLRPVKLFEGVNAPLANKKPGDIDMMIVRENTEGEYSSVGGKMYQNTEREIVIQETIMSKHGIDRVQKFAFELAKTRDRKKLTNATKSNGISITMPYWDQRFYENKKDFPEIKTDQFHIDILAARFVLTPEWFDVVVASNLFGDILSDLGPACTGTIGIAPSGNINPTNKHPSLFEPVHGSAPDIAGKGIANPIGQIWSGAMMLDYLGEKEAATRIVSSIEKTLLEKQNRTKDLDGNSNTKECANKILDNIN

SEQ ID NO: 87649 - protein, 358 aa, Unknown
  Bacterial polypetide isolated from the Sargasso Sea
MSKEILILPGDGVGQEVMASASDVLDFVINEYNLDFLVTSMSVGGTAYNECGSPIPKEVLDSAKKADAILFGAVGGTEWDNLDWEDRPENALLTLRKELNLFANLRPAFLFNELSEASPLKKEVINDLDILIVRELTGGIYFGEPRGIVSNEEPNYAFNTMIYNEEEIRRIAKVAFESAQKRNKKLCSVEKANVLEVSKFWRSIVSEMSTDYPDVELSHQLADNTAMQLVLNPNQFDVIVSSNLFGDILSDIAATLTGSIGMLPSASLDSSFKGMFEPCHGSAPDIAGKNLANPLAMISSLSMALRYSLNQADISDKIDNAIKKFIQAGYRTIDIASDGDYLLTSDVAKKIIEIIKDE

SEQ ID NO: 87650 - protein, 271 aa, Unknown
  Bacterial polypetide isolated from the Sargasso Sea
PESGLLALRSGMELFANLRPVKIVPALIGASTLREEVISGVDLMVVRELTGGIYFGQPKGRVTTESGEERGFNTMTYSSSEIDRIARVGFDLAVQRSARLCSVDKANVLDVSQLWRERVDAMASDYSGVEVSHMYVDNAAMQLVRAPRQFDVLLTGNLFGDILSDEAAMLTGSIGMLPSASLGTEGPGLFEPVHGSAPDIAGQDKANPLAMVLSAAMMLRIGLKQEAAAASLEKAVDKVLAQGLRTGDLMAEDCTPVSCQAMGEALLKALE

SEQ ID NO: 87651 - protein, 257 aa, Unknown
  Bacterial polypetide isolated from the Sargasso Sea
MAISNTRKLLLLPGDGIGPEVVREVKKIIEWLNKNKSLDFKIEEELIGGASIDAHKIPITDEVFYKSLECDAVILGACGGPKWDKLEFSKKPERALLKLRKELKLFANLRPAICFEQLVDSSTLKPEIVSGLDIMIVRELTGGIYFGEPRGIQPIENNERKGINTHSYTTTEIKRIAKVAFDLAKKRKNKVTSCEKSNVMEAGVLWREEVQDLKDKEYKNVELEHMLADNCAMQLLRNPKQFDVILADNLFGDMLSD

SEQ ID NO: 87652 - protein, 191 aa, Unknown
  Bacterial polypetide isolated from the Sargasso Sea
MIKVKKRKILLLPGDGIGPEVINEVKKVIKWLNSKKSLDFEIDQDLAGGASYDKHGIPITDEVFYKALESEVVMLGAVGGPKWDNLEFSKKPERALLKLRKELKLFANLRPAICFKQLVDASTLKPEIVSGLDIMIVRELTGGIYFGEPRGIKPIDNGERKGINTHTYTSSEIIRVARVAFDLAKKRSNRV

SEQ ID NO: 87653 - protein, 368 aa, Unknown
  Bacterial polypetide isolated from the Sargasso Sea
MIKIKKRKILLLPGDGVGPEVIAEVKKIIQWFNSKKSLDFETDEDLAGGASYDKHGTPITDEVFYKALESKAVMLGAVGGPKWDNLEFSKKPERALLKLRKELKLFANLRPAICFKQLVDASTLKPEIVSDLDIMIVRELTGGIYFGEPRGIKPIDKGERKGINTHVYTSSEIIRVARVAFDLAKKRKKKVTSCEKSNVMEAGQLWKEEVQALHEKEYKDIELKHMLADNCAMQLLRNPKQFDVIVTDNLFGDMLSDEASMLTGSLGLLPSASLGAKNKDGDMRAMYEPIHGSAPDIAGKGIANPIATILSFAMALRYSLDLDQEADNLEKSVQDVLDMGLRTKDILSKGMKEVSTSQMGDAIISKLK

SEQ ID NO: 87654 - protein, 336 aa, Unknown
  Bacterial polypetide isolated from the Sargasso Sea
MSKRTITVIPGDGIGPSIIDSALKILDKAGCDFEYEFADAGLTALEKQGELLPQRTLELIEKNRITLKGPLTTPVGEGFTSINVTLRKKFGLYANVRPVLSFKGTQARYENIDIITVRENTEGMYSGHGQKVSEDGTTAEATSIVTRQGAEQIATFAYELARKENRKKVTIVHKANIMKSTSGLFLKVAREVSQRYPDIKTEEMIVDATCMKLVMNPENFDVIVTTNLFGDILSDLCAGLVGGLGMAPGANIGRDAAIFEAVHGSAPDIAGKNLANPTSVILASIQMLEYLGMADKADLIRKAVSAVIEEGDRTTRDLGGTHGTTDFTQAVLDRLS

SEQ ID NO: 87655 - protein, 264 aa, Unknown
  Bacterial polypetide isolated from the Sargasso Sea
MKKYKIVLLSGDGIGPEISEVSKKVLKKLSKNHNFDIEIIEKLFGGIAYEKYGTPAPDETLEQCKKSDAVLLACVGDIKYDSLARELRPESGLLKLRSALNLFANIRPVKIRKSLLDASTLKKEIVEHVDLIVVRELIGGIYFGKPRGHITNTKIPKAFNTMIYDSTEIERITEIAIKIANQRNKKICSVDKSNVLEVSQLWRDTVLNITSKDKNISLSNMYVDNAAMQLVRDPSQFDVILTSNLFGDILSDLAAMLTGSIGML

SEQ ID NO: 87656 - protein, 256 aa, Unknown
  Bacterial polypetide isolated from the Sargasso Sea
MIKIKKRKVLLLPGDGIGPEVTREVRKIIEWFNKNKSLDFEIDEDLAGGASYDKHGTPITDEVFYKALESEVVILGAVGGPKWDNLEFSKKPERALLKLRKELKLFANLRPAICFKQLVDASSLKPEIVSGLDIMIVRELTGGIYFGEPRGIKPIDKGERKGINTHTYTTSEIVRVAKVAFDLAKKRANKVTSCEKSNVMEAGQLWKEEVQALHDKEYKDVELNHMLADNCAMQLLRNPKQFDVIVTDNLFGDMLS

SEQ ID NO: 87657 - protein, 145 aa, Unknown
  Bacterial polypetide isolated from the Sargasso Sea
NHMLADNCAMQLVRNPKQFDVIVTDNLFGDMLSDEAAMLTGSLGLLPSASLGAKDKNGSMRSLYEPVHGSAPDIAGQGIANPIATILSFAMALRYSLDLDKEADSLEKAVQDVLDEGLRTKDIISKGMKEVSTSVMGDAIISKLQ

SEQ ID NO: 87658 - protein, 354 aa, Unknown
  Bacterial polypetide isolated from the Sargasso Sea
MKEYNIASIPGDGIGKEVVPEGLKVLKEAAEKHQFKINFTEYEFASCDYYEKHGKMLPDDWKEKLGKHDAIFFGAVGMPDKVPDHISLWGSLLQFRREFDQYINLRPVKLFPGINPPLANKKPGDIDMLIVRENTEGEYSSVGGRMFKNTDREIAVQETIMSAHGVDRVQKFAFELAKQRKRKKLTNATKSNGISITMPFWDERFNAMKENYPDIETDQYHIDILVARFVLNPEWFDVVVASNLFGDILSDLGPACTGTIGIAPSGNINPENKFPSLFEPVHGSAPDIAGKGIANPVGQIWSGAMMLDYLGEKEASNSIVEAIEKSLSEKENRTKDLGGEADTLICSNSILANL

SEQ ID NO: 87659 - protein, 316 aa, Unknown
  Bacterial polypetide isolated from the Sargasso Sea
MILKIAVLSGDGIGPEVTKQSIKVLKSLGKKFNHKIKLESGLVGAVAIDKYNDPYPDETHQVCLNSDAILFGAIGDPKYDNDPKAKVRPEQGLLKMRKKLGLYANLRPTKVFESLLEMSPIKEERISGTDILFVRELTGGIYFGERGRKDNDNFAFDTCEYNRDEIVRIAKIGFEYAQKRSNKLCCVDKANVLETSRLWRETVQSMEKNYPNIQVSYEFVDAVAMRLVQWPNSYDVLITSNLFGDILTDEASVISGSMGLMPSASVGSENALYEPIHGSYPEAAGKNIANPIASILSLSMMLDHSFGLKIESQIIN

SEQ ID NO: 87660 - protein, 354 aa, Unknown
  Bacterial polypetide isolated from the Sargasso Sea
MKTYNIASIAGDGIGTEVVPEAHKVLKKISEQHQFKLVIDEFDFASCDYYEKYGKMMPDNWKEKIEKHDAIFFGAVGMPDRYPDHITLWGSLLKFRREFDQYINLRPVKLFPGVKSPLADKKPGDIDMVIIRENTEGEYSSVGGRMFEGTDREMALQETIMSKHGIDRVQKFAFELAKSRKRKKLTSATKSNGISITMPYWDERFNKNKKNYLDIETDQFHIDILVARFVLNPEWFDVVVASNLFGDILSDLGPACTGTIGIAPSGNINPEKKFPSLFEPVHGSAPDIAGKGIANPIGQIWSGALMLDYLGEKEAANSIMTSIEKTLFDKKNRTKDLNGESNTIQCAQAVIDNL

SEQ ID NO: 87661 - protein, 356 aa, Unknown
  Bacterial polypetide isolated from the Sargasso Sea
MTKNKYNIAVIPGDGIGTEVMPEALKVLEVISNKYGINLHFDHFDFSSYEYFSKHGQMMPDDWKTQIGSHDALFFGAVGWPDKIPDHISLWGSLLKFRRDFDQYINLRPVKLMPGVPSPLANRNPGDINFYIIRENTEGEYSSIGGKMFPDTDREIVMQETIMSRVGVDRVLKFAFELAQSSDKKHLTSATKSNGISITMPYWDERVEEMAKKYTDVKWDKYHIDILCAHFVLNPDKFNVVVASNLFGDILSDLGPACTGTIGIAPSGNINPEKKFPSLFEPVHGSAPDIAGKGIANPIGQIWAGAMMLEHLGHKQASDNIVSAIEEVLEKEDYRTGDLGGKANTHSCGSAVADAV

SEQ ID NO: 87662 - protein, 211 aa, Unknown
  Bacterial polypetide isolated from the Sargasso Sea
MTTKKILITPGDGIGPEVTEQAVQILENVAPLFDIQLDLTEKPVGGIAYDLTGTPLPDETLDAAKISDAVLLGAVGGPKWEPLDFSVRPERGLLKLRSELGLFANLRPAAIYGDLVNASTLKAEVVDGADLMVVRELTGGIYFGNPRGVEERDGERVGFNTLVYSESEIRRIAKVGFETAMKRRKKLTSVDKANVLESTEFWREIVTDVGI

SEQ ID NO: 87663 - protein, 364 aa, Unknown
  Bacterial polypetide isolated from the Sargasso Sea
MIKVKKRKILLLPGDGIGPEVVGEVKKIIKWFNNKKSLDFEIDEDLAGGCSYDKHGTPITDEVFYKALESEVVMLGAVGGPKWDNIEFSKKPERALLKLRKELKLFANLRPAICFEQLVGASTLKPEVVSGLDIMIVRELTGGIYFGEPRGIKPIENGERKGINTHTYTTSEITRVARVAFDLARKRSNKVTSCEKSNVMEAGQLWKEEVQELHEKEYKDVELSHMLADNCAMQLLRNPKQFDVIVTDNLFGDMLSDQASMLTGSLGLLPSASLGAKNKDGEMRAMYEPIHGSAPDIEGKGLANPIATVLSFAMALRYSLNLDNEADALENAVQAVLNDDLRTKDILSEGMKKVSTSQMGDAIT

SEQ ID NO: 87664 - protein, 320 aa, Unknown
  Bacterial polypetide isolated from the Sargasso Sea
GASIDANKIPITDEVFFKSLESDAVILGACGGPKWDKLEFSKKPERALLKLRKELKLFANLRPAICFKQLVDSSTLKPEIVSGLDIMIVRELTGGIYFGEPRGIEPMENNQRKGVNTHSYTTNEIHRIAKVAFDLAKKRKNKVTSCEKSNVMEAGVLWREEVQIIRDKDYKSVELDHMLADNCAMQLLRNPKQFDVILADNLFGDMLSDEAAMLTGSLGLLPSASLGAKDKNGKIRSLYEPVHGSAPDIAGKNLANPIATILSLSMALRYSLNLDKEANQLEEAVQKVLDDGLRTKDIISKGKKEVSTTDMGDAIISKLK

SEQ ID NO: 87665 - protein, 188 aa, Unknown
  Bacterial polypetide isolated from the Sargasso Sea
RITKFAIDIALKRNKHITSVDKANVLECSQLWRQTVDRTMQGHSNIDLQHMYVDNAAMQIIKNPKQFDVILTPNLFGDILSDAASMLTGSIGLLPSASLSETIGMFEPIHGSAPDIAGKGVVNPIAMILSLAMMFEYTFDRQDLARIIKKSVDDVLESGYFTKDLSQNDYITTNEMGDKILESIKKIC

SEQ ID NO: 87666 - protein, 368 aa, Unknown
  Bacterial polypetide isolated from the Sargasso Sea
MIKVKKRKILLLPGDGIGPEVIAEVRKIINWFNDKKSLDFEIDEDLAGGCSYDKHGNPITDEVFYKALESAVVMLGAVGGPKWDNVEFSKKPERALLKLRKELKLFANLRPAICFKQLVDASTLKPEIVSGLDIMIVRELTGGIYFGEPRGIKPIENGERKGINTHTYTSNEIIRVARVAFDLAKKRSNKVTSCEKSNVMEAGQLWKEEVQSLHEKEYKDVELSHMLADNCAMQLLRNPKQFDVIVTDNLFGDMLSDQASMLTGSLGLLPSASLGAKNKAGEMRAMYEPIHGSAPDIAGKGIANPIATILSFAMALRYSLDLDKEAEALEKAVQIVLNEGLRTKDILSKGTREVSTSEMGDAIISKLQ

SEQ ID NO: 87667 - protein, 362 aa, Unknown
  Bacterial polypetide isolated from the Sargasso Sea
MTKKILILPGDGVGPEIVAQAEKVLLFLIEQGKLSVKLEHGLIGGCAIDETGSPLPDETLKKARHSAAILMGSVGGPKWDNVDRAIRPERGLLAIRSELALFANLRPAYLFPQLVEASTLKKDVVSGLDIMIVRELTGGIYFGMPRGIRELDDGQREGFNTLVYSENEIKRIARVAFETANKRRGRLCSVDKANVLEATELWREIVNDMAKEYEAVELQHMYIDNASMQLVKEPKQFDVILTTNMFGDILSDLASMLTGSIGMLPSASLAENGTGMYEPVHGSAPDIAGKNIANPLATILSLSMLLRFSLGEEKLAKKLEQAIDLVLTDGFRTKDIYSKGMKSIGTNEIGDEVIKALTSLLV

SEQ ID NO: 87668 - protein, 92 aa, Unknown
  Bacterial polypetide isolated from the Sargasso Sea
MIKVKKRKILLLPGDGIGPEVIEEVKKIINWLNKNKSLDFEIDEDLAGGCSYDKHGTPITDEVFYKALESEAVMLGAVGGPKWDNLDFSKKP

SEQ ID NO: 87669 - protein, 177 aa, Unknown
  Bacterial polypetide isolated from the Sargasso Sea
MIKIKKRKFLLLPGDGIGPEVVAEVKKIIVWFNKNKSLDFEIDEDLAGGVSYDKHGTPITDEVFYKALESEAVILGAVGGPKWDNVEFSKKPERALLKLRKELKLFANLRPAICFEQLVEASTLKPEIVSGLDIMIVRELTGGIYFGEPRGIKPIDNGERKGINTHTYTSSEIQRVQ

SEQ ID NO: 87670 - protein, 368 aa, Unknown
  Bacterial polypetide isolated from the Sargasso Sea
MAISNTRKLLLLPGDGIGPEVVREVKKIIEWLNKNKSLDFKIEEELIGGASIDAHKIPITDEVFYKSLECDAVILGACGGPKWDKLEFSKKPERALLKLRKELKLFANLRPAICFEQLVDSSTLKPEIVSGLDIMIVRELTGGIYFGEPRGIEPIKNNERKGINTHTYTTTEIKRIAKVAFDLAKKRKNKVTSCEKSNVMEAGVLWREEVQDLKDKEYKTVELEHMLADNCAMQLLRNPKQFDVILADNLFGDMLSDEAAMLTGSLGLLPSASLGSKDKNGKLRSLYEPVHGSAPDIAGKNVANPIATILSLSMALRYSLDLDKEADLLDQAVQKVLNDGLRTKDIVSKGNKEVTTSQMGDAIISKLN

SEQ ID NO: 87671 - protein, 125 aa, Unknown
  Bacterial polypetide isolated from the Sargasso Sea
VIVTDNLFGDMLSDEAAMLTGSLGLLPSASLGAKDKNGNMRSLYEPVHGSAPDIAGKGIANPIATILSFAMALRYSLNLDSEADTLEKAVQDVLDEGLRTKDILSKGMKEVSTSAMGDAIISKLQ

SEQ ID NO: 87672 - protein, 303 aa, Unknown
  Bacterial polypetide isolated from the Sargasso Sea
MIKVKKRKFLLLPGDGIGPEVVGEVKKIIHWFNKNKSLDFEIDEDLAGGVSYDKHGTPITDEVFYKALECEAVILGAVGGPKWDDVEFSKKPERALLKLRKELKLFANLRPAICFKQLVDASTLKPEIVSGLDIMIVRELTGGIYFGEPRGIKPIDNGERKGINTHTYTTSEIQRVAKVAFDLAKKRKNKVTSCEKSNVMEAGLLWKEEVQQLHDKEYKDVELNHMLADNCAMQLLRNPKQFDVIVTDNLFGDMLSDQASMLTGSLGLLPSASLGAKNKEGKVRAMYEPIHGSAPDIAGQRCC

SEQ ID NO: 87673 - protein, 368 aa, Unknown
  Bacterial polypetide isolated from the Sargasso Sea
MIKVKKRKFLLLPGDGIGPEVINEVKKIINWFNNKKSLDFEMEEDLAGGISYDKHGTPITDEVFYKALECEAVILGAVGGPKWDNVEFSKKPERALLKLRKELKLFANLRPAICFKQLVDASTLKPEVVSGLDIMIVRELTGGIYFGEPRGIKPIDNGERKGINTHTYTSSEIRRVAKVAFDLAKKRQNKVTSCEKSNVMEAGLLWREEVQELHDKEYKDVNLNHMLADNCSMQLLRNPKQFDVIVTDNLFGDMLSDQASMLTGSLGLLPSASLGAKNKDGKLRAMYEPIHGSAPDIAGKGIANPIASILSFAMALKYSLNLDNEANALEKAVQDVLDDGLRTKDIISKGTKEVSTSQMGDAIISKLQ

SEQ ID NO: 87674 - protein, 248 aa, Unknown
  Bacterial polypetide isolated from the Sargasso Sea
LASASPIKEEIINDLDILIVRELTGGIYFGEPRGIDTFSNPPHAFNTMIYDEKEIERIGRVAFESAQKRNKKLCSVEKANVLEVSKFWREIITNLSKEYPDVELTHQLADNTAMQLVLDPNQFDVIVSSNLFGDILSDIAATLTGSIGMLPSASLNSSSQGMYEPCHGSAPDIAGKNLANPLAMILSLAMAFRYSLENHEVANIIEESVKEFISRGFRTQDLTEDTSFLKTGEVASELIPIIKEKSDV

SEQ ID NO: 87675 - protein, 358 aa, Unknown
  Bacterial polypetide isolated from the Sargasso Sea
MSKSILILPGDGIGQEVTASMVEVLNFLIGKYNLDFNVTTMSVGGTAYNEYGTPLPIKVLKEAKESDAILFGAVGGTEWDHLDWDDRPENALLSLRKELNLFANLRPAFLFNELSEASPLKKEIINDLDILIVRELTGGIYFGEPRGIVSNESPKYAFNTMIYNEDEIRRIAKVAFESAQKRNGRLCSVEKANVLEVSKFWRSILTEVSKDYPDVELSHQLADNAAMQLVLDPNQFDVIVASNLFGDILSDIAAILTGSIGMLPSASLDSSFKGMYEPCHGSAPDISGQNVANPIAMIASLSMAFKFSLGEERVSDKIDMAISNFIKLGYRTKDIAIDENYLKTSEVANKLITIIENE

SEQ ID NO: 87676 - protein, 369 aa, Unknown
  Bacterial polypetide isolated from the Sargasso Sea
MIKIKKRKILLLPGDGIGPEVVSEVKKIINWFNSKRSLDFETDEDLVGGAAYDKHGTPITDEVFYKALESEAVILGAVGGPKWDNLDFSKKPERALLKLRKELKLFANLRPAICFKQLVEASSLKPEIVSGLDIMIVRELTGGIYFGEPRGIKPIDNGERKGINTHSYTSSEIARVARVAFDLAKKRNNKVTSCEKSNVMEAGQLWKEEVTETHKNEFKEVKLEHMLADNCAMQLLRNPKQFDVIVTDNLFGDILSDEAAMLTGSLGLLPSASLGAKDKNGNIRSMYEPVHGSAPDIAGKNLANPIATILSFSMALKYSLNLEKEAKEIDTAVQSVLDMGLRTKDIYSKGNKEVSTTAMGDAIIAQLQK

SEQ ID NO: 87677 - protein, 242 aa, Unknown
  Bacterial polypetide isolated from the Sargasso Sea
MIKVKKRKILLLPGDGIGPEVIREVKKIIIWLNENRSLDFEIDEDLVGGAAYDKHGTPITDEVFFKALESEAVILGAVGGPKWDNLDFSKKPERALLKLRKELKLFANLRPAICFKQLVDASSLKPDVVSGLDIMIVRELTGGIYFGEPRGIMPINNGERKGVNTHTYTTKEIERVGRVAFDLAKKRNKKVTSCEKSNVMEAGQLWREEIQSLHDKDFKDIELDHMLADNCAMQLLRNPKQF

SEQ ID NO: 87678 - protein, 351 aa, Unknown
  Bacterial polypetide isolated from the Sargasso Sea
MIKVKKRKILLLPGDGIGPEVVSEVKKIINWFNSKRSLDFETDEDLVGGAAYDKHGTPITDEVFYKALESEAVILGAVGGPKWDNLDFSKKPERALLKLRKELKLFANLRPAICFKQLVEASSLKPEIVSGLDIMIVRELTGGIYFGEPRGIKPIDNGERKGVNTHTYTSSEIARVARVAFDLAKKRNNKVTSCEKSNVMEAGQLWKEEVAEIHKNEFKEVKLEHMLADNCAMQLLRNPKQFDVIVTDNLFGDILSDEAAMLTGSLGLLPSASLGAKDKNGKMRSMYEPVHGSAPDIAGKNLANPIATILSFSMALRYSLNLEKEAKELDLAVQSVLDMGLRTKDIYSKGN

SEQ ID NO: 87679 - protein, 108 aa, Unknown
  Bacterial polypetide isolated from the Sargasso Sea
MLTGSLGLLPSASLGAKNKDGEMRAMYEPIHGSAPDIAGKGIANPIASILSFAMALRYSLDLDNEADSLEKAVQAVLNEGLRTKDILSEGMKETSTSAMGDAIISKLQ

SEQ ID NO: 87680 - protein, 143 aa, Unknown
  Bacterial polypetide isolated from the Sargasso Sea
MLADNCAMQLLRNPKQFDVIVTDNLFGDMLSDQASMLTGSLGLLPSASLGAKNKDGKIRAMYEPIHGSAPDIAGKGIANPIATILSFAMALKYSLDLDKEADALEKAVQTVLDEKLRTKDILSPGMKEVSTSEMGDAIISKLQ

SEQ ID NO: 87681 - protein, 336 aa, Unknown
  Bacterial polypetide isolated from the Sargasso Sea
MSKRTITVIPGDGIGPSIIDSALKILDKAGCDFEYEFADAGLTALEKQGELLPQRTLELIEKNRITLKGPLTTPVGEGFTSINVTLRKKFGLYANVRPVLSFKGTQARYENIDIITVRENTEGMYSGHGQKVSEDGSTAEATSIVTRQGAEQIATFAYELARKENRKKVTIVHKANIMKSTSGLFLKVAREVSQRYPDIKTEEMIVDATCMKLVMNPENFDVIVTTNLFGDILSDLCAGLVGGLGMAPGANIGRDAAIFEAVHGSAPDIAGKNLANPTSVILASIQMLEYLGMADKADMIRKAVSAVIEEGDRTTRDLGGTHGTTDFTQAVLDRLS

SEQ ID NO: 87682 - protein, 369 aa, Unknown
  Bacterial polypetide isolated from the Sargasso Sea
MIKVKKRKILLLPGDGIGPEVVSEVKKIINWFNSKRSLDFETDEDLVGGAAYDKHGTPITDEVFYKALESEAVILGAVGGPKWDNLDFSKKPERALLKLRKELKLFANLRPAICFSQLVEASSLKPEIVSGLDIMIVRELTGGIYFGEPRGIKPIDNGERKGVNTHTYTSSEIARVARVAFDLAKKRNNKVTSCEKSNVMEAGQLWKEEVAEIHKNEFKEVKLEHMLADNCAMQLLRNPKQFDVIVTDNLFGDILSDEAAMLTGSLGLLPSASLGAKDKNGKMRSMYEPVHGSAPDIAGKNLANPIATILSFSMALRYSLNLEKEAKELDLAVQSVLDMGLRTKDIYSKGNKEVSTSEMGDAIIAQLQK

SEQ ID NO: 87683 - protein, 192 aa, Unknown
  Bacterial polypetide isolated from the Sargasso Sea
MIKVKKRKILLLPGDGIGPEVINEVKKIINWFNDKKSLDFEMDEDLAGGCSYDKHGTPITDEVFYKALESAVVMLGAVGGPKWDNVEFSKKPERALLKLRKELKLFANLRPAICFKQLVDASTLKPEIVSGLDIMIVRELTGGIYFGEPRGIKPIENGERKGINTHTYTSSEIIRVAKIAFDLAKKRSNKVT

SEQ ID NO: 87684 - protein, 109 aa, Unknown
  Bacterial polypetide isolated from the Sargasso Sea
MKAEITVLAGDGIGPEITEHALNILNAIEKKYGHEFTLHDALFGGIAIDETGDPYPLETRELCKKSDAVLLGAVGGPKWSDPKAKTRPEKGLLDMRSDLGVYANLRQIK

SEQ ID NO: 87685 - protein, 361 aa, Unknown
  Bacterial polypetide isolated from the Sargasso Sea
MTDRTYKIAVIPGDGIGREVMPEGLRALEAVTARFGVRFDFVQIDWASCDYYAQHGKMMPDDWKAQLSGMDAILFGAVGWPATVPDHISLWGSLLKFRREFDQYINLRPARLFDGVPSPLAGRRAGDIDFMIVRENTEGEYSSVGGTMFEGTEREIVMQQSIFTRHGTERVLKFAFDLAQRRAKRLTVATKSNGIAISMPWWDARTAEMAERYPDIAVDKQHIDILCARFVLQPDRFDVVVASNLFGDILSDLGPACTGTIGIAPSANLNPDRKFPSLFEPVHGSAPDIAGQYIANPVAMIWSAALMLDFLGNGAGREREAHDAIVAAIEDVLRTGPHSRDLGGNAGTQEVGEAIAARIAG

SEQ ID NO: 87686 - protein, 361 aa, Unknown
  Bacterial polypetide isolated from the Sargasso Sea
MNKKILILPGDGIGPEVTSSAMEILRFVKDLYSLDLDIETHDVGGAAYDKTGYPLPDKTLEIARKSDAILFGAVGGPEWEDLDWDKRPEQALLGLRKELGLFANLRPAFLFNELASASPIKEEIINDLDILIVRELTGGIYFGEPRGIDTSSNPPHAFNTMIYDEKEIERIGRVAFESAQKRNKKLCSVEKANVLEVSKFWREIITNLSKEYPDVELTHQLADNTAMQLVLDPNQFDVIVSSNLFGDILSDIAATLTGSIGMLPSASLNSSSQGMYEPCHGSAPDIAGKNLANPLAMILSLAMAFRYSLGNSEAASIIEKSVKEFISRGFRTKDLTDDSSFLETDEVASELISIIKEKSNV

SEQ ID NO: 87687 - protein, 133 aa, Unknown
  Bacterial polypetide isolated from the Sargasso Sea
MQIIRDPKQFDTMVTTNMFGDIISDAAAMMTGSLGMLPSASIGGGIGMYEPVHGSAPDITNEDKANPLAMILSVGMMMRYSFNLTDADEMIKKAVIDTLEKYRTIDIMAEGKIQIGCREMGERVLQSLKENNS

SEQ ID NO: 87688 - protein, 370 aa, Unknown
  Bacterial polypetide isolated from the Sargasso Sea
MASNRKLLVLPGDGIGPEVVGQVLRVVDWLGAKRSLSFDLQEGLVGGAAYDAHGTPLTDETLADAVSADAVLFGSVGGPKYDDVPFELKPERGLLRLRKEMDLFANLRPAMVFDAMVDSSTLKKEVIAGLDILILRELTGGIYFAEPRGIEELPNGEKKGYDTNLYTTSEIERIGRVAIDLARKRRGKVTSVEKANVMMSGILWREVMDNLFKGEAQGIETEHMYADNCGMQLVRNPKQFDVIVTDNLFGDMLSDCAAMLTGSLGMLPSASLGAVDEITKKRFALYEPVHGSAPDIAGKKMANPIAELLSFSMSLRYSFDMQEDADLIDNAIQSVLASGIRTPDIMQDGMTLVSTDAMMDNILKALDQSV

SEQ ID NO: 87689 - protein, 370 aa, Unknown
  Bacterial polypetide isolated from the Sargasso Sea
MSNKKILVLPGDGIGNEVMAEVLNIIDWLSKTRSMSFDISERLVGGTAYDKEGDSISDSTMQEALNSDAVLFGAVGGPKWDSVERHKRPEAALLRLRKELDLFANLRPAVVLDALAESSSLKLDLVKGLDILIVRELTSGVYFGQPRGISKISDTESKAIDTQVYTTSEIERVSRVAFELAKLRRNKVSSAEKSNVMETGIFWRNIVTNLHRNEYASVDLEHILADNCAMQLVRYPKQFDVILTDNLFGDLLSDTAAMLTGSLGMLPSASLGPVKENGTRAAMYEPVHGSAPDIAGQSKANPLAMIMSFGMMLKYSFDMEEDSKLIEKAVQNVLLKGLRTADIKDGADKIISTKEMGVAVIEELKVLSGN

SEQ ID NO: 87690 - protein, 265 aa, Unknown
  Bacterial polypetide isolated from the Sargasso Sea
SYEQHGSPLTDEVINKAKESDAILFGAVGGPQWDNLPWNKRPEQALLGLRKELELFANLRPAFLFKELAAASTLKTEVIADLDLLIVRELTGGVYFGEPRGIEKDVVNNQGYAYNTMIYYENEIKRIAKIGFEAAQKRNKKLCSVDKANVLEVSKFWREIVEEVSNDYPDVKLTHQLADNAAMQLVINPKQFDVIVSSNLFGDILSDIAATLSGSIGMLPSASLNSSSQGMYEPCHGSAPDIAHLNVANPIAMILSLSMAFKYSL

SEQ ID NO: 87691 - protein, 373 aa, Unknown
  Bacterial polypetide isolated from the Sargasso Sea
MEARVCVLAGDGVGEEVTQESMKVLEAICRKFDHNFEFIHALVGGAAIDKFNNPLPPESMNLALGSDAILFGAVGGPKWDNPSADVRPEDAILALRKRLGLYANMRPVKVYPELLHSSPLKPEFLEGVDFVIVRELTGGLYFGRPKRRSASTRGRRAVDTLAYSEKEIARVVRVAFELAKSRRQRLHSLDKMNVLETGRLWREIANEVSRDYPEVELIHMLADNAAMKIITNPSEFDVIVAENSIGDILSDEASVITGSMGMLPSASLASSPPPPGKRRGRRGRPALYEPIHGSAPDIAGHNVANPVASFLSAALMLRWSFGLHEEADEIESAINKIISEGYRTVDIAGEQDHKLSTSQMGDLVAGIISSGPK

SEQ ID NO: 87692 - protein, 360 aa, Unknown
  Bacterial polypetide isolated from the Sargasso Sea
MAKKILILPGDGIGQEVTSSMSEVLHYLIDEQSLDFQISERKVGGSSYDEFGTPLTEETLKIAQNSDAILFGAVGGPQWDNLEWDVRPEQALLRLRKSLGLFANLRPAFLFNELASASPLKNHIIENLDILIVRELTGGIYFGEPRGIVENETPKYGFNTMIYNEGEIRRIAKVAFEAAMNRDKKLCSVEKANVLEVSKFWRSIVSEMSSDYPEVELSHQLADNTAMQLVLNPNQYDVIVSGNLFGDMLSDIAATLSGSIGMLPSASLNSSSQGMYEPCHGSAPDIAGQGIANPIAMIASLAMAFEYSLERVDLARRIESAIKIFISKGLRTKDISTSKEFIQTKEVAPSIINIFKDEHE

SEQ ID NO: 87693 - protein, 364 aa, Unknown
  Bacterial polypetide isolated from the Sargasso Sea
MSYQIAVLAGDGIGPEVMAEARKVLKAVEARFGLNIEYTEYDVGGIAIDNHGCPLPEATLKGCEAADAILFGSVGGPKWEKLPPNEQPERGALLPLRGHFELFCNLRPAKLHDGLEHMSPLRSDISARGFDVLCVRELTGGIYFGKPKGRQGEGESEEAFDTMRYSRREISRIARIAFEAARGRRKKVTSVDKANVLACSVLWRQVVEEVAVDFPDVELEHIYIDNATMQLLRRPDEFDVMLCSNLFGDILSDEIAMLTGSMGLLSSASMNSTGFGLFEPAGGSAPDIAGKGIANPIAQILSAALMLRHSLKQEEAASAIERAVTKALNSGYLTGELLSSDQRHKAKSTVEMGNFIADAVKAGV

SEQ ID NO: 87694 - protein, 256 aa, Unknown; identical to SEQ ID NO: 87274
  Bacterial polypetide isolated from the Sargasso Sea

SEQ ID NO: 87695 - protein, 369 aa, Unknown
  Bacterial polypetide isolated from the Sargasso Sea
MSKLYKLLILSGDGIGPEVMDEVIKVAKCVEEKSNVVFEIQKDDIGGAAYDRYGVPLSDETLAKAKDSHAVLLGAVGGEKWDNLDFSLRPEQGLLSIRKEMDLFANLRPALCFESMVDASSLKSELVSGLDILIVRELTGGIYFGEPRGIEEKSDGTRIGINTQSYTTEEIRRVARIAFELASKRDNRVTSCEKSNVMESGILWREEVSYIHKNEYPNVELSHMYADNCAMQLVRNPKQFDVIVTDNLFGDILSDEAAMLTGSLGMLPSASLGAFDSNNSRKSLYEPVHGSAPDIAGKGIANPIASILSFAMCLKYSFNMDKESDLISQSVNKVLSDGYKTADLIGDANKNLSTVEMGDKIINQLKQNF

SEQ ID NO: 87696 - protein, 369 aa, Unknown
  Bacterial polypetide isolated from the Sargasso Sea
MIKVKKRKILLLPGDGIGPEVIAEVRKIIEWLNHNRSLDFEIDEDLVGGAAYDKHGTPITDEVFYKALESQAVVLGAVGGPKWDNLEFSKKPERALLKLRKELKLFANLRPAICFKQLVDASSLKPEIVSGLDIMIVRELTGGIYFGEPRGIKPINNGERKGINTHTYTSKEIERVGRIAFELAKKRNNKVTSCEKSNVMEAGQLWKEEIQTLHDKDFKDVQLEHMLADNCAMQLLRYPKQFDVIVTDNLFGDILSDEAAMLTGSLGLLPSASLGAKDKDGNMRSMYEPVHGSAPDIAGKGLANPIATILSFAMALKYSLNLDKEAKEIENAVQKVLNDGLRTKDILSKGNKEVSTKVMGDAVIAYLQK

SEQ ID NO: 87697 - protein, 197 aa, Unknown
  Bacterial polypetide isolated from the Sargasso Sea
ETIMSAHGIDRVQKFAFELAKQRTRKKLTNATKSNGISITMPFWDERFNQMKKNYPEIETDQFHIDILVARFVLNPEWFDVVVASNLFGDILSDLGPACTGTIGIAPSGNINPENKFPSLFEPVHGSAPDIAGKGIANPVGQIWSGAMMLDYLGEKEASNSIVEAIEKSLSEKENRTKDLGGDADTIKSSNSILANL

SEQ ID NO: 87698 - protein, 357 aa, Unknown
  Bacterial polypetide isolated from the Sargasso Sea
MKEYSIASIAGDGIGKEVVPEAQKILKEISQQHQFKLNIEDYDFASCDYYEKHGKMMPDDWQDKLIKHDAIFFGAVGMPDKYPDHITLWGSLLKFRREFDQFINLRPVKLFEGVNAPLANKKPGDIDMIIVRENTEGEYSSVGGRMYQGTDREVVIQETVMSKYGIDRVQQFAFELAKKRRRKKLTSATKSNGISITMPYWDERFNENKKNFSDVETDQYHIDILAARFVLSPERFDVIVASNLFGDILSDLGPACTGTIGIAPSGNINPTNKYPSLFEPVHGSAPDIAGQGIANPVGQIWSAAMMLDYLGEKEASDRIVKSIELTLKDKDSRTKDLQGSSNTEQCSKKILDNLSSV

SEQ ID NO: 87699 - protein, 233 aa, Unknown
  Bacterial polypetide isolated from the Sargasso Sea
MKKYKIVLLSGDGIGPEISEVSKKVLKKLSKNHNFDIEIIEELFGGIAYEKYGSPAPDKTLDQCKKSDAVLLACVGDIKYDSLARELRPESGLLKLRSALNLFANIRPVKIRKSLLDASTLKKEIVEHVDLIVVRELIGGIYFGKPRGHITNTKIPKAFNTMVYDSAEIERITEIAIKIANQRNKKICSVDKSNVLEVSQLWRDTVLNITSKDKNISLSNMYVDNAAMQLVRD

SEQ ID NO: 87700 - protein, 206 aa, Unknown
  Bacterial polypetide isolated from the Sargasso Sea
NTHTYTSSEIERVARVAFDLAKKRKNKVTSCEKSNVMEAGQLWKEEVQSLHDKEFKEIELDHMLADNCAMQLLRNPKQFDVIVTDNLFGDILSDEAAMLTGSLGLLPSASLGAKDKDGNLRSMYEPVHGSAPDIEGKGIANPIASILSFSMALRYSLNLDKEADELDKSVQSVLDKGLRTRDILSKGKKEVSTKEMGDAIIAYLQK

SEQ ID NO: 87701 - protein, 370 aa, Unknown
  Bacterial polypetide isolated from the Sargasso Sea
MSNKKILILPGDGIGNEVMAEVLKIIDWMEKTKSLSFDISERLVGGTAYDKEGNSISDETMQVAMDCDAVLFGAVGGAKWDNVERDKRPEAALLRLRKDLDLFANLRPAVVLDALSDSSSLKSDLVKGLDILIIRELTSGVYFGQPRGISKISETESKAVDTQLYTTSEVNRVSRVAFDLAKLRNNKVTSVEKSNVMETGLFWKQTVTDLHKKEYSDVNLEHMLADNCAMQLVRYPKQFDVILTDNLFGDLLSDTAAMLTGSLGMLPSAALGPVKENGTRAAMYEPVHGSAPDIAGQSKANPLAMIMSFAMMLKYSFDMQEDSQMVEKAVQNVLLKGLRTADIKDGAEKIISTQEMGNAVIEELKILSGN

SEQ ID NO: 87702 - protein, 357 aa, Unknown
  Bacterial polypetide isolated from the Sargasso Sea
MSSNRKLMVMPGDGIGPEVMNETLRLLDWLAKYKNINFDTIERDVGGKSCDLHGTPLTDEALSDALECDAVLFGAVGGPKYDDLDFELKPERGLLTLRKELDLFANLRPAIVFPPLVEASTLKPEVVEGLDIMILRELTGGVYFAEPRGIDIMPDGSKKGYDTNLYTTSEIERIGRVAFDLAKKRNNKVTSVEKANVMLSGVLWREVITELHKKEGNNIKLEHMFADNCAMQLVRAPKQFDVIVCDNLFGDMLSDCAAMLTGSLGMLPSASLGAPNKDGIRKAMYEPVHGSAPDITGKGVANPLAQVLSFTMMLRYSFDYNQEADLIENAVSEALSSGARTPDLGGGSKKCFHNTEM

SEQ ID NO: 87703 - protein, 225 aa, Unknown
  Bacterial polypetide isolated from the Sargasso Sea
LDMLIVRELTGGIYFGEPREKKSSSAFNTMIYERHEVERIARVAFDSASLRNKKVCSVDKSNVLEVSEFWREVVIDVSKDYPDIELSHMLVDNAAMQLVKNPKQFDVILSGNLFGDILSDISAMLTGSIGMLPSASLDNRNKGLYEPVHGSAPDIAGQGTVNPIAMILSVGMMFRYSLNQLEISENIKSAVSNTLNDGYATKDIADKNSKICSTRELTKIIIDHV

SEQ ID NO: 87704 - protein, 332 aa, Unknown
  Bacterial polypetide isolated from the Sargasso Sea
SLDFEIEEGLAGGASYDEYGTPITDEVFYKALESEAVILGAVGGPKWDNLEFSKKPERALLKLRKELKLFANLRPAICFKQLVNASTLKPEIVSGLDIMIVRELTGGIYFGEPRGIKPINNGERKGINTHTYTSNEIIRVARVAFDLAKKRSNKVTSCEKSNVMEAGQLWKEEVQSLHEKEYKDVELNHMLADNCAMQLLRNPKQFDVIVTDNLFGDMLSDQASMLTGSLGLLPSASLGAKDKNGKMRAMYEPIHGSAPDIAGKGIANPIATILSFSMALRYSLNLDKEADVLENAVQEVLNDGLRTKDIVSKGTKEVSTTKMGDAIISKLK

SEQ ID NO: 87705 - protein, 312 aa, Unknown
  Bacterial polypetide isolated from the Sargasso Sea
KILDKVGCDFAYDYADAGLVALEEHGELLPQETLDLIAKNKVALKGPLTTPVGEGFTSINVSLRKQFKLYANLRPVMSFKGTKARYEDIDIITVRENTQGMYSGLGQVVSEDGNEAEAMSKITRDGAEKIVVFAYELARREGRKKVTAVHKANILKSTSGLFLKVAREVGERYPDIESAEMIVDNCCMQLVMNPHQFDVIVTTNLFGDILSDLCAGLVGGLGMAPGANIGEDCAIFEAVHGSAPDIAGKNLANPTSVILAAAQMLEYLNMGDKAEKIRAALKDVIESGDRTTRDLGGEAGTTEFTQALLDRL

SEQ ID NO: 87706 - protein, 237 aa, Unknown
  Bacterial polypetide isolated from the Sargasso Sea
MIKVKKRKFLLLPGDGIGPEVVGEVKKIIEWFNKNKSLDFEIDEDLAGGASYDKHGVPITDEVFYKALECEAIILGAVGGPKWDNLEFSKKPERALLKLRKELKLFANLRPAICFKQLVDASTLKPEIVSGLDIMIVRELTGGIYFGEPRGIKPIDNGERKGINTHTYTSSEIKRVARVAFDLAKKRKNKVTSCEKSNVMEAGLLWREEVQELHDKEFKDVQLNHMLADNCAMQLLR

SEQ ID NO: 87707 - protein, 259 aa, Unknown
  Bacterial polypetide isolated from the Sargasso Sea
MDEVIKVAKCVEENSNVAFEIQKDDIGGAAYDRYGVPLSDETLDKAKDSHAVLLGAVGGEKWDHLDFSLRPEQGLLSIRKEMDLFANLRPALCFESMVDASSLKSELVSGLDILIVRELTGGIYFGEPRGIEEKSDGTRVGINTQSYSTEEIRRVARIAFELASKRDNKVTSCEKSNVMESGILWREEVSYVHKNEYPNVELSHMYADNCAMQLVRNPKQFDVIVTDNLFGDILSDEAAMLTGSLGMLPSASLGAFDSK

SEQ ID NO: 87708 - protein, 355 aa, Unknown
  Bacterial polypetide isolated from the Sargasso Sea
MKIAVLPGDGIGPEIVNEAVKVLNALDEKFELEQAPVGGAGYEASGHPLPDATLKLAKEADAILFGAVGDWKYDSLERALRPEQAILGLRKHLELFANFRPAICYPQLVDASPLKPELVAGLDILIVRELNGDIYFGQPRGVRAAPDGLFAGEREGFDTMRYSEPEVRRIAHVAFQAARKRAKKLLSVDKANVLETSQFWRDIMIDVSKEYADVELSHMYVDNAAMQLAKAPKQFDVIVTGNMFGDILSDEASMLTGSIGMLPSASLDKNNKGLYEPSHGSAPDIAGKGIANPLATILSAAMMLRYSLNRAEQADRIERAVKTVLEQGYRTGDIATPGCRQVGTTAMGDAVVAAL

SEQ ID NO: 87709 - protein, 148 aa, Unknown
  Bacterial polypetide isolated from the Sargasso Sea
DITLENMLADNCAMQLVRNPKQFDVIVTDNLFGDLLSDCAAMLTGSLGMLPSASLGAEKNGKSHGLFEPVHGSAPDIAGQDKANPIATILSLSMMLKYNLNKPELSNKVENAVQQILSEGYRTGDIYTDENQTLVSCSKMGDLIIERI

SEQ ID NO: 87710 - protein, 191 aa, Unknown
  Bacterial polypetide isolated from the Sargasso Sea
RVAFDLARKRNNKVTSCEKSNVMEAGQLWKEEVQAIHEKEYSDVELNHMLADNCAMQLVRNPKQFDVIVTDNLFGDMLSDEAAMLTGSLGLLPSASLGAKDKNGNMRSLYEPVHGSAPDIAGQGIANPIATILSFAMALRYSLDLDKEADSLEKAVQGVLDEGLRTKDIISKGMKEVSTSVMGDAIISKLQ

SEQ ID NO: 87711 - protein, 87 aa, Unknown
  Bacterial polypetide isolated from the Sargasso Sea
MIKVKKRKFLLLPGDGIGPEVIGEVKKIINWFNKNKSLDFEIEEELVGGASFEKHGTPITDEVFYKALESEAVILGAVGGPKWDDLE

SEQ ID NO: 87712 - protein, 163 aa, Unknown
  Bacterial polypetide isolated from the Sargasso Sea
MIKVKKRKILLLAGDGIGPEVIAEVKKIINWFNKNRSLDFEIDEDLVGGAAYDKHGIPITDEVFFKALESEAVMLGAVGGPKWDNIDFSKKPERALLKLRKELKLFANLRPAICFKQLVDASSLKPEIVSGLDIMLVRELTGGIYFGEPRGIKPINNGERKGI

SEQ ID NO: 87713 - protein, 367 aa, Unknown
  Bacterial polypetide isolated from the Sargasso Sea
MATNQKKIFLLPGDGIGPEVVGETRKVIDWFNKKKSLDFKIDQDLIGGAAIDKHGVPITDEVFYKALESDAVIVGACGGPQYDKLEFSKKPERALLKLRKELKLFANLRPAICFKQLVDSSTLKPEIVSGLDILIVRELTGGIYFGEPRGVKPIENGERRGVNTHVYTTKEIKRIAKVAFELAAKRNNKVTSCEKSNVMEAGVLWREEVQSLKDKDYKKIELNHMLADNCAMQLLRNPKQFDVILADNLFGDMLSDEAAMLTGSLGLLPSASLGDKDKNGRTRSLYEPVHGSAPDIAGKNISNPIATILSFSMALKYSLGMQKESTMLDKAVEKTLEDGLRTPDIMSKGKKKVSTSEMGDAIISNLN

SEQ ID NO: 87714 - protein, 147 aa, Unknown
  Bacterial polypetide isolated from the Sargasso Sea
MIKIKKRKFLLLPGDGIGPEVVGEVKKIIFWFNKNKSLDFEIDEDLAGGISYDKHGTPITDEVFYKALESEAVILGAVGGPKWDNVEFSKKPERALLKLRKELKLFANLRPAICFEQLVEASTLKPEIVSGLDIMIVRELTGGIYFG

SEQ ID NO: 87715 - protein, 361 aa, Unknown
  Bacterial polypetide isolated from the Sargasso Sea
MNKKILILPGDGIGPEVTSSAMEILRFVKDLYSLDLDIEIHEVGGAAYDKTGYPLPDKTLEIARKSDAILFGAVGGPEWEDLDWDKRPEQALLGLRKELGLFANLRPAFLFNELASASPIKEEIINDLDILIVRELTGGIYFGEPRGIDTSSNPPHAFNTMIYDEKEIERIGRVAFESAQKRNKKLCSVEKANVLEVSKFWREIITNLSKDYPDVELTHQLADNTAMQLVLDPNQFDVIVSSNLFGDILSDIAATLTGSIGMLPSASLNSSSQGMYEPCHGSAPDIAGKNLANPLAMILSLAMAFRYSLENYEAANIIEESVKEFISRGFRTKDLTEDMSFLETDEVASELIPIIMEKSDV

SEQ ID NO: 87716 - protein, 262 aa, Unknown
  Bacterial polypetide isolated from the Sargasso Sea
MIKVKKRKILLLPGDGIGPEVINEVKKVIEWFNSKKSLDFEIDQDLAGGASYDEHGTPITDEVFYKALESEVVMLGAVGGPKWDNLEFSKKPERALLKLRKELKLFANLRPAICFKQLVEASTLKPEIVSGLDIMIVRELTGGIYFGEPRGIKPIDNGERKGINTHTYTSSEIIRVARVAFDLAKKRSNKVTSCEKSNVMEAGQLWREEVQKLHDDEYNEVELKHMLADNCSMQLLRNPKQFDVIVTDHLFGDMLSDPASML

SEQ ID NO: 87717 - protein, 307 aa, Unknown
  Bacterial polypetide isolated from the Sargasso Sea
MSSNNKKILLLPGDGIGPEVVRETKKVINWFNKKKSLDFKIDEDLIGGISIDKHKTPITDEVFYKAIESDAIIFGACGGPKYDNLEFSKKPERGLMKLRKELKLFANLRPAICFNELVESSSLKPEIVSGLDILIVRELTGGIYFGEPRGIKPIENGERKGINTHVYTTKEIKRIAKVAFELAEKRKNKVTSCEKSNVMEAGILWREEVQTLRDKEFKKIELNHMFADNCAMQLLRNPKQFDVILADNLFGDILSDEAAMLTGSLGLLPSASLGDKDKKGRVKSLYEPVHGSAPDIAGKNISNPIAT

SEQ ID NO: 87718 - protein, 145 aa, Unknown
  Bacterial polypetide isolated from the Sargasso Sea
MIKLKKKKILLLPGDGIGPEVTDEVKKIINWFNDKKSLGFETDEELVGGCSYDKHGTPITDEVFYKALESGVIMLGAVGGPKWESVEFDKKPERALLKLRKELKLFANLRPAICFKQLVDASTLKPEIISGLDIMIVRELTGGVY

SEQ ID NO: 87719 - protein, 358 aa, Unknown
  Bacterial polypetide isolated from the Sargasso Sea
MSKNILILPGDGVGQEVTASAVEVLDFLIKEYGLDFSVKSMNVGGTAFNECGSPLPKEVLNAAKESDAILFGAVGGTEWDNLDWDDRPENALLTLRKELNLFANLRPAFLFNELSEASPLKKEIINNLDILIVRELTGGIYFGEPRGIVSDKEPNYAFNTMVYNEDEIRRIAKVGFESAQKRDGKLCSVEKANVLEVSKFWRSIVTEMASEYPDVQLTHQLADNAAMQLVLDPNQFDVIVASNLFGDILSDIAATLTGSIGMLPSASLDSSFKGMYEPCHGSAPDIAGQNIANPLAMISSLSMALRYSLNQESISGKIDTAIKLFIQSGYRTKDIAVDENYLKTSEVAQKIIDIIQNG

SEQ ID NO: 87720 - protein, 368 aa, Unknown
  Bacterial polypetide isolated from the Sargasso Sea
MIKVKKRKFLLLPGDGIGPEVIGEVKKIIQWFNKNKSLDFEIDEDLAGGASYDKHGTPITDEVFYKALECEAVILGAVGGPKWDNVEFSKKPERALLKLRKELKLFANLRPAICFKQLVDASTLKPEIVSGLDIMIVRELTGGIYFGEPRGIKPIDNGQRKGINTHTYTSSEIQRVARVAFDLAKKRKNKVTSCEKSNVMEAGLLWREEVEVLHDKEFKDVQLNHMLADNCAMQLLRNPKQFDVIVTDNLFGDMLSDQASMLTGSLGLLPSASLGAKNKDGKLRAMYEPIHGSAPDIAGQGIANPIATILSFAMALRYSLNLDKEADALEKAVQNVLDEGLRTKDILSKGMKEVSTSEMGDAIISKLQ

SEQ ID NO: 87721 - protein, 368 aa, Unknown
  Bacterial polypetide isolated from the Sargasso Sea
MIKVKKRKFLLLPGDGIGPEVIGEVKKIINWFNKNKSLDFEIEEELVGGASFEKHGTPITDEVFYKALESEAVILGAVGGPKWDDLEFSKKPERALLKLRKELKLFANLRPAICFKQLVDASSLKPELVSDLDILFVRELTGGIYFGEPRGIKPIDNGERKGINTHVYTSSEIERVARVAFDLARKRSKKVTSCEKSNVMEAGQLWKEEVKALHEKEYKDIELKHMLADNCAMQLVRYPKQFDVIVTDNLFGDMLSDEAAMLTGSLGLLPSASLGAKDKNGNMRSLYEPVHGSAPDIAGNGIANPIATILSFAMALKYSLDLDKESKTLEKAVQTVLDEGLRTKDILSKGSKEVSTSEMGDAIISKLQ

SEQ ID NO: 87722 - protein, 351 aa, Unknown
  Bacterial polypetide isolated from the Sargasso Sea
MKAEITVLSGDGIGPEITEHALHILTAIEKKYGHEFILHDALFGGIAIDKTGDPYPQETRDLCKTSDAVLLGAVGGPKWSDPKAKTRPEKGLLDMRSDLGVYANLRQIKTYPQLIDNSPIENSRLKDIDILFVRELIGGIYFGEKEKSEDYAKDVCEYSATEIERIVKVAADLSKKRKNKLTSVDKANVMATSQLWRSVTTTMIENEYPDLEIEHLLVDAATMHLLSRPADFDVVVAENLFGDILTDEASMLTGSIGMIPSASLGDNNFGVYEPIHGSAPDIQGKGLANPCGMILSVAMMLKHSLNLIDEANEIENAVQTVLNQGIFTADLSSHDHVSTDEMGEAILSNIN

SEQ ID NO: 87723 - protein, 226 aa, Unknown
  Bacterial polypetide isolated from the Sargasso Sea
GIYFGEPRGIKPIENGERKGINTHTYTTSEINRVARIAFDLARKRSNKVTSCEKSNVMEAGQLWKEEVQELHEKEYKDVELSHMLADNCAMQLLRNPKQFDVIVTDNLFGDMLSDQASMLTGSLGLLPSASLGAKNKDGEMRAMYEPIHGSAPDIAGQGIANPIASILSFAMALRYSLDLDKEADVLEKAVQDVLNDGLRTKDIMSEGMKETSTSAMGDAIISKLQ

SEQ ID NO: 87724 - protein, 335 aa, Unknown
  Bacterial polypetide isolated from the Sargasso Sea
PNILRKITLIPGDGIGQEVILGTKDIIDSLNLEIEWDIISNPMDDKTKKISSELEKSLSITKVGLKGPLTTPVGEGFRSINVEIRKRFELFANFRPIKTLQGFKTNYKDLDMIIIRENTEDLYAGKELEIAKGVTQSMKIITTAASDRVAKFAFQYALENKRKKITVLHKANIMKLTDGLFLDRVRRISRRKIYRDIEYEELIIDNACMQLVMNPNKFDIILTGNLFGDIVSDLCAGLVGGLGAASGANIGSNYAVFEPVHGTAPDIAGKGIANPLATILSSIMMLNHIGMKKSAIKLNKAVLYTLSFPENRMRDMGGKLKTKDFINKIISNIKN

SEQ ID NO: 87725 - protein, 130 aa, Unknown
  Bacterial polypetide isolated from the Sargasso Sea
MTDKKKILILPGDGIGPEVCTEAKKVLVALNDKFQYDIEFEEAEVGGAAFDKYGKPLPEATLEAAQNADAILLGAVGGPAWDDLDYDLRPERALLGLRSQLDLFANLRPAILSKHLVESSSLKSEKVEDL

SEQ ID NO: 87726 - protein, 354 aa, Unknown
  Bacterial polypetide isolated from the Sargasso Sea
MKEYNIAAIPGDGIGKEVVPEGLKILKEAALKHQFKINFTEYDFASCDYYEKHGKMLPDDWKEKLSKHNAIFFGAVGMPDQVPDHISLWGSLLQFRRGFDQYINLRPVKLFPGVNPPLANKKPGDIDMMIVRENTEGEYSSVGGRMYQNTDREIAIQETIMSAHGIDRVQEFAFELAKKRKRKKLTNATKSNGISITMPFWDERFNKMKNKYPEIETDQFHIDILAARFVLNPEWFDVVVASNLFGDILSDLGPACTGTIGIAPSGNINPENKHPSLFEPVHGSAPDIAGKGVANPVGQIWSGAMMLDYLGEKEASNSIVSAIEKSLSVQKNRTKDLGGESNTIECSNSILSNL

SEQ ID NO: 87727 - protein, 214 aa, Unknown
  Bacterial polypetide isolated from the Sargasso Sea
MKNGERKGINTHTYTTSEITRVARVAFDLARKRSNKVTSCEKSNVMEAGQLWKEEVQELHNKEYKDVELSHMLADNCAMQLLRNPKQFDVIVTDNLFGDMLSDQASMLTGSLGLLPSASLGAKNKDGEMRAMYEPIHGSAPDIAGQGIANPIASILSFAMALRYSLDLDKEADVLEKAVQDVLNDGLRTKDIMSDGMKESSTSAMGDAIISKLQ

SEQ ID NO: 87728 - protein, 158 aa, Unknown
  Bacterial polypetide isolated from the Sargasso Sea
MIKVKKRKILLLPGDGIGPEVIAEVKKIINWFNDKKSLDFELDQELVGGCSYDKHGTPITDEVFYKALESEVIMLGAVGGPTWDGLEFSKKPERALLKLRKELKLFANLRPAICFEQLVSASTLKPEVVSGLDIMIVRELTGGIYFGEPRGIKPIEKW

SEQ ID NO: 87729 - protein, 365 aa, Unknown
  Bacterial polypetide isolated from the Sargasso Sea
VKKRKFLLLPGDGIGPEVVGEVKKIIQWFNKNKSLDFEIDEDLAGGASYDKHGTPITDEVFYKALECEAIILGAVGGPKWDNVEFSKKPERALLKLRKELKLFANLRPAICFKQLVDSSTLKPEIVSGLDIMIVRELTGGIYFGEPRGIKPIDNGERKGINTHTYTTSEIKRVARVAFDLAKKRKNKVTSCEKSNVMEAGLLWREEVQELHDKEFKDVQLNHMLADNCAMQLLRNPKQFDVIVTDNLFGDMLSDQASMLTGSLGLLPSASLGVKNKDGKIRAMYEPIHGSAPDIAGKGIANPIATILSFAMALKYSLDLDKEADALEKAVQTVLDEKLRTKDILSPGMKEVSTSEMGDAIISKLQ

SEQ ID NO: 87730 - protein, 354 aa, Unknown
  Bacterial polypetide isolated from the Sargasso Sea
MKEYNIASIAGDGIGKEVLPEGLKVLKDVALKHQFKINFTEYDFASCDYYEKHGKMLPDDWKEKLGKHDAIFFGAVGMPDRVPDHVSLWGSLLQFRREFDQYINLRPVKLFPGINPPLANKKPGDIDMLIVRENTEGEYSTVGGRMYKNTDREIAIQETIMSAHGIDRVQKFAFELAKKRKRKKLTNATKSNGISITMPFWDERFNEMKKNYPEIETDQFHIDILVARFVLNPEWFDVVVASNLFGDILSDLGPACTGTIGIAPSGNINPENKFPSLFEPVHGSAPDIAGKGIANPVGQIWSGAMMLDYLGEKEASNSIVEAIEKSLSDKSNRTKDLGGDADTIKSSNSILANL

SEQ ID NO: 87731 - protein, 115 aa, Unknown
  Bacterial polypetide isolated from the Sargasso Sea
MLSDQASMLTGSLGLLPSASLGEKNKDGQMRAMYEPIHGSAPDIAGKGIANPIATILSFAMALRYSLDLDKEANSLEKAVQDVLDEGLRTKDIISKGKKEVSTSQMGDAIISKLQ

SEQ ID NO: 87732 - protein, 300 aa, Unknown
  Bacterial polypetide isolated from the Sargasso Sea
ESEVIMLGAVGGPTWDNLEFSKKPERALLKLRKELKLFANLRPAICFKQLVDASTLKPEVVSGLDIMIVRELTGGIYFGEPRGIKPIENGERKGINTHTYTTSEITRVARIAFDLARKRSNKVTSCEKSNVMEAGQLWKEEVQELHEKEYKDVELSHMLADNCAMQLLRNPKQFDVIVTDNLFGDMLSDQASMLTGSLGLLPSASLGAKNKDGEMRAMYEPIHGSAPDIAGKGIANPIASILSFAMALRYSLDLDKEADILEKAVQDVLNDGLRTKDIMSEGMKETSTSAMGDAIISKLQ

SEQ ID NO: 87733 - protein, 127 aa, Unknown
  Bacterial polypetide isolated from the Sargasso Sea
MIKIKKRKFLLLPGDGIGPEVITEVKKIINWFNTNKSLDFEIDEDLAGGASYDKHGTPITDEVFYKALECEAVILGAVGGPKWDNLEFSKKPERALLKLRKELKLFANLRPAICFKQLVDASSLKPE

SEQ ID NO: 87734 - protein, 136 aa, Unknown
  Bacterial polypetide isolated from the Sargasso Sea
MQLLRDPKQFDVIVTDNLFGDMLSDQASMLTGSLGLLPSASLGAKNKDGEMRAMYEPIHGSAPDIAGKGIANPIATILSFAMALRYSLDLDKEAEALEKAVQDVLNDGLRTKDILSNGMKEVSTSQMGDAIISKLQ

SEQ ID NO: 87735 - protein, 365 aa, Unknown
  Bacterial polypetide isolated from the Sargasso Sea
MDFRMNKKILILPGDGIGPEVTSSAMEILRFIKDLYSLDLDIEIHDVGGAAYDKTGHPLPDKTLEIARKSDAILFGAVGGPEWEDLDWDKRPEQALLGLRKELGLFANLRPAFLFNELASASPIKEEIINDLDILIVRELTGGIYFGEPRGIDTSSNPPHAFNTMIYDEKEIERIGRVAFESAQKRNKKLCSVEKANVLEVSKFWREIITNLSKEYPDVELTHQLADNTAMQLVLDPNQFDVIVSSNLFGDILSDIAATLTGSIGMLPSASLNSSSQGMYEPCHGSAPDIAGKNLANPLAMILSLAMAFRYSLENHQVANIIEESVKEFISRGFRTKDLTEDTSFLETGEVASELIPIIKEKSDV

SEQ ID NO: 87736 - protein, 293 aa, Unknown
  Bacterial polypetide isolated from the Sargasso Sea
MSNKKILILPGDGIGNEVMSEVLKIIDWMAKTKSMSFDITERLVGGTAYDKEGDSISDGTMQLALDSDAVLFGAVGGSKWDNVERDKRPEAALLRLRKDLDLFANLRPAVVLDALAEASSLKLDLVKGLDILIVRELTSGVYFGQPRGISKISNTESKAIDTQVYTTSEIDRVSRVAFDLAKVRRNKVSSAEKSNVMETGLFWRKTVTELHKKEYSSVDLEHILADNCAMQLVRYPKQFDVILTDNLFGDLLSDTAAMLTGSLGMLPSAALGPVKENGTRAAMYEPVHGSAPD

SEQ ID NO: 87737 - protein, 370 aa, Unknown
  Bacterial polypetide isolated from the Sargasso Sea
MASNRKLLVLPGDGIGPEVVSQVLRVVDWLAAKRSVSFDLQEGLVGGAAYDAHGTPLTDETLTDALAADAILFGSVGGPQYDDLPFDLKPERGLLRLRKEMDLFANLRPAMVFDAMVDSSTLKKEVIEGLDILILRELTGGIYFAEPRGIEDLPGGIRKGYDTNLYTTPEIERIGRVAMDLARKRRKKVTSVEKANVMMSGVLWRDVMNNLFENEAEGLETEHMYADNCGMQLVRNPKQFDVIVTDNLFGDMLSDCAAMLTGSLGMLPSASLGAVDETTQKRYALYEPVHGSAPDIAGKEMANPIAELLSFSMSLRYSFDMPEDADLIERAIQAVLAEGIRTPDIMQDGMKLVSTNVMMDNIVSKLDRSV

SEQ ID NO: 87738 - protein, 368 aa, Unknown
  Bacterial polypetide isolated from the Sargasso Sea
MIKVKKRKILLLPGDGIGPEVINEVKKVITWFNSKKSLDFEIDEDLAGGASYDKHGTPITDEVFYKALESKVVMLGAVGGPKWDNLEFQKKPERALLKLRKELKLFANLRPAICFKQLVDASTLKPEIVSGLDIMIVRELTGGIYFGEPRGIKPIDNGERKGINTHTYTSSEIIRVAKVAFDLAKKRSNKVTSCEKSNVMEAGQLWKEEVQTLHDAEYKEVELNHMLADNCSMQLLRNPKQFDVIVTDNLFGDMLSDQASMLTGSLGLLPSASLGEKNKDGEMRAMYEPIHGSAPDIAGKGLANPIATILSFAMALRYSLDLDKEADTLETAVQDVLNDGLRTKDIIAKGNKEVSTSQMGDAIISKLK

SEQ ID NO: 87739 - protein, 241 aa, Unknown
  Bacterial polypetide isolated from the Sargasso Sea
MILKIAVLSGDGIGPEVTQQSLKVLKALGRKFNHKIELESGLVGAVAIDKYGDPYPDQTHQVCLNSDAILFGAIGDPKYDNDPKAKVRPEQGLLKMRKKLGLYANLRPTKVFKSLLDMSPIKEERISGTDILFVRELTGGIYFGERGRKDNDNFAFDTCEYSRDEIIRIAKIGFEYAQKRTNKLCCVDKANVLETSRLWRETVQSMEKEFPDIEVSYEFVDAVAMRLVQWPNSYDVLITSN

SEQ ID NO: 87740 - protein, 367 aa, Unknown
  Bacterial polypetide isolated from the Sargasso Sea
MPTNQRKILLLPGDGIGPEVVRETKKVIDWFNKKKSLDFKIDQDLIGGAAIDEHGVPITDEVFYKALESDAVIFGACGGPKYDKLEFSKKPERALLKLRKELKLFANLRPAICFKQLVDASSLKPEIVSGLDILIVRELTGGIYFGEPRGVKPIENGERRGVNTHVYTTKEIKRIAKVAFELAAKRNNKVTSCEKSNVMEAGVLWREEVQNLKDNEYKKIDLNHMLADNCAMQLLRNPKQFDVILADNLFGDMLSDEAAMLTGSLGLLPSASLGDKDKNGRTRSLYEPVHGSAPDIEGKNISNPIATILSFSMALKYSLGLEKESAHLDKAVEKTLEDGLRTPDIMSKGKKKVSTSDMGDAIISNLN

SEQ ID NO: 87741 - protein, 368 aa, Unknown
  Bacterial polypetide isolated from the Sargasso Sea
MTNKILILPGDGIGQEVMIEVEKIIGWFNSNKDFNAEIEYGLVGGASYDADGVAISDATMQLAQKSDAVLFGAVGGPKWDDVAYEHRPEAGLLRLRKDLDLFANLRPAICFSSLSDSSSLKKEIVEDLDILIVRELTGGVYFGEPRGIEELENGNRRGTNTQVYETWEIQRIAEVAFELARKRKNKVTSSEKRNVMESGLLWYEEVKKIHQEKYNDVELDHMLADNCGMQLVRWPKQFDVIVTDNLFGDMLSDVAAMLTGSLGMLPSASLGKAVNGLFESALYEPVHGSAPDISGQGIANPLASILSFSMALKYSFGRNKDSKLLEDSISKVLDDGSRTKDITDDGDFISTSEMGNKVIENLELLNKE

SEQ ID NO: 87742 - protein, 171 aa, Unknown
  Bacterial polypetide isolated from the Sargasso Sea
MIKVKKRKILLLPGDGIGPEVVGEVEKIINWFNSKKSLDFEIDKDLIGGSAYDKHGSPITDEAFYKALESEAVILGAVGGPKWDNLEFSKKPERALLKLRKELKLFANLRPAICFKQLVDASSLKPELVSDLDILFVRELTGGIYFGEPRGIKPIDNGERKGINTHLHHKE

SEQ ID NO: 87743 - protein, 251 aa, Unknown
  Bacterial polypetide isolated from the Sargasso Sea
MIKVRKRKILLLPGDGIGPEVINEVKKIINWFNDKKSLDFEIDEALVGGCSYDKHGTPITDEVFYKALESEVVMLGAVGGPKWDDIEFSKKPERALLKLRKELKLFANLRPAICFEQLVDASTLKPEIVSGLDIMIVRELTGGIYFGEPRGIKPIDNGERKGINTHTYTTSEITRVARIAFDLAKKRSNKVTSCEKSNVMEAGQLWKEEVQELHDKEYKDVELSHMLADNCAMQLLRNPKQFDVIVTDNLV

SEQ ID NO: 87744 - protein, 358 aa, Unknown
  Bacterial polypetide isolated from the Sargasso Sea
MLPGDGIGPEVIAEVKKVINWFNDKKSLDFEIDEDLVGGISFDKHGTPLTDEVFYKALESAVIMLGAVGGPKWDGVEFSKKPERALLKLRKELKLFANLRPAICFEQLVNASTLKPEIVSGLDILIVRELTGGVYFGEPRGIKPIENGERKGVNTHTYTSSEIIRVARVAFDLAKKRSNRVISCEKSNVMEAGQLWKEEVQSLHDKDYKDVELSHMLADNCAMQLVRNPKQFDVILTDNLFGDMLSDEASMLTGSLGLLPSASLGAKNKDGEMRAMYEPIHGSAPDIAGKGVANPIASILSFAMALRYSLDLDKEAEALEKAVQEALNDGLRTKDIMSDKMKEVSTSQMGDAIISKLQ

SEQ ID NO: 87745 - protein, 311 aa, Unknown
  Bacterial polypetide isolated from the Sargasso Sea
MAISNTRKLLLLPGDGIGPEVVREVKKIIEWLNKNKSLDFKIEEELIGGASIDAHKIPITDEVFYKSLECDAVILGACGGPKWDKLEFSKKPERALLKLRKELKLFANLRPAICFEQLVDSSTLKPEIVSGLDIMIVRELTGGIYFGEPRGIEPIKNNERKGINTHTYTTTEIKRIAKVAFDLAKKRKNKVTSCEKSNVMEAGVLWREEVQDLKDKEYKNVELEHMLADNCAMQLLRNPKQFDVILADNLFGDMLSDEAAMLTGSLGLLPSASLGSKDKNGKLRSLYEPVHGSAPDIAGKNIANPIATILS

SEQ ID NO: 87746 - protein, 319 aa, Unknown
  Bacterial polypetide isolated from the Sargasso Sea
ILDVGGTAYEKFGSPIPEDVLVSAKEADAILFGAVGAPQWDNLSWEDRPENALLTLRKELNLFANLRPAFLFEELSNASPLKEKIIQGLDILIVRELTGGIYFGEPRGVVKDKNPNYAFNTMVYNEDEIRRIAKIAFESAQKRKGRLCSVEKANVLEVSKFWRSIVTEMSEDYPDVELSHQLADNAAMQLVLDPNQFDVIVASNLFGDILSDIAATLTGSIGMLPSASLDSSFKGMYEPCHGSAPDIAQQDIANPLAMIGSLSMALKYSLGEEMVASKIDLAIKNLIKQGFRTKDISNGENYLKTSEVAQKIIENIENE

SEQ ID NO: 87747 - protein, 256 aa, Unknown
  Bacterial polypetide isolated from the Sargasso Sea
ICFEQLVGASTLKPEVVSGLDIMIVRELTGGIYFGEPRGIKPIENGERKGINTHTYTTSEITRVVRVAFDLARKRSNKVTSCEKSNVMEAGQLWKEEVQELHEKEYKDVELSHMLADNCAMQLLRNPKQFDVIVTDNLFGDMLSDQASMLTGSLGLLPSASLGAKNKDGEMRAMYEPIHGSAPDIAGKGLANPIATVLSFAMALRYSLDLDNEADALEKSVQAVLNDGLRTKDILSKGMKEVSTSEMGDAIISKLQ

SEQ ID NO: 87748 - protein, 369 aa, Unknown
  Bacterial polypetide isolated from the Sargasso Sea
MIKVKKRKFLLLPGDGIGPEVIGEVKKIITWFNVNKSLDFDMEEALVGGASYDKHGTPITDEVFYKSLECEAVILGAVGGPKYDNLDFSKRPERALLKLRKELKLFANLRPAICFKQLVEASTLKPEIVSGLDIMIVRELTGGIYFGEPRGIKPIDNGERKGINTHTYTSSEIKRVARVAFDLAKKRNNKVTSCEKSNVMEAGQLWKEEVQNLHDKEFKDVELNHMLADNCAMQLLRNPKQFDVIVTDNLFGDMLSDEASMLTGSLGLLPSASLGAKNKDGEMRAMYEPVHGSAPDIAGKGIANPIATILSFAMALRYSLDLDKEADDLEKAVQNVLDDGLRTKDIVSKGTKEISTSGMGDAIIAYLQN

SEQ ID NO: 87749 - protein, 318 aa, Unknown
  Bacterial polypetide isolated from the Sargasso Sea
KRALVGGSAYDQTEKPLPKETLNVAHKSDAILLGAVGGPKWDELDYQFRPERALLGLRSELDLFANFRPAILSEYLTSSSSLKSEKVENLDLLIIRELTGGIYFGEPRGRKEDKLEAYNTMIYNNEEIERIGRVAFEAAQKRNKNLCSVDKANVLEVSVLWREVITDLSRDYPDVNLTHMLVDNAAMQLVREPKQFDVIVTGNLFGDILSDIAAMMTGSIGMLPSASINSDNKGMYEPVHGSAPDIAGQGLANPLATISSVAMMLRYSFGLEQAARNIEMAIDKVLKEGYRTHDLEGPEDMKLNTDQISQKILDNLKS

SEQ ID NO: 87750 - protein, 348 aa, Unknown
  Bacterial polypetide isolated from the Sargasso Sea
MKLNIIAFDGDGIGPEIVSSTLNIINLLNSKLKLDIEIQREILGFNLLKKNGVTFTDDLLLKSKEADGIILGPVDHNAYPSVSNGGINPSAKLRIELDLYSNIRPAKNYVNVKSLSQNMDLVIVRENTEGFYADRNMYDGSGEFSPIPGVGLSLRKITKEASLKIAKSAFEIAKSRSVNKSTKSKIHVVHKANVMKITDGIFLDACRLVSSKYNDVDYEEMLVDACAAHLVRKPDQFDVIVTTNMFGDILSDLATELSGSLGLAGSLNAGNNHAMAQAQHGAAPDIADKNIANPISLILSSAMLLDWLGKNREIDKLILASNLINDSVLELLKDRENFTRDLGGNASH

SEQ ID NO: 87751 - protein, 360 aa, Unknown
  Bacterial polypetide isolated from the Sargasso Sea
MTKNILILPGDGIGQEVTSAMREVLSYLIDEQGLDLNISERDVGGSSYDQFGVPLTEETLEIAKKSDAILFGAVGGPQWDDLDWDHRPEQALLALRKSLGLFANLRPAFLFNELASASPLKNNIIENLDILIVRELTGGIYFGEPRGIVENESPKYSFNTMIYNEDEIRRIAKVAFEAAMNRNKKLCSVEKANVLEVSKFWRSIVTEMSSEYPEVELSHQLADNTAMQLVLNPNQYDVIVSSNLFGDILSDIAATLSGSIGMLPSASLNSSSQGMYEPCHGSAPDIAGQGIANPIAMIASLAMAFEYSLDRIDLARRIEAAIKTFISKGFRTKDIASSEEFIKTQEVAPIIISILKDGHE

SEQ ID NO: 87752 - protein, 351 aa, Unknown
  Bacterial polypetide isolated from the Sargasso Sea
MKAEITVLAGDGIGPEITEHALNILNAIEKKYGHEFTLHDALFGGIAIDETGDPYPLETRELCKKSDAVLLGAVGGPKWSDPKAKTRPEKGLLDMRSDLGVYANLRQIKTYPQLIDNSPIENAKLKDIDILFVRELIGGIYFGEKEKTDDYAKDVCEYSASEIERIVKVAADLSMKRKNKLTSVDKANVMATSQLWRSVTIAMIEKEYPEIEIEHLLVDAATMHLLSRPADFDVIVAENLFGDILTDEASMLTGSIGMIPSASLGDNNFGVYEPIHGSAPDIQGKGLANPSGMILSVAMMLKHSLNLIEESNDIENAVEEVLSDGIFTADLSSEDHVSTDEMGNAILSKIV

SEQ ID NO: 87753 - protein, 368 aa, Unknown
  Bacterial polypetide isolated from the Sargasso Sea
MTNKILILPGDGIGQEVMVEVEKIINWFNSNNNFNAEIEYGLVGGASYDADGVAISDATMDLAKKSDAVLFGAVGGPKWDDVAYEHRPEAGLLRLRKDLDLFANLRPAICFSSLSDSSSLKKEIVQDLDILIVRELTGGVYFGEPRGIESLENGNRRGINTQVYETWEIQRIAEVAFELARKRNNKVTSSEKRNVMESGLLWYEEVKKIHEEKFQDVELDHMLADNCGMQLVRWPKQFDVIVTDNLFGDMLSDVAAMLTGSLGMLPSASLGKSVDGLFKSALYEPVHGSAPDISGQGIANPLASILSFSMALKYSFGRNEDSKLLEDSISKVLDDGSRTKDIADQENFISTNEMGDKVIENLELLSKE

SEQ ID NO: 87754 - protein, 244 aa, Unknown
  Bacterial polypetide isolated from the Sargasso Sea
MIKVKDRKLLLLPGDGIGPEVVREARKIIEWFNKNKSLDFKIEEGLVGGASYDKHKNPITDEVFYKALESEAVILGAVGGPKYENLEFSKRPERALLKLRKELKLFANLRPAICFKQLVEASSLKPEIISGLDIMIVRELTGGIYFGEPRGIEPIENNERKGINTHTYTTSEIQRVARVAFDLAKKRKNKVTSCEKSNVMEAGILWREEVQSLKDKEYKKIELQHMLADNCAMQLLRNPKQFDV

SEQ ID NO: 87755 - protein, 368 aa, Unknown
  Bacterial polypetide isolated from the Sargasso Sea
MIKVKDRKLLLLPGDGIGPEVIREVRKIIEWFNKNKSLDFKIEEGLIGGASYDKHKNPITDEVFYKALESEAVILGAVGGPKYDNLEFSKRPERALLKLRKELKLFANLRPAICFKQLVEASSLKPEIISGLDIMIVRELTGGIYFGEPRGIEPIENNERKGINTHIYTTNEIQRVARVAFDLAKKRKNKVTSCEKSNVMEAGILWREEVQALKDKEYKKIELSHMLADNCAMQLLRDPKQFDVIVTDNLFGDILSDEAAMLTGSLGLLPSASLGARDKKGKIRSMYEPVHGSAPDIAGKNIANPIATILSLSMALKYSLDLDKEAEQLDKAVQSVLDDGLRTKDIMSKNMKEVTTSVMGDAIIAKLK

SEQ ID NO: 87756 - protein, 254 aa, Unknown
  Bacterial polypetide isolated from the Sargasso Sea
QFINLRPVKLFEGVNAPLANKKPGDIDMMIVRENTEGEYSSVGGKMYQNTEREIIIQETIMSKHGIDRVQKFAFELAKKRKRKKLTNATKSNGISITMPYWDERFNENKKSYPEIKTDQFHIDILTARFVLTPEWFDVVVASNLFGDILSDLGPACTGTIGIAPSGNINPTNKYPSLFEPVHGSAPDIAGKGIANPVGQIWSGAMMLDYLGEKEAASRIVKSIEKTLLEKNNRTKDLDGDSNTTECASKVLSNL

SEQ ID NO: 87757 - protein, 368 aa, Unknown
  Bacterial polypetide isolated from the Sargasso Sea
MIKVKKRKILLLPGDGIGPEVITEVKKIINWFNDKKSLDFEIDQELVGGCSYDKHGTPITDEVFYKALESEVIMLGAVGGPTWDNLEFSKKPERALLKLRKELKLFANLRPAICFKQLVDASTLKPEVVSGLDIMIVRELTGGIYFGEPRGIKPIENGERKGINTHTYTTSEITRVARVAFDLARKRSNKVTSCEKSNVMEAGQLWKEEVKELHEKEYKDVELSHMLADNCAMQLLRNPKQFDVIVTDNLFGDMLSDQASMLTGSLGLLPSASLGAKNKDGEMRAMYEPIHGSAPDIAGQGIANPIASILSFAMALRYSLDLDKEADVLEKAVQDVLNDGLRTKDIMSEGMKETSTSAMGDAIISKLQ

SEQ ID NO: 87758 - protein, 126 aa, Unknown
  Bacterial polypetide isolated from the Sargasso Sea
DNLFGDLLSDTAAMLTGSLGMLPSASLGPVKENGTRAAMYEPVHGSAPDIAGQSKANPLAMIMSFAMMLKYSFDMEEDSKLIEKAVQNVLLKGLRTADIKDGADKIISTKEMGVAVIEELKVLSGN

SEQ ID NO: 87759 - protein, 335 aa, Unknown
  Bacterial polypetide isolated from the Sargasso Sea
KNKSLDFEIDEDLAGGVSYDKHGTPITDEVFYKALECEAIILGAVGGPKWDDVEFSKKPERALLKLRKELKLFANLRPAICFKQLVDASTLKPEIISGLDIMIVRELTGGIYFGEPRGIKPIDNGERKGINTHSYTTSEIQRVARVAFDLAKKRKNKVTSCEKSNVMEAGLLWKEEVQELHDKEFKDVELNHMLADNCAMQLLRYPKQFDVIVTDNLFGDMLSDQASMLTGSLGLLPSASLGAKNKEGKARAMYEPIHGSAPDIAGKGIANPIATILSFAMALRYSLDLDKEADALEKAVQSVLDEGLRTKDILSKGTKEVSTSKMGDAIISKLQ

SEQ ID NO: 87760 - protein, 108 aa, Unknown
  Bacterial polypetide isolated from the Sargasso Sea
MIKIKKRKILLLPGDGIGPEVIAEVKKIIEWFNSNKSLDFEIDQDLVGGAAYDKHGTPITDEAFYKAQESAAVILGAVGGPKWDNIDFSKKPERALLKLRKELKLLQI

SEQ ID NO: 87761 - protein, 145 aa, Unknown
  Bacterial polypetide isolated from the Sargasso Sea
MNKKILILPGDGIGPEVTSSAMEILKFIKDLYSLDLDIETHDVGGAAYDKTGYPLPEKTLEIARKSDAILFGAVGGPEWEDLDWDKRPEQALLGLRKELGLFANLRPAFLFNELASASPIKEEIINDLDILIVRELTGGIYFGEP

SEQ ID NO: 87762 - protein, 218 aa, Unknown
  Bacterial polypetide isolated from the Sargasso Sea
MTANQKKILLLPGDGIGPEVVGETKKVIDWFNKKKSLDFKIDQDLIGGAAIDKHGVPITDEVFYRALESDAVIVGACGGPQYDKLEFSKKPERALLKLRKELKLFANLRPAICFKQLVDSSTLKSEIVSGLDILIVRELTGGIYFGEPRGIKPIENGERRGVNTHVYTTKEIKRIAKVAFELASKRNNKVTSCEKSNVMEAGVLWREEVQSLKDKDYK

SEQ ID NO: 87763 - protein, 368 aa, Unknown
  Bacterial polypetide isolated from the Sargasso Sea
MIKIKKRKILLLPGDGIGPEVIAEVKKIIEWFNSNKSLDFEIDQDLVGGAAYDKHGIPITDEAFYKAQESAAVILGAVGGPKWDNIDFSKKPERALLKLRKELKLFANLRPAICFKQLVDASSLKPEFVSNLDILFVRELTGGIYFGEPRGIKPIDNGERKGINTHVYTTSEIERVARVAFDLARKRNNKVTSCEKSNVMEAGQLWKEEVQAIHEKEYSDVELKHMLADNCAMQLVRNPKQFDVIVTDNLFGDMLSDEAAMLTGSLGLLPSASLGAKDKNGNMRSLYEPVHGSAPDIAGQGIANPIATILSFAMALRYSLDLDKEADSLEKAVQGVLDQGLRTKDIISKGMKEVSTSVMGDAIISKLQ

SEQ ID NO: 87764 - protein, 149 aa, Unknown
  Bacterial polypetide isolated from the Sargasso Sea
MSKKVLILPGDGIGQEVTSSAIQILEFIVDKFNLDFSTKILDVGGTAYEKFGSPIPEDVLVSAKEADAILFGAVGAPQWDNLSWEDRPENALLTLRKELNLFANLRPAFLFEELSNASPLKEKIIQGLDILIVRELTGGIYFGEPRGVV

SEQ ID NO: 87765 - protein, 348 aa, Unknown
  Bacterial polypetide isolated from the Sargasso Sea
MIKVKKRKILLLPGDGIGPEVIGEVKKIINWFNDKKSLDFEIDQDLAGGCSYDKHGTPITDEVFYKALESEVVMLGAVGGPKWDDVEFSKKPERALLKLRKELKLFANLRPAICFEQLVGASTLKPEIVSGLDIMIVRELTGGIYFGEPRGIKPIDNGERKGINTHTYTSSEIVRVARVAFDLAKKRSNKVTSCEKSNVMEAGQLWKEEVQELHDKEYKDVELSHMLADNCAMQLLRNPKQFDVIVTDNLFGDMLSDQASMLTGSLGLLPSASLGAKNKDGEMRSMYEPIHGSAPDIAGKGIANPIASILSFAMALRYSLDLDKEADALEKAVQEVLNDGLRTKDISI

SEQ ID NO: 87766 - protein, 207 aa, Unknown
  Bacterial polypetide isolated from the Sargasso Sea
SYTTSEIERISRVAFDLAKLRNNKVTSVEKSNVMETGMFWKKIVTKIHTDEYTSVELNHMLADNCAMQLVRYPKQFDVILTDNLFGDLLSDISAMLTGSLGMLPSASLGPASSSGTRSAMYEPVHGSAPDIAGEGKANPLAMIMSFAMMLKYSFNMVEDSNLIEKAIQNVLSLGFRTLDIKQEAKKILSTSEMGQEVIKELSKLIGK

SEQ ID NO: 87767 - protein, 193 aa, Unknown
  Bacterial polypetide isolated from the Sargasso Sea
MKNSEGKILLLPGDGIGPEVNKALKDVINSADANTAINIEVEEDLVGGASYDKHNTPLTDDVLNKAISADAVILGSVGGYQYDKLPFEVKPERALLKIRKELDLFANIRPAKVFDALKDASSLKSEIVEGMDIIVLRELTGGIYFGEPRGIRKLPDGQREGINTEVYTTNEIVRLGKVGFEIAEQRKKDSTFS

SEQ ID NO: 87768 - protein, 182 aa, Unknown
  Bacterial polypetide isolated from the Sargasso Sea
MNKGKKIVHSVEKANVMESGILWREEIMKLHNEKYKHIDLSNMYADNCAMQLVKQPKQFDVIITGNLFGDILSDISAELTGSLGMLPSASLGDEVNGKRKALYEPVHGSAPDIAGKNIANPIAMILSFAMFLKLSLKNNKVSELIESSVENVLGKGYRTKDIMQSGKNLVTTSDMGSLISEE

SEQ ID NO: 87769 - protein, 358 aa, Unknown
  Bacterial polypetide isolated from the Sargasso Sea
MSKNILILPGDGVGQEVTASAVEVLDFLIKEYGLDFSVKSMNVGGTAYNECGSPLPKEVLNAAKESDAILFGAVGGTEWDNLDWDNRPENALLTLRKELNLFANLRPAFLFNELSEASPLKKEIINNLDILIVRELTGGIYFGEPRGIFSDKEPNYAFNTMVYNEDEIRRIAKVAFESAQKRDGKLCSVEKANVLEVSKFWRSIVTEMASEYPDVQLTHQLADNAAMQLVLDPNQFDVIVASNLFGDILSDIAATLTGSIGMLPSASLDSSFKGMYEPCHGSAPDIAGQNIANPLAMISSLSMALRYSLNQESISDKIDTAIKLFIQSGYRTKDIAVDENYLKTSEVAQKIIDIIQNG

SEQ ID NO: 87770 - protein, 374 aa, Unknown
  Bacterial polypetide isolated from the Sargasso Sea
MKEKVNLLLLPGDGIGPEVCNPVKKIINFLNNFTNIEFSVEEDLIGGSSYDKHKVPITKNVVSKANASDGVLLGAVGAPKYENLPFDLRPERGLLKLRKDLDLYANIRPAKVFNALADASSLKQDIVTNMDIVVLRELTGGIYFGEPRGIFNLNDGQRKGINTEVYTTNEIIRLGRIGFEIANLRNKTVHSVEKANVMESGVLWREEINKLHSAEFDDINLKHMYADNCAMQLVKDPKQFDVILTGNLFGDILSDISAELTGSLGMLPSASLGEIGESKKRKSLYEPVHGSAPDIAGKNIANPIAMILSLSMFFNYTLKNNILSKLIEDAVEKTLENGYRTKDIMQDGRNLLTTTEMGDKVIENLKILLEKNEL

SEQ ID NO: 87771 - protein, 354 aa, Unknown
  Bacterial polypetide isolated from the Sargasso Sea
MKEYNIAAIPGDGIGKEVIPEGLKVLKEAALKHQFKINFTEYDFASCDYYEKHGKMLPDDWKEKLSKHNAIFFGAVGMPDQVPDHISLWGSLLQFRREFDQYINLRPVKLFPGVNSPLANKKPGDIDMMIVRENTEGEYSSVGGRMYKNTDREIAIQETIMSAHGIDRVQKFAFELAKIRKRKKLTNATKSNGISITMPFWDERFEKMKKNYPEINTDQFHIDILVARFVLNPEWFDVVVASNLFGDILSDLGPACTGTIGIAPSGNINPENKYPSLFEPVHGSAPDIAGKGVANPVGQIWSGAMMLDYLGEKEAANSIVTAIEKSLKNEKNRTKDLGGESNTIECSKSILSNL

SEQ ID NO: 87772 - protein, 369 aa, Unknown
  Bacterial polypetide isolated from the Sargasso Sea
MIKVKKRKILLLPGDGIGPEVINEVKKIIEWFNKNRSLDFEVDQDLVGGAAYDKFKTPITDEVFFKALECEAVILGAVGGPKWDNLDFSKKPERALLKLRKELKLFANLRPAICFKQLVEASSLKPEIVSGLDIMIVRELTGGIYFGEPRGIKPIDNGERKGINTHTYTSKEIERVARVAFELAKKRNNKVTSCEKSNVMEAGQLWKEEVTTLHKKDYKDVNLEHMLADNCAMQLLRNPKQFDVIVTDNLFGDILSDEAAMLTGSLGLLPSASLGAKDKDGNLRSMYEPVHGSAPDIAGKGIANPIATILSFSMALKYSLNLDKESTELDNAVQKVLDDGLRTKDIISKGKKEVSTSMMGDAIIACLQK

SEQ ID NO: 87773 - protein, 368 aa, Unknown
  Bacterial polypetide isolated from the Sargasso Sea
MIKVKKRKVLLLPGDGIGPEVINEVKKVIKWFNSKRSLDFEMDEDLAGGASYDKHGTPITDEVFYKALESEVVMLGAVGGPKWDGLEFSKKPERALLKLRKELKLFANLRPAICFKQLVDASTLKPEIVSGLDIMIVRELTGGIYFGEPRGIKPIDNGERKGINTHSYTSSEIIRVARVAFDLAKKRSNKVTSCEKSNVMEAGQLWKEEVQALHEKEYKEVELSHMLADNCAMQLLRNPKQFDVIVTDNLFGDILSDQASMLTGSLGLLPSASLGAKNKDGEMRAMYEPIHGSAPDIAGKGLANPIATILSFAMALRYSLDLDKEADDLEKAVQDVLNEGLRTKDIAEKGKKEVSTKEMGDAIISKLK

SEQ ID NO: 87774 - protein, 314 aa, Unknown
  Bacterial polypetide isolated from the Sargasso Sea
MKEYKIASIAGDGIGKEVVPEALKILKEVANQHQFKLKIDEFDFSSCDYYEKHGKMLPDDWKQQIGNHDAIFFGAVGMPDKYPDHITLWGSLLQFRREFDQFINLRPVKLFKGVNAPLANKKPGDIDMMIVRENTEGEYSSVGGKMYQNTEREIVIQETIMSKHGIDRVQKFAFELAKTRDRKKLTNATKSNGISITMPYWDQRFYENKKDFPEIKTDQFHIDILAARFVLTPEWFDVVVASNLFGDILSDLGPACTGTIGIAPSGNINPTNKHPSLFEPVHGSAPDIAGKGIANPIGQIWSGAMMLDYLGKKK

SEQ ID NO: 87775 - protein, 270 aa, Unknown
  Bacterial polypetide isolated from the Sargasso Sea
FRREFDQYINLRPARLMPGVVAPVVRRDGSPRLPGEIDMLIVRENTEGEYSSIGGRMYEGTPREIVMQETVMSRHGVDRVLKFAFELAQSRPKKHLTSATKSNGIAITMPYWDERVAEMAKAYPDVKVDKFHIDILTAHFVQRPDFFDVVVASNLFGDILSDLGPACTGTIGIAPSANLNPTRTMPSLFEPVHGSAPDIAGKGIANPIGQIWCGAMMLDFLGYRAAHDAVLAAIEAVLQPGSGAPRTPDLGGTGSTQDVGKAIAQALTAR

SEQ ID NO: 87776 - protein, 102 aa, Unknown
  Bacterial polypetide isolated from the Sargasso Sea
MIKVIKRKLLLLPGDGIGPEVIGEVKKVITWLNKNRSLDFEIDEELVGGSSYDQHGTPITDEVFYKALESEAVILGAVGGPKWDNLEFSKKPERALLKLRKE

SEQ ID NO: 87777 - protein, 366 aa, Unknown
  Bacterial polypetide isolated from the Sargasso Sea
MSKTRKILLLPGDGIGPEVIAEVKKILDWMNKTKSLDFVLSQELIGGASIDANKVPITDEVFYKSLESDAVILGACGGPKWDNLEFSKKPERALLKLRKELKLFANLRPAICFKQLVDSSTLKPEIVSGLDIMIVRELTGGIYFGEPRGIEPMENNQRKGVNTHTYTTSEIHRIARVAFDLAKKRRNKVTSCEKSNVMEAGVLWREEVQSIKDKEFKKVELNHMLADNCAMQLLRYPKQFDVILADNLFGDMLSDEAAMLTGSLGLLPSASLGSKDKNGRIRSLYEPVHGSAPDIEGKNIANPIATILSLSMALRYSLELGKEADQIDKAVQSVLDEGLRTKDIMSKNMKEVSTTDMGDAIIAKLK

SEQ ID NO: 87778 - protein, 209 aa, Unknown
  Bacterial polypetide isolated from the Sargasso Sea
NTTYYSESEIERVAISAFEIASKRNKKVCSMEKANVMEVGVLWREVVQKIRDRDYPEIELSHMYADAGAMQLVRWPKQFDVIVTDNLFGDLLSDCAAMLTGSLGMLPSASLGNKNANGKLKAMYEPVHGSAPDICGKGLANPVACILSFSMALKYTFDLKKEAELLDKSVERVLSKGIRTADLLQKENQKPSSTKEVCDEILNELNLQL

SEQ ID NO: 87779 - protein, 369 aa, Unknown
  Bacterial polypetide isolated from the Sargasso Sea
MIKVKKRKILLLPGDGIGPEVIAEVKKIIQWFNKNKSLDFEIDEDLVGGAAYDKYKTPITDEVFYKALESEAVILGAVGGPKWDKLEFSKKPERALLKLRKELKLFANLRPAICFKQLVDASSLKPEIVSGLDIMIVRELTGGIYFGEPRGIKPIDNGERKGINTHTYTTKEIERVARVAFDLAKKRGNKVTSCEKSNVMEAGQLWKEEVQILHDKEYKDVELTHMLADNCAMQLLRNPKQFDVIVTDNLFGDILSDEAAMLTGSLGLLPSASLGAKDKDGNMRSMYEPVHGSAPDITGKGIANPIATILSFSMALKYSLNLDKESKALDNAVQKVLDDGLRTKDIISKGKKEVSTSEMGDAIIACLQK

SEQ ID NO: 87780 - protein, 334 aa, Unknown
  Bacterial polypetide isolated from the Sargasso Sea
MTKKILILPGDGIGEEVTSSAKEVLDFIIDNYDIDFEINTMKVGGAAYDEFGSPLPEEVLHEAKRSDAILFGAVGGPEWDNLEWDLRPEYALLKLRKDLELFANLRPAFLFNELASASPIKNEIIKDLDILIVRELTSGIYFGEPRGLVESENPKYAFNTMIYNEDEIKRIAKIGFESAQKRNNKLCSVDKANVLEVSKFWREIVTDMSKDYPDVELSHQLADNAAMQLVLNPNQFDVIVSSNLFGDILSDIAATLSGSIGMLPSASLNSSSKGMYEPCHGSAPDIAGKNIANPIAMIASLSMALRHSLDQENIAKMLDNSIMKYVSQGNRTKD

SEQ ID NO: 87781 - protein, 177 aa, Unknown
  Bacterial polypetide isolated from the Sargasso Sea
MIKIKKRKFLLLPGDGIGPEVVGEVKKIILWFNNNKSLDFEIEEDLAGGVSYDKHGTPITDEVFYKALESEAVILGAVGGPKWDNVEFSKKPERALLKLRKELKLFANLRPAICFEQLVEASTLKPEIVSGLDIMIVRELTGGIYFGEPRGIKPIDNGERKGINTHSYTSSEIQRVA

SEQ ID NO: 87782 - protein, 355 aa, Unknown
  Bacterial polypetide isolated from the Sargasso Sea
MNLKIALLPGDGIGPEVIKEAVKICNAISKKFNHSITWQEGLVGAAAIDKTGDPYPDTTHEICVNSDAVLFGAVGDPKFDNNPSLSVRPEEGLLRMRKKLGLYANLRPTFTFESLLEMSPIKRSIVKGTDLIFVRELTGGIYFGKRGKSPENDYAFDTCEYKKEEVERIAKIGFELARKRSKKLCCIDKANILETSRLWRKTVQSMERNYKDVEVSYEFVDAVAMRLIHSPNKYDVLITSNLFGDILTDEASVISGSMGLMPSASIGSHTSIYEPIHGSFPEAKGKNIANPLATILSASMMFERSFNLTKEAEMIRKIVSDSIEKKIVTEDLAENNKSFSTSQVGDWIKERIEKE

SEQ ID NO: 87783 - protein, 375 aa, Unknown
  Bacterial polypetide isolated from the Sargasso Sea
MNNNEFQIATVPGDGIGKDIVNSAISIVDLSSEITGGYKCEWHMIKAGAEYYSLTGKDVEPGGEKKVDELDSIFLGAIGLPSVRHKDGTEICPHLRFREMFGLYAGVRPVKAYKNIPKRLSNELSRNIDLIILRESTEGLFYTAAVHNRCPVENNQEVQDVMKITRATTEKLHDFAFKLARQRKKKGKLGKVTCVDKANVFRSQAFFRKIFDERKVKFKDIDAEHCYVDAMALNLIRNPWEYDVMVMENMFGDILSDLGGGLIGGMGMASCAEIGDNHGLFQPAHGSAPDILGQDKANPLATILSASLMLEYLSEKTDCKSTLLGSRLIETAVEIGFERNELRPIEFGGDMGTKAITETLSDLLKDNEIQKQILT

SEQ ID NO: 87784 - protein, 358 aa, Unknown
  Bacterial polypetide isolated from the Sargasso Sea
MSKKILVLPGDGIGQEVTASAMQILDFIIKKFSLNFSIDTLDVGGTAYEKFGSPIPENVLKTAKKADAVLFGAVGAPQWDGLSWEDRPENALLTLRKELNLFANLRPAFLFNELSNASPLKEKIIEGLDILIVRELTGGIYFGEPRGVVNDKSPNYAFNTMIYNEDEIRRIAKIAFESAQKRKGRLCSVEKANVLEVSKFWRSIVTEMSKEYPDVELSHQLADNAAMQLVLNPNQFDVIVASNLFGDILSDIAATLTGSIGMLPSASLDSSFKGMYEPCHGSAPDIANQDLANPLAMIGSLSMALRYSLDEETVANKIDTAIKKFIQQGFRTKDIATDENYLKTSEVAEKIIEILENE

SEQ ID NO: 87785 - protein, 187 aa, Unknown
  Bacterial polypetide isolated from the Sargasso Sea
RRGNKVCSMEKANVMESGVLWREVVQKVHDEDYQDVELSHMYADAGAMQLCRWPKQFDVIVTDNLFGDLLSDAAAMLTGSLGMLPSASLGAPMANGRPKALYEPVHGSAPDIAGEGKANPIACILSFAMALRYSFDQGKEADRLEAAVESVLADGFRTADLLGEEGVDPVTTQQMGDAILVALNSTL

SEQ ID NO: 87786 - protein, 265 aa, Unknown
  Bacterial polypetide isolated from the Sargasso Sea
RKHFKLFSNLRPAKLYQGLEAFCPLRADIAANGFDILCVRELTGGIYFGQPKGREGSGQHEKAFDTEVYHRFEIERIARIAFESARKRRRKVTSIDKANVLQTSILWREIVNEIANEYPDVELAHMYIDNATMQLIKDPSQFDVLLCSNLFGDILSDECAMITGSMGMLPSASLNDQGFGLYEPAGGSAPDIAGKNIANPIAQILSLALLLRYSLDANDAATAIESAINRALEEGIRTGDLARGAAAVGTDEMGDIIARYVTEGV

SEQ ID NO: 87787 - protein, 246 aa, Unknown
  Bacterial polypetide isolated from the Sargasso Sea
TLKPEVVSGLDIMIVRELTGGIYFGEPRGIKPIDNGERKGINTHTYTSSEIRRVAKVAFDLAKKRQNKVTSCEKSNVMEAGLLWREEVQELHDKEYKDVELDHMLADNCSMQLLRNPKQFDVIVTDNLFGDMLSDQASMLTGSLGLLPSASLGAKNKDGKMRAMYEPIHGSAPDIAGKGIANPIASILSFAMALKYSLNLDKEANSLEKAVQDVLDDGLRTKDIISKGTKEVSTSQMGDAIISKLQ

SEQ ID NO: 87788 - protein, 182 aa, Unknown
  Bacterial polypetide isolated from the Sargasso Sea
TSVRKANVMMSGVLWREVMVNLHKKEGAGIDINHMYADNCAMQLVRDPNQFDVIVTDNLFGDILSDCAAMLTGSLGMLPSASLGSVDKNTGKRYAMYEPVHGSAPDIAGKGLANPLAELLSLSMLLRYSFDMKEEADLIDKAVSKALETGPRTPDIIAEGREKVGTKGMMDLVIHKLEEITN

SEQ ID NO: 87789 - protein, 224 aa, Unknown
  Bacterial polypetide isolated from the Sargasso Sea
YFGEPRGIKPIDNGERKGINTHVYTTSEIERVARVAFDLARKRNNKVTSCEKSNVMEAGQLWKEEVQAIHEKEYSDVELKHMLADNCAMQLVRNPKQFDVIVTDNLFGDMLSDEAAMLTGSLGLLPSASLGAKDKNGNMRSLYEPVHGSAPDIAGQGIANPIATILSFAMALRYSLDLDKEADSLEKAVQGVLDEGLRTKDIISKGMKEVSTSVMGDAIISKLQ

SEQ ID NO: 87790 - protein, 237 aa, Unknown
  Bacterial polypetide isolated from the Sargasso Sea
LANKKPGDIDIMIVRENTEGEYSSVGGKMYQNTEREIVIQETIMSKHGIDRVQNFAFELAKTRKRKKLTNATKSNGISITMPYWDERFYENKKNYPEIETDQFHIDILTARFVLTPEWFDVVVASNLFGDILSDLGPACTGTIGIAPSGNINPTNKYPSLFEPVHGSAPDIAGKGIANPIGQIWSGAMMLDYLGEKEAASRIVNSIEKTLLEKNNRTKDLDGDSNTIECANKILSNL

SEQ ID NO: 87791 - protein, 106 aa, Unknown
  Bacterial polypetide isolated from the Sargasso Sea
SSEGGISDMHYSISNTAEFGDYLTGPRIITEETKKEMKKVLEDIQSGDFADKFLDDCRQSNDGSGGPFLKNNREKTKEHSIEFVGKELRSKMKFLSEKKLVDKEKN

SEQ ID NO: 87792 - protein, 91 aa, Unknown
  Bacterial polypetide isolated from the Sargasso Sea
IARKRLYEMNVVISDTAEYGNYLFSNAAVPLLRDFVNKLSTEYVGKGLSSAANGVDNIRLIAVNEAIRQHPVELVGKKLRGYMTAMKKIVG

SEQ ID NO: 87793 - protein, 38 aa, Unknown
  Bacterial polypetide isolated from the Sargasso Sea
MTQLFYDTDADLSLLNNKTIAIIGYGSQGHAHALNLKD

SEQ ID NO: 87794 - protein, 102 aa, Unknown
  Bacterial polypetide isolated from the Sargasso Sea
MKIFYDDDANLEIIKNMKVSIIGYGSQGHAHANNLNDSGVDVTVGLREGSSSWKKAEDAGLKVASVSEASQGADLIMILAPDEFQQALYDNEIKPNISNGCV

SEQ ID NO: 87795 - protein, 278 aa, Unknown
  Bacterial polypetide isolated from the Sargasso Sea
GKAGYQPEQDERHFLYEEYLHVIREHRPTVFVMENVRGLLSATVRNQQILQNILTDLRAPDADDPSLAYRLFGLAIQGDDLSLFRDVIDPREFVIEMERHGVPQARRRLIIVGVGNDVSREPSRLAASERLSTVSDVIKDLPPLRSGLSRGQDSEEAWRSAIAKFALDWSGSKGSASSDLVERARQHIEQISSGDGPSSRGGRWIPARVGPSSHAGWFVDSRLEGVLNHETRGHIVEDLQRYLFAAVFGEMSEQQRSPTLHDFPATLLPKHENVNQTL

SEQ ID NO: 87796 - protein, 101 aa, Unknown
  Bacterial polypetide isolated from the Sargasso Sea
ISNMHYSISNTAEFGDYATGPRIITHETKKEMKKVLEDIQSGAFADRFLEDSRQSNDGSGGPFLKNNREMTKEHSIESVGKELRSKMKFLSEKKLVDKDKN

SEQ ID NO: 87797 - protein, 96 aa, Unknown
  Bacterial polypetide isolated from the Sargasso Sea
MANMRYSISNTAEYGDYSRGPRLITDETKKEMKKILSEIQSGQFAKEWMQEHQSGQTKFKVMRKEQAEHPIEAVGDKLRTLMPWIAEGKMVDKSKN

SEQ ID NO: 87798 - protein, 63 aa, Unknown
  Bacterial polypetide isolated from the Sargasso Sea
MKIFYDDDADISIIRQLKVTIVGYGSQGHAHANNLHESGVDVTVALREHSTSWKKAQEAGLKV

SEQ ID NO: 87799 - protein, 75 aa, Unknown
  Bacterial polypetide isolated from the Sargasso Sea
VVNKEETKKRMKEVLAEIQSGKFTKEWMDECKNGQKNFLATRAKLAEHPVEKVGAELRAMMPWIGKKKLVDSDKS

SEQ ID NO: 87800 - protein, 50 aa, Unknown
  Bacterial polypetide isolated from the Sargasso Sea
MANYFNTLSLRQQLDQLGRCRFMAREEFADGCQFLKGKEIVIVGCGRTGL

SEQ ID NO: 87801 - protein, 82 aa, Unknown
  Bacterial polypetide isolated from the Sargasso Sea
MKIYYDDDANIEIIKNMKVSIIGYGSQGHAHANNLNDSGVDVTVGLREGSASWKKATDAGLKVAAVSDSVMNADMVMILAPD

SEQ ID NO: 87802 - protein, 104 aa, Unknown
  Bacterial polypetide isolated from the Sargasso Sea
VDLLYEGGMANMRYSISNTAEYGDYSRGPRLITNETKKEMKKILAEIQSGQFTKEWMDEHKSGQTKFKLMRKQQAEHPIEAVGEKLRTLMPWIAESKMVDKSKN

SEQ ID NO: 87803 - protein, 171 aa, Unknown
  Bacterial polypetide isolated from the Sargasso Sea
KDHKEKVENYISIGEKEGAELILDGRNYKIQGYENGYFIGPTIFDKVKENMKVYQDEIFGPVLSVVRVNNYNDALNLVNNHNYGNGTSIYTSDGEISRHFSTNCKIGMVGVNVPIPVPMAFHSFGGWKNSLFGDHAMHGVEGVRFYTKLKTITSRWPNSIKSGPEFSIPTN

SEQ ID NO: 87804 - protein, 84 aa, Unknown
  Bacterial polypetide isolated from the Sargasso Sea
MVSISQRPRIIKKDETKQRMKEVLAEIQSGKFTKEWMDECKNGQKNFLATRAKLAEHSVEKVGAELRAMMPWISKKKLVDSDKK

SEQ ID NO: 87805 - protein, 129 aa, Unknown
  Bacterial polypetide isolated from the Sargasso Sea
MYQWRLPRTRCPTQYAPFFRAPIEDTPVSNYFNSLPLRTQLQELGKCRFMDPAEFEAGVEPLAGKKLVIIGCGAQGFNQGLNLRDSGLNVAYALRKEAIEEKRPSWVKATEAGFQVGTYEEMVPEADMV

SEQ ID NO: 87806 - protein, 64 aa, Unknown
  Bacterial polypetide isolated from the Sargasso Sea
KEVLAEIQSGKFTKEWMDECKNGQKNFLATRAKLAEHPVEKVGAELRAMMPWIGKKKLVDSDKS

SEQ ID NO: 87807 - protein, 48 aa, Unknown
  Bacterial polypetide isolated from the Sargasso Sea
MAQLFYDSDADLGLLNGADVAIIGYGSQGHAHALNLKGSGVDVVVGLY

SEQ ID NO: 87808 - protein, 34 aa, Unknown
  Bacterial polypetide isolated from the Sargasso Sea
MKTYYDKDTNKDLIKNKKVAIFGYGSQGHAHALI

SEQ ID NO: 87809 - protein, 282 aa, Unknown
  Bacterial polypetide isolated from the Sargasso Sea
VSGAAERIGLTLQRCRWLSADVIMVLVGLICGITLFVEVGVVLLIPLAFSIAKKTNTSLLKLAIPLCTALMAVHCVVPPHPAALFVANKLGADIGTVIVYGLLVGLMASLVGGPLYLKFLGNRLPFKPVPAEFSDLKVRDESTLPSLGATLFTVLLPIGLMLVKTVAELNMAKGSTVYTLLEFIGNPITAMFIAVFVAYYILGLRQHIGMGALLTHTENGFGSIANILLIIGAGGAFNAILKSSGLADTLALILSNMHMHPILLAWLVALILHAAVGSATVA

SEQ ID NO: 87810 - protein, 80 aa, Unknown
  Bacterial polypetide isolated from the Sargasso Sea
ETARYGGLTRGPMVMTSDTKDRMKKVLEMIQDGTFNKEWIDNYQHEGKTAFDKYMKDLDNHQIETVGKQMRKMMWPDSTE

SEQ ID NO: 87811 - protein, 71 aa, Unknown
  Bacterial polypetide isolated from the Sargasso Sea
EETKKRMKEVLADIQSGKFTKEWMDECKSGQKNFLATRAKLAEHPVEKVGANLRAMMPWIGKKKLVDSDKK

SEQ ID NO: 87812 - protein, 66 aa, Unknown
  Bacterial polypetide isolated from the Sargasso Sea
MKIFYDDDADISIIQQLKVTIVGYGSQGHAHANNLHESGVDVTVALREGSSSWKKAQEAGLKVAKV

SEQ ID NO: 87813 - protein, 278 aa, Unknown
  Bacterial polypetide isolated from the Sargasso Sea
VEVNVVAGGGAGGYNVGGGGGAGGFVRTEVNVCGSTQYDITVGGGGAGSGDVAPRNGGSGTDSTFGSTTATGGGGGAGYSCGSAGLPGGSGGGARGYTSCSPRAGGSGTACQGNDGGSLSAPKGIGGTGAGGGGAGGAGANSICVGSPKSGCVAGGVGLASPINGTTYAAGGKGMADCSPGSSASSNTGNGGDGGGNPNCAGAGGSGIVVVKELNKASGVWSMQSQYQARSEGTWVLPPVIYTGVNFMVIAGGGSGSANAGGGGGAGGYRASGFGPSP

SEQ ID NO: 87814 - protein, 106 aa, Unknown
  Bacterial polypetide isolated from the Sargasso Sea
LHEGGISNMHYSISNTAEFGDYLTGPRIITEETKKEMKKVLEDIQSGDFADKFLDDCRQSNDGSGGPFLKNNREKTKEHSIESVGKELRSKMKFLSEKKLVDKDKN

SEQ ID NO: 87815 - protein, 36 aa, Unknown
  Bacterial polypetide isolated from the Sargasso Sea
MKIYYDEDANLEIIKNLKVAIIGYGSQGHAHANNLH

SEQ ID NO: 87816 - protein, 128 aa, Unknown
  Bacterial polypetide isolated from the Sargasso Sea
NIQDGTFSNTPLNFAGIYGLTEIANALVNAGADLNLVNADNFTPLCNAAAWGHTEVVTILLDAGADISAKCFETQIGLSVAVAIAISAPYSDYIKALYVDHGEKYNIPYDEAKIIAGREKVTELLSSR

SEQ ID NO: 87817 - protein, 89 aa, Unknown
  Bacterial polypetide isolated from the Sargasso Sea
INGMWRRVSETARYGGLTRGPMVMTSDTKENMKKVLTMIQDGTFNKEWIDNYQNEGKAAFDKYMKDLDGHQIETVGKQMRKMMWPDSTE

SEQ ID NO: 87818 - protein, 48 aa, Unknown
  Bacterial polypetide isolated from the Sargasso Sea
MDECKNGQKIFLATRAKLAEHSVEKVGAELRAMMPWISKKKLVDSDKS

SEQ ID NO: 87819 - protein, 127 aa, Unknown
  Bacterial polypetide isolated from the Sargasso Sea
MKQFAGGVAVITGGASGFGKEFAKIGAGLGMKLVLADIQQDALDAAVAEFSAQGVEVIGLRVDVSKVEDVQALADAAIKAFGKVNLLFNNAGVGAGGLIWENTERDWDWVLGVNLHGVIHGVRSSRR

SEQ ID NO: 87820 - protein, 107 aa, Unknown
  Bacterial polypetide isolated from the Sargasso Sea
KLIVDLLYEGGMANMRYSISNTAEYGDYSRGPRLITDDTKKEMKKILAEIQSGQFTKEWMDEHKSGQTKFKLMRKQQAEHSIEAVGKKLRTLMPWIAESKMVDKSKN

SEQ ID NO: 87821 - protein, 131 aa, Unknown
  Bacterial polypetide isolated from the Sargasso Sea
MIALFKAGVELAYEIMVNNGIKEESAYYESLHELPLIANLVARKKLYEMNNIISDTAEYGCYLFNNDAIPLLKDFFNNIDVDIIGTNALSISDNPVDDERLKVINDNVRDHSIEKIGSELRQHMTSMKNIH

SEQ ID NO: 87822 - protein, 31 aa, Unknown
  Bacterial polypetide isolated from the Sargasso Sea
LAEHPVEKVGAELRAMMPWIGKKKLVDSDKS

SEQ ID NO: 87823 - protein, 35 aa, Unknown
  Bacterial polypetide isolated from the Sargasso Sea
MKTYYDKETNLNLIKNKKGAIFGYGSQGHAHALNL

SEQ ID NO: 87824 - protein, 80 aa, Unknown
  Bacterial polypetide isolated from the Sargasso Sea
MRVYYDRDADINLIKNKKIVIVGYGSQGHAHAMNLRDTGINDLAIALREGSPSREKATKANFKVMTPAEASSWADILMIL

SEQ ID NO: 87825 - protein, 84 aa, Unknown
  Bacterial polypetide isolated from the Sargasso Sea
MVKYQSGPRIINKEETKKRMKEVLSDIQSGKFTKEWMDECKNGQKNFLATRAKLAEHSVEKVGAELRAMMPWIGKKKLVDSDKS

SEQ ID NO: 87826 - protein, 65 aa, Unknown
  Bacterial polypetide isolated from the Sargasso Sea
MSTNDLPQTKIAVIGYGSQGRAHALNLRESGFDVVVGLRPGGPTEVKAQADGFTVKAPAEAGRTP

SEQ ID NO: 87827 - protein, 33 aa, Unknown
  Bacterial polypetide isolated from the Sargasso Sea
MATLYYDTDADLGLLSGKTVAIIGYGSQGHAHA

SEQ ID NO: 87828 - protein, 53 aa, Unknown
  Bacterial polypetide isolated from the Sargasso Sea
FAREWMLENKIGQIGFRAVRSRESEHPIEEVGRKLRGMMPWISENKLVDKDKN

SEQ ID NO: 87829 - protein, 36 aa, Unknown
  Bacterial polypetide isolated from the Sargasso Sea
MKTYYDKDTNKELIRDKKVAIFGYGSQGHAHALNLK

SEQ ID NO: 87830 - protein, 97 aa, Unknown
  Bacterial polypetide isolated from the Sargasso Sea
MSKIYYNKDADIKIIKKKTIAIIGYGSQGHAHARNLHDSGVKVMVGLRKNSAFWKRAEKDGLRVVTVPEAAKQADIMMILIPDDKQREMYDNDIAPH

SEQ ID NO: 87831 - protein, 39 aa, Unknown
  Bacterial polypetide isolated from the Sargasso Sea
MYYDKDADLGLLSDKTVAVIGYGSQGHAHALNLHDSGVK

SEQ ID NO: 87832 - protein, 64 aa, Unknown
  Bacterial polypetide isolated from the Sargasso Sea
GPHEDILEEIQDGTFARNWIAENEAGKPQYEAWLKADRESQIEQVGARLRERMAWLNTPKAEAA

SEQ ID NO: 87833 - protein, 92 aa, Unknown
  Bacterial polypetide isolated from the Sargasso Sea
FSAEFGDYVSGPKVINSDTKEEMRAILKRIQSGEFANEFMSDCRESNDGKGGPRMKEYRQQTSEHSIEKVGSELRAMMPWIAQNKIVDKAKN

SEQ ID NO: 87834 - protein, 83 aa, Unknown
  Bacterial polypetide isolated from the Sargasso Sea
MAAKVYYDKDADSSYIADKTVAIIGYGSQGHAHALNMKDNGVKVIIGLYEGSSSWSKAEDDGFEVMTTSEATENADIIMMLLP

SEQ ID NO: 87835 - protein, 34 aa, Unknown
  Bacterial polypetide isolated from the Sargasso Sea
MKVYYDHDCDINLLKKKNIVILGYGSQGHAHALN

SEQ ID NO: 87836 - protein, 153 aa, Unknown
  Bacterial polypetide isolated from the Sargasso Sea
MKNYFNSLSFREKLMQLGKCRFMDSSEFQNGVDFLKYKKIAIVGCGAQGLHQGLNMRDSGLDISYALRQSSIDSKRQSFINASSNDFNVGNFDEIIPNSDLVINLTPDKNHTPVVEQLMPIMKKNSILSYSHGFNIVEEGIKVSRRYNCNNGC

SEQ ID NO: 87837 - protein, 409 aa, Unknown
  Bacterial polypetide isolated from the Sargasso Sea
MEFTVVSIIVFCGITMCLVLLLSLAEKKLIPQGDVSILINDEPDKAINVGAGGTLLGALSGQKVFLPSACGGGGTCAMCKCQVFEGGGDILPTETSHISRPEAKESWRLACQVKVKENMKIHVPDEVFSVRKWDCTVKSNTDVATFIREFVLELPPGENLDFEAGGYIQIDIPEYHDLGFKGFDIDKEYHEDWDKYNIWGLVANNDEPEFRAYSMANHPAEGNKVMLNVRIATPPPALWNDVPPGIASSYIYSLKPGDPVTISGPFGEFFIKDTDREMVYIGGGAGMAPMRSHLFHLFHTLKTGRKVSFWYGARSLREMFYDDEFKRIEKEFPNFSYHVALSEPLPEDNWTGPTGFIHQVAHDNYLSNHDDPTEIEYYMCGPPPMIKAVEDMLDELGVEKEMIAFDSFG

SEQ ID NO: 87838 - protein, 70 aa, Unknown
  Bacterial polypetide isolated from the Sargasso Sea
ETKKRMKEVLADIQSGKFTKDWMDECKNGQKNFLKTREKLADHPVEKVGAVLRAMMPWISKKKLVDSDKK

SEQ ID NO: 87839 - protein, 53 aa, Unknown
  Bacterial polypetide isolated from the Sargasso Sea
MANYFNTLSLRQQLDQLGRCRFMARDEFADGCQFLKGKKIVIVGCGAQGLNQG

SEQ ID NO: 87840 - protein, 71 aa, Unknown
  Bacterial polypetide isolated from the Sargasso Sea
EETKKRMKEVLAEIQSGKFTKEWMDECKNGQKNFLATRAKLAEHSVEKVGAELRAMMPWISKKKLVDSDKK

SEQ ID NO: 87841 - protein, 99 aa, Unknown
  Bacterial polypetide isolated from the Sargasso Sea
LIVDMIQRYGINGMWRRVSETARYGGLTRGPMVMTSDTKENMKKVLTMIQDGTFNKEWIDNYQNEGKAAFDKYMKDLDGHQIETVGKQMRKMMWPDSTE

SEQ ID NO: 87842 - protein, 389 aa, Unknown
  Bacterial polypetide isolated from the Sargasso Sea
MTRKKPRILNKIYALEDLEVHAKKHLPKPVFGYVAGGAERNHTLRNNAEDFANYKFVPNILRNVSKRSTKTEIFGRQWDAPFGISPMGVSALAAYRGDIVLADAAQKMNIPMVISGSSLIPMEEIIKLAPGTWFQAYLPGEHDKVENLVLRVKKAGFETLVLTVDVAVLAGRENNLRNGFSTPLRPSFSLLYQGLTHPNWSMNTFLKTIFKHGMPHFENFLAERGEPVFSASINRDFGKRSNLNWEHLKQIRKLWDGNLIVKGILNKGDTLKAINLGADAIIISNHGGRQLDSAISSIKALENIRPHVKGDCKLFVDSGFRRGTDIIKALALGADFVFIGRPFLYAASIAGIAGVTHTINLLKEEIDRDMALLGVNEIDELGLELLQKY

SEQ ID NO: 87843 - protein, 55 aa, Unknown
  Bacterial polypetide isolated from the Sargasso Sea
MQKILKDIQDGTFAKNFVEECDRNKPLMTKLREENSKHEIEKVGKGLRSMFSWLK

SEQ ID NO: 87844 - protein, 127 aa, Unknown
  Bacterial polypetide isolated from the Sargasso Sea
MSSPKNLEYKKTSFLSKSNSSFIEEMYIKYIEKDPSLPASWENYFNTLNEDLNLITKEIEGPIWKKNKKKITSKTNIQSTEKIESTENIEKYKAESIKAIALIRAYRIRGHLIANLDPLGLMERKYL

SEQ ID NO: 87845 - protein, 34 aa, Unknown
  Bacterial polypetide isolated from the Sargasso Sea
MKVFYEKDADLKLIKNKKVAIIGYGSQGHAHANN

SEQ ID NO: 87846 - protein, 101 aa, Unknown
  Bacterial polypetide isolated from the Sargasso Sea
MFYEKDTDVNLIKDKKIAIFGYGSQGHAHALNLKDSGVNEVVVALREGSSSIKKAESKGLKVMNLSDAAEWADVVMILTPDELQAQIYKNHMNKELKKEQV

SEQ ID NO: 87847 - protein, 83 aa, Unknown
  Bacterial polypetide isolated from the Sargasso Sea
MQVYYDKDANIDIIKDKKVVIVGYGSQGHAHANNLKDSGGNVTVALRKESSSWAKAEAAGLNVQEVSEAVQDADMVMILMPDE

SEQ ID NO: 87848 - protein, 120 aa, Unknown
  Bacterial polypetide isolated from the Sargasso Sea
MFYEKDTDVNLIKDKKVAIFGYGSQGHAHALNLKDSGVKEVVVALRDGSASKTKAESKGLKVMNLSDAAEWADVVMILTPDELQATIYKNHIEQRVREGTSIAFAHGLNIHYDLIKARKD

SEQ ID NO: 87849 - protein, 54 aa, Unknown
  Bacterial polypetide isolated from the Sargasso Sea
MKIYYDEDANLEIIKNLKVTIIGYGSQGHAHANNLRDSGVDITVGLREGSSSWK

SEQ ID NO: 87850 - protein, 81 aa, Unknown
  Bacterial polypetide isolated from the Sargasso Sea
MKVYYEKDADLNLVKTKKIAVYGYGSQGHAHALNLKDSGASNVVVALRDGSSSAKKAEAERFKVMSMSDAAEWADIMMMLI

SEQ ID NO: 87851 - protein, 84 aa, Unknown
  Bacterial polypetide isolated from the Sargasso Sea
MHRVLYKKLEIERRRKMAKLYYDKDIDDQILRNKTISVIGYGSQGHAHAQNLKDSGFNVIIGLYEGSKSKDQAEHDGFEVYSIS

SEQ ID NO: 87852 - protein, 68 aa, Unknown
  Bacterial polypetide isolated from the Sargasso Sea
MYYESDIDKGLIKSKKIAVLGYGSQGHAHSLNLKDSGFDVVVGLYEGSKSKEKAETAGLNVLSNSEAV

SEQ ID NO: 87853 - protein, 102 aa, Unknown
  Bacterial polypetide isolated from the Sargasso Sea
MRVYYDRDADINLIKDKKIVIVGYGSQGHAHAMNLRDSGIDNVAIALREGSLSRKKAEQAGFKVMSPSESASWADIIMMLTPDELQSEIYNNEIAANIKDGT

SEQ ID NO: 87854 - protein, 121 aa, Unknown
  Bacterial polypetide isolated from the Sargasso Sea
MKIYYDEDAKIEIIKDMKVSIIGYGSQGHAHANNLNDSGVDITVGLREGSSSWKKAEDAGLKVKSVSDSVTDADMVMILAPDEFQKGIYENQIKPNLKPNAILGFAHGFNKHFEKIIPEKG

SEQ ID NO: 87855 - protein, 64 aa, Unknown
  Bacterial polypetide isolated from the Sargasso Sea
MFYEKDADVNLIKSKKVAIFGYGSQGHAHALNLKDSGVKEIVVALREGSSSAAKAESKGLKVMN

SEQ ID NO: 87856 - protein, 41 aa, Unknown
  Bacterial polypetide isolated from the Sargasso Sea
FAHGFNIHFGKIKPTDDISVVMIAPKGPGHTVRSTYLSGGG

SEQ ID NO: 87857 - protein, 105 aa, Unknown
  Bacterial polypetide isolated from the Sargasso Sea
MKTYYDKDTNIDLIKNKKVAIFGYGSQGHAHALNLKDSGVKEVVVALREGSSSIKKAESAGLKVMSLSDAAAWADVVMMLTPDELQSEIYKNHIEQRMKEGTSLA

SEQ ID NO: 87858 - protein, 83 aa, Unknown
  Bacterial polypetide isolated from the Sargasso Sea
MKIFYEKDTNTDLIKDKKIAIFGYGSQGHAHALNLKDSGVKEVVVALRDGSASKVKAESKGLKVMNLSDAAEWADVVMILTPR

SEQ ID NO: 87859 - protein, 79 aa, Unknown
  Bacterial polypetide isolated from the Sargasso Sea
MKIFYEKDTNSNLIKDKKIAIFGYGSQGHAHALNLKDSGVKEVVVALRDGSASKIKAESKGLKVMNLSDAAEWADVVMI

SEQ ID NO: 87860 - protein, 74 aa, Unknown
  Bacterial polypetide isolated from the Sargasso Sea
MKMFYEKDTDVNLIKNKKIAIFGYGSQGHAHALNLKDSGVKEVVVALRDGSASKAKAESKGKKVMNLSDAAEWA

SEQ ID NO: 87861 - protein, 117 aa, Unknown
  Bacterial polypetide isolated from the Sargasso Sea
MAYFECLHEVKLIVDLLYEGGMANMRYSISNTAEYGDYSRGPRLITDETKKEMKKILSEIQSGQFAKEWMDEHRSGQIKFKKMRKDQSVHPIEAVGEKLRTLMPWIAEGKMVDKSKN

SEQ ID NO: 87862 - protein, 96 aa, Unknown
  Bacterial polypetide isolated from the Sargasso Sea
MKTYYDKDTDKDIIKNKKVAIFGYGSQGHAHALNLKDSGVKEVVVALREGSSSIKKAESAGLKVMTLSDAAAWADVVMMLTPDELQSEIYKNHIEQ

SEQ ID NO: 87863 - protein, 42 aa, Unknown
  Bacterial polypetide isolated from the Sargasso Sea
MFYEKDTNVDLIKDKKVAIFGYGSQGHAHALNLRDSGVKEVV

SEQ ID NO: 87864 - protein, 133 aa, Unknown
  Bacterial polypetide isolated from the Sargasso Sea
MNYFNTLPLRLQLEQLGKCRFMEQSEFSDGVNKLKGAKIVIVGCGAQGLNQGLNMRDSGLDISFTLREAAISEKRASWKNATENGFLVGTYQDLVPSADLVLNLTPDKQHTAVVNQIMPLMKKGACLGYSHGS

SEQ ID NO: 87865 - protein, 42 aa, Unknown
  Bacterial polypetide isolated from the Sargasso Sea
MQVYYDKDADLEIIKNKKVVIVGYGSQGHAHANNLKDSGGNV

SEQ ID NO: 87866 - protein, 46 aa, Unknown
  Bacterial polypetide isolated from the Sargasso Sea
MFYEKDADVDLIKNKKIAIFGYGSQGHAHALNLKDSGVKEIVVALR

SEQ ID NO: 87867 - protein, 93 aa, Unknown
  Bacterial polypetide isolated from the Sargasso Sea
MYYEKDTDVNLIKDKKVAIFGYGSQGHAHALNLRDSGVKEVVVALRDGSSSAAKAESKGLKVMNLSDAAEWADIVMILTPDEIAASIYKNHIE

SEQ ID NO: 87868 - protein, 101 aa, Unknown
  Bacterial polypetide isolated from the Sargasso Sea
MKTYYDKDTNLNLIKDKKVAIFGYGSQGHAHALNLKDSGVKEVVVALREGSSSIKKAESAGLKVMSLSDAAAWADVVMMLTPDELQSEIYKNHIEQRRKRE

SEQ ID NO: 87869 - protein, 50 aa, Unknown
  Bacterial polypetide isolated from the Sargasso Sea
MKYLNNQKEIIMKMYYEKDTDVNLIKNKKVAIFGYGSQGHAHALNLRDSG

SEQ ID NO: 87870 - protein, 123 aa, Unknown
  Bacterial polypetide isolated from the Sargasso Sea
MFYEKDTDANLIKDKKIAIFGYGSQGHAHALNLKDSGVKEVVVALREGSSSKTKAESKGLKVMNLSDAAEWADVVMILTPDELQATIYKNHIEQRVKEGTSIAFAHGLNIHYDLIKARKDLDV

SEQ ID NO: 87871 - protein, 311 aa, Unknown
  Bacterial polypetide isolated from the Sargasso Sea
EEYLRGFGVPTFIAVHPENDLNGIGFDAAKAYAVSLGSNKAGVLESSFVAEVKSDLMGEQTILCGMLQTGSILCFNRMKELGIDPNYSAKLIQHGWETITESLKHGGITNMMDRLSNHGKVKVFELSEELKLILAPLFIKHMDNVLSGSFSETMMKDWENDDKELLSWREQTSKTDFEMTEPTSNEISEQEYFNNGLLMIAIVKAGVELAYETMVEAGIKEESAYYESLHELPLIANLISRKKLYEMNNIISDTAEYGCYLFNNEAIPLLSKFFDKVETDIIGSESISNSTDSVDNKKLIEIKRTIRYHSI

SEQ ID NO: 87872 - protein, 64 aa, Unknown
  Bacterial polypetide isolated from the Sargasso Sea
MKMFYEKDTDANLIKDKKIAIFGYGSQGHAHALNLKDSGVKEVVVALREGSSSIAKAESKGLKV

SEQ ID NO: 87873 - protein, 47 aa, Unknown
  Bacterial polypetide isolated from the Sargasso Sea
MKMFYEKDTDVNLIKDKKIAIFGYGSQGHAHALNLKDSGVKEVCCSL

SEQ ID NO: 87874 - protein, 78 aa, Unknown
  Bacterial polypetide isolated from the Sargasso Sea
LIKNKKMAIFGYGSQGHAHALNLKESGVKEIVVALREGSSSVAKAESKGLKVMNLSEAAAWAEVVMILTPDELQAENY

SEQ ID NO: 87875 - protein, 160 aa, Unknown
  Bacterial polypetide isolated from the Sargasso Sea
ERRTSKTDFEKTDPTSDEISEQEYFDNGILMIALVKAGVELAYETMVEAGIKEESAYYESLHELPLIANLVSRKKLYEMNNIISDTAEYGCYLFNNDAIPLLSKFFDKVEADMIGSDSISKSSSSVDNKKLIEINETIRYHSIEIIGDELRQYMTSMKSV

SEQ ID NO: 87876 - protein, 51 aa, Unknown
  Bacterial polypetide isolated from the Sargasso Sea
MKMFYEKDTDVNLIKNKKIAIFGYGSQGHAHALNLKDSGVKEVVVALRDGS

SEQ ID NO: 87877 - protein, 186 aa, Unknown
  Bacterial polypetide isolated from the Sargasso Sea
MENYFNTLSFREKLMQLGKCRFMSSSEFSNGVEFLKNKKIAIVGCGAQGLHQGLNMRDSGLDISYALRQSSIDSKRQSFVNASTNNFNVGNFEEIIPNSDLVINLTPDKNHTPVVEQLMPLMKKNSILSYSHGFNIVEEGIKVRDDITVIMVAPKSPGSEVREEYLRGFGSPTLIAVHPENDANGI

SEQ ID NO: 87878 - protein, 86 aa, Unknown
  Bacterial polypetide isolated from the Sargasso Sea
MFYEKDADVNLIKTKKVAIFGYGSQGHAHALNLKDSGVKDIVVALREGSSSAAKAESKGLKVMNLSDAAERADVVMILTPDELTSR

SEQ ID NO: 87879 - protein, 51 aa, Unknown
  Bacterial polypetide isolated from the Sargasso Sea
MTQLFYDTDADLSLLNNKTIAIIGYGSQGHAHALNLKDSGMDVIVGLYKGS

SEQ ID NO: 87880 - protein, 32 aa, Unknown
  Bacterial polypetide isolated from the Sargasso Sea
MAYFETLHEVKLIVDLIYEGGIANMNYSISNT

SEQ ID NO: 87881 - protein, 110 aa, Unknown
  Bacterial polypetide isolated from the Sargasso Sea
MFYEKDTDVNLIKSKKIAIFGYGSQGHAHALNLKDSGVKEVVVALRDGSSSKAKAESKGLKVMNLSDAAEWADVVMILTPDELQATIYKNHIEPRVRRRNFIAFAHGLNI

SEQ ID NO: 87882 - protein, 284 aa, Unknown
  Bacterial polypetide isolated from the Sargasso Sea
IAVHPENDLNGIGFDAAKAYAVSLGSNKAGVLESSFVAEVKSDLMGEQTILCGMLQTGSILCFNRMKELGVDPNYSAKLIQHGWETITESLKHGGITNMMDRLSNPGKVKVFELSEELKLILAPLFIKHMDNVLSGSFSETMMKDWENDDKELLNWREQTSKTDFEMTEPTSDEISEQEYFNNGLLMIAIVKAGVELAYETMVEAGIKEESAYYESLHELPLIANLISRKKLYEMNSIISDTAEYGCYLFNNEAIPLLSKFFDKVETDIIGSDSISNSTDSVDN

SEQ ID NO: 87883 - protein, 121 aa, Unknown
  Bacterial polypetide isolated from the Sargasso Sea
MFYEKDTDVNLIKKKKIAIFGYGSQGHAHALNLRDSGVKEVVVALRDGSASKAKAESKGLKVMNLSDAAEWADVVMVLTPDELQATIYKNHIEQRVREGTSIAFAHGLNIHYDLIKARKDL

SEQ ID NO: 87884 - protein, 97 aa, Unknown
  Bacterial polypetide isolated from the Sargasso Sea
IANMNYSISNTAEYGEYTSGPRIIKKEETKKRMKEVLDDIQSGKFTKEWMDECKNGQKNFLKTREKLAEHPVEKVGTRLRAMMPWIAKKKLVDSDKK

SEQ ID NO: 87885 - protein, 104 aa, Unknown
  Bacterial polypetide isolated from the Sargasso Sea
DLIYEGGIANINYSISNTAEYGEYKSGPRIINKEETKKKMKEVLSDIQSGKFTKEWMEECKNGQKNFLATRAKLAEHSVEKVGAELRAMMPWISKKKLVDSDKS

SEQ ID NO: 87886 - protein, 63 aa, Unknown
  Bacterial polypetide isolated from the Sargasso Sea
MRVYYDRDADLNLIKDKKISIVGYGSQGHAHAMNLRDSGIENVSIALREGSNSRSKAEQANSK

SEQ ID NO: 87887 - protein, 57 aa, Unknown
  Bacterial polypetide isolated from the Sargasso Sea
MFYEKDTNVNLIKDKKVAIFGYGSQGHAHALNLKDSGVKEVVVALREGSSSIEKLNL

SEQ ID NO: 87888 - protein, 131 aa, Unknown
  Bacterial polypetide isolated from the Sargasso Sea
MVTKIIYDDSIDQDLIKSKKVTVIGFGSQGHAHALNLHESGVDVTVGLRESSESFKRASDMGLKVKNVEDATSGADVVMLLLPDQLMADIYNSDIAPHMKDGSTLLFAHGFNIHFGEIIPREDISIGMVAP

SEQ ID NO: 87889 - protein, 90 aa, Unknown
  Bacterial polypetide isolated from the Sargasso Sea
MKIFYEKDTNSNLIKDKKIAIFGYGSQGHAHALNLKDSGVKEVVVALRDGSGSKAKAESKGLKVMNLSDAAEWADVVMILTPDELQAEIY

SEQ ID NO: 87890 - protein, 128 aa, Unknown
  Bacterial polypetide isolated from the Sargasso Sea
MFYEKDTDTNLIKGKKIAIFGYGSQGHAHALNLRDSGVKDVVVALRDGSSSKSKAESKGLKVMNLSDAAEWADVVMILTPDELQASIYKNHIEQRVREGTSIAFAHGLNIHYDLIKARKDLDVFMVAP

SEQ ID NO: 87891 - protein, 66 aa, Unknown
  Bacterial polypetide isolated from the Sargasso Sea
MKMFYEKDTDVNLIKDKKIAIFGYGSQGHAHALNLKDSGVKEVVVALRDGSSSIPKAESKGLKVMN

SEQ ID NO: 87892 - protein, 116 aa, Unknown
  Bacterial polypetide isolated from the Sargasso Sea
AYFECLHEVKLIVDLLYEGGMANMRYSISNTAEYGDYSRGPRLITDETKKEMKKILSEIQSGQFTKEWMQEHKSGQTKFKVMRNQQAEHPIEAVGEKLRTLMPWIAEGKMVDKSKN

SEQ ID NO: 87893 - protein, 106 aa, Unknown
  Bacterial polypetide isolated from the Sargasso Sea
MFYEKDTDVNLIKSKKVAIFGYGSQGHAHALNLKDSGVKEVVVALRDGSSSKEKAESKGLKVMNLSDAAEWADIVMILTPDELQASIYKNHIEQRVKEGTSVAFAP

SEQ ID NO: 87894 - protein, 179 aa, Unknown
  Bacterial polypetide isolated from the Sargasso Sea
EFSKTMMEDWKNGDANLLKWRAETGETAFEKTEPTNEPIREQEFFDNGVLLVALVRAGVELAFETMIDAGIKDASAYYESLHEAPLIANTIARKKLFEMNRIISDTAEYGCYLFDHACKPLLSDFFNQIEKKHIGNLFSNNNDADNQTLIKINDTIRNHPVEIIGKELRASMTAMKKIV

SEQ ID NO: 87895 - protein, 117 aa, Unknown
  Bacterial polypetide isolated from the Sargasso Sea
MLYEKDAQVDLIKSKKVAIFGFGSQGHAHALNLKDSGVKEVVVALREGSTSKKKAEAQGLRVMSLSDAAEWADILMMLTPDELQSKIYKNHIEQRMRQGSTLAFAHGLNIHFNLINA

SEQ ID NO: 87896 - protein, 67 aa, Unknown
  Bacterial polypetide isolated from the Sargasso Sea
VVDDSVKENMKEILSQIQDGTFAREWISENDEGRPSFNRLRKDNADHPIEKVGKELRDMMTFLTDSD

SEQ ID NO: 87897 - protein, 112 aa, Unknown
  Bacterial polypetide isolated from the Sargasso Sea
MNVLYDRDAKEGLIKEKKVAIIGYGSQGHAHALNLSESGVNVCVGLRKNGASWAKAEKAGMVVKEVHEAVRGADIVMLLMPDETISTVYLKHIESEMKEGSCLGFAHGFNIH

SEQ ID NO: 87898 - protein, 100 aa, Unknown
  Bacterial polypetide isolated from the Sargasso Sea
MFYEKDTDVNLIKKKKIAIFGYGSQGHAHALNLKDSGVKEVVVALRDGSASKSKAESKGLKVMNLSDAAEWADVVMVLTPDELQATIYKNHIEQRVRQGT

SEQ ID NO: 87899 - protein, 93 aa, Unknown
  Bacterial polypetide isolated from the Sargasso Sea
MFYEKDTDANLIKDKKIAIFGYGSQGHAHALNLKDSGVKEVVVALREGSSSIAKAESKGLKVMNLSDAAEWADVVMILTPDELQATIYKNHIE

SEQ ID NO: 87900 - protein, 68 aa, Unknown
  Bacterial polypetide isolated from the Sargasso Sea
DEFQKGVLEKSIKPNLESNAILAFAHGFNIHFKKIVPSETNTVIMIAPKAPGHTVRSTYLNGGGVPSL

SEQ ID NO: 87901 - protein, 206 aa, Unknown
  Bacterial polypetide isolated from the Sargasso Sea
MVAPKGPGPTLRNRFVKGQGIPALVGVHQTGEANAEEHLQRWGTGIGCARAALIPSSFAEECETDLFGEQAILCGGVLALMQASFETLQDAGYSDEVAYIECIHELKQVVDLLYTQGPAAMHKAISNTAEFGAFVAAERLDSKELRGQLQALLQDIQSGAFAQRFAEDAEAGHPWFNAKRSAHEDHAIEAASEKVRQTMPWLKDDA

SEQ ID NO: 87902 - protein, 44 aa, Unknown
  Bacterial polypetide isolated from the Sargasso Sea
KNGYETLVEAGYEPEMAYFETVHEVKLIVDLIYEGGVANMYYSI

SEQ ID NO: 87903 - protein, 92 aa, Unknown
  Bacterial polypetide isolated from the Sargasso Sea
RYSISNTAEYGDVTRGPRVVTPEVKAQMKKILSEIQSGEFAREWMEESRSGGANFQGLRQRGREHQIEAVGEGLRAMMPWIQKGKLVDKTRN

SEQ ID NO: 87904 - protein, 113 aa, Unknown
  Bacterial polypetide isolated from the Sargasso Sea
MFYEKDTDVNLIKNKKIAIFGYGSQGHAHALNLKDSGVKEVVVALRDGSASKTKAESKGLNVMNLSDAAEWADVVMILTPDELQATIYKNHIEQRVKEGTSIAFAHGLTFIMI

SEQ ID NO: 87905 - protein, 127 aa, Unknown
  Bacterial polypetide isolated from the Sargasso Sea
MFYEKDTNVNLIKNKKIAIFGYGSQGHAHALNLKDSGVKEVVVALRDGSASKAKAESKGLKVMNLSDAAEWADVVMILTPDELQATIYKNHIEQRVREGTSIAFAHGLNIHYDLIKARKDLDVFMVA

SEQ ID NO: 87906 - protein, 71 aa, Unknown
  Bacterial polypetide isolated from the Sargasso Sea
MKMFYEKDTDVNLIKDKKIAIFGYGSQGHAHALNLRDSGVKEVVVALREGSSSIAKAESKGLKVMNLSDAA

SEQ ID NO: 87907 - protein, 92 aa, Unknown
  Bacterial polypetide isolated from the Sargasso Sea
YSISNTAEYGEYVSGPRIINKEETKKRMKEVLEDIQSGKFTKQWMDECKNGQKNFLKTREELAKHSIETVGTKLRAMMPWIGKKKLVDSDKK

SEQ ID NO: 87908 - protein, 40 aa, Unknown
  Bacterial polypetide isolated from the Sargasso Sea
MQVYYDKDCDLSIIQGKKVAIIGYGSQGHAHACNLKDSGV

SEQ ID NO: 87909 - protein, 106 aa, Unknown
  Bacterial polypetide isolated from the Sargasso Sea
MFYEKDTDVNLIKEKKIAIFGYGSQGHAHALNLKDSGVKEVVVALRDGSASKAKAESKGLKVMNLSDAAEWADVVMILTPDELQATIYKNHIEQRVREGTSIAFAH

SEQ ID NO: 87910 - protein, 132 aa, Unknown
  Bacterial polypetide isolated from the Sargasso Sea
MRVYYDRDADINLIKDKKIVIVGYGSQGHAHAMNLRDSGIEDVAIALREGSPSRKKAENAGFKVMTPSESASWADIIMMLTPDELHSEIYNNEIAANIKDGTALAFAHGLNIHFDLIKPNANIDVIMMAPKG

SEQ ID NO: 87911 - protein, 253 aa, Unknown
  Bacterial polypetide isolated from the Sargasso Sea
MIYKKMIELGYESDFSIKLIQNGWETITEELKHNGIKGMMNRLDDSSRYVAHKLSDELKKIMTPLFDKHMSDILDGTFSNDMMKDWINNDHKLLRWREDTGKSKFELNSAGSMKIKNQEYFDKGILMVSFVKSGVELAFETMVNNGIIDESAYYESLHELPLIANLVARKKLYEMNRIISDTAEYGCYLFNNSCIPLLENFMHKIKKHQIGSVCSIEFDKNELSSFDKKTYSHPIEHIGETLRNNMKNMKKLI

SEQ ID NO: 87912 - protein, 50 aa, Unknown
  Bacterial polypetide isolated from the Sargasso Sea
MKTYYDKDTNKDLIKNKKVAIFGYGSQGHAHALNLKDSGVKEVVVALREG

SEQ ID NO: 87913 - protein, 84 aa, Unknown
  Bacterial polypetide isolated from the Sargasso Sea
MFYEKDADVNLIKSKKVAIFGYGSQGHAHALNLKDSGVKEIVVALREGSSSAAKAESKGLKVMNLSDAAEWADVVMILTPDELQ

SEQ ID NO: 87914 - protein, 48 aa, Unknown
  Bacterial polypetide isolated from the Sargasso Sea
MKVYYEKDAKLDLIKSKKIAIYGYGSQGHAHALNLNDSGASDVVVALR

SEQ ID NO: 87915 - protein, 82 aa, Unknown
  Bacterial polypetide isolated from the Sargasso Sea
MKTFYEKDANVNLIKNKKVAIFGYGSQGHAHALNLKDSGVKEVVVALREGSSSVKKAESEGLKVMTLSDAAAWADVVMMLTP

SEQ ID NO: 87916 - protein, 99 aa, Unknown
  Bacterial polypetide isolated from the Sargasso Sea
MKIYYDDDADIEIIKKLNVTIIGYGSQGHAHANNLKDSGVNVTVALREGSSSWNKAVEAGLNVMPVAESIQNADLVMMLAPDEFQKGIYDKNIQSNLKS

SEQ ID NO: 87917 - protein, 41 aa, Unknown
  Bacterial polypetide isolated from the Sargasso Sea
MFYEKDTDVNLIKKKKIAIFGYGSQGHAHALNLRDSGVKEV

SEQ ID NO: 87918 - protein, 56 aa, Unknown
  Bacterial polypetide isolated from the Sargasso Sea
MKMFYEKDTDVNLIKDKKIAIFGYGSQGHAHALNLKDSGVKEVVVALRDGSSSIPK

SEQ ID NO: 87919 - protein, 60 aa, Unknown
  Bacterial polypetide isolated from the Sargasso Sea
MKVYYEKDSDIDLIKSKKVAIYGYGSQGHAHALNLSDSGVKEVVVALRDGSSSAVKAEAE

SEQ ID NO: 87920 - protein, 65 aa, Unknown
  Bacterial polypetide isolated from the Sargasso Sea
EWADVCMILTPDELQATIYKNHIEQRIKEGTSLAFAHGLNIHYDLIKARKDLDVFMVAPKGPGHL

SEQ ID NO: 87921 - protein, 60 aa, Unknown
  Bacterial polypetide isolated from the Sargasso Sea
MKMFYEKDTDVNLIKDKKIAIFGYGSQGHAHALNLKDSGVKEVVVALRDGSSSKAKADLK

SEQ ID NO: 87922 - protein, 81 aa, Unknown
  Bacterial polypetide isolated from the Sargasso Sea
MFYEKDTDANLIKDKKIAIFGYGSQGHAHALNLKDSGVKEVVVALREGSSSIEKAESKGLKVMNLSDAAEWAEVVMILTPR

SEQ ID NO: 87923 - protein, 66 aa, Unknown
  Bacterial polypetide isolated from the Sargasso Sea
KAEMKKVLSEIQDGTFTKEWMAEHKSGQIKFKQMRDQGAKHQIEEVGAKLRSMMPWIASNKLVKDI

SEQ ID NO: 87924 - protein, 95 aa, Unknown
  Bacterial polypetide isolated from the Sargasso Sea
MRVYYDRDADINLIKNKKIAIVGYGSQGHAHAMNLRDSGVENVTIALREGSATKEKAENANFQVMTPNEASSWADIIMMLTPDEMQSDIYEKEIA

SEQ ID NO: 87925 - protein, 143 aa, Unknown
  Bacterial polypetide isolated from the Sargasso Sea
MSTKIIYDESIDIEMIKSKNVSVIGFGSQGHAHALNLHDSGVNVTVGLREDSSSFNRAKEMGLNVDNLENATKNADIVMLLLPDQLMADVYEKDIAPFMKDNSTLFFAHGFNIHFGEIVPREDISIAMIAPKGPGHLLRRTYE

SEQ ID NO: 87926 - protein, 159 aa, Unknown
  Bacterial polypetide isolated from the Sargasso Sea
RADWIMVLLPDEFQKEVYDKEIAPHLSAGKVLSFAHGFNIRFALIKPPADVDVVMIAPKGPGHTVRWDTRTPRACLPCLPSSKTPAAKPAAWPWLMPKELAAPAPASLKPTSKRRPKPIYLASKPCSAVASLSWSKLVLKPSWKLAISRNWPTSSASTR

SEQ ID NO: 87927 - protein, 37 aa, Unknown
  Bacterial polypetide isolated from the Sargasso Sea
MFYEKDADVDLIKNKKIAIFGYGSQGHAHALNLKDSG

SEQ ID NO: 87928 - protein, 173 aa, Unknown
  Bacterial polypetide isolated from the Sargasso Sea
DWENDDKELLNWREETNQTSFEKTNPTKDEISEQEYFDNGILMVAFVKAGVELAYETMVEAGIKEESAYYESLHELPLIANLVSRKKLYEMNHIISDTAEYGCYLFNNDAIPLLSSFFKKLNSDVIGSDQMSNASNSIDNEKLIEINESIRFHSIEIIGDELRQHMTSMKKAL

SEQ ID NO: 87929 - protein, 112 aa, Unknown
  Bacterial polypetide isolated from the Sargasso Sea
MFYEKDTDANLIKNKKIAIFGYGSQGHAHALNLKDSGVKEVVVALRDGSASKAKAESKGLKVMNLSDAAEWADVVMILTPDELQATIYKNHIEQRVREKTSIAFAHGIKYSL

SEQ ID NO: 87930 - protein, 195 aa, Unknown
  Bacterial polypetide isolated from the Sargasso Sea
EILTPLFKHHMKNILDGTFSNDMMEDWVNDDEKLLNWRRETGLTDFEKSSVSDIEISNQDYFEKGILMVAFVKSGVELAFETMLDNGIIDESAYYESLHELPLIANLVARKKLFEMNRIISDTAEYGCYLFNNECVPLLNDFMLKINNHHIGSKPNGIEIDSSKLYEYDLKTKNHRIEKIGIILRKNMSNMKKLK

SEQ ID NO: 87931 - protein, 99 aa, Unknown
  Bacterial polypetide isolated from the Sargasso Sea
MTQLFYDTDADLSLLKNKTIAIIGYGSQGHAHALNLKDSGMDVIVGLYKGSKSESKAISDGLQVFSVSEACEKADWIMILLPDEFQKDVYLKEIEPNLK

SEQ ID NO: 87932 - protein, 45 aa, Unknown
  Bacterial polypetide isolated from the Sargasso Sea
MKIYYDDDADIEIIKKLNVTIVGYGSQGHAHANNLKDSGVNVTVG

SEQ ID NO: 87933 - protein, 107 aa, Unknown
  Bacterial polypetide isolated from the Sargasso Sea
MFYEKDTDANLIKGKKIAIFGYGSQGHAHALNLKDSGVNEVVVALRDGSSSKAKAESKGLKVMNLSDAAEWADVVMILTPDELQATIYKNHIEQRVREGTSIAFAHG

SEQ ID NO: 87934 - protein, 79 aa, Unknown
  Bacterial polypetide isolated from the Sargasso Sea
MRVYYDRDADLNLIKDKKIVIIGYGSQGHAHAMNLRDSGIENVAIALRDGSPTREKAKNANFDVMTPAEAANWADIIMM

SEQ ID NO: 87935 - protein, 66 aa, Unknown
  Bacterial polypetide isolated from the Sargasso Sea
MTQLFYDKDADLSLLNDKTIAIIGYGSQGHAHALNLKDSGMDVIVGLYTGSKSESKAISDGLQVFS

SEQ ID NO: 87936 - protein, 114 aa, Unknown
  Bacterial polypetide isolated from the Sargasso Sea
MRVYYDRDADLNLIKDKKISIVGYGSQGHAHAMNLRDSGIENVSIALREGSNSRSKAEQANFKVMTPAEAASWADVIMMLTPDELQSEIYKNDIAENIKEGYNNRICSRIKYSL

SEQ ID NO: 87937 - protein, 109 aa, Unknown
  Bacterial polypetide isolated from the Sargasso Sea
MKMFYEKDTDVNLIKDKKIAIFGYGSQGHAHALNLRDSGVKEVVVALREGSSSIAKAESKGLKVMNLSDAAEWADVVMILTPDELQAAIYKNHIEQRVKEGTSIAFAHG

SEQ ID NO: 87938 - protein, 102 aa, Unknown
  Bacterial polypetide isolated from the Sargasso Sea
MQVYYDKDADLEIIKNKKVVIVGYGSQGHAHANNLKDSGGNVTVALRKDSASWEKAEAAGLQVQEVAEAVKDADMVMILMPDELQSATYKLKLNKTSKKEQF

SEQ ID NO: 87939 - protein, 81 aa, Unknown
  Bacterial polypetide isolated from the Sargasso Sea
MFYEKDADVDLIKNKKIAIFGYGSQGHAHALNLKDSGVKEIVVALRDGSSSVAKAESKGLKVMNLSDAAAWADVVMILTPR

SEQ ID NO: 87940 - protein, 121 aa, Unknown
  Bacterial polypetide isolated from the Sargasso Sea
MYSEQDVNPSILEDKKIVILGYGSQGRAHALNLKDSGFNVVVGLRRSGASWDKAISDGLDVNEPNDAVKDASIVMFLTPDMTQENIYNNIEQSIEKDAAIVFAHGFNIHYKRIKPRDDLDV

SEQ ID NO: 87941 - protein, 238 aa, Unknown
  Bacterial polypetide isolated from the Sargasso Sea
MFYEKDADVNLIKSKKVAIFGYGSQGHAHALNLKDSGVKDIVVALREGSSSAAKAESKGLKVMNLSDAAEWADVVMILTPDELQAEIYKNHIEQRVREGTSIAFAHGLNVHYDLIKARKDLDVFMVAPKGPGHLVRSEYEKGGGVPCLFAVHQDGSGKARDLALSYASAVGGGRSGIIETTFKDEVETDLFGEQTVLCGGLVELIKNGYETLVEAGYEPEMAYFETVHEVKLIVDLIY

SEQ ID NO: 87942 - protein, 143 aa, Unknown
  Bacterial polypetide isolated from the Sargasso Sea
ETDLFGEQAVLCGGLSELVKAGFETLVEAGYQPELAYFECLHEVKLIVDLMVKGGLTSMRDSISNTAEYGDYVSGPRLITADTKAEMKRVLADIQDGTFARNFVAECEAGKPEMKKVRDRDSQHPIEKVGKGLRSMFSWLKDA

SEQ ID NO: 87943 - protein, 190 aa, Unknown
  Bacterial polypetide isolated from the Sargasso Sea
MVAVDKNPSGNALEIGIAYASAIGGGRAGIIETTFKEECETDLFGEQSVLCGGLTHLILAGYETLVEAGYAPEMAYFECLHEVKLIVDLLYEGGMANMRYSISNTAEYGDYSRGPRLITDETKKEMKKILSEIQSGQFAKEWMQEHQSGQTKFKIMRKEQAEHPIEAVGEKLRTLMPWIAEGKMVDKSKN

SEQ ID NO: 87944 - protein, 215 aa, Unknown
  Bacterial polypetide isolated from the Sargasso Sea
MFYEKDTNVNLIKDKKIAIFGYGSQGHAHALNLKDSGVKEVVVALRDGSSSRQKAESKGLKVMNLSDAAEWADVIMILTPDELQASIYKNHIEQRVKEGTSIAFAHGLNIHYDLIKARKDLDVFMVAPKGPGHLVRSEFEKGGGVPCLFAVHQNGSGKARDIAMSYASAIGGGRSGIIETTFKDEVETDLFGEQTVLCGGLVELIKNGYETLVEA

SEQ ID NO: 87945 - protein, 260 aa, Unknown
  Bacterial polypetide isolated from the Sargasso Sea
MFYEKDTDPNLIKNKKIAIFGYGSQGHAHALNLKDSGVKEVVVALRDGSASKAKAESKGLKVMNLSDAAEWADVIMVLTPDELQASIYKNHIEQRVKEGTSIAFAHGLNVHYDLIKARKDLDVFMVAPKGPGHLVRSEFEKGGGVPCLFAVHQNGSGKARDLAMSYASAIGGGRSGIIETTFKDEVETDLFGEQTVLCGGLVELIKNGYETLVEAGYEPEMAYFETVHEVKLIVDLIYEGGIANMNYSISNTAEYGEYMS

SEQ ID NO: 87946 - protein, 116 aa, Unknown
  Bacterial polypetide isolated from the Sargasso Sea
LVEAGYQPELAYFECLHEVKLIVDLMVKGGLSQMRDSISNTAEYGDYVSGKRLINSDTKKEMQKILKDIQDGTFAKNFVEECDKNKPLMTKLREENSKHEIEKVGKGLRSMFSWLK

SEQ ID NO: 87947 - protein, 242 aa, Unknown
  Bacterial polypetide isolated from the Sargasso Sea
IKDGAVLAFAHGFNIHFEMIIPRDDLDVIMVAPKGPGHTVRSQYESGAGVPCLLAVHRNVSGKAKDVGLSYASMIGSGRAGIIETNFKDETETDLFGEQAVLCGGLTSLIQTGYEVLVENGYPPEMAYFECLHEVKLIVDLIYEGGLQNMRYSISNTAEYGDYVTGPKIVNENTKETMQKILTEIQSGEFAKDFMNDCNSGGQKMSEYRKNSSEHSIESVGEELRSMMPWISANKIVDKAKN

SEQ ID NO: 87948 - protein, 285 aa, Unknown
  Bacterial polypetide isolated from the Sargasso Sea
MKTYYDKDTNLNLIKDKKVAIFGYGSQGHAHALNLKDSGVKEVVVALREGSSSIKKAESAGLKVMSLSDAAAWADVVMMLTPDELQSEIYKNHIEQRMKEGTSLAFAHGLNIHFDLINARKDLDVFMVAPKGPGHTVRSEYQKGGGVPCLMAVHKDSSGKAKDLALSYASAVGGGKAGIIETTFKDECETDLFGEQTVLCGGLVELIKNGFETLTEAGYPPQMAYFETLHEVKLIVDLIYEGGIANMNYSISNTAEYGEYVSGKRIVDEKTKEKMKSVLKDIPSG

SEQ ID NO: 87949 - protein, 287 aa, Unknown
  Bacterial polypetide isolated from the Sargasso Sea
ITVIMVAPKCPGTEVREEYLRGFGVPTLIAVHPPNDPNDDGLDYAKAYAVATGGHRAGVLESSFVAEVKSDLMGEQTILCGVLQSGSILCFNKMIELGYDSGFSSKLIQFGWETITEELKHNGINGMLARLDDDSRYLVHTLSEELKEILTPLFKHHMKNILDGTFSKDMMEDWVNDDVKLLNWRRETGLTDFEKSSASDIEISNQDYFEKGILMIAFVKSGVELAFETMLDNGIIDESAYYESLHELPLIANLVARKKLFEMNRIISDTAEYGCYLFNNECVPLLN

SEQ ID NO: 87950 - protein, 239 aa, Unknown
  Bacterial polypetide isolated from the Sargasso Sea
GTSLAFAHGLNIHFDLINARKDLDVFMVAPKGPGHTVRSEYQKGGGVPCLMAVHKDSSGKAKDLALSYASAVGGGKAGIIETTFKDECETDLFGEQTVLCGGLVELIKNGFETLTEAGYPPEMAYFETLHEVKLIVDLIYEGGIANMNYSISNTAEYGEYVSGKRIVDSKTKEKMKEVLKDIQSGKFTKQWMEEHKSGQKNFLKMRKDLANHQIEKVGKELRAMMPWIGKNKLVDKDKN

SEQ ID NO: 87951 - protein, 124 aa, Unknown
  Bacterial polypetide isolated from the Sargasso Sea
LDMNQRWHIFETVHEVKLIVDLIYEGGIANMNYSISNTAEYGEYQSGPRVVNKEETKKRMKEVLAEIQSGKFTKEWMDECKNGQKNFLATRAKLAEHPVEKVGAELRAMMPWIGKKKLVDSDKS

SEQ ID NO: 87952 - protein, 192 aa, Unknown
  Bacterial polypetide isolated from the Sargasso Sea
MFYEKDANTNLIKDKKVAIFGYGSQGHAHALNLKDSGVKNVVVALREGSSSIKKAESEGLKVMSLSDAAAWADVVMVLTPDELQASIYKNHIEQRMREGTSLAFAHGLNIHFNLINSRKDLDVFMVAPKGPGHLVRSEYQKGGGVPCLMAVHKDSSGKARDLAMSYACAVGGGRSGIIETTFKDECETDLFG

SEQ ID NO: 87953 - protein, 279 aa, Unknown
  Bacterial polypetide isolated from the Sargasso Sea
MKTYYDKDTNKDLIKNKKVAIFGYGSQGHAHALNLKDSGVKEVVVALREGSSSIKKAESAGLKVMSLSDAAAWADVVMMLTPDELQSEIYKNHIEQRMKEGTSLAFAHGLNIHFDLINARKDLDVFMVAPKGPGHTVRSEYQKGGGVPCLMAVHKDSSGKAKDLALSYASAVGGGKAGIIETTFKDECETDLFGEQTVLCGGLVELIKNGFETLTEAGYPPEMAYFETLHEVKLIVDLIYEGGIANMNYSISNTAEYGEYVSGKRIVDNKTKEKMREIL

SEQ ID NO: 87954 - protein, 315 aa, Unknown
  Bacterial polypetide isolated from the Sargasso Sea
HIHMVFNIVEEGIKIREDITVIMVAPKCPGSEVREEFKRGFGVPTLIAVHPNNDPQKLGLSQAKAYAVATGGHKAGVLESSFVAEVKSDLMGEQTILCGILQTGSILCFDKMVSEGIAPSYASKLIQYGWEKITEALKHGGITNMMDRLSNQSKIKAFELSEELKLILKPLFTKHMDDIMSGDFSKTMMQDWANDDKNLLAWRSATAETSFEKTPPTKDKIDEQEYFDKGVLMVAFVRAGVELAFEIMVNSGIKEESAYYESLHETPLIANTIARKKLFEMNRVISDTAEYGCYLFDHAAKPLLVPFMKKIKTDV

SEQ ID NO: 87955 - protein, 232 aa, Unknown
  Bacterial polypetide isolated from the Sargasso Sea
GLNVHYDLIIARKDLDVFMVAPKGPGHLVRSEYEKGGGVPCLFAVHQDGSGKARDLALSYASAVGGGRSGIIETTFKDEVETDLFGEQTVLCGGLVELIKNGYETLVEAGYEPEMAYFETVHEVKLIVDLIYEGGIANMNYSISNTAEYGEYQSGPRVVNKEETKKRMKEVLAEIQSGKFTKEWMDECKNGQKNFLATRAKLAEHPVEKVGAELRAMMPWIGKKKLVDSDKS

SEQ ID NO: 87956 - protein, 254 aa, Unknown
  Bacterial polypetide isolated from the Sargasso Sea
AEIYKNHIEQRVKEGSSIAFAHGLNVHYDLIKTRKDLDVFMVAPKGPGHLVRSEFEKGGGVPCLFAVHQNGSGKARDLALSYASAVGGGRSGIIETTFKDEVETDLFGEQTVLCGGLVELMKNGYETLVEGGYEPEMAYFETVHEVKLIVDLIYEGGIANMNYSISNTAEYGEYQSGPRIINKEETKKRMKEVLSDIQSGKFTKEWMDECKNGQKNFLATRAKLAEHSVEKVGAELRAMMPWIGKKKLVDSDKS

SEQ ID NO: 87957 - protein, 213 aa, Unknown
  Bacterial polypetide isolated from the Sargasso Sea
VAPKGPGHLVRSEFEKGGGVPCLFAVHQNGSGKARDLALSYASAVGGGRSGIIETTFKDEVETDLFGEQTVLCGGLVELMKNGYETLVEAGYEPEMAYFETVHEVKLIVDLIYEGGIANMNYSISNTAEYGEYQSGPRIINKEETKKRMKEVLSDIQSGKFTKEWMDECKNGQKNFLATRAKLAEHSVEKVGAELRAMMPWIGKKKLVDSDKS

SEQ ID NO: 87958 - protein, 136 aa, Unknown
  Bacterial polypetide isolated from the Sargasso Sea
ELIKNGYETLVEAGYEPEMAYFETVHEVKLIVDLIYEGGIANMNYSISNTAEYGEYQSGPRIINKEETKKRMKEVLSDIQSGKFTKEWMDECKNGQKNFLATRAKLAEHSVEKVGAELRAMMPWIGKKKLVDSDKS

SEQ ID NO: 87959 - protein, 196 aa, Unknown
  Bacterial polypetide isolated from the Sargasso Sea
GGGVPCLMAVHKDSSGKAKDLALSYASAVGGGKAGIIETTFKDECETDLFGEQTVLCGGLVELIKNGFETLTEAGYPPEMAYFETLHEVKLIVDLIYEGGIANMNYSISNTAEYGEYVSGKRVVDNKTKEKMKEVLKDIQSGKFTKQWMEEHKSGQKNFLKMRQDLAKHPIEKVGKELRAMMPWIGKNKLVDKDKN

SEQ ID NO: 87960 - protein, 261 aa, Unknown
  Bacterial polypetide isolated from the Sargasso Sea
MFYEKDADVNLIKEKKVAIFGYGSQGHAHALNLKDSGVKEVVVALRDGSASKTKAESKGLKVMNLTDAAEWADVCMILTPDELQATIYKNHIEQRIKEGTSLAFAHGLNIHYDLIKARKDLDVFMVAPKGPGHLVRSEFEKGGGVPCLMAVHQDGTGKARDLALSYASAIGGGRSGIIETTFKDECETDLFGEQTVLCGGLVELIKNGYETLVEAGYEPEMAYFECLHEVKLIVDLIYEGGIANMNYSISNTAEYGEYVSG

SEQ ID NO: 87961 - protein, 313 aa, Unknown
  Bacterial polypetide isolated from the Sargasso Sea
QGHAQAQNLRDSGLNVVVAQRPGGPNFDLAKSHGFDPLSVEEAVKQADVVNILLPDELQGDVYKTSIKPNLKAGAVLMASHGFNFHFNQVEPPPGHDILLVAPKGPGHLVRSEYEKGGGVPCLIALGEGASEETKKIGLAYAKGVGGTRGGVIETTIAEETETDLFGEQAVLCGGVSELIKAGFDTLVEAGYQPEMAYFECLHEMKLIVDLLYQGGLEYMRYSVSNTAEYGDYTRGNRVITDETRAEMKKILEEIQAGEFARDWILENRAGAAMFKATRRREREHKLTETGRHLRKMMKWIDSKESLIQFGRF

SEQ ID NO: 87962 - protein, 298 aa, Unknown
  Bacterial polypetide isolated from the Sargasso Sea
MFYEKDTNPNLIKDKKIAIFGYGSQGHAHALNLKDSGVKEVVVALRDGSSSKAKAESKGLKVMNLSDAAEWADVVMVLTPDELQATIYKNHIEQRVREGTSIAFAHGLNIHYDLIKARKDLDVFMVAPKGPGHLVRSEFEKGGGVPCLFAVHQNGSGKARDIAMSYASAIGGGRSGIIETTFKDEVETDLFGEQTVLCGGLVELIKNGYETLVEAGYEPEMAYFETVHEVKLIVDLIYEGGIANMNYSISNTAEYGEYVSGPRIINKEETKKRMKEVLSDIQSGKFTKEWMDECKNGQ

SEQ ID NO: 87963 - protein, 323 aa, Unknown
  Bacterial polypetide isolated from the Sargasso Sea
KVAIFGYGSQGHAHALNLRDSGVKEVVVALREGSSSIEKAESKGLKVMNLSDAAEWADVVMILTPDELQASIYKNHIEQRVKEGTSIAFAHGLNVHYDLIKARKDLDVFMVAPKGPGHLVRSEYEKGGGVPCLFAVHQDGSGKARDLAMSYASAVGGGRSGIIETTFKDEVETDLFGEQTVLCGGLVELIKNGYETLVEAGYEPEMAYFETVHEVKLIVDLIYEGGIANMNYSISNTAEYGEYQSGPRIIKKDETKRRMKEVLAEIQSGKFTKEWMEECKNGQKNFLATRAKLAEHSVEKVGAELRAMMPWISKKKLVDSDKK

SEQ ID NO: 87964 - protein, 138 aa, Unknown
  Bacterial polypetide isolated from the Sargasso Sea
MKTYYEKDTNVDLIKNKKIAIFGYGSQGHAHALNLKDSGIKEVVVALREGSSSKKKAESEGLKVMSLSDAAAWADIVMMLTPDELQSEIYKNHIEQRMKEGTSLAFAHGLNIHFDLINARKDLDVFMVAPKGPGHTVR

SEQ ID NO: 87965 - protein, 300 aa, Unknown
  Bacterial polypetide isolated from the Sargasso Sea
MFYEKDTDVNLIKDKKIAIFGYGSQGHAHALNLKDSGVKEVVVALREGSSSITKAESKGLKVMNLSDAAEWADVVMILTPDELQASIYKNHIEQRVKEGTSIAFAHGLNIHYDLISARKDLDVFMVAPKGPGHLVRSEFEKGGGVPCLFAVHQNGSGKARDLAMSYASAVGGGRSGIIETTFKDEVETDLFGEQTVLCGGLVELIKNGYETLVEAGYEPEMAYFETVHEVKLIVDLIYEGGIANMNYSISNTAEYGEYQSGPRIINKEETKKRMKEVLDDIPSGKFTKEWMQECKSGQKN

SEQ ID NO: 87966 - protein, 206 aa, Unknown
  Bacterial polypetide isolated from the Sargasso Sea
HLVRSEYEKGGGVPCLFAVHQDGSGKARDLAMSYASAVGGGRSGIIETTFKDEVETDLFGEQTVLCGGLVELIKNGYETLVEAGYEPEMAYFETVHEVKLIVDLIYEGGIANMNYSISNTAEYGEYQSGPRIIKKDETKQRMKEVLAEIQSGKFTKEWMEECKNGQKNFLATRAKLAEHSVEKVGAELRAMMPWISKKKLVDSDKK

SEQ ID NO: 87967 - protein, 108 aa, Unknown
  Bacterial polypetide isolated from the Sargasso Sea
KLIVDLIYEGGIANMNYSISNTAEYGEYQSGPRVIKKEETKQRMKEILTEIQSGKFTKEWMEECKNGQKNFLATRAKLAEHSVEKVGAELRAMMPWISKKKLVDSDKK

SEQ ID NO: 87968 - protein, 201 aa, Unknown
  Bacterial polypetide isolated from the Sargasso Sea
MTQLFYDTDADLSLLNNKTIAIIGYGSQGHAHALNLKDSGMDVIVGLYKGSKSESKAISDGLQVFSVSEACEKADWIMILLPDEFQKDVYLKEIEPNLKEGKILSFAHGFNIRFGLIKPPSFVDVVMIAPKGPGHTVRWEYQNGQGVPALFAVEQDSSGSARSLAMAYAKGIGGTRAGILETNFKEETETDLFGEQAVLCG

SEQ ID NO: 87969 - protein, 309 aa, Unknown
  Bacterial polypetide isolated from the Sargasso Sea
ENDPENKGWAYAKAYAVGTGGHRAGCLKSSFVAEVKSDLMGEQTILCGLLQTGSILCFDKMVEGGIDAGYASKLIQYGWEAITEGLKQGGITNMMDRLSNPSKIKAFELAEELKEIMKPLFDKHMDDIFTGVFSSTMMEDWANDDKNLLGWRAATGETNFEKTPAGDVEISEQEFYDNGVLMVAMVKAGVELAFEAMVNAGIIDESAYYESLHETPLIANTIARKKLYEMNSVISDTAEYGCYLFDHACKPLLEDFMAKIDLNVIGKKYDEGLSNAVDNRTLVAVNDAIRNHSVEEIGVYLRAEMADMK

SEQ ID NO: 87970 - protein, 150 aa, Unknown
  Bacterial polypetide isolated from the Sargasso Sea
DLFGEQTVLCGGLVELIKNGYETLVEAGYEPEMAYFECLHEVKLIVDLIYEGGIANMNYSISNTAEYGEYVSGPRIINKEETKKRMKEVLADIQSGKFTKQWMDECKNGQKNFLKTREELAKHSIETVGTKLRAMMPWIGKKKLVDSDKK

SEQ ID NO: 87971 - protein, 155 aa, Unknown
  Bacterial polypetide isolated from the Sargasso Sea
MRLKQIYFGEQTVLCGGLVELIKNGYETLVEAGYEPEMAYFETVHEVKLIVDLIYEGGIANMNYSISNTAEYGEYQSGPRVINKEETKKRMKEVLADIQSGKFTKEWMDECKSGQKNFLTTRAKLAEHPVEKVGANLRSMMPWIGKKKLVDSDKK

SEQ ID NO: 87972 - protein, 162 aa, Unknown
  Bacterial polypetide isolated from the Sargasso Sea
IIETTFKDEVETDLFGEQTVLCGGLVELIKNGYETLVEAGYEPEMAYFETVHEVKLIVDLIYEGGIANMNYSISNTAEYGEYMSGPRIINKEETKKRMKEVLEDIQSGKFTKQWMDECKNGQKNFLKTREKLAEHPVEKVGAKLRAMMPWISKKKLVDSDKN

SEQ ID NO: 87973 - protein, 283 aa, Unknown
  Bacterial polypetide isolated from the Sargasso Sea
MRVYYDRDADINLIKGKKVVVVGYGSQGHAHALNLKDSGVKDVAIALRKGSASAKKAEAAGFKVLEVAEAAKWGDVIMMLTPDELQADIYRDHLHDNMKNGAALLFAHGLNVHFNLIEPRADIDVLMVAPKGPGHTVRSEYQRGGGVPCLIAIHKDASGNAHDLGLSYASAIGGGRAGIIETSFREECETDLFGEQVVLCGGLVELIKGGFETLVEAGYAPEMAYFECLHEVKLIVDLIYEGGIANMNYSISNTAEYGEYVTGPRIVTPETKAEMKRVLADIQ

SEQ ID NO: 87974 - protein, 281 aa, Unknown
  Bacterial polypetide isolated from the Sargasso Sea
MFYEKDTNVDLIKDKKVAIFGYGSQGHAHALNLRDSGVKEVVVALREGSSSIGKAESKGLKVMNLSDAAEWADVVMILTPDELQASIYKNHIEQRVKEGTSIAFAHGLNVHYDLIKARKDLDVFMVAPKGPGHLVRSEYEKGGGVPCLFAVHQDGSGKARDLAMSYASAVGGGRSGIIETTFKDEVETDLFGEQTVLCGGLVELIKNGYETLVEAGYEPEMAYFETVHEVKLIVDLIYEGGIANMNYSISNTAEYGEYQSGPRIIKKEKTKQRMKEVLAEI

SEQ ID NO: 87975 - protein, 148 aa, Unknown
  Bacterial polypetide isolated from the Sargasso Sea
MFYEKDTDVNLIKDKKIAIFGYGSQGHAHALNLKDSGVKEVAVALREGSLSKAKAESKGLKVMNLSDAAEWADVVMILTPDELQASIYKNHIEQRVKEGTSIAFAHGLNIHYDLIKARKDLDVFMVAPKGPGHLVRSEYEKGGGVPCL

SEQ ID NO: 87976 - protein, 112 aa, Unknown
  Bacterial polypetide isolated from the Sargasso Sea
KGGGVPCLFAVHQDGSGKARDLAMSYASAVGGGRSGIIETTFKDEVETDLFGEQTVLCGGLVELIKNGYQTLVEAGYEPEMAYFETVHELKLIVDLIYEGGIANMNYSISNT

SEQ ID NO: 87977 - protein, 285 aa, Unknown
  Bacterial polypetide isolated from the Sargasso Sea
EKAESQGLRVMSLSDAAEWADILMMLTPDELQSQIYKNHIEQRMRQGTSLAFAHGLNIHFNLIKARKDLDIFMIAPKGPGHLVRSEYQKGGGVPCLMAIHQDSSGKAKDLALSYASAIGGGKSGVIETTFKDECETDLFGEQSVLCGGLVELIKNGYEVLVEAGYPPEMAYFECLHEVKLIVDLIYEGGIANMNYSISNTAEYGEYVTGKRIVDTKTKERMKEVLKDIQSGKFAKQWMEENKNGQKNFLKMRKELAEHPIEKVGKKLRDMMPWIGKNKLVDKEKN

SEQ ID NO: 87978 - protein, 180 aa, Unknown
  Bacterial polypetide isolated from the Sargasso Sea
MFYEKDTDVNLIKNKKIAIFGYGSQGHAHALNLKDSGVKEVVVALRDGSASKAKAESKGLKVMNLSDAAEWADVVMVLTPDELQATIYKNHIEQRVREGTSIAFAHGLNIHYDLIKARKDLDVFMVAPKGPGHLVRSEYEKGGGVPCLFAVHQNGSGKARELAMSYASAVGGGRSGIIET

SEQ ID NO: 87979 - protein, 259 aa, Unknown
  Bacterial polypetide isolated from the Sargasso Sea
ADVVMILTPDELQAEIYKNHIEQRVKEGTSIAFAHGLNVHYDLIKARKDLDVFMVAPKGPGHLVRSEYEKGGGVPCLFAVHQNGSGKARDLALSYASAVGGGRSGIIETTFKDEVETDLFGEQTVLCGGLVELIKNGYETLVEGGYEPEMAYFETVHEVKLIVDLIYEGGIANMNYSISNTAEYGEYQSGPRIINKEETKKRMKEVLSDIQSGKFTKEWMDECKNGQKNFLATRAKLAEHSVEKVGAELRAMMPWIGKK

SEQ ID NO: 87980 - protein, 133 aa, Unknown
  Bacterial polypetide isolated from the Sargasso Sea
MRVYYDRDADLNLIKNKKIAIVGYGSQGHAHAMNLRDSGIENVAIALRKDSATRDKAKNASFNVMTPTEAADWADIIMMLTPDELQSDIYNNEIAPNIKEGTALAFAHGLNIHFDLIQPSEGIDVIMIAPKGP

SEQ ID NO: 87981 - protein, 181 aa, Unknown
  Bacterial polypetide isolated from the Sargasso Sea
MFYEKDANVNLIKDKKVAIFGYGSQGHAHALNLKDSGVKNVVVALREGSSSIKKAESEGLKVMSLSDAAAWADVVMVLTPDELQASIYKNHIEQRMRQGTSLAFAHGLNIHFNLINSRKDLDVFMVAPKGPGHLVRSEYQRGGGVPCLMAVHKDSSGKARDLAMSYACAVGGGRSGIIETT

SEQ ID NO: 87982 - protein, 254 aa, Unknown
  Bacterial polypetide isolated from the Sargasso Sea
LCIPDPSMKKVYNEDIKDNLEENDILLFAHGFAILYEEVKPPDNVDVIMIAPKAPGHRVRAVFERDLGVPCLIAVDKDFSGSAHEIGLAYGKGIGGGRAGILETTFKEETETDLFGEQAVLCGGVTALIKAGFEVLTEAGYQPESAYFEVLHELKLIVDLIYQGGLEGMRYSVSTTAEYGDYTVGPRIIDDSVKKEMKKVLDDIQSGRFAREWIAENDEGLHKYDDLREADLTHPVEKIGKELRAMMPWLESTT

SEQ ID NO: 87983 - protein, 223 aa, Unknown
  Bacterial polypetide isolated from the Sargasso Sea
MFYEKDTDVNLIKDKKIAIFGYGSQGHAHALNLKDSGVKEVVVALREGSASKIKAESKGLKVMNLSDAAEWADVVMVLTPDELQATIYKNHIEQRVREGTSIAFAHGLNIHYDLIKARKDLDVFMVAPKGPGHLVRSEYEKGGGVPCLFAVHQNGSGKARELAMSYASAVGGGRSGIIETTFKDEVETDLFGEQTVLCGGLVELIKNGYETLVEAGYEPEMAY

SEQ ID NO: 87984 - protein, 163 aa, Unknown
  Bacterial polypetide isolated from the Sargasso Sea
MKIYYDDDANIDIIKTFKVTIVGYGSQGHAHANNLKDSGVNVTVALREGSDSWTKATEAGLNVMPVADSIKDADLVMILAPDEFQKGIYEKNIQPNLKSDAILAFAHGFNIHFKKIIPEAGNSVIMIAPKGPGHTVRSTYLKDGGVPSLIAVYQDAISNNTFS

SEQ ID NO: 87985 - protein, 144 aa, Unknown
  Bacterial polypetide isolated from the Sargasso Sea
MFYEKDTDVNLIKSKKIAIFGYGSQGHAHALNLKDSGVKEVVVALRDGSSSKAKAESKGLKVMNLSDAAEWADVVMILTPDELQATIYKNHIEQRVREGTSIAFAHGLNIHYDLIKARKDLDVFMVAPKGPGHLVRSELKKGRC

SEQ ID NO: 87986 - protein, 161 aa, Unknown
  Bacterial polypetide isolated from the Sargasso Sea
IIETTFKDECETDLFGEQTVLCGGLVELIKNGFETLTEAGYPPEMAYFETLHEVKLIVDLIYEGGIANMNYSISNTAEYGEYVSGKRIVDSKTKEKMKEVLKDIQSGKFTKQWMEEHKSGQKNFLKMRKDLADHPIEKVGKDLRAMMPWIGKNKLVDKDKN

SEQ ID NO: 87987 - protein, 196 aa, Unknown
  Bacterial polypetide isolated from the Sargasso Sea
SQGHAHALNLKDSGVKEIVVALRDGSSSVAKAESKGLKVMNLSDAAAWADVVMILTPDELQAEIYKNHIEQRVKEGSSIAFAHGLNVHYDLIKTRKDLDVFMVAPKGPGHLVRSEFEKGGGVPCLFAVHQNGSGKARDLALSYASAVGGGRSGIIETTFKDQVETDLFGEQTVLCGGLVELMKNGYETLFEAGYKP

SEQ ID NO: 87988 - protein, 164 aa, Unknown
  Bacterial polypetide isolated from the Sargasso Sea
MKTYYDKDTNKDLIKDKKVAIFGYGSQGHAHALNLKDSGVKEVVVALREGSSSIKKAESAGLKVMSLSDAAAWADVVMMLTPDELQSEIYKNHIEQRMKEGTSLAFAHGLNIHFNLINARKDLDVFMVAPKGPGHTVRSEYQKGGGVPCLMAVHKDSSGKAKDL

SEQ ID NO: 87989 - protein, 268 aa, Unknown
  Bacterial polypetide isolated from the Sargasso Sea
MNLSDAAEWADIVMILTPDELQASIYKNHIEQRVKEGSSIAFAHGLNVHYDLIKARKDLDVFMVAPKGPGHLVRSEYEKGGGVPCLFAVHQNGSGKARDLAMSYASAIGGGRSGIIETTFKDEVETDLFGEQTVLCGGLVELIKNGYETLVEAGYEPEMAYFETVHEVKLIVDLIYEGGIANMNYSISNTAEYGEYQTGPKIINKEETKKRMKEALADIQSGKFTKAWMDECKNGQKNFLATRAKLAEHPVEKVGANLRAMMPWIGKK

SEQ ID NO: 87990 - protein, 272 aa, Unknown
  Bacterial polypetide isolated from the Sargasso Sea
MRVYYDRDADLNLIKDKKISIVGYGSQGHAHAMNLRDSGIENVSIALREGSNSRSKAEQANFKVMTPAEAASWADIIMMLTPDELQSEIYKNDISENIKEGTTIAFAHGLNIHFDLIKPKEGIDVIMVAPKGPGHTVRAEYVRGAGVPCLVAVDKNPSGNALEIGIAYASAIGGGRAGIIETTFKEECETDLFGEQSVLCGGLTHLILAGYETLVEAGYAPEMAYFECLHEVKLIVDLLYEGGMANMRYSISNTAEYGDYSRGPRLYTDETK

SEQ ID NO: 87991 - protein, 268 aa, Unknown
  Bacterial polypetide isolated from the Sargasso Sea
DGSASKIKAESKGLKVMNLSDAAEWADVVMVLTPDELQATIYKNHIEQRVREGTSIAFAHGLNIHYDLIKARKDLDVFMVAPKGPGHLVRSEYEKGGGVPCLFAVHQNGSGKARELAMSYASAVGGGRSGIIETTFKDEVETDLFGEQTVLCGGLVELIKNGYETLVEAGYEPEMAYFETVHEVKLIVDLIYEGGIANMNYSISNTAEYGEYVTGPKIINKEETKKRMKEVLADIQSGKFTKDWMNECKNGQKNFLKTREKLAEHPVE

SEQ ID NO: 87992 - protein, 250 aa, Unknown
  Bacterial polypetide isolated from the Sargasso Sea
DLYKESIEPNLKPSAAVAFAHGFNIHYKQIVPADSHDVFMIAPKSPGHLVRSTFVNGKGVPTLIAIHNNTSGKAKDIALAYASAIGGGRAGIIETDFKEETETDLFGEQAVLCGGVTALILAGFETLVDAGYAPEMAYFECLNELKLIVDLMYEGGMTDMRYSISNTAEYGDLTKGPFLIDDHVKAKMKLVLADVQNGKFANDFVSEIKSGSPEFNRLRKEGSEHLIESTGKKLRSMMSWMDKEKLVGNK

SEQ ID NO: 87993 - protein, 274 aa, Unknown
  Bacterial polypetide isolated from the Sargasso Sea
AHALNLKDSGVKEVVVALRDGSASKAKAESKGLKVMNLSDAAEWADVVMILTPDELQATIYKNHIEQRVREGTSIAFAHGLNIHYDLIKARKDLDVFMVAPKGPGHLVRSEYQKGGGVPCLFAVHQNGSGKARELAMSYASAVGGGRSGIIETTFKDEVETDLFGEQTVLCGGLVELIKNGYETLVEAGYEPEMAYFETVHEVKLIVDLIYEGGIANMNYSISNTAEYGEYTSGPKIINKEETKKRMKEVLANIQSGKFTKEWMDECKNGQKNF

SEQ ID NO: 87994 - protein, 296 aa, Unknown
  Bacterial polypetide isolated from the Sargasso Sea
DSGGNVTVALRKESASWSKAETAGLNVQEVAEAVTDADMVMILMPDELQSATYKSEIENNIKQGAVLAFAHGFNIHFDMIEPREDLDVIMVAPKGPGHTVRSQYEIGAGVPCLIAVHKDISGNAKEIGLSYASAIGSGRAGIIETNFKDETETDLFGEQAVLCGGLTQLIQNGYEVLVEDGYPPEMAYFECLHEVKLIVDLIYEGGLENMRYSISNTAEFGDYLSGPKVVNSDVKEEMRAVLKRIQSGEFAQEFMSDARESNDGKGGPRMKEYRQQTSEHSIEKVGSELRAMMPWI

SEQ ID NO: 87995 - protein, 235 aa, Unknown
  Bacterial polypetide isolated from the Sargasso Sea
MFYEKDTNVNLIKDKKIAIFGYGSQGHAHALNLKDSGVKEVVVALREGSSSIPKAESKGLKVMNLSDAAEWADVVMILTPDELQASIYKNHIEQRVKEGKSIAFAHGLNVHYDLIKARKDLDVFMVAPKGPGHLVRSEYEKGGGVPCLFAVHQNGSGKARDLAMSYASAVGGGRSGIIETTFKDEVETDLFGEQTVLCGGLVELIKNGYETLVEAGYEPEMAYFETVHEVKLIVD

SEQ ID NO: 87996 - protein, 158 aa, Unknown
  Bacterial polypetide isolated from the Sargasso Sea
TTFKEECETDLFGEQTVLCGGLVELIRAGYETLTEAGYAPEMAYFECLHEVKLIVDLIYEGGIANMNYSISNTAEYGEYVTGPRLITSETKAEMKRILRDIQSGKFTRDWMLENKVNQTSFKATRRKASDHPIEAVGKELRAMMPWITANRLVDKDKN

SEQ ID NO: 87997 - protein, 203 aa, Unknown
  Bacterial polypetide isolated from the Sargasso Sea
QLKTLMRPLFEKHMDDIIAGEFSRGMMADWAEDDAKLFGWREETGKSAFENAPAFAGKIAEQEYFDNGVVMVAMVKAGVELAFETMVASGIYEESAYYESLHELPLIANTVARKRLYEMNVVISDTAEYGNYLFANAAVPLLREHFMPTLKAGDLGASKAEGQSVDNLALLAANEATRNHPIEAIGQVLRGYMKDMKRIAVGG

SEQ ID NO: 87998 - protein, 186 aa, Unknown
  Bacterial polypetide isolated from the Sargasso Sea
MVTKIIYDDSIDQDLIKSKKVTVIGFGSQGHAHALNLHESGVDVTVGLRESSESFKRASDMGLKVENVVDATSGADVVMLLLPDQLMADIYNSDIAPHMKDGSTLLFAHGFNIHFGEIIPREDISIGMVAPKGPGHLLRRTYEEDSGMPCLVAVEKDVSGNTFELSLSYSSAIGGGKAGILKTTFK

SEQ ID NO: 87999 - protein, 178 aa, Unknown
  Bacterial polypetide isolated from the Sargasso Sea
MFYEKDANIGLIKDKKVAIFGYGSQGHAHALNLKDSGVKNVVVALREGSSSIKKAESEGLKVMSLSDAAEWADVVMLLTPDELQASIYKNHIEQRMREGTSLAFAHGLNIHFNLINSRKDLDVFMVAPKGPGHLVRSEYQRGGGVPCLMAVHKDSSGKARDLAMSYACAVGGGRSGII

SEQ ID NO: 88000 - protein, 173 aa, Unknown
  Bacterial polypetide isolated from the Sargasso Sea
YASAVGGGRSGIIETTFKDEVETDLFGEQTVLCGGLVELIKNGYETLVEAGYEPEMAYFETVHEVKLIVDLIYEGGIANMNYSISNTAEYGEYESGPRIINKAETKKRMKEVLDDIQSGKFTKEWMDECKNGQKKFLATRAKLAEHPVEKVGASLRAMMPWIAKKKLVDSDKK

SEQ ID NO: 88001 - protein, 225 aa, Unknown
  Bacterial polypetide isolated from the Sargasso Sea
REDLDVIMVAPKGPGHTVRSQYEIGAGVPCLIAIHKDASGKAKEIGLSYASAIGSGRAGIIETNFKDETETDLFGEQAVLCGGLSQLIQNGYEVLVEDGYPPEMAYFECLHEVKLIVDLIYEGGLENMRYSISNTAEFGDYVSGPKVVNSDAKEEMRAVLKRIQSGEFAKEFMNDCRESNDGKGGPRMKEYRKQTSEHSIEKVGSELRAMMPWIAQNKIVDKAKN

SEQ ID NO: 88002 - protein, 256 aa, Unknown
  Bacterial polypetide isolated from the Sargasso Sea
KIEPNLKQGAILAFAHGFNIHFGKIKPTDDISVVMIAPKGPGHTVRSTFISGGGVPSLIAIHKDSISERDFNAKDVALSYAKANGGTRAGVLETSFKEETETDLFGEQAVLCGGMTALIKAGYETLVEAGYSPEMAYFECLHETKLIVDLLHEGGISNMHYSISNTAEFGDYLTGPRIITEDTKKEMKKVLEDIQSGNFADKFLDDCRQSNDGSGGPFLKNNREKTKEHSIESVGKELRSKMKFLSEKKLVDKDKN

SEQ ID NO: 88003 - protein, 283 aa, Unknown
  Bacterial polypetide isolated from the Sargasso Sea
LKDSGVKEVVVALRENSPSAKKAKSEGLKVMSLSDAAAWADVVMLLTPDELQSKIYKNHIEQRMREGTSLAFAHGLNIHFNLINSRKDLDVFMVAPKGPGHLVRSEYQKGGGVPCLMAVHKDSSGKARNLAMSYASAIGGGKSGIIETTFKDECETDLFGEQTVLCGGLVELIKNGYETLTEAGYPPEMAYFECLHEVKLIVDLIYEGGIANMNYSISNTAEYGEYVSGKKIVDNKTKERMKEVLKDIQSGKFTKEWMKECESGQKNFLKMREDLANHSIEKV

SEQ ID NO: 88004 - protein, 249 aa, Unknown
  Bacterial polypetide isolated from the Sargasso Sea
MFYEKDTDVNLIKDKKIAIFGYGSQGHAHALNLKDSGVKEVVVALREGSSSKAKAESKGLKVMNLSDAAEWADVVMILTPDELQASIYKNHIEQRVKEGTSIAFAHGLNIHYDLIKARKDLDIFMVAPKGPGHLVRSEYEKGGGVPCLFAVHQNGSGKARDLAMSYASAVGGGRSGIIETTFKDEVETDLFGEQTVLCGGLVELIKNGYETLVEAGYEPEMAYFETVHEVKLIVDLIYEGGIANMNYSI

SEQ ID NO: 88005 - protein, 154 aa, Unknown
  Bacterial polypetide isolated from the Sargasso Sea
RSKLIYFGEQTVLCGGLVELIKNGYETLVEAGYEPEMAYFETVHEVKLIVDLIYEGGIANMNYSISNTAEYGEYKSGPRIINKEETKKRMKEVLDDIQSGKFTKEWMDECKNGQKNFLATRAKLAEHPVEKVGANLRAMMPWIAKKKLVDSDKK

SEQ ID NO: 88006 - protein, 172 aa, Unknown
  Bacterial polypetide isolated from the Sargasso Sea
CFCIGGGRSGIIETTFKDEVETDLFGEQTVLCGGLVELIKNGYETLVEAGYEPEMAYFETVHEVKLIVDLIYEGGIANMNYSISNTAEYGEYVSGPKIINKEETKKRMKEVLEKIQSGKFTKEWMEECKNGQKNFLKTREKLAEHPIEKVGADLRAMMPWITKKKLVDSDKN

SEQ ID NO: 88007 - protein, 272 aa, Unknown
  Bacterial polypetide isolated from the Sargasso Sea
SKGLKVMNLSDAAEWADVVMILTPDELQAAIYKNHIEQRVKEGTSIAFAHGLNIHYDLIKARKDLDVFMVAPKGPGHLVRSEFEKGGGVPCLFAVHQNGSGKARELAMSYASAVGGGRSGIIETTFKDEVETDLFGEQTVLCGGLVELIKNGYETLVEAGYEPEMAYFETVHEVKLIVDLIYEGGIANMNYSISNTAEYGEYQSGPRIINKEETKKRMKEVLNDIQSGKFTKDWMDECKNGQKNFLATRAKLSEHPVEKVGASLRANDALDS

SEQ ID NO: 88008 - protein, 288 aa, Unknown
  Bacterial polypetide isolated from the Sargasso Sea
MKVFYDQDADLNLIKNKKVLIVGYGSQGHAHAANLRDSGVKNVCIALREDSNSVAKAKNAGFDVKTVNEGSKWAEVVMILTPDELQGEIYTNEIKNNIRSGSAIAFAHGLNIHFNLIEPRDDIDVFMVAPKGPGHTVRSEYQKGGGVPCLLAVHLDSSGNTHEIGLSYACAVGGGRSGIIETTFKEECETDLFGEQVVLCGGLVELIKAGYETLVEAGYAPEMAYFECLHEVKLIVDLIYEGGISNMNYSISNTAEYGEYVSGPRLITSETKKTMKNILSDIQTGKFT

SEQ ID NO: 88009 - protein, 289 aa, Unknown
  Bacterial polypetide isolated from the Sargasso Sea
GGSSSVAKAESKGLKVMNLSDAAAWADVVMILTPDELQAEIYKNHIEQRVREGTSIAFAHGLNVHYDLIKARKDLDVFMVAPKGPGHLVRSEYEKGGGVPCLFAVHQDGSGKARDLALSYASAVGGGRSGIIETTFKDEVETDLFGEQTVLCGGLVELIKNGYETLVEAGYEPEMAYFETVHEVKLIVDLIYEGGIANMNYSISNTAEYGEYQSGPRIVNKEETKKRMKEVLADIQSGKFTKEWMDECKTGQKNFLATRAKLAEHSVEKVGAELRAMMPWISKKKLVDS

SEQ ID NO: 88010 - protein, 265 aa, Unknown
  Bacterial polypetide isolated from the Sargasso Sea
MFYEKDTNVNLIKDKKVAIFGYGSQGHAHALNLRDSGVKEVVVALREGSSSIEKAESKKLKVMNLSDAAEWADVVMILTPDELQASIYKNHIEQRVKEGTSIAFAHGLNVHYDLIKARKDLDVFMVAPKGPGHLVRSEYEKGGGVPCLFAVHQDGSGKARDLAMSYASAVGGGRSGIIETTFKDEVETDLFGEQTVLCGGLVELIKNGYETLVEAGYEPEMAYFETVHEVKLIVDLIYEGGIANMNYSISNTAEYGEYQSGPRII

SEQ ID NO: 88011 - protein, 130 aa, Unknown
  Bacterial polypetide isolated from the Sargasso Sea
MADVYYDKDADFNILNGETVGIIGYGSQGHAHALNLKDSGANVIVGLYKGSPSWEKAESDGLKVATVEEVAEQASIIMMLIPDTKQKEVYENSVKPHLSPGKTLMFAHGFNIHYNQISPPSDIDVTMVAP

SEQ ID NO: 88012 - protein, 254 aa, Unknown
  Bacterial polypetide isolated from the Sargasso Sea
ATIYKNHIDKRARKGTSIAFAHGLNIHYDLIKARKDLDVFMVAPKGPGHLVRSEFEKGGGVPCLFAVHQNGSGNARDIAMSYASAIGGGRSGIIETTFKDEVETDLFGEQTVLCGGLVELIKNGYETLVEAGYDPEMAYFETVHEVKLIVDLIYEGGIANMNYSISNTAEYGEYMSGPRIINKEETKKRMKEVLNDIQSGKFTKQWMDECKNGQKEFLKIRAKLAEHPVEKVGAELRGMMPWIGKKKLIDSDKK

SEQ ID NO: 88013 - protein, 255 aa, Unknown
  Bacterial polypetide isolated from the Sargasso Sea
QATIYKNHIEQRVKEGTSIAFAHGLNIHYDLIKARKDLDVFMVAPKGPGHLVRSEFEKGGGVPCLFAVHQNGSGKARDIAMSYASAIGGGRSGIIETTFKDEVETDLFGEQTVLCGGLVELIKNGYETLVEAGYEPEMAYFETVHEVKLIVDLIYEGGIANMNYSISNTAEYGEYMSGPRIINKEETKKRMKEVLADIQSGKFTKEWMDECKNGQKNFLKIREKLAEHPVEKVGANLRAMMPWISKKKLVDSDKN

SEQ ID NO: 88014 - protein, 241 aa, Unknown
  Bacterial polypetide isolated from the Sargasso Sea
HGFNIHFKKIIPDETNSVIMIAPKGPGHTVRSTYLKGGGVPSLIAIYQDSTNTSDSSAKEVALSYAKANGGTRAGVLETTFKEETETDLFGEQAVLCGGMTALIKAGYETLVEAGYSPEMAYFECLHETKLITDLIQEGGIANMHYSISNTAEYGDYLSGPKIITEKTKEAMKEVLENIQSGNFADEFLDDCRQSNDGSGGPFMKSKRESTKNHPIEKVGKELRSKMKFLNSEKLVDKEKN

SEQ ID NO: 88015 - protein, 246 aa, Unknown
  Bacterial polypetide isolated from the Sargasso Sea
MRVYYDRDADFNLIKNKKIVIVGYGSQGHAHAMNLRDSGVENVAIALREGSLTRDKAKNANFDVMTPSEAASWGDIIMMLTPDELQSDIYNNEIAPNIKEGSAVAFAHGLNIHFDLIQPANGIDVIMIAPKGPGHTVRAEYERGAGVPCLVAVDKNPSGNALEIAIAYASGVGGGRAGIIETTFKEECETDLFGEQSVLCGGLTHLILAGYETLVEAGYAPEMAYFECLHEVKLIVDLLYEGGMAN

SEQ ID NO: 88016 - protein, 120 aa, Unknown
  Bacterial polypetide isolated from the Sargasso Sea
PPEMAYFETLHEVKLIVDLIYEGGIANMNYSISNTAEYGEYVSGKRIVDNNTKAKMKEVLKDIQSGKFTKQWMDEHKSGQKNFLKMRQDLAKHPIEKVGKELRAMMPWIGKNKLVDKDKN

SEQ ID NO: 88017 - protein, 161 aa, Unknown
  Bacterial polypetide isolated from the Sargasso Sea
FKEETETDLFGEQSVLCGGITALIKAGYETLVEAGYSPEMAYFECLHETKLIVDLIHEGGISNMHYSISNTAEFGDYLSGPKVITDDTKDSMKKILMKIQSGEFADEFLNDCRSSNDGKGGPFMRQNRKNTQNHSIEMVGKELRSKMKFLQTEKLVDKEKN

SEQ ID NO: 88018 - protein, 201 aa, Unknown
  Bacterial polypetide isolated from the Sargasso Sea
MEVFYEKDSNPELLKDKTIAIIGYGSQGHAHANNLKDSGFNVILGLRDGSSSAAKASEAGFEVASNVEAASKADVLMMLIPDEFQGIAYKEEIEPNLKQGATLAFAHGFNIHYEQIVPREDLDVIMIAPKGPGHTVRGQYLDGAGVPCLVAIHQDASSNALDTSIAYASAIGGGRAGIIKTTFKDETETDLFGEQSVLCGG

SEQ ID NO: 88019 - protein, 130 aa, Unknown
  Bacterial polypetide isolated from the Sargasso Sea
MRVYYDRDCDVNLIKDKKVAILGYGSQGHAHALNLRDSGAKNLVVALREGSPSAKKAEVEGLNVMGISEAAAWCDLIMFTMPDELQADTYKKYVHDNIKEGAAIAFAHGLNVHFGLIEPKKGIDVLMMAP

SEQ ID NO: 88020 - protein, 247 aa, Unknown
  Bacterial polypetide isolated from the Sargasso Sea
MKVYYEKDSDIDLIKSKKVAIYGYGSQGHAHALNLSDSGVSEVVVALREGSSSAAKAEAEGLKVMSMSDAAEWADILMMLIPDELQADVYKNHIEQRAKKGAALAFAHGLNVHFDLINARDDMDVFMIAPKGPGHTVRSEYKKGGGVPCLVSVDSDKTGNALKIALSYASAIGGGKAGIIETTFKDECETDLFGEQTVLCGGVVELIRNGFETLVEAGYPPEMAYFECLHEVKLIVDLIYEGGIANM

SEQ ID NO: 88021 - protein, 141 aa, Unknown
  Bacterial polypetide isolated from the Sargasso Sea
MCGGLVELIKNGFETLTEAGYPPEMAYFETLHEVKLIVDLIYEGGIANMNYSISNTAEYGEYISGKKIVDSKTKERMKEVLKDIQSGKFTKQWMDECKGGQKNFLKMREDLAKHPIEKVGKKLRDLMPWIGKNKLVDKSKN

SEQ ID NO: 88022 - protein, 257 aa, Unknown
  Bacterial polypetide isolated from the Sargasso Sea
ELQATIYKNHIEQRVKEGTSIAFAHGLNVHYDLIKARKDLDVFMVAPKGPGHLVRSEYEKGGGVPCLFAVHQNGSGKARDLAMSYASAIGGGRSGIIETTFKDEVETDLFGEQTVLCGGLVELIKNGYETLVEAGYEPEMAYFETVHEVKLIVDLIYEGGIANMNYSISNTAEYGEYVSGPRIINKEETKKRMKEVLADIQSGKFTKQWMDECKNGQKNFLATRAKLAEHPVEKVGATLREMMPWIAKKKLVDSDKK

SEQ ID NO: 88023 - protein, 160 aa, Unknown
  Bacterial polypetide isolated from the Sargasso Sea
ETTFKDEVETDLFGEQTVLCGGLVELIKNGYETLVEAGYEPEMAYFETVHEVKLIVDLIYEGGIANMNYSISNTAEYGEYISGPKIINKEETKKRMKEVLSDIQSGKFTKQWMDECKNGQKNFLKTREKLAEHPVEKVGAGLRALMPWISKKKLIDSDKN

SEQ ID NO: 88024 - protein, 144 aa, Unknown
  Bacterial polypetide isolated from the Sargasso Sea
MFYEKDANVNLIKEKKVAIFGYGSQGHAHALNLKESGVKNVVVALREGSSSIKKAESEGLKVMSLSDAAAWADVVMVLTPDELQASIYKNHIEQRMREGTSLAFAHGLNIHFKLINSRKDLDVFMVAPKGPGHLVRSEYQRGGG

SEQ ID NO: 88025 - protein, 198 aa, Unknown
  Bacterial polypetide isolated from the Sargasso Sea
KGGGVPCLFAVHQNGSGKARDLAMSYASAVGGGRSGIIETTFKDEVETDLFGEQTVLCGGLVELIKNGYETLVEAGYEPEMAYFETVHEVKLIVDLIYEGGIANMNYSISNTAEYGEYVSGPKIINKEETKKRMKEVLDKIQSGKFTKEWIDECKNGQKNFLKTREKLAEHPIEKVGAGLRAMMPWITKKKLVDSDKN

SEQ ID NO: 88026 - protein, 260 aa, Unknown
  Bacterial polypetide isolated from the Sargasso Sea
MYYEKDTDVNLIKNKKVAIFGYGSQGHAHALNLRDSGVKEVVVALREGSSSIAKAESKDLKVMNLSDAAEWADVVMILTPDELQAAIYKNHIEQRVKEGTSIAFAHGLNIHYDLINARKDLDVFMVAPKGPGHLVRSEYEKGGGVPCLFAVHQNGSGKARELAMSYASAVGGGRSGIIETTFKDEVETDLFGEQTVLCGGLVELIKNGYETLVEAGYEPEMAYFETVHEVKLIVDLIYEGGIGNMNYSISNTAEYGEYQS

SEQ ID NO: 88027 - protein, 80 aa, Unknown
  Bacterial polypetide isolated from the Sargasso Sea
LVAVHKDASGTTENLAMSYASAIGGGRAGILRTTFKEETETDLFGEQVVLCGGLTELIRNGFETLVEAGYQPESAYFETL

SEQ ID NO: 88028 - protein, 155 aa, Unknown
  Bacterial polypetide isolated from the Sargasso Sea
MFYEKDANPNLIKDKKVAIFGYGSQGHAHALNLKDSGVKNVVVALREGSSSKKKAESEGLKVMSLSDAAAWADVVMVLTPDELQASIYKNHIEQRMREGTSLAFAHGLNIHFDLIKARKDLDVFMVAPKGPGHLVRSEYQRGGGVPCLMAVHKDS

SEQ ID NO: 88029 - protein, 262 aa, Unknown
  Bacterial polypetide isolated from the Sargasso Sea
GSWAKAEAAGFDVKEVGEAVPNADLVMMLIPDEKQSAMYENHLKDNIKDGAVLAFAHGFNIHFEMIIPRDDLDVIMVAPKGPGHTVRSQYESGAGVPCLLAVHRNVSGKAKDVGLSYASMIGSGRAGIIETNFKDETETDLFGEQAVLCGGLTSLIQTGYDVLVENGYPPEMAYFECLHEVKLIVDLIYEGGLQNMRYSISNTAEYGDYVTGPKIVNENTKETMQKILTEIQSGEFAKDFMNDCNSGGQKMSEYRKNSSEHS

SEQ ID NO: 88030 - protein, 271 aa, Unknown
  Bacterial polypetide isolated from the Sargasso Sea
MFYEKDTDPNLIKGKKIAIFGYGSQGHAHALNLKDSGVKEVVVALRDGSSSKAKAESKGLKVMNLSDAAEWADVVMVLTPDELQATIYKNHIEQRVREGTSIAFAHGLNIHYDLIKARKDLDVFMVAPKGPGHLVRSEFEKGGGVPCLFAVHQNGSGKARDLAMSYASAIGGGRSGIIETTFKDEVETDLFGEQTVLCGGLVELIKNGYETLVEAGYEPEMAYFETVHEVKLIVDLIYEGGIANMNYSISNTAEYGEYVTGPKIINKEETK

SEQ ID NO: 88031 - protein, 293 aa, Unknown
  Bacterial polypetide isolated from the Sargasso Sea
ALNLKDSGVKEVVVALRDGSSSIEKAESKGLKVMNLSDAAEWADVVMILTPDELQATIYKNHIEQRVKEGTSIAFAHGLNVHYDLIKARKDLDVFMVAPKGPGHLVRSEYEKGGGVPCLFAVHQNGSGKARDLAMSYASAIGGGRSGIIETTFKDEVETDLFGEQTVLCGGLVELIKNGYETLVEAGYEPEMAYFETVHEVKLIVDLIYEGGIANMNYSISNTAEYGEYESGPRIINKEETKKRMKEVLADIQSGKFTKQWMDECKNGQKNFLATRAKLAEHPVKKLVLLKRN

SEQ ID NO: 88032 - protein, 247 aa, Unknown
  Bacterial polypetide isolated from the Sargasso Sea
MKTYYDKDTNKDLIKNKKVAIFGYGSQGHAHALNLKDSGVKEVVVALREGSLSVKKAESAGLKVMSLSDAAAWADVVMMLTPDELQSEIYKNHIEQRMKEGTSLAFAHGLNIHFDLINARKDLDVFMVAPKGPGHTVRSEYQKGGGVPCLMAVHKDSSGKAKDLALSYASAVGGGKAGIIETTFKDECETDLFGEQTVLCGGLVELIKNGFETLTEAGYPPEMAYFETLHEVKLIVDLIYEGGIANM

SEQ ID NO: 88033 - protein, 137 aa, Unknown
  Bacterial polypetide isolated from the Sargasso Sea
LVELIKNGFETLTEAGYPLEMAYFETLHEVKLIVDLIYEGGIANMNYSISNTAEYGEYVSGKKIVDSKTKEKMKEVLKDIQSGKFTKKWMEEHRSGQKNFLKMRKDLANHPIEKVGKELRAMMPWIGKNKLVDKDKN

SEQ ID NO: 88034 - protein, 172 aa, Unknown
  Bacterial polypetide isolated from the Sargasso Sea
GGTRAGVLETSFREETETDLFGEQAVLCGGMTALIKAGYETLVEAGYSPEMAYFECLHETKLIVDLLHEGGISNMHYSISNTAEFGDYLTGPRIITEETKKEMKKVLHDIQSGNFADKFLDDCRQSNDGSGGPFLKNNREKTKEHSIESVGKELRSKMKFLSEKKLVDKDKN

SEQ ID NO: 88035 - protein, 248 aa, Unknown
  Bacterial polypetide isolated from the Sargasso Sea
ALNLRDSGVKEVVVALREGSSSIEKAESKGLKVMNLSDAAEWADVVMILTPDELQASIYKNHIEQRVKEGTSIAFAHGLNVHYDLIKARKDLDVFMVAPKGPGHLVRSEYEKGGGVPCLFAVHQDGSGKARDLAMSYASAVGGGRSGIIETTFKDEVETDLFGEQTVLCGGLVELIKNGYETLVEAGYEPEMAYFETVHEVKLIVDLIYEGGIANMNYSISNTAEYGEYQSGPRIIKKDETKQRMKEV

SEQ ID NO: 88036 - protein, 249 aa, Unknown
  Bacterial polypetide isolated from the Sargasso Sea
KNHIEQRMREGTSLAFAHGLNIHFNLINSRKDLDVFMVAPKGPGHLVRSEYQRGGGVPCLMAVHKDSSGKARDLAMSYACAVGGGRSGIIETTFKDECETDLFGEQTVLCGGLVELIKNGFETLTEAGYPPEMAYFETLHEVKLIVDLIYEGGIANMNYSISNTAEYGEYVSGRKIVDPKTKERMKEVLKDIQSGKFTKQWIDECKGGQKNFLKMREELAKHPIEKVGKKLRDLMPWIRKNKLVDKSKN

SEQ ID NO: 88037 - protein, 270 aa, Unknown
  Bacterial polypetide isolated from the Sargasso Sea
YEKDTDVNLIKDKKIAIFGYGSQGHAHALNLKDSGVKEVVVALREGSSSKPKAESKGLKVMNLSDAAEWADVVMILTPDELQASIYKNHIEQRVRKGTSLAFAHGLNVHYDLIKAREDLDVFMVAPKGPGHLVRSEYVKGGGVPCLFAVHQNGSGKARDLAMSYASAVGGGRSGIIETTFKDEVETDLFGEQTVLCGGLVELIKNGYETLVEAGYEPEMAYFETVHEVKLIVDLIYEGGIANMNYSISNTAEYGEYESGPRVIKKDETKK

SEQ ID NO: 88038 - protein, 276 aa, Unknown
  Bacterial polypetide isolated from the Sargasso Sea
DRAHIDNKTVAVIGYGSQGHAHARNLHDSGVNVIVGLRENSSSWETVKNDGLNVATPIEATKEADIIMMLVPDTAASSVYKEIEPAIEEGNTLMFAHGFNIHYSQVEPPGNIDVSMIAPKSPGNLVRRNYVKDQGTPALLAIYQDYTGKAKEVALAYAEGIGCARAGVVETSFQEEVESDLFGEQVILCGGVTSLMRMSFETLVENGYSPEMAYFECLNELKLIVDLIYEGGLMKMWTDVSDTAEYGGLTRGPRVVDERVKENMAVVLKEIKMEHL

SEQ ID NO: 88039 - protein, 163 aa, Unknown
  Bacterial polypetide isolated from the Sargasso Sea
GIIETTFKDEVKTDLFGEQTVLCGGLVELIKNGYETLVEAGYEPEMAYFETVHEVKLIVDLIYEGGIANMNYSISNTAEYGEYVSGPKIINKEETKKRMKEVLKDIQSGKFTKQWMDECKNGQKNFLKTREKLAEHPVEKVGAVLRAMMPWIAKKKLVDSDKK

SEQ ID NO: 88040 - protein, 158 aa, Unknown
  Bacterial polypetide isolated from the Sargasso Sea
TTFKDECETDLFGEQTVLCGGLVELIKNGFETLTEAGYPPEMAYFETLHEVKLIVDLIYEGGIANMNYSISNTAEYGEYVSGKRVVDSKTKEKMKEVLKDIQSGKFTKEWMQEHKSGQKNFLRMRDELAKHQIEKVGKELRAMMPWIGKNKLVDKDKN

SEQ ID NO: 88041 - protein, 113 aa, Unknown
  Bacterial polypetide isolated from the Sargasso Sea
CLHEVKLIVDLIYEGGIANMNYSISNTAEYGEYVSGPRIINKDETKKRMKEVLEDIQSGKFTKQWMDECKNGQKNFLKTREELAKHSIETVGTKLRAMMPWIGKKKLVDSDKK

SEQ ID NO: 88042 - protein, 219 aa, Unknown
  Bacterial polypetide isolated from the Sargasso Sea
DDLDVFMIAPKGPGHTVRSEYKRGGGVPCLVAIDSDKSGDALSIALSYASAIGGGKAGTIETTFKDECETDLFGEQAVLCGGVVELIRNGFETLTEAGYPPEMAYFECLHEVKLIVDLIYEGGIANMNYSISNTAEYGEYVSGPIVVDGNTKAKMKGVLDKIQSGDFTREWIEEYKNGAKNFHAMRAKIDGHQIEEVGQKLRSMMPWIAKNKLVDKEKN

SEQ ID NO: 88043 - protein, 310 aa, Unknown
  Bacterial polypetide isolated from the Sargasso Sea
MRVYYDRDADLNLIKIKKIVIVGYGSQGHAHAMNLRDSGIENVAIALREDSATREKAKKASFDVMTPTEAADWADIIMMLTPDELQSDIYNNEIAPNIKEGTALAFAHGLNIHFDLIQPGEGIDVIMIAPKGPGHTVRAEYERGAGVPCLVAVDKNPSGNALDIAIAYASGVGGGRAGIIETTFKEECETDLFGEQSVLCGGLTHLITAGYETLVEAGYAPEMAYFECLHEVKLIVDLLYEGGMANMRYSISNTAEYGDYSRGPRLITDETKKEMKKILAEIQSGQFTKEWMNEHKSGQTKFKLMRKQQA

SEQ ID NO: 88044 - protein, 70 aa, Unknown
  Bacterial polypetide isolated from the Sargasso Sea
VLCGGLVELIKNGYETLVEAGYEPEMAYFETVHEVKLIVDLIYEGGIANMNYSISNTAQYGEYQSASKNN

SEQ ID NO: 88045 - protein, 211 aa, Unknown
  Bacterial polypetide isolated from the Sargasso Sea
MFYEKDADVNLIKDKKVAIFGYGSQGHAHALNLKDSGVKEVVVALRDGSASKAKAESKGLKVMNLSDAAEWADVCMILTPDELQATIYKNHIEQRIKEGTSLAFAHGLNIHYDLIKARKDLDVFMVAPKGPGHLVRSEFEKGGGVPCLMAVHQDGTGKARDLALSYASAIGGGRSGIIETTFKDECETDLFGEQTVLCGGLVELIKNGYET

SEQ ID NO: 88046 - protein, 187 aa, Unknown
  Bacterial polypetide isolated from the Sargasso Sea
HQNGSGNARDLAMSYASAIGGGRSGIIETTFKDEVETDLFGEQTVLCGGLVELIKNGYETLIEAGYEPEMAYFETVHEVKLIVDLIYEGGIANMNYSISNTAEYGEYVTGPRIINKEETKKRMKEVLADIQSGKFTKEWMDECKNGQKNFLKTREKLAEHPVEKVGAELRALMPWIAKKKLIDSDKK

SEQ ID NO: 88047 - protein, 148 aa, Unknown
  Bacterial polypetide isolated from the Sargasso Sea
MFYEKDANVNLIKDKKVAIFGYGSQGHAHALNLKDSGVKNVVVALREGSSSIKKAESEGLKVMSLSDAAAWADVVMVLTPDELQASIYKNHIEQRMKQGTSLAFAHGLNIHFNLINSRKDLDVFMVAPKGPGHLVRSEYQRGGGVPCL

SEQ ID NO: 88048 - protein, 219 aa, Unknown
  Bacterial polypetide isolated from the Sargasso Sea
MKVYYDKDCDLSIIQGKKVAIIGYGSQGHAQACNLKDSGVDVTVGLRKGSATVAKAEAHGLKVTDVASAVAAADLVMILTPDEFQSSLYKNEIEPNIKKGATLAFSHGFAIHYNQVVPRADLDVIMIAPKAPGHTVRSEFVKGGGIPDLIAIYQDASGNAKNVALSYAAGVGGGRTGIIETTFKDETETDLFGEQAVLCGGTVELVKAGFETLVEAGYA

SEQ ID NO: 88049 - protein, 247 aa, Unknown
  Bacterial polypetide isolated from the Sargasso Sea
MSFRKNVYIKEIEPNLKEGKILSFAHGFNIRFGLIKPPSFVDIVMIAPKGPGHTVRWEYQNGQGVPALFAVEQDSSGSARSLAMAYAKGIGGTRAGILETNFKEETETDLFGEQAVLCGGLSELVKSGFETLVEAGYQPELAYFECLHEVKLIVDLMVKGGLSQMRDSISNTAEYGDYVSGKRLINSDTKKEMQKILKDIQDGTFAKNFVEECDKNKPLMTRLREENSKHEIEKVGKGLRSMFSWLK

SEQ ID NO: 88050 - protein, 217 aa, Unknown
  Bacterial polypetide isolated from the Sargasso Sea
MKTYYDKDTNKDLIKNKKVAIFGYGSQGHAHALNLKDSGVKEVVVALREGSSSIKKAESAGLKVMSLSDAAAWADVVMMLTPDELQSEIYKNHIEQRMREGTSLAFAHGLNIHFDLIKARKDLDVFMVAPKGPGHTVRSEYQKGGGVPCLMAVHKDSSGKAKNLALSYASAVGGGKAGIIETTFKDECETDLFGEQTVLCGGLVELIKNGFETLTEA

SEQ ID NO: 88051 - protein, 184 aa, Unknown
  Bacterial polypetide isolated from the Sargasso Sea
MAAEIFYDADADQALLENKKIAILGYGSQGHAHAQNLRDSGCHVIVGTRGKGPSHELAESHGFQPMSIQQAAEEADIVNLLLPDERQGDVYEQEVLPVLSPGNILMCSHGFNLHFGYVTAPDGVATLLVAPKGPGHLVRSEYLAGGGVPCLVAVGNPDDETTFSIGLAYASAIGGGRAGIIRTT

SEQ ID NO: 88052 - protein, 177 aa, Unknown
  Bacterial polypetide isolated from the Sargasso Sea
MKTYYDKDTNKNLIKDKKVAIFGYGSQGHAHALNLKDSGVKEVVVALREGSSSIKKAESAGLKVMSLSDAAAWADVVMMLTPDELQSEIYKNHIEQRMKEGTSLAFAHGLNIHFNLINARKDLDVFMVAPKGPGHTVRSEYQKGGGVPCLMAVHKDSSGKAKDLALSYASAVGGGKA

SEQ ID NO: 88053 - protein, 106 aa, Unknown
  Bacterial polypetide isolated from the Sargasso Sea
IVDLIYEGGIANMNYSISNTAEYGEYVSGPRIINKEETKKRMKEVLEDIQSGKFTKQWMEECKNGQKNFLKTRDELAKHSIETVGTKLRAMMPWIGKKKLVDSDKK

SEQ ID NO: 88054 - protein, 217 aa, Unknown
  Bacterial polypetide isolated from the Sargasso Sea
DVFMVAPKGPGHLVRSEFEKGGGVPCLFAVHQNGSGKARDLAMSYASAVGGGRSGIIETTFKDEVETDLFGEQTVLCGGLVELIKNGYETLVEAGYEPEMAYFETVHEVKLIVDLIYEGGIANMNYSISNTAEYGEYTSGPRIINKEETKKRMNEVLKDIQSGKFTKEWMEECKNGQKNFLKIREKLADHPVEKVGAGLRAMMPWIAKKKLIDSDKK

SEQ ID NO: 88055 - protein, 287 aa, Unknown
  Bacterial polypetide isolated from the Sargasso Sea
VAVFGYGSQGHAHALNLKDSGVKEVVVALREGSSSIKKAESAGLKVMSLSDAAAWADVVMMLTPDELQSEIYKNHIEQRMREGTSLAFAHGLNVHFDLIKARKDLDVFMVAPKGPGHTVRSEYQKGGGVPCLMAVHKDSSGKAKDLALSYASAVGGGKAGIIETTFKDECETDLFGEQTVLCGGLVELIKNGFETLTEAGYPPEMAYFETLHEVKLIVDLIYEGGIANMNYSISNTAEYGEYVSGKRIVDTKTKEKMKEVLKDIQSGKFTKQWMEEHKSGQKNFLKM

SEQ ID NO: 88056 - protein, 138 aa, Unknown
  Bacterial polypetide isolated from the Sargasso Sea
MFYEKDTDVNLIKDKKIAIFGYGSQGHAHALNLKDSGVKEVVVALREGSSSKPKAVSKGLKVMNLSDAAEWADVVMILTPDELQASIYKNHIEQRVRKGTSLAFAHGLNVHYDLIKNREDLDVFMVAPKGPGHLVRSE

SEQ ID NO: 88057 - protein, 170 aa, Unknown
  Bacterial polypetide isolated from the Sargasso Sea
MFYEKDADVDLIKNKKIAIFGYGSQGHAHALNLKDSGVKEIVVALRDGSSSVAKAESKGLKVMNLSDAAAWADVVMILTPDELQAEIYKNHIEQRVKEGTSIAFAHGLNVHYDLIKARKDLDVFMVAPKGPGHLVRSEYEKGGGVPCLFAVHQNGSGKARDLALSYASAS

SEQ ID NO: 88058 - protein, 62 aa, Unknown
  Bacterial polypetide isolated from the Sargasso Sea
CGGLSELVKSGFETLVEAGYQPELAYFECLHEVKLIVDLMVKGGLSQMRDSISNTVRISEIM

SEQ ID NO: 88059 - protein, 101 aa, Unknown
  Bacterial polypetide isolated from the Sargasso Sea
YEGGIANMNYSISNTAEYGEYQSGPRVINKEETKKRMKEVLADIQSGKFTKEWMAECKSGQKNFLATRAKLAEHPVEKVGANLRAMMPWIGKKKLVDSDKK

SEQ ID NO: 88060 - protein, 147 aa, Unknown
  Bacterial polypetide isolated from the Sargasso Sea
MANIYYEADADRSYIDGKKVAVLGYGSQGHAHALNLKESGVEVCVGLRPESSSVAKAEEAGLTVMNIADASAWANAVMILLPDTEQADIYDAHIGPNLEAGDIVMFSHGFNIRFDLIQPPSNVDVVMVAPKGPGHLVRRTYVEGGGV

SEQ ID NO: 88061 - protein, 174 aa, Unknown
  Bacterial polypetide isolated from the Sargasso Sea
MKVYYEKDSELDLVKSKKVAIYGYGSQGHAHALNLRDAGVKEVVVALREGSSSVAKAEAEGLKVMSMSDAAEWADILMMLIPDELQADVYKNHIEQRAKQGAALAFAHGLNVHFNLINARDDLDVFMIAPKGPGHTVRSEFKKGGGVPCLVAVDSDKTGKCPKIALSYASAIGG

SEQ ID NO: 88062 - protein, 243 aa, Unknown
  Bacterial polypetide isolated from the Sargasso Sea
KEADVMMMALPDTEQAAIYSEQIAPNLSAGNALAFSHGFNIHFDQIQPPDDVDVWMIAPKGPGHNVRRTYAEGGGVPALVAIHQDATGNALNDALAYAKGIGGTRGGVLTTTFAEETETDLFGEQVVLCGGLTELIRAGYDTLVEAGYQPESAYFETLHEVKLIVDFIYEAGIAGMRYSISTTAEYGDLTRGPRIITDETRAEMKRILGEIQDGTFANEWIEENRSGLANYKRLVEEGKEHPI

SEQ ID NO: 88063 - protein, 131 aa, Unknown
  Bacterial polypetide isolated from the Sargasso Sea
GYETLVEAGYDPEMAYFETVHEVKLIVDLIYEGGIANMNYSISNTAEYGEYMSGPRIVNKDETKKRMKEVLNDIQSGKFTKQWIDECKNGQKEFLKIRAKLSEHPVEKVGAELRAMMPWIGKKKLIDSDKK

SEQ ID NO: 88064 - protein, 200 aa, Unknown
  Bacterial polypetide isolated from the Sargasso Sea
MKKGVGVPCLFAVHQNGSVKARDLALSYASAVGGGRSGIIETTFKDEVETDLFGEQTVLCGGLVELIKNGYETLVEAGYEPEMAYFETVHEVKLIVDLIYEGGIANMNYSISNTAEYGEYQSGPRIINKEETKKRMKEVLSEIQSGKFTKEWMDECKNGQKNFLATRAKLAEHSVEKVGAELRAMMPWISKKKLVDSDKS

SEQ ID NO: 88065 - protein, 191 aa, Unknown
  Bacterial polypetide isolated from the Sargasso Sea
CLMAVHKDSSGKAKELALSYASAVGGGKAGIIETTFKDECETDLFGEQTVLCGGLVELIKNGFETLTEAGYPPEMAYFETLHEVKLIVDLIYEGGIANMNYSISNTAEYGEYVSGKRIVDSKTKEKMKEVLKDIQSGKFTKQWMDEHKSGQKNFLKMRKDLADHPIEKVGKELRAMMPWIGKNKLVDKDKN

SEQ ID NO: 88066 - protein, 278 aa, Unknown
  Bacterial polypetide isolated from the Sargasso Sea
ASKAKSDGLEVLSVAEASERADWIMILLPDEFQKDVYSKEIAPHLKAGKILSFAHGFNIRFELIKPPEFVDVVMIAPKGPGHTVRWEYQNGQGVPALFAIEQDASGNARALAMAYAKGIGGTRAGILETNFKEETETDLFGEQAVLCGGLSELVKAGFETLVEAGYQPELAYFECLHEVKLIVDLMVKGGLTAMRDSISNTAEYGDYVSGPRLITKETKEEMKNILADIQDGTFAKNFVKECDAGKPEMKRIRQKDSELPIEKVGKTLRSMFSWLKSD

SEQ ID NO: 88067 - protein, 154 aa, Unknown
  Bacterial polypetide isolated from the Sargasso Sea
GILETNFKEETETDLFGEQAVLCGGLSELVKAGFETLVEAGYQPELAYFECLHEVKLIVDLMVKGGLTAMRDSISNTAEYGDYVSGPRLITKETKEEMKNILADIQDGTFANNFVKECDAGKPEMKRIRQRDSELPIEKVGKTLRSMFSWLKSD

SEQ ID NO: 88068 - protein, 238 aa, Unknown
  Bacterial polypetide isolated from the Sargasso Sea
KYLAFGHGFNIHYNQIVPDSDINVFMVAPKAPGHTVRGTYEEGAGVPGLIAVNQDPGGNTKKIALAYAAGIGSARVGIIETTFKDETETDLFGEQSVLCGGLSSLILAGFETLIEAGYPPEMAYFECLHEVKLIVDLVYQGGISNMRYSISDTAKYGDITRGPRLIDDSVKKRMKNILDEIQSGQFADEWIKENKSGRPNYNKLLKDGETHPIEDIGQTLRSMMTPLFKKKLVDKDKN

SEQ ID NO: 88069 - protein, 276 aa, Unknown
  Bacterial polypetide isolated from the Sargasso Sea
SQGHAHANNLNDSGVDITVGLREGSSSWKKAEDAGLKVKSVSNSVIDADMVMILAPDEFQKGIYENQIKPNLKPNAILGFAHGFNIHFKKIIPEKGNSVIMIAPKGPGHTVRSTYINGGGVPSLIAIFEDATTDKFSAKEIALSYAKANGGTRAGVLETSFKEETETDLFGEQAVLCGGMTALIKAGYETLVEAGYSPEMAYFECLHETKLITDLIQEGGIANMHYSISNTAEYGDYLSGPKVITDKTKEAMKEILNNIQSGNFADEFLDDCRQSI

SEQ ID NO: 88070 - protein, 129 aa, Unknown
  Bacterial polypetide isolated from the Sargasso Sea
MEVFYEKDSNPELLKDKTIAIIGYGSQGHAHANNLKDSGFKVILGLRDGSSSAVKASEAGFEVASNVDAASKADLLMMLIPDEFQGITYKEEIEPNLKKGATLAFAHGFNIHYEQIVPREDLDVIMIAP

SEQ ID NO: 88071 - protein, 268 aa, Unknown
  Bacterial polypetide isolated from the Sargasso Sea
SWADIIMMLTPDELQSDIYNKEISENIKDGTALAFAHGLNIHFDLIKPKENIDVIMMAPKGPGHTVRAEYVRGAGVPCLVAVDKNPSGNALEIAIAYSSAIGGGRAGIIETSFKEECETDLFGEQSVLCGGLTHLIIAGYETLVEAGYAPEMAYFECLHEVKLIVDLLYEGGMANMRYSISNTAEYGDYSRGPRLITDETKKEMKKILSEIQSGQFAKEWMEEHRSGQTKFKTMRKKQAEHSIEQVGEKLRTLMPWIAEGKMVDKSKN

SEQ ID NO: 88072 - protein, 294 aa, Unknown
  Bacterial polypetide isolated from the Sargasso Sea
DINKDFVDGKKIAVLGYGSQGHAHARNLNDSGMDVVVGLYEGSKSKQVAEKDGLKVLSNSEAVKQSDIIMFCLPDTIQGKVYKEDVEENLTEGKMLMFCHGFSIFYEQIKPPEFVDVAMIAPKGPGHIVRRVFESGQGVPCLVAVYQDYSGKAQEVALGYGLGIGGARAGILETTFKEETETDLFGEQAVLCGGVTSLVQSAFEVLVEAGYQPESAYFEVLHELKLIVDLMYQGGLGEMRFSISDTAEYGDYTRGPVVVDPSVKENMKKVLEQIQSGQFAKEWIAENDEGLHKF

SEQ ID NO: 88073 - protein, 245 aa, Unknown
  Bacterial polypetide isolated from the Sargasso Sea
QRVREGTSIAFAHGLNIHYDLINARKDLDVFMVAPKGPGHLVRSEYQKGGGVPCLFAVHQNGSGKARELAMSYASAVGGGRSGIIETTFKDEVETDLFGEQTVLCGGLVELIKNGYETLVEAGYEPEMAYFETVHEVKLIVDLIYEGGIANMNYSISNTAEYGEYTSGPKIINKEETKKRMKEVLDDIQSGKFTKQWMDECKNGQKNFLKTREKLAEHPVEKVGASLRAMMPWISKKKLVDSDKN

SEQ ID NO: 88074 - protein, 131 aa, Unknown
  Bacterial polypetide isolated from the Sargasso Sea
LMVAMVKAGVELAFETMTAAGIIEESAYYESLHETPLIANTIARKKLFEMNRTISDTAEYGCYLYNHACLPLLADFMKNIDTDVIGKGLGEQSNQVDNKALIEINTALREHPVEIVGAKLRGYMSAMKKIV

SEQ ID NO: 88075 - protein, 261 aa, Unknown
  Bacterial polypetide isolated from the Sargasso Sea
MFYEKDTDVNLIKDKKIAIFGYGSQGHAHALNLKDSGVKEVVVALREGSSSIPKAESKGLKVMNLSDAAEWADVVMILTPDELQASIYKNHIEQRVKEGKSIAFAHGLNVHYDLIKARKDLDVFMVAPKGPGHLVRSEYEKGGGVPCLFAVHQNGSGKARDLAMSYASAVGGGRSGIIETTFKDEVETDLFGEQTVLCGGLVELIKNGYETLVEAGYEPEMAYFETVHEVKLIVDLIYEGGIANMNYSISNTAEYGEYQSG

SEQ ID NO: 88076 - protein, 198 aa, Unknown
  Bacterial polypetide isolated from the Sargasso Sea
DLDVIMVAPKGPGHTVRSQYESGAGVPCLLAVYRNISGKAKDVGLSYASMIGSGRAGIIETNFKDETETDLFGEQAVLCGGLTSLIQTGYEVLVENGYPPEMAYFECLHEVKLIVDLIYEGGLQNMRYSISNTAEYGDYVTGPKIVNENTKETMQKILTEIQSGEFAKDFMNDCNSGGQKMSEYRKNSSEHSIESVGE

SEQ ID NO: 88077 - protein, 290 aa, Unknown
  Bacterial polypetide isolated from the Sargasso Sea
VVVALREGSSSIEKAESKGLKVMNLSDAAEWADVVMILTPDELQATIYKNHIEQRVKEGTSIAFAHGLNVHYDLIKARKDLDVFMVAPKGPGHLVRSEYEKGGGVPCLFAVHQNGSGKARDLAMSYASAIGGGRSGIIETTFKDEVETDLFGEQTVLCGGLVELIKNGYETLVEAGYEPEMAYFETVHEVKLIVDLIYEGGIANMNYSISNTAEYGEYESGPRIINKEETKKRMKEVLADIQSGKFTKQWMDECKNGQKNFLATRAKLAEHPVEKVGATLREMMPWIAKK

SEQ ID NO: 88078 - protein, 129 aa, Unknown
  Bacterial polypetide isolated from the Sargasso Sea
YETLTEAGYAPEMAYFECLHEVKLIVDLIYEGGIANMNYSISNTAEYGEYVTGPRLITSETKAEMKRILNDIQSGKFTRDWMLENKVNQTSFKATRRKVADHPIEAIGNELRAMMPWITANRLVDKDKN

SEQ ID NO: 88079 - protein, 281 aa, Unknown
  Bacterial polypetide isolated from the Sargasso Sea
KGLKVMNLSDAAEWADVCMILTPDELQATIYKNHIEQRIKEGTSLAFAHGLNIHYDLIKARKDLDVFMVAPKGPGHLVRSEFEKGGGVPCLMAVHQDGTGKARDLALSYASAIGGGRSGIIETTFKDECETDLFGEQTVLCGGLVELIKNGYETLVEAGYEPEMAYFECLHEVKLIVDLIYEGGIANMNYSISNTAEYGEYVSGPRIINKEETKKRMKEVLEDIQSGKFTKQWMDECKNGQKNFLKTREELAKHSIETVGTKLRAMMPWIGKKKLVDSDKK

SEQ ID NO: 88080 - protein, 273 aa, Unknown
  Bacterial polypetide isolated from the Sargasso Sea
MRVYYDRDADLNLIKDKKISIVGYGSQGHAHAMNLRDSGIENVSIALREGSNSRSKAEQANFKVMTPAEAASWADVIMMLTPDELQSEIYKNDIAENIKEGTTIAFAHGLNIHFDLIKPKEGIDVIMVAPKGPGHTVRAEYVRGAGVPCLVAVDKNPSGNALEIGIAYASAIGGGRAGIIETTFKEECETDLFGEQSVLCGGLTHLILAGYETLVEAGYAPEMAYFECLHEVKLIVDLLYEGGMANMRYSISNTAEYGDYSRGPRLITDETKK

SEQ ID NO: 88081 - protein, 196 aa, Unknown
  Bacterial polypetide isolated from the Sargasso Sea
MYYEKDADVSLIKNKKIAIFGYGSQGHAHALNLKDSGVKEVVVALRENSQSKKKAESEGLKVMSLSDAAAWADVVMVLTPDELQSQIYKNHIEQRMKAGSSLAFAHGLNIHFNLINARKDLDVFMVAPKGPGHLVRSEFQKGGGVPCLMAVHKDSSGKARDLAMSYASAIGGGKSGIIETTFKDECETDLLESRQF

SEQ ID NO: 88082 - protein, 169 aa, Unknown
  Bacterial polypetide isolated from the Sargasso Sea
IGGGRSGIIETTFKDEVETDLFGEQSVLCGGLVELMKNGYETLVEAGYEPEMAYFETVHEVKLIVDLIYEGGIANMNYSISNTAEYGEYQSGPRIINKEETKKRMKEVLSEIQSGKFTKDWMDECKNGQKNFLATRAKLAEHPVEKVGAGLRAMMPWIGKKKLVDSDKK

SEQ ID NO: 88083 - protein, 136 aa, Unknown
  Bacterial polypetide isolated from the Sargasso Sea
GLTELIRNGFETLVEAGYQPESAYFETLHEVKLIVDLMYEGGFEWMRHSISDTAEYGDFSRGSRIITSETKEEMKKVLEEIQSGAFAKEWMSQAREGSPFLNEKRAEASKHQLEEVGKGLREMMPFLNAKDVKKDK

SEQ ID NO: 88084 - protein, 134 aa, Unknown
  Bacterial polypetide isolated from the Sargasso Sea
LIKNGFETLTEAGYPPEMAYFETLHEVKLIVDLIYEGGIANMNYSISNTAEYGEYVSGKRIVDSKTKEKMREVLKDIQSGKFTKQWMDEHKSGQKNFLKMRQDLAKHPIEKVGKDLRAMMPWIGKNKLVDKDKN

SEQ ID NO: 88085 - protein, 272 aa, Unknown
  Bacterial polypetide isolated from the Sargasso Sea
MFYEKDADVNLIKDKKIAIFGYGSQGHAHALNLKDSGVKEVVVALREGSSSKAKAESKGLKVMNLSDAAEWADVVMILTPDELQATIYKNHIEQRVREGTSIAFAHGLNIHYDLIKARKDLDVFMVAPKGPGHLVRSEFEKGGGVPCLFAVHQNGSGKARDLAMSYASAIGGGRSGIIETTFKDEVETDLFGEQTVLCGGLVELIKNGYETLVEAGYEPEMAYFETVHEVKLIVDLIYEGGIANMNYSISNTAEYGEYVTGPKIINKEETKK

SEQ ID NO: 88086 - protein, 300 aa, Unknown
  Bacterial polypetide isolated from the Sargasso Sea
FYEKDTDVNLIKNKKIAIFGYGSQGHAHALNLKDSGVKEVVVALRDGSASKVKAESKGLKVMNLSDAAEWADVVMILTPDELQATIYKNHIEQRVREGTSIAFAHGLNIHYDLIKARKDLDVFMVAPKGPGHLVRSEFQKGGGVPCLFAVHQNGSGKARDLAMSYASAVGGGRSGIIETTFKDEVETDLFGEQTVLCGGLVELIKNGYETLVEAGYEPEMAYFETVHEVKLIVDLIYEGGIANMNYSISNTAEYGEYVTGPKIINKEETKKRMKEVLADIQSGKFTEDWMNECKNGQKNF

SEQ ID NO: 88087 - protein, 224 aa, Unknown
  Bacterial polypetide isolated from the Sargasso Sea
MFYEKDTDVNLIKDKKIAIFGYGSQGHAHALNLKDSGVKEVVVALRDGSSSIPKAESKGLKVMNLSDAAAWADIVMILTPDELQASIYKNHIEQRVRKGTSLAFAHGLNVHYELIKAREDLDVFMVAPKGPGHLVRSEYVKGGGVPCLFAVHQNGSGKARDLAMSYASAVGGGRSGIIETTFKDEVETDLFGEQTVLCGGLVELIKKGYETLVEAGYEPEMAYL

SEQ ID NO: 88088 - protein, 188 aa, Unknown
  Bacterial polypetide isolated from the Sargasso Sea
QNGQGVPALFAVEQDSSGSARSLAMAYAKGIGGTRAGILETNFKEETETDLFGEQAVLCGGLSELVKSGFETLVEAGYQPELAYFECLHEVKLIVDLMVKGGLSQMRDSISNTAEYGDYVSGKRLINNDTKKEMQKILKDIQDGTFAKNFVEECDKNKPLMTKLREENSKHEIEKVGKGLRSMFSWLK

SEQ ID NO: 88089 - protein, 153 aa, Unknown
  Bacterial polypetide isolated from the Sargasso Sea
MFYEKDTDPNLIKNKKIAIFGYGSQGHAHALNLKDSGVKEVVVALRDGSASKAKAESKGLKVMNLSDAAEWADVIMVLTPDELQASIYKNHIEQRVKEGTSIAFAHGLNVHYDLIKARKDLDVFMVAPKGPGHIVRSEFEKGGGVTMSLCSSS

SEQ ID NO: 88090 - protein, 225 aa, Unknown
  Bacterial polypetide isolated from the Sargasso Sea
SVMMIAPKGPGHTVRSTYMSGGGVPSLIAIYRDALNGKDFNAKDVALSYAKANGGTRAGVLETTFREETETDLFGEQAVLCGGLTALIKAGYETLVEAGYSPEMAYFECLHETKLIIDLLYEGGISNMHYSISNTAEFGDYLIGPRIITEETKKEMKKVLEDIQSGDFADKYLDDCRQSNDGSGGPFLKRNREKTKEHSIELVGKELRSKMKFLSEKKLVDKDKN

SEQ ID NO: 88091 - protein, 217 aa, Unknown
  Bacterial polypetide isolated from the Sargasso Sea
KGPGHTVRSTYINGGGVPSLIAIFEDATTEKFSAKEIALSYAKANGGTRAGVLETSFKEETETDLFGEQAVLCGGITALIKAGYETLVEAGYSPEMAYFECLHETKLITDLIQEGGIANMHYSISNTAEYGDYLSGPKVITKKTKEAMKEILDNIQSGNFADEFLDDCRQSNDGSGGPFMKSNRKSTEDHPIEKVGKELRSKMKFLNSEKLVDKEKN

SEQ ID NO: 88092 - protein, 170 aa, Unknown
  Bacterial polypetide isolated from the Sargasso Sea
MKTYYDKDTNKDLIKDKKVAIFGYGSQGHAHALNLKDSGVKEVVVALREGSSSIKKAESAGLKVMSLSDAAAWADVVMMLTPDELQSEIYKNHIEQRMKEGTSLAFAHGLNIHFNLINARKDLDVFMVAPKGPGHTVRSEYQKGGGVPCLMAVHKDSSGKAKDLALSYAS

SEQ ID NO: 88093 - protein, 213 aa, Unknown
  Bacterial polypetide isolated from the Sargasso Sea
MYYEKDADVNLIKEKKVAIFGYGSQGHAHALNLKDSGVKEVVVALRENSPSAKKAKSEGLKVMSLSDAAAWADVVMLLTPDELQSQIYKNHIEQRMREGTSLAFAHGLNIHFNLINSRKDLDVFMVAPKGPGHLVRSEYQRGGGVPCLMAVHKDSSGKARNLAMSYASAIGGGKSGIIETTFKDECETDLFGEQTVLCGGLVELIKNGYETLT

SEQ ID NO: 88094 - protein, 232 aa, Unknown
  Bacterial polypetide isolated from the Sargasso Sea
LKRRKKLSFAHGFNIRFGLIKPPSFVDVVMIAPKGPGHTVRWEYQNGQGVPALFAVEQDSSGSARSLAMAYAKGIGGTRAGILETNFKEETETDLFGEQAVLCGGLSELVKSGFETLVDAGYQPELAYFECLHEVKLIVDLMVKGGLSQMRDSISNTAEYGDYVSGKRLINSDTKKEMQKILKDIQDGTFAKNFVEECDKNKPLMTKLREENSKHEIEKVGKGLRSMFSWLK

SEQ ID NO: 88095 - protein, 311 aa, Unknown
  Bacterial polypetide isolated from the Sargasso Sea
MRVYYDRDADINLIKNKNIVIVGYGSQGHAHAMNLRDSGIENVVIALREGSPSRAKAENAGFKVLTPAEAASSANIIMMLTPDELQSDIYNNEIAANIEEGTAIAFAHGLNIHFDLIKPNKDIDVIMMAPKGPGHTVRAEYVRGAGVPCLVAVDQNPSGNALEIAIAYSSAIGGGRAGIIETTFKEECETDLFGEQSVLCGGLTHLILAGYETLVDAGYAPEMAYFECLHEVKLIVDLLYEGGMANMRYSISNTAEYGDYSRGPRLITEETKKEMKKILSEIQSGQFAKEWMEEHKSGQTKFKTMRKKQAE

SEQ ID NO: 88096 - protein, 211 aa, Unknown
  Bacterial polypetide isolated from the Sargasso Sea
MFYEKDANVNLIKDKKVAIFGYGSQGHAHALNLKDSGVKNVVVALREGSSSIKKAEKEGLKVMSLSDAAAWADVVMVLTPDELQASIYKNHIEQRMRQGTSLAFAHGLNIHFNLINSRKDLDVFMVAPKGPGHLVRSEYQRGGGVPCLMAVHKDSSGKARDLAMSYACAVGGGRSGIIETTFKDECETDLFGEQTVLCGGLVELIKNGFET

SEQ ID NO: 88097 - protein, 250 aa, Unknown
  Bacterial polypetide isolated from the Sargasso Sea
LKVMNLSDAAEWADVVMVLTPDELQATIYKNHIEQRVREGTSIAFAHGLNIHYDLIKARKDLDVFMVAPKGPGHLVRSEYEKGGGVPCLFAVHQNGSGKARELAMSYASAVGGGRSGIIETTFKDEVETDLFGEQTVLCGGLVELIKNGYETLVEAGYEPEMAYFETVHEVKLIVDLIYEGGIANMNYSISNTAEYGEYVTGPKIINKEETKKRMKEVLADIQSGKFTKDWMDECKNGQKNFLKTREKLA

SEQ ID NO: 88098 - protein, 226 aa, Unknown
  Bacterial polypetide isolated from the Sargasso Sea
MKTYYDKDTNKDLIKNKKVAIFGYGSQGHAHALNLKDSGVKEVVVALREGSSSIKKAESAGLKVMTLSDAAAWADVVMMLTPDELQSEIYKNHIEQRMREGTSLAFAHGLNIHFDLIKARKDLDVFMVAPKGPGHTVRSEYQKGGGVPCLMAVHKDSSGKAKDLALSYASAVGGGKSGIIETTFKDECETDLFGEQTVLCGGLVELIKNGFETLTEAGYPPRNGIL

SEQ ID NO: 88099 - protein, 289 aa, Unknown
  Bacterial polypetide isolated from the Sargasso Sea
NLKDSGAKVVVGLREGSSSASKAEEAGLEVKNISDAVSEADVVMILAPDEYQADLYKESIEQNLKPSAAIAFAHGFNIHYGQIKPQENHDIFMIAPKSPGHLVRSTYVNGKGVPTLIAIHNNASGNAKDIALSYASAIGGGRAGIIETNFKEETETDLFGEQAVLCGGVTALVKAGFETLVDAGYAPEMAYFECLNELKLIVDLMYEGGMTDMRYSISNTAEYGDLTKGPFLIDDHVKEKMKLVLADVQNGKFANDFVSEIKAGSPEFNRLRKEGSEHLIESTGKKLRS

SEQ ID NO: 88100 - protein, 142 aa, Unknown
  Bacterial polypetide isolated from the Sargasso Sea
VLCGGLTHLILAGYETLVDAGYAPEMAYFECLHEVKLIVDLLYEGGMANMRYSISNTAEYGDYTRGPRLITDETKKEMKKILSEIQSGQFAKEWMSEHKSGQTQFKTMRKNHAEHPIEAIGEKLRTLMPWIAEGKMVDKSKN

SEQ ID NO: 88101 - protein, 167 aa, Unknown
  Bacterial polypetide isolated from the Sargasso Sea
MYYEKDTDVNLIKDKKVAIFGYGSQGHAHALNLRDSGVKEVVVALRDGSSSAAKAESKGLKVMNLSDAAEWADVVMILTPDELQAAIYKNHIEQRVKEGTSIAFAHGLNIHYDLINARKDLDVFMVAPKGPGHLVRSEYEKGGGVPCLFAVHQNGSGKARELAMSYA

SEQ ID NO: 88102 - protein, 169 aa, Unknown
  Bacterial polypetide isolated from the Sargasso Sea
VGGGRSGIIETTFKDEVETDLFGEQTVLCGGLVELIKNGYETLVEAGYEPEMAYFETVHEVKLIVDLIYEGGIANMNYSISNTAEYGEYQSGPRIIKKDETKQRMKEVLAEIQSGKFTKEWMEECKNGQKNFLATRAKLAEHSVEKVGAELRAMMPWISKKKLVDSDKK

SEQ ID NO: 88103 - protein, 191 aa, Unknown
  Bacterial polypetide isolated from the Sargasso Sea
MFYEKDTNVDLIKDKKVAIFGYGSQGHAHALNLRDSGVKEVVVALREGSSSIEKAESKGLKVMNLSDAAEWADVVMILTPDELQASIYKNHIEQRVKEGTSIAFAHGLNVHYDLIKARKDLDVFMVAPKGPGHLVRSEYEKGGGVPCLFAVHQDGSGKARDLAMSYASAVGGGRSGIIETTFKDEVETDLF

SEQ ID NO: 88104 - protein, 235 aa, Unknown
  Bacterial polypetide isolated from the Sargasso Sea
MFYEKDTDVNLIKDKKIAIFGYGSQGHAHALNLKDSGVKEVVVALRDGSPSQKKAESKGLKVMNLSDAAEWADVVMILTPDELQASIYKNHIEQRVREGTSIAFAHGLNIHYDLIKARKDLDVFMVAPKGPGHLVRSEFEKGGGVPCLFAVHQNGSGKARDLAMSYASAVGGGRSGIIETTFKDEVETDLFGEQTVLCGGLVELIKNGYETLVEAGYEPEMAYFETVHEVKLIVD

SEQ ID NO: 88105 - protein, 232 aa, Unknown
  Bacterial polypetide isolated from the Sargasso Sea
LKEGKILSFAHGFNIRFGLIKPPNFVDVVMIAPKGPGHTVRWEYQNGQGVPALFAVEQDSSGSARSLAMSYAKGIGGTRAGILETNFKEETETDLFGEQAVLCGGLSELVKSGFETLVEAGYQPELAYFECLHEVKLIVDLMVKGGLSQMRDSISNTAEYGDYVSGKRLINSDTKKEMQKILKDIQDGTFAKNFVEECNKNKPLMTKLREENSKHEIEKVGKGLRSMFSWLK

SEQ ID NO: 88106 - protein, 249 aa, Unknown
  Bacterial polypetide isolated from the Sargasso Sea
GHAHAMNLRDSGLENVSIALREGSNSRSKAEQANFNVMTPAEAASWADIIMMLTPDELQSEIYTNDIAKNIKEGTTIAFAHGLNIHFDLIKPKEGIDVIMVAPKGPGHTVRAEYVRGAGVPCLVAVDKNPSGNALEIGIAYASAIGGGRAGIIETTFKEECETDLFGEQSVLCGGLTHLILAGYETLVEAGYAPEMAYFECLHEVKLIVDLLYEGGMANMRYSISNTAEYGDYSRGPRLITDETKKEMK

SEQ ID NO: 88107 - protein, 245 aa, Unknown
  Bacterial polypetide isolated from the Sargasso Sea
QRVKERTSIAFAHGLNIHYDLIKARKDLDVFMVAPKGPGHLVRSEFEKGGGVPCLFAVHQNGSGKARDIAMSYASAIGGGRSGIIETTFKDEVETDLFGEQTVLCGGLVELIKNGYETLVEAGYEPEMAYFETVHEVKLIVDLIYEGGIANMNYSISNTAEYGEYVSGPKIINKEETKKRMKEVLEKIQSGKFTKEWMEECKNGQKNFLKTREKLAEHPIEKVGADLRAMMPWITKKKLVDSDKN

SEQ ID NO: 88108 - protein, 300 aa, Unknown
  Bacterial polypetide isolated from the Sargasso Sea
MFYEKDTDPNLIKNKKIAIFGYGSQGHAHALNLKDSGVKEVVVALRDGSASKAKAESKGLKVMNLSDAAEWADVIMVLTPDELQASIYKNHIEQRVKEGTSIAFAHGLNVHYDLIKARKDLDVFMVAPKGPGHLVRSEFEKGGGVPCLFAVHQNGSGKARDLAMSYASAIGGGRSGIIETTFKDEVETDLFGEQTVLCGGLVELIKNGYETLVEAGYEPEMAYFETVHEVKLIVDLIYEGGIANMNYSISNTAEYGEYMSGPRIINKEETKKRMKEVLQDIQSGKFTKQWMDECKNGQKN

SEQ ID NO: 88109 - protein, 202 aa, Unknown
  Bacterial polypetide isolated from the Sargasso Sea
MRVYYDRDADINLIKNKKVVIVGYGSQGHAHAANLRDSGVRDVTVALRSDSSSIDKAKSAGFQVMNVAEASKWADVIMMLTPDELQGNIYRSDIEQNMKSGAAIAFAHGLNVHFNLIEPRKDIDVFMVAPKGPGHTVRSEYQKGGGVPCLIAIDKDISGNVQDIGLSYACAIGGGRSGIIETTFKEECETDLFGEQQFYVVV

SEQ ID NO: 88110 - protein, 229 aa, Unknown
  Bacterial polypetide isolated from the Sargasso Sea
SKSKEVAENDGLKVLSNSEAVKQSDVIMFCLPDTVQGKVYKQDVEENLSEGKTLMFCHGFSIFYEQIKPPEFVDVAMIAPKGPGHIVRRVFESGQGVPCLVAVYQDYSGKAQEIALGYGLGIGGARAGILETTFKEETETDLFGEQAVLCGGVTSLVQSAFEVLVEAGYQPESAYFEVLHELKLIVDLMYQGGLGEMRYSISTTAEYGDYTRGPVVVDPSVKENMKKVL

SEQ ID NO: 88111 - protein, 255 aa, Unknown
  Bacterial polypetide isolated from the Sargasso Sea
LQSEIYSNDIAENIKEGTTIAFAHGLNIHFDLIKPKEGVDVIMVAPKGPGHTVRAEYVRGAGVPCLVAVDKNPSGNALEIGIAYASAIGGGRAGIIETTFKEECETDLFGEQSVLCGGLTHLILAGYETLVEAGYAPEMAYFECLHEVKLIVDLLYEGGMANMRYSISNTAEYGDYSRGPRLITDETKKEMKKILSEIQSGQFAKEWMQEHKSGQTKFKVMRKEQAEHSIEAVGEKLRTLMPWIAEGKMVDKSKN

SEQ ID NO: 88112 - protein, 183 aa, Unknown
  Bacterial polypetide isolated from the Sargasso Sea
QRIGLSYASAIGSGRAGIIETNFKDETETDLFGEQAVLCGGLTQLIQNGYEVLVEDGYPPEMAYFECLHEVKLIVDLIYEGGLENMRYSISNTAEFGDYVSGPKVVNSDAKEEMRAVLKRIQSGEFAQEFMSDCRESNDGKGGPRMKEYRQQTSEHSIEKVGSELRAMMPWIAQNKIVDKAKN

SEQ ID NO: 88113 - protein, 206 aa, Unknown
  Bacterial polypetide isolated from the Sargasso Sea
HLVRSEYEKGGGVPCLFAVHQNGSGKARDLAMSYASAIGGGRSGIIETTFKDEVETDLFGEQTVLCGGLVELIKNGYETLVEAGYEPEMAYFETVHEVKLIVDLIYEGGIANMNYSISNTAEYGEYQTGPKIINKEETKKRMKEALADIQSGKFTKAWMDECKNGQKNFLATRAKLAEHPVEKVGANLRAMMPWIGKKKLVDSDKK

SEQ ID NO: 88114 - protein, 200 aa, Unknown
  Bacterial polypetide isolated from the Sargasso Sea
MRVYYDRDADIGLIKSKKVLIVGYGSQGHAHAANLKDSGVEDVSIALRPDSSSIKKAKEGGFDVKTVQEGAKWADVIMMLAPDELQSDIYNDHIKNNMKSGSSIAFAHGLNVHFNLIDPRDDIDVFMVAPKGPGHTVRSEYIRGAGVPCLIAIDRDFSGNAHDVGLSYACAIGGGRSGVIETTFKEECETDLFGEPSCFM

SEQ ID NO: 88115 - protein, 209 aa, Unknown
  Bacterial polypetide isolated from the Sargasso Sea
GPGHTVRGEYIKGGGVPCLVAVDKDESGKALEIGLSYCSAIGGGRSGIIETNFREECETDLFGEQAVLCGGLIELIRCGFETLVEAGYAPEMAYFECLHEVKLIVDLIYEGGIANMDYSISNTAEYGQYVTGPRILPYEQTKKVMKGVLSDIQKGNFVRDFMLENAVGQPTIKAARRANDEHMIEEVGEKLRGMMPWISAGKMVDKDKN

SEQ ID NO: 88116 - protein, 85 aa, Unknown
  Bacterial polypetide isolated from the Sargasso Sea
MQVYYDKDADLSIIQKMKVVIVGYGSQGHAHANNLRDSGVNNVVVGLRKGSGSWRKAENAGFEVQEVAAAVEGADLVMILVPDEL

SEQ ID NO: 88117 - protein, 273 aa, Unknown
  Bacterial polypetide isolated from the Sargasso Sea
LVMILAPDEFQKDIFEKDIQPNLKSDAILAFAHGFNIHFKKIVPNETNSVIMIAPKGPGHTVRSTYLKGGGVPSLIAIYKDSTKDESASAKNIALSYAKANGGTRAGVLQTTFKEETETDLFGEQAVLCGGMTALIKAGYETLVEAGYSPEMAYFECLHETKLITDLIQEGGIANMHYSISNTAEYGDYLSGPKIITEETKKAMKEVLENIQSGNFADEFLDDCRQSNDGSGGPFMKSNRESIEKHPIEKVGKELRSKMKFLNSQKLVDKEKN

SEQ ID NO: 88118 - protein, 178 aa, Unknown
  Bacterial polypetide isolated from the Sargasso Sea
DLAMSYASAVGGGRSGIIETTFKDEVETDLFGEQTVLCGGLVELIKNGYETLVEAGYEPEMAYFETVHEVKLIVDLIYEGGIANMNYSISNTAEYGEYVTGPKIINKEETKKRMKEVLADIQSGKFTKDWMDECKNGQKNFLKTREKLAEHPVEKVGAGLRALMPWIAKKKLIDSDKN

SEQ ID NO: 88119 - protein, 216 aa, Unknown
  Bacterial polypetide isolated from the Sargasso Sea
GLYKGSKSESKAISDGLQVFSVSEACEKADWIMILLPDEFQKDVYLKEIEPNLKEGKILSFAHGFNIRFGLIKPPNFVDVVMIAPKGPGHTVRWEYQNGQGVPALFAVEQDSSGSARSLAMAYAKGIGGTRAGILETNFKEETETDLFGEQAVLCGGLSELVKSGFETLVEAGYQPELAYFECLHEVKLIVDLMVKGGLSQMRDSISNTAEYGDYV

SEQ ID NO: 88120 - protein, 284 aa, Unknown
  Bacterial polypetide isolated from the Sargasso Sea
KDTDVNLIKNKKIAIFGYGSQGHAHALNLRDSGVKEVVVALRDGSASKAKAESKGLKVMNLSDAAEWADVVMILTPDELQATIYKNHIEQRVREGTSIAFAHGLNIHYDLIKARKDLDVFMVAPKGPGHLVRSEFEKGGGVPCLFAVHQNGSGKARDLAMSYASAVGGGRSGIIETTFKDEVETDLFGEQTVLCGGLVELIKNGYETLVEAGYEPEMAYFETVHEVKLIVDLIYEGGIANMNYSISNTAEYGEYVTGPKIINKEETKKRMKEVLADIQSGKFTK

SEQ ID NO: 88121 - protein, 148 aa, Unknown
  Bacterial polypetide isolated from the Sargasso Sea
MFYEKDTDVNLIKNKKIAIFGYGSQGHAHALNLKDSGVKEVVVALRDGSASKVKAESKGLKVMNLSDAAEWADVVMILTPDELQATIYKNHIEQRVREGTSIAFAHGLNIHYDLIKARKDLDVFMVAPKGPGHLVRREYQKGGGVPCL

SEQ ID NO: 88122 - protein, 271 aa, Unknown
  Bacterial polypetide isolated from the Sargasso Sea
SQGHAHALNLKDSGVKNVVVALRDSSDSKKKAESEGLKVMSLSDAAAWADVVMVLTPDELQASIYKNHIEQRMRQGTSLAFAHGLNIHFNLINSRKDLDVFMVAPKGPGHLVRSEYQRGGGVPCLMAVHKDSSGKARDLAMSYACAVGGGRSGIIETTFKDECETDLFGEQTVLCGGLVELIKNGFETLVEAGYPPEMAYFECLHEVKLIVDLIYEGGIANMNYSISNTAEYGEYVSGKKIVDSKTKERMKEVLKDIQSGKFAKQWMDECK

SEQ ID NO: 88123 - protein, 180 aa, Unknown
  Bacterial polypetide isolated from the Sargasso Sea
MANYFNTLPLREQLAQLAQCEFMDASEFTDGVNALKGKKLVIVGCGAQGLNQGLNLRDSGLDVSYTLRDSAITERRQSFLNASENGFTVGTYQELIPTADVVLNLTPDKQHTAVVNAIMPLMKQGSTLAYSHGFNIVEEGMQVREDITVIMVAPKCPGSEVREEYKRGFGVPTLIAVHPE

SEQ ID NO: 88124 - protein, 208 aa, Unknown
  Bacterial polypetide isolated from the Sargasso Sea
MKNYFNSLSFREKLMQLGKCRFMDSSEFNNGVDFLKDKKIAIVGCGAQGLHQGLNMRDSGLDISYALRQTSIDSKRQSFINATSNNFNVGNFDEIIPNSDLVINLTPDKNHTPVVEQLMPIMKKNSILSYSHGFNIVEEGIKVREDITVIMVAPKSPGSEVREEYLRGFGVPTLIAVHPENDKNNIGFDAAKAYAVSLGSNKAGVLDS

SEQ ID NO: 88125 - protein, 176 aa, Unknown
  Bacterial polypetide isolated from the Sargasso Sea
ALSYASAVGGGRSGIIETTFKDEVETDLFGEQTVLCGGLVELIKNGYETLVEAGYEPEMAYFETVHEVKLIVDLIYEGGIANMNYSISNTAEYGEYQSGPRVVNKEETKKRMKEVLAEIQSGKFTKEWMDECKNGQKNFLATRAKLAEHPVEKVGAELRAMMPWISKKKLVDSDKG

SEQ ID NO: 88126 - protein, 252 aa, Unknown
  Bacterial polypetide isolated from the Sargasso Sea
IYKNHIEQRVRKGTSIAFAHGLNVHYDLIKAREDLDVFMVAPKGPGHLVRSEYVKGAGVPCLFAVHQNGSGKARDLAMSYASAVGGGRSGIIETTFKDEVETDLFGEQTVLCGGLVELIKNGYETLVEAGYEPEMAYFETVHEVKLIVDLIYEGGIANMNYSISNTAEYGEYESGPRVVNKEETKKRMKEVLADIQSGKFTKQWMEECKNGQKNFLATRAKLAEHPVEKVGANLRAMMPWIGKKKLVDSDKS

SEQ ID NO: 88127 - protein, 180 aa, Unknown
  Bacterial polypetide isolated from the Sargasso Sea
KAKDLALSYASAFGGAKAGIIETTFKDECETDLFGEQTVLCGGLVELIKNGFETLTEAGYPPEMAYFETLHEVKLIVDLIYEGGIANMNYSISNTAEYGEYVSGKRIVDSKTKEKMKEVLKDIQSGKFTKQWMEEHKSGQKNFLKMRKDLANHQIEKVGKELRAMMPWIGKNKLVDKDKN

SEQ ID NO: 88128 - protein, 243 aa, Unknown
  Bacterial polypetide isolated from the Sargasso Sea
MRVYYDRDADLNLIKDKKIAIVGYGSQGHAHAMNLRDTGVENVSIALRENSQSRAKAEKANFKVMTPSEAASWADVIMMLTPDELQSEIYLNDISENIKEGTTIAFAHGLNIHFDLIKPKEGVDVIMVAPKGPGHTVRAEYVRGAGVPCLVAVDKNPSGNALEIGIAYASAIGGGRAGIIETTFKEECETDLFGEQSVLCGGLTHLILAGYETLVEAGYAPEMAYFECLHEVKLIVDLLYEGG

SEQ ID NO: 88129 - protein, 263 aa, Unknown
  Bacterial polypetide isolated from the Sargasso Sea
EDSESFKRAQDMGLQVANLEKATENADVVMLLLPDQIMADIYNNQIATHMKEGATLLFAHGFNIHFNEIVPREDLSVAMVAPKGPGHLLRRTYSEESGMPCLVAVHNDVSGSTEDLAMSYASAIGGGRAGILRTTFKEETETDLFGEQVVLCGGLTELIRNGFETLVEAGYQPESAYFETLHEVKLIVDLMYEGGFEWMRHSISDTAEYGDFSRGSRIITSETKEEMKRVLEEIQSGAFAKEWMSQAREGSPFLNEKRVEASK

SEQ ID NO: 88130 - protein, 256 aa, Unknown
  Bacterial polypetide isolated from the Sargasso Sea
ELQASIYKNHIEQRMREGTSLAFAHGLNIHFNLINSRKDLDVFMVAPKGPGHLVRSEYQRGGGVPCLMAVHKDSSGKARDLAMSYACAVGGGRSGIIETTFKDECETDLFGEQTVLCGGLVELIKNGFETLTEAGYPPEMAYFETLHEVKLIVDLIYEGGIANMNYSISNTAEYGEYISGRKIVDSKTKERMKEVLKDIQSGKFTKQWMDECKGGQKNFLKMREELAKHPIEKVGKKLRDLMPWIGKNKLVDKSKN

SEQ ID NO: 88131 - protein, 242 aa, Unknown
  Bacterial polypetide isolated from the Sargasso Sea
MKEGTSLAFAHGLNIHFDLINARKDLDVFMVAPKGPGHTVRSEYQKGGGVPCLMAVHKDSSGKARDLALSYASAIGGGKSGIIETTFKDECETDLFGEQTVLCGGLVELIKNGFETLTEAGYPPEMAYFETLHEVKLIVDLIYEGGIANMNYSISNTAEYGEYVSGKRIVDSKTKDKMKEVLKDIQSGKFTKQWMDEHKSGQKNFLKMREDLAKHPIEKVGKELRAMMPWIGKNKLVDKDKN

SEQ ID NO: 88132 - protein, 191 aa, Unknown
  Bacterial polypetide isolated from the Sargasso Sea
MFAVHQNGSGKARDLALSYASAVGGGRSGIIETTFKDEVETDLFGEQTVLCGGLVELIKNGYETLTEAGYEPEMAYFETVHEVKLIVDLIYEGGIANMNYSISNTAEYGEYQSGPRIINKEETKKRMKEVLSDIQSGKFTKEWMDECKNGQKNFLKTRAKLAEHSIEKVGAELRAMMPWIGKKKLVDSDKS

SEQ ID NO: 88133 - protein, 292 aa, Unknown
  Bacterial polypetide isolated from the Sargasso Sea
LEYAKAYAVATGGHRAGVLESSFVAEVKSDLMGEQTILCGVLQTGSILCFDKMVEKGIDPAYAAKLIQYGWETITEALKHGGITNMMDRLSNPAKIKAFELSETLKEILTPLFQKHMDDIMSGYFSKTMMEDWANDDKNLLEWRAATGQTAFEKTTITDQEIPEQEYFDHGVLMVAFVRAGVELAFDTMVASGIKEESAYYESLHETPLIANTIARKKLFEMNRVISDTAEYGCYLFDHAAKTLLVDFMNDIDTNVIGKAFADSKGNSIDNRQLIDVNEIIRFHPIEIIGYD

SEQ ID NO: 88134 - protein, 137 aa, Unknown
  Bacterial polypetide isolated from the Sargasso Sea
KAGYETLVEAGYSPEMAYFECLHETKLITDLIQEGGIANMHYSISNTAEYGDYLSGPKVITDKTKEAMKEILENIQSGNFANEFLNDCRQSNDGSGGPFMKTNREATKSHPIEEVGKELRSKMKFLNSQKLVDKEIN

SEQ ID NO: 88135 - protein, 268 aa, Unknown
  Bacterial polypetide isolated from the Sargasso Sea
VGLYKGSKSESKAISDGLQVFSVSEACKKADWIMILLPDEFQKDVYLKEIEPNLKEGKILSFAHGFNIRFGLIKPPSFVDVVMIAPKGPGHTVRWEYQNGQGVPALFAVEQDSSGSARSLAMAYAKGIGGTRAGILETNFKEETETDLFGEQAVLCGGLSELVKSGFETLVEAGYQPELAYFECLHEVKLIVDLMVKGGLSQMRDSISNTAEYGDYVSGKRLINSDTKKEMQKILKDIQDGTFAKNFVEEYDKNKPLMTKLREENSKQ

SEQ ID NO: 88136 - protein, 126 aa, Unknown
  Bacterial polypetide isolated from the Sargasso Sea
VEAGYEPEMAYFETVHEVKLIVDLIYEGGIANMNYSISNTAEYGEYQSGPRIIKKEETKQRMKEVLAEIQSGKFTKEWMDECKNGQKNFLATRAKLAEHSVEKVGAELRAMMPWISKKKLVDSDKK

SEQ ID NO: 88137 - protein, 231 aa, Unknown
  Bacterial polypetide isolated from the Sargasso Sea
MYYEKDTDVNLIKDKKVAIFGYGSQGHAHALNLRDSGVKEVIVALREGSSSAAKAESKGLKVMNLSDAAEWADVVMILTPDELQASIYKNHIEQRVKEGTSIAFAHGLNIHYDLINARKDLDVFMVAPKGPGHLVRSEYEKGGGVPCLFAVHQNGSGKARDLAMSYASAVGGGRSGIIETTFKDEVETDLFGEQTVLCGGLVELIKNGYETLVEAGYEPEMAYLKLFMKLN

SEQ ID NO: 88138 - protein, 190 aa, Unknown
  Bacterial polypetide isolated from the Sargasso Sea
MKIFYEKDTNTDLIKDKKIAIFGYGSQGHAHALNLKDSGVKEVVVALREGSVSKEKAESKGLKVMNLSDAAEWADVVMILTPDELQATIYKNHIEQRARKGTSIAFAHGLNIHYDLIKARQDLDVFMVAPKGPGHLVRSEFEKGGGVPCLFAVHQDGSGKARDLAMSYASAVGGGRSGIIETTFKDEVET

SEQ ID NO: 88139 - protein, 250 aa, Unknown
  Bacterial polypetide isolated from the Sargasso Sea
KNHIEQRVRKGTSLAFAHGLNVHYDLIKAREDLDVFMVAPKGPGHLVRSEYEKGGGVPCLFAVHQNGSGKARDLAMSYASAVGGGRSGIIETTFKDEVETDLFGEQTVLCGGLVELIKNGYETLVEAGYEPEMAYFETVHEVKLIVDLIYEGGIANMNYSISNTAEYGEYESGPRVVNKEETKKRMKEVLADIQSGKFTKQWMEECKNGQKNFLATRAKLAEHPVEKVGANLRAMMPWIGKKKLVDSDKS

SEQ ID NO: 88140 - protein, 147 aa, Unknown
  Bacterial polypetide isolated from the Sargasso Sea
WRQTVLCGGLVELIKNGYETLVEAGYEPEMAYFETVHEVKLIVDLIYEGGIANMNYSISNTAEYGEYMSGPRIINKEETKKRMKEVLQDIQSGKFTKQWMDECKNGQKNFLKTREKLAEHPVEKVGAKLRAMMPWISKKKLVDSDKN

SEQ ID NO: 88141 - protein, 262 aa, Unknown
  Bacterial polypetide isolated from the Sargasso Sea
MATLFYDNDADLGLLSGNTVAIIGYGSQGHAHALNLKDSGVDVVVGLYDGSRSAEKAKADGLEVLNVADASAKADWIMVLLPDEFQKTVYDKEIAPHLSAGKVLSFAHGFNIRFGLIQPPADVDVVMIAPKGPGHTVRWEYQNAQGVPALFAIEQDASGQARGLAMAYAKGIGGTRAGILETNFKEETETDLFGEQAVLCGGLSELVKAGFETLVEAGYQPELAYFECLHEVKLIVDLMVKGGLSAMRDSISNTAEYGDYVS

SEQ ID NO: 88142 - protein, 314 aa, Unknown
  Bacterial polypetide isolated from the Sargasso Sea
GLKGHAHALNLKDSGASNVVVGLREGSSSIEKAKNVGLKTQTPAEAVKDADIVMFLAPDENQQDIYQTQIHDNIKNGAALAFAHGLNIHFQLITARDDLDVFMVAPKGPGHTVRGEYLKGGGVPCLLAVDKNVSGNAKEIGLAYASALGGGKSGIIETTFKEECETDLFGEQTVLCGGLMSLVRNGFETLVEAGYAPEMAYFECLHEVKLIVDLMYEGGMANMRYSISNTAEYGDYTRGPRVVPNEATKAEMKKVLTEIQDGTFTKEWMSEHKAGQIKFKQMRDQGAKHQIEEVGAKLRSMMPWIASNKLVKDI

SEQ ID NO: 88143 - protein, 218 aa, Unknown
  Bacterial polypetide isolated from the Sargasso Sea
DFRCFYVAPKGPGHLVRSEYQRGGGVPCLMAVHKDSSGKARDLAMSYACAVGGGRSGIIETTFKDECETDLFGEQTVLCGGLVELIKNGFETLVEAGYPPEMAYFECLHEVKLIVDLIYEGGIANMNYSISNTAEYGEYVSGKKIVDSKTKERMKEVLKDIQSGKFAKQWMDECKGGQKNFLKMREELAKHPIEKVGKKLRDLMPWIGKNKLVDKAKN

SEQ ID NO: 88144 - protein, 227 aa, Unknown
  Bacterial polypetide isolated from the Sargasso Sea
GHGFNIHFGQIEPPKDVDVFMVAPKGPGHLVRRTFEQGAGVPCLMAIHQNASKKAKKIALAYAKGIGGTRAGVLETNFKEETETDLFGEQVVLCGGVTELIRSGYDTLVDAGYDPNLAYFECLHELKLIVDLIYEGGIGNMRYSISTTAAYGDVTRGPRIITDETRAEMKKILSEIQSGSFAKEFILENKANRPMFNALLRKGKEHRVEQVGEKLRKMMPFVGKKLQ

SEQ ID NO: 88145 - protein, 189 aa, Unknown
  Bacterial polypetide isolated from the Sargasso Sea
VAVDKNPSGNALDIAIAYASGVGGGRAGIIETTFKEECETDLFGEQSVLCGGLTHLILAGYETLVEAGYAPEMAYFECLHEVKLIVDLLYEGGMANMRYSISNTAEYGDYSRGPRLITDETKKEMKKILAEIQSGQFTKEWMDEHKSGQTKFKLMRKQQAEHSIEAVGEKLRTLMPWIAEGKMVDKSKN

SEQ ID NO: 88146 - protein, 204 aa, Unknown
  Bacterial polypetide isolated from the Sargasso Sea
VRSEYEKGGGVPCLFAVHQDGSGKARDLAMSYASAVGGGRSGIIETTFKDEVETDLFGEQTVLCGGLVELIKNGYETLVEAGYEPEMAYFETVHEVKLIVDLIYEGGIANMNYSISNTAEYGEYQSGPRIIKKEETKQRMKEVLAEIQSGKFTKEWMDECKNGQKNFLATRAKLAEHSVEKVGAELRAMMPWISKKKLVDSDKK

SEQ ID NO: 88147 - protein, 250 aa, Unknown
  Bacterial polypetide isolated from the Sargasso Sea
KKAESAGLKVMSLSDAAAWADVVMMLTPDELQSEIYKNHIEQRMKEGTSLAFAHGLNIHFNLINARKDLDVFMVAPKGPGHTVRSEYQKGGGVPCLMAVHKDSSGKAKDLALSYASAVGGGKAGIIETTFKDECETDLFGEQTVLCGGLVELIKNGFETLTEAGYPPQMAYFETLHEVKLIVDLIYEGGIANMNYSISNTAEYGEYVSGKRVVDGKTKEKMKEVLKDIQSGKFTKQWMDEHKSGQKNFLK

SEQ ID NO: 88148 - protein, 130 aa, Unknown
  Bacterial polypetide isolated from the Sargasso Sea
MFYEKDADVNLIKSKKVAIFGYGSQGHAHALNLKDSGVKDIVVALREGSSSAAKAESKGLKVMNLSDAAEWADVVMILTPDELQAEIYKNHIEQRVREGTSIAFAHGLNVHYDLIKARKDLDVFMVAPKG

SEQ ID NO: 88149 - protein, 154 aa, Unknown
  Bacterial polypetide isolated from the Sargasso Sea
MRVYYDRDADLNLIKNKKIVIVGYGSQGHAHAMNLRDSGIKNVAIALRDGSPTREKAKNAKFDVMTPAEAADWADIIMMLTPDELQSDIYNNEIAPNIKEGTALAFAHGLNVHFDLIKPAEGIDVIMIAPKGPGHTVRAEYERGAGVPCLVAVD

SEQ ID NO: 88150 - protein, 267 aa, Unknown
  Bacterial polypetide isolated from the Sargasso Sea
MKVMNLSDAAEWADVVMILTPDELQAAIYKNHIEQRVKEGTSIAFAHGLNIHYDLINARKDLDVFMVAPKGPGHLVRSEYEKGGGVPCLFAVHQNGSGKARDLAMSYASAVGGGRSGIIETTFKDEVETDLFGEQTVLCGGLVELIKNGYETLVEAGYEPEMAYFETVHEVKLIVDLIYEGGIANMNYSISNTAEYGEYESGPRIINKEETKKRMKEVLDDIQSGKFTKEWMDECKNGQKKFLATRAKLAEHPVEKVGASLRAMMPW

SEQ ID NO: 88151 - protein, 166 aa, Unknown
  Bacterial polypetide isolated from the Sargasso Sea
GRSEFIETTFKDEVETDLFGEQTVLCGGLVELIKNGYETLVEAGYEPEMAYFETVHEVKLIVDLIYEGGIANMNYSISNTAEYGEYMSGPRIINKDETKKRMKEVLDDIQSGKFTKQWMDECKNGQKNFLKIREKLADHPVEKVGKSLRAMMPWISKKKLVDSDKS

SEQ ID NO: 88152 - protein, 188 aa, Unknown
  Bacterial polypetide isolated from the Sargasso Sea
MYYEKDTDVNLIKDKKVAIFGYGSQGHAHALNLRDSGVKEVVVALRDGSSSAAKAESKGLKVMNLSDAAEWADVVMILTPDELQAAIYKNHIEQRVKEGTSIAFAHGLNIHYDLIEARKDLDVFMVAPKGPGHLVRSEYEKGGGVPCLFAVHQNGSGKARELAMSYASAVGGGRSGIIETTFKDEVKP

SEQ ID NO: 88153 - protein, 214 aa, Unknown
  Bacterial polypetide isolated from the Sargasso Sea
MVAPKGPGHLVRSEFEKGGGVPCLFAVHQNGSGKARDLAMSYASAIGGGRSGIIETTFKDEVETDLFGEQTVLCGGLVELIKNGYETLVEAGYEPEMAYFETVHEVKLIVDLIYEGGIANMNYSISNTAEYGEYMSGPRIINKEETKKRMKEVLQDIQSGKFTKQWMDECKSGQKNFLKTREKLAEHPVEKVGAKLRAMMPWISKKKLVDSDKN

SEQ ID NO: 88154 - protein, 285 aa, Unknown
  Bacterial polypetide isolated from the Sargasso Sea
RSKAEKAGFKVITPSESDWADIIMMLTPDELQSEIYNNEIAPNIKDGTALAFAHGLNIHFNLIEPKEGIDVIMMAPKGPGHTVRAEYVRGAGVPCLVAVQKNPSGNALEIAIAYSSAIGGGRAGIIETTFKEECETDLFGEQSVLCGGLTHLILAGYETLVDAGYAPEMAYFECLHEVKLIVDLLYEGGMANMRYSISNTAEYGDYSRGPRLITDETKKEMKKILNEIQSGEFAKEWMIEHKSGQGKFKNMRRMQAEHPIEKVGEKLRTLMPWIAEGKMVDKSKN

SEQ ID NO: 88155 - protein, 174 aa, Unknown
  Bacterial polypetide isolated from the Sargasso Sea
SYASAVGGGRSGIIETTFIDEVETDLFGEQTVLCGGLVELIKNGYETLVEAGYEPEMAYFETVHEVKLIVDLIYEGGIANMNYSISNTAEYGEYQSGPRVVNKEETKKRMKEVLAEIQSGKFTKEWMDECKNGQKNFLATRAKLAEHPVEKVGAELRAMMPWIGKKKLVDSDKS

SEQ ID NO: 88156 - protein, 137 aa, Unknown
  Bacterial polypetide isolated from the Sargasso Sea
VLCGGISELIRVAFETLVEAGYQPACAYFECLHEVKLITDLIYQGGITMMRYSVSDTAEYGDITRGKRVIDDSTRERMRDILKDIQTGKFASEWINENMVGRPTFSTVVRKEKDHPIEVVGARLRGMMPWMEDREVK

SEQ ID NO: 88157 - protein, 298 aa, Unknown
  Bacterial polypetide isolated from the Sargasso Sea
EPGHAHALNLKDSGVKEVVVALRDGSSSKKKAESQGLKVMSLSDAAAWADVLMVLTPDELQSQIYKNHIEQRMRQGTSLAFAHGLNIHFNLINARKDLDVFMIAPKGPGHLVRSEYQKGGGVPCLMAIHQDSSGKAKDLALSYACAIGGGKAGVIETNFKEECETDLFGEQSVLCGGLVELIKNGYETLVEAGYSPEMAYFECVHEVKLIVDLIYEGGIANMNYSISNTAEYGEYMTGKRIIDKKMTKEKMKEVLKDIQSGKFAKQWMEENKNGQKNFLKMRKELADHPIEKVGKKLR

SEQ ID NO: 88158 - protein, 186 aa, Unknown
  Bacterial polypetide isolated from the Sargasso Sea
MTQLFYDTDADLSLLNNKTIAIIGYGSQGHAHALNLKDSGMDVIVGLYKGSKSESKAINDGLQVFTVSEACKKADWIMILLPDEFQKNVYVQEIEPNLKEGKILSFAHGFNIRFGLVKPPSFVDVVMIAPKGPGHTVRWEYQNGQGVPALFAVEQDFSGNARSLAMAYAKGIGGTRAGILETNFKE

SEQ ID NO: 88159 - protein, 306 aa, Unknown
  Bacterial polypetide isolated from the Sargasso Sea
MEVYYDKDAKLDLIKDKTIAVIGFGSQGHAHANNLKDSGMQVIIGLREGSSSADKAKGAGFEVMDNKAAAAAADFVMMLIPDEKQGKTYAEEIEPNLKEGATLAFAHGFNIHYGQIKPRADLDVVMIAPKGPGHTVRGQYQIGAGVPCLVAIHQDASGNALDNSVAYASAIGGGRAGIIKTTFKDETETDLFGEQAVLCGGLTSLIQAGYETLVEAGYPPEMAYFECVHEVKLIVDLIYEGGLANMRYSISNTAEYGDYTSGPKVVTDEAKQAMKKILDRIQNGEFADEFVTDARKSNGPEGGTEM

SEQ ID NO: 88160 - protein, 127 aa, Unknown
  Bacterial polypetide isolated from the Sargasso Sea
TLTEAGYPPEMAYFETLHEVKLIVDLIYEGGIANMNYSISNTAEYGEYISGKKIVDSKTKERMKEVLKDIQSGKFTKQWMDECKGGQKNFLKMREELSKHPIEKVGKKLRDLMPWIGKNKLVDKSKN

SEQ ID NO: 88161 - protein, 227 aa, Unknown
  Bacterial polypetide isolated from the Sargasso Sea
YDLIKARKDLDVFMVAPKGPGHLVRSEFEKGGGVPCLMAVHQDGTGKARDLALSYASAIGGGRSGIIETTFKDECETDLFGEQTVLCGGLVELIKNGYETLVEAGYEPEMAYFECLHEVKLIVDLIYEGGIANMNYSISNTAEYGEYVSGPRIINKDETKKRMKEVLDDIQSGKFTKQWMDECKNGQKNFLKTREELAKHSIETVGTKLRAMMPWIGKKKLVDSDKK

SEQ ID NO: 88162 - protein, 123 aa, Unknown
  Bacterial polypetide isolated from the Sargasso Sea
MFYEKDTNVDLIKEKKVAIFGYGSQGHAHALNLRDSGVKEVVVALREGSSSIEKAESKGLKVMNLSDAAEWADVVMILTPDELQASIYKNHIEQRVKEGTSIAFAHGLNVHYDLIKARKDLDV

SEQ ID NO: 88163 - protein, 227 aa, Unknown
  Bacterial polypetide isolated from the Sargasso Sea
MTQLFYDTDADLSLLNDKTIAIIGYGSQGHAHALNLKDSGMDVIVGLYKGSKSESKAISDGLQVFSVSEACEKADWIMILLPDEFQKDVYLKEIEPNLKEGKILSFAHGFNIRFGLIKPPSFVDVVMIAPKGPGHTVRWEYQNGQGVPALFAVEQDSSGSARSLAMAYAKGIGGTRAGILETNFKEETETDLFGEQAVLCGGLSELVKSGFETLVEARLSTGNLLTS

SEQ ID NO: 88164 - protein, 185 aa, Unknown
  Bacterial polypetide isolated from the Sargasso Sea
MFYEQDTDVNLIKDKKIAIFGYGSQGHAHALNLRDSGVKEVVVALREGSSSIEKAESKGLKVMNLSDAAEWADVVMILTPDELQASIYKNHIEQRVKEGTSIAFAHGLNVHYDLIKARKDLDVFMVAPKGPGHLVRSEYEKGGGVPCLFAVHQDGSGKARDLAMSYASAVGGGRSGIIETTFKEK

SEQ ID NO: 88165 - protein, 224 aa, Unknown
  Bacterial polypetide isolated from the Sargasso Sea
MKVYYEQDADFSIIKDKKIVIIGFGSQGHAHALNLKDSGASNVVVGLREGSSSIEKAKNVGLKTQTPADAVKDADIVMFLAPDENQQEIYQTQIHENIKKGAALAFAHGLNIHFQLITARDDLDVFMVAPKGPGHTVRGEYLKGGGVPCLLAVDKNVSGNAKEIGLAYASALGGGKSGIIETTFKEECETDLFGEQTVLCGGLMSLVRNGFETLVEAGYAPEMA

SEQ ID NO: 88166 - protein, 267 aa, Unknown
  Bacterial polypetide isolated from the Sargasso Sea
MFYEKDTNVNLIKDKKIAIFGYGSQGHAHALNLKDSGVKEVVVALRDGSSSRSKAESKGLKVMNLSDAAEWADVIMILTPDELQASIYKNHIEQRVKEGTSIAFAHGLNIHYDLIKARKDLDVFMVAPKGPGHLVRSEFEKGGGVPCLFAVHQNGSGKARDIAMSYASAIGGGRSGIIETTFKDEVETDLFGEQTVLCGGLVELIKNGYETLVEAGYEPEMAYFETVHEVKLIVDLIYEGGIANMNYSISNTAEYGEYVTGPKIINK

SEQ ID NO: 88167 - protein, 234 aa, Unknown
  Bacterial polypetide isolated from the Sargasso Sea
AHGLNVHYDLIKARKDLDVFMVAPKGPGHLVRSEYEKGGGVPCLFAVHQNGSGKARDLALSYASAVGGGRSGIIETTFKDEVETDLFGEQTVLCGGLVELIKNGYETLVEGGYEPEMAYFETVHEVKLIVDLIYEGGIANMNYSISNTAEYGEYQSGPRIINKEETKKRMKEVLADIQSGKFTKEWMDECKNGQKNFLATRANLAEHSVEKVGAELRAMMPWIGKKKLVDSDKS

SEQ ID NO: 88168 - protein, 142 aa, Unknown
  Bacterial polypetide isolated from the Sargasso Sea
CVVDLVELIKNGYETLVEAGYEPEMAYFETVHEVKLIVDLIYEGGIANMNYSISNTAEYGEYVSGPKIINKEETKKRMKEVLTDIQSGKFTKQWMDECKNGQKNFLKTREKLAEHQVEKVGAVLRAMMPWINKKKLVDSDKK

SEQ ID NO: 88169 - protein, 176 aa, Unknown
  Bacterial polypetide isolated from the Sargasso Sea
ALSYASAVGGGRSGIIETTFKDEVETDLFGEQTVLCGGLVELIKNGYETLVEAGYEPEMAYFETVHEVKLIVDLIYEGGIANMNYSISNTAEYGEYQSGPRVVNKEETKKRMKEVLAEIQSGKFTKEWMDECKNGQKNFLATRAKLAEHPVEKVGAELRAMMPWIGKKKLVDSDKS

SEQ ID NO: 88170 - protein, 261 aa, Unknown
  Bacterial polypetide isolated from the Sargasso Sea
LKDSGAKVVVGLREGSSSTSKAEEAGLEVKNISDAVSGADVVMILAPDEYQADLYKESIEQNLKPSAAIAFAHGFNIHYGQIKPQDNHDIFMIAPKSPGHLVRSTYVNGKGVPTLIAIHNDASGNAKDIALSYASAIGGGRAGIIETNFKEETETDLFGEQAVLCGGVTALVKAGFETLVDAGYAPEMAYFECLNELKLIVDLMYEGGMTDMRYSISNTAEYGDLTKGPFLIDDHVKEKMKLVLADVQNGKFANDFVSEIK

SEQ ID NO: 88171 - protein, 270 aa, Unknown
  Bacterial polypetide isolated from the Sargasso Sea
FEVMTPSESASWGDIIMMLTPDELQSDIYNNEIANNIKEGSAIAFAHGLNIHFELIKPKDGVDVMMMAPKGPGHTVRAEYVRGAGVPCLVAVHKNSSGNALEIAIAYASAIGGGRAGIIETTFKEECETDLFGEQSVLCGGLTHLILAGYETLVEAGYSPEMAYFECLHEVKLIVDLLYEGGMANMRYSISNTAEYGDYSRGPRLITDDTKKEMKKILSEIQSGEFAKEWMIEHRSGQTKFKTMRKKHADHPIEEIGEKLRKLMPWIAEQ

SEQ ID NO: 88172 - protein, 253 aa, Unknown
  Bacterial polypetide isolated from the Sargasso Sea
MFYEKDADVNLIKDKKVAIFGYGSQGHAHALNLKDSGVKEVVVALRDGSASKAKAESKGLKVMNLSDAAEWADVCMILTPDELQATIYKNHIEQRIKEGTSLAFAHGLNIHYDLIKARKDLDVFMVAPKGPGHLVRSEFEKGGGVPCLMAVHQDGTGKARDLALSYASAIGGGRSGIIETTFKDECETDLFGEQTVLCGGLVELIKNGYETLVEAGYEPEMAYFECLHEVKLIVDLIYEGGIANMNYSISNTA

SEQ ID NO: 88173 - protein, 155 aa, Unknown
  Bacterial polypetide isolated from the Sargasso Sea
MKSKQIYLGEQTVLCGGLVELIKNGYETLVEAGYEPEMAYFETVHEVKLIVDLIYEGGIANMNYSISNTAEYGEYQSGPRVVNKEETKKRMKEVLAEIQSGKFTKEWMDECKNGQKNFLATRAKLAEHPVEKVGAELRAMMPWIGKKKLVDSDKS

SEQ ID NO: 88174 - protein, 206 aa, Unknown
  Bacterial polypetide isolated from the Sargasso Sea
HLVRSEYEKGGGVPCLFAVHQDGSGKARDLAMSYASAVGGGRSGIIETTFKDEVETDLFGEQTVLCGGLVELIKNGYETLVEAGYEPEMAYFETVHEVKLIVDLIYEGGIANMNYSISNTAEYGEYQSGPRIIKKDETKQRMKEVLAEIQSGKFTKEWMDECKNGQKNFLATRAKLAEHSVEKVGAELRAMMPWISKKKLVDSDKK

SEQ ID NO: 88175 - protein, 145 aa, Unknown
  Bacterial polypetide isolated from the Sargasso Sea
QTVLCGGLVELIKNGYETLVEAGYEPEMAYFETVHEVKLIVDLIYEGGIANMNYSISNTAEYGEYVTGPKIINKEETKKRMKEVLTDIQSGKFTKDWMDECKNGQKNFLKTRERLAEHPVEKVGAGLRALMPWISKKKLIDSDKN

SEQ ID NO: 88176 - protein, 131 aa, Unknown
  Bacterial polypetide isolated from the Sargasso Sea
MYYEKDADISLIKNKKIAIFGYGSQGHAHALNLKDSGVKEVVVALRENSPSAKKAQSEGLKVMSLSDAAAWADVVMMLTPDELQSQIYLNHIEQRMREGTSLAFAHGLNIHFNLINARKDLDVFMVAPKGP

SEQ ID NO: 88177 - protein, 256 aa, Unknown
  Bacterial polypetide isolated from the Sargasso Sea
MYYEKDTDVNLIKNKKVAIFGYGSQGHAHALNLRDSGVKEVVVALREGSSSAAKAESKGLKVMNLSDAAEWADIVMMLTPDELQAAIYKNHIEQRVKEGTSIAFAHGLNIHYDLINARKDLDVFMVAPKGPGHLVRSEYEKGGGVPCLFAVHQNGSGKARELAMSYASAVGGGRSGIIETTFKDEVETDLFGEQTVLCGGLVELIKNGYETLVEAGYEPEMAYFETVHEVKLIVDLIYEGGIANMNYSISNTAEYG

SEQ ID NO: 88178 - protein, 265 aa, Unknown
  Bacterial polypetide isolated from the Sargasso Sea
MFYEKDADTNLIKGKKIAIFGYGSQGHAHALNLKDSGVSEVVVALREGSPSKYKAESKGLKVMNLSDAAEWADVVMILTPDELQATIYKNHIEQRVKEGTSIAFAHGLNIHYDLIQARKDLDVFMVAPKGPGHLVRSEFEKGGGVPCLFAVHQNGSGKARDIAMSYASAIGGGRSGIIETTFKDEVETDLFGEQTVLCGGLVELIKNGYETLVEAGYEPEMAYFETVHEVKLIVDLIYEGGIANMNYSISNTAEYGEYMSGPRII

SEQ ID NO: 88179 - protein, 140 aa, Unknown
  Bacterial polypetide isolated from the Sargasso Sea
GGLVELIKNGYETLVEAGYEPEMAYFECLHEVKLIVDLIYEGGIANMNYSISNTAEYGEYVSGPRIINKDETKKRMKEVLEDIQSGKFTKQWMDECKNGQKNFLKTREELAKHSIETVGAKLRAMMPWIGKKKLVDSDKK

SEQ ID NO: 88180 - protein, 88 aa, Unknown
  Bacterial polypetide isolated from the Sargasso Sea
MKVYYEKDADLDLIKTKKIAVYGYGSQGHAHALNLKDSGASEVVVALREGSSSAKKAEAEGLKVMSMSDAAEWADIMMMLIPDELQAD

SEQ ID NO: 88181 - protein, 130 aa, Unknown
  Bacterial polypetide isolated from the Sargasso Sea
GYETLTDAGYAPEMAYFECLHEVKLIVDLLYEGGIANMRYSISNTAEYGDYVSGKRIITDATRLEMKKVLRDIQTGKFVRDWMLENKSNKPNFKAMRREAQSHNIEEVGKRLRAMMPWIKKNKLVDTNKN

SEQ ID NO: 88182 - protein, 137 aa, Unknown
  Bacterial polypetide isolated from the Sargasso Sea
MKIFYEKDTNSSLIKDKKIAIFGYGSQGHAHALNLKDSGVKEVVVALRDGSSSKDKAESKGLKVMNLSDAAEWADVVMILTPDELQAAIYKNHIEQRAREGTSIAFAHGLNIHYDLIKARKDLDVFMVAPKGPGHLV

SEQ ID NO: 88183 - protein, 198 aa, Unknown
  Bacterial polypetide isolated from the Sargasso Sea
EKGGGVPCLMAVHKDSSGKARDLAMSYACAVGGGRSGIIETTFKDECETDLFGEQTVLCGGLVELIKNGFETLTEAGYPPEMAYFETLHEVKLIVDLIYEGGIANMNYSISNTAEYGEYISGKKIVDSKTKERMKEVLKDIQSGKFTKQWIDECKGGQKNFLKMREDLAKHPIEKVGKKLRDLMPWIGKNKLVDKSKN

SEQ ID NO: 88184 - protein, 183 aa, Unknown
  Bacterial polypetide isolated from the Sargasso Sea
SGKARDLAMSYASAVGGGRSGIIETTFKDEVETDLFGEQTVLCGGLVELIKNGYETLVEAGYEPEMAYFETVHEVKLIVDLIYEGGIANMNYSISNTAEYGEYVSGPKIINKEETKKRMKEVLDKIQSGKFTKEWMDECKNGQKNFLKTREKLAEHPIEKVGAGLRAMMPWITKKKLVDSDKN

SEQ ID NO: 88185 - protein, 213 aa, Unknown
  Bacterial polypetide isolated from the Sargasso Sea
MIKSKKVAIFGYGSQGHAHALNLKDSGVKDIVVALREGSSSAAKAESKGLKVMNLSDAAEWADVVMILTPDELQAEIYKNHIEQRVREGTSIAFAHGLNVHYDLIKARKDLDVFMVAPKGPGHLVRSEYEKGGGVPCLFAVHQNGSGKARDLALSYASAVGGGRSGIIETTFKDEVETDLFGEQTVLCGGLVELIKNGYETLVEAGYEPEMAY

SEQ ID NO: 88186 - protein, 174 aa, Unknown
  Bacterial polypetide isolated from the Sargasso Sea
MKTYYDKDTNKNLIKNKKVAIFGYGSQGHAHALNLKDSGVKNVVVALREGSSSIKKAEGAGLKVMSLSDAAAWADVVMMLTPDELQSEIYKNHIEQRMREGTSLAFAHGLNIHFDLIKARKDLDVFMVAPKGPGHTVRSEYQKGGGVPCLMAVHKDSSGKAKDLALSYASACWG

SEQ ID NO: 88187 - protein, 203 aa, Unknown
  Bacterial polypetide isolated from the Sargasso Sea
MSLNIFYDKDADLNEISDKKIVIIGYGSQGHAHALNLKDSGVENITIALRNGSSSVLRAQQAGFTVEEPTDAVKDADIIMLLAPDEHQAEIYNDIKDKIKQGAALAFAHGLNIHFKLINARPDLDVFMTAPKGPGHTVRSEYLKGAGVPCLIAVAQNATGKAKNLALAWASGVGGGRSGIIETTFKDECETDLFGEQAVLCGG

SEQ ID NO: 88188 - protein, 185 aa, Unknown
  Bacterial polypetide isolated from the Sargasso Sea
MFYEKDADANLIKNKKVAIFGYGSQGHAHALNLKDSGVKNVVVALREGSSSIKKAESEGLKVMSLSDAAAWADVVMVLTPDELQASIYKNHIEQRMREGTSLAFAHGLNIHFNLINSRKDLDVFMVAPKGPGHLVRSEYQRGGGVPCLMAVHKDSSGKARDLAMSYACAVGGGRSGIIETTFKDE

SEQ ID NO: 88189 - protein, 213 aa, Unknown
  Bacterial polypetide isolated from the Sargasso Sea
MRVYYDRDADINLIKSRNVVIIGYGSQGHAHASNLRDSGATNVKIALREGSASAAKAESAGFEVLTVTAAAQWADVMMMATPDELQASIYKEHLHPHMKEGAALAFAHGLSIHFGLIDPRKDLDIFMVAPKGPGHTVRSEFERGGGVPCLLAVHKNISGNASEIGLSYASAIGGGRAGIIETSFKEECETDLFGEQVVLCGGLTAIDYSGVLK

SEQ ID NO: 88190 - protein, 111 aa, Unknown
  Bacterial polypetide isolated from the Sargasso Sea
MFYEKDTNVDLIKDKKVAIFGYGSQGHAHALNLRDSGVKEVVVALREGSSSIEKAESKGLKVMNLSDAAEWADVVMILTPDELQASIYKKHIEQRVKEGTSIAFAHGLNVH

SEQ ID NO: 88191 - protein, 144 aa, Unknown
  Bacterial polypetide isolated from the Sargasso Sea
MFYEKDTNVDLIKDKKVAIFGYGSQGHAHALNLRDSGVKEVVVALREGSSSIEKAESKGLKVMNLSDAAEWADVVMILTPDELQASIYKNHIEQRVKQGTSIAFAHGLNVHYDLIKARKDLDVFMVAPKGPGHLVRSEYEKGEE

SEQ ID NO: 88192 - protein, 288 aa, Unknown
  Bacterial polypetide isolated from the Sargasso Sea
MRVYYDRDADIGLIKSKKVLVIGYGSQGHAHAANLRDSGVKDIAIALKKGSQSIEKAKKAGFDVKDVSNGAKWADVIMMATPDELQSDIYNVSLKENMRAGSAIAFAHGLNVHFNLIEPRDDIDVFMVAPKGPGHTVRSEYLRGAGVPCLIAINKNSTGNAHDIGLSYACAIGGGRSGVIETTFKEECETDLFGEQVVLCGGLVELIRSGFETLVEAGYAPEMAYFECLHEVKLIVDLIYEGGIANMNYSISNTAEYGEYVTGPRIINSDTKKEMKKVLDDIQSGKLL

SEQ ID NO: 88193 - protein, 266 aa, Unknown
  Bacterial polypetide isolated from the Sargasso Sea
MKVFYDKDADFNIIKNKVITIVGYGSQGHAHVANLKDSGVNNINVALKENSLSVNKAKSAGFNVISIEEASKESDVLMLATPDEIQGKLYKEKIHENMKPGAALAFAHGLNIHYGLIEPRDDIDVFMIAPKGPGHTVRSEYKRGGGVPSLISVFQDKSGNAFEVALAYGSGLGAGRSGMIETTFKEECETDLFGEQVVLCGGLTELITAGYETLVDAGYAPEMAYFECLHEVKLIVDLLYEGGIANMRYSISNTAEYGDYVSGKRI

SEQ ID NO: 88194 - protein, 204 aa, Unknown
  Bacterial polypetide isolated from the Sargasso Sea
MLYEKDSNVDLIKSKKIAIFGFGSQGHAHALNLKDSGVKEVVVALRDGSSSKKKAEAQGLKVMSLSDAAEWADVLMMLTPDEMQSQIYKNHIEQRMRQGTTLAFAHGLNIHFNLITARKDLDIFMIAPKGPGHLVRSEYQRGAGVPCLMAIQQDSSGKAKDLALSYACAIGGGKSGIIETTFKDECETDLFGEQTVLCGGLVEL

SEQ ID NO: 88195 - protein, 213 aa, Unknown
  Bacterial polypetide isolated from the Sargasso Sea
PEFVDVAMIAPKGPGHIVRRVFESGQGVPCLVAVYQNYSSKAQEIALGYGLGIGGARAGILETTFKEETETDLFGEQAVLCGGVTSLVQSAFEVLVEAGYQPESAYFEVLHELKLIVDLMYQGGLGEMRYSISDTAEYGDYTRGPVVVDPSVKENMKKVLEQIQSGQFAKEWIAENDEGLHKFNSLRDENAGHPIEEVGKKLRNMMPFLKNQS

SEQ ID NO: 88196 - protein, 289 aa, Unknown
  Bacterial polypetide isolated from the Sargasso Sea
MFYEKDTDPNLIKNKKIAIFGYGSQGHAHALNLKDSGVKEVVVALRDGSASKAKAESKGLKVMNLSDAAEWADVIMVLTPDELQASIYKNHIEQRVKEGTSIAFAHGLNVHYDLIKARKDLDVFMVAPKGPGHLVRSEFEKGGGVPCLFAVHQNGSGKARDLAMSYASAIGGGRSGIIETTFKDEVETDLFGEQTVLCGGLVELIKNGYETLVEAGYEPEMAYFETVHEVKLIVDLIYEGGIANMNYSISNTAEYGEYMSGPRIINKEETKKRMKEVLQDIQSGKFTKQ

SEQ ID NO: 88197 - protein, 126 aa, Unknown
  Bacterial polypetide isolated from the Sargasso Sea
MFYEKDTDVNLIKDKKIAIFGYGSQGHAHALNLKDSGVKEVVVALREGSSSIAKAESKGLKVMSLSDAAEWADVVMILTPDELQASIYKNHIEQRVRKGTSLAFAHGLNVHYDLIKAREDLDVFMV

SEQ ID NO: 88198 - protein, 194 aa, Unknown
  Bacterial polypetide isolated from the Sargasso Sea
MFYEKDTDVNLIKKKKIAIFGYGSQGHAHALNLRDSGVKEVVVALRDGSTSKAKAESKGLKVMNLSDAAEWADVVMVLTPDELQATIYKNHIEQRVREGTSIAFAHGLNIHYDLIKARKDLDVFMVAPKGPGHLVRSEYEKGGGVPCLFAVHQNGSGKARELAMSYASAVGGGRSGIIETTFKDEVETDLFGEQ

SEQ ID NO: 88199 - protein, 207 aa, Unknown
  Bacterial polypetide isolated from the Sargasso Sea
MYYEKDTNKNLIKDKKIAIFGYGSQGHAHALNLKDSGVKEVVVALRDGSSSKAKAESKGLKVMNLSDAAEWADVVMILTPDELQATIYKNHIEQRVKEGTSIAFAHGLNIHYDLIKARKDLDVFMVAPKGPGHLVRSEFEKGGGVPCLFAVHQNGSGKARDIAMSYASAIGGGRSGIIETTFKDEVETDLFGEQTVLCGGLVELIKN

SEQ ID NO: 88200 - protein, 292 aa, Unknown
  Bacterial polypetide isolated from the Sargasso Sea
NVIVGLHEGSNSRTKVKEDGLEVASVDEAAKQSDVIMVLCPDTTQPDVYKDSIEPNLLPGKTLMFAHGFNIHYKTIIPPNTVDVSMVAPKAPGHRMREVFTKGSGVPGLLAIHQDASGKAHELGLAYAKGIGCSRAGVLATTFEEETETDLFGEQAVLCGGVSALVKAAFEVLTEDGGYAPESAYFEVMHELKLIVDLFYKGGMEYMRYSVSDTAEFGDYTRGPKVIDENVKSNMRDVLAQIKDGTFAREWITENDEGRPTFNRLRKENAGHPIEKVGKELRGMMSFLDDSD

SEQ ID NO: 88201 - protein, 169 aa, Unknown
  Bacterial polypetide isolated from the Sargasso Sea
MKIYYDEDANLEIIKNLKVAIIGYGSQGHAHANNLHDSGVDITVGLREGSASWEKAESAGLKVSSVEDSVKDSDFVMILAPDEFQSDLYTKKIEPNLKQGVILAFAHGFNIHFGKIKPTNDISVVMIAPKGPGHTVRSTYISGGGVPSLIAIYRDSISAKDYNAKDVCS

SEQ ID NO: 88202 - protein, 115 aa, Unknown
  Bacterial polypetide isolated from the Sargasso Sea
FETVHEVKLIVDLIYEGGIANMNYSISNTAEYGEYVTGPKIINKEETKKRMKEVLENIQSGNFTKQWMDECKNGQKNFLKTREKLADHPVEKVGATLRAMMPWISKKKLVDSDKK

SEQ ID NO: 88203 - protein, 243 aa, Unknown
  Bacterial polypetide isolated from the Sargasso Sea
VREGTSIAFAHGLNVHYDLIKARKDLDVFMVAPKGPGHLVRSEYEKGGGVPCLFAVHQNGSGKARDLALSYASAVGGGRSGIIETTFKDEVETDLFGEQTVLCGGLVELIKNGYETLTEAGYEPEMAYFETVHEVKLIVDLIYEGGIANMNYSISNTAEYGEYQSGPRIINKEETKKRMKEVLADIQSGKFTKEWMDECKNGQKNFLATRAKLAEHSVEKVGAELRAMMPWIAKKKLVDSDKS

SEQ ID NO: 88204 - protein, 231 aa, Unknown
  Bacterial polypetide isolated from the Sargasso Sea
MFYEKDTDVNLIKDKKIAIFGYGSQGHAHALNLKDSGVKEVVVALRDGSSSIPKAESKGLKVMNLSDAAEWADVVMVLTPDELQASIYKNHIEQRVREGSSIAFAHGLNIHYDLIKARKDLDVFMVAPKGPGHLVRSEYEKGGGVPCLFAVHQNGSGKARDLAMSYASAVGGGRSGIIETTFKDEVETDLFGEQTVLCGGLVELIKNGYETLVEAGYEPEMAYFETVHEVK

SEQ ID NO: 88205 - protein, 232 aa, Unknown
  Bacterial polypetide isolated from the Sargasso Sea
MRVYYDRDADLNLIKDKKISIVGYGSQGHAHAMNLRDSGIENVSIALREGSNSRSKAEQANFKVMTPAEAASWADVIMMLTPDELQSEIYKNDIAENIKEGTTIAFAHGLNIHFDLIKPKEGIDVIMVAPKGPGHTVRAEYARGAGVPCLVAVDKNPSGNALEIGIAYASAIGGGRAGIIETTFKEECETDLFGEQSVLCGGLTHLILAGYETLVEAGYAPEMAYFECLHEV

SEQ ID NO: 88206 - protein, 248 aa, Unknown
  Bacterial polypetide isolated from the Sargasso Sea
ATKDADLVMILAPDEFQKGIYEKSIKPNLKNDSILAFAHGFNIHFKKIIPDETNSVIMIAPKGPGHTVRSTYLKGGGVPSLIAIYQDSTNTSDSSAKEVALSYAKANGGTRAGVLETTFKEETETDLFGEQAVLCGGMTALIKAGYETLVEAGYSPEMAYFECLHETKLITDLIQEGGIANMHYSISNTAEYGDYLSGPKIITEKTKEAMKEVLDNIQSGNFADEFLDDCRQSNDGSGGPFMKSKRES

SEQ ID NO: 88207 - protein, 289 aa, Unknown
  Bacterial polypetide isolated from the Sargasso Sea
YKRATSNGFTVGTYQQLIPEADVVYNLTPDKQHASVVEAVMPLMKEGATLGYSHGFNIVEEGQQIRSDITVIMCAPKSPGSEVREEYKRGFGVPTLIAVHPENDPEGKGWDQAKALASATGGDRAGVLESSFVAEVKSDLMGEQTILCGMQQVAAVLAFEKMVDDGIEPGYAGALIQYGLEAITEALKIGGVTNMMDRLSNPAKVKAFELSEQLTDLLRPLFEKHQDDIISGEFSRTMMEDWANGDANLLKWREETGETAFENAPAYEGEISEQEFFDHGILLVAMIKC

SEQ ID NO: 88208 - protein, 193 aa, Unknown
  Bacterial polypetide isolated from the Sargasso Sea
MKIYYDEDANLEIIKNLKVAIIGYGSQGHAHANNLHDSGVDITVGLREGSASWEKAESAGLKVSSVEDSVKDSDFVMILAPDEFQSDLYTKKIEPNLKQGAILAFAHGFNIHFGKIKPTDDISVVMIAPKGPGHTVRSTYMSGGGVPSLIAIYRDSISAKDFNAKDVALSYAKANGGTRAGVLETSFREETET

SEQ ID NO: 88209 - protein, 162 aa, Unknown
  Bacterial polypetide isolated from the Sargasso Sea
MYYEKDTDVNLIKDKKVAIFGYGSQGHAHALNLRDSGVKEVVVALREGSSSAAKAESKGLKVMNLSDAAEWADVVMILTPDELQAAIYKNHIDQRVRPGTSIAFAHGLNIHYDLINARKDLDVFMVAPKGPGHLVRSEFEKGGGVPCLFAVHQNGSGKAREL

SEQ ID NO: 88210 - protein, 152 aa, Unknown
  Bacterial polypetide isolated from the Sargasso Sea
MVTKIIYDDSIDQDLIKSKKVTVIGFGSQGHAHALNLHESGVDVTVGLRESSESFKRASDMGLKVKNVEDATSGADVVMLLLPDQLMADIYNSDIAPHMKDGSTLLFAHGFNIHFGEIIPREDISIGMVAPKGPGHLLRRTYEENSGMPCLV

SEQ ID NO: 88211 - protein, 275 aa, Unknown
  Bacterial polypetide isolated from the Sargasso Sea
DLSDAAAGADVVMILTPDELQAEIYKNHIEQRVREGTSVAFAHGLNVHYDLIKARKDLDVFMVAPKGPGHLVRSEYEKGGGVPCLFAVHQDGSGKARDLALSYASAVGGGRSGIIETTFKDEVETDLFGEQTVLCGGLVELIKNGYETLVEAGYEPEMAYFETVHEVKLIVDLIYEGGIANMNYSISNTAEYGEYQSGPRIINKEETKKRMKEVLADIQSGKFTKEWMNECKTGQKNFLATRAKLAEHSVEKVGAELRAMMPWISKKKLVDSDKS

SEQ ID NO: 88212 - protein, 119 aa, Unknown
  Bacterial polypetide isolated from the Sargasso Sea
MQVYYDKDADLSIIQKMKVVIVGYGSQGHAHANNLRDSGVNNVVVGLRKGSGSWRKAENAGFEVQEVASAVEGADLVMILVPDELQPALYRDDIEPNIKQGAAIAFAHGFNIHFELIEP

SEQ ID NO: 88213 - protein, 234 aa, Unknown
  Bacterial polypetide isolated from the Sargasso Sea
MFYEKDTDVNLIKSKKIAIFGYGSQGHAHALNLKDSGVKEVVVALREGSSSKTKAESKGLKVMNLSDAAEWADVVMILTPDELQATIYKNHIEQRVKEGTSIAFAHGLNIHYDLINARKDLDVFMVAPKGPGHLVRSEFEKGGGVPCLFAVHQNGSGKARDLAMSYASAVGGGRSGIIETTFKDEVETDLFGEQTVLCGGLVELIKNGYETLVEAGYEPEMAYFETVHEVKLIV

SEQ ID NO: 88214 - protein, 319 aa, Unknown
  Bacterial polypetide isolated from the Sargasso Sea
MFYEKDTDPNLIKNKKIAIFGYGSQGHAHALNLKDSGVKEVVVALRDGSTSKAKAESKGLKVMNLSDAAEWADVIMVLTPDELQASIYKNHIEQRVKEGTSIAFAHGLNVHYDLIKARKDLDVFMVAPKGPGHLVRSEFEKGGGVPCLFAVHQNGSGKARDLAMSYASAIGGGRSGIIETTFKDEVETDLFGEQTVLCGGLVELIKNGYETLVEAGYEPEMAYFETVHEVKLIVDLIYEGGIANMNYSISNTAEYGEYMSGPRIINKEETKKRMKEVLQDIQSGKFTKQWMDECKNGQKNFLKTREKLAEHPVEKVGAK

SEQ ID NO: 88215 - protein, 214 aa, Unknown
  Bacterial polypetide isolated from the Sargasso Sea
YGCSKGPGHLVRSEYEKGGGVPCLFAVHQNGSGKARDLALSYASAVGGGRSGIIETTFKDEVETDLFGEQTVLCGGLVELIKNGYETLVEAGYEPEMAYFETVHEVKLIVDLIYEGGIANMNYSISNTAEYGEYQSGPRVVNKEETKKRMKEVLAEIQSGKFTKEWMDECKNGQKNFLATRAKLAEHPVEKVGAELRAMMPWIGKKKLVDSDKS

SEQ ID NO: 88216 - protein, 210 aa, Unknown
  Bacterial polypetide isolated from the Sargasso Sea
KGPGHLVRSEFEKGGGVPCLFAVHQNGSGKARELAMSYASAVGGGRSGIIETTFKDEVETDLFGEQTVLCGGLVELIKNGYETLVEAGYEPEMAYFETVHEVKLIVDLIYEGGIANMNYSISNTAEYGEYVTGPKIIKKEETKKRMKEVLADIQSGKFTKDWMDECKNGQKNFLKTREKLAEHPVEKVGAGLRALMPWIAKKKLIDSDKN

SEQ ID NO: 88217 - protein, 175 aa, Unknown
  Bacterial polypetide isolated from the Sargasso Sea
MRVYYDRDADINLIKDKKIVIVGYGSQGHAHAMNLRDSGIEDVAIALREGSPSRKKAENAGFKVMTPSESASWADVIMMLTPDELQSEIYNNEIAANIKDGTALAFAHGLNIHFDLIKPNANIDVIMMAPKGPGHTVRAEYVRGAGVPCLVAVNQNPSGNALEIAIAYSSAIGGG

SEQ ID NO: 88218 - protein, 182 aa, Unknown
  Bacterial polypetide isolated from the Sargasso Sea
PALFAVEQDSSGSARSLAMAYAKGMAGTRAGILETNFKEETETDLFGEQAVLCGGLSELVKSGFETLVEAGYQPELAYFECLHEVKLIVDLMVKGGLSQMRDSISNTAEYGDYVSGKRLINSDTKKEMQKILKDIQDGTFAKNFVEECDKNKPLMTKLREENSKHEIEKVGKGLRSMFSWLK

SEQ ID NO: 88219 - protein, 174 aa, Unknown
  Bacterial polypetide isolated from the Sargasso Sea
YCSAIGGGRSGIIETNFREECETDLFGEQAVLCGGLIELIRCGFETLVEAGYAPEMAYWECLHEVKLIVELIYEGGMANMDNSIPNTAEYGQYVTGPRILPNEQTKKGMKGVLSEIQKGNFVRDSMLENAVGQPTIKAARRANEEHKIEAVGEKLRGMMPWIPAGKMVDKDKNK

SEQ ID NO: 88220 - protein, 256 aa, Unknown
  Bacterial polypetide isolated from the Sargasso Sea
ELQSEIYKNHIEQRMKEGTSLAFAHGLNIHFDLINARKDLDVFMVAPKGPGHTVRSEYQKGGGVPCLMAVHKDSSGKAKDLALSYASAVGGGKAGIIETTFKDECETDLFGEQTVLCGGLVELIKNGFETLTEAGYPPEMAYFETLHEVKLIVDLIYEGGIANMNYSISNTAEYGEYVSGKRIVDNKTKEKMREVLKDIQSGKFTKQWMDEHKSGQKNFLKMRQDLAKHPIEKVGKELRAMMPWIGKNKLVDKDKN

SEQ ID NO: 88221 - protein, 293 aa, Unknown
  Bacterial polypetide isolated from the Sargasso Sea
DSGVKEVVVALREGSSSIKKAESKGLKVMNLSDAAEWADVVMILTPDELQASIYKNHIEQRVKEGTSIAFAHGLNVHYDLIKARKDLDVFMVAPKGPGHLVRSEYEKGGGVPCLFAVHQDGSGKARDLAMSYASAVGGGRSGIIETTFKDEVETDLFGEQTVLCGGLVELIKNGYETLVEAGYEPEMAYFETVHEVKLIVDLIYEGGIANMNYSISNTAEYGEYQSGPRIIKKDETKQRMKEVLAEIQSGKFTKEWMEECKNGQKNFLATRAKLAEHSVEKVGAELRAMMPWI

SEQ ID NO: 88222 - protein, 171 aa, Unknown
  Bacterial polypetide isolated from the Sargasso Sea
MTQLFYDTDADLSLLNNKTIAIIGYGSQGHAHALNLKDSGMDVIVGLYKGSKSESKAISDGLQVFSVSEACEKADWIMILLPDEFQKDVYLKEIEPNLKEGKILSFAHGFNIRFGLIKPPSFVDVVMIAPKGPGHTVRWEYQNGQGVPALFAVEQDSSGSARSLAMAYAKG

SEQ ID NO: 88223 - protein, 227 aa, Unknown
  Bacterial polypetide isolated from the Sargasso Sea
FILIIKSKKRFRCVMVAPKGPGHTVRSEYQKGGGVPCLMAIHKDSSGKAKDLALSYAAAVGGGKAGIIETTFKDECETDLFGEQTVLCGGLVELIKNGFETLTEAGYPPEMAYFETLHEVKLIVDLIYEGGIANMNYSISNTAEYGEYVSGKRVVDSTTKEKMKAVLKDIQSGKFTKEWMKECENGQKNFTKMRENLSKHPIEKVGKDLRAMMPWIAKNKLVDKDKN

SEQ ID NO: 88224 - protein, 247 aa, Unknown
  Bacterial polypetide isolated from the Sargasso Sea
MRVYYDRDADLNLIKDKKIAIVGYGSQGHAHAMNLRDTGLTNVAIALREGSQSRTKAEQANFKVMTPSEAASWADILMMLTPDELQSEIYSNDIASNIKEGTTIAFAHGLNIHFDLIKPAEGIDVIMVAPKGPGHTVRAEYARGAGVPCLVAVDKNPSGNALEIGIAYASAIGGGRAGIIETTFKEECETDLFGEQSVLCGGLTHLILAGYETLVEAGYAPEMAYFECLHEVKLIVDLLYEGGMANM

SEQ ID NO: 88225 - protein, 106 aa, Unknown
  Bacterial polypetide isolated from the Sargasso Sea
IVDLIYEGGIANMNYSISNTAEYGEYMSGPKIINKEETKKRMKEVLQDIQSGKFTKQWMDECKNGQKNFLKTREKLAEHPVEKVGAKLRAMMPWISKKKLVDSDKN

SEQ ID NO: 88226 - protein, 151 aa, Unknown
  Bacterial polypetide isolated from the Sargasso Sea
MFYEKDTDVNLIKDKKIAIFGYGSQGHAHALNLKDSGVKEVVVALREGSSSIPKAQSKGLKVMNLSDAAEWADVVMILTPDELQASIYKNHIEQRVREGTSIAFAHGLNVHYDLIKARKDLDVFMVAPKGPGHLVRSEYEKGGGVPCLFAV

SEQ ID NO: 88227 - protein, 161 aa, Unknown
  Bacterial polypetide isolated from the Sargasso Sea
MYYEKDTDVNLIKEKKVAIFGYGSQGHAHALNLRDSGVKEVVVALREGSASAAKAESKGLKVMNLSDASEWADIVMILTPDELQATIYKNHIEQRVKEGTSIAFAHGLNIHYDLIKARKDLDVFMVAPKGPGHLVRSEFEKGGGVPCLFAVHQNGSGKARE

SEQ ID NO: 88228 - protein, 176 aa, Unknown
  Bacterial polypetide isolated from the Sargasso Sea
GMMDDWKNDDKKLLTWREATAETSFEKSTAAELSISEQEYYDNGILMVAMVKAGVELAFETMTASGVIAESAYYESLHEVPLIANLIGRKKLYEMNKVISDTAEYGCYLFSHECIPLLEGFMSNINTDVIGKGLQLNDSGSDNAELIAANEAIRSHPIEVVGKKLRMHMTSMKKAI

SEQ ID NO: 88229 - protein, 216 aa, Unknown
  Bacterial polypetide isolated from the Sargasso Sea
SHDVFMIAPKSPGHLVRSTFVNGKGVPTLIAIHNNTSGKAKDIALAYASAIGGGRAGIIETDFKEETETDLFGEQAVLCGGVTALILAGFETLVDAGYAPEMAYFECLNELKLIVDLMYEGGMTDMRYSISNTAEYGDLTKGPFLIDDHVKAKMKLVLADVQNGKFANDFVSEIKSGSPEFNRLRKEGSEHLIESTGKKLRSMMSWMDKEKLVGNK

SEQ ID NO: 88230 - protein, 141 aa, Unknown
  Bacterial polypetide isolated from the Sargasso Sea
CGGLVELIKNGYETLVEAGYEPEMAYFECLHEVKLIVDLIYEGGIANMNYSISNTAEYGEYVSGPRIVNKEETKKRMKEVLNDIQSGKFTKQWMDECKNGQKNFLKTREDLAKHSIETVGSKLRAMMPWIGKKKLVDSDKG

SEQ ID NO: 88231 - protein, 269 aa, Unknown
  Bacterial polypetide isolated from the Sargasso Sea
KKTSKSIDKAKKDGFKVLNVDEASKWADVCMVLVPDELQADLYEDFLDKNLKKGACLLFAHGLSIHFQLIKARSDLDVFMIAPKGPGHTVRGQYVSGGGVPCLLAIHQDASKNALELGLSYASAIGGGRSGIIQTTFKEECETDLFGEQSVLCGGLTALIQAGFETLVEAGYSPEMAYFECLHEVKLIVDLIYEGGIANMRYSISNTAEYGDLTRGPRIIDENVKKEMKKVLNEIQSGKFVRDWILECKSGQLNFKAEKRIQNQKQIEV

SEQ ID NO: 88232 - protein, 281 aa, Unknown
  Bacterial polypetide isolated from the Sargasso Sea
MSTATAQAANSDATKTPLSVYYDKDCNIELIKGKNVAIIGYGSQGHAHALNLKDSGVANVTIGLREGSSSAPKAEAAGFDVKTPADATAEADVVMILVPDELQADLYRDHIEPQIKQGAALMFAHGLNVHFGLIKPRADLDVFMVAPKGPGHTVRGEFEKGGGVPALIAIYQDATGNAKELALSYASAVGGGRSGIIETTFKDECETDLFGEQAVLCGGIEELIKAGYETLVEAGYPEEMAYFECLHETKLIVDLIYEAGISNMNYSVSNTAEFGGYVSGS

SEQ ID NO: 88233 - protein, 313 aa, Unknown
  Bacterial polypetide isolated from the Sargasso Sea
QGHAHALNLKDSGVKDVVIALRENSSSIKKAEKDGFKVQSVDEASKWADVCMVLVPDELQADLYNDFLEKNLKKGACLLFAHGLSIHFQLITPRTDLDVFMIAPKGPGHTVRGQYLSGAGVPCLIAIHQDASRNALELGLSYASAIGGGRSGIIQTTFKEECETDLFGEQSVLCGGLTALIQAGFETLVEAGYSPEMAYFECLHEVKLIVDLIYEGGISNMRYSISNTAEYGDLTRGPRIINKNVKKEMKKVLDEIQTGKFVRDWILECKSGQLNFKAEKRIQENKEIEIVGEKLRKMMPWISSNKLVNKNKN

SEQ ID NO: 88234 - protein, 154 aa, Unknown
  Bacterial polypetide isolated from the Sargasso Sea
ECETDLFGEQAVLCGGLIELIRCGFETLVEAGYAPEMAYFECLHEVKLIVDLIYEGGIANMDYSISNTAEYGQYVTGPRILPYEQTKKVMKGVLSDIQKGNFVRDFMLENAVGQPTIKAARRANDEHMIEEVGEKLRGMMPWISAGKMVDKDKN

SEQ ID NO: 88235 - protein, 143 aa, Unknown
  Bacterial polypetide isolated from the Sargasso Sea
AVLCGGAAALVQAGFETLVEAGYAPEMAYFECLHELKLIVDFFYEGGISNMWYTVSNTAEYGGLTRGERIITEDTKEEMKKILEEIQTGKFAQEFVSENLAGAPGIKAMRRISQQHPIEDVGLKLRAMMPWIEEHKLVDKDVN

SEQ ID NO: 88236 - protein, 279 aa, Unknown
  Bacterial polypetide isolated from the Sargasso Sea
SQGHAHALNLKDSGVKEVVVALRDGSSSIAKAESKGLKVMNLSDAAAWADVLMILTPDELQAQIYKNHIEQRAKEGTSIAFAHGLNVHYDLIKARKDLDVFMVAPKGPGHLVRSEYEKGGGVPCLFAVHQNGSGKARDLALSYASAIGGGRSGIIETTFKDEVETDLFGEQTVLCGGLVELMKNGYETLVEAGYEPEMAYFETVHEVKLIVDLIYEGGIANMNYSISNTAEYGEYQSGPRIVNKEQTKKRMKEVLSEIQSGKFTKDWMDECKNGQKNFS

SEQ ID NO: 88237 - protein, 233 aa, Unknown
  Bacterial polypetide isolated from the Sargasso Sea
MNYFNTLPLRLQLEQLGKCRFMDHSEFSDGVNKLKGAKIVIVGCGAQGLNQGLNMRDSGLDIAFTLRDEAIAEKRASWKNATKNGFETGTYQELIPSADLVLNLTPDKQHSSVVNQVMPLMKQGSCLAYSHGFNIVEEGMQIREDITVIMVAPKCPGTEVREEYKRGFGVPTLIAVHAENDPNGDGLDIAKAYAAATGGHRAGVLESSFIAEVKSDLMGEQTILCGMLQTGSL

SEQ ID NO: 88238 - protein, 135 aa, Unknown
  Bacterial polypetide isolated from the Sargasso Sea
GYEVLVEDGYPPEMAYFECLHEVKLIVDLIYEGGLENMRYSISNTAEFGDYVSGPKVVNSDAKEEMRAVLKRIQSGEFAQEFMSDCRESNDGKGGPRMKEYRQQTSEHSIEKVGSELRAMMPWIAQNKIVDKAKN

SEQ ID NO: 88239 - protein, 255 aa, Unknown
  Bacterial polypetide isolated from the Sargasso Sea
YQASLFTESIEPYLKDSAMLAFAHGFNIHFGQIKPDTKHDVFMIAPKSPGHLVRSTFLQGKGVPTLIAIHNDNSGKAKDIALAYASAIGGGRAGIIETDFKEETETDLFGEQAVLCGGVTALVKAGFETLVEAGYAPEMAYFECLNELKLIVDLMYEGGMTEMRYSISNTAEYGDLTKGPFLIDDHVKEKMKLVLADVQNGKFANDFVNEIKSGSKEFNKLRKEGSEHQIEETGKKLRNMMSWMQDSKLVDEKIK

SEQ ID NO: 88240 - protein, 296 aa, Unknown
  Bacterial polypetide isolated from the Sargasso Sea
RCFRDGSASKAKAESKGLKVMNLSDAAEWADVCMILTPDELQATIYKNHIEQRIKEGTSLAFAHGLNIHYDLIKARKDLDVFMVAPKGPGHLVRSEFEKGGGVPCLMAVHQDGTGKARDLALSYASAIGGGRSGIIETTFKDECETDLFGEQTVLCGGLVELIKNGYETLVEAGYEPEMAYFECLHEVKLIVDLIYEGGIANMNYSISNTAEYGEYVSGPRIINKDETKKKMKEVLADIQSGKFTKQWMDECKNGQKNFLKTREELAKHSIETVGAKLRAMMPWIGKKKLVDSDKK

SEQ ID NO: 88241 - protein, 214 aa, Unknown
  Bacterial polypetide isolated from the Sargasso Sea
MLYEKDADVDLIKSKKVAIFGYGSQGHAHALNLKDSGVKEVVVALRDGSPSKKKAEAQGLKVMSLSDAAEWADILMMLTPDELQSQIYKNHIEQRMREGTTLAFAHGLNIHFNLIKARKDLDIFMIAPKGPGHLVRSEFQKGGGVPCLMAIHQDSSGKAKDLALSYASAIGGGKSGIIETTFKDECETDLFGEQSVLCGGLVELIKNGYETLVE

SEQ ID NO: 88242 - protein, 134 aa, Unknown
  Bacterial polypetide isolated from the Sargasso Sea
MQVYYDKDANLEIIKDKKVVIVGYGSQGHAHANNLKDSGGNVTVALRKDSASWTKAEDAGLNVQEVAEAVKDADLVMILMPDELQSATYKSEIENNIKEGAVLAFAHGFNIHFDMISPRDDLDVIMVAPKGPGH

SEQ ID NO: 88243 - protein, 307 aa, Unknown
  Bacterial polypetide isolated from the Sargasso Sea
DKKVAIFGYGSQGHAHALNLKDSGVKEVVVALRDGSSSIKKAESAGLKVMTLSDAAAWADVVMMLTPDELQSEIYKNHIEQRMKEGTSLAFAHGLNIHFDLINARKDLDVFMVAPKGPGHTVRSEYQKGGGVPCLMAVHKDSSGKAKELALSYASAVGGGKAGIIETTFKDECETDLFGEQTVLCGGLVELIKNGFETLTEAGYPPEMAYFETLHEVKLIVDLIYEGGIANMNYSISNTAEYGEYVSGKRIVDSKTKEKMKEVLKDIQSGKFTKQWMEEHKSGQKNFLKMRKDLANHQIEKVGKELE

SEQ ID NO: 88244 - protein, 114 aa, Unknown
  Bacterial polypetide isolated from the Sargasso Sea
FETLHEVKLIVDLIYEGGIANMNYSISNTAEYGEYVSGKRVVDGKTKEKMKEVLKDIQSGKFTKQWMDEHKSGQKNFLKMRQDLAKHPIEKVGKELRAMMPWIGKNKLVDKDKN

SEQ ID NO: 88245 - protein, 302 aa, Unknown
  Bacterial polypetide isolated from the Sargasso Sea
KKIVIVGYGSQGHAHAINLRDSGIEDVAIALREGSPTRKKAENAGFKVMTPSESALWADIIMMLTPDELQSEIYNNEIAANIKDGTALAFAHGLNIHFDLIKPNANIDVIMMAPKGPGHTVRAEYVRGAGVPCLVAVNQNPSGNALEIAIAYSSAIGGGRAGIIETTFKEECETDLFGEQSVLCGGLTHLIIAGYETLVDAGYAPEMAYFECLHEVKLIVDLLYEGGMANMRYSISNTAEYGDYSRGPRLITDETKKEMKKILSEIQSGQFAKEWMEEHRAGQTKFTTMRKKHAEHPIEKIG

SEQ ID NO: 88246 - protein, 204 aa, Unknown
  Bacterial polypetide isolated from the Sargasso Sea
MKVFYDKDCDKSLIKNKKVAIIGFGSQGHAHAMNLKDSGVNDIVIGLKKNSSSITKAKKAGFKVLSPLEAIKYGEVVMILIPDELQPNLYKEIIKNNIGKNAYLGFAHGFSIHFKFIKPRKDLNIFMVAPKGPGHLVRSEYKNKRGVPCLLAINKSVSNDTKNIGLSYASAVGGGRTGIIETTFKEECETDLFGEQVVLCGGIT

SEQ ID NO: 88247 - protein, 124 aa, Unknown
  Bacterial polypetide isolated from the Sargasso Sea
MFYEKDTKVNLIKDKKVAIFGYGSQGHAHALNLRDSGVKEVVVALREGSSSIEKAESKGLKVMNLSDAAEWADVVMILTPDELQASIYKNHIEQRVKEGTSIAFAHGLNVHYDLIKARKDLDVF

SEQ ID NO: 88248 - protein, 161 aa, Unknown
  Bacterial polypetide isolated from the Sargasso Sea
AKGIGGTRAGILETNFKEETETDLFGEQAVLCGGLSELVKSGFETLVEAGYQPELAYFECLHEVKLIVDLMVKGGLSQMRDSISNTAEYGDYVSGKRLINSDTKKEMQKILKDIQDGTFAKNFVEECDKNKPLMTKLREENSKHEIEKVGKGLRSMFSWLK

SEQ ID NO: 88249 - protein, 238 aa, Unknown
  Bacterial polypetide isolated from the Sargasso Sea
MFYEKDTNVNLIKDKKIAIFGYGSQGHAHALNLRDSGVKEVVVALREGSSSIEKAESKGLKVMNLSDAAEWADVVMILTPDELQASIYKNHIEQRVKEGTSIAFAHGLNVHYDLIKARKDLDVFMVAPKGPGHLVRSEYEKGGGVPCLFAVHQDGSGKARDLAMSYASAVGGGRSGIIETTFKDEVETDLFGEQTVLCGGLVELIKNGYETLVEAGYEPEMAYFETVHEVKLIVDLIY

SEQ ID NO: 88250 - protein, 153 aa, Unknown
  Bacterial polypetide isolated from the Sargasso Sea
VEQIYLGEQTVLCGGLVELIKNGYETLVEAGYEPEMAYFETVHEVKLIVDLIYEGGIANMNYSISNTAEYGEYQSGPRVVNKEETKKRMKEVLAEIQSGKFTKEWMDECKNGQKNFLATRAKLAEHPVEKVGAELRAMMPWISKKKLVDSDKS

SEQ ID NO: 88251 - protein, 206 aa, Unknown
  Bacterial polypetide isolated from the Sargasso Sea
VITVRSEYQKGGGVPCLMAVHKDSSGKAKDLALSYASAVGGGKAGIIETTFKDECETDLFGEQTVLCGGLVELIKNGFETLTEAGYPPEMAYFETLHEVKLIVDLIYEGGIANMNYSISNTAEYGEYISGKRVVDNKTKEKMREVLKDIQSGKFTKQWMDEHKSGQKNFLKMRQDLAKHPIEKVGKELRAMMPWIGKNKLVDKDKN

SEQ ID NO: 88252 - protein, 185 aa, Unknown
  Bacterial polypetide isolated from the Sargasso Sea
DGSGKARDLAMSYASAVGGGRSGIIETTFKDEVETDLFGEQTVLCGGLVELIKNGYETLVEAGYEPEMAYFETVHEVKLIVDLIYEGGIANMNYSISNTAEYGEYQSGPRIIKKDETKQRMKEVLAEIQSGKFTKEWMEECKNGQKNFLATRAKLAEHSVEKVGAELRAMMPWISKKKLVDSDKK

SEQ ID NO: 88253 - protein, 238 aa, Unknown
  Bacterial polypetide isolated from the Sargasso Sea
MKIFYDDDADISIIQKLKVTIVGYGSQGHAHANNLHESGVDVTVALREGSSSWSKAEIAGLKVATVSEAVSDADLVMILAPDEFQKSLYESEIKSNLKSNAVLAFAHGFNIHFKKIIPTDDTSVIMIAPKGPGHTVRSTYLNGGGVPSLIAIYQDGTNPNNHSAKEIALSYAMANGGTRAGVLETTFKEETETDLFGEQAVLCGGMTALIKAGYETLVEAGYSPEMAYFECLHETKLI

SEQ ID NO: 88254 - protein, 311 aa, Unknown
  Bacterial polypetide isolated from the Sargasso Sea
SYSHGFNIVEEGMEIRKDLTVIMVAPKCPGSEVREEYKRGFGVPTLIAVHPENDPEGKGLEQAKAYAFGTGGHRAGVLESSFVAEVKSDLMGEQTILCGVLQTGSILCFDKMIEKGIDPGYASKLIQYGWETITEALKHGGITNMMDRLSNPAKIKAFELSEQLKEILTPLFQKHMDDIMSGHFSKTMMEDWANDDKNLLTWRAATGETAFEKTENTSQNINEQEYFDHGVLMIAFVRAGVELAYDTMVAAGIKEESAYYESLHETPLIANTIARKKLFEMNRVISDTAEYGCYLFDHAAKPLLKDFMKNG

SEQ ID NO: 88255 - protein, 188 aa, Unknown
  Bacterial polypetide isolated from the Sargasso Sea
AVHKDSSGAAKDLSLSYASAIGGGKSGIIETTFRDECETDLFGEQVVLCGGLVELIKKGFETLVEAGYPPEMAYFECLHEVKLIVDLIYEGGIANMNYSISNTAEYGEYVSGKKIIDDKTKERMKEVLKNIQSGKFAKEWMKENEAGQKNFLKMRKELSEHQIEQVGEKLRALMPWISKNKIIDKNKN

SEQ ID NO: 88256 - protein, 194 aa, Unknown
  Bacterial polypetide isolated from the Sargasso Sea
MFYEKDTDVNLIKNKKIAIFGYGSQGHAHALNLKDSGVKEVIVALRDGSASKAKAESKGLKVMNLSDAAEWADVVMILTPDELQASIYKNHIEQRVREGTSIAFAHGLNIHYDLIKARKDLDVFMVAPKGPGHLVRSEFEKGGGVPCLFAVHQNGSGKARELAMSYASAVGGGRSGIIETTFKDEVETDLLENR

SEQ ID NO: 88257 - protein, 247 aa, Unknown
  Bacterial polypetide isolated from the Sargasso Sea
MFYEKDTNVNLIKEKKIAIFGYGSQGHAHALNLKDSGVKEVVVALRDGSASKEKAESKGLKVMNLSDAAEWADVIMILTPDELQANIYKNHIEQRVKEGTSIAFAHGLNVHYDLIKARKDLDVFMVAPKGPGHLVRSEYEKGGGVPCLFAVHQNGSGKARDLAMSYASAIGGGRSGIIETTFKDEVETDLFGEQTVLCGGLVELIKNGYETLVEAGYEPEMAYFETVHEVKLIVDLIYEGGIANMNY

SEQ ID NO: 88258 - protein, 319 aa, Unknown
  Bacterial polypetide isolated from the Sargasso Sea
MFYEKDTDVNLIKDKKIAIFGYGSQGHAHALNLKDSGVKEVVVALRDGSSSKSKAESKGLKVMNLSDAAEWADVVMILTPDELQATIYKNHIEQRVREGTSIAFAHGLNIHYDLIKARKDLDVFMVAPKGPGHLVRSEYEKGGGVPCLFAVHQNGSGKARELAMSYASAVGGGRSGIIETTFKDEVETDLFGEQTVLCGGLVELIKNGYETLVEAGYEPEMAYFETVHEVKLIVDLIYEGGIANMNYSISNTAEYGEYTSGPRIINKEETKKRMKEVLADIQSGKFTKEWMDECKNGQKNFLKTREKLAEHPVKKWVQD

SEQ ID NO: 88259 - protein, 320 aa, Unknown
  Bacterial polypetide isolated from the Sargasso Sea
IFGYGSQGHAHALNLKDSGVKDVVVALREGSSSKVKAESKGLKVMNLSDAAEWADVVMILTPDELQATIYKNHIEQRVREGTSIAFAHGLNIHYDLIKARKDLDVFMVAPKGPGHLVRSEFEKGGGVPCLFAVHQNGSGKARDLAMSYASAVGGGRSGIIETTFKDEVETDLFGEQTVLCGGLVELIKNGYETLVEAGYEPEMAYFETVHEVKLIVDLIYEGGIANMNYSISNTAEYGEYVTGPKIINKEETKKRMKEVLADIQTGKFTKDWMDECKNGQKNFLKTREKLAEHPVEKVGAGLRALMPWISKKKLINSDKK

SEQ ID NO: 88260 - protein, 128 aa, Unknown
  Bacterial polypetide isolated from the Sargasso Sea
MTQLFYDTDADLSLLNNKTIAIIGYGSQGHAHALNLKDSGMDVIVGLYKGSKSESKAISDGLEVFSVSEACKKADWIMILLPDEFQKDVYLKEIEPNLKEGKILSFAHGFNIRFGLIKPPSFVDVVMI

SEQ ID NO: 88261 - protein, 311 aa, Unknown
  Bacterial polypetide isolated from the Sargasso Sea
MFYEKDADTNLIKDKKVAIFGYGSQGHAHALNLKDSGVKNVVVALREGSSSIKKAESEGLKVMSLSDAAAWADVVMVLTPDELQASIYKNHIEQRMREGTSLAFAHGLNIHFNLINSRKDLDVFMVAPKGPGHLVRSEYQRGGGVPCLMAVHKDSSGKARDLAMSYACAVGGGRSGIIETTFKDECETDLFGEQTVLCGGLVELIKNGFETLTEAGYPPEMAYFETLHEVKLIVDLIYEGGIANMNYSISNTAEYGEYISGRKIVDPKTKERMKEVLKDIQTGKFTKQWMDECKNGQKNFLKMREELAKHP

SEQ ID NO: 88262 - protein, 211 aa, Unknown
  Bacterial polypetide isolated from the Sargasso Sea
MVAPKGPGHLLRRTYSEGSGMPCLVAVHKDASGITEDLAMSYASAIGGGRAGILKTTFKEETETDLFGEQVVLCGGLTELIRNGFETLVEAGYQPESAYFETLHEVKLIVDLMYEGGFEWMRHSISDTAEYGDFSRGSRIITSETKEEMKKVLDEIQSGAFAKEWMSQAREGSPFLNKKRAEASKHQLEEVGKGLREMMPFLNAKDVKKDK

SEQ ID NO: 88263 - protein, 177 aa, Unknown
  Bacterial polypetide isolated from the Sargasso Sea
IKIAQEKQKIYSLSYASAVGGGKAGIIETTFKDECETDLFGEQTVLCGGLVELIKNGFETLTEAGYPPQMAYFETLHEVKLIVDLIYEGGIANMNYSISNTAEYGEYVSGKRVVDGKTKEKMKEVLKDIQSGKFTKQWMDEHKSGQKNFLKMRQDLAKHPIEKVGKELRAMMPWIGK

SEQ ID NO: 88264 - protein, 183 aa, Unknown
  Bacterial polypetide isolated from the Sargasso Sea
SGKARDLAMSYASAIGGGRSGIIETTFKDEVETDLFGEQTVLCGGLVELIKNGYETLVEAGYEPEMAYFETVHEVKLIVDLIYEGGIANMNYSISNTAEYGEYMSGPRIINKEETKKRMKEVLQDIQSGKFTKQWMDECKNGQKNFLKTREKLAEHPVEKVGAKLRAMMPWISKKKLVDSDKS

SEQ ID NO: 88265 - protein, 174 aa, Unknown
  Bacterial polypetide isolated from the Sargasso Sea
MQIYYDSDADQNIAKGMEIVIIGYGSQGHAHANNLKDSGANVTVALRKESGSWAKAEAAGFDVKEVGEAVPNADLVMMLIPDEKQSAMYENHLKDNIKDGAVLAFAHGFNIHFEMIIPRDDLDVIMVAPKGPGHTVRSQYESGAGVPCLLAVHRNVSGKAKDVGLSYASMIGSG

SEQ ID NO: 88266 - protein, 200 aa, Unknown
  Bacterial polypetide isolated from the Sargasso Sea
EYVRGAGVPCLVAVDKNPSGNALEIGIAYASAIGGGRAGIIETTFKEECETDLFGEQSVLCGGLTHLILAGYETLVEAGYAPEMAYFECLHEVKLIVDLLYEGGMANMRYSISNTAEYGDYSRGPRLITDETKKEMKKILSEIQSGQFAKEWMQEHQSGQTKFKVMRKEQAEHPIEAVGEKLRTLMPWIAEGKMVDKSKN

SEQ ID NO: 88267 - protein, 206 aa, Unknown
  Bacterial polypetide isolated from the Sargasso Sea
HLVRSEYEKGGGVPCLFAVHQNGSGKARDLAMSYASAIGGGRSGIIETTFKDEVETDLFGEQTVLCGGLVELIKNGYETLVEAGYEPEMAYFETVHEVKLIVDLIYEGGIANMNYSISNTAEYGEYMSGPRIINKEETKKRMKEVLDDIQSGKFTKQWMDECKNGQKNFLKIREKLAEHPVEKVGKNLRAMMPWISKKKLVDSDKS

SEQ ID NO: 88268 - protein, 275 aa, Unknown
  Bacterial polypetide isolated from the Sargasso Sea
MFYEKDTNVNLIKEKKIAIFGYGSQGHAHALNLKDSGVKEVVVALREGSSSKEKAESKGLKVMNLSDAAEWADVIMILTPDELQAIIYKNHIEQRVKEGTSIAFAHGLNVHYNLIKARKDLDVFMVAPKGPGHLVRSEYEKGGGVPCLFAVHQNGSGKARDLAMSYASAIGGGRSGIIETTFKDEVETDLFGEQTVLCGGLVELIKNGYETLVEAGYEPEMAYFETVHEVKLIVDLIYEGGIANMNYSISNTAEYGEYMSGPRIINKDETKKRRK

SEQ ID NO: 88269 - protein, 314 aa, Unknown
  Bacterial polypetide isolated from the Sargasso Sea
ADVNLIKDKHVAIAGYGSQGHAHALNLRDSGVKNITVVLREGSGSAVKAKNDGFTVKTAADAAKDADVFMILTPDEGQADLYNDHVHTNLKEGAALAFAHGLNIHFGLIEPRSDIDVFMIAPKGPGHTVRSEYDRGAGVPTLVAVSQDASGNTMDVALSYASGIGGGRAGIVETTFKEECETDLFGEQVVLCGGLTALIMAGYETLVEAGYAPEMAYFECCHEVKLIVDLIYEGGIANMRYSVSNTAEYGDYITGPKIITDDTRARMKEVLADIQSGTFTRDWMTENKVGQPNFKAMRRIGAEHDIEQVASDCA

SEQ ID NO: 88270 - protein, 258 aa, Unknown
  Bacterial polypetide isolated from the Sargasso Sea
IMMLTLDELQSEIYNNEIANNIKPGSAVAFAHGLNIHFELIKPSNDIDVIMMAPKGPGHTVRAEYVRGAGVPCLVAVNQNPSGNALEIAIAYSSAIGGGRAGIIETTFKEECETDLFGEQSVLCGGLTHLIIAGYETLVDAGYAPEMAYFECLHEVKLIVDLLYEGGMANMRYSISNTAEYGDYSRGPRLITEDTKKEMKKILSEIQSGQFAKEWMEEHRSGQLKFKTMRKKEAEHPIEKVGEKLRTLMPWIAESENG

SEQ ID NO: 88271 - protein, 214 aa, Unknown
  Bacterial polypetide isolated from the Sargasso Sea
MVAPKGPGHLVRSEFEKGGGVPCLFAVHQNGSGKARELAMSYASAVGGGRSGIIETTFKDEVETDLFGEQTVLCGGLVELIKNGYETLVEAGYEPEMAYFETVHEVKLIVDLIYEGGIANMNYSISNTAEYGEYTSGPKIIKKEETKKRMKEVLNDIQSGKFTKEWMDECKNGQKNFLKTREKLAEHPVEKVGTRLRAMMPWIAKKKLVDSDKK

SEQ ID NO: 88272 - protein, 213 aa, Unknown
  Bacterial polypetide isolated from the Sargasso Sea
MRVYYDRDADLNLIKDKKISIVGYGSQGHAHAMNLRDSGIENVSIALREGSNSRSKAEQANFKVMTPAEAASWADVIMMLTPDELQSEIYKNDISENIKEGTTIAFAHGLNIHFDLIKPKEGIDVIMVAPKGPGHTVRAEYVRGAGVPCLVAVDKNPSGNALEIGIAYASAIGGGRAGIIETTFKEECETDLFGEQSVLCGGLTHLILAGYET

SEQ ID NO: 88273 - protein, 257 aa, Unknown
  Bacterial polypetide isolated from the Sargasso Sea
MNLSDAAEWADVCMILTPDELQATIYKNHIEQRIKEGTSLAFAHGLNIHYDLIKARKDLDVFMVAPKGPGHLVRSEFEKGGGVPCLMAVHQDGTGKARDLALSYASAIGGGRSGIIETTFKDECETDLFGEQTVLCGGLVELIKNGYETLVEAGYEPEMAYFECLHEVKLIVDLIYEGGIANMNYSISNTAEYGEYVSGPRIINKEETKKRMKEVLADIQSGKFTKQWMDECKNGQKNFLKTREELAKHSIETSWYK

SEQ ID NO: 88274 - protein, 145 aa, Unknown
  Bacterial polypetide isolated from the Sargasso Sea
MFYEKDTNVNLIKDKKIAIFGYGSQGHAHALNLKDSGVKNVVVALRDGSSSKSKAESKGLKVMNLSDAAEWADVVMILTPDELQASIYKNHIEQRVREGTSIAFAHGLNIHYDLIKARKDLDVFMVAPKGPGHLVRSEFEKGGGV

SEQ ID NO: 88275 - protein, 139 aa, Unknown
  Bacterial polypetide isolated from the Sargasso Sea
MRVYYDRDADINLIKDKKIVIVGYGSQGHAHAMNLRDSGIEDVAIALREGSPSRKKAENAGFKVMTPSESASWADIIMMLTPDELQSEIYNNEIAASIKDGTALAFAHGLNIHFDLIKPNENIDVIMMAPKGPGHTVRA

SEQ ID NO: 88276 - protein, 276 aa, Unknown
  Bacterial polypetide isolated from the Sargasso Sea
ESKAISDGLQVFSVSVACEKADWIMILLPDEFQKDVYLKEIEPNLKEGKILSFAHGFNIRFGLIKPPSFVDVVMIAPKGPGHTVRWEYQNGQGVPALFAVEQDSSGSARSLAMAYAKGIGGTRAGILETNFKEETETDLFGEQAVLCGGLSELVKSGFETLVEAGYQPELAYFECLHEVKLIVDLMVKGGLSQMRDSISNTAEYGDYVSGKRLINSDTKKEMQKILKDIQDGTFAKNFVEECDKNKPLMTKLREENSKHEIEKVGKGLRSMFSWLK

SEQ ID NO: 88277 - protein, 258 aa, Unknown
  Bacterial polypetide isolated from the Sargasso Sea
QMRNNRAMYENHLKDNIKDGAVLAFAHGFNIHFEMIIPRDDLDVIMVAPKGPGHTVRSQYESGAGVPCLLAVHRNVSGKAKDVGLSYASMIGSGRAGIIETNFKDETETDLFGEQAVLCGGLTSLIQTGYEVLVENGYPPEMAYFECLHEVKLIVDLIYEGGLQNMRYSISNTAEYGDYVTGPKIVNENTKETMQKILTEIQSGEFAKDFMNDCNSGGQKMSEYRKNSSEHSIESVGEELRSMMPWISANKIVDKAKN

SEQ ID NO: 88278 - protein, 278 aa, Unknown
  Bacterial polypetide isolated from the Sargasso Sea
NVVVALRSGSSSAPKAEAAGFKVVSPSEAAAWCDLAMVLTPDEGQADLWEYDLHNNMKEGTAIAFAHGLSIHFNLIEAREDMDVFMIAPKGPGHTVRSEYVRGAGVPCLVAVEQNASGNALEIALSYSSAIGGGRAGTIETTFREECETDLFGEQTVLCGGVCELMRAGFEILVEAGYAPEMAYFECMHEMKLIVDLIYEGGIANMNYSVSNTAEYGEYVTGPKVIDDHVKKNMRKALESIQSGDFAANWMLENKVNQASFKAMRRRSSEHQSEEIGE

SEQ ID NO: 88279 - protein, 150 aa, Unknown
  Bacterial polypetide isolated from the Sargasso Sea
MRVYYDRDADIGLIKSKKVLVIGYGSQGHAHAANLKDSGVKNVAIALKKKSQSIEKAKKAGFDVKEVHDGAKWADVIMMATPDELQADIYHESLKENMRAGSAIAFAHGLNIHFNLIEPRNDIDVFMVAPKGPGHTVRSEYLRGGGVPCL

SEQ ID NO: 88280 - protein, 200 aa, Unknown
  Bacterial polypetide isolated from the Sargasso Sea
MFYEKDADVNLIKSKKVAIFGYGSQGHAHALNLKDSGVKDIVVALREGSSSAAKAESKGLKVMNLSDAAEWADVVMILTPDELQAEIYKNHIEQRVREGTSIAFAHGLNVHYDLIKARKDLDVFMVAPKGPGHLVRSEYEKGGGVPCLFAVHQNGSGKARDLALSYASAVGGGRSGIIETTFKDEVETDLFGDKLYCVEV

SEQ ID NO: 88281 - protein, 163 aa, Unknown
  Bacterial polypetide isolated from the Sargasso Sea
MRVYYDRDADLNLIKEKKISIVGYGSQGHAHAMNLRDSGIENVSIALREGSNSRSKAEQANFKVMTPAEAASWADVIMMLTPDELQSEIYKNDIAENIKEGTTIAFAHGLNIHFDLIKPKEGIDVIMVAPKGPGHTVRAEYARGAGVPCLVAVDKNPSGNALK

SEQ ID NO: 88282 - protein, 222 aa, Unknown
  Bacterial polypetide isolated from the Sargasso Sea
MKIYYDDDADIEIIRKLNVTIVGYGSQGHAHANNLKDSGVNVTVALREGSSSWNKAVEAGLNVMPVAESIQDADLVMMLAPDEFQKGIYDKNIQSNLKSDAILAFAHGFNIHFKKIIPEKGNSVIMIAPKGPGHTVRSTYLKGGGVPSLVAIYQDAISNNSFSAKDVALSYAKANGGTRAGVLETSFKEETETDLFGEQAVLCGGMTALIKAGYETLVEARI

SEQ ID NO: 88283 - protein, 178 aa, Unknown
  Bacterial polypetide isolated from the Sargasso Sea
SYASAIGSGRAGIIETNFKDETETDLFGEQAVLCGGLTQLIQNGYEVLVEDGYPPEMAYFECLHEVKLIVDLIYEGGLENMRYSISNTAEFGDYVSGPKVVNSDAKEEMRAVLKRIQSGEFAQEFMSDCRESNDGKGGPRMKEYRQQTSEHSIEKVGSELRAMMPWIAQNKIVDKAKN

SEQ ID NO: 88284 - protein, 241 aa, Unknown
  Bacterial polypetide isolated from the Sargasso Sea
MRVYYDRDADINLIKDKKIVIVGYGSQGHAHAMNLRDSGIQNVAIALREGSATRVKAEKANFKVMSPSEASKWADIIMMLTPDELQSEIYNNEIGPNIKEGTSIAFAHGLNIHFDLIQPEEGIDVIMIAPKGPGHTVRAEYVRGAGVPCLVAVDKNPSGNALEIGIAYASAIGGGRAGIIETTFKEECETDLFGEQSVLCGGLTHLILAGYETLVEAGYAPEMAYFECLHEVKLIVDLLYE

SEQ ID NO: 88285 - protein, 237 aa, Unknown
  Bacterial polypetide isolated from the Sargasso Sea
ALAFAHGLNVHFDLINARPDMDVFMVAPKGPGHTVRSEFKKGGGVPCLVAVDSDKTGKALDIALSYASAIGGGKAGIIETTFKDECETDLFGEQTVLCGGVVELIRNGFETLVEAGYPPEMAYFECLHEVKLIVDLIYEGGIANMNYSISNTAEYGEYVSGPKIVDGETKSKMKKVLEKIQSGEFTREWIEEYKSGAKNFEAMRSKIDNHQIEKVGKDLRAMMPWISKNKLVDKEKN

SEQ ID NO: 88286 - protein, 189 aa, Unknown
  Bacterial polypetide isolated from the Sargasso Sea
CCSQNGSGNARDIAMSYASAIGGGRSGIIETTFKDEVETDLFGEQTVLCGGLVELIKNGYETLVEAGYEPEMAYFETVHEVKLIVDLIYEGGIANMNYSISNTAEYGEYVSGPKIINKEETKKRMKEVLEKIQSGKFTKEWIDECKNGQKNFLKTREKLAEHPIEKVGADLRAMMPWITKKKLVDSDKN

SEQ ID NO: 88287 - protein, 162 aa, Unknown
  Bacterial polypetide isolated from the Sargasso Sea
GIIETTFKDECETDLFGEQTVLCGGLVELIKNGFETLTEAGYPPEMAYFETLHEVKLIVDLIYEGGIANMNYSISNTAEYGEYISGRKIVDSKTKERMKEVLKDIQSGKFTKQWMDECKGGQKNFLKMREELAKHPIEKVGKKLRDLMPWIGKNKLVDKSKN

SEQ ID NO: 88288 - protein, 132 aa, Unknown
  Bacterial polypetide isolated from the Sargasso Sea
MKTYYDKDTNPSLIKDKKVAIFGYGSQGHAHALNLKDSGVKEVVVALREGSSSIKKAESAGLKVMTLSDAAAWADVVMMLTPDELQSEIYKNHIEQRMKEGTSLAFAHGLNIHFDLINARKDLDVFMVAPKG

SEQ ID NO: 88289 - protein, 283 aa, Unknown
  Bacterial polypetide isolated from the Sargasso Sea
ESKGLKVMNLSDAAEWADVVMVLTPDELQASIYKNHIEQRVREGTSIAFAHGLNIHYDLIKARKDLDVFMVAPKGPGHLVRSEFVKGGGVPCLFAVHQNGSGKARDLAMSYASAVGGGRSGIIETTFKDEVETDLFGEQTVLCGGLVELIKNGYETLVEAGYEPEMAYFETVHEVKLIVDLIYEGGIANMNYSISNTAEYGEYQSGPRVVNKEETKKRMKEVLDDIQSGKFTKQWMEECKNGQKNFLATRAKLAEHPVEKVGANLRAMMPWIGKKKLVDSDKS

SEQ ID NO: 88290 - protein, 176 aa, Unknown
  Bacterial polypetide isolated from the Sargasso Sea
MRVYYDRDADINLIKNKKVVIVGYGSQGHAHAANLRDSGVKDVAVALRSDSTSVEKARSAGFNVMNVAEASKWADVIMMLTPDELQGNIYRTDIEKNMKSGAAIAFAHGLNVHFNLIEPRNDIDVFMVAPKGPGHTVRSEYQKGGGVPCLIAIDKDVSGNVHDIGLSYACAIGGGR

SEQ ID NO: 88291 - protein, 338 aa, Unknown
  Bacterial polypetide isolated from the Sargasso Sea
MKVFYDKDADLSLIKGKQVTIIGYGSQGHAHALNLKESGVNITVGLRKGGASWSKAENAGLQVKEVAEAVKGADVVMMLLPDEQIADVYAKEVHANIKQGAALAFAHGFNVHYGQVIPRADLDVIMIAPKAPGHTVRGTYSQGGGVPHLIAVAQDKSGAARDIALSYAAANGGGRAGIIETNFREETETDLFGEQAVLCGGTVDLIKAGFETLVEAGYAPEMAYFECLHELKLIVDLIYEGGIANMNYSISNNAEYGEYVTGPRIVTAETKKAMKAVLTDIQTGEYAKSFIIENKAGAPTLQSRRRLTAEHQIETVGAKLRSMMPWIAANKLVDQSKN

SEQ ID NO: 88292 - protein, 338 aa, Unknown
  Bacterial polypetide isolated from the Sargasso Sea
MFYEKDTNVNLIKDKKVAIFGYGSQGHAHALNLRDSGVKEVVVALREGSSSIEKAESKGLKVMNLSDAAEWADVVMILTPDELQASIYKNHIEQRVKEGTSIAFAHGLNVHYDLIKARKDLDVFMVAPKGPGHLVRSEYEKGGGVPCLFAVHQDGSGKARDLAMSYASAVGGGRSGIIETTFKDEVETDLFGEQTVLCGGLVELIKNGYETLVEAGYEPEMAYFETVHEVKLIVDLIYEGGIANMNYSISNTAEYGEYQSGPRIIKKDETKQRMKEVLAEIQSGKFTKEWMEECKNGQKNFLATRAKLAEHSVEKVGAELRAMMPWISKKKLVDSDKK

SEQ ID NO: 88293 - protein, 162 aa, Unknown
  Bacterial polypetide isolated from the Sargasso Sea
MQVYYDKDADLDIIKNKKVVIVGYGSQGHAHANNLKDSGGNVTVALRKESASWSKAEAAGLNVQEVAEAVKDADMVMILMPDELQSATYKSEIENNIKQGAVLAFAHGFNIHFDMIEPREDLDVIMVAPKGPGHTVRSQYEIGAGVPCLIAIHTDISGNAKE

SEQ ID NO: 88294 - protein, 338 aa, Unknown
  Bacterial polypetide isolated from the Sargasso Sea
MFYEKDTNVDLIKDKKVAIFGYGSQGHAHALNLRDSGVKEVVVALREGSSSIEKAESKGLKVMNLSDAAEWADVVMILTPDELQASIYKNHIEQRVKEGTSIAFAHGLNVHYDLIKARKDLDVFMVAPKGPGHLVRSEYEKGGGVPCLFAVHQDGSGKARDLAMSYASAVGGGRSGIIETTFKDEVETDLFGEQTVLCGGLVELIKNGYETLVEAGYEPEMAYFETVHEVKLIVDLIYEGGIANMNYSISNTAEYGEYQSGPRIIKKDETKQRMKEVLAEIQSGKFTKEWMEECKNGQKNFLATRAKLAEHSVEKVGAELRAMMPWISKKKLVDSDKK

SEQ ID NO: 88295 - protein, 411 aa, Unknown
  Bacterial polypetide isolated from the Sargasso Sea
MSNYFNTLNLRQQLKQLGKCRFMAKEEFAKGSDLLKGWKVVIVGCGAQGLNQGLNMRDSGLDISYALRAEAIAAKRKSFQNASDNGFNVGTYEELIPTADLVLNLTPDKQHTSVVKAVMPLMKQGATLAYSHGFNIVEEGTQIRKDITVVMVAPKCPGTEVREEYKRGFGVPTLIAVHPENDPKGLGLEIAKAYASATGGDRAGVLESSFVAEVKSDLMGEQTILCGMLQTGSILAYDKLVAEGVEPGYAAKLIQFGWETVTEALKHGGITHMMDRLSNPAKIKAYDLAEELKVTLRPLFEKHMDDIISGEFSRTMMADWANDDKQLFGWREETRQSGFENAPVSSEQIPEQDYFDRGILFVAMVKAGVELAFETMVAAGIVEESAYYESLHETPLIANTIARKRLYEMNV

SEQ ID NO: 88296 - protein, 338 aa, Unknown
  Bacterial polypetide isolated from the Sargasso Sea
MFYEKDTDVNLIKDKKIAIFGYGSQGHAHALNLKDSGVKEVVVALREGSASKTKAESKGLKVMNLSDAAEWADVVMVLTPDELQATIYKNHIEQRVREGTSIAFAHGLNIHYDLIKARKDLDVFMVAPKGPGHLVRSEFEKGGGVPCLFAVHQNGSGKARELAMSYASAVGGGRSGIIETTFKDEVETDLFGEQTVLCGGLVELIKNGYETLVEAGYEPKMAYFETVHEVKLIVDLIYEGGIANMNYSISNTAEYGEYVTGPKIINKEETKKRMKEVLADIQSGKFTKDWMDECKNGQKNFLKTREKLAEHPVEKVGAGLRALMPWIAKKKLIDSDKS

SEQ ID NO: 88297 - protein, 277 aa, Unknown
  Bacterial polypetide isolated from the Sargasso Sea
MKVYYEKDANLDLIKSKKIAIYGYGSQGHAHALNLNDSGASNVVVALREGSSSAKKAEAEGLKVMSLSDAAEWADIMMMLIPDELQADVWKNHIEQRAKEGSALAFAHGLNIHFDLINARTDMDVFMVAPKGPGHTVRSEYKIGGGVPCLVAVDSNKTGNALDLALSYASAIGGGKAGIIETTFKDECETDLFGEQTVLCGGVVELIRNGFETLVEAGYPPEMAYFECLHEVKLIVDLIYEGGIANMNYSISNTAEYGEYVSGPKIVDGDTKAKRKR

SEQ ID NO: 88298 - protein, 492 aa, Unknown
  Bacterial polypetide isolated from the Sargasso Sea
MANYFNSLNLRQQLAQLGQCRFMDRSEFSDGCNYIKDWNIVILGCGAQGLNQGLNMRDSGLNIAYALRPEAIAQKRASWQKATDNGFRVGTFEELIPTADLVLNLTPDKQHSNVVSAVMPLMKQGATLSYSHGFNIVEEGMQIRSDITVVMVAPKCPGTEVREEYKRGFGVPTLIAVHPENDPDGDGLDIAKAYASATGGDRAGVLQSSFIAEVKSDLMGEQTILCGMLQTGAILGYDKMVADGVEPGYAAKLIQQGWETVTEALKHGGITNMMDRLSNPAKIKAFEIAEDLKEILQPLFEKHMDDIISGEFSRTMMQDWANDDANLLRWRAETAETGFENAPVSSEHIDEQTYFDKGIFLVAMIKAGVELAFDTMVSAGIVEESAYYESLHETPLIANTIARKRLYEMNVVISDTAEYGCYLFNHAAVPMLRDYVNAMSPEYLGAGLKDSSNNVDNLQLIAINDAIRHTSVEYIGAELRGYMTDMKSIVGA

SEQ ID NO: 88299 - protein, 308 aa, Unknown
  Bacterial polypetide isolated from the Sargasso Sea
LNLKDSGVKEVVVALREGSTSKAKAESKGLKVMNLSDAAEWADVVMILTPDELQATIYKNHIEQRVREGTSIAFAHGLNIHYDLIKARKDLDVFMVAPKGPGHLVRSEFEKGGGVPCLFAVHQNGSGKARELAMSYASAVGGGRSGIIETTFKDEVETDLFGEQTVLCGGLVELIKNGYETLVEAGYEPEMAYFETVHEVKLIVDLIYEGGIANMNYSISNTAEYGEYVTGPKIINKEETKQRMKEVLADIQSGKFTKEWMDECKNGQKNFLKTREKLAEHPVEKVGAGLRALMPWIAKKKLIDSDKS

SEQ ID NO: 88300 - protein, 151 aa, Unknown
  Bacterial polypetide isolated from the Sargasso Sea
MFYEKDTNVNLIKDKKVAIFGYGSQGHAHALNLRDSGVKEVVVALREGSSSIEKAESKGLKVMNLSDAAEWADVVMILTPDELQASIYKNHIEQRVKEGTSIAFAHGLNVHYDLIKARKDLDVFMVAPKGPGHLVRSEYEKGGGVPCLFAV

SEQ ID NO: 88301 - protein, 137 aa, Unknown
  Bacterial polypetide isolated from the Sargasso Sea
MFYEKDADVNLIKQKKIAIFGYGSQGHAHALNLKDSGVKEVVVALRDGSSSKAKAESKGLKVMNLSDAAEWADVVMILTPDELQATIYKNHIEQRVREGTSIAFAHGLNIHYDLIKARKDLDVCMVAPKGPGHLVRS

SEQ ID NO: 88302 - protein, 328 aa, Unknown
  Bacterial polypetide isolated from the Sargasso Sea
MIKDKKIAIFGYGSQGHAHALNLKDSGVKEVVVALREGSVSIAKAESKGLKVMNLSDAAEWADVVMILTPDELQAAIYKNHIEQRVKEGTSIAFAHGLNVHYDLIKARKDLDVFMVAPKGPGHLVRSEYEKGGGVPCLFAVHQDGSGKARDLAMSYASAVGGGRSGIIETTFKDEVETDLFGEQTVLCGGLVELIKNGYETLVEAGYEPEMAYFETVHEVKLIVDLIYEGGIANMNYSISNTAEYGEYQSGPRIINKEETKKRMKEVLADIQSGKFTKEWMDECKNGQKNFLATRAKLAEHSVEKVGAELRAMMPWISKKKLVDSDKK

SEQ ID NO: 88303 - protein, 300 aa, Unknown
  Bacterial polypetide isolated from the Sargasso Sea
MRVYYDRDCDVNLIKSKNVVVIGYGSQGHAHAANMKDSGVKNVRIALREDSSSVSKAKDAGYEVMNVSDAAKWADVMMMATPDELQSQIWEESLVDNMKPGSALGFAHGLNIHFGLIDPRKDIDIFMLAPKGPGHTVRSEYLRGGGVPSLVAVAQDSTKNALDIGLSYGCAVGGGRAGIIETTFKEECETDLFGEQVVLCGGLSELITAGFETLVDAGYAPEMAYFECLHEVKLIVDLMYEGGLANMRYSISNTAEYGDYVTGKRIINEDTRKEMKRVLDDIQSGKFARDWMQECKVNQP

SEQ ID NO: 88304 - protein, 347 aa, Unknown
  Bacterial polypetide isolated from the Sargasso Sea
MKIYYDDDANLELIKKLNVTIIGYGSQGHAHANNLKDSGVDVTVGLREGSSSWSKATEAGLKVMPVDQSVLNADLVMILAPDEFQKGVFEKSIKPNLKSNAILAFAHGFNIHFKKIVPSETNTVIMIAPKGPGHTVRSTYLNGGGVPSLIAIFNDAMQKGEDSAKDIALSYAKANGGTRAGVLETTFKEETETDLFGEQAVLCGGLTALIKAGYETLVEAGYSPEMAYFECLHETKLITDLIQEGGIANMHYSISNTAEYGDYLSGPKVITEKTKEAMREILDNIQSGNFADEFLDDCRQSNDGSGGPFMKSNRKSTKNHPIEEVGRELRSKMKFLNSEKLVDIEKN

SEQ ID NO: 88305 - protein, 133 aa, Unknown
  Bacterial polypetide isolated from the Sargasso Sea
MRVYYDRDADLNLIKNKKIVIVGYGSQGHAHAMNLRDTGLENVSIALREGSQSRSKAEQANFNVMTPAEAASWADIIMILTPDELQSEIYENDIANNIKEGTTIAFAHGLNIHFDLIKPKEGIDVIMVAPKGP

SEQ ID NO: 88306 - protein, 329 aa, Unknown
  Bacterial polypetide isolated from the Sargasso Sea
MTQLFYDTDADLSLLNNKTIAIIGYGSQGHAHALNLKDSGMDVIVGLYEGSKSESKAISDGLQVFSVSQACEKADWIMILLPDEFQKDVYLKEIEPNLKEGKILSFAHGFNIRFGLIKPPGFVDVVMIAPKGPGHTVRWEYQNGQGVPALFAVEQDSSGSARSLAMAYAKGIGGTRAGILETNFKEETETDLFGEQAVLCGGLSELVKSGFETLVEAGYQPELAYFECLHEVKLIVDLMVKGGLSQMRDSISNTAEYGDYVSGKRLINSDTKKEMQKILKDIQDGTFAKNFVEECDKNKPLMTKLREENSKHEIEKVGKGLRSMFSWLK

SEQ ID NO: 88307 - protein, 221 aa, Unknown
  Bacterial polypetide isolated from the Sargasso Sea
SRKDLDVFMVAPKGPGHLVRSEYQRGGGVPCLMAVHKDSSGKARDLAMSYACAVGGGRSGIIETTFKDECETDLFGEQTVLCGGLVELIKNGFETLTEAGYPPEMAYFETLHEVKLIVDLIYEGGIANMNYSISNTAEYGEYVSGKKIVDSKTKERMKEVLKNIQSGKFTKQWMDECKGGQKNFLKMREELAKHPIEKVGKKLRDLMPWIGKNKLVDKSKN

SEQ ID NO: 88308 - protein, 339 aa, Unknown
  Bacterial polypetide isolated from the Sargasso Sea
MRVYYDRDADLNLIKNKKIAIVGYGSQGHAHAMNLRDSGIENVAIALREDSATREKAKNASFDVVTPTEAADWADIIMMLTPDELQSDIYNNEIAPNIKEGTALAFAHGLNIHFDLIQPAEGIDVIMIAPKGPGHTVRAEYERGAGVPCLVAVDKNPSGNALDIAIAYASGVGGGRAGIIETTFKEECETDLFGEQSVLCGGLTHLITAGYETLVEAGYAPEMAYFECLHEVKLIVDLLYEGGMANMRYSISNTAEYGDYSRGPRLITDETKKEMKKILAEIQSGQFTKEWMDEHKSGQTKFKLMRKQQAEHSIEAVGEKLRTLMPWIAEGKMVDKSKN

SEQ ID NO: 88309 - protein, 338 aa, Unknown
  Bacterial polypetide isolated from the Sargasso Sea
MFYEKDTDVNLIKDKKIAIFGYGSQGHAHALNLKDSGVKEVVVALREGSSSISKAESKGLKVMNLSDAAEWADVVMILTPDELQAEIYKNHIDQRIRPGTSIAFAHGLNVHYDLIKARKDLDVFMVAPKGPGHLVRSEYEKGGGVPCLFAVHQNGSGKARDLAMSYASAVGGGRSGIIETTFKDEVETDLFGEQTVLCGGLVELIKNGYETLVEAGYEPEMAYFETVHEVKLIVDLIYEGGIANMNYSISNTAEYGEYESGPRVVNKEETKKRMKEVLADIQSGKFTKQWMDECKNGQKNFLATRAKLAEHPVEKVGANLRAMMPWIGKKKLVDSDKS

SEQ ID NO: 88310 - protein, 280 aa, Unknown
  Bacterial polypetide isolated from the Sargasso Sea
LSNADAAQKADLVMFLIPDEFQGKTYIEEIEPNLKQGATIAFAHGFNIHYKQITPRSDLDVVMIAPKGPGHTVRGQYKSGAGVPCLIAIQQDASGTALENSIAYASAIGGGRAGIIKTTFKDETETDLFGEQAVLCGGLTSLIKAGYETLTEAGYPPELAYFECVHEVKLIVDLIYEGGLANMRYSISNTAEYGDYTSGPKVITDTAKEAMKKILERVQSGDFADEFVSDARQSNSQAGGPLMEKYRKESQEHPIEEVGEQLRGMMPWISENKLVDKSKN

SEQ ID NO: 88311 - protein, 329 aa, Unknown
  Bacterial polypetide isolated from the Sargasso Sea
MTQLFYDTDADLSLLNNKTIAIIGYGSQGHAHALNLKDSGMDVIVGLYKGSKSESKAISDGLQVFSVAEACKKADWIMVLLPDEFQKDVYLKEIEPNLKEGKILSFAHGFNIRFGLIKPPGFVDVVMIAPKGPGHTVRWEYQNGQGVPALFAVEQDSSGSARSLAMAYAKGIGGTRAGILETNFKEETETDLFGEQAVLCGGLSELVKSGFETLVEAGYQPELAYFECLHEVKLIVDLMVKGGLSQMRDSISNTAEYGDYVSGKRLINSDTKKEMQKILKDIQDGTFAKNFVEECDKNKPLMTKLREENSKHEIEKVGKGLRSMFSWLK

SEQ ID NO: 88312 - protein, 291 aa, Unknown
  Bacterial polypetide isolated from the Sargasso Sea
MKTYYDKDTNKDLIKNKKVAIFGYGSQGHAHALNLKDSGVKEVVVALREGSSSIKKAEGAGLKVMSLSDAAAWADVVMMLTPDELQSEIYKNHIEQRMKEGTSLAFAHGLNIHFDLINARKDLDVFMVAPKGPGHTVRSEYQKGGGVPCLMAVHKDSSGKAKDLALSYASAVGGGKAGIIETTFKDECETDLFGEQTVLCGGLVELIKNGFETLTEAGYPPQMAYFETLHEVKLIVDLIYEGGIANMNYSISNTAEYGEYVSGKRVVDGKTKEKMEEVLKIYNLENLPKSG

SEQ ID NO: 88313 - protein, 338 aa, Unknown
  Bacterial polypetide isolated from the Sargasso Sea
MVTKIIYDDSIDQNLIKSKKVTVIGFGSQGHAHALNLHESGVDVTVGLRESSESFKRASDMGLKVENVEDATSGADVVMLLLPDQLMADIYNSDIAPHMKDGSTLLFAHGFNIHFGEIVPREDISIGMVAPKGPGHLLRRTYEEDSGMPCLVAVDKDVSGNTFELALSYSSAIGGGKAGILKTTFKEETETDLFGEQVVLCGGLTELIRNGFETLVEAGYQPESAYFETLHEVKLIVDLMYEGGFEWMRHSISDTAEYGDFSRGSRIITDDTKKEMKKVLEEIQSGAFAKEWMSQAREGAPFLNQKREEASKHQLENIGKDLREMMPFLNAKDIKKDI

SEQ ID NO: 88314 - protein, 120 aa, Unknown
  Bacterial polypetide isolated from the Sargasso Sea
MFYEKDADVDLIKNKKIAIFGYGSQGHAHALNLKDSGVKEIVVALRDGSSSAAKAESKGLKVMNLSDAAAWADVVMILTPDELQAEIYKNHIEQRVKEGTSIAFAHGLNVHYDLIKQEKI

SEQ ID NO: 88315 - protein, 231 aa, Unknown
  Bacterial polypetide isolated from the Sargasso Sea
MFYEKDTDVNLIKEKKIAIFGYGSQGHAHALNLKDSGVKEVVVALRDNSPSKSKAESKGLKVMNLSDAAEWADVVMVLTPDELQATIYKNHIEQRVREGTSIAFAHGLNIHYDLIKARKDLDVFMVAPKGPGHLVRSEFEKGGGVPCLFAVHQNGSGKARELAMSYASAVGGGRSGIIETTFKDEVETDLFGEQTVLCGGLVELIKNGYETLVEAGYEPEMAYFETVHEVN

SEQ ID NO: 88316 - protein, 261 aa, Unknown
  Bacterial polypetide isolated from the Sargasso Sea
MFYEKDTDANLIKNKKIAIFGYGSQGHAHALNLKDSGVNDVVVALRDGSSSKSKAESKGLKVMNLSDAAEWADVVMILTPDELQATIYKNHIEQRVREGTSVAFAHGLNIHYDLIKARKDLDVFMVAPKGPGHLVRSEFEKGGGVPCLFAVHQNGSGKARDLAMSYASAIGGGRSGIIETTFKDEVETDLFGEQTVLCGGLVELIKNGYETLVEAGYEPEMAYFETVHEVKLIVDLIYEGGIANMNYSISNTAEYGEYVSG

SEQ ID NO: 88317 - protein, 174 aa, Unknown
  Bacterial polypetide isolated from the Sargasso Sea
MSYASAVGGGKAGIIETTFKDECETDLFGEQTVLCGGLVELIKNGFETLTEAGYPPEMAYFETLHEVKLIVDLIYEGGIANMNYSISNTAEYGEYVSGKRIVDNKTKEKMKSVLKDIQSGKFTKAWMDECKSGQKNFAKMRKDLANHPIEKVGKDLRAMMPWISKNKLVDKDRN

SEQ ID NO: 88318 - protein, 272 aa, Unknown
  Bacterial polypetide isolated from the Sargasso Sea
MFYEKDTDVNLIKDKKIAIFGYGSQGHAHALNLKDSGVKEVVVALREGSSSIAKAESKGLKVMNLSDAAEWADVVMILTPDELQASIYKNHIEQRVREGTSIAFAHGLNVHYDLIKARKDLDVFMVAPKGPGHLVRSEYEKGGGVPCLFAVHQNGSGKARDLAMSYASAIGGGRSGIIETTFKDEVETDLFGEQTVLCGGLVELIKNGYETLVEAGYEPEMAYFETVHEVKLIVDLIYEGGIANMNYSISNTAEYGEYQSGPRIINKEDTKK

SEQ ID NO: 88319 - protein, 230 aa, Unknown
  Bacterial polypetide isolated from the Sargasso Sea
LNIHFDLIKPNANIDVIMMAPKGPGHTVRAEYVRGAGVPCLVAVNQNPSGNALEIAIAYSSAIGGGRAGIIETTFKEECETDLFGEQSVLCGGLTHLIIAGYETLVDAGYAPEMAYFECLHEVKLIVDLLYEGGMANMRYSISNTAEYGDYSRGPRLITDETKKEMKKILSEIQSGQFAKEWMEEHRAGQTKFTTMRKKHAEHPIEKIGEKLRTLMPWIAEGKMVDKSKN

SEQ ID NO: 88320 - protein, 338 aa, Unknown
  Bacterial polypetide isolated from the Sargasso Sea
MNIYYDKDADLSIIKGKQVAIIGYGSQGHAHANNLKDSGVNVCVGLRDGSSSIEKAKSAGLEVKSIAEAVSASDVVMILAPDEHQSELYKNEIEPNIKQGAALAFAHGFNIHFKQIIPRADLDVIMVAPKGPGHLVRATYSSGGGVPSLIAIFQDSSGHAKELSLSYASANGGGRAAIIETTFKEETETDLFGEQTVLCGGITSLIQTGFETLVEAGYAPEMAYFECLHETKLIVDLIYEGGIANMRYSISNTAEYGDFTRGPRVITEDTKRIMKEILAEIQSGEFAREFISEYKNGAPVMEEKRRVSREHGIEIIGEKLRSMMPWIGENKLVDEKKN

SEQ ID NO: 88321 - protein, 329 aa, Unknown
  Bacterial polypetide isolated from the Sargasso Sea
MTQLFYDTDADLSLLNNKTIAIIGYGSQGHAHALNLKDSGMDVIVGLYKGSKSESKAISDGLQVFTVSEACEKADWIMILLPDEFQKDVYLKEIEPNLKEGKILSFAHGFNIRFELIKPPSFVDVVMIAPKGPGHTVRWEYQNGQGVPALFAVEQDSSGSARSLAMAYAKGIGGTRAGILETNFKEETETDLFGEQAVLCGGLSELVKSGFETLVEAGYQPELAYFECLHEVKLIVDLMVKGGLSQMRDSISNTAEYGDYVSGKRLINSDTKKEMQKILKDIQDGTFAKNFVEECDKNKPLMTKLREENSKHEIEKVGKGLRSMFSWLK

SEQ ID NO: 88322 - protein, 338 aa, Unknown
  Bacterial polypetide isolated from the Sargasso Sea
MFYEKDTDANLIKDKKIAIFGYGSQGHAHALNLKDSGVKDVVVALREGSASITKAESKGLKVMNLSDAAEWADVVMILTPDELQATIYKNHIEQRVKEGTSIAFAHGLNVHYDLIKARKDLDVFMVAPKGPGHLVRSEFEKGGGVPCLFAVHQNGSGKARDLAMSYASAIGGGRSGIIETTFKDEVETDLFGEQTVLCGGLVELIKNGYETLVEAGYEPEMAYFETVHEVKLIVDLIYEGGIANMNYSISNTAEYGEYESGPRIINKEETKKRMKEVLADIQSGKFTKQWMDECKNGQKNFLATRAKLAEHPVEKVGATLREMMPWIAKKKLVDSDKK

SEQ ID NO: 88323 - protein, 328 aa, Unknown
  Bacterial polypetide isolated from the Sargasso Sea
MFYEKDADVNLIKSKKVAIFGYGSQGHAHALNLKDSGVKDIVVALREGSSSAAKAESKGLKVMNLSDAAEWADVVMILTPDELQAEIYKNHIEQRVREGTSIAFAHGLNVHYDLIKARKDLDVFMVAPKGPGHLVRSEYEKGGGVPCLFAVHQDGSGKARDLALSYASAVGGGRSGIIETTFKDEVETDLFGEQTVLCGGLVELIKNGYETLVEAGYEPEMAYFETVHEVKLIVDLIYEGGIANMNYSISNTAEYGEYQSGPRIVNKEETKKRMKEILAEIQSGKFTKEWMDECKNGQKNFLATRAKLAEHPVEKVGAELRAMMPWIA

SEQ ID NO: 88324 - protein, 148 aa, Unknown
  Bacterial polypetide isolated from the Sargasso Sea
MFYEKDTDVNLIKNKKIAIFGYGSQGHAHALNLKDSGVKEVVVALRDGSASKAKAESKGLKVMNLSDAAEWADVVMILTPDELQATIYKNHIEQRVREGTSIAFAHGLNIHYDLIKARKDLDVFMVAPKGPGHLVRSELKKVVEYHVY

SEQ ID NO: 88325 - protein, 332 aa, Unknown
  Bacterial polypetide isolated from the Sargasso Sea
MAKTWKDADISLDPIKDQTIAVIGYGIQGDAQANNMKDSGLKVIVGLREGSPTWNKAKEDGHQVMSVADATKQADIVHILLPDMVQAKVYKEEIGPNLSEGNALSFSHAAAIYWKWIDAPENVDLIMVAPKGPGSKVRETYLQNFGTPSIVAVEQDKTGNAWDRTLGIAKAIGSARAGLIQTTFKEEVETDWFGEQADLCGGSASMVVNAFETLVEAGYQPEIAYFEVLHELKLIVDMIQRYGINGMWRRVSETARYGGLTRGPMVMTSDTKENMKKVLTMIQDGTFNKEWIDNYQNEGKAAFDKYMKDLDGHQIETVGKQMRKMMWPDSTE

SEQ ID NO: 88326 - protein, 220 aa, Unknown
  Bacterial polypetide isolated from the Sargasso Sea
MQVYYDKDADLDIIKNKKVVIVGYGSQGHAHANNLKDSGGNVTVALRKESTSWAKAEAAGLNVQEVAEAVKDADMVMILMPDELQSATYKSEIESNIKEGAVLAFAHGFNIHFDMIEPRNDLDVIMVAPKGPGHTVRSQYEIGAGVPCLIAIHKDVSGNAKEIGLSYASAIGSGRAGIIETNFKDETETDLFGEQAVLCGGLTQLIQNGYEVLVEDGYPP

SEQ ID NO: 88327 - protein, 343 aa, Unknown
  Bacterial polypetide isolated from the Sargasso Sea
MEVFYEKDSNPELLKDKTIAIIGYGSQGHAHANNLKDSGFNVILGLRDGSSSAAKASEAGFEVASNVEAASKADVLMMLIPDEFQGITYKEEIEPNLKQGATLAFAHGFNIHYEQIVPRDDLDVIMIAPKGPGHTVRGQYLDGAGVPCLVAIHQDASSNALDTSIAYASAIGGGRAGIIKTTFKDETETDLFGEQSVLCGGLTSLIQAGYETLVEAGYPPEMAYFECVHEVKLIVDLIYEGGLANMRYSISNTAEYGDYTSGPKVITDETKKEMKKILERIQSGDFADEFIADARKSNGPDGGPAMQEFRRQSAAHPIEEVGKSLREMMPWIANNRLVDKAKN

SEQ ID NO: 88328 - protein, 338 aa, Unknown
  Bacterial polypetide isolated from the Sargasso Sea
MFYEKDTDVNLIKSKKIAIFGYGSQGHAHALNLKDSGVKEVVVALRDGSSSKAKAESKGLKVMNLSDAAEWADVVMILTPDELQATIYKNHIEQRVREGTSIAFAHGLNIHYDLIKARKDLDVFMVAPKGPGHLVRSEFEKGGGVPCLFAVHQNGSGKARDLAMSYASAVGGGRSGIIETTFKDEVETDLFGEQTVLCGGLVELIKNGYETLVEAGYEPEMAYFETVHEVKLIVDLIYEGGIANMNYSISNTAEYGEYVTGPRIINKEETKKRMKEVLTDIQSGKFTKEWMDECKNGQKNFLKTREKLADHPVEKVGAGLRAMMPWIAKKKLVDSDKK

SEQ ID NO: 88329 - protein, 347 aa, Unknown
  Bacterial polypetide isolated from the Sargasso Sea
MKIYYDDDANIELIKNLKVTIIGYGSQGHAHANNLKDSGVDVTVGLREGSSSWGKASEAGLNVKTVEESISNADLIMILAPDEFQKGIFEKNIRPNLKPDAILAFAHGFNIHFKKIIAEETNSVIMIAPKGPGHTVRSTYLKGGGVPSLIAIYHDSLDNEDYSAKDIALSYAKANGGTRAGVLETSFKEETETDLFGEQAVLCGGMTALIKAGFETLVEAGYSPEMAYFECLHETKLITDLIQEGGIANMHYSISNTAEYGDYLSGPKVITDDTKVAMKKILDNIQSGNFADEFLDDCRQSNDGSGGPFMKSKRESTKNHPIEKVGKELRSKMKFLNSEKLVDKEKN

SEQ ID NO: 88330 - protein, 307 aa, Unknown
  Bacterial polypetide isolated from the Sargasso Sea
MFYEKDTDPNLIKNKKIAIFGYGSQGHAHALNLKDSGVKEVVVALRDGSASKAKAESKGLKVMNLSDAAEWADVIMVLTPDELQASIYKNHIEQRVKEGTSIAFAHGLNVHYDLIKARKDLDVFMVAPKGPGHLVRSEFEKGGGVPCLFAVHQNGSGKARDLAMSYASAIGGGRSGIIETTFKDEVETDLFGEQTVLCGGLVELIKNGYETLVEAGYEPEMAYFETVHEVKLIVDLIYEGGIANMNYSISNTAEYGEYMSGPRIINKEETKKRMKEVLQDIQSGKFTKQWMDECKNGQKNFLKTREK

SEQ ID NO: 88331 - protein, 161 aa, Unknown
  Bacterial polypetide isolated from the Sargasso Sea
MKIYYDEDANLEIIKNLKVAIIGYGSQGHAHANNLHDSGVDITVGLREGSASWDKAESAGLKVSSVGDSVKGSDFVMILAPDEFQSDLYSKQIEPNLKEGAILAFAHGFNIHFGKIKPTDDISVVMIAPKGPGHTVRSTYMSGGGVPSLIAIYRDSIPQKI

SEQ ID NO: 88332 - protein, 235 aa, Unknown
  Bacterial polypetide isolated from the Sargasso Sea
FAHGLNIHYELINARKDLDVFMVAPKGPGHLVRSEYEKGGGVPCLFAVHQNGSGKARELAMSYASAVGGGRSGIIETTFKDEVETDLFGEQTVLCGGLVELIKNGYETLVEGGYEPEMAYFETVHEVKLIVDLIYEGGIANMNYSISNTAEYGEYQSGPKIINKEETKKRMKEVLDDIQSGKFTKDWMDECKNGQKNFLATRAKLAEHPVEKVGANLRAMMPWIAKKKLVDSDKK

SEQ ID NO: 88333 - protein, 343 aa, Unknown
  Bacterial polypetide isolated from the Sargasso Sea
MQVYYDKDADLEIIKNKKVVIVGYGSQGHAHANNLKDSGGNVTVALRKDSSSWEKAEAAGLQVQEVSEAVKDADMVMILMPDELQSATYKSEIEQNIKEGAVLAFAHGFNIHFDMIMPREDLDVIMVAPKGPGHTVRSQYEIGAGVPCLLAIHKDVSGNAKDIGLSYASAIGSGRAGIIETNFKDETETDLFGEQAVLCGGLTQLIQNGYEVLVEGGYPPEMAYFECLHEVKLIVDLIYEGGLENMRYSISNTAEFGDYVSGPKVINSDTKEEMRAILKRIQSGEFANEFMSDCRESNDGKGGPRMKEYRQQTSEHSIEKVGSELRAMMPWIAQNKIVDKAKN

SEQ ID NO: 88334 - protein, 338 aa, Unknown
  Bacterial polypetide isolated from the Sargasso Sea
MQIFYDSDADQNIVKGMNIVIVGYGSQGHAHANNLKDSSANVTVALRKESESWAKAESAGFNVKEVDDAVPEADLVMMLIPDEKQAVMYENYLKGNIKDGAVLAFAHGFNIHFEMIVPREDLDVIMIAPKGPGHTVRSQFESGAGVPCLLAIHKNVSGKAKDIGLSYASLIGSGRAGIIETNFKDETETDLFGEQAVLCGGLTSLIQTGYEVLVENGYPPEMAYFECLHEVKLIVDLIYEGGLQNMRYSISNTAEYGDYVTGPKIVNQSTKETMQKILSEIQSGEFAKDFMDDCNSGGDKMNEYRRNSSEHSIEAVGENLRSMMPWISANKIVDKAKN

SEQ ID NO: 88335 - protein, 246 aa, Unknown
  Bacterial polypetide isolated from the Sargasso Sea
MFYEKDTDVNLIKDKKIAIFGYGSQGHAHALNLKDSGVKEVVVALREGSASKTKAESKGLKVMNLSDAAEWADVVMVLTPDELQATIYKNHIEQRVREGTSIAFAHGLNIHYDLIKARKDLDVFMVAPKGPGHLVRSEYEKGGGVPCLFAVHQNGSGKARELAMSYASAVGGGRSGIIETTFKDEVETDLFGEQTVLCGGLVELIKNGYETLVEAGYEPEMAYFETVHKVKLIVDLIYEGGIANMN

SEQ ID NO: 88336 - protein, 154 aa, Unknown
  Bacterial polypetide isolated from the Sargasso Sea
MNVKQIYFGEQTVLCGGLVELIKNGFETLTEAGYPPEMAYFETLHEVKLIVDLIYEGGIANMNYSISNTAEYGEYISGKKIVDPKTKERMKEVLKDIQSGKFTKQWMDECKGGQKNFLKMREELAKHPIEKVGKKLRDLMPWIGKNKLVDKAKN

SEQ ID NO: 88337 - protein, 208 aa, Unknown
  Bacterial polypetide isolated from the Sargasso Sea
LSSGGGVPSLIAIYRDSISNESYSAKDVALSYAKANGGTKAGVLETTFKEETETDLFGEQAVLCGGMTALIKAGYETLVEAGYSPEMAYFECLHETKLIVDLIQEGGISNMHYSISNTAEYGDYLSGPKIITDETKESMREILENIQSGNFANQFLNDCRQSNDGSGGPFMKSNREATKNHPIESVGQELRSKMKFLKTQKLVDKKIN

SEQ ID NO: 88338 - protein, 347 aa, Unknown
  Bacterial polypetide isolated from the Sargasso Sea
MKIYYDEDANLEIIKNLKVAIIGYGSQGHAHANNLHDSGVDITVGLREGSTSWEKAESAGLKVSSVEDSVKDSDFVMILAPDEFQSDLYTKKIEPNLKQGAILAFAHGFNIHFAKIKPTDDISVVMIAPKGPGHTVRSTYISGGGVPSLIAIYRDSISAKDFNAKDVALSYAKANGGTRAGVLETSFREETETDLFGEQAVLCGGMTALIKAGYETLVEAGYSPEMAYFECLHETKLIVDLLHEGGISNMHYSISNTAEFGDYLTGPRIITEETKKEMKKVLEDIQSGDFADKFLDDCRQSNDGSGGPFLKNNREKTKEHSIEFVGKELRSKMKFLSEKKLVDKDKN

SEQ ID NO: 88339 - protein, 160 aa, Unknown
  Bacterial polypetide isolated from the Sargasso Sea
MQIYYDSDADQNIAKGMEIVIIGYGSQGHAHANNLKDSGANVTVALRKESGSWAKAEAAGFDVKEVGEAVPNADLVMMLIPDEKQSAMYENHLKDNIKDGAVLAFAHGFNIHFEMIIPRDDLDVIMVAPKGPGHTVRSQYESGAGVPCLLAVHRNIPEKQ

SEQ ID NO: 88340 - protein, 338 aa, Unknown
  Bacterial polypetide isolated from the Sargasso Sea
MYYEKDTDVNLIKDKKVAIFGYGSQGHAHALNLRDSGVKEVVVALRDGSSSAAKAESKGLKVMNLSDAAEWADIVMILTPDELQASIYKNHIEQRVKEGTLIAFAHGLNIHYDLISARKDLDVFMVAPKGPGHLVRSEYEKGGGVPCLFAVHQNGSGKARELAMSYASAVGGGRSGIIETTFKDEVETDLFGEQTVLCGGLVELIKNGYETLVEAGYEPEMAYFETVHEVKLIVDLIYEGGIANMNYSISNTAEYGEYQSGPRIINKEETKKRMKEVLDDIQSGKFTKEWMDECKNGQKNFLATRAKLAEHPVEKVGANLRAMMPWIAKKKLVDSDKK

SEQ ID NO: 88341 - protein, 229 aa, Unknown
  Bacterial polypetide isolated from the Sargasso Sea
MKIFYDDDANIEIIQKMQVTIIGYGSQGHAHANNLSNSGVDVTVGLRTGSSSWEKATDVGLKVKEVEEAVTNSDLVMILAPDEFQKDIYEKSIKPNLKTDAILAFAHGFNIHFKKIIPDLSNSVIMIAPKGPGHTVRSTYLKGGGVPSLIAVYQDSNIENNISAKEIALSYAKANGGTKAGVLETTFKEETETDLFGEQAVLCGGITALIKAGYETLVEARLQSRNGLF

SEQ ID NO: 88342 - protein, 329 aa, Unknown
  Bacterial polypetide isolated from the Sargasso Sea
MTQLFYDTDADLSLLNNKTIAIIGYGSQGHAHALNLKDSGMDVIVGLYKGSKSESKAISDGLQVFSVSEACEKADWIMILLPDEFQKDVYLKEIEPNLKEGKILSFAHGFNIRFGLIKPPSFVDVVMIAPKGPGHTVRWEYQNGQGVPALFAVEQDSSGSARSLAMAYAKGIGGTRAGILETNFKEETETDLFGEQAVLCGGLSELVKSGFETLVEAGYQPELAYFECLHEVKLIVDLMVKGGLSQMRDSISNTAEYGDYVSGKRLINSDTKKEMQKILKDIQDGTFAKNFVEECDKNKPLMTKLREENSKHEIEKVGKGLRSMFSWLK

SEQ ID NO: 88343 - protein, 338 aa, Unknown
  Bacterial polypetide isolated from the Sargasso Sea
MNVFYDKDADLSLIKGKQVTIIGYGSQGHAHALNLKDSGVNVTVGLRKGGASWSKAENAGLSVKEVAEAVKSADVVMMLLPDEQIADVYAKEVHANIKQGAALAFAHGFNVHYGAVIPRADLDVIMIAPKAPGHTVRGTYSQGGGVPHLIAVAQNKSGAARDIALSYAAANGGGRAGIIETNFREETETDLFGEQAVLCGGTVELIKAGFETLVEAGYAPEMAYFECLHELKLIVDLIYEGGIANMNYSISNNAEYGEYVTGPRIVTEETKKAMKQCLTDIQTGEYAKSFILENKAGAPTLQSRRRLTAEHQIEQVGSKLRAMMPWIAKNKLVDQSKN

SEQ ID NO: 88344 - protein, 168 aa, Unknown
  Bacterial polypetide isolated from the Sargasso Sea
MARKVRNYETTFKDEVKTDLFGEQTVLCGGLVELIKNGYETLVEAGYEPEMAYFETVHEVKLIVDLIYEGGIANMNYSISNTAEYGEYMSGPRIINKDETKKRMKEVLADIQSGKFTKEWINECETGQKNFLKTRAKLAEHPVEKVGAGLRALMPWISKKKLIDSDKN

SEQ ID NO: 88345 - protein, 338 aa, Unknown
  Bacterial polypetide isolated from the Sargasso Sea
MFYEKDTDVNLIKDKKIAIFGYGSQGHAHALNLKDSGVKEVAVALREGSSSKAKAESKGLKVMNLSDAAEWADVVMILTPDELQASIYKNHIEQRVKEGTSIAFAHGLNIHYDLIKARKDLDVFMVAPKGPGHLVRSEYEKGGGVPCLFAVHQNGSGKARDLAMSYASAVGGGRSGIIETTFKDEVETDLFGEQTVLCGGLVELIKNGYETLVEAGYEPEMAYFETVHEVKLIVDLIYEGGIANMNYSISNTAEYGEYQTGPRIINKEETKKRMKEVLEEIQSGKFTKDWMDECKNGQKNFLATRAKLAEHPVEKVGANLRAMMPWIGKKKLVDSDKK

SEQ ID NO: 88346 - protein, 316 aa, Unknown
  Bacterial polypetide isolated from the Sargasso Sea
MYYEKDADINLIKNKKVAIFGYGSQGHAHALNLKDSGVKEVAVALRENSPSIKKAESEGLKVMSLSDAAAWADVVMILTPDELQSQIYKNHIEQRMKEGTSLAFAHGLNIHFDLINARKDLDVFMVAPKGPGHLVRSEYQKGGGVPCLMAVHKDSSGKARDLAMSYASAIGGGKSGIIETTFKDECETDLFGEQTVLCGGLVELIKNGFETLTEAGYPPEMAYFECLHEVKLIVDLIYEGGIANMNYSISNTAEYGEYVSGKKIVDSKTKERMKEVLKDIQSGKFTKQWMEECRSGKKNFLKMRKELSDHEIEKVG

SEQ ID NO: 88347 - protein, 289 aa, Unknown
  Bacterial polypetide isolated from the Sargasso Sea
MKNYFNTLSFREKLMQLGKCRFMRSSEFSDRVEFLKNKKIAIVGCGAQGLNQGLNMRDSGLDISYALRQSSIDSKRQSFVNASTNNFNVGNFEEIIPNSDLVINLTPDKNHTPVVEQLMPLMKKNSILSYSHGFNIVEEGIKVREDITVIMVAPKSPGSEVREEYLRGFGVPTLIAVHPENDTNGIGFDAAKAYAVSLGSDKAGVLESSFVAEVKSDLMGEQTILCGMLQTGSILCFNKMKELGIEPSYSAKLIQYGWETITESLKHGGITNMMDRLSNSAKVKAFELS

SEQ ID NO: 88348 - protein, 338 aa, Unknown
  Bacterial polypetide isolated from the Sargasso Sea
MSAKIIYDDSIDVELIKSKKVSVIGFGSQGHAHALNLHDSGVDVTVGLREESNSFDRAKKMGLKVENLENATKNADVVMLLLPDQLMADVYEKDIAPFMKESSTLFFAHGFNIHFGEIVPREDISIAMIAPKGPGHLLRRTYEEGSGMPCLVAVEKDLNDNTKDLALSYASAIGGGRAGVLNTTFKEETETDLFGEQVVLCGGLTELIRNGFETLVEAGYQPESAYFETLHEVKLIVDLMYEGGFEWMRHSISDTAEYGDFSRGSRIITDETKKEMKKVLEEIQSGAFAKEWMSQAREGSPYLKQEREKASNHQIENIGKELRNMMPFLDAKDIKKDI

SEQ ID NO: 88349 - protein, 130 aa, Unknown
  Bacterial polypetide isolated from the Sargasso Sea
YETLVEAGYEPEMAYFETVHEVKLIVDLIYEGGIANMNYSISNTAEYGEYQSGPRIINKEETKKRMKEVLADIQSGKFTKEWMDECKTGQKNFLATRAKLAEHSVEKVGAELRAMMPWISKKKLVDSDKS

SEQ ID NO: 88350 - protein, 134 aa, Unknown
  Bacterial polypetide isolated from the Sargasso Sea
MCGGSASMVVNAFETLVEAGYQPEIAYFEVLHELKLIVDMIQRYGINGMWRRVSETARYGGLTRGPMVMTSDTKENMKKVLTMIQDGTFNKEWIDNYQNEGKAAFDKYMKDLDGHQIETVGKQMRKMMWPDSTE

SEQ ID NO: 88351 - protein, 320 aa, Unknown
  Bacterial polypetide isolated from the Sargasso Sea
MKVFYDKDTDLSLIKGKTVAIIGYGSQGHAHAQNLNDSGVKVVVGLRKGGASWDKVGKAGLTVMEVNDAVKAADVVMILLPDEDIAAVYKNNVEPNIKQGASLAFAHGFNVHYNQVVPRADLDVWMVAPKAPGHTVRNTYTQGGGVPHLVAVHQDKSGKARDLALSYAAANGGGKAGIIETNFKEETETDLFGEQAVLCGGAVELIKMGYETLVEAGYAPEMAYFECLHELKLIVDLIYEGGIANMNYSISNNAEYGEYVTGPEVINEQSRAAMRNALKRIQNGDYAKMFIQEGRLNYPSMTARRRNTAEHSIEKGGQPA

SEQ ID NO: 88352 - protein, 180 aa, Unknown
  Bacterial polypetide isolated from the Sargasso Sea
MFYEKDTDVNLIKDKKIAIFGYGSQGHAHALNLKDSGVKEVVVALRDGSSSKAKAESKGLKVMNLSDAAEWADIVMILTPDELQATIYKNHIEQRVKEGTSIAFAHGLNIHYDLINARKDLDVFMVAPKGPGHLVRSEFEKGGGVPCLFAVHQNGSGKARDLAMSYASAVGGGRSGIIET

SEQ ID NO: 88353 - protein, 245 aa, Unknown
  Bacterial polypetide isolated from the Sargasso Sea
MTQLFYDTDADLSLLNNKTIAIIGYGSQGHAHALNLKDSGMDVIVGLYKGSKSESKAISDGLQVFSVSEACEKADWIMILLPDEFQKDVYLKEIEPNLKEGKILSFAHGFNIRFGLIKPPSFVDVVMIAPKGPGHTVRWEYQNGQGVPALFAVEQDSSGSARSLAMAYAKGIGGTRAGILETNFKEETETDLFGEQAVLCGGLSELVKSGFETLVEAGYQPELAYFECLHEVKLIVDLMVKGGLS

SEQ ID NO: 88354 - protein, 239 aa, Unknown
  Bacterial polypetide isolated from the Sargasso Sea
KLVQHGWETVAEGLKHGGITNMMDRLSNPAKLIAVELADELKVIMEPLFKKHMDDIITGTFSSGMMSDWDNDDKKLLTWREETAETPFEKSTASELPITEQEYYDNGILMVAMVKAGVELAFETMTASGVIAESAYYESLHEVPLIANLIGRKKLYEMNKVISDTAEYGCYLFSHECVPLLTGFMQNIDADVIGRGLQLNDFGADNAELIAANESIRSHPIEVVGKKLRMHMTSMKKAI

SEQ ID NO: 88355 - protein, 297 aa, Unknown
  Bacterial polypetide isolated from the Sargasso Sea
MQIYYDSDADQNIAKGMEIVIIGYGSQGHAHANNLKDSGANVTVALRKESGSWAKAEAAGFDVKEVGEAVPNADLVMMLIPDEKQSAMYENHLKDNIKDGAVLAFAHGFNIHFEMIIPRDDLDVIMVAPKGPGHTVRSQYESGAGVPCLLAVHRNASGKAKDVGLSYASMIGSGRAGIIETNFKDETETDLFGEQAVLCGGLTSLIQTGYEVLVENGYPPEMAYFECLHEVKLIVDLIYEGGLQNMRYSISNTAEYGDYVTGPKIVNENTKETMQKILTEIQSGEFAKDFMNDCHSG

SEQ ID NO: 88356 - protein, 189 aa, Unknown
  Bacterial polypetide isolated from the Sargasso Sea
MFYEKDTDVNLIKDKKIAIFGYGSQGHAHALNLKDSGVKEVVVALRDGSASKAKAESKGLKVMNLSDAAEWADVVMILTPDELQATIYKNHIEQRVREGTSIAFAHGLNIHYDLIKARKDLDVFMVAPKGPGHLVRSEYEKGGGVPCLFAVHQNGSGKARELAMSYASAVGGGRSGIIETTFKDEVETD

SEQ ID NO: 88357 - protein, 338 aa, Unknown
  Bacterial polypetide isolated from the Sargasso Sea
MKVYYDKDADINIIKKLNVSIIGYGSQGHAHALNLKDSGVNVTVGLRANSQNATRAEAEGLNVLEISEAVNSADIVMILAPDEYQADLYKESIKPYLKDNAKLAFAHGFNIHYNQIIPDKNVDVFMVAPKSPGHLVRSTYLNGKGVPTLIAIKSDTSGNTKETALAYASAIGGGRAGIIETTFKEETETDLFGEQAVLCGGVTALVKAGFETLVDAGYAPEMAYFECLNELKLIVDLMYEGGMTEMRYSISNTAEYGDLTKGPYLIDGHVREKMKDVLKDVQNGKFADEFVNEIKSGSKNFDQLRKQGSEHLIEETGKKLRDMMSWMKDKKLVDEKIK

SEQ ID NO: 88358 - protein, 339 aa, Unknown
  Bacterial polypetide isolated from the Sargasso Sea
MKTYYDKDTKKDLIKNKKVAIFGYGSQGHAHALNLKDSGVKEVVVALREGSSSIKKAESAGLKVMSLSDAAAWADVVMMLTPDELQSEIYKNHIEQRMREGTSLAFAHGLNIHFDLIKARKDLDVFMVAPKGPGHTVRSEYQKGGGVPCLMAVHKDSSGKAKELALSYASAVGGGKAGIIETTFKDECETDLFGEQTVLCGGLVELIKNGFETLTEAGYPPEMAYFETLHEVKLIVDLIYEGGIANMNYSISNTAEYGEYVSGKRIVDSKTKEKMREVLKDIQSGKFTKQWMEEHKSGQKNFLKMRKDLADHPIEKVGKDLRAMMPWIGKNKLVDKDKN

SEQ ID NO: 88359 - protein, 146 aa, Unknown
  Bacterial polypetide isolated from the Sargasso Sea
MQVYYDKDADLDIIKNKKVVIVGYGSQGHAHANNLKDSGGNVTVALRKEYASWSKAEVAGLNVQEVAEAVKDADMVMILMPDELQSATYKSEIENNIKQGAVLAFAHGFNIHFDMIEPREDLDVIMVAPKGPGHTVRSQYEIGAGV

SEQ ID NO: 88360 - protein, 347 aa, Unknown
  Bacterial polypetide isolated from the Sargasso Sea
MKIFYDDDADLDIIKNLKVSVIGYGSQGHAHSNNLHDSGVDVTVGLRKDSSSWTKANDAGLKVAEVEEAVSGADLVMILAPDEFQQDLFETKIKPNAKENSILAFAHGFNIHFKKIIPSQKQSVIMIAPKGPGHTVRSTYKSGGGVPSLVAVYQDALQEKEFSALDLALSYAKANGGTRAGVLETNFKEETETDLFGRTAVLCGGITALIKAGYETLVEAGYSPEMAYFECLHETKLIVDLIHEGGISNMHYSISNTAEFGDYLSGPKVITDDTKDSMKKILMKIQSGEFADEFLNDCRSSNDGKGGPFMRQNRKNTQNHSIEMVGKELRSKMKFLQTEKLVDKEKN

SEQ ID NO: 88361 - protein, 338 aa, Unknown
  Bacterial polypetide isolated from the Sargasso Sea
MVTKIIYDDSIDQDLIKSKKVTVIGFGSQGHAHALNLHESGVDVTVGLRESSESFKRASDMGLKVENVEDATSGADVVMLLLPDQLMADIYNSDIAPHMKDGSTLLFAHGFNIHFGEIIPREDISIGMVAPKGPGHLLRRTYEEDSGMPCLVAVDKDVSGNTFELSLSYSSAIGGGKAGILKTTFKEETETDLFGEQVVLCGGLTELIRNGFETLVEAGYQPESAYFETLHEVKLIVDLMYEGGFEWMRHSISDTAEYGDFSRGSRIITDDTKKEMKKVLEEIQSGAFAKEWMSQAREGAPFLNQKREEASKHQLESIGKDLREMMPFLNAKDIKKDI

SEQ ID NO: 88362 - protein, 317 aa, Unknown
  Bacterial polypetide isolated from the Sargasso Sea
SLLNKKTIAIIGYGSQGHAHALNLKDSGMDVIVGLYKGSKSESKAKSDGLQVFSVSEACERADWIMILLPDEFQKDVYLKEIEPNLKEGKILSFAHGFNIRFGLIKPPSFVDVVMIAPKGPGHTVRWEYQNGQGVPALFAVEQDYSGSARSLAMAYAKGIGGTRAGILETNFKEETETDLFGEQAVLCGGLSELVKSGFETLVEAGYQPELAYFECLHEVKLIVDLMVKGGLSQMRDSISNTAEYGDYVSGKRLINSDTKKEMQKILKDIQDGTFAKNFVQECDKNKPLMTKLREENSKHEIEKVGKGLRSMFSWLK

SEQ ID NO: 88363 - protein, 339 aa, Unknown
  Bacterial polypetide isolated from the Sargasso Sea
MKTYYDKDTNKDLIKNKKVAIFGYGSQGHAHALNLKDSGVKDVVVALRDGSSSIKKAESAGLKVMSLSDAAAWADVVMMLTPDELQSEIYKNHIEQRMREGTSLAFAHGLNIHFDLIKARKDLDVFMVAPKGPGHTVRSEYQKGGGVPCLMAVHKDSSGKAKELALSYASAVGGGKAGIIETTLKDECETDLFGEQTVLCGGLVELIKNGFETLTEAGYPPEMAYFETLHEVKLIVDLIYEGGIANMNYSISNTAEYGEYVSGKRIVDGKTKEKMREVLKDIQSGKFTKQWMNEHKSGQKNFLKMRKDLADHPIEKVGKDLRAMMPWIGKNKLVDKDKN

SEQ ID NO: 88364 - protein, 264 aa, Unknown
  Bacterial polypetide isolated from the Sargasso Sea
MRVYYDRDADLNLIKDKKISIVGYGSQGHAHAMNLRDSGIENVSIALREGSNSRSKAEQANFKVMTPAEAASWADVIMMLTPDELQSEIYKNDIAENIKEGTTIAFAHGLNIHFDLIKPKEGIDVIMVAPKGPGHTVRAEYVRGAGVPCLVAVDKNPSGNALEIGIAYASAIGGGRAGIIETTFKEECETDLFGEQSVLCGGLTHLILAGYETLVEAGYAPEMAYFECLHEVKLIVDLLYEGGMANMRYSISNTAEYGDYSRSP

SEQ ID NO: 88365 - protein, 279 aa, Unknown
  Bacterial polypetide isolated from the Sargasso Sea
MAKMFYDSDADLNLLKDKSIAVIGYGSQGHAHALSAHDSGIKVRVGLYKGSKSWEKAEKDGLEVGTVDQVTINSDIIMLLLPDTVQPSVYNDLIKPNLDESKTLMFAHGFNIHYETIVPPENIDVIMVAPKAPGHRMREVYTKGSGVPGLLAIHQDPSGTAEQKGLAYAKAVGCTRAGVLNTTFKEETETDLFGEQSVLCGGTAQLVKYAFETLIEAGYQPESAYFECLHELKLIVDLMYEGGLDYMRYSISTTAEYGDLTRGPVIIDESVKENMKKVL

SEQ ID NO: 88366 - protein, 347 aa, Unknown
  Bacterial polypetide isolated from the Sargasso Sea
MKIYYDEDANLDIIRNLKVTIIGYGSQGHAHANNLHDSGVDITVGLREGSASWEKAESAGLKVSSVEDSVKGSDFVMILAPDEFQSDLYSKKIEPNLKEGVILAFAHGFNIHFGKIKPTDDISVVMIAPKGPGHTVRSTYMSGGGVPSLIAIYRDSISAKDFNAKDVALSYAKANGGTRAGVLETSFREETETDLFGEQAVLCGGMTALIKAGYETLVEAGYSPEMAYFECLHETKLIVDLLHEGGISNMHYSISNTAEFGDYLTGPRIITEETKKEMKKVLEDIQSGDFADKFLDDCRRSNDGSGGPFLKNNREKTKEHSIESVGKELRSKMKFLSEKKLVDKDKN

SEQ ID NO: 88367 - protein, 328 aa, Unknown
  Bacterial polypetide isolated from the Sargasso Sea
YLCGFGVPTLIAVHLENDPEGKGLEWAKAYAAGTGGHRAGVLESSFIAEVKSDLMGEQTILCGMLQTGSLLCFDRMVELGTDPAYAAKLVQYGWETVTEGLKQGGITNMMDRLSNPAKIRAFDLAEEMKLILRPLFEKHQDDIMSGHFSSTMMADWATGDANLLKWREETNGTPFELQDITDDPIDEQTYYDQGILMVAMVKAGVELAYETMVSAGIIEESAYYESLHETPLIANTIARKKLYEMNVVISDTAEYGCYLFDQAARPLLKNFVAGLDSEVIGEGMGSNNAVDNRRLIDANAQIRHHSVEVVGTKLRGFMTGMKAISSAD

SEQ ID NO: 88368 - protein, 147 aa, Unknown
  Bacterial polypetide isolated from the Sargasso Sea
DLFGEQVVLCGGLTELIRNGFETLVEAGYQPESAYFETLHEVKLIVDLMYEGGFEWMRHSISDTAEYGDFSRGSRIITDETKKEMKKVLEEIQSGAFAREWMSQAREGSPYLKQERENASKHQIENIGKELRNMMPFLDAKDIKKDI

SEQ ID NO: 88369 - protein, 119 aa, Unknown
  Bacterial polypetide isolated from the Sargasso Sea
MRVYYDRDADLNLIKDKKISIVGYGSQGHAHAMNLRDSGIENVSIALREGSNSRSKAEKANFKVMTPAEAASWADVIMMLTPDELQSEIYKNDIAENIKEGTTIAFAHGLNIHFDLIKP

SEQ ID NO: 88370 - protein, 193 aa, Unknown
  Bacterial polypetide isolated from the Sargasso Sea
MGYQNAQGVPALFAIEQDASGKARGLAMAYAKGIGGTRAGILETNFKEETETDLFGEQAVLCGGLSELVKAGFETLVEAGYQPELAYFECLHEVKLIVDLMVKGGLSAMRDSISNTAEYGDYVSGPRLITADTKAEMKRILGDIQDGTFAKNFVAECEAGKPEMNKIRERDSVHKIEEVGKGLRAMFSWLKAA

SEQ ID NO: 88371 - protein, 340 aa, Unknown
  Bacterial polypetide isolated from the Sargasso Sea
MKVYYDSDTDKNLITDYKIAIIGYGSQGHAHALNLRDSGVSDVCIALREDSKSIKKAENAGFEVKTVADAAKWADIMMMVTPDELQADIYNSDIEPNLKENASLFFAHGLNIHFNLINARDDLNVVMVAPKGPGHTVRSEYERGAGVPCLIAVHQDSTGNALDIGLSYASLIGGGRAAIIETTFKEECETDLFGEQAVLCGGVVELIRNGFDTLVEAGYAPEMAYFECLHEMKLIVDLMYEGGIKNMNYSISNTAEYGEYVSGPKVVGSESKEAMKKVLENIQSGNFTKEWINENKEGSNKEFHAMREKSNSHSIEEVGTKLRGMMPWIGENSLVDKEKN

SEQ ID NO: 88372 - protein, 319 aa, Unknown
  Bacterial polypetide isolated from the Sargasso Sea
FGYGSQGHAHALNLKDSGVKEVVVALRDGSSSKAKAESKGLKVMNLSDAAEWADVIMVLTPDELQASIYKNHIEQRVKGGTSIAFAHGLNVHYDLIKARKDLDVFMVAPKGPGHLVRSEFEKGGGVPCLFAVHQNGSGKARDLAMSYASAIGGGRSGIIETTFKDEVETDLFGEQTVLCGGLVELIKNGYETLVEAGYEPEMAYFETVHEVKLIVDLIYEGGIANMNYSISNTAEYGEYMSGPRIINKEETKKRMKEVLQDIQSGKFTKQWMDECKNGQKNFLKTREKLAEHPVEKVGAKLRAMMPWISKKKLVDSDKN

SEQ ID NO: 88373 - protein, 246 aa, Unknown
  Bacterial polypetide isolated from the Sargasso Sea
MFYEKDTNVNLIKDKKIAIFGYGSQGHAHALNLRDSGVKEVVVALREGSSSIAKAESKGLKVMNLSDAAEWADVVMILTPDELQAAIYKNHIEQRVKEGTSIAFAHGLNVHYDLIKARKDLDVFMVAPKGPGHLVRSEYEKGGGVPCLFAVHQDGSGKARDLAMSYASAVGGGRSGIIETTFKDEVETDLFGEQTVLCGGLVELIKNGYETLVEAGYEPEMAYFETVHEVKLIVDLIYERRIANMN

SEQ ID NO: 88374 - protein, 247 aa, Unknown
  Bacterial polypetide isolated from the Sargasso Sea
EIASNIKEGTALAFAHGLNIHFDLIQPAEGIDVIMIAPKGPGHTVRAEYERGAGVPCLVAVDKNPSGNALDIAIAYASGVGGGRAGIIETTFKEECETDLFGEQSVLCGGLTHLITAGYETLVEAGYAPEMAYFECLHEVKLIVDLLYEGGMANMRYSISNTAEYGDYSRGPRLITDETKKEMKKILAEIQSGQFTKEWMNEHKSGQTKFKLMRKQQAEHSIEAVGEKLRTLMPWIAEGKMVDKSKN

SEQ ID NO: 88375 - protein, 156 aa, Unknown
  Bacterial polypetide isolated from the Sargasso Sea
FKKSVKQIYFGEQSVLCGGLTHLILAGYETLVDAGYAPEMAYFECLHEVKLIVDLLYEGGMANMRYSISNTAEYGDYSRGPRLITDETKKEMKKILSEIQSGQFAKEWMQEHKSGQTKFKVMRKNQAEHPIEAVGEKLRTLMPWIAEGKMVDKSKN

SEQ ID NO: 88376 - protein, 144 aa, Unknown
  Bacterial polypetide isolated from the Sargasso Sea
MFYEKDTNVNLIKDKKIAIFGYGSQGHAHALNLKDSGVKEVVVALREGSSSIAKAESKGLKVMNLSDAAEWADVVMILTPDELQAEIYKNHIDQRIRPGTSIAFAHGLNVHYDLIKARKDLNVFMVAPKGPGHLVRSEYEKGGG

SEQ ID NO: 88377 - protein, 392 aa, Unknown
  Bacterial polypetide isolated from the Sargasso Sea
FMKSEEFSDGVNVLIDKKIVIIGCGAQGLNQGLNMRDSGLDISYVLRQSSIDNKKESFLNASNNKFNVGTYSDLIPSADMVINLTPDKNHTQVVNEVMPLMKKNSILSYSHGFNIVEEGLKIREDITVIMVAPKCPGTEVREEYLRGFGVPTLIAVHPPNDPNGDGLDYAKAYAVATGGHRAGVLESSFVAEVKSDLMGEQTILCGVLQSGSILCFNKMIELGFDSGFSSKLIQFGWETITEELKHNGINGMLARLDDDSRYLVHTLSEELKEILNPLFKHHMKNILDGTFSKDMMEDWVNDDVKLLNWRRETGLTDFEKSSVSDIEISNQDYFEKGILMIAFVKSGVELAFETMLDNGIIDESAYYESLHELPLIANLVARKKLFEMNRII

SEQ ID NO: 88378 - protein, 176 aa, Unknown
  Bacterial polypetide isolated from the Sargasso Sea
MKIYYDEDANLEIIKNLKVTIIGYGSQGHAHANNLHDSGVDITVGLREGSASWEKAESAGLKVSSVEDSVKGSDFVMILAPDEFQSDLYSKQIEPNLKEGIILAFAHGFNIHFGKIKPTDDISVVMIAPKGPGHTVRSTYMSGGGVPSLIAIYRDSISAKEFNAKDVALSYAKANG

SEQ ID NO: 88379 - protein, 243 aa, Unknown
  Bacterial polypetide isolated from the Sargasso Sea
VREGTSIAFAHGLNVHYDLIKARKDLDVFMVAPKGPGHLVRSEYEKGGGVPCLFAVHQNGSGKARDLALSYASAVGGGRSGIIETTFKDEVETDLFGEQTVLCGGLVELIKNGYETLVEAGYEPEMAYFETVHEVKLIVDLIYEGGIANMNYSISNTAEYGEYQSGPRVVNKEETKKRMKEVLAEIQSGKFTKEWMDECKNGQKNFLATRAKLAEHPVEKVGAELRAMMPWIAKKKLVDSDKS

SEQ ID NO: 88380 - protein, 339 aa, Unknown
  Bacterial polypetide isolated from the Sargasso Sea
MKTYYEKDTDANLIKNKKIAIFGYGSQGHAHALNLKDSGVKEVVVALREGSSSKVKAEKEGLKVMSLSDAAAWADIVMMLTPDELQSEIYKNHIEQRMKEGTSLAFAHGLNIHFELINARKDLDVFMVAPKGPGHTVRSEFQKGGGVPCLMAVHKNSSGKARELALSYASAIGGGKSGIIETTFKDECETDLFGEQTVLCGGLVELIKNGFETLTEAGYPPEMAYFETLHEVKLIVDLIYEGGIANMNYSISNTAEYGEYVSGKKIVDSKTKEKMKEVLKNIQSGKFTKEWMEECKSGQKNFLQMRKDLANHPIEKVGKELRDMMPWIRKNKLVDKDKN

SEQ ID NO: 88381 - protein, 313 aa, Unknown
  Bacterial polypetide isolated from the Sargasso Sea
MNIFYDDDANIEIIQKLKVSIVGYGSQGHAHANNLSDSGVDVTVALREGSSSWEKAEEAGLKVMPVDEATKDADLVMILAPDEFQKGIYEKSIKPNLKNDAILAFAHGFNIHFKKIIPDETNSVIMIAPKGPGHTVRSTYLKGGGVPSLIAIYQDSTNTSDSSAKEVALSYAKANGGTRAGVLETTFKEETETDLFGEQAVLCGGMTALIKAGYETLVEAGYSPEMAYFECLHETKLITDLIQEGGIANMHYSISNTAEYGDYLSGPKIITEKTKEAMKEVLDNIQSGNFADEFLDDCRQSNDGSGGPFMKSK

SEQ ID NO: 88382 - protein, 338 aa, Unknown
  Bacterial polypetide isolated from the Sargasso Sea
MFYEKDTDVNLIKDKKIAIFGYGSQGHAHALNLRDSGVKEIVVALREGSSSAAKAESKGLKVMNLSDAAAWADVVMILTPDELQAEIYKNHIEQRAREGTSIAFAHGLNVHYDLIKARKDLDVFMVAPKGPGHLVRSEYEKGGGVPCLFAVHQDGSGKARDLALSYASAVGGGRSGIIETTFKDEVETDLFGEQSVLCGGLVELMKNGYETLVEAGYEPEMAYFETVHEVKLIVDLIYEGGIANMNYSISNTAEYGEYKSGPRIINKEETKKRMKEILSEIQSGKFTKEWMDECKNGQKNFLATRAKLAEHSVEKVGAQLRAMMPWIGKKKLVDSDKS

SEQ ID NO: 88383 - protein, 332 aa, Unknown
  Bacterial polypetide isolated from the Sargasso Sea
MAKLFYDKDIDDQILRDKRISVIGYGSQGHAHAQNLKDSGFDVIIGLYEGSKSKEQAEHDGFEVYSISDAVKNSQLISLCIPDPSMKKVFNEDIEQNLSEGDILLFAHGFAILYGEIKPPENVDVVMIAPKAPGHRVRAVFERDLGVPCLIAVDQDFSGKAYETALAYGKGIGGGRAGILETTFKEETETDLFGEQAVLCGGVTALIKAGFEVLTEAGYQPESAYFEVLHELKLIVDLIYQGGLEGMRYSVSTTAEYGDYTVGPKIIDDSVKQSMKNVLDDIQSGRFAREWIAENDEGLHKYNELREADLSHPVEKIGKDLRAMMPWLESTT

SEQ ID NO: 88384 - protein, 347 aa, Unknown
  Bacterial polypetide isolated from the Sargasso Sea
MKIYYDDDANLELIKKLNVTIIGYGSQGHAHANNLKDSGVDVTVGLREGSLSWSKAFEAGLKVMPVDQSVLNADLVMILAPDEFQKGVFEKSIKPNLKSNAILAFAHGFNIHFKKIVPSETNTVIMIAPKGPGHTVRSTYLNGGGVPSLIAIFNDAMQEDEHSAKDIALSYAKANGGTRAGVLETTFKEETETDLFGEQAVLCGGLTALIKAGFETLVEAGYSPEMAYFECLHETKLITDLIQEGGIANMHYSISNTAEYGDYLSGPKVITETTKEAMREILDNIQSGNFANEFLDDCRQSNDGSGGPFMKSNRKSTKNHPIEEVGKELRSKMKFLNSEKLVDIEKN

SEQ ID NO: 88385 - protein, 105 aa, Unknown
  Bacterial polypetide isolated from the Sargasso Sea
IVDLIYEGGIANMNYSISYTAEYGEYVSGKKIVDSKTKEKMKEVLKDIQSGKFTKQWMDECKGGQKNFLKMREELAKHPIEKVGKKLRDLMPWIGKNKLVDKAKN

SEQ ID NO: 88386 - protein, 338 aa, Unknown
  Bacterial polypetide isolated from the Sargasso Sea
MFYEKDADVDLIKNKKIAIFGYGSQGHAHALNLKDSGVKEIVVALRDGSSSVAKAESKGLKVMNLSDAAAWADVVMILTPDELQAEIYKNHIEQRVKEGTSIAFAHGLNVHYDLIKARKDLDVFMVAPKGPGHLVRSEYEKGGGVPCLFAVHQNGSGKARDLALSYASAVGGGRSGIIETTFKDEVETDLFGEQTVLCGGLVELIKNGYETLVEGGYEPEMAYFETVHEVKLIVDLIYEGGIANMNYSISNTAEYGEYQSGPRIINKEETKKRMKEVLSDIQSGKFTKEWMDECKNGQKNFLATRAKLAEHSVEKVGAELRAMMPWIGKKKLVDSDKS

SEQ ID NO: 88387 - protein, 338 aa, Unknown
  Bacterial polypetide isolated from the Sargasso Sea
MNIYYDKDANLQIIKEKKVAIIGYGSQGHAHANNLKDSGVDVCVGLRAGSSSIEKAKSAGLNVESIAEAVSSADVVMLLAPDEHQAELYKSEIEPNIKNSATLAFAHGFNIHFKQIIPRDDLDVIMVAPKGPGHLVRATYASGGGVPSLIAIFQDASGSAKELSLSYASANGGGRAAIIETTFKEETETDLFGEQAVLCGGITSLIQTGYETLVEAGYAPEMAYFECLHETKLIVDLIYEGGIANMRYSISNTAEYGDFTRGPRVITEETKEVMKKILSEIQSGEFAREFISEYKNGASVMDQKRKESRQHGIEIIGEKLRSMMPWIGENKLVDEKKN

SEQ ID NO: 88388 - protein, 493 aa, Unknown
  Bacterial polypetide isolated from the Sargasso Sea
MANYFNTLNLRQQLAQLGKCRFMQREEFADGCNVLKGKKVVIVGCGAQGLNQGLNMRDSGLDISYALRKAAITEKRASWQKATDNGFAVGTYEELIPTADLVLNLTPDKQHSDVVKTVMPLMKQGAALGYSHGFNVVEEGQQIRSDITVVMVAPKCPGTEVREEYKRGFGVPTLIAVHPENDPKGEGMAIAKAWASATGGDRAGVLESSFVAEVKSDLMGEQTILCGMLQAGSLLCYDKLVAEGTDKAYAGKLIQFGWETITEALKQGGISLMMDRLSNPAKLRAFELSEQLKTLMRPLFEKHMDDIIAGEFSRGMMADWAEDDAKLFGWREETGKSAFENAPAFAGKIAEQEYFDNGVVMVAMVKAGVELAFETMVASGIYEESAYYESLHELPLIANTVARKRLYEMNVVISDTAEYGNYLFANAAVPLLREHFMPTLKAGDLGASKADEQSVDNLALLAANEATRNHPIEAIGQVLRGYMKDMKRIAVGG

SEQ ID NO: 88389 - protein, 338 aa, Unknown
  Bacterial polypetide isolated from the Sargasso Sea
MFYEKDADVNLIKSKKVAIFGYGSQGHAHALNLKDSGVKEIVVALREGSSSAAKAESKGLKVMNLSDAAEWADVVMILTPDELQAEIYKNHIEQRVREGTSIAFAHGLNVHYDLIKARKDLDVFMVAPKGPGHLVRSEYEKGGGVPCLFAVHQDGSGKARDLALSYASAVGGGRSGIIETTFKDEVETDLFGEQTVLCGGLVELIKNGYETLVEAGYEPEMAYFETVHEVKLIVDLIYEGGIANMNYSISNTAEYGEYQSGPRVVNKEETKNRMKEVLAEIQSGKFTKEWMDECKNGQKNFLATRAKLAEHPVEKVGAELRAMMPWIGKKKLVDSDKS

SEQ ID NO: 88390 - protein, 305 aa, Unknown
  Bacterial polypetide isolated from the Sargasso Sea
KDSGVKEIVVALREGSSSAAKAESKGLKVMNLSDAAAWADVVMILTPDELQAEIYKNHIEQRVREGTSIAFAHGLNVHYDLIKARKDLDVFMVAPKGPGHLVRSEYEKGGGVPCLFAVHQNGSGKARDLALSYASAVGGGRSGIIETTFKDEVETDLFGEQTVLCGGLVELIKNGYETLTEAGYEPEMAYFETVHEVKLIVDLIYEGGIANMNYSISNTAEYGEYQSGPRIINKDETKKRMKEVLADIQSGKFTKEWMDECKNGQKNFLATRAKLAEHSVEKVGAELRAMMPWIAKKKLVDSDKS

SEQ ID NO: 88391 - protein, 337 aa, Unknown
  Bacterial polypetide isolated from the Sargasso Sea
MFYEKDADPNLIKDKKVAIFGYGSQGHAHALNLKDSGVKNVVVALREGSSSIKKAESEGLKVMSLSDAAAWADVVMVLTPDELQASIYKNHIEQRMREGTSLAFAHGLNIHFDLIKARKDLDVFMVAPKGPGHLVRSEYQRGGGVPCLMAVHKDSSGKARDLAMSYACAVGGGRSGIIETTFKDECETDLFGEQTVLCGGLVELIKNGFETLTEAGYPPEMAYFETLHEVKLIVDLIYEGGIANMNYSISNTAEYGEYISGRKIVDSKTKERMKEVLKDIQSGKFTKQWMDECKGGQKNFLKMREELAKHPIEKVGKKLRDLMPWIGKNKLVDKSKN

SEQ ID NO: 88392 - protein, 125 aa, Unknown
  Bacterial polypetide isolated from the Sargasso Sea
EAGYDPEMAYFETVHEVKLLWDLIYEGGIANMNYSISNTAEYGEYVTGPKIINKEETKKRMKEVLADIQSGKFTKQWMDECKNGQKNFLKTRERLADHPVEKVGTALRAMMPWISKKKLVDSDKK

SEQ ID NO: 88393 - protein, 194 aa, Unknown
  Bacterial polypetide isolated from the Sargasso Sea
VPCLFAVHQNGSGKARYLAMSYASAIGGGRSGIIETTFKDEVETDLFGEQTVLCGGLVELIKNGYETLVEAGYEPEMAYFETVHEVKLIVDLIYEGGIANMNYSISNTAEYGEYMSGPRIINKEETKKRMKEVLQDIQSGKFTKQWMDECKNGQKNFLKTREKLAEHPVEKVGAKLRAMMPWISKKKLVDSDKN

SEQ ID NO: 88394 - protein, 337 aa, Unknown
  Bacterial polypetide isolated from the Sargasso Sea
MFYEKDADTNLIKDKKVAIFGYGSQGHAHALNLKDSGVKNVVVALREGSSSIKKAESEGLKVMSLSDAAAWADVVMVLTPDELQASIYKNHIEQRMREGTSLAFAHGLNIHFNLINSRKDLDVFMVAPKGPGHLVRSEYQRGGGVPCLMAVHKDSSGKARDLAMSYASAVGGGRSGIIETTFKDECETDLFGEQTVLCGGLVELIKNGFETLTEAGYPPEMAYFETLHEVKLIVDLIYEGGIANMNYSISNTAEYGEYISGRKIVDSKTKEKMKEVLKDIQSGKFTKQWMEECKGGQKNFLKMREELAKHPIEKVGKKLRDLMPWIGKNKLVDKSKN

SEQ ID NO: 88395 - protein, 200 aa, Unknown
  Bacterial polypetide isolated from the Sargasso Sea
MFYEKDADVDLIKNKKIAIFGYGSQGHAHALNLRDSGVKEIVVALREGSSSAAKAESKGLKVMNLSDAAAWADVVMILTPDELQAEIYKNHIEQRVREGTSIAFAHGLNVHYDLIKARKDLDVFMVAPKGPGHLVRSEYEKGGGVPCLFAVHQNGSGKARDLALSYASAVGGGRSGIIENTFKDEVETEFIWRTRLVLCG

SEQ ID NO: 88396 - protein, 295 aa, Unknown
  Bacterial polypetide isolated from the Sargasso Sea
WPQKGWGKVWGKAKATGLDVVEVDELVKKSDIIMILAPDTSQKKIYEDSIRDNIEPGKYLAFGHGFNIHYNQIVPEDGVNVFMVAPKAPGHTVRGTYEEGAGVPGLIAIHQDPSSDTKDIALAYAAGIGSSRVGIIETTFKDETETDLFGEQSVLCGGVSSLILAGFETLTEAGYPPEMAYFECLHEVKLIVDLIYQGGISNMRYSISDTAKYGDITRGPRLIDSSVKERMKIVLDEIQSGQFADEWIKENESGRPNYNRLLKEGETHPIEDIGTELRSMMTALFKKKLVDKEKN

SEQ ID NO: 88397 - protein, 339 aa, Unknown
  Bacterial polypetide isolated from the Sargasso Sea
MRVYYDRDADLNLIKDKKIAIVGYGSQGHAHAMNLRDSGLENVSIALREGSNSRPKAEQANFKVMTPAEAASWADVIMMLTPDELQSEIYTNDIADNIKEGTTIAFAHGLNIHFDLIKPKEGIDVIMVAPKGPGHTVRAEYVRGAGVPCLVAVDKNPSGNALEIGIAYASAIGGGRAGIIETTFKEECETDLFGEQSVLCGGLTHLILAGYETLVEAGYAPEMAYFECLHEVKLIVDLLYEGGMANMRYSISNTAEYGDYSRGPRLITDETKKEMKKILSEIQSGQFAKEWMAEHKSGQTKFKVMRKDQAEHPIEAVGEKLRTLMPWIAEGKMVDKSKN

SEQ ID NO: 88398 - protein, 347 aa, Unknown
  Bacterial polypetide isolated from the Sargasso Sea
MKIFYDDDADISIIQQLKVTIVGYGSQGHAHANNLHESGVDVTVALREGSSSWKKAQAAGLKVAKVSDAVCDADLVMILAPDEFQQGLYESEIKAHLKQDAVLAFAHGFNIHFKKIVPGEKTSVIMIAPKGPGHTVRSTYVNGGGVPSLIAIYQDGVNPCNHSARDIALSYAKANGGTRAGVLETSFKEETETDLFGEQAVLCGGMTALIKAGYETLVEAGYSPEMAYFECLHETKLIVDLIHEGGIANMHYSISNTAEYGDYLSGPEIITNDTKEAMKGILNRIQTGEFADNFLNDCRQSNDGTGGPIMKEMRKNTAAHSIEEVGAELRSKMKFLNSERLVNKDKN

SEQ ID NO: 88399 - protein, 338 aa, Unknown
  Bacterial polypetide isolated from the Sargasso Sea
MFYEKDTNVNLIKDKKVAIFGYGSQGHAHALNLRDSGVKEVVVALREGSSSIEKAESKGLKVMNLSDAAEWADVVMILTPDELQASIYKNHIEQRVKEGTSIAFAHGLNVHYDLIKARKDLDVFMVAPKGPGHLVRSEFEKGGGVPCLFAVHQDGSGKARDLAMSYASAVGGGRSGIIETTFKDEVETDLFGEQTVLCGGLVELIKNGYETLVEAGYEPEMAYFETVHEVKLIVDLIYEGGIANMNYSISNTAEYGEYQSGPRIIKKDETKQRMKEVLAEIQSGKFTKEWMEECKNGQKNFLATRAKLAEHSVEKVGAELRAMMPWISKKKLVDSDKK

SEQ ID NO: 88400 - protein, 287 aa, Unknown
  Bacterial polypetide isolated from the Sargasso Sea
AKKAQAEGLNVMGIPEAAAWCDLIMFTMPDELQAETYKKYVNDNIKEGAAIAFAHGLNVHFGLIEPKKGIDVLMMAPKGPGHTVRGEYTKGGGVPCLVAVDKDESGKALEIGLSYCSAIGGGRSGIIETNFREECETDLFGEQAVLCGGLIELIRCGFETLVEAGYAPEMAYFECLHEVKLIVDLIYEGGIANMDYSISNTAEYGQYVTGPRILPYEQTKKVMKGVLSDIQKGNFVRDFMLENAVGQPTIKAARRANDEHMIEAVGEKLRGMMPWISAGKMVDKDKN

SEQ ID NO: 88401 - protein, 211 aa, Unknown
  Bacterial polypetide isolated from the Sargasso Sea
MFYEKDTDVNLIKEKKIAIFGYGSQGHAHALNLKDSGVKEVVVALRDGSASKAKAESKGLKVMNLSDAAEWADVVMILTPDELQATIYKNHIEQRVREGTSIAFAHGLNIHYDLIKARKDLDVFMVAPKGPGHLVRSEFEKGGGVPCLFAVHQNGSGKARELAMSYASAVGGGKSGIIETTFKDEVETDLFGEQTVLCGGLVELIKNGYET

SEQ ID NO: 88402 - protein, 170 aa, Unknown
  Bacterial polypetide isolated from the Sargasso Sea
AVGGGRSGIIETTFKDEVETDLFGEQTVLCGGLVELIKNGYETLVEAGYEPEMAYFETVHEVKLIVDLIYEGGIANMNYSISNTAEYGEYQSGPRVINKEETKKRMKEVLADIQSGKFTKEWMDECKNGQKNFLATRAKLAEHPVEKVGANLRAMMPWIGKKKLVDSDKK

SEQ ID NO: 88403 - protein, 347 aa, Unknown
  Bacterial polypetide isolated from the Sargasso Sea
MNIFYDDDANIEIIQKLKVSIVGYGSQGHAHANNLSDSGVDVTVALREGSSSWEKAEEAGLKVMPVDEATKDADLVMILAPDEFQKGIYEKSIKPNLKNDAILAFAHGFNIHFKKIIPDETNSVIMIAPKGPGHTVRSTYLKGGGVPSLIAIYQDSTNTSDSSAKEVALSYAKANGGTRAGVLETTFKEETETDLFGEQAVLCGGMTALIKAGYETLVEAGYSPEMAYFECLHETKLITDLIQEGGIANMHYSISNTAEYGDYLSGPKIITEKTKEAMKEVLDNIQSGNFADEFLDDCRQSNDGSGGPFMKSKRESTKNHPIEKVGKELRSKMKFLNSEKLVDKEKN

SEQ ID NO: 88404 - protein, 484 aa, Unknown
  Bacterial polypetide isolated from the Sargasso Sea
MANYFNTLNLRQQLAQLGKCRFMGRDEFADGASYLQGKKVVIVGCGAQGLNQGLNMRDSGLDISYALRKEAIAEKRASWRKATENGFKVGTYEDLIPQADLVVNLTPDKQHSDVVRSVQPLMKDGAALGYSHGFNIVEVGEQIRKDITVVMVAPKCPGTEVREEYKRGFGVPTLIAVHPENDPKGEGMAIAKAWAAATGGHRAGVLESSFVAEVKSDLMGEQTILCGMLQAGSLLCFDKLVAEGTDPAYAEKLIQFGWETITEALKQGGITLMMDRLSNPAKLRAYALSEQLKEIMAPLFQKHMDDIISGEFSSGMMADWANDDKKLLTWREETGKTAFETAPQYEGKIGEQEYFDKGVLMIAMVKAGVELAFETMVDSGIIEESAYYESLHELPLIANTIARKRLYEMNVVISDTAEYGNYLFSYACVPLLKEFMTTLQTGDLGKAIAEGAVDNAQLRDVNDAIRSHAIEKVGQKLRGYMTDM

SEQ ID NO: 88405 - protein, 328 aa, Unknown
  Bacterial polypetide isolated from the Sargasso Sea
LIKSKKVAIFGYGSQGHAHALNLKDSGVKDIVVALREGSSSAAKAESKGLKVMNLSDAAEWADVVMILTPDELQAEIYKNHIEQRVREGTSIAFAHGLNVHYDLIKARKDLDVFMVAPKGPGHLVRSEYEKGGGVPCLFAVHQDGSGKARDLALSYASAVGGGRSGIIETTFKDEVETDLFGEQTVLCGGLVELIKNGYETLVEAGYEPEMAYFETVHEVKLIVDLIYEGGIANMNYSISNTAEYGEYQSGPRVVNKEETKKRMKEVLAEIQSGKFTKEWMDECKNGQKNFLATRAKLAEHPVEKVGAELRAMMPWIGKKKLVDSDKS

SEQ ID NO: 88406 - protein, 325 aa, Unknown
  Bacterial polypetide isolated from the Sargasso Sea
NKKIAIFGYGSQGHAHALNLRDSGVKEVVVALRDGSSSKAKAESKGLKVMNLSDAAEWADVVMVLTPDELQATIYKNHIEQRVREGTSIAFAHGLNIHYDLIKARKDLDVFMVAPKGPGHLVRSEFEKGGGVPCLFAVHQNGSGNARELAMSYASAVGGGRSGIIETTFKDEVETDLFGEQTVLCGGLVELIKNGYETLVEAGYEPEMAYFETVHEVKLIVDLIYEGGIANMNYSISNTAEYGEYVTGPKIINKEETKKRMKEVLADIQSGKFTKDWMEECKNGQKNFLKTREKLAEHPVEKVGAGLRALMPWISKKKLIDSDKN

SEQ ID NO: 88407 - protein, 331 aa, Unknown
  Bacterial polypetide isolated from the Sargasso Sea
MAQLFYDSDADLGLLNGKTVAIIGYGSQGHAHALNLKDSGVNVVVGLYDGSRSADKAKADGLEVLSVADASAKADWVMVLLPDEFQKDVYEKEIAPHLTSGKVLSFAHGFNIRFELIKPPADVDVVMIAPKGPGHTVRWEYQNGQGVPALFAIEQDASGQARGLAMAYAKGIGGTRAGILETNFKEETETDLFGEQAVLCGGLSELVKAGFETLVEAGYQPELAYFECLHEVKLIVDLMVKGGLTSMRDSISNTAEYGDYVSGPRLITADTKAEMKRVLADIQDGTFAKNFVAECEAGKPEMKKVRDRDSQHPIEKVGKGLRSMFSWLKDA

SEQ ID NO: 88408 - protein, 285 aa, Unknown
  Bacterial polypetide isolated from the Sargasso Sea
MFYEKDTNVDLIKDKKVAIFGYGSQGHAHALNLRDSGVKEVVVALREGSSSIEKAESKGLKVMNLSDAAEWADVVMILTPDELQASIYKNHIEQRVKEGTSIAFAHGLNVHYDLIKARKDLDVFMVAPKGPGHLVRSEYEKGGGVPCLFAVHQDGSGKARDLAMSYASAVGGGRSGIIETTFKDEVETDLFGEQTVLCGGLVELIKNGYETLVEAGYEPEMAYFETVHEVKLIVDLIYEGGIANMNYSISNTAEYGEYQSGPRIIKKDETKRRMKEVLAEIHLVN

SEQ ID NO: 88409 - protein, 369 aa, Unknown
  Bacterial polypetide isolated from the Sargasso Sea
MTNYFNKLSPEEKKIQLGKCRFMDSSEFSDGVSFLKEKKIVIVGCGAQGLHQGLNMRDSGLDISYALRQSSIDSKRQSFLNATQNNFNVGNFDDMIPIADLVINLTPDKNHTPVVNKLMPLMKKDSILSYSHGFNIVEEGMEVRDDITVIMVAPKSPGSEVREEYMRGFGVPTLIAVHPDNDYKNIGLSASKAYAVSLGSHKAGVLESSFVAEVKSDLMGEQTILCGMLQTGSILSFNRMLELGIEPKYASKLVQNGWETITEALKHGGITKMMDRLNNIAKIKAYNLSEELKEILTPLFKKHMENILSGSFSTTMMRDWENDDNELLNWREETSQTVFEKTSSTDQNIEEQEYFDNGILMIAFIKARC

SEQ ID NO: 88410 - protein, 245 aa, Unknown
  Bacterial polypetide isolated from the Sargasso Sea
MKILKKGTTIAFAHGLNIHFDLIKPKEGIDVIMVAPKGPGHTVRAEYVRGAGVPCLVAVDKNPSGNALEIGIAYASAIGGGRAGIIETTFKEECETDLFGEQSVLCGGLTHLILAGYETLVDAGYAPEMAYFECLHEVKLIVDLLYEGGMANMRYSISNTAEYGDYSRGPRLITDETKKEMKKILSEIQSGQFAKEWMQEHQSGQTKFKVMRKEQAEHPIEAVGEKLRTLMPWIAEGKMVDKSKN

SEQ ID NO: 88411 - protein, 338 aa, Unknown
  Bacterial polypetide isolated from the Sargasso Sea
MFYEKDTDVNLIKSKKVAIFGYGSQGHAHALNLKDSGVKEVVVALRDGSSSKEKAESKGLKVMNLSDAAEWADIVMILTPDELQASIYKNHIEQRVKEGTSVAFAHGLNIHYDLIKARKDLDIFMVAPKGPGHLVRSEFEKGGGVPCLFAVHQNGSGKARDLAMSYASAVGGGRSGIIETTFKDEVETDLFGEQTVLCGGLVELIKNGYETLVEAGYEPEMAYFETVHEVKLIVDLIYEGGIANMNYSISNTAEYGEYVSGPRIINKAETKKRMKEVLDDIQSGKFTKEWMDECKNGQKNFLKTREKLAEHPVEKVGAGLRAMMPWISKKKLVDSDKK

SEQ ID NO: 88412 - protein, 311 aa, Unknown
  Bacterial polypetide isolated from the Sargasso Sea
SGVKNVCIALREDSNSVPKAKNAGFEVKTVSEGSKWADVVMILTPDELQGEIYTNEIKNNIRSGSAIAFAHGLNIHFNLIEPRNDIDVFMVAPKGPGHTVRAEYQKGGGVPCLLAVHLDSSGNTHEIGLSYACAVGGGRSGIIQTTFKEECETDLFGEQVVLCGGLVELIKAGYETLVEAGYAPEMAYFECLHEVKLIVDLIYEGGISNMNYSISNTAEYGEYVSGPRLITNETKETMKGILNDIQTGKFTREWMLENKVNQTSFKAIRNKNANHPIEEVGEKLRSMMPWIGSNKLVDKGKKLKFKNIKIY

SEQ ID NO: 88413 - protein, 168 aa, Unknown
  Bacterial polypetide isolated from the Sargasso Sea
VGGGKAGIIETTFKDECETDLFGEQTVLCGGLVELIKNGFETLTEAGYPPQMAYFETLHEVKLIVDLIYEGGIANMNYSISNTAEYGEYVSGKRVVDGKTKEKMKEVLKDIQSGKFTKQWMDEHKSGQKNFLKMRQDLAKHPIEKVGKELRAMMPWIGKNKLVDKDKN

SEQ ID NO: 88414 - protein, 307 aa, Unknown
  Bacterial polypetide isolated from the Sargasso Sea
MTQLFYDTDADLSLLKNKTIAIIGYGSQGHAHALNLKDSGMDVIVGLYKGSNSESKAINDGLKVFTVSEACEKADWIMILLPDEFQKDVYIKEIEPNLKEGKILSFAHGFNIRFELIKPPNFVDVVMVAPKGPGHTVRWEYQNGQGVPALFAVEQDYSGNARSLAMSYAKGIGGTRAGILETNFKEETETDLFGEQAVLCGGLSELVKSGFETLVEAGYQPELAYFECLHEVKLIVDLMVKGGLSQMRDSISNTAEYGDYVSGKRLINNNTKKEMQKILKDIQDGTFAKNFVDECDNNKPLMTKLRE

SEQ ID NO: 88415 - protein, 113 aa, Unknown
  Bacterial polypetide isolated from the Sargasso Sea
PNLAYFECLHELKLIVDLIYEGGIGNMRYSISTTAAYGDVTRGPRIITDETRAEMKKILSEIQSGSFAKEFILENKANRPMFNALLRKGKEHRVEQVGEKLRKMMPFVGKKLQ

SEQ ID NO: 88416 - protein, 259 aa, Unknown
  Bacterial polypetide isolated from the Sargasso Sea
MAKTWKDADISLDPIKDQTVAVIGYGIQGDAQANNMKDSGLKVIVGLREGSPTWNKAKEDGHEVMSVADATKQADIVHILLPDMVQAKVYKEEIGPNLSEGNALSFSHAAAIYWKWIDAPENVDLIMVAPKGPGSKVRETYQQNFGTPSIVAVEQDKTGKAWDRTLGIAKAIGSARAGLIQTTFKEEVETDWFGEQADLCGGSASMVVNAFETLVEAGYQPEIAYFEVLHELKLIVDMIQRYGINGMWRRVSETARYGG

SEQ ID NO: 88417 - protein, 178 aa, Unknown
  Bacterial polypetide isolated from the Sargasso Sea
MKVYYDDDADLGIISAKTVAVIGYGSQGHAHANNLRDSGVDVVVGLREDSSSRDKAVTSGLRVDTVANAVGAADVVMMLVPDELAAELYESDVAANLKPGAALAFAHGFNVHFGFIEPDSSVDVIMIAPKGPGHLVRSTYTEGGGVPCLIAIQQDASGSARATALSYASCHRRRQGRR

SEQ ID NO: 88418 - protein, 339 aa, Unknown
  Bacterial polypetide isolated from the Sargasso Sea
MKVYYDQDADLNLIKSKNVLIVGYGSQGHAHAANLRDSGVKNVCIALREDSNSVPKAKNAGFEVKTVSEGSKWADVVMILTPDELQGEIYTNEIKNYIKSGSAIAFAHGLNIHFNLIEPRNDIDVFMVAPKGPGHTVRAEYQKGGGVPCLLAVHLDSSGNTHEIGLSYACAVGGGRSGINTTTFKEECETDLFGEQVVLCGGLVELIKAGYETLVEAGYAPEMAYFECLHEVKLIVDLIYEGGISNMNYSISNTAEYGEYVSGPRLITNETKETMKKILNDIQSGKFTREWMLENKVNQTSFKAIRNKNSNHPIEEVGEKLRSMMPWIGSNKLVDKGKN

SEQ ID NO: 88419 - protein, 339 aa, Unknown
  Bacterial polypetide isolated from the Sargasso Sea
MKVYYEKDADLDLIKTKKIAVYGYGSQGHAHALNLKDSGASDVVVALREGSSSAKKAEAEGLRVMSMSDAAEWADIMMMLIPDELQADVWKNHIEQRAKEGSALAFAHGLNVHFDLINARPDMDVFMVAPKGPGHTVRSEFKKGGGVPCLVAVDSDKTGKALDIALSYASAIGGGKAGIIETTFKDECETDLFGEQTVLCGGVVELIRNGFETLVEAGYPPEMAYFECLHEVKLIVDLIYEGGIANMNYSISNTAEYGEYVSGPKIVDGETKSKMKKVLEKIQSGEFTREWIEEYKSGAKNFEAMRSKIDNHQIEKVGKDLRAMMPWISKNKLVDKEKN

SEQ ID NO: 88420 - protein, 341 aa, Unknown
  Bacterial polypetide isolated from the Sargasso Sea
MVQKEPPVPATIYYDSDADLAVLSGKTIAVIGYGSQGHAQAQNLRDSGLNVVVAQRPGGPNFDLAKSHGFEPLSVEEAVKQADVVNILLPDELQGDVYKTSIKPNLKAGAVLMASHGFNFHFNQVEPPPGHDILLVAPKGPGHLVRSEYEKGGGVPCLIALGEGASEETKKIGLAYAKGVGGTRGGVIETTIAEETETDLFGEQAVLCGGVSELIKAGFDTLVEAGYQPEMAYFECLHEMKLIVDLLYQGGLEYMRYSVSNTAEYGDYTRGNRVITDETRAEMKKILEEIQTGEFARDWILENRAGAAMFKATRRREREHKLTETGRHLRKMMKWIDSKEV

SEQ ID NO: 88421 - protein, 338 aa, Unknown
  Bacterial polypetide isolated from the Sargasso Sea
MQIFYDSDADQNIVKGMDVVIVGYGSQGHAHANNLKDSGANVTVALRKESESWAKAESAGFNVKEVDDAVPEADLVMMLIPDEKQAVMYENHLKGNIKDGAVLAFAHGFNIHFEMIVPREDLDVIMIAPKGPGHTVRSQFESGAGVPCLLAVHKDVSGKAKDIGLSYASLIGSGRAGIIETNFKDETETDLFGEQAVLCGGLTSLIQTGYEVLVENGYPPEMAYFECLHEVKLIVDLIYEGGLQNMRYSISNTAEYGDYVTGPKIVNQSTKETMQKILSEIQSGDFAKDFMDDCNSGGDKMNEYRRNSSEHSIEAVGENLRSMMPWISANKIVDKAKN

SEQ ID NO: 88422 - protein, 338 aa, Unknown
  Bacterial polypetide isolated from the Sargasso Sea
MFYEKDTDTNLIKDKKIAIFGYGSQGHAHALNLKDSGVKEVVVALREGSSSKAKAESKGLTVMNLSDAAEWADVVMILTPDELQASIYKNHIEQRVREGTSIAFAHGLNIHYDLIKARKDLDVFMVAPKGPGHLVRSEFEKGGGVPCLFAVHQNGSGKARDLAMSYASAVGGGRSGIIETTFKDEVETDLFGEQTVLCGGLVELIKNGYETLVEAGYEPEMAYFETVHEVKLIVDLIYEGGIANMNYSISNTAEYGEYVSGPRIINKEETKKRMKEVLADIQSGKFTKEWMKEHETGQKNFLQTRAKLAEHPVEKVGAGLRALMPWIAKKKLIDSDKN

SEQ ID NO: 88423 - protein, 338 aa, Unknown
  Bacterial polypetide isolated from the Sargasso Sea
MFYEKDADVNLIKDKKVAIFGYGSQGHAHALNLKDSGVKEVVVALRDGSASKAKAESKGLKVMSLSDAAEWADVCMILTPDELQATIYKNHIEQRIKEGTSLAFAHGLNIHYDLIKARKDLDVFMVAPKGPGHLVRSEFEKGGGVPCLMAVHQDGTGKARDLALSYASAIGGGRSGIIETTFKDECETDLFGEQTVLCGGLVELIKNGYETLVEAGYEPEMAYFECLHEVKLIVDLIYEGGIANMNYSISNTAEYGEYVSGPRIINKEETKKRMKEVLADIQSGKFTKQWMDECKNGQKNFLKTREELAKHSIETVGTKLRAMMPWIGKKKLVDSDKK

SEQ ID NO: 88424 - protein, 140 aa, Unknown
  Bacterial polypetide isolated from the Sargasso Sea
MFYEKDADVNLIKSKKVAIFGYGSQGHAHALNLKDSGVKDIVVALREGSSSAAKAESKGLKVMNLSDAAEWADVVMILTPDELQAEIYKNHIEQRVREGTSIAFAHGLNVHYDLIKARKDLDVFMVAPKGPGHLVRSEYE

SEQ ID NO: 88425 - protein, 329 aa, Unknown
  Bacterial polypetide isolated from the Sargasso Sea
MTQLFYDTDADLSLLNNKTIAIIGYGSQGHAHALNLKDSGMDVIVGLYRGSKSESKAISDGLQVFSVSEACEKADWIMILLPDEFQKDVYLKEIEPNLKEGKILSFAHGFNIRFGLIKPPSFVDVVMIAPKGPGHTVRWEYQNGQGVPALFAVEQDSSGSARSLAMAYAKGIGGTRAGILETNFKEETETDLFGEQAVLCGGLSELVKSGFETLVEAGYQPELAYFECLHEVKLIVDLMVKGGLSQMRDSISNTAEYGDYVSGKRLINSDTKKEMQKILKDIQDGTFAKNFVEECDKNKPLMTKLREENSKHEIEKVGKGLRSMFSWLK

SEQ ID NO: 88426 - protein, 492 aa, Unknown
  Bacterial polypetide isolated from the Sargasso Sea
MANYFNSLNLRQQLAQLGQCRFMDRSEFSDGCNYIKDWNIVILGCGAQGLNQGLNMRDSGLNIAYALRPEAIAQKRASWQKATDNGFKVGTFEELIPTADLVLNLTPDKQHSNVVSAVMPLMKQGATLSYSHGFNIVEEGMQIRPDITVIMVAPKCPGTEVREEYKRGFGVPTLIAVHPENDPNGDGLDIAKAYASATGGDRAGVLQSSFIAEVKSDLMGEQTILCGMLQTGAILGYEKMVADGVEPGYAAKLIQQGWETVTEALKHGGITNMMDRLSNPAKIKAFEIAEDLKEILQPLFEKHMDDIISGEFSRTMMQDWANDDANLLRWRAETAETGFENAPVSSEHIDEQTYFDKGIFLVAMIKAGVELAFDTMVSAGIVEESAYYESLHETPLIANTIARKRLYEMNVVISDTAEYGCYLFNHAAVPLLRDYVNAMSPEYLGAGLKDSSNSVDNLQLIAINDAIRHTAVEYIGAELRGYMTDMKSIVGA

SEQ ID NO: 88427 - protein, 225 aa, Unknown
  Bacterial polypetide isolated from the Sargasso Sea
MFYEKDTDANLIKDKKIAIFGYGSQGHAHALNLKDSGVKEVVVALREGSSSKAKAESKGLKVMNLSDAAEWADVVMILTPDELQATIYKNHIDQRIRPGTSIAFAHGLNIHYDLINARKDLDVFMVAPKGPGHLVRSEFQKGGGVPCLFAVHQNGSGKARDLAMSYASAIGGGRSGIIETTFKDEVETDLFGEQTVLCGGLVELIKNGYETLVEAGYEPEMAYFE

SEQ ID NO: 88428 - protein, 347 aa, Unknown
  Bacterial polypetide isolated from the Sargasso Sea
MKIYYDDDADIEIIKKLNITIVGYGSQGHAHANNLKDSGVNVTVALREGSSSWNKAAEAGLTVMPVAESIQDADLVMMLAPDEFQKGIYDKSIQPNLKSDAILAFAHGFNIHFEKIVPEKGNSVIMIAPKGPGHTVRSTYLKGGGVPSLVAIYQDAISNNSFSAKDVALSYAKANGGTRAGVLETSFKEETETDLFGEQAVLCGGMTALIKAGYETLVEAGYSPEMAYFECLHETKLITDLIQEGGIANMHYSISNTAEYGDYLSGPKIITDQTKKAMKEILDNIQSGNFANEFLDDCRQSNDGSGGPFMKSNRKSTEDHPIEKVGKELRSKMKFLNSEKLVDKEKN

SEQ ID NO: 88429 - protein, 505 aa, Unknown
  Bacterial polypetide isolated from the Sargasso Sea
MSNYFNTLNLRQQLKQLGKCRFMAKEEFAKGSDLLKGWKVVIVGCGAQGLNQGLNMRDSGLDISYALRAEAIAAKRKSFQNASDNGFKVGTYEELIPTADLVLNLTPDKQHTSVVKAVMPLMKQGATLAYSHGFNIVEEGTQIRKDITVVMVAPKCPGTEVREEYKRGFGVPTLIAVHPENDPKGLGLEIAKAYASATGGDRAGVLESSFVAEVKSDLMGEQTILCGMLQTGSILAYDKLVAEGVEPGYAAKLIQFGWETVTEALKHGGITHMMDRLSNPAKIKAYDLAEELKVTLRPLFEKHMDDIISGEFSRTMMADWANDDKQLFGWREETRQSGFENAPVSSEQIPEQDYFDRGILFVAMVKAGVELAFETMVAAGIVEESAYYESLHETPLIANTIARKRLYEMNVVISDTAEYGNYLFSNAAVPLLRDFVNKLSTEYVGKGLSSAANGVDNIRLIAVNEAIRQHPVELVGKKLRGYMTAMKKSSVNSRDFPVSPQVPSF

SEQ ID NO: 88430 - protein, 377 aa, Unknown
  Bacterial polypetide isolated from the Sargasso Sea
VNKLMPLMKKDSILSYSHGFNIVEEGMEVRDDITVIMVAPKSPGSEVREEYLRGFGVPTLIAVHPDNDYKNIGLSASKAYAVSLGSHKAGVLESSFVAEVKSDLMGEQTILCGMLQTGSILSFNRMLELGIEPKYASKLVQNGWETITEALKHGGITKMMDRLTNIAKIRAYDLSEELKEILTPLFNKHMENILSGSFSTTMMRDWENDDNELLNWREETSQTVFEKTSSTDQNIEEQEYFDNGILMIAFIKAGVELAYEIMVNNGIKEESAYYESLHELPLIANLVARKKLYEMNNIISDTAEYGCYLFNNDAIPLLKDFFSNVDSDIIGTDALSKSNSAVDDEILKVISDNIREHSIEKIGSELRQHMTTMKNIY

SEQ ID NO: 88431 - protein, 338 aa, Unknown; identical to SEQ ID NO: 88294
  Bacterial polypetide isolated from the Sargasso Sea

SEQ ID NO: 88432 - protein, 347 aa, Unknown
  Bacterial polypetide isolated from the Sargasso Sea
MKIFYDDDADISIIQQLKVTIVGYGSQGHAHANNLHESGVDVTVALREHSTSWKKAQEAGLKVAKVSDAIGDADLVMILAPDEFQQGLYESEIKANLKQNAVLAFAHGFNIHFKKIVPEEKTSVIMIAPKGPGHTVRSTYINGGGVPSLIAIYQDGDNPYNHSARDIALSYAMANGGTRAGVLETTFKEETETDLFGEQAVLCGGMTALIKAGYETLVEAGYSPEMAYFECLHETKLIVDLIHEGGIANMHYSISNTAEFGDYISGPKVITNDTKEAMKGILSRIQTGEFADNFLNDCRQSNDATGGPIMKEMRKNTASHSIEEVGAELRSKMKFLNSERLVNKDKN

SEQ ID NO: 88433 - protein, 338 aa, Unknown
  Bacterial polypetide isolated from the Sargasso Sea
MFYEKDTDVNLIKDKKIAIFGYGSQGHAHALNLKDSGVKEVVVALREGSASKTKAESKGLKVMNLSDAAEWADVVMILTPDELQATIYKNHIEQRVREGTSIAFAHGLNIHYDLIKARKDLDVFMVAPKGPGHLVRSEFQKGGGVPCLFAVHQNGSGKARDLAMSYASAVGGGRSGIIETTFKDEVETDLFGEQTVLCGGLVELIKNGYETLVEAGYEPEMAYFETVHEVKLIVDLIYEGGIANMNYSISNTAEYGEYVTGPKIINKEETKKRMKEVLADIQSGKFTKEWMDECKNGQKNFLKTREKLAEHPVEKVGAGLRALMPWIAKKKLIDSDKS

SEQ ID NO: 88434 - protein, 338 aa, Unknown
  Bacterial polypetide isolated from the Sargasso Sea
MFYEKDTDVNLIKDKKIAIFGYGSQGHAHALNLRDSGVKEVVVALRDGSSSIAKAESKGLKVMNLSDAAEWADVVMILTPDELQAAIYKNHIEQRVKEGTSIAFAHGLNVHYDLIKARKDLDVFMVAPKGPGHLVRSEYEKGGGVPCLFAVHQDGSGKARDLAMSYASAVGGGRSGIIETTFKDEVETDLFGEQTVLCGGLVELIKNGYETLVEAGYEPEMAYFETVHEVKLIVDLIYEGGIANMNYSISNTAEYGEYQSGPRIIKKEETKQRMKEVLAEIQSGKFTKEWMDECKNGQKNFLATRAKLAEHSVEKVGAELRAMMPWISKKKLVDSDKK

SEQ ID NO: 88435 - protein, 338 aa, Unknown
  Bacterial polypetide isolated from the Sargasso Sea
MFYEKDADVNLIKNKKVAIFGYGSQGHAHALNLKDSGVKEIVVALREGSSSAAKAESKGLKVMNLSDAAEWADVVMILTPDELQAEIYKNHIEQRVREGTSIAFAHGLNVHYDLIKARKDLDVFMVAPKGPGHLVRSEYEKGGGVPCLFAVHQNGSGKARDLALSYASAVGGGRSGIIETTFKDEVETDLFGEQTVLCGGLVELIKNGYETLVEAGYEPEMAYFETVHEVKLIVDLIYEGGIANMNYSISNTAEYGEYQSGPRVVNKEETKKRMKEVLAEIQSGKFTKEWMDECKNGQKNFLATRAKLAEHPVEKVGAELRAMMPWISKKKLVDSDKS

SEQ ID NO: 88436 - protein, 342 aa, Unknown
  Bacterial polypetide isolated from the Sargasso Sea
MKIYYDNDADINIIQGINVTIIGYGSQGHAHANNLNDSGVNVTVGLREGSSSWSKAEAAGLNVKTVSESVKDADLVMILAPDEFQKSIFDKHISPNLKSDAILGFAHGFNIHFKKIVPSEDNSVIMIAPKGPGHTVRSTYKNGGGVPSLIAIYKDNIVDKKFNAKDLALSYAMANGGTRAGVLETSFKEETETDLFGEQAVLCGGLTALIKAGYETLVEAGYSPEMAYFECLHETKLITDLIQEGGIANMHYSISNTAEFGDYKSGPKIITEDTKKAMKEILSEIQTGNFANEFLDDCRQSNDGTGGPIMKSNRKMTQNHPIEQVGKELRSKMKFLNSEKLV

SEQ ID NO: 88437 - protein, 331 aa, Unknown
  Bacterial polypetide isolated from the Sargasso Sea
LKVTIVGYGSQGHAHANNLHESGVDVTVALREGSSSWSKAENAGLRVAKVSDAVSDADLVMILAPDEFQQGLYESAIQSNLKSNAVLAFAHGFNIHFKKIIPGDGTSVIMIAPKGPGHTVRSTYLSGGGVPSLIAIYQDGNNPNNHSAKEIALSYAKANGGTRAGVLETTFKEETETDLFGEQAVLCGGMTALIKAGYETLVEAGYSPEMAYFECLHETKLIVDLIHEGGIANMHYSISNTAEFGDYVSGPEIITDDTKEAMRGILKRIQTGEFADNFLNDCRQSNDGSGGPIMKEKRKKTAYHSIEQVGADLRSKMKFLHSERLVNKDKN

SEQ ID NO: 88438 - protein, 273 aa, Unknown
  Bacterial polypetide isolated from the Sargasso Sea
MFYEKDTDVNLIKDKKIAIFGYGSQGHAHALNLRDSGVKEVVVALREGSSSIAKAESKGLKVMNLSDAAEWADVVMILTPDELQAAIYKNHIEQRVKEGTSIAFAHGLNIHYDLIKARKDLDVFMVAPKGPGHLVRSEYEKGGGVPCLFAVHQDGSGKARDLAMSYASAVGGGRSGIIETTFKDEVETDLFGEQTVLCGGLVELIKNGYETLVEAGYEPEMAYFETVHEVKLIVDLIYEGGIANMNYSISNTAEYGEYQSGPRIIKKEETKQR

SEQ ID NO: 88439 - protein, 203 aa, Unknown
  Bacterial polypetide isolated from the Sargasso Sea
VRAEYVRGAGVPCLFAVNQNPSGNALEIAIAYSSAIGGGRAGIIETTFKEECETDLFGEQSVLCGGLTHLIIAGYETLVDAGYAPEMAYFECLHEVKLIVDLLYEGGMANMRYSISNTAEYGDYSRGPRLITDETKKEMKKILSEIQSGQFAKEWMAEHRAGQTKFTTMRKKHAEHPIEKVGEKLRTLMPWIAEGKMVDKSKN

SEQ ID NO: 88440 - protein, 338 aa, Unknown
  Bacterial polypetide isolated from the Sargasso Sea
MFYEKDTDAKLIKDKKIAIFGYGSQGHAHALNLKDSGVKEVVVALREGSSSIKKAESKGLKVMNLSDAAEWADVVMILTPDELQATIYKNHIEQRVKEGTSIAFAHGLNVHYDLIKARKDLDVFMVAPKGPGHLVRSEYEKGGGVPCLFAVHQNGSGKARDLAMSYASAIGGGRSGIIETTFKDEVETDLFGEQTVLCGGLVELIKNGYETLVEAGYEPEMAYFETVHEVKLIVDLIYEGGIANMNYSISNTAEYGEYESGPRIINKEETKKRMKEVLADIQSGKFTKQWMDECKNGQKNFLATRAKLAEHPVEKVGATLREMMPWIAKKKLVDSDKK

SEQ ID NO: 88441 - protein, 220 aa, Unknown
  Bacterial polypetide isolated from the Sargasso Sea
RPDMDVFMVAPKGPGHTVRSEFKKGGGVPCLVAVDSDKTGKALDIALSYASAIGGGKAGIIETTFKDECETDLFGEQTVLCGGVVELIRNGFETLVEAGYPPEMAYFECLHEVKLIVDLIYEGGIANMNYSISNTAEYGEYVSGPKIVDGETKSKMKKVLEKIQSGEFTREWIKEYKSGAKNFEAMRSKIDNHQIEKVGKDLRAMMPWISKNKLVDKEKN

SEQ ID NO: 88442 - protein, 147 aa, Unknown
  Bacterial polypetide isolated from the Sargasso Sea
MENKRSFCGGLTSLIQTGYEVLVENGYPPEMAYFECLHEVKLIVDLIYEGGLQNMRYSISNTAEYGDYVTGPKIVNENTKETMQKILTEIQSGEFAKDFMNDCNSGGEKMSEYRKNSSEHSIESVGEELRSMMPWISANKIVDKAKN

SEQ ID NO: 88443 - protein, 105 aa, Unknown
  Bacterial polypetide isolated from the Sargasso Sea
CDLIYEGGIANMNYSISNTAEYGEYVTGPRIINKEETKKRMKEVLADIQSGKFTKEWMDECKNGQKNFLKTREKLADHPVEKVGAGLRAMMPWISKKKLVDSDKK

SEQ ID NO: 88444 - protein, 338 aa, Unknown
  Bacterial polypetide isolated from the Sargasso Sea
MKVYYDKDANIDNIKNLNVSIIGYGSQGHAHALNLKDSGINVTIGLRENSSSIDRAKNEGLEVLSLEEAVNKADIVMILAPDEYQASIFKDSIEPNLKENAALAFAHGFNIHYGQIKPSTQHDVFMIAPKSPGHLVRSTFLQGKGVPTLIAIHNNNSGTAKDIALAYASAIGGGRAGIIETDFKEETETDLFGEQAVLCGGVTALVKAGFETLVDAGYAPEMAYFECLNELKLIVDLMYEGGMTEMRYSISNTAEYGDLTKGPFLIDDHVKAKMKVVLEDVQNGKFANDFVNEIKNGSKEFDRLRQEGSDHLIEETGKKLRDMMSWMQDSKLVDEKIK

SEQ ID NO: 88445 - protein, 165 aa, Unknown
  Bacterial polypetide isolated from the Sargasso Sea
GVSGSILTSFRDETETDLFGEQAVLCGGATALVKAGFETLVDAGYEPEMAYFECLHELKLIVDLMYEGGISNMRYSISNTAEYGDFTRGPRIVNNSTKDEMKKILAEIQSGEFANEYIKEYRSGNKNFNSMRKEGEHHAIEEVGDKLRSMMPWISANKLVDKDKN

SEQ ID NO: 88446 - protein, 334 aa, Unknown
  Bacterial polypetide isolated from the Sargasso Sea
KDTDVNLIKDKKIAIFGYGSQGHAHALNLKDSGVKEVVVALREGSSSIPKAESKGLKVMNLSDAAEWADVVMILTPDELQAEIYKNHIDQRIRPGTSIAFAHGLNVHYDLIKARKDLDVFMVAPKGPGHLVRSEYEKGGGVPCLFAVHQNGSGKARDLAMSYASAVGGGRSGIIETTFKDEVETDLFGEQTVLCGGLVELIKNGYETLVEAGYEPEMAYFETVHEVKLIVDLIYEGGIANMNYSISNTAEYGEYQSGPRIINKEETKKKMKEVLSDIQSGKFTKEWMNECKNGQKNFLATRAKLAEHPVEKVGANLRAMMPWISKKKLVDSDKS

SEQ ID NO: 88447 - protein, 320 aa, Unknown
  Bacterial polypetide isolated from the Sargasso Sea
IFGYGSQGHAHALNLKDSGVKEVVVALRDGSASKAKAESKGLKVMNLSDSAEWADVCMILTPDELQATIYKNHIEQRIKEGTSLAFAHGLNIHYDLIKARKDLDVFMVAPKGPGHLVRSEFEKGGGVPCLMAVHQDGTGKARDLALSYASAIGGGRSGIIETTFKDECETDLFGEQTVLCGGLVELIKNGYETLVEAGYEPEMAYFECLHEVKLIVDLIYEGGIANMNYSISNTAEYGEYVSGPRIINKEETKKRMKEVLEDIQSGKFTKQWMDECKNGQKNFLKTREELAKHSIETVGTKLRAMMPWIGKKKLVDSDKK

SEQ ID NO: 88448 - protein, 181 aa, Unknown
  Bacterial polypetide isolated from the Sargasso Sea
KARDLALSYASAVGGGRSGIIETTFKDEVETDLFGEQTVLCGGLVELIKNGYETLVEAGYEPEMAYFETVHEVKLIVDLIYEGGIANMNYSISNTAEYGEYQTGPRVVNKEETKKRMKEVLAEIQSGKFTKEWMDECKNGQKNFLATRAKLAEHPVEKVGAELRAMMPWIGKKKLVDSDKS

SEQ ID NO: 88449 - protein, 294 aa, Unknown
  Bacterial polypetide isolated from the Sargasso Sea
LRDGSASKAKAESKGLKVMNLSDAAEWADVVMVLTPDELQATIYKNHIEQRVREGTSIAFAHGLNIHYDLIKARKDLDVFMVAPKGPGHLVRSEYEKGGGVPCLFAVHQNGSGKARELAMSYASAVGGGRSGIIETTFKDEVETDLFGEQTVLCGGLVELIKNGYETLVEAGYEPEMAYFETVHEVKLIVDLIYEGGIANMNYSISNTAEYGEYITGPKIINKEETKKRMKEVLTDIQSGKFTKQWMDECKNGQKNFLKTREKLADHPVEKVGAVLRAMMPWISKKKLVDSDKK

SEQ ID NO: 88450 - protein, 169 aa, Unknown
  Bacterial polypetide isolated from the Sargasso Sea
VGGGRSGIIETTFKDEVETDLFGEQTVLCGGLVELIKNGYETLVEAGYEPEMAYFETVHEVKLIVDLIYEGGIANMNYSISNTAEYGEYQSGPRVVNKEETKKRMKEVLTEIQSGKFTKEWMDECKNGQKNFLATRAKLAEHPVERVGAELRAMMPWISKKKLVDSDKS

SEQ ID NO: 88451 - protein, 253 aa, Unknown
  Bacterial polypetide isolated from the Sargasso Sea
QQEIYQSQIHDNIKNGAALAFAHGLNIHFQLITAREDLDVFMVAPKGPGHTVRGEYLKGGGVPCLLAVDKNVSGNAKEIGLAYASALGGGKSGIIETTFKEECETDLFGEQTVLCGGLMSLVRNGFETLVEAGYAPEMAYFECLHEVKLIVDLMYEGGMANMRYSISNTAEYGDYTRGPRVVPNEATKAEMKKVLSEIQDGTFTKEWMAEHKSGQIKFKQMRDQGAKHQIEEVGAKLRSMMPWIASNKLVKDI

SEQ ID NO: 88452 - protein, 211 aa, Unknown
  Bacterial polypetide isolated from the Sargasso Sea
KIGALSGPNLAKEIAENKVAGTVIASEFDEVNFEIKTMLSSDTFKVFSSQDLQGVELAGALKNIYAICCGIAHEKSVGENALGLIITRSMAEMSRFAVAKGANPITFLGLAGMGDLMATCTSKLSRNFQLGELLARDYSFTDAKNKVGQVAEGARTLEVVYHEANKMNVSMPLVNSLYKILYANASSDELIQDLLEHPNEVDVEFTYQDKL

SEQ ID NO: 88453 - protein, 272 aa, Unknown
  Bacterial polypetide isolated from the Sargasso Sea
IKATTNQKDVLKLSHVIISIPSSSVRGFFKKNKNSVGNSTSFLIASKGLERGSFKSLSEILHEELSPYAKLSVLSGPNLASEIIEGMTSACVIASKNKKFSKEFLEILDQQNFKVFLNDDVKGIELSGALKNIYAIVSGLSDGLGNKKNTKAMILTRSLVEMSHLFQRLKLNKLTLIGLAGVGDLIATSSSEKSRNYSFGYLLGKGKSRQEAKKLINQVIEGEKTLKTVYEKILELNLEMPIVEKLYNIVFKKSPVRDSFDKMIIESDGKDL

SEQ ID NO: 88454 - protein, 204 aa, Unknown
  Bacterial polypetide isolated from the Sargasso Sea
AKLAILSGPSFAIEVAKKKPTAVTVASKNQNEAKKLAKLINSKIFRCYYSNDIIGVQFGGIIKNILAIASGIVEGQNLGLNARAALISRGLVEMKRIGVAYGAKEFTFNGLSGLGDLMLTCNANLSRNFTTGLLIGKGKKIKQVIKFKKTVSEGVLNSKTIFKLSRKKKIEMPVCEAVYKILYKRNKIKETIGKILSRDIKKET

SEQ ID NO: 88455 - protein, 282 aa, Unknown
  Bacterial polypetide isolated from the Sargasso Sea
MSYENNIAVLGAGSWGTAIIKMLCENVNEVLWYVRNSDHANEIIKLKRNPKYLKNLDIDVNKLVISSDIEMIIQQSNIIILAIPSPYINESLEKYKSILNQKIIFSGSKGVIPESHLVITDHLNKYYNIPYKNLGIISGPTHAEEIANEKLSYLTIGSSNKDICDFLSEKLKSSYIKTSISKDVIGIEYSAALKNIYSILVGISIGLGYGDNFISVLISHCSKEMIKFIKSIDNVKRDFSHSAYIGDLLVTTYSSFSRNRTFGKMIGEGHSVNESISEMSMM

SEQ ID NO: 88456 - protein, 296 aa, Unknown
  Bacterial polypetide isolated from the Sargasso Sea
RVNNITVVGVTTWGVTLGVLAGQSSNNEISILSRTEIEATKLSTENECSRFLPGVKFPDGCRFTHYADKALEHANVVIVAVPSHTFRENIIHIADAIPSDAILVSATKGLEMPQKLRMTEIVAQEISQEICDGMCVISGPNLAKEIVEGKPSSSVVASINESNAELVRDIIMRPTFRIYTSKDVSGVELCGTLKNIIAIGAGIVDGLGLGDNSKAAYITRGIAEITRLGVALGASSSTFAGLAGVGDIVATSFSKLSRNRYLGEQIAHGKTIKEITGNMHNVVEGIQTTRAAVELG

SEQ ID NO: 88457 - protein, 138 aa, Unknown
  Bacterial polypetide isolated from the Sargasso Sea
MKNVIAIAAGIVYGLELGENARAAILTRGLAETAKLAKGLGGQTETVFGLAGAGDMALSSLSMTSRNFSWGFSLAKKKPFDDKLTEGLNSSKMAIKIAKKIKIEMPITELVSKADNKNFDLQTEVENMMKRPPKLEWL

SEQ ID NO: 88458 - protein, 192 aa, Unknown
  Bacterial polypetide isolated from the Sargasso Sea
MSRVAEVGVLGAGAWGTALATVAARNNHRVVLWDIDPAIADSINKVHKHPFALSGVKLNPLIRGTPHIEEIGSCPLILAVAPAQLMRSALTQLAEHLESTSRLTLCSKGIEKNTGQLMTSIAEETAPDARPVILSGPTFAEEVALGLPTAITLAAKSPSDAHYVAQIMGSEKFRTYVSSDPIGAQVAGATKN

SEQ ID NO: 88459 - protein, 231 aa, Unknown
  Bacterial polypetide isolated from the Sargasso Sea
ISASKGLSEDGKTLTKMIASEIKIDSSQIGVITGPNLATEILAGKPATTLLSFTDLNKANSIRDNFSSKNFRVYSGDDVVGAEIGGALKNIIAIGSGIIDKLELGDNAKSAFITRGLREITRFGTYYGAKEYTFYGLSGIGDLFTTCSSSLSRNWQLGYNLASGMTYNEFKTNTKLTVEGANTTKIVNMISQKKNIDMPITNMTYKVLEENYDPEIAIKEFMSRDLSQERN

SEQ ID NO: 88460 - protein, 191 aa, Unknown
  Bacterial polypetide isolated from the Sargasso Sea
MKNKKIAVIGGGSWGTALSLHLAEKFKQVNLWVYEKELCEIMLKERENRWFLPGILLPQNIIPDTSLQKVLHDQVIILLVVPTPKIRDITNQLKSFVNPETLIINGSKGIENDSLIPCHKIIEDSLNIQCKIATISGPTFAKEVATKMPSALLAASKSTNTAKIIQKMFSSNNMKVFTSTDIMGVEIGGAL

SEQ ID NO: 88461 - protein, 144 aa, Unknown
  Bacterial polypetide isolated from the Sargasso Sea
MSKLQKVAVLGGGSFGTVLANLAASNGYKVSLWVRDSEQALRINSEGANTSYHPELKLSENILASDDLNEVVKDVSIVFIATPSIIFEKIVNRLSNYIHGDAFLISCTKGILENPFRLLSEVISKDCKNPIGVLSGPNLAKEIA

SEQ ID NO: 88462 - protein, 128 aa, Unknown
  Bacterial polypetide isolated from the Sargasso Sea
NAIGLILTRSMAEMSRFAVAKGANPITFLGLSGMGDLVATCMSNLSRNYQLGFNIGSGMTLLEAKNKVGQVAEGVRTLEIVRNESSRLNIKMPLVESMYNIIYEEASPESIIDDLLNNPHEVDVEFKH

SEQ ID NO: 88463 - protein, 271 aa, Unknown
  Bacterial polypetide isolated from the Sargasso Sea
MTFLKTNPFIHDVILDKRLPKFNLIYLYFLMRKIKKLKISKVYDLQNSSRTNFYKRILFPNSNLNVWSSSETTLPNDKTKKEFDKKSVLERFNHQMQTSEINTKHTMLPDFSWSCTDISKIKSEYKLEKYIVLFPFCSPHLAQKKWPYYNELIEKIKNHYNDEYKVVVAPGPNEIADAKEINTLCVLDNGKALDISQLSSLIKKSSFVIANDTGPAHMAAHLNSKGLTLFGSHTTAYKVSIERENFKAIQVTDLSKLTAEKVFEKLTNLLI

SEQ ID NO: 88464 - protein, 190 aa, Unknown
  Bacterial polypetide isolated from the Sargasso Sea
MNKKTISVLGGGSWGTVLANLAAKNNNEVFLWMRDSETCRSINEEKINFKYLPNYSLEENLYATTEIEKISSSDIVIYCIPSDSLREVVDESLNHLKTNSYLISATKGVEPGSFLLMSQIVEDITKNNHKVGVLSGPNLAGEIAEEHLTGTVIASLHEDLSSALVDAYQTPFFQVYVNSDPYGVELGGAL

SEQ ID NO: 88465 - protein, 95 aa, Unknown
  Bacterial polypetide isolated from the Sargasso Sea
MKIILASKSGVRKKILDENNINCEVIVSNVDEDEIKNSLLAEGADPLTISKNLAEIKSIKVSSNNPDKLVLGADSVISLENKLINKPISREEAMS

SEQ ID NO: 88466 - protein, 185 aa, Unknown
  Bacterial polypetide isolated from the Sargasso Sea
ASKHADLCHLGREILSSSTFKIYTSADTQGIELAGALKNIYAIISGYCHSLDVGENAIGLILTRSMAEMSNFAVSKGANPITFLGLAGMGDLVATCFSKLSRNYQFGWAIGEGLDIEAAKNKVGQVAEGLNTIKIIHSEISSSEIKMPLVSGMHEILFNNGSKELLLEQIINSEIYVDVNFDVES

SEQ ID NO: 88467 - protein, 305 aa, Unknown
  Bacterial polypetide isolated from the Sargasso Sea
LRINSEGANATYHPELKLSDNITADDNLASVVAESQYILVATPSIIFEEVISRLEPLISSSVTVISCTKGIKPDPFRTMTNIINQHLGHIIGNRIGALSGPNLAKEIAEEKVAGTVIASENENINIEIKSMLSSKTFKVFSSQDTQGVELAGALKNIYAICCGIAHAKLVGENALGFIVTRSMAEMSRFAVAKGANPITFLGLAGMGDLMATCTSKLSRNFQLGELIAEDLSLIAAKEKVGQVAEGARTLEVVYHEANKMNVSMPLVNSLYKILYSDSSSDQLIQDLLDHPNEVDVEFTYKEKKL

SEQ ID NO: 88468 - protein, 255 aa, Unknown
  Bacterial polypetide isolated from the Sargasso Sea
MNKIAIIGGGAWGYALASAISKKGFYPFILTSSTKRAEQINNEFLLRFKSLESKNEPIAHSDPVKVFGNASIIILATEVNRVLSFTNQINNYSKENCHVLIASKGFGPNGELLSNILQEGLKNKKIGVLSGPSFAQEVIDYKPTAVVVAGELETIEKSTELFHTPEFRVYGSKDIIGTSVSGAMKNVIAIAAGIVYGLELGENARAAILTRGLAETAKLARGLGGKTETVFGLAGAGDMALSSLSMTSRNFSWGF

SEQ ID NO: 88469 - protein, 193 aa, Unknown
  Bacterial polypetide isolated from the Sargasso Sea
DKTKEEFDKKSVLERFNHQLQTSEINTKHTLLPDFSWSCTDISKIKSEYKLDKYIVLFPFCSPHLTQKKWPYYNELIEKIKSQYNDQYKIILAPGPDEINESKNINALCVLDNGKALDISQLSSLIKDSSFVIANDTGPAHMAAHLGAKGLTLFGSHTTAYKVSIERENFKAIQVNDLAKLSTEKVFEKINLN

SEQ ID NO: 88470 - protein, 249 aa, Unknown
  Bacterial polypetide isolated from the Sargasso Sea
MNKIAVIGGGAWGCALASAILKKGYYPFILTSSTKRAEQINNEFLSRFKNLESRNELIAHSDPVKVFGNASIIILTTEVNRVLSFINEINNYSEENCHVLVASKGFGPNGELLSDILQERISNKKIGVLSGPSFAQEVIDYKPTAVVVAGEPETIEKSTELFHTPEFRVYGSNDIIGTSVSGAMKNVIAIAAGIVYGLELGENARAAILTRGLAETAKLAKGLGGQTETVFGLAGAGDMALSSLSMTSR

SEQ ID NO: 88471 - protein, 232 aa, Unknown
  Bacterial polypetide isolated from the Sargasso Sea
PEPFRTMTDIINQHLGHLIGSRIGALSGPNLAKEIAEEKVAGTVIASEDESINIEIKSMLSSRTFKVFSSHDIQGVELAGALKNIYAICCGIAHAKLVGENALGFIVTRSMAEMSRFAVAKGADPITFLGLAGMGDLMATCTSKLSRNFQLGELIAEDFSLIDAKEKVGQVAEGARTLEVVYHEANKMNVSMPLVNSLYRILYSKSSSDQLIKDLLDHPNEVDVEFTYKKEK

SEQ ID NO: 88472 - protein, 208 aa, Unknown
  Bacterial polypetide isolated from the Sargasso Sea
MTSRQASSATRVSVLGAGSWGTTIASLMARNAETYLWARNPSVEEEVNESHTNQRYLPDASLSPRLQATSNLTEAARRAEVLVMAIPSQNYREVLTMAAPHIGEGVPIVSLTKGLEPSTRRRMTEVTAEVCPGHACGVLTGPNLAREVIAGFAAACVLAMPDEYSARTLQPLFHTRVFRVYRNTDVIGSELGGVLKNVIAIAAGMGDG

SEQ ID NO: 88473 - protein, 139 aa, Unknown
  Bacterial polypetide isolated from the Sargasso Sea
AAVSAAAAFMREAGAKRVLPLPVSAPFHTPLMQPAATVMAEAFQDVALSDAQIPVISNVDAQPHRKATDIRRLLVRQVSEPVMWTQCVMTLLQAGCVQFLECGPGKVLTGLVKRISRDASCIALEDPVALTTAVKECSV

SEQ ID NO: 88474 - protein, 293 aa, Unknown
  Bacterial polypetide isolated from the Sargasso Sea
FNLWAKESAVVNSINSSHENDIFLPNVKLSDLIVAFNNLEQITNCDLLLIVSPAQYTRETLLEVSKTLKSKTPIILCSKGIEISSLSLMSQIAESIFPDNPIAILSGPSFAIDVVNNKPTAVTLACKDLKIGKNIAESISLPTFRPYLSEDLIGAQIGGATKNVIAIAAGVVEGQNMGDSARAATIARGFSEIKRLAIAMGAKEETLAGLSGMGDLLLTCNSKTSRNYSLGIKLGEGQTIEEATNGLSTIAEGMYSAKAITKLAVQNKIDTPITQAVNDLIEEKYSVTDIIDN

SEQ ID NO: 88475 - protein, 128 aa, Unknown
  Bacterial polypetide isolated from the Sargasso Sea
NARAALITRGLAEMARLNLAKGGRAETIMGLSGLGDLSLTCTSPQSRNYSLGIALGKGKDLETVTGERSSVAEGVFSAAAVSTLAAKLRIDMPISESINSVVNHGAQVEEVIASLLSRQFRWETDDRR

SEQ ID NO: 88476 - protein, 249 aa, Unknown
  Bacterial polypetide isolated from the Sargasso Sea
MSNILIIKHGSLGDIAQACGAIQDISENHNNDQIYLLTTKPYFDLFKKNPHLTDVILDKRLSRFNLIYIYFLMRNIKKLKISKVYDLQNSSRTSFYKKILFPNSNFNVWSSSETTLPKDKTKEEFDKKSVLERFNHQLQTSEINTKHTLLPDFSWSCIDISKIKLEYKLEKYIVLFPFCSPHLTQKKWPYYNELIEKIKNKYNDQYKIVIAPGPDEMNESKDINALCVLDNGKALDISQLSSLIKDSSF

SEQ ID NO: 88477 - protein, 247 aa, Unknown
  Bacterial polypetide isolated from the Sargasso Sea
SYFRENKKYLKTFHLPKNITPTHDLKLSCFGSDAIVMCIPAQKTSFFLEKFHPFLPRKPLILCAKGIEEKTLLLQSDIVKNFLPKNEIAILTGPSFAQEIANGKPTALALACSDQRTGQKLQTVFSTKTIRVYLNADVIGCQLGGSLKNVIAIACGVATGLNLGESARMALMTRGFSETCRLGLAMGGSMETFLGLSGMGDLALTCNSPHSRNFKLGIALAKNKPLSKHTTVEGILTTKAACELAKK

SEQ ID NO: 88478 - protein, 281 aa, Unknown
  Bacterial polypetide isolated from the Sargasso Sea
VFDSNNVRATCAPKDLNDCSHIFITTPSHDFSKVVEKFVFEGDEKVVITCTKGLEDRTSRLMSEILLGDFKLDENKLVVLSGPNLASEILNKETTATVLASKSKSVLEEVNNFLKTDYFIPYYSNDTSGVELAGALKNIYAIVSGYFNGMNVGQNTMGFLLTKSLEEMRLYSQSRGANLSTFLGLAGVGDFFSTALSPDSRNHQFGNYLSKGFSVEESLQRVGDIVEGLRTSKIVYEDCKRKNLNLKILKFLNDVYSGKEDYEGAKKLLFSDKFQSDVSKD

SEQ ID NO: 88479 - protein, 170 aa, Unknown
  Bacterial polypetide isolated from the Sargasso Sea
EINTKHTLLPDFSWSCTYISKIRSEYKLEKYIILFPFCSPHLTQKKWPYYNELIEKIKNQYNDQFKIVVAPGPDEINDSKDINALCILDNGKALDISQLSSLIKNSSFVIANDTGPAHMAAHLGAKGLTLFGSHTTAYKVSIERENFKAIQVNDLTKLTTDKVLEKINLN

SEQ ID NO: 88480 - protein, 326 aa, Unknown
  Bacterial polypetide isolated from the Sargasso Sea
MSSYSNICFYGGGAWGQALAITLASLGIKSTLIVSDKIREVDINNHISKRFPEAKLSPLIKASIDKNQIIKTCDLIFITTESKRVLDAINQVAFLSDKNVHVVITSKGFATNKGETFSEVVESDFPNMKLSILTGPTFADEIANNQPAAAVIANKVIEQANSICELFHHSNLRLYPSNDPQGVSIAGAVKNIIAIGAGIIEGLKLGDNAKAALITRGISETSELIEKAGGNYTSAFGLAGIGDMSLTCSGPHSRNMAYGMKIVKNNNEPAKELVEGLNAINATIALSEKLELELPIMTSIKKILNKEANVDEIIKKLLSRPIKNEI

SEQ ID NO: 88481 - protein, 182 aa, Unknown
  Bacterial polypetide isolated from the Sargasso Sea
MQIFVVSEEKFCLSSTFKIYTSSDIKGIELAGALKNIYAIISGYCHSLDVGENAIGLILTRSMAEMSNFAVIKGANPITFLGLAGMGDLVATCFSKLSRNYQFGWAIGEGLDIESAKNKVGQVAEGLYTIKIIHNEVSSSEIKMPLVSGMHEILFNNGSKELLLEQIINSEIYVDVNFDVES

SEQ ID NO: 88482 - protein, 223 aa, Unknown
  Bacterial polypetide isolated from the Sargasso Sea
MNRKTISVLGGGSWGTVLAHLASLNGNKVTLWMRDEEIAKEINQTHINQRYLPRLNLESNLVATPHIEEVSDSDTIIFCIPSDAFREVSSLAANFIQESSYLITATKGVEKDGFSLMSNILEEYYPKNPIGVLSGPNLAEEIANHHLSGTVIASKDKDLRRETIEDLSTDYFKVYENDDPYGVEMGGALKNIYAIACGIAAGLNSGENTIGMIMTRGLGEMGR

SEQ ID NO: 88483 - protein, 159 aa, Unknown
  Bacterial polypetide isolated from the Sargasso Sea
SFRASQLRVYASDDPLGVAIGGTMKNVIAIAAGCAIGLGLGDNARAAIITRGLAEMARLAAAEGAEAETIYGLSGAGDLALSCAGPHSRNMAYGLALGRGETPDARLAEGRNTVSALAARGRETRVELPITNGVDRVVNGGAPLGDVVASLLARPAGSE

SEQ ID NO: 88484 - protein, 301 aa, Unknown
  Bacterial polypetide isolated from the Sargasso Sea
MVLTIGVLGGGAWGSTLAGLLAEAGHHVQIWRRCQGAEGLQALEGVELLVGATALVGVKGIAEEMRSWASRPLLSCSKGLDPASSKTASALWSVSCPQWPLVVLSGPNLASELQQGLPAASVLAGHDDALLTELQKELSTEQLRLYRNNDPLGTELAGGLKNVMAIAAGICDGLQLGANARASLLTRALAEMATVLDAMGGCQETLYGLAGIGDLLATATSPLSRNYRFGVYLAEGLNRDDALKRVGATVEGVPTCEAIAALGQQQQWSLPITENVASLLRAELSPTDALSQLMRRELRCE

SEQ ID NO: 88485 - protein, 187 aa, Unknown
  Bacterial polypetide isolated from the Sargasso Sea
MFGDIARFLLNTVFTLFGAALLLRAWLQVVRMPPYNPVTNAVLQVTNWIVLPLRHVLHSTRNIDWASLAAALIAAIVYVVLMVVLTGADPLTLVPTLLIVAVLTVIKWALNLIIWMTILMALLSWLNPRSPAMPILYQLTAPFLNPLRRVVPQLGGLDLSPILLFVIVQVLLMVVTRAAVQLTYFVI

SEQ ID NO: 88486 - protein, 334 aa, Unknown
  Bacterial polypetide isolated from the Sargasso Sea
MIQDNYRNISIVGAGAWGTALAEVMSRQGHQINLWAKESAVVNSINSSHENDVFLPNVKLSDLIVAFNNLEQITNCDLLLVVSPAQYTRETLLEVSKTLKSETPIILCSKGIEISSLSLMSQIAESIFPDNPIAILSGPSFAIDVVNNKPTAVTLACKDLKIGKNIAESISLPTFRPYLSEDVIGAQIGGATKNVIAIAAGVVEGQKMGDSARAATIARGFSEIKRLAIAMGGKEETLAGLSGMGDLLLTCNSKTSRNYSLGIKLGEGQTIEEATNGLSTIAEGMYSAKAITKLAVQNKIDMPITQAVNDLIEEKYSVTDIIDNLLNRPIKEEN

SEQ ID NO: 88487 - protein, 110 aa, Unknown
  Bacterial polypetide isolated from the Sargasso Sea
KLEEIIPQSQIIFLATPSKIINDVLERLSGFSMDNKMIISCTKGINENPFMTMSQTIEKHFNNPSIKVGVLSGPNLAREIADKKVAGTVIASKHADLCSLGREILSFKHL

SEQ ID NO: 88488 - protein, 275 aa, Unknown
  Bacterial polypetide isolated from the Sargasso Sea
MSDLIVAFNNLEQITNCDLLLVVSPAQYTRETLLEVSKTLKSETPIILCSKGIEISSLSLMSQIAESIFPDNPIAILSGPSFAIDVVNNKPTAVTLACKDLKIGKNIAESISLPTFRPYLSEDVIGAQIGGATKNVIAIAAGVVEGQKMGDSARAATIARGFSEIKRLAIAMGGKEETLAGLSGMGDLLLTCNSKTSRNYSLGIKLGEGQTIEEATNGLSTIAEGMYSAKAITKLAVQNKIDMPITQAVNDLIEEKYSVTDIIDNLLNRPIKEEN

SEQ ID NO: 88489 - protein, 311 aa, Unknown
  Bacterial polypetide isolated from the Sargasso Sea
MSNILIIKHGSLGDIAQASGAIQDISENHNNDQIYLLTTKPYFDLFKKNPHLTDIILDRRLSRFNLIYLYFLMRKIKKLKISKVYDLQNSSRTSFYKKILFPNSNFNIWSSSETTLPKDKTKEEFDKKSVLERFNHQLQTSEINTKHTMLPDFSWSCNDISKIKSEYKLEKYILLFPFCSPHLTQKKWPYYNELIEKIKGQYNNQFKIAVAPGPDEINDSKHINALCILDNGKALDISQLSSLIKDSSFVIANDTGPAHMAAHLGVKGLTLFGSHTTAYKVSIERENFKAIQVNDLTKLTTDKVLEKINLN

SEQ ID NO: 88490 - protein, 151 aa, Unknown
  Bacterial polypetide isolated from the Sargasso Sea
MAGALKNIYAVICGMAESLKVGENAIGLILTRSMAEMSRFAVAKGANPITFLGLSGMGDLVATCMSTLSRNYQLGFNIGSGMSLSKAKESVGQVAEGVRTLEVVLKESSKLNIKMPLVESMYNIIYNNASPNTLIDDLINNPSEVDVEFNY

SEQ ID NO: 88491 - protein, 118 aa, Unknown
  Bacterial polypetide isolated from the Sargasso Sea
MELKWGGVPETFSGMAGLGDLVLTGTGSLSRNHTLGFRIGEGLSPEEIFQNQLTVTEGAATSVSLQSLSLHHQVEMPICEAVYRILYQGQAPMEALTQLLERQMPESESIDWGQNSSD

SEQ ID NO: 88492 - protein, 247 aa, Unknown
  Bacterial polypetide isolated from the Sargasso Sea
MQNLHANIYGAGSWSQAIAHVLVKNINQITVIYRNDNNFVKSGENKKINFSNDLLSSINSNNDPLIVCSPVSSLKDLGENLKKIKFSRPVLLCCKGIESNTGKFPSEILEEFISLDQIAILTGPSFSDEVLNDKPTAVIISGQKAEVIELFTTMFHSINFRVYNSNDVIGCQLGGALKNILSIAVGIAEGLKLGANAKAALISRGILEMKYLGDKVQCDPLTIFGLSGLGDIVLTANDDLSRNRSFG

SEQ ID NO: 88493 - protein, 273 aa, Unknown
  Bacterial polypetide isolated from the Sargasso Sea
LRLPGYILPQNIIVTNDINQMENCSIILIAVPMQQLRSVVELHRSRLEGKILVACCKGFEVSTGLGPTSILEMASNKTAVLTGPSFATDLASGFPTALTVASKVEGLAQYIQSELGTETLRLYWSDDPIGAEFGGALKNVIAIGCGVTIGAGYGSSSRAALMTRGYSEIISIAPYFGAKPETLSGLSGLGDLSLTCMSSESRNYRYGLALGKQQSFDKNITVEGTSTSSAIILKAKEFKLDTPVMAAINNLVVGKVSLTVAIQSLLSRPPKKE

SEQ ID NO: 88494 - protein, 332 aa, Unknown
  Bacterial polypetide isolated from the Sargasso Sea
MGETSFLVFGAGAWGTALSLQLHKSGNEVFLSSFDQTNLKNIASTRINHKYLPGVRLPDDIHVMEATKDLLGEIDCVVICVKSPYFRKALSELSQAPASFKVLWATKGFDLESGALLSKIVSEYFDADIEHGVLSGPTFAEELALSKPTAITLATNTINDPSRLASKMSNENLRVYISADPIGVQLGGILKNIVAIASGISDAMEMGANARAALITRGAEEMKALGTSMGANESTFSGLSGIGDLVLSSTDDQSRNRQLGIHIGRGGNLDSFREEHNGTPEGVHAVSALVNTGIVNDDDFPITSRVYKILFEGLSAKEAGAELMNRPLRFEN

SEQ ID NO: 88495 - protein, 273 aa, Unknown
  Bacterial polypetide isolated from the Sargasso Sea
MILDKKYKETPIGVIGAGAWGTAISKLLCKNGSDVKIWCHSPETAKDINTNHTNSKFLSDIKLPESLQATIDLIEIVKSCRILVSTVPSHVTRKIAKIINPNITTNHFLVILSKGIEENSLALLSEIFMEELDTLPKIAVISGPTFAREVAMDLPSAALLACDDNNTKIILQKIFHSDRFRLYLSNDMIGAQIGGAIKNVVAIASGIADGMKLGLNARAALICRGVAEMSRLGVKMGGSPETFSGISGVGDLILTATGNLSRNYSLGYKLGQG

SEQ ID NO: 88496 - protein, 311 aa, Unknown
  Bacterial polypetide isolated from the Sargasso Sea
MSNILIIKHGSLGDIAQACGAIQDISENHNNDQIYLLTTKPYIDLFKKNPHLTDVILDKRLSRFNLIYLYFLMRKIKKLKISKVYDLQNSSRSSFYKKILFPSSNFNTWSSSETTLPKDTTKEEFDKKSVLERFDHQLQTSEINTKHTMLPDFSWSCTDISKIKSEYKLEKYIILFPFCSPHLAQKKWPYYNELIEKIKNKYNDQYKIVVAPGPDEINESKDINALCILDNGKALDISQLSSLIKYSTFVIANDTGPAHMAAHLGAKGLTLFGSHTTAYKVSIERENFKAIQVNDLAKLSTNKVLEKINLN

SEQ ID NO: 88497 - protein, 89 aa, Unknown
  Bacterial polypetide isolated from the Sargasso Sea
MSSQSLLVQGAGSWGTALAMVLSRNCYQIYLWDTNLDTIKAIRSNRCNERYLPGQKIPENIIPIESIEEAPDTINKVICAVPSHAVRSS

SEQ ID NO: 88498 - protein, 319 aa, Unknown
  Bacterial polypetide isolated from the Sargasso Sea
MTFGIIGSGSFGTALSISLSSTNKKLILWTRNQDVVNSVQEIRENRLRLPGYILPQNIIVTNDINQMRNCSIILIAVPMQQLRSVVELHRSSLEGKILVACCKGFEVSTGLGPTSILEMASNRTAVLTGPSFAADLASGFPTALTVASKVEGLAQYIQSELGTETLRLYWSDDPIGAEFGGALKNVIAIGCGVTIGAGYGSSSRAALMTRGYSEIISIAPYFGAKPETLSGLSGLGDLSLTCMSSESRNYRYGLALGKQQSFDKNITVEGTSTSSAIILKAKEFKLDTPVMAAINNLVVGKISVSVAIQSLLSRPPKKE

SEQ ID NO: 88499 - protein, 295 aa, Unknown
  Bacterial polypetide isolated from the Sargasso Sea
MKIGIIGSGKFGTSLAFNFAKNFKKVYLWNRTQTNKNELVEKINNLNKGILIKKLNPNLKIIKSLKKVAENSDVILLCINAQSMFDFLAKNFNSLKNKPLVFCSKGIDTKYCLFQTEIAERFLDKKLFSVLSGPGFASDIVREKPIALSLACKNVNLGKKLQYILSSQSIRIYLNNDLIGTQLGGALKNVIAIACGIADANELGEGAKSAIITRGFSEIRQIGKTFGCKIETLFGLSCLGDLTLTCNSKLSRNYNFGLKIGNNIKNKKDNKETIEGEKTASAAVLISKKYQLDLP

SEQ ID NO: 88500 - protein, 188 aa, Unknown
  Bacterial polypetide isolated from the Sargasso Sea
AGTVIASPNESLINIVKSVLSSETFKIYSSKDMQGVEMAGALKNIYAVICGMAESLKVGENAIGLILTRSMAEMSRFAVAKGANPITFLGLSGMGDLVATCMSTLSRNYQLGFNIGSGMSLSKAKESVGQVAEGVRTLEVVLKESSKLNIKMPLVESMYNIIYNNASPKTLIDDLINNPNEVDVEFNY

SEQ ID NO: 88501 - protein, 246 aa, Unknown
  Bacterial polypetide isolated from the Sargasso Sea
MNKNYKICVLGGGSFGTVLANLAASNGHDVSLWVKDSDKALRINSESRNTEYHPELKLSNNIIASEKLEEIIPKSEIIFVATPSKIINDVLDRLSDFSMDNKMIISCTKGINEKPFMTMSETIEKHFNNSSIKVGVLSGPNLAREIADEKVAGTVIASKHADLCHLGREILSSSTFKIYTSADTQGIELAGALKNIYAIISGYCHSLDVGENAIGLILTRSMAEMSNFAVSKGANPITFLGLAGMG

SEQ ID NO: 88502 - protein, 291 aa, Unknown
  Bacterial polypetide isolated from the Sargasso Sea
MVDNRTNSCYLPNIVLPENINIFSNIEDSVRDANTVIVALPSETVRDTFLQLKKTINSQAGISWASKGLEVKSGLLIHSVCEEIFGKRHPMAVISGPSFAVEVANKKPTAVTIASSSKNFRNQLAEDLSDQNFRVYTSDDIIGAEIGGAIKNIIAIGAGISDGLNYGENAKIALITRGLHEIQKLGVALGAKKETFSGLSGAGDLFLTCTSNLSRNRRLGLALANGSNLSEFESKTMQVVEGVKASEAVHKLSKKMSISMPICEIIYQILFHQLDPKKAAIMLMSRDLQDE

SEQ ID NO: 88503 - protein, 172 aa, Unknown
  Bacterial polypetide isolated from the Sargasso Sea
MEILGTDFFRVYENDDPYGVEMGGAIKNIYAIACGIADGLNSGENTVGMIMTRGLGEMSRLAVELGANPQTFLGLSGVGDLITTCASPLSRNHKFGKYIGEGLSVESATHEIGQTVEGLKTLKVVKVLADERNINMPIVDSLYKIIYKGKDLNGSIHNILGEDQIKDVEFSK

SEQ ID NO: 88504 - protein, 325 aa, Unknown
  Bacterial polypetide isolated from the Sargasso Sea
FWTVLANLAASNGSNVALWVRDSEQALRINSEGANSIYHPELKLSDNIMASEDLYEVVKNADLIFIATPSKIFEKIIIRISKIVKRDCYVISCTKGILDNPFRTMTEIISSNNIKHFGVLSGPNLAKEIAENKVAGTVIASNDQQMITSVKEVLSSDTFKIYSSNDIQGVELAGAMKNIYAITCGLAESLNVGENALGLILTRSMAEMSRFAVAKGANPITFLGLSGMGDLVATCTSVLSRNYQLGFNIGKGMNLIDAKKSVGQVAEGIKTLEVIRNESLNLNIKMPLVESMYNIIYKEDSPNVLINDLVNNPNEVDVEFRYKDE

SEQ ID NO: 88505 - protein, 171 aa, Unknown
  Bacterial polypetide isolated from the Sargasso Sea
KYVQGLFSTNNFRVYTNSDIKGVEIGGSAKNVIAIAAGFCDGAGYGDNTKAALITRGLNEISLLGKELGAKSSTFFGLAGIGDLMVTCNSIHSRNRRLGELVGRGEDLSKILSQSHMVAEGVKTSYSIYSLRAKLNIEMPICESVYRVLYNNSNPIKEVDRLMTRNLRSEN

SEQ ID NO: 88506 - protein, 246 aa, Unknown
  Bacterial polypetide isolated from the Sargasso Sea
LLLLPTTTTTTTTTTTTTTTTTTTTTTTTSTTTTTTTTATTKTSERSRNRALRLQRQCQPAESGPGHVATGVSIQVPDTQPESGPSHAATAVSIRDIQPKSGPGHGVVSIPDTQPESGPSHAAGVVAIPDIQPESGPGHAADATSTQAREIENYFATPEYRDTLDELLEKAVEPLDAPGHGSGHVAVGASSLSSSWRPEDAPGHGPGHVAIEPASSSFSRKRRLDERSSGSDDDSDGSSELGADRT

SEQ ID NO: 88507 - protein, 236 aa, Unknown
  Bacterial polypetide isolated from the Sargasso Sea
MIKTYWWATKGFDPSNGDLLSSMVDEVIGASTKTAVLSGPSFAQELAGGKPAAITMATDTINNSALLAESMSNESLRIYLSSDPVGVQLGGGLKNVVAIAAGISDGLGLGANAKAALVTRGLDEITSLGILLGASEKTFMGLSGVGDLMLSSSDDKSRNRSLGLAIGRGLSFNDATKLQNGTPEGAHAIKTLVENSVINNKQPVLYSVYAALYSGAKLSAIVKGLMLRPIKEEGLR

SEQ ID NO: 88508 - protein, 265 aa, Unknown
  Bacterial polypetide isolated from the Sargasso Sea
MKNASMVFIATPSIVFEQIIERIRNLLEEDSYVISCTKGILGQPFRSLTDTIISDVGINIGVLSGPNLAKEIADNKVAGSVIASLDSDLVDSVKTVLSSATFKIYSSNDVQGVELAGALKNIYAIICGLAEAIEVGENAIGLILTRSMAEMSRFAVAKGANPITFLGLAGMGDLVATCTSRLSRNYQLGYNIGKGMDLNKAKEDIGQVAEGIRTLDVIKNESSELDIKMPLVESLYNIIYEEGQPHALISDLVKNPHEVDVEFKY

SEQ ID NO: 88509 - protein, 306 aa, Unknown
  Bacterial polypetide isolated from the Sargasso Sea
LSVSDFKKDFYPFILTSSTKRAKQINNEFLSRFKSLESKNELIAHSDPVKVFGNASIIILATEVNRVLSFTNQINNYSEENCHVLIASKGFGPNGKLLSNILQERLNNKKIGVLSGPSFAQEVIEFKPTAVVVAGELETIEKSIELFHSPEFRVYGSKDIIGTSVSGAMKNVIAIAAGIVYGLELGENARAAILSRGLAETAKLAKGLGGQTETVFGLAGAGDMALSSLSMTSRNFSWGFSLAKKQTFDDKLVEGLNSSKMAIKIAKKIKIEMPITELVSMADKKSFDLQTEVDNMMKRPPKLEWL

SEQ ID NO: 88510 - protein, 171 aa, Unknown
  Bacterial polypetide isolated from the Sargasso Sea
CLSKGLETSTCDMMSEIIPAGLGRDQPLAVLSGPTFAVELMQGSPTTIVAASEDEQLAVSVQQLFGSSCLRVNTSTDVTGVELSGAMKNVLAIAAGIVEGLELGNNSMAALVAQGVAEIRWLAGKMGARPETLAGVSGTGDIMLTWFVNLSRNRTVGVRLGAGETLEEVLG

SEQ ID NO: 88511 - protein, 209 aa, Unknown
  Bacterial polypetide isolated from the Sargasso Sea
MINNIAIIGGGAWGTALAHCIALTDKTIRLWAREPEVVETISKYNENKMFLPGIKLHSQIKPSSEILTVTKNSDLVILVVPSQYFRHVSNELMQCITDETPIIICTKGIETGTGLLMSEIISNFSPQNTIAMLSGPTFASEVALGKPTALALACGDKNITQKLSEVFNKTNLRPYISDDIVGAEIGGAVKNVIAIASGVTIGRGLGDNA

SEQ ID NO: 88512 - protein, 277 aa, Unknown
  Bacterial polypetide isolated from the Sargasso Sea
MKIGIIGAGKFGLVLARIAAENSNEVLIHSRRTNEVESLNTKNESLSGFSFNGMAISATQDLDRLNECDALLVTVASKDFIESISKLNYKTYEGKFVSCVKGFDQKSGKLMTEVLIDEFNIDSDNVFVLSGPNLSKELGNQELTGTVVAGEDDIFIDALCNALKTDYFLPFSSNDRYGVELGGALKNIYAILSGYFHKKGVGENTIGLLLTKCLSEMSIYSKARGANPATFLGLAGVGDFFSTALSSDSRNYRFGELLAEGHKPESALDKVGDTVKG

SEQ ID NO: 88513 - protein, 244 aa, Unknown
  Bacterial polypetide isolated from the Sargasso Sea
MLISTTKGIEPGNFKLMSQILHEESPSSGIGVLSGPNLAKEIASKHPTGTVIASNNEQIRETVKDVLRSDTFRVYTNDDMFGIELGGSLKNIYAIIAGLAASIGTGHNTNSMLVTRALAEMARFGRELGADPMTFLGLAGVGDLVVTCSTPLSRNYRIGQALGEGRSIEQALNEVDQVAEGVNTLKLVKEKADDLGVYMPLVNGLYRIIYDGQPINDIVSSLTLSEEALDVEFAAKDEKILNEI

SEQ ID NO: 88514 - protein, 133 aa, Unknown
  Bacterial polypetide isolated from the Sargasso Sea
DGLGLGLNARAALVTRGLAEMTRLGLALGGRPETFMGLTGMGDLLLTATGDLSRNRTVGMQLAQGRSLDDILHSLGHVAEGVRCARAVAALARAKGVDMPITFTVCEVLFEGLPAAKAVERLLQRDAKSESTR

SEQ ID NO: 88515 - protein, 182 aa, Unknown
  Bacterial polypetide isolated from the Sargasso Sea
NRVQDVLHSDRLRVYKSADIYGVELAGALKNIYAIICGMANGFSVGQNTIGMLLTRALAEMSRFAVAMGGNPFTFLGLAGVGDLLVTCSSPLSRNYQLGLKISRGMSVEEAIGELGQLAEGLNTLKLVHSKKNDMNVYMPLVDGLHRVLFDGDEIWSVVRGLMEAPEGPDVEFADPSIWPSR

SEQ ID NO: 88516 - protein, 278 aa, Unknown
  Bacterial polypetide isolated from the Sargasso Sea
PFILTSSINRAEQINDEFLSRFENLESRNELIAHSDPLKVFGNASIIILATEVNRVLSFINEINNYSEENCHVLIASKGFGPNGELLSNILQERISNKKIGVLSGPSFAQEVIDYKPTAVVVAGELETIEKSTELFHTPEFRVYGSNDIIGTSVSGAMKNVIAIAAGIVYGLELGENARAAILTRGLAETAKLAKGLGGQTETVFGLAGAGDMALSSLSMTSRNFSWGFSLAKKQPFDDQLTEGLNSSKMAIKIAKKIKIEMPITELVSKADNKNFDL

SEQ ID NO: 88517 - protein, 279 aa, Unknown
  Bacterial polypetide isolated from the Sargasso Sea
PELKFPKIVNFTNNISSAIRSANVIVLAIPSQSIRKLLTDNKSDFNQDQLIVNVSKGIEVDTLMTVSEVINDVLGTAYNKAVTLSGPSHAEEVVQNHPTTLVAASSDLEAAQKIQDLFASDMLRTYRNKDIKGVELGGSMKNVIAIAAGICDGIGYGDNSKAALITRGMAEITRLGKKMGGKRETFRGLSGFGDLIVTCLSRHSRNRQIGQAIGEGKTLKEIISDMNMIAEGIDTAKSVHQLQLKHNVEMPIHEAIYQVLFDNKNPKSAVTELMNRKVK

SEQ ID NO: 88518 - protein, 279 aa, Unknown
  Bacterial polypetide isolated from the Sargasso Sea
LKICVLGGGSFGTVLANLAASKGHDVSLWVKDSDKALRINSESRNTEYHPELKLSNNIIASEKLEEIIPKSEIIFVATPSKIINDVLDRLSDFSMDNKMIISCTKGINEKPFMTMSETIEKHFNNSSIKVGVLSGPNLAREIADEKVAGTVIASKHADLCNLGREILSSSTFKIYTSADTQGIELAGALKNIYAIISGYCHSLDVGENAIGLILTRSMAEMSNFAVSKGANPITFLGLAGMGDLVATCFSKLSRNYQFGWAIGEGLDIEAAKNKVGQVA

SEQ ID NO: 88519 - protein, 176 aa, Unknown
  Bacterial polypetide isolated from the Sargasso Sea
LVLASAKPSFLKKLQSDISMQNFRLYRTSDVIGVELGGALKNIIAIACGIAIGAKQGDSARAALMTRGFSEMITFAKAHGAKEKTLTGLSGLGDLSLTCNSEKSRNFVFGVSLGCQKPFNKNTTVEGVATAFAVSKKASSLGLEMPITSAVSALVEGSASIEEVIKSLLSRPTKEE

SEQ ID NO: 88520 - protein, 222 aa, Unknown
  Bacterial polypetide isolated from the Sargasso Sea
MKQRVHYLIPELKFPKIVNFTNNISSAIRSANVIVLAIPSQSIRKLLTDNKSDFNQDQLIVNVSKGIEVDTLMTVSEVINDVLGTAYNKAVTLSGPSHAEEVVQNHPTTLVAASSDLEAAQKIQDLFASDMLRTYRNKDIKGVELGGSMKNVIAIAAGICDGIGYGDNSKAALITRGMAEITRLGKKMGGKRKTFRGLSGFGDLIVTCLSKHSRNRQMDRQS

SEQ ID NO: 88521 - protein, 156 aa, Unknown
  Bacterial polypetide isolated from the Sargasso Sea
PYGVEMGGALKNIYAIACGIADGLNSGENTVGMIMTRGLGEMSRLAVDLGANPQTFLGLAGVGDLITTCASPLSRNHQFGKMIGTGLSVDEAKIKIGQTIEGLKTLKVVKEISDEHEVEMPIVDSLFKIIYKGDSLDGSIQKVLGKDMIKDVEFIK

SEQ ID NO: 88522 - protein, 277 aa, Unknown
  Bacterial polypetide isolated from the Sargasso Sea
MSKVGIIGAGAWGTALACAMKRAGNEVIIYAHEKETADAINSKHINITFLPEVTLDSTIRATNSLEKATKADAVLLVSPSQYFRKSCEMLAGIWRQGVPAIICTKGIETQTSSLMSEIVRETMPLVRVAILSGPTFAMEVADDLPTAMTLATDDETLGKLLMEVMTTKHFRIYRSRDVIGAQIGGAVKNVIAIACGIVKGRGFGENSRAAIVTRGLAEMVRLGVAKGARPETLSGLAGTGDLILTCSSTQSRNFSLGCELGSGDTLENIMKKRVSVA

SEQ ID NO: 88523 - protein, 212 aa, Unknown
  Bacterial polypetide isolated from the Sargasso Sea
PRHEYAILSGPTFAAEIAREKPSAVTLASRGSNIRDSLAKALGTPRFRIYKSVDVIGAEIGGAVKNVLAIACGIVEGRGLGDSARAAIITRGLTEMARLSRAKGGRPETLMGLSGIGDLTLTCNAIQSRNFSLGVALGQGQALREVLANRVSVAEGVDTAAAVSALAGQLGVDAPICFAVNSIVNKGEDTDSTISNLLARPVGIDSPLDEGG

SEQ ID NO: 88524 - protein, 257 aa, Unknown
  Bacterial polypetide isolated from the Sargasso Sea
MTSYSVGTIGAGAWGTALAQAQAVEGGSSILWAREQDVVDSINSVHENTPFLPGVPLSENLKATASMEEVAQQDILLMVTPAQYMRASLESFKPYIRKDQPVVICSKGIEIETGKLLVPVAQEVLGAKHPIAVMTGPTFASEIARNMPAAVTIAAKDEALGKMLQQALGAPKFRPYVSTDIVGAQLGGAVKNVIAIAAGIASGREMGDSARAALITRGLAETARLCVAMGGQRQTLLGMCGVGDLMLTCSSMQSRNC

SEQ ID NO: 88525 - protein, 233 aa, Unknown
  Bacterial polypetide isolated from the Sargasso Sea
MFNLSKGIEVDTLMTVSEVIKDVLSDSYQGIVTLSGPSHAEEVIQKHPTTLVAASSDLDSAQKVQNLFATDMLRTYRNNDIKGVELGGSMKNVIAIAAGICDGIGYGDNSKAALITRGMTEISRLGTTMGGQRETFNGLSGFGDLIVTCLSRHSRNRQLGEAIGKGRPLEEITSGMNMVAEGIFTAKSVHQLRIKHHVEMPIHEAIYQVLFENKNPRTSVIELMKRRLSEENN

SEQ ID NO: 88526 - protein, 192 aa, Unknown
  Bacterial polypetide isolated from the Sargasso Sea
SGDVVASDDRAVCEILQKVLASSYFRVYANYDRFGVELAGALKNIYAIVSGIAEALGAGQNTKSVVLTRGLAEMSRFGQQLGADPMTFLGLSGVGDLFVTCSSPLSRNFQVGLGLGRGKTLAQSMNDVGQVAEGVNTTRLVKDKADKMGIYMPIVSALYETLFNDQSIERSLQIMMSAEQNTDVDFMVKQNE

SEQ ID NO: 88527 - protein, 302 aa, Unknown
  Bacterial polypetide isolated from the Sargasso Sea
LYRHAKVLGENAHTVHFWMRDEAQAEEVRRTRVNKRYMPDVTIEGDVQPTTDLAEAVARAEVVLVAIPSKAFRSVIRENADAFWEGQIVVSLTKGIEEHGFKLMSEILMEELPRCRSGVLSGPNLAAEIVNRELTATVIAAKDPEVRRTVQDLLGCEYFRVYANVDVYGVELAGALKNIYAIVAGLASALEMGENARAMLITRGLAEMSRFAVSLGANPMTFMGLAGVGDLIATCTSNKSRNYRIGYAVGKGKQLDEAVKELGQVAEGIYTLKLVREKSESIGIYMPLVRGLYEILYNGASI

SEQ ID NO: 88528 - protein, 280 aa, Unknown
  Bacterial polypetide isolated from the Sargasso Sea
MKENNKVVVLGGGSFGTVLANLAASNGYEVSLWVRDAEQALRINSEGANTNYHPELKLSDKIEASDDLKKVIKDASVVLIATPSSIFENITKRIVPLIDKNAYVISCTKGILSKPFRLLSDVISNQISNDIGVLSGPNLAKEIAESKVAGTVIASHSKELILSVKSILSSDTFKIYSSHDMEGVELAGALKNIYAIVCGMAESMKVGENAIGLILTRSMAEMSRFAVAKGADPITFLGLSGMGDLVATCTSKLSRNYQLGNYIGSGLNLSDSKLKVSQVA

SEQ ID NO: 88529 - protein, 339 aa, Unknown
  Bacterial polypetide isolated from the Sargasso Sea
MNNKQRVSVLGGGSFGTVLANLAASNGSNVALWVRDSEQALRINSEGANSSYHPELKLSDNIMASEDLYEVVKNADLIFVATPSKIFEKIIVRISKIIKEDCYVISCTKGILDDPFRTMTDIILSNNIKNFGVLSGPNLAKEIADNKVAGTVIASNDQQMITSVKEVLSSVTFKIYSSNDIQGVELAGAMKNIYAITCGLAESLDVGENALGLILTRSMAEMSRFAVAKGANPITFLGLSGMGDLVATCTSVLSRNYQLGFNIGKGMNLTDAKKNVGQVAEGIKTLEVIRNESLNLNIKMPLVESMYNIIYKDDSPNVLINDLVNNPNEIDVEFRYKDE

SEQ ID NO: 88530 - protein, 309 aa, Unknown
  Bacterial polypetide isolated from the Sargasso Sea
MNKNFKICVLGGGSFGTVLANLAGSKGHDVSLWVKDSDKALRINSESRNTEYHPELKLSSNIIASEKLEEIIPESEIIFVATPSKIINDVLERLSDFSMDNKMIISCTKGINEKPFMTMSETIEKHFNNSSIKVGVLSGPNLAREIADEKVSGTVIASKHTDLCNLGREILSSRTFKIYTSKDTQGIELAGALKNIYAIISGYCHSLDVGENAIGLILTRSMAEMSKFAVSKGANPITFLGLAGMGDLVATCFSKLSRNYQFGWAIGEGLDIEAAKNKVGQVAEGLNTIKIIQSEISSSEIEMPLVSGM

SEQ ID NO: 88531 - protein, 257 aa, Unknown
  Bacterial polypetide isolated from the Sargasso Sea
MDVSGKVAVLGGGSFGTVLANLAASNNNKVSLWVRDSEQALRINSEGANTSYHPELKLSKNIEASDNLEEVMGGSSIIFVATPSLIFEQIINRISLHLDNNAIIISCTKGILDEPFRTLSDVLSKKLNNRIGVLSGPNLAKEIADKKIAGTVIASTHDEVIDNVKSILSSKNFKIYSSKDVQGIELAGSLKNIYAIICGMAEALKVGENAIGLILTRSMAEMSRFAVAKGANPITFLGLAGMGDLVATCTSKLSRNY

SEQ ID NO: 88532 - protein, 336 aa, Unknown
  Bacterial polypetide isolated from the Sargasso Sea
MNSLKKVAVLGGGSFGTVLANLAASNGNQVSLWVRDSEQALRINSEGANTSYHPELRLSTNIKASENLDEVMHQASIIFIATPSLIFEQIVKRISNFLTEEAFIISCTKGILDKPFRTLSDILSEELKNKVGVLSGPNLAKEIADKKIAGTVIASCDDKLIDAVKAILSSEHFKIYSSNDIQGVELAGALKNIYAIICGMAESLKVGENALGLILTRSMAEMSRFAVAKGANPITFLGLAGMGDLVATCTSKLSRNYQLGFNLGQNMSLDTAKKEVGQVAEGLRTLSVIKNESKSLKINMPLVQSLYNIIYEDSNPHELINDLINNPHEVDVEFTY

SEQ ID NO: 88533 - protein, 290 aa, Unknown
  Bacterial polypetide isolated from the Sargasso Sea
MENSKSVAVLGGGSFGTVLANLAASNGYNVSLWVRDSEQALRINSEGANTTYHPELKLSKNIIASDNLKEVLNNISIIFIATPSIVFEQIVMRVSDHIDEKPYLVSCTKGILDDPFRPLSDIISSKLNNTIGVLSGPNLAKEIADEKIAGTVIASPDESLINIVKSVLSSETFKIYSSKDMQGVEMAGALKNIYAVICGMAESLKVGENAIGLILTRSMAEMSRFAVAKGANPITFLGLSGMGDLVATCMSTLSRNYQLGFNIGSGMSLSKAKESVGQVAEGVRTLEVVL

SEQ ID NO: 88534 - protein, 280 aa, Unknown
  Bacterial polypetide isolated from the Sargasso Sea
MSATRVPRKLSKIKLPDEVEIVSSLKRIEKNECLFLAVPTQNLADFCENNKVFLNGRPLIACCKGVDQKTGLRPSEILSEYSSKVAVMSGPSFAIDIAQGMPTALVLASVKYDFLKKLQSDISMQNFRLYRTSDVIGVELGGALKNIIAIACGVAIGAGQGDSARAALMTRGFSEMVSFAKAHSAKEKTLSGLSGFGDLSLTCNSEKSRNFAFGVSLGCQKTFNKNTTVEGVATAFAVSQKAKALGIEMPITSSVSALVKGSTSVEEVIRSLLSRPTKEE

SEQ ID NO: 88535 - protein, 341 aa, Unknown
  Bacterial polypetide isolated from the Sargasso Sea
MNKNYKICVLGGGSFGTVLANLAASKGHDVSLWVKDSDKALRINSESRNTEYHPELKLSNNIIASEKLEEIIPESEIIFVATPSKIINDVLDRISDFSMDNKMIISCTKGINEKPFMTMSETIEKHFNNSSIKVGVLSGPNLAREIADEKVAGTVIASKHADLCHLGREILSSSTFKIYTSADTQGIELAGALKNIYAIISGYCHSLDVGENAIGLILTRSMAEMSNFAVSKGANPITFLGLAGMGDLVATCFSKLSRNYQFGWAIGEGLDIEAAKNKVGQVAEGLNTIKIIHGEISSSEIKMPLVSGMHEILFNNGSKELLLEQIINSEIYVDVNFDVES

SEQ ID NO: 88536 - protein, 336 aa, Unknown
  Bacterial polypetide isolated from the Sargasso Sea
MKENNKVVVLGGGSFGTVLANLAASNGYEVSLWVRDAEQALRINSEGANTNYHPELKLSDKIEASDDLKKVIKDASVVLIATPSSIFENITKRIVPLIDKNAYVISCTKGILSKPFRLLSDVISNQISNDIGVLSGPNLAKEIAESKVAGTVIASHSKELILSVKSILSSDTFKIYSSHDMEGVELAGALKNIYAIVCGMAESMKVGENAIGLILTRSMAEMSRFAVAKGADPITFLGLSGMGDLVATCTSKLSRNYQLGFHIGSGLNLSDSKLKVGQVAEGIRTLEVIKSESDKLGLNMPLVESLYKIINEKSSPSSLIEDLIKNPHEVDVEFTH

SEQ ID NO: 88537 - protein, 341 aa, Unknown
  Bacterial polypetide isolated from the Sargasso Sea
MNKNYKICVLGGGSFGTVLANLAASKGHDVSLWVKDSDKALRINSESRNTEYHPELKLSNNIIASEKLEEIIPESEIIFVATPSKIINDVLDRLSDFSMDNKMIISCTKGINEKPFMTMSETIEKHFNNSSIKVGVLSGPNLAREIADEKVAGTVIASKHADLCHLGREILSSSTFKIYTSADTQGIELAGALKNIYAIISGYCHSLDVGENAIGLILTRSMAEMSNFAVSKGANPITFLGLAGMGDLVATCFSKLSRNYQFGWAIGEGLDIEAAKNKVGQVAEGLNTIKIIHSEISSSEIKMPLVSGMHEILFNNGSKELLLEQIINSEIYVDVNFDVES

SEQ ID NO: 88538 - protein, 341 aa, Unknown
  Bacterial polypetide isolated from the Sargasso Sea
MSKSKSHSIGVIGAGSWGTALSCLMADDNPAIYLWAYERETVKDITNSRENRVFLPGIRIPDNVKAISEIEKLMENCKILMIVTPVQNTRSIIKQIKNLVKPDHKFVLAGKGIEKKSSCLLSEIIEEELGTSKNVAILSGPTFALEVAQRKPTAAVVASSDPKLAKIVQSILHKNRFRIYQSKDIKGVQLAGAIKNVISIAGGIADGMRLGLNARAALICRGLEEMKRLGVKLNGQPETFSGLAGLGDLILTATGSLSRNHELGFRIGEGISPKDLLKNQFNVVEGVPTSISLQELCREQQVEMPISENVYSILHEGLDPNDALFQLLERKIPSPEIKRKD

SEQ ID NO: 88539 - protein, 187 aa, Unknown
  Bacterial polypetide isolated from the Sargasso Sea
MKISIAGAGAFGSAIASVFAKGGHSTKLFSPTNFKELSATRVPRKLSNIKLPPEVDIVSSLEKTEKNEYLFLAVPTQNLASFCKENKSFLNDRPLIACCKGVDQTTGLRPSEILSEHSSKVAVMSGPSFAIDISKGMPTALVLASAEPGFLKKLQSDISMQNFRLYRTSDVVGVELGGALKNIIAIA

SEQ ID NO: 88540 - protein, 335 aa, Unknown
  Bacterial polypetide isolated from the Sargasso Sea
MSEKQDFKNISIVGAGAWGTALAEVMSRRGHQINLWAKENSVVNSINSKHENDVFLPNVKLSNLIVAFNNLEQITKCDLLLVVSPAQHTRETLLEVSKTLKSETPIILCSKGIEISTLSLMSQVTESIFPKNPIAILSGPSFAIDVVNNKATAVTLACKDLEIAKSIAENISLPTFRPYISEDVIGAQIGGATKNVIAIAAGVVEGQKMGDSARAATIARGFSEIKRLAISMGGKEETLAGLSGMGDLLLTCNSKTSRNYSLGIQLGEGKSIEEATNGLSTIAEGMYSAKAITSLAEENGVDMPITLAVNDLIEKKYSVTDIIDNLLNRPIKKEN

SEQ ID NO: 88541 - protein, 270 aa, Unknown
  Bacterial polypetide isolated from the Sargasso Sea
MDRSKKVVVLGGGSFGTVLANLAASNGYQVTLWVRDSEHALRINSEGANTIYHPELKLSENIQASDSLEDVMKNASIVFIATPSIVFEQIIERIRHLLQEDTYVISCTKGILGNPFRSLSEVITSNINNTVGVLSGPNLAKEIADNKVAGSVIASSDNDLIDSVKTILSSDTFKIYSSDDLQGVELAGALKNIYAIICGLAEAIDVGENAIGLILTRSMAEMSRFAVAKGANPITFLGLAGMGDLVATCTSKLSRNYQLGYNLGKGMSID

SEQ ID NO: 88542 - protein, 147 aa, Unknown
  Bacterial polypetide isolated from the Sargasso Sea
ALKNIYALACGIAFGLNSGENTIGMIMTRGLGEMSRLAHKMGANPMTFLGLSGVGDLITTCASPLSRNHKMGELIGQGHSVEDAKSKIGQAVEGLKTLEAVKKKSLEVGISMPIVDSLYSVIFEGTGFDSIEKILGNDQPKDVEFLN

SEQ ID NO: 88543 - protein, 53 aa, Unknown
  Bacterial polypetide isolated from the Sargasso Sea
MNQSNASMTVIGAGSYGTALAITLARNGHQVVLWGHDPKHIETLEHDRCNVAF

SEQ ID NO: 88544 - protein, 218 aa, Unknown
  Bacterial polypetide isolated from the Sargasso Sea
MSEVISSEMTSFNNIVSLYGPSHAEEVINNQPTTLVSASDDLDIAKKVQSIFSSDNLRVYANQDIIGVELGGSLKNVIAIATGICDGIGFGDNTKAALLTRGMAEIIRLGEKMGANPSTFSGLSGVGDLIATCLSHHSRNRFIGQSIGEGKNLDEILNSMDMVAEGVNMSRSIDDLSKKYNIDMPISKAVYKILFDNKDPKDMVVGLMTRDLIQEKNN

SEQ ID NO: 88545 - protein, 336 aa, Unknown
  Bacterial polypetide isolated from the Sargasso Sea
MISLNKVAVLGGGSFGTVLANLAASNGFNVSLWVRDSDQALRINSEGANTSYHPELKLSENIVASDNLNEVLENAEIIFIATPSIIFEKIVDRISEFIDPDSFIISCTKGILDDPYRSLSEIISLKLKNKIGVLSGPNLAKEIAENKLAGTVIASSDDNLLIKVKSALSSKHFKIYSSKDMQGVELAGALKNIYAVVCGMAESLEVGENAIGLILTRSMAEMSRFAVAKGANPITFLGLSGMGDLVATCMSNLSRNYQLGFNIGSGMTLLEAKNKVGQVAEGVRTLEIVRNESSRLNIKMPLVESMYNIIYKEASPESIIDDLLNNPHEVDVEFKH

SEQ ID NO: 88546 - protein, 190 aa, Unknown
  Bacterial polypetide isolated from the Sargasso Sea
QLSGTVIASEDKALQKNVVDVLGSDSFRVYENDDPYGVEMGGAIKNIYAIACGIADGLSSGENTVGMIMTRGLGEMSRLAVELGANPQTFLGLSGVGDLITTCASPLSRNHKFGKYIGEGLTVESAKKKIGQTVEGLKTLKVVKTLSDERNINMPIVDSLYKIIYKGGNLNGSIQNILGEDLIKDVEFSK

SEQ ID NO: 88547 - protein, 176 aa, Unknown
  Bacterial polypetide isolated from the Sargasso Sea
KKMLVKYFETDFFRVYENDDPYGVEMGGAIKNIYAIACGIADGLNSGENTVGMIMTRGLGEMSRLAVALGANPQTFLGLSGVGDLITTCASPLSRNHKFGKYIGEGLSVESATDEIGQTVEGLKTLKVVKVLADERNIKMPIVDSLYKIIYKGKDLNGSIQNILGEDQIKDVEFSK

SEQ ID NO: 88548 - protein, 197 aa, Unknown
  Bacterial polypetide isolated from the Sargasso Sea
TGTVIASNIEEIRETVKEVLRSDTFRVYTNDDMFGIELGGSLKNIYAIIAGLAASIGMGHNTNSMLVTRALAEMARFGRELGADPMTFLGLAGVGDLVVTCSTPLSRNYRIGQALGEGRSIEQALTEVGQVAEGVNTLKLVKEKADELGVYMPLVNGLYRIVYDNQPIKNIVSSLTLSEEALDVEFAAKDEKVLNGN

SEQ ID NO: 88549 - protein, 285 aa, Unknown
  Bacterial polypetide isolated from the Sargasso Sea
NSRYLPNITFPENIDIFSNIEDSVKDANTVIVALPSETIRDTFLQLKNTISSQTGISWASKGLEVKSGLLIHSVCEEILGKGHPMAVISGPSFAVEVANKKPTAVTIASSSKNFRNQLAEDLSDQNFRVYTSDDIIGAEIGGAIKNIIAIGAGISDGLNYGENAKIALITRGLHEIQKLGVALGAKKETFSGLSGAGDLFLTCTSNLSRNRRLGLALADGSNLSEFESKTMQVVEGVKASEAVHKLSQKMNISMPICEIIYQILFHRLDPKKAAIMLMSRDLQDE

SEQ ID NO: 88550 - protein, 329 aa, Unknown
  Bacterial polypetide isolated from the Sargasso Sea
TAIGNIVAANGHATSLWMRDPDQVAESLTNQENTRYLPGHPLESLLVPTDDLESAAADAEIIFVTVPSYGFRDICRQLAPFVRKSDLLVSGTKGIEPVGFRLMSQLIAEHTTSEHIGVLSGPNFAEEIAEKHYTGSVLASESAQVRAKVQEVMRSETFRVYPSQDIFGVELGGALKNIYAIVCGMAVGLNVGQNTIGMIITRSLAEMSRFAVSMGANPYTFLGLSGVGDLLVTCTSPLSRNYQLGLKIAQGQTFEEASDDLGKLAEGANTLEQVFQKSKERGVYMPLVHGLYQILFSNEETNLIFKALMERQEEIDVEFADPTYWQGDP

SEQ ID NO: 88551 - protein, 179 aa, Unknown
  Bacterial polypetide isolated from the Sargasso Sea
LPGITLPPSLTLAHGDFAALWTGADLVIVATPMAALRGMLQTLHGCAAPVAWLCKGFEAVPAGTDPASFGLLAHEIQAQIAPDLIAGVFSGPSFAQEVALGQPTALVAASPHAQVRDALVSAFHSPSVRVYANEDIVGVEVGGAVKNVLAIATGLCDGLALGLNARAALITRGLAEMTR

SEQ ID NO: 88552 - protein, 211 aa, Unknown
  Bacterial polypetide isolated from the Sargasso Sea
VQELGDDVPLAVLSGPTFAKEMAMGLPTAISVSSTSKDFAKQLADLLHCGRSFRVYNNDDFIGIQLGGAVKNVIAIGAGMSDGFGFGANARTALITRGLAELCRLGCALGARSDTFMGMAGLGDLILTCTDNQSRNRRFGLALGKGEGVEAAIESIGQVVEGYRNTKEVYLLAERTGIEMPITEQIYQVLYENKDVKEAAMALLGREQKSE

SEQ ID NO: 88553 - protein, 254 aa, Unknown
  Bacterial polypetide isolated from the Sargasso Sea
LLAENGQRVLQWMRDPEQAEQMRQSGENPRYLKGVKLHGGIEPTSDLSGVLQQAELVLVALPSSALRDALQPVAAQLAGKMLISTTKGIEAKTFKLMSQILEEIAPAARIGVLSGPNLAKEVADHALTATVIASEDEELCLRVQQALHGRTFRVYASADRFGVELGGALKNVYAIMSGMAAALGMGENTKSMLITRALAEMTRFAVKLGANPMTFLGLAGVGDLIVTCSSPKSRNYQVGFALGEGLSLEDAVQR

SEQ ID NO: 88554 - protein, 240 aa, Unknown
  Bacterial polypetide isolated from the Sargasso Sea
EITKQLGDFKGIAVSVTKGIEHQTGRTMGGLIEADAPNATPVALSGPSLAAEVARGIPTALVCASENVTAAKTVQDWFHRPTLRMYTSTDVLGVELGGALKNVMAIAAGVCDGLKLGDNAKAALITRGLNEMRRLGTAAGALPETFSGLSGMGDLTVTCFSRQSRNRTLGDRIARGESLETVLASATAEGYPTSRSAKALAARLEVSTPIIDEVYAMLYEGKDVHQAVNDLLTRNPRAEA

SEQ ID NO: 88555 - protein, 194 aa, Unknown
  Bacterial polypetide isolated from the Sargasso Sea
MKSNSVSASVSVLGAGSYGTALAFCLARNGNPTLLWGRDEKHVAEMNTNRENARYLPGATFPDALVVNANLEEVVAASQDILVVVPSHAFAAMLQSLKPLLKPHQRIIWATKGLEPKTGRLLRDVAEEILGTDYPLAVLSGPTFAKEMVAGLPTAISLSSTDDTLSDEFAAKLHCAKSFRVYKNSDFTGVQLGG

SEQ ID NO: 88556 - protein, 216 aa, Unknown
  Bacterial polypetide isolated from the Sargasso Sea
MSDVIKDVIKNKSNIVTLSGPSHAEEVIDEKPTAVVSSSKNLALAKYVQGLFSTNKFRVYTNTDIEGVEIAGSAKNVIAIAAGFCDGVGYGDNTKAALITRGLNEISLLGRKLGAKSKTFFGLAGIGDLIVTCNSIHSRNRRLGELVGRGEILSEILSQSHMVAEGVKTADSIYSLRTQLNIEMPICESVYRVLYSNSNPIREVDKLMTRNLRSEY

SEQ ID NO: 88557 - protein, 235 aa, Unknown
  Bacterial polypetide isolated from the Sargasso Sea
KLIINLSKGIEIDTLMTVSEVIKDVLSDSYQGIVTLSGPSHAEEVIQKHPTTLVAASSDLDCAQKVQNLFATDMLRTYRNNDIKGVELGGAMKNVIAIAAGICDGIGYGDNSKAALITRGMTEISRLGTTMGGQRETFNGLSGFGDLIVTCLSRHSRNRQLGEAIGRGRSLEEITSKMNMVAEGIFTAKSVHQLRIKHCVEMPIHEAIYQVLFEDKNPRTSVVELMKRRLSEENN

SEQ ID NO: 88558 - protein, 251 aa, Unknown
  Bacterial polypetide isolated from the Sargasso Sea
MTNIVVMGAGSWGSAIATALMRAKQKNSKTKHVTVLARRQESVNALAAGRCLYLPENPPAMSIAATTDPTCLDDADLIFVAAPVLANQASFLMIHDRQSDQQKNQSIATIVLCAKGIGKNDDGNAMLLTELAANILPEHPLAVFSGPSFADEVFTGLPAALVTASHTPAAAIQIQDAFEGSNLRLYSNDDPIGVALAGAMKNVIAIAAGCAVGAGFGDNAKAAILTRGLAEIARFAILMGAKPDTIFGLAG

SEQ ID NO: 88559 - protein, 186 aa, Unknown
  Bacterial polypetide isolated from the Sargasso Sea
ASKSPEITKIVQQIFSSHYLKVFTSEDILGVEIGGALKNVIAIATGISDGLGLGFNTRAALITRGLVEIARIGTELGAKPETFNGLSGLGDLVLTCTGDLSRNRYLGIQLGKGKSLDDITKKLRTVAEGISTVKSAYKLIHKLNIQASIMEETFKVLHENKSPKKALGDLMKVEISNEFSGIKGLA

SEQ ID NO: 88560 - protein, 218 aa, Unknown
  Bacterial polypetide isolated from the Sargasso Sea
VSEVINDVLDGQHKSLVTLSGPSHAEEVISGHPTTLVAASKDVQSAKIIQNLFATEKLRTYLNRDIRGVELGGSMKNVIAIAAGICDGIGYGDNSKAALMTRGMMEITRLGEAMGARVKTFRGLSGYGDLIVTCLSKHSRNRQLGQLIGEGKILEDITSDMSMIAEGIFTAKSVHQLQLKHNVEMPIHEAIYQVLFQKKDPKNSVAELMTRRLSEELN

SEQ ID NO: 88561 - protein, 264 aa, Unknown
  Bacterial polypetide isolated from the Sargasso Sea
VIGAGSWGSAIATALMRAKQKNSRTKQITVLARHQESVDALAEGRCLYLPKNPPAMSIAATTDPACLDDANLIFVATPVVANQANLVMINDRQNNPQKNEHQNQRLATIVLCAKGIGKADDGNAILLTELAANILPAHQLAVFSGPSFADEVFTGLPAALVTASHTPATAIQIQEAFEGSNLRLYSNDDPIGVTLAGAMKNVIAIAAGCAVGAGFGDNAKAAILTRGLAEIARFAALMGAKPDTIFGLAGVGDLALTCAGPHSR

SEQ ID NO: 88562 - protein, 250 aa, Unknown
  Bacterial polypetide isolated from the Sargasso Sea
MTRTIAAHGGVRNVIWLCKGFDPETSALPHAIVADVLKASGRTDLAVGVLSGPSFAKEVAQGLPCAMTVASTSDALCKLTQRGFHHHAMRVYASDDLVGVEVGGAVKNVLAIATGAADGLGLGLNARAALVTRGLAEMTRLGLALGGRLETFMGLTGVGDLLLTATGDLSRNRTVGMQLAQGRTLDDILHSLGHVAEGVRCARAVAALARAKGVDMPITFTVCEVLFEGLPAAKAVERLLQRDAKSESAR

SEQ ID NO: 88563 - protein, 251 aa, Unknown
  Bacterial polypetide isolated from the Sargasso Sea
SQSVRGVLLNAQNSIGTSKCIINIAKGIENNSLMTMSQVIKDVLKNKSNIVTLSGPSHAEEVIDKNPTAIVASSKNLGLAQYVQSLFSTNKFRVYTNTDIKGVEIGGSTKNVIAIAAGFCDGTGYGDNTKAALITRGLNEISLLGKKLGAKSKTFFGLAGIGDLIVTCNSVHSRNRRLGELVGRGENLSKILSQSHMVAEGVKTADSIYSLRTKLNIEMPICESVYRVLYENSNPTSEVDKLMTRNLRPEY

SEQ ID NO: 88564 - protein, 162 aa, Unknown
  Bacterial polypetide isolated from the Sargasso Sea
MNALNAAMTVIGAGSYGTALAITLARNGHHVVLWGHDPKHIATLQHDRCNAAFLPDVPFPDTLHLESDLSAALAASRDILVVVPSHVFGEVLRQIKPLMRSDARLVWATKGLEAETGRLLQDVAREALGDTIPLAVISGPTFAKELAAGLPTAISLASTEPQ

SEQ ID NO: 88565 - protein, 60 aa, Unknown
  Bacterial polypetide isolated from the Sargasso Sea
ALITRGLVEMQRLGAALGADAKTFMGMAGLGDLVLTCTDNQSRNRRFGLALGAGKDVNTA

SEQ ID NO: 88566 - protein, 95 aa, Unknown
  Bacterial polypetide isolated from the Sargasso Sea
GLGDLVLTCTDNQSRNRRFGLALGQGKDVMTAQDEIGQVVEGYRNTKEVFTLAKRLGVEMPITEQIYQVLYQGKAPVEAAKELLSRDKKSETLKK

SEQ ID NO: 88567 - protein, 271 aa, Unknown
  Bacterial polypetide isolated from the Sargasso Sea
MYTSDAFREVSSLAVNFIQESSYLITATKGVEKDGFSLMSNILEEYYPKNPIGVLSGPNLAEEIANHHLSGTVIASKDKDLRRQTIEDLSTDYFRVYENDDPYGVEMGGALKNIYAIACGIADGLNSGENTIGMIMTRGLGEMGRLATDLGANPQTFLGLAGVGDLITTCASPLSRNHQFGKFIGEGLSVDEAKLKIGQTIEGLKTLRVVKNISDKNHVEMPIVDSLYKIIYKGDSLDGSIQNVLGQDMIKDVEFVKKKICQKKKKIKLLM

SEQ ID NO: 88568 - protein, 199 aa, Unknown
  Bacterial polypetide isolated from the Sargasso Sea
LSGPTHAEEVIDKNPTAIVSSSKNLALAKYVQGLFSTNNFRVYTNSDIKGVEIGGSAKNVIAIAAGFCDGAGYGDNTKAALITRGLNEISLLGKKLGAKSKTFYGLAGIGDLIVTCNSIHSRNRRLGELVGRGEGLSTILSKSHMVAEGVKTAYSIYNLSKKLNIEMPICESVYRVLYNNSNPIKEVDKLMARNLRSEN

SEQ ID NO: 88569 - protein, 257 aa, Unknown
  Bacterial polypetide isolated from the Sargasso Sea
MKSVTFLGCGSWGGALGKLLSEKGIDVTMWHRKAEVVSHLINTQNHYLIPELIFPSNVNFTNDISSAIKSSEIIVLALPSQSIRNVITKNKSSFNKNHIIVNISKGIEIDTLLTVSEVIDDILNGCHKSVVTLSGPSHAEEVIRGHPTTLVAASSDVQTAEIIQNLFATKMLRTYLNRDIRGVELGGSMKNVIAIAAGICDGIGYGDNSKAALMTRGMMEITRLGEAMGAKVKTFRGLSGYGDLIVTCLSKHSRNRQ

SEQ ID NO: 88570 - protein, 255 aa, Unknown
  Bacterial polypetide isolated from the Sargasso Sea
MTRQQPIAVLGGGSFGTAIANLLAENGHHVLLWMRDAEQAESIRTLRQNPRYLKGVEIRAQVEPTTDLSSTLDACELIFVALPSSALRQALQPFAAQLGGKMLVSTTKGIEADGFMLMSQILEQIAPQARIGVLSGPNLAREVAEHALTATVVASQDEALCRSVQQVLHGRTFRVYASSDRFGVELGGALKNVYAIMAGMAAALGMGENTRSMLITRALAEMTRFAVKLGANPMTFLGLAGVGDLIVTCTSPKSR

SEQ ID NO: 88571 - protein, 184 aa, Unknown
  Bacterial polypetide isolated from the Sargasso Sea
VAGTCPKFTAELVELLHSPKRLRVYANDDFIGLQLGGAVKNVIAIGAGMSDGIGFGANARTALITRGLVELTRLGEALGASTATFMGMAGLGDLVLTCTDNQSRNRRFGLALGKGCDVDTAQAEIGQVVEGYRNTKEVFTLAKRMGVEMPITEQIYQVLYQGKAPLDAAKELLSREKKSETPAQ

SEQ ID NO: 88572 - protein, 335 aa, Unknown
  Bacterial polypetide isolated from the Sargasso Sea
MNKNKISVLGGGSWGTVLAHLASLNGNEVTLWMRDEEVAKEINNTNINSRYLPNLSLGSNLIATSEMADISDSGIIIFCIPSDAFRDVSGLASNYIKEESFLVTATKGVEKDGFSLMSNILTDSFPRNAIGVLSGPNLAEEIASNHLSGTVIASENKILVQTIITSLSTEFFRVYENDDPYGVEMGGALKNIYAIACGIADGLDSGENTVGMIMTRGLGEMGRLASALGANPQTFLGLAGVGDLITTCASPLSRNHQFGKLIGKGMSVDDAKKQIGQTIEGLKTLKVVKIISDEHKVKMPIVDSLYKIIYKGNSLDGSIQNVLGQDMIKDVEFIK

SEQ ID NO: 88573 - protein, 332 aa, Unknown
  Bacterial polypetide isolated from the Sargasso Sea
MNAAIAVLGAGSYGTALAISLARNGNPTLLWGRNADDIRVMTEQRMNQRYLPDIRLPDSLAVTDDLAYAVGSCRDILLSVPSHAFADTLRDIKPFLQHNARVAWATKGLEPETGRLLQDVAKEILGEEVSLAVLSGPTFAKELAKGLPTAISLSSTDPEFITTLSDLLHCTKTFRVYTNPDFIGVQLGGAVKNVIAIGAGMADGIGFGANARTALITRGLTEMCRLGCALGAKKETFMGMAGLGDLVLTCTDNQSRNRRFGLLLGEGKGVDEAMTTIGQVVEGYRNAKEVFNLAQRVGVEMPITEQIYQVLYQGKDARLAAMDLLGREKRDE

SEQ ID NO: 88574 - protein, 335 aa, Unknown
  Bacterial polypetide isolated from the Sargasso Sea
MKLKKVVTIFGAGSWGTAIAKNISRNGYKVHLWAKEKEVVESITKFRENRVYLPGIKLPSIIIPTLSLDKALFKSDFLIFSIPTQFIRESLSVMKNMINKDSILINTSKGIEQSSMKPIFSIFKDVLPRVNKRYVTISGPSFAYDVASGLPTSVTLAASNSLLLPVAMKIFENQNFKTYTSKDIVGVELGGSLKNVIAIGAGILDGIKSSESTKAAFITRGLNEIKTLSKFLGAKNDTFMGLSGIGDLMLTAYGEQSRNRSLGFNIGKGKKIKTILLSNKTVAEGFYTSKAIYELTKKYKIHSPIIESIYKILYRNSNPNNIIKNLLKNDGIVDI

SEQ ID NO: 88575 - protein, 338 aa, Unknown
  Bacterial polypetide isolated from the Sargasso Sea
MKNSADITVLGAGSYGTALAISLASNGHKTLLWGHDPAHMQTLAQDKCNQAFLPGIAFPECLYIEADLAKALAASNNVLIVVPSHVFGSVLAQAKPLLRQDARIVWATKGLEPETGRLLQDVARDVLGEQYPLAVLSGPTFAKELAMGLPTAISVAGTCPKFTAELVELLHSPKRLRVYANDDFIGLQLGGAVKNVIAIGAGMSDGIGFGANARTALITRGLVELTRLGEALGASTATFMGMAGLGDLVLTCTDNQSRNRRFGLALGKGCDVDTAQAEIGQVVEGYRNTKEVFTLAKRMGVEMPITEQIYQVLYQGKAPLDAAKELLSREKKSETPAQ

SEQ ID NO: 88576 - protein, 332 aa, Unknown
  Bacterial polypetide isolated from the Sargasso Sea
MKVAVLGAGAWGTALAGHLAARHDTLLWARDAALIAGLQARHENSRYLDGIVLPDALRYDADLGAALAHGAADDALCVIAAPVAGLRTLCHAMRDAGCVPAHVVWVCKGFEADTHLLPHQVIAAELPEQHSNGVLSGPSFAREVGQSLPVALTVASTSAECRERTLAAFHHGAMRIYTGDDVVGVEVGGAVKNVLAIATGIADGLGLGLNARAALITRGLAEMSRLGVALGGRAETFTGLTGLGDLILTATGDLSRNRTVGLQLAAGRTLNDILGALGHVAEGVRCAQAVLAIARAQSIEMPITEAVCGVLFDGIAPRDAVSGLLRRDARAE

SEQ ID NO: 88577 - protein, 285 aa, Unknown
  Bacterial polypetide isolated from the Sargasso Sea
LGIAFPECLHIEADLAKALAASNNVLVVVPSHVFGSVLAQAKPLLRQDARIVWATKGLEPETGRLLQDVARDVLGEQYPLAVLSGPTFAKELAMGLPTAISVAGTCPKFTAELVELLHSPKRLRVYANDDFIGLQLGGAVKNVIAIGAGMSDGIGFGANARTALITRGLVELTRLGEALGASTATFMGMAGLGDLVLTCTDNQSRNRRFGLALGKGCDVDTAQAEIGQVVEGYRNTKEVFTLAKRMGVEMPITEQIYQVLYQGKAPLDAAKELLSREKKSETPAQ

SEQ ID NO: 88578 - protein, 335 aa, Unknown
  Bacterial polypetide isolated from the Sargasso Sea
MNRKTISVLGGGSWGTVLAHLASLNGNKVTLWMRDEETAKEINQTHINQRYLPSLNLGSNLVATPHIEEVSDSDTIIFCIPSDAFREVSLLAANFIQESSYLITATKGVEKDGFSLMSNILEEYYPKNPIGVLSGPNLAEEIANHQLSGTVIASKDKDLRRETIEDLSTDYFRVYENDDPYGVEMGGALKNIYAIACGMADGLNSGENTIGMIMTRGLGEMGRLASDLGANPQTFLGLAGVGDLITTCASPLSRNHQFGKYIGEGLSVEEAKQKIGQTIEGLKTLRVVKNISDKNQVEMPIVDSLYKIIYKGDSLDGSIQNVLGQDMIKDVEFVK

SEQ ID NO: 88579 - protein, 338 aa, Unknown
  Bacterial polypetide isolated from the Sargasso Sea
MKNSADITVLGAGSYGTALAISLASNGHKTLLWGHDPAHMQTLAQDKCNQAFLPGIAFPECLHIEADLAKALAASNNVLVVVPSHVFGSVLAQAKPLLRQDARIVWATKGLEPETGRLLQDVARDVLGEQYPLAVLSGPTFAKELAMGLPTAISVAGTCPKFTAELVELLHSPKRLRVYANDDFIGLQLGGAVKNVIAIGAGMSDGIGFGANARTALITRGLVELTRLGEALGASTATFMGMAGLGDLVLTCTDNQSRNRRFGLALGKGCDVDTAQAEIGQVVEGYRNTKEVFTLAKRMGVEMPITEQIYQVLYQGKAPLDAAKELLSREKKSETPAQ

SEQ ID NO: 88580 - protein, 341 aa, Unknown
  Bacterial polypetide isolated from the Sargasso Sea
MRIAIIGGGNFGTAIGNIVAANGYDTSLWMRDPDQVAESLIHRENTRYLPGHPLEGLLVPTDDLESAAADAEIIFVTVPSYGFRDICRQLAPFVRKSDLLVSGTKGIEPVSFRLMSQLIAEHTPSEHIGVLSGPNFAEEIADKHYTGSVLASESAQVRAKVQEVMRSETFRVYPSQDIFGVELGGALKNIYAIVCGMAVGLNVGQNTIGMIITRSLAEMSRFAVSMGANPYTFLGLSGVGDLLVTCTSPLSRNYQLGLKIAQGQTFEEASDDLGKLAEGANTLEQVFQKSKELGVYMPLAHGLYQILFSNEETNLIFKALMERQEESDVEFADPTYWQGDP

SEQ ID NO: 88581 - protein, 332 aa, Unknown
  Bacterial polypetide isolated from the Sargasso Sea
MNAAIAVLGAGSYGTALAISLARNGNPTLLWGRNADDIRVMAEQRVNQRYLPDIRLPDSLAVTDDLAYAVSSCRDILLSVPSHAFADTLKQIKPYLQPAARVAWATKGLEPETGRLLQDVAKEILGEDISLAVLSGPTFAKELAKGLPTAISLSSTDPEFIAALSDLLHCTKTFRVYTNPDFIGVQLGGAVKNVIAIGAGMADGIGFGANARTALITRGLTEMCRLGCALGAKKETFMGMAGLGDLVLTCTDNQSRNRRFGLLLGEGKGVDEAMTTIGQVVEGYRNAKEVFNLAQRVGVEMPITEQIYQVLYQGKDARLAAMDLLGREKRDE

SEQ ID NO: 88582 - protein, 336 aa, Unknown
  Bacterial polypetide isolated from the Sargasso Sea
MENFKKVAVLGGGSFGTVLANLAASNDYKVSLWVRDAEQALRINSEGANTSYHPELKLSDNIQATEDLNEVMRDASIIFIATPSIIFEQIMNRISELIDNKAYVISCTKGILENPFRSMTDVIQNKIKNDVGVLSGPNLAKEIAQNKIAGTVIASNNEDLIKLVKDTLSSKTFKIFSSNDIQGVELGGALKNIYAIICGLADSLEVGENALGLILTRSMAEMSRFAVAKGANPVTFLGLSGMGDLVATCTSTLSRNYQLGHNLGIGMDLDDAKDNVGQVAEGIRTLEVIRNESISLDLKMPLIESLYNIIYKKSSPDSLINDLINNPHEVDVEFKL

SEQ ID NO: 88583 - protein, 334 aa, Unknown
  Bacterial polypetide isolated from the Sargasso Sea
MADQIAISVLGAGSYGSALAISLARNGHPTLLWGHDPAHVAELEQDRCNKAFLPDVPFPADLQLTADLQQAVQAAPVLLLVVPSHVFGQVLAQVKPFLRPDTRIAWATKGLEPDSGRLLQDVAREVLGDEMPLAVISGPTFAKELAAGLPTAISVASTHDDFADDLSLLLHCGRSFRVYTNPDFIGLQLGGAVKNVIAIGAGLSDGLGFGANARTALITRGLVEMQRLGAALGADAKTFMGMAGLGDLVLTCTDNQSRNRRFGLALGAGKDVNTAMTEIGQVVEGYRNTKEVHLLAARCGVEMPICEQIFKVLYEGKNPKEAAIALLSRDKKDE

SEQ ID NO: 88584 - protein, 338 aa, Unknown
  Bacterial polypetide isolated from the Sargasso Sea
MKSHSVSESVSVLGAGSYGTALAFCLARNGNPTLLWGRDEKHIAEMEANRENARYLPGATFPDALVVNANLEEVVAASQDILVVVPSHAFAAMLQSLKPLLKPHQRIIWATKGLEPKTGRLLRDVAEEILGTDYPLAVLSGPTFAKEMVAGLPTAISLSSTDDTLSDEFAAKLHCAKSFRVYKNSDFTGVQLGGAVKNVIAIGAGLADGLGFGANARTALITRGLAELTRLGVKLGANPETFMGMAGLGDLVLTCTDNQSRNRRFGLALGQGKSVDVAIDEIGQVVEGYRNTEEVHILSKKVGVEMPICEQIYAVLYHGKSPKEAALALLGRDLKKEA

SEQ ID NO: 88585 - protein, 100 aa, Unknown
  Bacterial polypetide isolated from the Sargasso Sea
KLSIAKEGSIIINTSRGGLIDEQEVFNLVNENKLYSGGFDVYEKEPPEMNEEKNRSKVITLPHLGASTKEAQARAGQQLVENIKNILNEDLSSVVNKNLK

SEQ ID NO: 88586 - protein, 327 aa, Unknown
  Bacterial polypetide isolated from the Sargasso Sea
ALAMMLSLSRHVPQAHAGMRDGKWDRKKYVGNELYKKTLGVVGLGKIGSHVARVARAMGMQVIAYDPFIAADRAKQMQVSLTQLDELFRTADYITLHIPRTPDTENLVNAELLRSMKSTARIVNCARGGIVDESDLAEAVDNGVIAGAGLDVYASEPLAADSPLRSVERGLVLTPHLGASTEEAQENVAIDVAEQIRDVLLGLPARSAVNIPGLSAEIMERLKPHLQLSETLGLLVSQLAGDQVQELELRLQGEFANHPSQPLVIAALKGMLSSALGDSINYVNASLEAKARGINVLEVKDESSRDFAGGSLQLTSRGAQGGHSVTG

SEQ ID NO: 88587 - protein, 313 aa, Unknown
  Bacterial polypetide isolated from the Sargasso Sea
GLGKIGREVIQRSKAFNMQILGYDPFIPDDFFREDELKICDLEYLIKKSDYITLHIPLTNDTKNLFDYDNLIKMKKEARIINVARGGIINENDLSKVLKEKRISGAALDVFESEPLDRDNPLLSSPNIILTPHLGASTKEAKEGVSISICNQVKNFLINEELENAINMPFKNFAQLKEMAPFLQLSELLGGIHSQVADGPIKKVAINCYGSINDTKPIGLAFLRSLLQSRVPERVNYINADALAKELGMEVGINFSTSDSNYSNLISTIVSSDKEVLIEGSVFDDNLPRLVNIFGYKMEVNPSGTLLFIQNDD

SEQ ID NO: 88588 - protein, 281 aa, Unknown
  Bacterial polypetide isolated from the Sargasso Sea
VYGYDPFVSTERAQQIQVKLSELEDLFKESDYVTLHLPRTPETENLVNIDVLKSMKSSAKLINCARGGLINEEALAEALNKSLIAGAAIDVFSKEPLESDSPLLKVEKNLILTPHLGASTREAQENVAVDVAEQIRDVLLGLSARTAVNIPGLSPDIMDSLKPHLQLAETMGLLISQLSGGQIQKLEVKLQGEFVQHPSQPLIIASLKGLLSKALGDRINYVNASLEADSRGISVVENKDEARPEFASGSLQLTTYGDNGDHSVAGSIFADGELRIISIDQ

SEQ ID NO: 88589 - protein, 227 aa, Unknown
  Bacterial polypetide isolated from the Sargasso Sea
NSVSVAEHVMTMILNLTKNIVNYDKLVKNGNFVKKNEIGDFFELFNKKILILGFGRIGRALAKRCLGFEMKVYVYDPFVPEEEINKYNCITIDKSSGFKIADYISIHLPLNKDTKKLISYNEFKIFKKNTILINTARGGIVDEKALYEALKNNDILGAGLDVYEEEPLNDSPLFSLNNIILTPHNAALTLECRKRMSIESCMNVFNYLKNKNELNKNNIVNFSNLNF

SEQ ID NO: 88590 - protein, 304 aa, Unknown
  Bacterial polypetide isolated from the Sargasso Sea
KFVGNELYKKKLGVVGLGKIGAHVAKVANALGMEVYGYDPFVSTERAQQIQVKLSELEDLFQQSDYVTLHLPRTPETENLVNIEVLKSMKSSAKLINCARGGLIDEEALAEALNKSLIAGAAIDVFSKEPLESNSPLLKVEKNLILTPHLGASTREAQENVAVDVAEQIRDVLLGLSARTAVNIPGLSPDIMDSLKPHLQLAETMGLLISQLSGGQIQKLEVKLQGEFVQHPSQPLIIASLKGLLSKALGDRINYVNASLEADSRGISVVESKDEVRPEFASGSLQLSTYGDNGDHSVAGSIFA

SEQ ID NO: 88591 - protein, 256 aa, Unknown
  Bacterial polypetide isolated from the Sargasso Sea
ELDGKTLGIIGLGSIGSMVAQASQTLGMKLIGYDPYISIESAWRLPREVKKAETMDELLQHSDYVSLHVPLGEETRNLINKSNLNKFKKGARLINLSRGGIVNTNDVIKELETGNLGRFVTDFPTLELIKRSAEKNDVVLLPHLGASTKEAEVNCAVMAANQMVNYLRHGTIVNSVNFPRISLSRGTHHRLVIINHNEPGMISKITDSIAACDINIAEMTNKSKDEIAINLIDLECEASPELIRQLESVEHVLSVR

SEQ ID NO: 88592 - protein, 308 aa, Unknown
  Bacterial polypetide isolated from the Sargasso Sea
SKFNGTEITNKILGLIGCGNVGSIVANRAIGLKMKVIAFDPFLNKKRAEEIGIEKVTLDDLLKKSDIISLHTPLTNETKNIISADTIKKMKKGAKLVNCARGGLVDEYVCRAALESGHLSGAAFDVFTEEPATNNILFEAPNFIATPHLGASTKEAQENVAVQIAEQMSDFLISGAISNALNFPNVTAEEAPILKPYIKLSYLLGSFLGQVSPEGIKSVSLELEGKAYHIKDEPILANALVGILEPSSATVNNVNALKIVSGRGINVSSTKHERRCDYETLLTLSILHERGERKISGTLIGGYMPRIV

SEQ ID NO: 88593 - protein, 243 aa, Unknown
  Bacterial polypetide isolated from the Sargasso Sea
LILTPHLGASTREAQENVAVDVAEQIRDVLLGLSARTAVNIPGLSPDIMDSLKPHLQLAETMGLLISQLSGGQIQKLEVKLQGEFVQHPSQPLIIASLKGLLSKALGDRINYVNASLEADSRGISVVESKDEARPEFASGSLQLTTYGDNGDHSVAGSIFADGELRIISIDQYPVNVSPSRYMLVTRHRDMPGIIGKLGSLLGSNNVNIASMQVGRKIVRGEAVMVLSIDDPIPNKLLDTIMK

SEQ ID NO: 88594 - protein, 253 aa, Unknown
  Bacterial polypetide isolated from the Sargasso Sea
FVSTERAQQIQLKLSELEDLFQQSDYVSLHLPRTPETENLVNIDVLKSMKSSAKLINCARGGLIDEEALAEALNKSLIAGAAIDVFSKEPLESDSPLLKVEKNLILTPHLGASTREAQENVAVDVAEQIRDVLLGLSARTAVNIPGLSPDIMDSLKPHLQLAETMGLLISQLSGGQIQKLEVKLQGEFVQHPSQPLIIASLKGLLSKALGDRINYVNASLEADSRGILVVENKDEARPEFASGSLQLTTYGDN

SEQ ID NO: 88595 - protein, 142 aa, Unknown
  Bacterial polypetide isolated from the Sargasso Sea
NKIKTYVTDFPNEEMINHKDVLVMPHLGASTKEAQINCAVMVANSIKSFLESGNILNSVNFPDVKLSLKSPHRLTITNKNVPNIIGQFTSILGNSEINIDDLSHKVLADIGYTILNVDKSVPESVLHEISNIDGVMKTNLLF

SEQ ID NO: 88596 - protein, 197 aa, Unknown
  Bacterial polypetide isolated from the Sargasso Sea
IAVANNSVKNNEWERSEFIGVELYKKQLGLIGFGKVAKLVSKRMQSFDMKIVFYDPFIDSSTENEEKVELEELLKTSDFISIHVPKNKETINLVSKEKLSIVKEGSIIINTSRGGLIDEQEVFNLVNENKLYSAGFDVYEKEPPEMNEEKNRSKVITLPHLGASTKEAQARAGQQLVENIKNILNEDLSSVVNKNLK

SEQ ID NO: 88597 - protein, 149 aa, Unknown
  Bacterial polypetide isolated from the Sargasso Sea
MKIVFYDPFIDSSTENEEKVELEELLKTSDFISIHVPKNNETINLVSKEKLSIAKEGSIIINTSRGGLIDEQEVFNLVNENKLYSAGFDVYEKEPPEMNEEKNRSKVITLPHLGASTKEAQARAGQQLVKNIKNILNEDLSSVVNKNLK

SEQ ID NO: 88598 - protein, 312 aa, Unknown
  Bacterial polypetide isolated from the Sargasso Sea
NANAVKELVICGMLLSSRGIIDGIEFAKKLDLKDPEVLNKAMEAQKKSFAGNELDGKTLGIIGLGSIGSMLAQAAQTLGMKLIGYDPYISIESAWRLPREVEKADTMDELLQYSDYVSLHVPLAEETKNLINKSNLNKFKKGARLINLSRGGIVNSADVIKELETGNLGGFVTDFPTPELIKRSVDKNDVVLLPHLGASTKEAEINCAVMAANQMVNYLKHGTIVNSVNFPRISLSRGTHHRLVIINHNEPGMISKITDSIAACDINIAEMTNKSKDKIAINLIDLEIEASSELIRHLESVEHVLSVRSLSI

SEQ ID NO: 88599 - protein, 280 aa, Unknown
  Bacterial polypetide isolated from the Sargasso Sea
MLRLLRKKEFLLLILLGGNTIAAAEHTIAMMLALSRHIPIANSSTLSGKWERKKFVGNELYKKKLGVVGLGKIGAHVAKVANALGMEVYGYDPFVSTERAQQIQVKLSELEDLFKQSDYVTLHLPRTPETENLVNIEVLKSMKSSAKLINCARGGLIDEEALAEALNESLIAGAAIDVFSKEPLESNSPLLKVEKNLILTPHLGASTREAQENVAVDVAEQIRDVLLGLSARTAVNIPGLSPDIMDSLKPHLQLAETMGLLISQLSGGQIQKLEVKLQGE

SEQ ID NO: 88600 - protein, 261 aa, Unknown
  Bacterial polypetide isolated from the Sargasso Sea
PDLKMIARVGIGLDGVPLHECRKRGIRVSWTPDAVTRAVAELTVGQMLSSSRFVRMLDAGIRKQKWSRPAGRGIRESIIGLIGFGRIGSSVARLLGSFSPEQILVKDIVDKTSEIQALQQEGLNIRSAGLEEILKSSHIISLHVPLWKETRHMIGVHELEMMRQDAMLINTARGGIVDETALRDGLEKGFIAGAAIDVFEKEPYSGPLSLMENCILTPHLGSCTLECRARMESESLNEAIRFLQGDSILQEVPDAEYVYQE

SEQ ID NO: 88601 - protein, 207 aa, Unknown
  Bacterial polypetide isolated from the Sargasso Sea
FASDKLTRSNGFDSKSNLPDFFELYEKKILILGFGRIGKALAKRCLGFEMEVLVYDPFIDNKKIISCGCKPVSKTQGFKIADYISIHLPLNENTENLISDDEFKLFKKNLILINTARGGIVDESALYNALKSNKILGAGIDVFEQEPPTQNHKLFSLENIILTPHNSALTLECRKRMSLESCMNIFNYLKNKSNLNKSNIINFSNLD

SEQ ID NO: 88602 - protein, 282 aa, Unknown
  Bacterial polypetide isolated from the Sargasso Sea
YNHIKTADGWIIRSGTTLDSDIIQKADNLSVIGRAGVGVDNINISAATRRGIVVMNTPDANTISAAEHTMALILALSRNVSSGHDGLSKGEWNRHLLIGSELNGKTIGIVGLGKIGREVMHRSKAFNMQILGYDPFIPDDFFRDDALEVCDLEYLIKNSDYITLHIPLTEDTKNLFDYDNLIKMKKEARIINVARGGIINEDDLSKVLKEKKISGAALDVFESEPLNNNSPLISSPNIILTPHLGASTKEAKEGVSISICNQVKNFLINEELDNAINIPFKN

SEQ ID NO: 88603 - protein, 325 aa, Unknown
  Bacterial polypetide isolated from the Sargasso Sea
SSFNGVEVTNKIFGLIGCGNIGSIVASRAIGLKMKVLAFDPFLKEEKAKELGVKKVDLDELLRLSDVISLHTPLTEETKNIISADAINKMKKGSRLINCARGGLVDENACRAALENNHLAGAAFDVFVEEPAHNNVLFKAPNFIATPHLGASTKEAQENVALQIAEQISNFLNDGAVSNALNFPTLTAEEAPLLKPYIRLSYLLGTFLGQVTSENIKNIRLEMEGKAASLKDEPIIANLLTGILEPNFNAINNVNSREIANSKGLDFSTVKHDRRCDYETLLTASIKHEKGIRTISGTLIGGYMPRIVSIQNIPIESSFPNTALY

SEQ ID NO: 88604 - protein, 297 aa, Unknown
  Bacterial polypetide isolated from the Sargasso Sea
KITVDYKPGIQNSELLKIIKNYDGLAVRSNTHVTKELLEKAEKLKIIGRAGIGTDNIDKDAATEKGVIVMNTPFGNAVTTAEHTIAMIMSLVRMIPLADFSTRQGKWEKSKFNGIEITNKILGLVGCGNVGSIVANRAIGLKMKVLAFDPFLNKKRAKEIGVEKVTLDELLKKSDIISLHTPLTDETKNIISAEAINKMKNGAKLVNCARGGLVDEYVCRAALESGHLSGAAFDVFSEEPATSNILFEAPNFIATPHLGASTKEAQENVAVQIAEQMSDYLVSGAITNALNFPSGNC

SEQ ID NO: 88605 - protein, 281 aa, Unknown
  Bacterial polypetide isolated from the Sargasso Sea
SIIQDYDALMIRSGTQVTEEIINSSSKLRIIGRAGVGVDNVDVKAATQKGVLVVNSPGGNTIAAAEHTIAMMLALSRHIPIANSSTLSGKWERKKFVGNELYKKKLGVVGLGKIGAHVAKVANALGMEVYGYDPFVSTERAQQIQVKLSELEDLFKQSDYVTLHLPRTPETENLVNIDVLKSMKSSAKLINCARGGLIDEEALAQALNQSLIAGAAIDVFSKEPLESNSPLLKVEKNLILTPHLGASTREAQVNVAVDVAEQIRDVLLGLSARTAVNIPGL

SEQ ID NO: 88606 - protein, 264 aa, Unknown
  Bacterial polypetide isolated from the Sargasso Sea
EKGIIVMNTPDVNTVSAAEHTIGIMLSLARNISIGSQRLNAGNWDRNNLIGTELRNKTIGIVGLGKIGREVMNRCLSFGMRVIGFDPYIKDDLFSPDDVTLTDLDTLTKESDFITLHVPKLDSTNNLFDLKRLKMMKSTAMIINVARGGIINEEDLSIAVKERIISGAAIDVFVDEPIDTNHPFINIDNILMTPHLGASTKEAKEGVSVTICELVRDYLLNNKLSSALNIPISDMNILKQIQPHLLLAEKMGIIQGQLAQEPIR

SEQ ID NO: 88607 - protein, 264 aa, Unknown
  Bacterial polypetide isolated from the Sargasso Sea
SPLLKVEKNLILTPHLGASTREAQENVAVDVAEQIRDVLLGLSARTAVNIPGLSPDIMDSLKPHLQLAETMGLLISQLSGGKIQKLEVKLQGEFVQHPSQPLIIASLKGLLSKALGDRINYVNASLEAESRGISVVESKDEARPEFASGSLQLTTYGDNGDHRVAGSIFADGELRIISIDQYPVNVSPSRYMLVTRHRDMPGIIGKLGSLLGSNNVNIASMQVGRKIVRGEAVMVLSIDDPIPNELLDTIIEVEGITSANPVTL

SEQ ID NO: 88608 - protein, 390 aa, Unknown
  Bacterial polypetide isolated from the Sargasso Sea
MYKFKTFNNISEQALSLLTKAKFEYDDIEPDAILIRSHTLINYDFNKNLKCIARAGAGFNNIPVELATKNGIVVFNTPGANSNAVKELVICGMLLSSRGIIQGNAFAKSLIGKDETEINNLMEKEKKIFKGNELKGKVLGIVGLGSVGSLLAQAASILDMKIIGYDPYISVDAAWMLPKEVEKAENLEFLLSNSDYISLHVPLSNLTKNLVSKKLLDNVKTNAKLINLSRGGVVNNFDVIDALKNKKLSSYVTDFPTPELIDRSVHNGDVILLPHLGASTKEAEINCSIMAAEQTKDFLENGLIINSVNFPNVKLGRTTQFRIVIVHKDEPGVLGKITSEVAHNNLNITDMINKSRDEIAITLIDLNENPSQELLKKIHDNENVLTVRVC

SEQ ID NO: 88609 - protein, 301 aa, Unknown
  Bacterial polypetide isolated from the Sargasso Sea
MYKVLKLNNIADEGLSVFDLDQFHCGDDVTNPDAIILRSFDMHDMDIPKELKAVGRAGSGVNNIPIEKYTEQAIPVFNAPGANSNAVKELVLASILISARNIHSAIKYVESVKDSDDLKSDIEQGKKAYVGFELPTKTLGVIGLGQIGIKVANAAHDLGMNVIGYDPLITVDNAINLQPGVQNVNELKELLNESDIITIHIPHKKETENFIGENEIKQLNDGAIIINLSREAIVDSIAVLKHFETSKIKTYVTDFPNEEMINHKDVLVMPHLGASTKEAQINCAVMVAKSIKSYLETGNIL

SEQ ID NO: 88610 - protein, 312 aa, Unknown
  Bacterial polypetide isolated from the Sargasso Sea
MKILICDKLDKITIEELQKLGTCIDVSQDKDKSKKIKENIIDAEIVLVRSDTQINKELLDVSKKLKIIGRSGVGTDNIDIEEASIRNIYVTNTPEANVISAAELTIGLLISAARNITVANNSVKNNEWERSEFIGVELYKKQLGLIGFGKVAKLVSKRMQSFDMKIVFYDPFIDSSTENEEKVELEELLKTSDFISIHVPKNKETINLVSKEKLSIAKEGSIIINTSRGGLIDEQEVFNLVNENKLYSAGFDVYEKEPPEMSEEKNRSKVITLPHLGASTKEAQARAGQQLVENIKNILNEDLSSVVNKNLK

SEQ ID NO: 88611 - protein, 239 aa, Unknown
  Bacterial polypetide isolated from the Sargasso Sea
EALGMHVAFFDVVNKLPLGNARQVQHLHDLLGQSDIVSLHVPELPSTEGMIGAAEIAAMKPGGIFINAARGTVVDIEALAAALQAKKLLGAAIDVFPVEPRTNKDEFQSPLRGLDNVILTPHIGGSTMEAQANIGLEVAEKLVKYSDNGTSTSSVNFPEVALPAHPGKHRLLHIHRNVPGVLSEINRIFSDNAINVSAQYLQTNEKIGYVVIDIDAASSDLALDKLARVSGTLRSRVLF

SEQ ID NO: 88612 - protein, 243 aa, Unknown
  Bacterial polypetide isolated from the Sargasso Sea
KKKLGVVGLGKIGAHVAKVANALGMEVYGYDPFVSTERAQQIQVKLSELEDLFKQSDYVTLHLPRTPETENLVNMEVLKSMKSSAKLINCARGGLIDEEALAEALNKSFIAGAAIDVFSKEPLESNSPLLKVEKNLILTPHLGASTREAQENVAVDVAEQIRDVLLGLSARTAVNIPGLSPDIMDSLKPHLQLAETMGLLISQHSGGQIQKLEVKLQGEFVQHPSQPLIIASLKGLLIKALWR

SEQ ID NO: 88613 - protein, 390 aa, Unknown
  Bacterial polypetide isolated from the Sargasso Sea
MSTYKVYNNIAEEGIKCLSDSGFKEDTNNPEALLIRSHIIDESDFNESLRCICRAGAGVNHIPINMATERGVVVFNTPGGNANAVKELVICGLLLSSRGIIQGHTFTQGLNSKNSSDLTNLVENNKKRFKGSELKGKTIGIIGLGSIGSLLAQTVENMGMKIIGYDPNISIDSAWQLPKDVEKAEDLKYLLSNSDYISIHVPLVEETKNLISKDNIKYIKKGAKLINLSRESIVNNLDILSALESKKISSFVTDFPTPELVNRSIDYSDVILLPHLGASTKEAEINCAIMAAEQANNFLINGEIINSVNFPRVRLRRTTKNRLVIIHKDEPGLIGSITGELASKNINISDMINKSSNEIAITLIDIEIEPSKNLLSNINKIDKVLSVRCC

SEQ ID NO: 88614 - protein, 354 aa, Unknown
  Bacterial polypetide isolated from the Sargasso Sea
GFDPFVNQEMFNQKEIKIVELDELTRNADFITIHVPLNDKTRDLFNFNRLKSMKKTSRIINVSRGGIINEQDLAKALTNKEIAGAAIDVFAQEPVEKDNLLIDAPNILLTPHLGASTKEAKEGVSISICEQLRDYLLEEKLSNAINMPISDLSTMKEIQSSLDLAETMGRLQEQLNPESIKKIQVECSGSLEDSKPIALAFLKGFLSRRIPERINYINSEALAIDLGIKIEHSYTNDSGSYTNLIRTRVSGMSKPSRIAGSIFGQNEPRLVNILGFDIDVKPYGYMLFAKNKDIPGVIGKVGTALGDFNVNIGGFILSRAEKGQAFSVVRVDNMVSDENLSELRKIPEIISLKQ

SEQ ID NO: 88615 - protein, 443 aa, Unknown
  Bacterial polypetide isolated from the Sargasso Sea
GIVVMNTPDVNTISAAEHTIAMMLALSRNISIGDLEIKQKKWNRHLLVGSEIKNKTLGIVGLGKIGKEVMKRCLPFGMNVIGFDPFVNQKMFNQEEIKIVELDELTRNADFITIHVPLNDKTRDLFNFNRLKSMKKTARIINVSRGGIINEQDLAKALTNKEIAGAAIDVFAQEPVEKDNPLIDAPNILLTPHLGASTKEAKEGVSISICEQLRDYLLEEKLSNAINMPISDLSIMKEIQPSLDLAETMGRLQDQLNPEAIKKIQVECSGSLEDSKPIALAFLKGFLGRRIPERINYINSEALAIDLGIKIEHSYTNDSGSYTNLIRTRVSGISKPTRIAGSIFGQNEPRLVNILGFDIDVKPYGYMLFAKNKDVPGVIGKVGTALGDFNVNIGGFILSRAEKDQAFSVVRVDNMISDENLSELRKIPEIISLKQLTCDEYSS

SEQ ID NO: 88616 - protein, 330 aa, Unknown
  Bacterial polypetide isolated from the Sargasso Sea
GSGVNNIPIDKYTENAIPVFNAPGANSNAVKELVLASILITARNIHNAIKYVESVKHSENLKDDIENGKKEYVGFELPKKTLGVIGLGQIGVKVSNAAYDLGMNVIGYDPLITVDNAINLQPGVQKVSDLKELLKISDIITIHIPYKKETENFIGDSEIKTLRDGAIIINLSREAIVDSDAVLQHLDSNKIKTYVTDFPSEAMINHEGVLVMPHLGASTKEAEINCAVMVASSLKSYLETGNILNSVNFPDVKLGINSPHRLTITNKNVPNIIGQFTSILGNAGINIDDLSHKVLDEIGYTILNVDKPITEIVLHEISNIEGVMKTNILF

SEQ ID NO: 88617 - protein, 368 aa, Unknown
  Bacterial polypetide isolated from the Sargasso Sea
MFNFKSFNNIAEDGLKILGDNNFKEVSDNPDGLLLRSYALTKEDFGDNLKCIARAGAGVNNIPIDEATKQGIVVFNTPGANANAVKELVICGMLLSSRGIIDGIEFAKNLDLKDPDGLNKAMEVQKKTFAGNELHGKTLGIIGLGSIGSMLAQAAQTLGMKLIGYDPYISIEGAWRLPREVEKAETMDELLQHSDYVSLHVPLVEETKNLINKLNLKKFKKGARLINLSRGGIVNTNDVIKDLETGNLGRFVTDFPTPELIKRSAEKNDVVLLPHLGASTKEAEVNCAVMAANQMVNYLQHGTIVNSVNFPRISLSRGTHHRLVIINHNEPGMISKITDSIAAFDINIAEMTNKSRDEIAINLIDLEC

SEQ ID NO: 88618 - protein, 293 aa, Unknown
  Bacterial polypetide isolated from the Sargasso Sea
GIIQGHSFTKSLDVAVPSELANLVETNKKNFKGTELKGKTIGIIGLGSIGSLVAQSVDSLGMKIIGYDPNISIDAAWQLPKEVEKAENLKYLLSNSDYISVHVPLLDDTQNLISKDAIKYIKKGAKLINLSRGAIVNNSDVLHALEANKIGCFVTDFPTPELVKRSNEFSDVILLPHLGASTKEAEVNCAIMASEQAIRFLKDGEITNSVNFPKIKLGRTTKHRLVIIHKDEPGVIGSITGEIASNNINIPDMINKSRDEIAITVIDLDEKPSQNLLNSLKNISSVLNVRICK

SEQ ID NO: 88619 - protein, 387 aa, Unknown
  Bacterial polypetide isolated from the Sargasso Sea
MYKVLKLNNIAEEGLSVFDLDAFHCGDDVTNPDAIILRSFDMHDMDIPKNLKAVGRAGSGVNNIPVDKYTEQAIPVFNAPGANSNAVKELVLASILISARNIHSAIKYVESVKDSDDLKNDIEQGKKAYVGFELPTKTLGVIGLGQIGVKVANAAHDLGMNVIGYDPLITVDNAINLQPGVQNVNELKELLNESDIISIHIPHKKETENFIGENEIKQLNDGAIIINLSREAIVDSTAVLKHLETSKIKTYVTDFPNGEMINHKDVLVMPHLGASTKEAQINCAVMVAKSIKSYLETGNILNSVNFPNVKLSIKSPHRLTITNKNVPNIIGQFTSILGNSEINIDDLSHKVLDDIGYTILNVDRLVPESVLHEISNIDGVMKTNLLF

SEQ ID NO: 88620 - protein, 168 aa, Unknown
  Bacterial polypetide isolated from the Sargasso Sea
NDGAIIINLSREAIVDSIAVLKHLETSKIKTYVTDFPNGEMINHKDVLVMPHLGASTKEAQINCAVMVAKSIKSYLETGNILNSVNFPNVKLSIKSPHRLTITNKNVPNIIGQFTSILGNSEINIDDLSHKVLDDIGYTILNVDKLVPESVLHEISNIDGVMKTNLLF

SEQ ID NO: 88621 - protein, 346 aa, Unknown
  Bacterial polypetide isolated from the Sargasso Sea
GEFKCVARAGSGTNNIPIDEATKQGIVVFNTPGANANAVKELVICGMLLSSRGIIEGIEFAKKLDLKDPKGLNKAMEAQKKSFAGNELDGKTLGIIGLGSIGSMLAQAAQTLGMKLIGYDPYISIESAWRLPREVGKAETMDELLQHSDYVSLHVPLAEETKNLINKSNLNKFKKGARLINLSRGGIVNTADVIKELETGNLGRFVTDFPTPELIKRSTEKNDVVLLPHLGASTKEAEVNCAVMAANQMVNYLKHGTIVNSVNFPRISLSRGTHHRLVIINHNEPGMISKITDSIAECGINIAEMTNKSKDKIAINLIDLELEASSELIQQLESVEHVLSVRSLSI

SEQ ID NO: 88622 - protein, 239 aa, Unknown
  Bacterial polypetide isolated from the Sargasso Sea
ESLGMDVYFYDVVSKLPIGNATQVGTLQELLNISDVVSLHVPETPATKYMFKAEQFAQMKPGSILMNASRGTVVDIDALADALSSGKLLGAAIDVFPVEPKSNDEEFVSPLREFDNCILTPHVGGSTIEAQENIGREVAEKLAMYSDNGTSVSSVNFPEVALPSHPNQHRLLHIHENVPGVMSEINQVFSENGINVCGQYLQTKEDIGYVVVDVDKAYGELALEKLRQVKGTIRCRVLF

SEQ ID NO: 88623 - protein, 525 aa, Unknown
  Bacterial polypetide isolated from the Sargasso Sea
MIQILVTDPLSDAGISVLENAKIKVVVDSNANKQDLLKIVPEIDGWIIRSGTIIDKDLIHAAKKLQVIGRAGVGVDNIDLPAATQKGIIVMNTPDVNTVSAAEHTIGIMLSLARNISIANQRLNSGKWDRNNLVGTELRNKTIGIVGLGKIGREVMTRCLSFGMRVIGCDPYITDNIFSSDDVRLTDLDTLTKESDFISVHVPKLDSTNNLFDLERIKLMKSTSMIINVARGGIINEQDLAFAVKEGIIAGAAVDVFVNEPIEKDHPFINIDNILITPHLGASTKEAKEGVSVTICELVRDYLINNKLSSALNIPITDMNILKQIQPHLLLSERMGIIQGQLAQGAIEKVKVNVQGPFDDFKPFMLAFIKGLLNDRIPDRVNFINAELLAKERGIVIEYGANNEEGSYANLISTSVIFDNKERLLDGSVFDGNQLRLVNILGYDMDINPTGHLLFVNNEDVPGVIGKVGTLLGQHKINIGAYILSDSEKMDEAFAVIRLDSEVPSSVIELLIQIPEILSVQQINC

SEQ ID NO: 88624 - protein, 309 aa, Unknown
  Bacterial polypetide isolated from the Sargasso Sea
MKILICDSLEKDVIDIFSKIGEVTNISDNENKEDQISKNILDAEVVVIRSATTITKELINSAKQLKVIARCGVGVDNIDLEQASKNNIYVTNSPNANIISVAELTIGLIISAARNIHTSNNSLKAGEWKRQKFTGTELYDKQLGLIGFGKAANEVAKRLSAFGMKIVFYDPYIEESKNEATKVDLDHLMQTSDVISIHVNKTKETENLIDSKALNMMKKGGIIVNTSRGGIVDEKSLFALVDDKKIIFGALDVYEKEPPIVDEFLSNSNIVTTPHLGASTKEAQLKAGKQTAENVKDILNGDLSSVINN

SEQ ID NO: 88625 - protein, 263 aa, Unknown
  Bacterial polypetide isolated from the Sargasso Sea
NIEFLKTSLPEDELIEKIKDAHFVGIRSRTQITEKVVEAAQKLVAIGCFCIGTNQVDLEATQRRGIPVFNAPFSNTRSVAELVLGQIILLLRQVPSKNAKAHRGEWEKTAVGSYEARGKTLGIIGYGHIGTQLSILAEHLGMRVQFFDIEDKLVLGNSAQVKSLEKLLNTSDVVSLHVPETPQTQDMIGEKELSQMKKGSILINASRGTVVDIDALAKALESGQLNGAAIDVFPVEPKSNTEEFESPLRAFDNVILTPPCGRQ

SEQ ID NO: 88626 - protein, 276 aa, Unknown
  Bacterial polypetide isolated from the Sargasso Sea
MSKVSLEKDKIRILLLEGVHQSALETLKSNGYSNIEFLKTSLPEDELIEKIKDAHFVGIRSRTQITEKVVEAAQKLVAIGCFCIGTNQVDLEATQRRGIPVFNAPFSNTRSVAELVLGQIILLLRQVPSKNAKAHRGEWEKTAVGSYEARGKTLGIIGYGHIGTQLSILAEHLGMRVQFFDIEDKLVLGNSAQVKSLEKLLNTSDVVSLHVPETPQTQDMIGEKELSQMKKGSILINASRGTVVDIDALAKALESGHLNGAAIDVFPVSLSRILKN

SEQ ID NO: 88627 - protein, 319 aa, Unknown
  Bacterial polypetide isolated from the Sargasso Sea
DAAAKRGIPVFFAPFSNTRSVAELVIGELLLMLRGVPEANAKAHRGVWNKLAVGSFEARGKKLGIIGYGHIGTQLGILAESLGMHVYFYDIESKLPLGNATQVQHLSDLLNMSDVVSLHVPENASTKNMMGAQELALMKPGALLINASRGTVVDIPALCDALARKHLAGAAIDVFPTEPATNSDPFSSPLCEFDNVILTPHIGGSTQEAQENIGLEVAGKLAKYSDNGSTLSAVNFPEVSLPLHGGRRLLHIHENRPGVLTAINQIFAAQSINIAAQYLQTTPQMGYVVIDIEAEEDVAQQALQAMKAIPGTIRARLLF

SEQ ID NO: 88628 - protein, 409 aa, Unknown
  Bacterial polypetide isolated from the Sargasso Sea
MAKHSLDKDKIKILLLEGVHQSAVDVFERAGYTNIEYHKASLGDEALLESIKDAHFVGIRSRTQLTAEVLKRAEKLIAIGCFCIGTNQVDLATAELLGIPVFNAPFSNTRSVAELVLGEIIMLMRGIPERNAIAHRGGWMKTAAGSYEVRGKTLGVIGYGHIGTQLGILAETLGMRVVFFDIEDKLPLGNAQQIHSMEQLLAQSDVISLHVPETAQTKDMISTAEFAAMRKGSIFINASRGTVVDIDALTVALKERHLAGAAIDVFPVEPQSNDDEFISPLRGLDNVLLTPHVGGSTAEAQENIGIEVAGKLAKYSDNGSTVSAVNFPEVSLPMHKGISRLLHIHQNRPGVLIKINKAFSEKGINIAAQYLQTTAEIGYVVMEVDTHQAEEALVELKAIEGTLRTRVLF

SEQ ID NO: 88629 - protein, 409 aa, Unknown
  Bacterial polypetide isolated from the Sargasso Sea
MAKHSLDKDKIKILLLEGVHQSAVDVFERAGYTNIEYHKASLGDEALHESIKDAHFVGIRSRTQLTADVLKRAEKLIAIGCFCIGTNQVDLATAELLGIPVFNAPFSNTRSVAELVLGEIIMLMRGIPERNAIAHRGGWMKTAAGSYEVRGKTLGVIGYGHIGTQLGILAETLGMRVVFFDIEDKLPLGNAQQIHSMEQLLAQSDVVSLHVPETPQTKDMISTAEFAAMRKGSIFINASRGTVVDIDALTVALKERHLAGAAIDVFPIEPQSNDDEFISPLRGLDNVLLTPHVGGSTAEAQENIGIEVAGKLAKYSDNGSTVSAVNFPEVSLPMHKGTSRLLHIHQNRPGVLIKINKAFSEKGINIAAQYLQTTAEIGYVVMEVDTHQAEEALVELKAIEGTLRTRVLF

SEQ ID NO: 88630 - protein, 410 aa, Unknown
  Bacterial polypetide isolated from the Sargasso Sea
MTAKFSLDKDKIKVLLLEGVHPNTVETFRAAGYTSVEYLKTSLSEEDLIERIRDVHFVGLRSRTQITEKVLDAANKLVAIGCFCIGTNQVELDAAHLRGIPVFNAPFSNTRSVAELVLGEILLLLRGIPEKNAKCHRGVWEKLANRSVEARGKKLGIIGYGHIGTQLGIIAESIGMKVYYYDIENKLSLGNAIQVPSMVELLNMSDVISLHVPETASTKDLIGAEQLRMMKPGAIFINASRGTVVDIDALADVIKSGHISGAAIDVFPSEPKSNDEEFLTPLRGLDNVILTPHIGGSTQEAQENIGLEVANKLVKYSDNGSTLSAVNFPEVSLPGHKGSSRLLHIHRNQPGVMNQINQIFADEGINIAGQYLQTSSHIGYVVIDVETEHSEKALAKLKEIGGTIRARILH

SEQ ID NO: 88631 - protein, 401 aa, Unknown
  Bacterial polypetide isolated from the Sargasso Sea
MEKFSLPKDKIKILLLEGLHQSAVQSFKNQGYSNIEYLKTSLDEAELIEKIRDVHFIGIRSRTQLTEKVLDAATKLAAIGCFCIGTNQVDLDAALMRGIPVFNAPFSNTRSVAELVLGQIIMLLRGIPERNAAAHRGEWQKTATQSFEARGKTLGIIGYGHIGTQLSIMAENIGMRVQFYDIEDKLVLGNATQVDFGTLLKTSDVVTLHVPETAQTKNMIGEAELDLMKQGSILINASRGTVVDIDALAAVMKAKKLAGAAIDVFPVEPTSNDEEFISPLREFDNVILTPHIGGSTQEAQENIGFEVAGKMVKYSDNGSTLSAVNFPEVSLPEHKGRSRLLHIHKNQPGMLTKINEAFAKHGINISGQYLQTNAEIGYVVIDIDSQDRDLALNELKAIPGT

SEQ ID NO: 88632 - protein, 408 aa, Unknown
  Bacterial polypetide isolated from the Sargasso Sea
MEKFSLPKDKIKILLLEGLHQSAVQSFKNQGYSNIEYLKTSLDEAELIEKIRDVHFIGIRSRTQLTEKVLDAASKLAAVGCFCIGTNQVDLDAALMRGIPVFNAPFSNTRSVAELVLGQIIMLLRGIPERNAAAHRGVWQKTATQSFEARGKTLGIIGYGHIGTQLSIMAENIGMRVQFYDIEDKLVLGNATQVDFGTLLKTSDVVTLHVPETAQTKNMIGEAELDLMKQGSILINASRGTVVDIDALAAVMKAKKLAGAAIDVFPVEPTSNDEEFLSPLREFDNVILTPHIGGSTQEAQENIGFEVAGKMVKYSDNGSTLSAVNFPEVSLPEHRGRSRLLHIHKNQPGMLTKINEAFAKHGINISGQYLQTNAEIGYVVIDIDSLDHELALNELKAIPGTLRARVLH

SEQ ID NO: 88633 - protein, 337 aa, Unknown
  Bacterial polypetide isolated from the Sargasso Sea
VIGAGSAGCVIFNRLSEDKNKKILILEAGGNDKSVTVSMPAALSIPMNSERFNWGLKTEPEPGLDNRIMNLPRGKGLGGSSSINGMCYVRGNPMDYELWSAKGAKGWHWGNVLPYFKKLEHSSEDGEFRGNDGPLSVKKGEAKNILYNTFVQASKEAGYAVSENMNGLQHEGMGPMEMSVKNGVRASAAKSYLYPALKRGNINVITKANVEKILFQNKKAKGVLFSRYGKKITVKAGNGVILCAGSIMSPKILKLSGIGRANELKNHAIEIILERKEVGNNLMDHLELYIQQECVKPITLYQYLNPFYKSLIGLQWLLFKKGPGATNHFETGGHIRS

SEQ ID NO: 88634 - protein, 305 aa, Unknown
  Bacterial polypetide isolated from the Sargasso Sea
MKFSHKYIIVGAGSAGCVLANKLSEDPKNSVLLIEAGPMDSSYSIKMPLAASSLFKSKKYGWCYETEPEKNLNNRTINWPRGKTLGGSSSINGMLYIRGQADDYNNWEQLGNNGWGYRDLLKYFIALENNQNHEDQFHGNFGPLWVETFQPILDASKEFLKACSEFGFKNNNDFNGTDQEGFGQYQVNIKNGKRFSAADAFLKPISNRANLDILTSTLVEKIIISNKKVIGVKISNKKFSGVIGCSSELILSGGSINSPQILMLSGIGPKNHLKKYQIALVHDLPGVGQNLQDHLTVNLSYKVNE

SEQ ID NO: 88635 - protein, 326 aa, Unknown
  Bacterial polypetide isolated from the Sargasso Sea
AFTRKILHKNGKAFGVEFDNNGEVQEVYSSNSVIVSCGAIKSPQILMLSGIGPADHLRSMDIEARENLSGVGKNLQDHLLVATGFECTKNVTIHKITQPHQKLFAGLKWLLTRKGIVASNIWEMGGQIFGNHNVKYPNLQYHFAPAFNKYEGRKIILSQGFLLQCDQLRPKSKGSVQLKSNNPYETPNSFFNYLSHPHDLKELREAFKKMIELISQPAFDEFRGKRIKPSPDVKSNSEIDSWIRETAITDYHPSGTCKMGNEPDSVVDEKLKVHGFENLYVVDASIMPEVVSGNLNAPTQMIAEKASDFILGKKPLKPINAKFHFQ

SEQ ID NO: 88636 - protein, 228 aa, Unknown
  Bacterial polypetide isolated from the Sargasso Sea
CKTPDTLYTYTKLIPKVLAGIQWFLSRSGPCSKSFLEAGGFAKSSPEREIANIQFHFFPSFVIDHGLVNPSSHGYQLHASPNHPKSRGQITLNSSNPYDYPKILFNYLEDEDDLKQTRECIHVARKILSQPSLAKHSGKEVGPGSDKQNDDELDEYIRSKAETAYHPCGTCKMGVDDMAVVDENLKVKGMQNLRVVDASVMPEIPSANLNAPTLMIAEKASDLILNNI

SEQ ID NO: 88637 - protein, 335 aa, Unknown
  Bacterial polypetide isolated from the Sargasso Sea
EPNCDNRQMVYPRGKTLGGSSSINGMLYIRGQSNDYDYWRQLGNVGWSWEDVLPYFKKSEDFQFGENEFHGSGGPIKVEKIRATFKVLDLFLEAAEEFGYKKTDDFNNGNNEGMGYFPFTIKNGFRCSTAVGYLNPIKKRKNLKIVTNAHIKNIQFENKKAISVNYWINNNLVNVKSNKEIILSAGTIGSPHILQASGIGPGEILKKNSIDVIKDHQSVGRNLTDHLMLRPVYKIKNLETLNNVYYSVTKKILTGLQFFFLRKGPLTVGASYVCGFVKSDSHLETPNLQFHISPASTDQLGKSSLHKFPAFTPTITNVRPTSRGSIELNSPDTRV

SEQ ID NO: 88638 - protein, 310 aa, Unknown
  Bacterial polypetide isolated from the Sargasso Sea
MKFSHKYIIIGAGSAGCVLANKLSENPENSVLLIEAGPMDNYSSIKMPLAASSLFKNKKYGWGYETQPEKNLNNRTINWPRGKTLGGSSSINGMLYIRGQAEDYEAWEKAGNKGWGYRDLMKYFVGLENNQNHQDQYHGNFGPLWVETYKPILKASYSFLNACKQSGLVQNNDFNGNEQEGYGQYQVNIKDGQRFSAADAFLKPVLDRTNLELLTNALVEKIIISNKKAIGVKVKFKNEVHVIGCTSEIILCGGSINSPQILMLSGIGPKKHLKEHQISLIQDLPGVGQNLQDHLTVNISYKINKLQTFS

SEQ ID NO: 88639 - protein, 271 aa, Unknown
  Bacterial polypetide isolated from the Sargasso Sea
LQVSGIGNPELLKNLGIDVIHQLNGVGENLHDHLMFRPIYKINGIKSLNKKVNSLFGKLMIGLEYIFKRSGPMTMGASQLCMFAKSDPSLELPDLQWHVQPMSMDTLAATKNHDFHAFTPTVSNVRPTSRGYVRVVDKDSRTYAKIKQNYLSTDHDRMVAAKGLKLTRKIVMESETFKKYSPEEYRPGIHINDDEELVKEASNFAQTIFHPVGTCKMGQDEMSVVDEKLKVRGIENLRVIDASIMPNITSGNTNAPTIMIAEKGADMILQQ

SEQ ID NO: 88640 - protein, 199 aa, Unknown
  Bacterial polypetide isolated from the Sargasso Sea
VSKSFLEAGGFAKSSPERKVANIQFHFFPSFVINHGLEDPKSHGYQLHASPNHPKSRGHITLNSSDPYDYPKILFNYLKEEEDLIQTRECIHVARKILSQPALIEHAGNEVGPGSNAQSDDELDDYIRSKADTAYHPCGTCKMGVDEMAVVDESLKVKGIQNLRVVDASIIPEIPSANLNAPVIMIAEKASDIILNSYN

SEQ ID NO: 88641 - protein, 208 aa, Unknown
  Bacterial polypetide isolated from the Sargasso Sea
MEIFDYIILGGGSAGCVLANRLSANPKNKVLLLEAGGKDTYPWIHIPVGYFKTMHNPKVDWCFKTEPDEKMNNRSIRYPRGKTLGGSSSINGLLWIRGQSEDYNIWRQLGNTGWGWNDVLPYFLKSENNELGKGEFHNDSGPITVANKKINLKLLDEFQNAAEEYGIPKTNDFNTGDNTGVGFFQFTTSFNKTGLKLRCSAAKGYFNP

SEQ ID NO: 88642 - protein, 280 aa, Unknown
  Bacterial polypetide isolated from the Sargasso Sea
GRQIPIPRGRVLGGSSSINGMLYVRGQALDFDVWGQLGNRGWSYSDILPYFKKSENFERGNDEFRGTDGLLNVADMYEKHELIDAFIDAGVELGYPRNPDYNGSKQDGFGYYQITQRNGRRESTARAFLNPAKNRKNLTVESRAHVTKIIFNKKRAAGVEYSIDGIKKTADVNNEIILTAGAVQSPQILELSGIGQPELLKSHGISIQHELPGVGENYRDHYAARMNWRVNKPISLNEETRGLNLVKEVFKYALTRRGALTWTAGVGHAFMKTRPELETP

SEQ ID NO: 88643 - protein, 301 aa, Unknown
  Bacterial polypetide isolated from the Sargasso Sea
VLVHVRGNAMDFENWGQLGLSNWNYESVLPYFKKSESIEGLDTEYRNTDGPLKLSRTENGNILSKVYLEAAKEAGYEINNDMNGYKQEGFGLMDTTIFDGKRQSTSVTYLHPIKQRQNLTLITNIQVLKIIIENSVAIGVEIKNKNKLKKIFADKEVLLSAGAINSPQILMLSGIGPEEELKNHNIKIISALNGVGKNLQDHLETYVQYECTKPVTLYSSFNPINMALIGMQWFLFKKGIAAHSNLEIGGFIRTNEMVDYPNMQYHFFPSLVIDHGRQNPSCHAFQAHVGPMRPTSRGFVN

SEQ ID NO: 88644 - protein, 125 aa, Unknown
  Bacterial polypetide isolated from the Sargasso Sea
FNYLKHEDDLKQMREGVGIAKKILSQKALKEYVGTEIRPGKNVSNQNELDEVIKNTSESAYHPSCTNKMGDDKTSVVDQNLRVHGIQNLRVIDASVMPDIVSANLNASTIMIAEKAYDQIKSSVS

SEQ ID NO: 88645 - protein, 140 aa, Unknown
  Bacterial polypetide isolated from the Sargasso Sea
SKEDYLPSIDPKYLSDERDIHDLYSAFDFIRKFSNNRHLKEIIDTSVNTTPMNASNEALLDHFKSNAGTVYHPCGTCRMSKDINSGVVSEKLKVHGIKNLWIVDASIMPNITSGNINAPVMMLSYLSSKIIIEELKQRYK

SEQ ID NO: 88646 - protein, 257 aa, Unknown
  Bacterial polypetide isolated from the Sargasso Sea
MEIFDYIILGGGSAGCVLANRLSANPKNKVLLLEAGGKDTYPWIHIPVGYFKTMHNPKVDWCFKTEPDEKMNNRSIRYPRGKTLGGSSSINGLLWIRGQSEDYNIWRQLGNTGWGWNDVLPYFLKSENNELGKGEFHNDSGPITVANKKINLKLLDEFQNAAEEYGIPKTNDFNTGDNTGVGFFQFTTSFNKTGLKLRCSAAKGYLNPVKKRSNLKIVVKAHVQKINFDGKKAIGASYYKGDKLVEVKANKEIILSA

SEQ ID NO: 88647 - protein, 331 aa, Unknown
  Bacterial polypetide isolated from the Sargasso Sea
AGGKDTYPWIHIPVGYYKTMHNPKVDWCFHTEKDKSMNDRSIRYPRGKTLGGSSSINGLLWIRGQSQDYNNWRQQGNNGWGWDDVLPYFIKSENNELGKSEFHNDSGPIVVSNKKIKLKMLDEFINAANEIGIPKVDDFNTGNNFGVGYFQFTTTRNKFGLKLRCSAAKGYLNPVKNRKNLEIIVDAHVKRIVFEDNRAIGIEYFKDDKLINSRANREVILSAGSIGSPHILQTSGIGDLDSLKNFGIDGVKYLKGVGKNLQDHLMFRPVYKVKNLESLNKKINSLFGNFLIGLEYVLQQSGPMTMGASQVCGFAKKDSSRETPNLQFHVQ

SEQ ID NO: 88648 - protein, 62 aa, Unknown
  Bacterial polypetide isolated from the Sargasso Sea
SPVGTCKMGQDEMAVVDETLKVKGLNNLRVIDASIMPNITSGNTNAPTIMIAEKGADMILRS

SEQ ID NO: 88649 - protein, 106 aa, Unknown
  Bacterial polypetide isolated from the Sargasso Sea
KIMLETETFKKYEPEEYSPGLHITDDEELVKAGSDFTQTIFHPVGTCKMGKDENAVVNDKLYVHGLQNLRVIDASIMPNITSGNTNAPTIMIAEKGADFILNNQIK

SEQ ID NO: 88650 - protein, 282 aa, Unknown
  Bacterial polypetide isolated from the Sargasso Sea
MHQGERAGVSKYYLDPVKNRKNLNILKNSYVEKILFDGKKAIGLQVKIKNKVQKIYAKKEVILSGGSINSPQLLMLSGIGDANHLKENGIEVVNDVKGVGKNLQDHLETYIQQECKTPNTLYTYTKLVPKVLAGIQWFMFKSGPCSKSFLEAGGFAKSSPEREISNIQFHFFPSFVINHGLEQPKSHGYQLHASPNHPKSRGQITLNSSNPYEYPKILFNYLQDEDDLQQTRECIHVARKILSQPALVEHAGKEVGPGIEAQSDDELNEYIRSKADTAYHPC

SEQ ID NO: 88651 - protein, 107 aa, Unknown
  Bacterial polypetide isolated from the Sargasso Sea
MDEFDYIIVGAGSAGCVLANRLTSKKENKVLLLEAGGKDNYPWIHIPVGYYKTMHNPKVDWCFHTEKDETMNNRSIRYPRGKTLGGSSSINGLLWIRGQSNDYDNWR

SEQ ID NO: 88652 - protein, 215 aa, Unknown
  Bacterial polypetide isolated from the Sargasso Sea
YQAIEGSKWFLFKKGRLANSHLELGGFVKSDKSYNHPNLQFHFFPYLVINHGLENPNFEAFQFHVCPNRPKSRGFVKIKTNNYKDDPKIQFNYLKHEDDLKQMREGVRIAKQILSQKVLKEYVGTEIRPGKNVSNQNELDEVIKNTSESAYHPSCTNKMGEDKTSVVDQNLRVHGIQNLRVIDASVMPDIVSANLNATTIMIAEKAYDQLNSIAG

SEQ ID NO: 88653 - protein, 307 aa, Unknown
  Bacterial polypetide isolated from the Sargasso Sea
MNFDYIIVGAGTAGCVLANRLSENGKFNVALFEAGGSSDIWKVNMPLAILYAMHDPKYNYKYYSEPEPNLNNRRLFCPRGKMVGGCSAHNGMVYVRGNKNDYERWASFGLKSWSYENVLPFFKKIETWSEGENEFRGGKGILPVNQSKNQNPLFSAFINASVEAGYKKNNDMNGEDQEGFGMYDITIHKGQRASASKYYLEPAKKRKNLKVFTNSFAERIIFEGKKAVGIEVNIKNKVTKVYANKEIVLSGGSINSPQLLMLSGVGPEKDLKNKGINVVHSLEGVGQNLQDHLETYIQQECKTKDTL

SEQ ID NO: 88654 - protein, 279 aa, Unknown
  Bacterial polypetide isolated from the Sargasso Sea
DEMMNNRSINYPRGKTLGGSSSINGLLYIRGQEQDYNMWRQLGNVGWGWKDVLPYFLKSENQERGKNEFHGVGGPITVEDQRIQLDILDVFMNAAEEVGIPKVDDFNKGDNFGCGYFQVTEKKGLRCSAAVGYLRPIKSRRNLKIITRAHVKNIDFDKKTAVGISYWRNNQLIKAKAKKEVILSAGSIGSPHILQVSGIGDPSKIKNHGIEILHNSPGVGKNLQDHIMMRPVYKVKNIKTLNKKVNSFFGKMLIGLEYILFRKGPMTMGASQLCGLQKV

SEQ ID NO: 88655 - protein, 252 aa, Unknown
  Bacterial polypetide isolated from the Sargasso Sea
MAEGYDYIIVGAGSAGCVLANRLSEDANSRVLLLEAGGRDLDPLIHIPIGMGKIYEHRLHDWKYVSEVEPNLNNRVLQVKRGKVLGGSSSINVMAYTRGHPGDFDRWAQKGALGWTHADCLPYFKRCEGWEEGGTESRGGDGPLGTSWATTKDPLFPAWIEAAKAAGLPVTEDYNGPQQEGFGRSQYTIKNGRRCSTAVAFLKPVMHRSNLTVVTKALTSRIIMQGTKAVGIEYIKGGQTIRADVDQEVILS

SEQ ID NO: 88656 - protein, 272 aa, Unknown
  Bacterial polypetide isolated from the Sargasso Sea
DKEHLKKFDKEIIIDNSNVGRNLQDHLGLDYLFKTHHHSLNKSLGTWPGRITSVLKYIYNRKGPLSLSINQSGGYVNWNSKHHYPNLQIYFNPLTYSITHKNKRPLLKTDKFNGFIIGYNSCRPKSLGRVELKTPNFADAPLIDPNFLSHEEDIYDVKCAINFSQVLANTNSIKKIRNESVTHDLLNATEEEMIDHFKSNAVSIYHPCGTCKMDEDPKKGVVSERLKVHGMENLWIADASVFPNITSGNINAPVMMLANLGSKFIIEDLNKI

SEQ ID NO: 88657 - protein, 76 aa, Unknown
  Bacterial polypetide isolated from the Sargasso Sea
TAYHPSCTNKMGVDQMSVVDEEARVYGVENLRVIDSSIMPDILSGNLNAGTIMIAEKVADMILGKEEKPIDAPFFY

SEQ ID NO: 88658 - protein, 90 aa, Unknown
  Bacterial polypetide isolated from the Sargasso Sea
PQEYRPGTHITDDEELVKAGSEHTQTIFHPVGTCKMGSGEDSVVDQRLKVHGIESLRVVDASIMPNITSGNTNAPTIMIAEKASDMILNK

SEQ ID NO: 88659 - protein, 100 aa, Unknown
  Bacterial polypetide isolated from the Sargasso Sea
LQSYSSSETAPGVHIQTSEELESFAREQGSIIYHPVSTCKMGEDTMAVVDSRLCVHGIKGLRVVDASIMPTVTTGNTNAPTIMIAEKASDIIKEDARSAL

SEQ ID NO: 88660 - protein, 206 aa, Unknown
  Bacterial polypetide isolated from the Sargasso Sea
MKYDHIIIGAGSAGCVLATRLTEDPEISVLLLEAGPDYLDIDSAPDDVKFGNNMWKSAYGQHSWGYPAFPTKHRSTPMIIPRGKVVGGSSSINGQVICRGIPEDYDNWAKWGNSEWSFEKVLPYFRKLENDLDFGSSDIHGSDGPIPVRRYKRKELLPSFEQFYESCINLGYPEDPDQNSPESFGIGMRALNNIDGVRMSTSSPIS

SEQ ID NO: 88661 - protein, 280 aa, Unknown
  Bacterial polypetide isolated from the Sargasso Sea
WSEGENQFRGSLGPLPINLSKNSNPLFKAFIEAAAEAGHKTNIDMNGKEQEGFGMFDTTMHQGERAGVAKYYLNPVKNRKNLSILKNSFVEKILFEGKKAVGLEVKIKNKVEKIYANKEVILSGGSINSPQLLMLSGVGDEAHLKDNGIKVVHNSKGVGKNLQDHLETYIQQKCKTPNTLYTYTKLLPKILAGMQWFMFKSGPCSKSFLEAGGFAKSSPERKVANIQFHFFPSFVINHGLEEPDSHGYQLHASPNHPKSRGEITLNSSNPYDYPKILFNY

SEQ ID NO: 88662 - protein, 292 aa, Unknown
  Bacterial polypetide isolated from the Sargasso Sea
DSWAQLGNSGWGYSDVLPYFKRCEEKIGEGDELYRGKSGNLKITDLEWRHPLCDAFIKGANSIGIPTNTDYNGANQEGVSYVQRTTYNRRRVSSARAFLNPAKSRKNLTVYTNAHVTRILFEARRAIGVELKRGDSGGQTQRIIAKREVILSGGAINSPQVLQLSGIGPANLLNDLEIPLVHDLPGVGENLRDHYAPRFTARVKNIDTINEKARGPRLWWEVAKYLLGGNSIVNLSPTLVYCFWHSDENVRNKDLQLTFTPASYKEGVQSELDDQPGFTIASWQQRPDSRGY

SEQ ID NO: 88663 - protein, 168 aa, Unknown
  Bacterial polypetide isolated from the Sargasso Sea
MNKTYDFIIVGGGSAGCVLANRLSENPENQVLLLEAGRPDSIWDIFIHMPAGLSIPIGNRFYDWIYETEPEPYMNGRRIYQGRGKVLGGSSSINGMIFQRGNPQDYERWAADPGMEEWDYSHCLPYFKKMENCLAGGDDFRGAQGPLKVEREPASTPLFQAFLRQSTG

SEQ ID NO: 88664 - protein, 185 aa, Unknown
  Bacterial polypetide isolated from the Sargasso Sea
SPEREIANIQFHFFPSFVINHGLINPSSHGYQLHASPNHPKSRGLITLNSSDPYDYPKILFNYLEHEDDLKQTRECIHVARKILSQPSLVKHSGNEVGPGSNKQTDEELDEYIRSKAETAYHPCGTCKMGTDEMSVVDETLKVKGIENLRVVDASVMPEIPSANLNAPTLMIAEKASDFILNSQR

SEQ ID NO: 88665 - protein, 141 aa, Unknown
  Bacterial polypetide isolated from the Sargasso Sea
MYDFIIVGAGSAGCVLANRLSENPSNRVLLLEAGGKDLNPMIHLPIMCGALFPLPLNNWHYNSEPDSNLDNRKIFIPRGKTLGGSSSINGMVYIRGHKRDYDIWRQLGCEGWSYDDVLPYFKKLENHIERDDKFHGKKGPL

SEQ ID NO: 88666 - protein, 328 aa, Unknown
  Bacterial polypetide isolated from the Sargasso Sea
MNFDYIIIGGGSAGCVLANRLSENSRNNVLLIEAGKDSDIWKVNMPLAILYAMHDPKYNYKYYSEPEPNLNNRKIFCPRGKMIGGCSAHNGMVYVRGNPNDYSRWAKMGLDEWSYEKVLPYFKKIETWSEGGNEYRGGNGILPVNQSKNSNPLFKAFINSAGEAGYKINSDMNGKDQEGFGMYDVTIHKGERASVSKYYLKPAKSRKNLKILTEKYVKRIIFDGKKAIGVEILGKNKKVEKIYSNKEIILSAGAINSPQILMLSGIGPGDHLRENGIDVIHSLEGVGSNLQDHLEVYIQQECKKPLTLYSYVNKINMVKVGNQWVLSK

SEQ ID NO: 88667 - protein, 208 aa, Unknown
  Bacterial polypetide isolated from the Sargasso Sea
MDEFDFVIIGAGSAGCVLANRLSADPNNKVLLLEAGGKDTYPWIHIPVGYFKTMHNPKVDWCFHTEKDETMNNRSIRYPRGKTLGGSSSINGLLWIRGQSNDYDNWRQQGNAGWGWDDVFPYFLKSENNELGPNEFHNDKGPITVSNKKINLDMLEEFQNAAEETGIPRTEDFNTGDNFGIGYFQFTTSRNKLLKLRCSAAKGIFKSR

SEQ ID NO: 88668 - protein, 155 aa, Unknown
  Bacterial polypetide isolated from the Sargasso Sea
GITPTVANIRPTSRGEINIVSNNIKDYPKIKMNYLSTDDDRYVAAQGLKLVRKIMLETETFKKYEPEEYRPGLHIKDNEELVKVGSDHTQTIFHPVGTCKMGNDENSVVDEKLKVHGIENLRVIDASIMPNITSGNTNAPTIMIAEKGADMILGK

SEQ ID NO: 88669 - protein, 133 aa, Unknown
  Bacterial polypetide isolated from the Sargasso Sea
DNPKIKMNYLSTQDDRDVAAKALKIVRKIMLNTNTFKKYEPEEYRPGINIINDEELVKAASEHSQTIFHPVGTCKMGIGDEAVVNANLSVHGLKNLKVVDASIMPNITSGNTNAPTIMIAEKASDMIIEESKA

SEQ ID NO: 88670 - protein, 190 aa, Unknown
  Bacterial polypetide isolated from the Sargasso Sea
MFAKSDPSLELPDLQWHVQPMSMDTLGATKNHDFHAFTPTVSNIRPTSRGHVNIVDKDSRTYAKIKMNYLSTDHDRMIAARGLKLTRKIVMESETFKKYKPEEYRPGIDINDDEELVKAGSDFAQTIFHPVGTCKMGQDDMAVVDEKLKVKGIENLRVIDASIMPNITSGNTNAPTIMIAEKGADMILTH

SEQ ID NO: 88671 - protein, 283 aa, Unknown
  Bacterial polypetide isolated from the Sargasso Sea
FKTMHNPSVDWCYKTEPDASMNNRSIRYPRGKTLGGSSSINGLLYIRGQSRDYDIWRQLGNTGWGWDDVLPYFIKAENQERGKDKFHGIGGPLSVSDQRIQLPLLNEFQNAAEEFGIPKTKDFNTGDNHGCGYFQVTEKDGFRCSTAVGYLNPIKKRQNLKTITNAHVKKINFKSKTAIGIEYWQGDDLKKLTCNKEIILSSGSIGSPQILQTSGIGNSQKLKDLGIDVVQELKGVGENLQDHLMFRPIYKIQGLKSLNKKVNSLFGKLMIGLEYVFNRSGPQ

SEQ ID NO: 88672 - protein, 211 aa, Unknown
  Bacterial polypetide isolated from the Sargasso Sea
NPAKKRKNLNIFSNSFVEKIIFEGKKAIGIEVKIKNKVEKVYAEKEVILSGGSINSPQLLMLSGVGNSDHLKEKGIDVVSDIKGVGKNLQDHLETYIMQECKTPDTLYTYTKLIPKVLAGIQWFLSKSGPCSKSFLEAGGFAKSSPEREIANIQFHFFPSFVIDHGLVNPSSHGYQLHASPNHPKSRGQITLNSSNPYDYPKILFNYLEDE

SEQ ID NO: 88673 - protein, 287 aa, Unknown
  Bacterial polypetide isolated from the Sargasso Sea
RIPIGYAKLIDNPVANWCYSSEPDEGTGNRRIPVPRGKLLGGSSSINGMVFVRGQAQDYDHWAQLGNRGWSYNDVLPIFKNMESYDGGDDAYRGRDGLLRVTDTDQKGPLYDALIAGAESIGLPYNPDYNGAQQEGIAMTQTTISGGRRMSTARAYLEPARNRTNLQIETGAMTECLLLEGKRCVGVRYSVGGSVREARAGREVMLSAGSINSPQLLELSGIGNPEILKACGVDVLHELPGVGENLRDHYSPRMRYRIAKPDWTYAVHGRGVRLVGQVLKYITKGEG

SEQ ID NO: 88674 - protein, 241 aa, Unknown
  Bacterial polypetide isolated from the Sargasso Sea
MNNYDFIILGAGSAGCVLANRLSENPSHKVLLLEAGGKDNYPWIHIPVGYFKTMHNPKTDWCYKTEPDESMNNISIRYPRGKTLGGSSSINGLLYIRGQNRDYDVWRQLGNTGWGWDDVLPYFIKAEDQERGKNEFHGVNGPLAVSDQRIHLPLLDEFQNAAEEFGIPKTKDFNTGDNHGCGYFQVTEKDGFRCSTSVGYLNPIKSRKNLEIITHAHVKKIIFENKIAKKVEFWQGDELKK

SEQ ID NO: 88675 - protein, 258 aa, Unknown
  Bacterial polypetide isolated from the Sargasso Sea
LKDKGIEVINDLKGVGQNLHDHLETYIQQECKTPNTLYTYTKLIPKVLAGIQWFLFRSGPCSKSFLEAGGFAKSSPDRKVANIQFHFFPSFVINHGLEDPNTHGYQLHASPNHPISRGHITLDSSNPYDYPKILFNYLKEEEDLKQTRECIHVARKILSQPALSEHAGKEIGPGSEAQSNEQLDEYIKSKADTAYHPCGTCKMGVDEMAVVDESLRVKGIKNLRVVDASIIPEIPSANLNAPVLMIAEKASDMILNQI

SEQ ID NO: 88676 - protein, 314 aa, Unknown
  Bacterial polypetide isolated from the Sargasso Sea
MNNRSIRYPRGKTLGGSSSINGLLWIRGQKEDYDIWRQLGNTGWGWNDVLPYFLKSENNELGKNEFHNDSGPISVANKKINLKLLDEFQNAAEEYGIPKTIDFNTGDNFGIGFFQFTTSFNKVGLKLRCSAAKGYLNPVKKRSNLKIIVNAHVQKINFEGKKTTGVSYYTGDKLNTVNAKKEVILSAGSIGSPHILQVSGIGESHKLKNFGIEVIQELNGVGKNLQDHLMFRPVYKVKNLKSLNRKVESLFGRLLMGLEYILNQSGPVTMGASQVCGFVKSDASRATPNLQFHVSPVSTDILGVTPMHDFEGNY

SEQ ID NO: 88677 - protein, 135 aa, Unknown
  Bacterial polypetide isolated from the Sargasso Sea
IKDYPKIKMNYLSTDDDRYVAAQGLKLVRKIMLETETFKKYEPEEYRPGIHITNDEELVKAGSEYTQTIFHPVGTCKMGQDENSVVNERLNLHGIENLRVVDASIMPNITSGNTNAPTIMIAEKASDMILKDSKS

SEQ ID NO: 88678 - protein, 82 aa, Unknown
  Bacterial polypetide isolated from the Sargasso Sea
SNQNELDEVIKFTSESAYHPSCTNKMGEDKTSVVDQNLRVHGIQNLRVVDASVMPDIVSANLNATTIMIAEKAYDQINSTVS

SEQ ID NO: 88679 - protein, 261 aa, Unknown
  Bacterial polypetide isolated from the Sargasso Sea
IGDPLKIKNHGIEIINNSPGVGKNLQDHIMMRPVYKVKNIKTLNKKVNSFFGRMLIGMEYIFFRRGPMTMGASQLCGFAKSDTSRDTPNLQFHIQPISTDKLGGADLHNFDAFTPTVANIRPTSRGEVYIASADTRDNPKIKMNYLSTPEDRKVTADGLKLIRKIVLGTKAFAKYKPEEFRPGINIQDDEELVKAASDYAQTIFHPVGTCKMGNDENSVVNDRLVAHGLRNLRIVDASIMPNITSGNTNAPTIMIAEKAAD

SEQ ID NO: 88680 - protein, 108 aa, Unknown
  Bacterial polypetide isolated from the Sargasso Sea
HVARKILSQPSLAKHSGNEVGPGSEKQTDEELNEYIRSNAETAYHPCGTCKMGIDEMAVVDENLKVKGIQNLRVVDASVMPEIPSANLNAPTLMIAEKASDLILDQSI

SEQ ID NO: 88681 - protein, 299 aa, Unknown
  Bacterial polypetide isolated from the Sargasso Sea
HNPKTDWCFKTEPDESINGRSINYPRGKTLGGSSSINGLLYIRGQSRDYDIWRQQGNTGWGWDDVLPYFLKSENQERGANEFHGVGGPLSVSDIRIKLDILDKFQNAAAEIGIPKTNDFNTGDNFGCDYFQVTEKNGLRCSTAVAYLNPAKKRSNLKVDVKAHVKQINFDGKKAIGISYWKNGELITVNANKEVILSAGSIGSPHILQTSGIGDQKKLKDLGVPLIHHNASIGKNLQDHLMLRPVYKVRNIKTLNKTINSFFGKMMIGMEFVFFRRGGNEYGCKSVMWVCQKVMKVEKL

SEQ ID NO: 88682 - protein, 304 aa, Unknown
  Bacterial polypetide isolated from the Sargasso Sea
PDETMNNRSINYPRGKTLGGSSSINGLLYIRGQKEDYQMWRQLGNTGWSWDDVLPYFLKSENQERGKSEFHNTGGPLSVSDQRINLPLLNEFQNAAEEFGIPKSNDFNTGDNHGCGYFQVTEKNGLRCSAAVGYLNPVKKRRNLKVIVNAHVKKINFEGKKAIGVSYFIKNEVFNSKAKKEVILSAGTIGSPQLLQVSGIGDNTNLKKIGVKTIQNLPGVGKNLQDHLMFRPVYKVKNIESLNKKINSFFGKMLIGMEYVFFRKGPMTMGASQLCGFAKSDPSRETPNLQFHVQPISTDTLGSS

SEQ ID NO: 88683 - protein, 184 aa, Unknown
  Bacterial polypetide isolated from the Sargasso Sea
MEQFDYIVIGAGSAGCVIANRLGEDPKKKILVLEAGGSDRSLTISMPAALSVPMNSKRFNWGLKTEPEPGLNNRIMNLPRGKGLGGSSSINGMCYVRGNPMDYELWSAKGALGWHWANVLPYFKKLEKVSENSDLRGNEGPITVTKGNSRNILNLKFLEAGAQAGYPLSENMNGIQHEGMSPHG

SEQ ID NO: 88684 - protein, 162 aa, Unknown
  Bacterial polypetide isolated from the Sargasso Sea
LRPESRGYIALKSLDPSVPPIIQPNYFATQKDRDTLIKGVKMSREIMNQSAFDEYRGKEITPGIHVQTDEEIEEFIRNAAETIYHPVGTCKMGSDEFAVVDDKLKVRGVENLRVVDASIMPTLIGGNTNAPTIMIADKISDHILGNEFLPSQHVSYKDKNAA

SEQ ID NO: 88685 - protein, 136 aa, Unknown
  Bacterial polypetide isolated from the Sargasso Sea
FNYMKHPDDWIEFRNCIKITRKILNQPAFKDFYGEEIQPGKQKISNDDLDNFIKEEAESAYHPCGTIKMGDKNDPSSVVDPNCKVIGIENLRVVDSSIFPRITNGNTNAPSIMVGEKASDIILGKMPLPRENLEPF

SEQ ID NO: 88686 - protein, 306 aa, Unknown
  Bacterial polypetide isolated from the Sargasso Sea
MNNRSIRYPRGKTLGGSSSINGLLWIRGQSNDYDNWRQQGNTGWGWDDVLPYFLKSENNELGKDEFHNDKGPITVTNKKINLKMLEEFQNAAEEFGIPRINDFNRGDNFGVGYFQFTTTRKKLLKLRCSAAKGYLNPVKKRSNLKIIVNAHVQKINFEGKKATSVSFYRNDKLTTIKANKEILLSAGSIGSPHILQVSGLGDAQKLKNYGISIVQELKGVGKNLQDHLMFRPVYKVKNLKSLNGKINSLFGNLLIGLEYILNQSGPMTMGASQVCGFLKSDPSRATPNLQFHVQPISTDILGATKM

SEQ ID NO: 88687 - protein, 211 aa, Unknown
  Bacterial polypetide isolated from the Sargasso Sea
MGLEYLLFQSGPVTMGASQVCGFAKSDPSRETPNLQFHVSPVSTDILGVTPMHDFEGITPTVANIRPTSRGEINIVSSDSREYPKIKMNYLSTQDDRYVAAQGLKLVRKIMMETKTFKPYQPEEYRPGLNITDDEELVKAASDYAQTIFHPVGTCKMGNDDEAVVSDKLSVHGLQNLRVVDASIMPNITSGNTNAPTIMIAEKASDMILKK

SEQ ID NO: 88688 - protein, 255 aa, Unknown
  Bacterial polypetide isolated from the Sargasso Sea
NRLSSIKNNKVLLLEAGGKDTYPWIHIPVGYFKTMHNPKVDWCFTTEKDETMNNRSIRYPRGKTLGGSSSINGLLWIRGQSNDYDNWRQQGNSGWGWDNVLPYFLKSENNEIGKNEFHSDEGPIQVSNKKINLKMLEEFQNAAEEIGIPRTNDFNTGDNFGIGYFQFTTSRQKLLKLRCSAAKGYLNPVKNRSNLKIIVNAHVQKINFEGKKAIGVNYFTKDKLSTVNANKEVILSAGSIGSPHILQVSGIGDSE

SEQ ID NO: 88689 - protein, 293 aa, Unknown
  Bacterial polypetide isolated from the Sargasso Sea
MGKFGLSNWSYDKVLPYFKKIETWSGGENQFRGSLGPLPVNLSENSNPLFKAFIDAAAEAGHRTNIDMNGEEQEGFGMFDTTMHEGERAGVAKYYLNPVKNRKNLNILKNSFVEKILFEGKKAVGLQVKIKNKVQKIYANKEVILSGGSINSPQLLMLSGIGDEAHLRDNGIEVVHNSKGVGKNLQDHLETYIQQKCKTPNTLYTYTKLIPKVLAGIQWFMFKSGPCSKSFLEAGGFAKSSPERKVPNIQFHFFPSFVINHGLEDPDSHGYQLHTSPNHPKSRGEITLNSSDP

SEQ ID NO: 88690 - protein, 195 aa, Unknown
  Bacterial polypetide isolated from the Sargasso Sea
MNNYDFIILGAGSAGCVLANRLSENPAHKVLLLEAGGKDNYPWIHIPVGYFKTMHNPKTDWCYKTEPDESMNNISIRYPRGKTLGGSSSINGLLYIRGQNRDYDVWRQLGNTGWGWDDVLPYFIKAEDQERGKNEFHGVNGPLAVSDQRIHLPLLDEFQNAAEEFGIPKTKDFNTGNNLGCGYFQVTEKDGFRCS

SEQ ID NO: 88691 - protein, 274 aa, Unknown
  Bacterial polypetide isolated from the Sargasso Sea
VRGNRNDYERWENFGLKSWSYEKVLPYFKKIETWSGGENQYRGSLGPLPVNQSKNDNPLFKAFINSASEAGHTVNPDMNGEEQEGFGMFDTTIHEGQRASATKYYLNPAKKRKNLNIFSNSFVEKIIFEGKKAIGIEVKIKNKVEKVYAEKEVILSGGSINSPQLLMLSGVGNSDHLKEKGIDVVSDIKGVGKNLQDHLETYIMQECKTPDTLYTYTKLIPKVLAGIQWFLSRSGPCSKSFLEAGGFAKSSPEREIANIQFHFFPSFVIDHGLV

SEQ ID NO: 88692 - protein, 197 aa, Unknown
  Bacterial polypetide isolated from the Sargasso Sea
CSKSFLEAGGFAKSSPDRKVANIQFHFFPSFVINHGLEDPDSHGYQLHASPNHPKSRGEITLNSSDPYDYPKILFNYLKEEEDLKQTRECIHVARKILSQPALAEHAGDEVGPGFNAQSDDELNEYIRSKADTAYHPCGTCKMGVDDMAVVDQDLKVNGIGNLRVIDASVIPEIPSANLNAPTLMIAEKGSEAILNN

SEQ ID NO: 88693 - protein, 107 aa, Unknown
  Bacterial polypetide isolated from the Sargasso Sea
INVARKILSQPALSEHAGDEVGPGFDAQSDDELNEYIRSKADTAYHPCGTCKMGVDDMAVVDQDLKVRGIENLRVIDASVIPEIPSANLNAPTLMIAEKGSEAILNN

SEQ ID NO: 88694 - protein, 313 aa, Unknown
  Bacterial polypetide isolated from the Sargasso Sea
DPKIKVLLIEAGGKDTYPWIIFQFGYFKTMHNPKVDWCFHTEKDETMNNRSIRYPRGKTLGGSSSINGLLWIRGQSNDYDNWRQQGNSGWGWDDVFPYFLKSENNELGPNEFHNDKGPITVSNKKINLDMLEEFQNAAEETGIPRTDDFNTGDNFGIGYFQFTTSRNKLLKLRCSAAKGYLNPVKNRSNLKIVTKAHVEKINFEGKKAVGVNYFLKDKLITVKANKEVILSAGSIGSPHILQVSGIGDSDKLKNHGIETIHELKGVGRNLQDHLMFRPVYKVKNLKSLNSKINSLIGNFFIGLEYVFKQKWSL

SEQ ID NO: 88695 - protein, 94 aa, Unknown
  Bacterial polypetide isolated from the Sargasso Sea
EPEEYRPGVHITDNEELVKAGSDYAQTIFHPVGTCKMGKDEYSVVNEKLKLHGIENLRVVDASIMPNITSGNTNAPTIMIAEKASDMILKDSKS

SEQ ID NO: 88696 - protein, 102 aa, Unknown
  Bacterial polypetide isolated from the Sargasso Sea
MDNFDFIILGAGSAGCVLANRLSANPKNKVLLLEAGGKDNYPWIHIPVGYFKTMHNPKTDWCYKTEPDESMNNISIRYPRGKTLGGSSSINGLLYIRGQNRD

SEQ ID NO: 88697 - protein, 202 aa, Unknown
  Bacterial polypetide isolated from the Sargasso Sea
LTVGASYACGFIKSDPYLETPNLQFHISPASTDVLGKASLHKFSAFTPTITNVRPTSRGSIELKSPDTRVSPKIKMNYLSTKEDREIAGKSLKIVRKIVMNSKAYKEHEPEELRPGINITDNEKLAIEAGKFANTIFHPVGTCKMGKDENAVVSDRLVAHGLFNLRIVDASIMPHITSGNTNAPTIMIAEKAADMIIEDSKS

SEQ ID NO: 88698 - protein, 225 aa, Unknown
  Bacterial polypetide isolated from the Sargasso Sea
MEKFDFIIIGAGSAGCVLANRLSANPKIKVLLLEAGGKDTNPWIHIPGGYFKTMHNPNTDWCFTTEKEPNCNNREMTYPRGKTLGGSSSINGMLYIRGQSNDYDYWRQLGNVGWSWEDVLPYFKKSEDFQFGENEFHGKGGPIKVEKIRATFKVLDLFLEAAEEFGYKKTDDFNSGNNEGMGYFPFTIKNGFRCSTAVGYLNPIKGRKNLKIITNAHIKNMNRKK

SEQ ID NO: 88699 - protein, 38 aa, Unknown
  Bacterial polypetide isolated from the Sargasso Sea
IKNLRVIDASIMPNITSGNTNAPTIMIAEKGADMILTN

SEQ ID NO: 88700 - protein, 214 aa, Unknown
  Bacterial polypetide isolated from the Sargasso Sea
IGLEYLFKQSGPMTMGASQVCGFAKSDPSKATPNLQFHVQPISTDILGASKLHDFDGITPTVANIRPSSRGEISIVSNDSRVNPKIKMNYLSTQDDRIVAAQGLKLVRKIMLETETFKKYEPEEYRPGVHITDDEELVKAGSEFTQTIFHPVGTCKMGKDDNAVVNEKLYMHGLRNLRVIDASIMPNITSGNTNAPTIMIAEKGAEFILNNQTQ

SEQ ID NO: 88701 - protein, 178 aa, Unknown
  Bacterial polypetide isolated from the Sargasso Sea
NLQFHVQPISTDILGASKLHDFEGITPTVANIRPTSRGEINIISNDSKIYPKIKMNYLSTDEDRKVAAQGLKIIRKIMLETKTFKQYEPEEYRPGVHITDDEELVKAGSDFTQTIFHPVGTCKMGQDDMAVVDEKLRVKGIHNLRVIDASIMPNITSGNTNAPTIMIAEKGADMILGN

SEQ ID NO: 88702 - protein, 89 aa, Unknown
  Bacterial polypetide isolated from the Sargasso Sea
EEFRPGSHLKEKEEIVKACSHYAQTIFHPVGTCKMGNDESAVVSDKLKVHGLNKLRVIDASIMPNITSGNTNAPTIMIAEKGADMILDS

SEQ ID NO: 88703 - protein, 263 aa, Unknown
  Bacterial polypetide isolated from the Sargasso Sea
MNNRKMFCPRGKMLGGSSSHNGMVHVRGNPMDFENWAQKDLKSWNYNNVLPYFKKSESIEGLDETYRNKSGPLKLSRSSEGNELSKVYLEAAEQAGYEINNDMNGYKQEGFGLMDTTIYGGRRQSTSVTYLHPVINRRNLTVITNTIVNKVIIENNKAVGVECTTGRERKKIHAENEVILSAGAINSPQLLMLSGIGNAEELKKLDISVQHDLRGVGENLQDHLETYLQYECTKPVTLYTSYNPIRMAFIGIEWFIFKSGVAA

SEQ ID NO: 88704 - protein, 106 aa, Unknown
  Bacterial polypetide isolated from the Sargasso Sea
MDKFDYIIIGAGSAGCVLANRLTANPDTKVLLLEAGGKDTNPWIHIPGGYFKTMHNPDTDWCFNTEKEPNCDNRQMVYPRGKTLGGSSSINGMLYIRGQSNDYNYW

SEQ ID NO: 88705 - protein, 136 aa, Unknown
  Bacterial polypetide isolated from the Sargasso Sea
VSNDSRIYPKIKMNYLSTDEDRKVAAQGLKIVRKIMLETETFKQYEPEEYRPGVHITDDEELVKAGSDYTQTIFHPVGTCKMGNDDMAVVDDSLKVKGIQNLRVIDASIMPNITSGNTNAPTIMIAEKGADMILNG

SEQ ID NO: 88706 - protein, 227 aa, Unknown
  Bacterial polypetide isolated from the Sargasso Sea
LNKKINSIFGNFLIGLEYIFNQSGPMTMGASQVCGFAKSDSSRETPNLQFHVQPISTDILGATKLHDFDGITPTVANIRPTSRGEINIISSNIKDYPKIKMNYLSTDDDRYVAAQGLKLIRKIMLETNTFKKYEPEEYRPGLNIQNDEELVKAGSDYTQTIFHPVGTCKMGKDENSVVNERLNIHGIKNLRVVDASIMPNITSGNTNAPTIMIAEKASDMILEDSKS

SEQ ID NO: 88707 - protein, 193 aa, Unknown
  Bacterial polypetide isolated from the Sargasso Sea
SSLWFCKSDPSRATPNLQFHVSPVSTDILGVTPMHDFEGITPTVANVRPTSRGEINIVSNDSRVYPKIKMNYLSTDDDRKVAAQGLKIVRKIMLETETFKQYEPEEYRPGVHITDDEELVKAGSDFTQTIFHPVGTCKMGQDDMSVVDEKLKVKGIQNLRVIDASIMPNITSGNTNAPTIMIAEKGADMILTN

SEQ ID NO: 88708 - protein, 234 aa, Unknown
  Bacterial polypetide isolated from the Sargasso Sea
METYIMQECKTPNTLYRYTKLIPKVLAGIQWFLSKSGPCSQSYLEAGGFAKSSPEREIANIQFHFFPSFVIDHGLVNPNSHGYQLHASPNHPKSRGLVTLNSSNPYDYPKILFNYLEHEDDLRQTRECIHVARKILSQPSLAKHSGNEVGPGSDKKTDEELNEYIRSKAETAYHPCGTCKMGVDDMAVVDENLKVKGIQNLRVVDASVMPEIPSANLNAPTLMIAEKGADAILN

SEQ ID NO: 88709 - protein, 224 aa, Unknown
  Bacterial polypetide isolated from the Sargasso Sea
MSDYDVVIVGGGSAGCVLANRLSENSDVSVLLIEAGRRDHRWDFVIHMPAALSYGIGNKFYDWKYESDPEPGLGGRRVSHARGKVLGGSSSINGMIFQRGNPADYERWATTPGCKEWSYSHCLPYFQRMETCLNGADRYRGDSGPLMLERGPASTPLFRAFFDAVQEAGYELTEDVNGYRQEGFASFDRNIYQGRRNSASVAYLHPVSSRTNLDVITRAHVTKI

SEQ ID NO: 88710 - protein, 203 aa, Unknown
  Bacterial polypetide isolated from the Sargasso Sea
VEYPDLQLCISPIAMENNSWQPLKEHAFQVHVGLMRTHSRGKIELRSNNPADPPRILVNYLKDKRDRELMRKGIHLVRELLDQPSFSDLKGEEIFPGDNCKSDADLDTKLNAHTTSQWHLACTARMGLKTDKYAVVDNSGKVHGINSLRVVDASIMPFAPNGNTNAPTIMIAEKISDEILGAKPLTRLELQTWQSSNYQTDQR

SEQ ID NO: 88711 - protein, 119 aa, Unknown
  Bacterial polypetide isolated from the Sargasso Sea
RDIISQKAFDEYRGKEILPGIEVQSDEQIENFIREKAETIYHPVGTCKMGSDENAVVDDKLRVRGVESLRVVDASIMPNLVGGNTNAPTIMIAEKIADHILGNDFLPALDLSQSYKQSA

SEQ ID NO: 88712 - protein, 287 aa, Unknown
  Bacterial polypetide isolated from the Sargasso Sea
SSGSIMTPYLLLKSGIGNPADLNKFNIPVVIKSPHVGKNFQDHLGLDYLYKTYFPTLNKDLGTWSGRVKSLLQYIYNRKGPLSLSLNQGGGYINWNSLDPYPNIQLYFNPLTYSVSFKNKRPLLRTDKFNGFIIGFNSCRPKSLGEVNLKKMDNDYLPSIDPRYLSDERDINDLYSTFDFVRKFSANKNIKKIIKSPVNIDPIKSSDEELLDHFKSKSTTVYHPCGTCRMSKSIQEGVVSEKLKVHGLDNLWIVDASIMPNITSGNINAPVMMLSHLSSKIIIEDLK

SEQ ID NO: 88713 - protein, 78 aa, Unknown
  Bacterial polypetide isolated from the Sargasso Sea
SNEDLDEIIRNTSESAYHPSCTNKMGYDQNSVVDQKTKVHGIKNLRVIDASIMPDIVSANLNASVVMMAERAADFILD

SEQ ID NO: 88714 - protein, 114 aa, Unknown
  Bacterial polypetide isolated from the Sargasso Sea
LKQTRECIHVARKILSQPALAEHAGDEVGPGFYAQSDDELNEYIRSKADTAYHPCGTCKMGVDEMAVVDQDLKVNGVENLRVIDASVIPEIPSANLNAPTLMIAEKGSDAIINK

SEQ ID NO: 88715 - protein, 132 aa, Unknown
  Bacterial polypetide isolated from the Sargasso Sea
KGIHLARELLNQPAFSNIKGDEIFPGENYKSDDELDAKLNSNITSQWHLCCTARMGLKTDKYAVVDNQGRVHGFNNLRVVDASIMPFATNGNTNAPTIMIAEKISDNILGDSPLPRIELKTWQSPNYQMYQR

SEQ ID NO: 88716 - protein, 317 aa, Unknown
  Bacterial polypetide isolated from the Sargasso Sea
IFNGFRTSSSKVFLKPIIKHPNLTIFTKTEVLKLNYENNKIISLKIKHKNKVISVKPKIGTILSSGAIMTPYLLLKSGIGNAEELNNYNIPINLHSPHIGKNLQDHLGLDYLYKTSMTTLNYDLGTWSGRIKSILKYLYNRTGPFALSLNQGGGYINWNSLDPYPNIQLYFNPLTYSVSYKKNRPLLKTDKFNGFIIGFNSCRPKSLGEVKLRASKTDYLPSIDPKYLSDERDIHDLYSAFDFIRNFSTNRHLKEIIDSSVNITPINANNEELLGHFKSNAGTVYHPCGTCRMSKDINSGAVSEKLKVHGIKNLWIV

SEQ ID NO: 88717 - protein, 207 aa, Unknown
  Bacterial polypetide isolated from the Sargasso Sea
YIFKQSGPMTMGASQVCGFAKSDSSRATPNLQFHVQPISTDVLGASKLHDFHGITPTVANIRPTSRGEINIVSNDSRIYPKIKMNYLSTDDDRYVAAQGLKLVRKIMLDTETFKKYEAEEYRPGLHIQDDEELVKAGSDYTQTIFHPVGTCKMGKDDNAVVSEKLKVHGIENLRVIDASIMPNITSGNTNAPTIMIAEKGADMILNN

SEQ ID NO: 88718 - protein, 155 aa, Unknown
  Bacterial polypetide isolated from the Sargasso Sea
MEKFDYIIIGAGSAGCVLANRLSANPKNKVLLLEAGGKDNYPWIHIPVGYYKTMHNPKVDWCFHTEKDKTMNNRSIRYPRGKTLGGSSSINGLLWIRGQRNDYDNWRQQGNSGWGWEDVLPYFIKSENNELGKSEFHNDSGPIMVANKKIKLKML

SEQ ID NO: 88719 - protein, 117 aa, Unknown
  Bacterial polypetide isolated from the Sargasso Sea
MDKFDYIIIGAGSAGCVLANRLTANPDTKVLLLEAGGKDTNPWIHIPGGYFKTMHNPDTDWCFNTEKEPNCDNRQMVYPRGKTLGGSSSINGMLYIRGQSNDYNYWRQLGNVGWSWD

SEQ ID NO: 88720 - protein, 117 aa, Unknown
  Bacterial polypetide isolated from the Sargasso Sea
MYATFDFIRKFSANKNISNIIKSPVNIDPLIATDHELLDHFKSNATTIYHPCGTCRMSKDIGTGVVSDKLKVHGLDNLWIVDASIMPNITSGNINAPVMMLSHLSSKIILEELKRQY

SEQ ID NO: 88721 - protein, 179 aa, Unknown
  Bacterial polypetide isolated from the Sargasso Sea
MNNYDFIILGAGSAGCVLANRLSKNPSHKVLLLEAGGKDNYPWIHIPVGYFKTMHNPKTDWCYKTEPDESMNNISIRYPRGKTLGGSSSINGLLYIRGQNRDYDIWRQLGNTGWGWDDVLPYFIKAEDQERGKNEFHGVDGPLAVSDQRIHLPLLDEFQNAAEEFGIPKTKDFNTGDNH

SEQ ID NO: 88722 - protein, 78 aa, Unknown
  Bacterial polypetide isolated from the Sargasso Sea
KEEIVKACSHYAQTIFHPVGTCKMGNDESAVVSDKLKVHGINKLRVIDASIMPNITSGNTNAPTIMIAEKGADMILSA

SEQ ID NO: 88723 - protein, 295 aa, Unknown
  Bacterial polypetide isolated from the Sargasso Sea
MGAASEAGHLINPDMNGEHQEGFGMFDTTIHNGERASVAKYYLNPIKNRKNLNIFSNSFVEKIIFEGKKAVGIEVKTKNKVEKFYAKKELILSGGSINSPQLLMLSGIGDVNHLKEKGISVIHDLKGVGKNLQDHLETYIMQECNTPNTLYKYTKLIPKVLAGIQWFLSKSGPCSQSYLEAGGFAKSSPEREMANIQFHFFPSFVINHGLVNPSSHGYQLHASPNHPKSRGSITLNSSNPYDYPKILFNYLEDEDDLKQTRECIHVARKILSQPSLAKHSGKEVGPGSDKKTDDE

SEQ ID NO: 88724 - protein, 233 aa, Unknown
  Bacterial polypetide isolated from the Sargasso Sea
MEEFDFIIIGAGSAGCVLANRLTADGKNKVLLLEAGGKDTYPWIHIPVGYFKTMHNPKVDWCFKTEKDETMANRSIRYPRGKTLGGSSSINGLLWIRGQSNDYDNWRQQGNSGWGWDDVLPYFLKSENNELGNNKYHNDKGPIVVSNKQINLDMLEEFQNAAEETGIPRTKDFNTGDNFGIGYFQFTTSRNKLLKLRCSAAKGYLNPAKKRSNLKIEVKAHVQKINFEGKKAV

SEQ ID NO: 88725 - protein, 132 aa, Unknown
  Bacterial polypetide isolated from the Sargasso Sea
MNNFDYIIIGAGSAGCVLANRISSNPKNKVLLLEAGGKDTNPWIHIPGGYFKTMHNPETDWCFNTEEEPFCDNRKMTYPRGKTLGGSSSINGMLYIRGQSNDYNYWRQLGNVGWSWDDVLPYFKKSEDFQLE

SEQ ID NO: 88726 - protein, 200 aa, Unknown
  Bacterial polypetide isolated from the Sargasso Sea
KSGPCSQSYLEAGGFAKSSSEREIPNIQFHFFPSFVINHGLVNPSSHGYQLHASPNHPKSRGLITLNSSDPYDYPKILFNYLEDEDDLKQTRECIHVARKILSQPSLIKHAGKEIGPGSEKQNDEELNEYIKSNAETAYHPCGTCKMGIDDMAVVDENLKVIGMQNLRVVDASVMPEIPSANLNAPTLMIAEKASDIILN

SEQ ID NO: 88727 - protein, 295 aa, Unknown
  Bacterial polypetide isolated from the Sargasso Sea
ETMNNRSIRYPRGKTLGGSSSINGLLWVRGQSDDYNIWRQLGNKGWGWDDVLPYFLKSENNELGKSEYHNDKGPISVANKKINLKLLDVFQDAAEEFGIPKTSDFNKGDNTGVGFFQFTTSFNNLGLKLRCSAAKGYLNPAKKRKNLKIEVKAHVKKINFEGKKVVSVSYFSGDNLKTVKVNKEVILSSGSIGSPQILQVSGIGDSDKLKKLGIEVIHELKGVGKNLQDHLMMRPVYKVKKLKSLNKKVNSIFGRFMMGLEYILKQSGPMTMGASQVCGFVKSDPSRATPNLQFH

SEQ ID NO: 88728 - protein, 257 aa, Unknown
  Bacterial polypetide isolated from the Sargasso Sea
FTWCGQNLKDHLEIYIQHKSKKKETLYNLSTNYFSQAIEGLKWFLFKKGMLAHSHLEVGGFVKTSEKYKHPNIQLHFFPSLVINHGLINPSFDGFQFHASPNRPKSRGFVEIKSNNYKDNPKIQFNYLQDEEDLEQMRDSVKIANKIFIQKSMETYLGDQLRPGYDISNKELDNIIRETADTAYHPSCTNKMGIDNMSVVNQETKVKGLESLRVIDSSIMPDILSGNLNAGTIMIAEKASDMILGKEETPIEAEFYN

SEQ ID NO: 88729 - protein, 264 aa, Unknown
  Bacterial polypetide isolated from the Sargasso Sea
DYERWENFGLKSWSYEKVLPYFKKIETWSGGENQYRGSLGPLPVNQSKNDNPLFKAFINSASEAGHTVNPDMNGEEQEGFGMFDTTIHEGQRASATKYYLNPAKKRKNLNIFSNSFVEKIIFEGKKAIGIEVKIKNKFEKVYAEKEVILSGGSINSPQLLMLSGVGNSDHLREKGIDVVSDIKGVGKNLQDHLETYIMQECKTPDTLYTYTKLIPKVLAGIQWFLSKSGPCSKSFLEAGGFAKSSPEREIANIQFHFFPSFVID

SEQ ID NO: 88730 - protein, 83 aa, Unknown
  Bacterial polypetide isolated from the Sargasso Sea
FNAQSDDELNEYIRSKADTAYHPCGTCKMGVDDMAVVDQDLKVNGIGNLRVIDASVIPEIPSANLNAPTLMIAEKGSEAILNN

SEQ ID NO: 88731 - protein, 254 aa, Unknown
  Bacterial polypetide isolated from the Sargasso Sea
GNKNDYERWASFGLKSWSYENVLPFFKKIETWSEGENKFRGGKGILPVNQSKNKNPLFSAFINASVEAGYKKNDDMNGEDQEGFGMYDITIHKGQRASASKYYLEPAKKRKNLKVFTNSFAERIIFEGKKAVGIEVNIKNKVTKVYANKEIVLSGGSINSPQLLMLSGVGPEKDLKDKGINVIHSLEGVGQNLQDHLETYIQQECKTKDTLYSYVNKINMLKIGIQWFLSKSGPCSTSFLEARWFLQIFRRQKL

SEQ ID NO: 88732 - protein, 72 aa, Unknown
  Bacterial polypetide isolated from the Sargasso Sea
IRSKAETAYHPCGTCKMGVDDMAVVDENLKVKGIQNLRVVDASVMPEIPSANLNAPTLMIAEKASDLILNSI

SEQ ID NO: 88733 - protein, 52 aa, Unknown
  Bacterial polypetide isolated from the Sargasso Sea
GDDSVVDEKLKVRGIENLRVIDASIMPNITSGNTNAPTIMIAEKAADMILNQ

SEQ ID NO: 88734 - protein, 117 aa, Unknown
  Bacterial polypetide isolated from the Sargasso Sea
LYSIFDFIRKFSSNPNIYDIIKSPVNIDPLKSSDDQLLNHFKLNSNSVYHPCGTCRMSNNISTGVVSDKLKVHGLDNLWIVDASIMPNITSGNINAPVMMLSHLSSNIIIEELKQKY

SEQ ID NO: 88735 - protein, 141 aa, Unknown
  Bacterial polypetide isolated from the Sargasso Sea
IKFNYMKHPDDWVEFRNCIKITRKILNQPSFKDFYGEEIQPGEQKISNDDLDNFIKEEAESAYHPCGTIKMGDENDPSSVVDPNCKVIGIENLRVVDSSIFPRITNGNTNAPSIMVGEKASDIILGKMPLPRENLEPFKHT

SEQ ID NO: 88736 - protein, 80 aa, Unknown
  Bacterial polypetide isolated from the Sargasso Sea
TDDEELVKAGADFTQTIFHPVGTCKMGNDDMAVVDDSLRVKGIQNLRVIDASIMPNITSGNTNAPTIMIAEKGADMILNG

SEQ ID NO: 88737 - protein, 185 aa, Unknown
  Bacterial polypetide isolated from the Sargasso Sea
METFDYIILGGGSAGCVLANRLSANSKNKVLLLEAGGKDTYPWIHIPVGYFKTMHNPKVDWCFKTEPDETMNNRSIRYPRGKTLGGSSSINGLLWIRGQSEDYNIWRQLGNTGWGWNDVLPYFLKSENNELGKGEFHNDSGPITVANKKINLKLLDEFQNAAEEYGIPKTNDFNTGDNTGVGFFS

SEQ ID NO: 88738 - protein, 269 aa, Unknown
  Bacterial polypetide isolated from the Sargasso Sea
MIQNSIWKYYTEPEPFLNNRSLYCPRGKMLGGCSSHNGMVFARGHKEDFNRWASYGLDQWSYDKVLPYYKKLETWSGDNYFRGSNGPLKVNKSEIHKKFPLFNSILNAAKEAGYNIFDDSNSENNEGFGTFDVTIDKGIRQSIAKAYLDPIENRKNLEIIKNTYVKKIIFKNKVAVGIEYIKNDKIEKFYAKKEVILSAGSINSPKILQLSGIGNAQHLKDLGIEVINNLKGVGENLQDHLEFYIQYKSKKKETLYDLSTNYISQAIEG

SEQ ID NO: 88739 - protein, 67 aa, Unknown
  Bacterial polypetide isolated from the Sargasso Sea
TAYHPCGTCKMGVDEMAVVDESLKVKGIQNLRVVDASIIPEIPSANLNAPVIMIAEKAFDIILNSYN

SEQ ID NO: 88740 - protein, 294 aa, Unknown
  Bacterial polypetide isolated from the Sargasso Sea
DTSEYIIVGAGSAGCVLADRLSASGADVVLLEAGPSDLHPMIHIPAGILHLISNPKVNWNYSSEPEESSGNRRIHWPRGRVLGGSSSINGMLYVRGNPADYDGWAQMGCRGWSFDEVLPYFKKSENYKNGGDEEFRSQGGPLEVEDYKTILDLTHAFVEAASQAGHTKSKDLNGAQAEGVGYSQMTRKGRFRGSTAQTFLKQARKRLNLRVETNATVSKLIFEDKKCVGVKFFKHGKEKFIKAAKEVILSGGAVNSPHILQVSGIGPSDHLMNIGINVVHHLPGVGANPSDHYV

SEQ ID NO: 88741 - protein, 257 aa, Unknown
  Bacterial polypetide isolated from the Sargasso Sea
MDNFDYVIIGAGSAGCVLANRLSANPNNKVLLLEAGGKDNYPWIHIPVGYYKTMHNPKVDWCFHTEKDETMNNRSIRYPRGKTLGGSSSINGLLWIRGQSNDYDNWRQQGNKGWGWDDILPYFIKSENNELGKGKYHSDNGPIMVANKKIKLKMLDEFINAAEEKGIPKTNDFNTGDNFGVGFYQFTTSHSHFGLKLRYSAAKGYLNPVKSRKNLKIITNAHVQKIIFENRKAKSIQYEYENKTIEVKTNKEIILSA

SEQ ID NO: 88742 - protein, 285 aa, Unknown
  Bacterial polypetide isolated from the Sargasso Sea
KPEKNLNNRSIQHDRGKVIGGSSSINGMVYVRGHAEDFNGWSELGCEGWSYADVLPYFIRMEAYSGGDKDYRGAEGPLKIHRPTPRDPISLAFLESGKEKNYQTTNDINGFCQEGFGVFDSTINKGKRFSAADAYLKPAKNRNNLTILSESHVNKIIFKNKIAVGVEFFDKQKNKVLAYASKEIILSAGAIGTPHILMLSGIGPEQQLRELNVDVVKNSPGVGSNLNDHPDFVLKYRCTKPVSLWPKTKMIPSIIQGLRWFLFSDGMCASNHFDVIACIRSNHSE

SEQ ID NO: 88743 - protein, 250 aa, Unknown
  Bacterial polypetide isolated from the Sargasso Sea
GVGKNLQDHIMMRPVYKVKNIKTLNKKVNSFFGKMLIGLEYVFFRKGPMTMGASQLCGFAKSDPSRETPNLQFHVQPISTDKLGGANLHNFDAFTPTVANIRPTSRGEVYLASADTRDNPKIKMNYLSTPEDRKVTADGLKLIRKIVLGTKTFSKYMPEEFRPGVDIQDDEDLVKAASNYAQTIFHPVGTCKMGNDENSVVNDRLVAHGIESLRIVDASIMPNITSGNTNAPTIMIAEKASDMIIEDSKT

SEQ ID NO: 88744 - protein, 283 aa, Unknown
  Bacterial polypetide isolated from the Sargasso Sea
MIVGAGSAGCVLATRLSEDPSVNVVLLEAGGSDRSIIVQMPSALSVPMNTRRFNWGFQTEAEPGLDGRVLDCPRGLGLGGSSSINGMVYVRGHAEDINQWESSGAAGWNYAACLPYYQRAETWYRGADQYRGGSGPVGVCAGNDMKLNPLYRAFIDAGVEAGYPSSEDYNGYQQEGFGQMHMTVDRGRRASTSRAYLKPVRHRKNLRVISGTLATRVLLEGDRAVGVAYQKDGNDFEVFARAEVILSAGSIGSPALLQRSGIGSPVILEAAGIPVAHPLEGVG

SEQ ID NO: 88745 - protein, 136 aa, Unknown
  Bacterial polypetide isolated from the Sargasso Sea
IDKDSRTYAKVKLNYLSTDHDRMVAAKGLKLTRKIVMESETFKKYKPEEYRPGININNDEELVKAGSDYTQTIFHPVGTCKMGQDDLAVVDEKLKVKGVQNLRVIDASIMPNITSGNTNAPTIMIAEKGADMILES

SEQ ID NO: 88746 - protein, 298 aa, Unknown
  Bacterial polypetide isolated from the Sargasso Sea
SSQLKNSVILLEAGPSSKTWKVDMPSALLYAMHDPKYNWKYYTEPEPFLNNRSLYCPRGKMIGGCSSHNGMVFARGHKEDFDRWSSSGLTNWSYEKVLPFFKKLETWSHDSNVRGQEGPLKVNKSNIDKKYPLFKKVLEAAQEAGYKIFNDSNSIDKEGFGTFDVTINNGVRQSVAKAYLEPIQNRKNLRIINNIDVKKILFKNKTAIGVETIKKNITNNYLANKEVILCAGSINSPKILQLSGIGNETYLKSLGIEVINNLVGVGENLQDHLEMYIQYKSKKNETLHTLATNYLYQA

SEQ ID NO: 88747 - protein, 172 aa, Unknown
  Bacterial polypetide isolated from the Sargasso Sea
FFSSFVIDHGLVNPNSHGYQLHASPNHPKSRGQITLNSSNPYDYPKILFNYLEDEDDLKQTRECIHVARKILSQPSLAKHSGKEVGPGSDKQNDDELDEYIRSKAETAYHPCGTCKMGVDDMAVVDENLKVKGIQNLRVVDASVMPEIPSANLNAPTLMIAEKASDLILNSI

SEQ ID NO: 88748 - protein, 75 aa, Unknown
  Bacterial polypetide isolated from the Sargasso Sea
LVKAGSEYAQTIFHPVGTCKMGSDENAVVDDKLRVHGINNLRVIDASIMPNITSGNTNSPTIMIAEKGADMILNS

SEQ ID NO: 88749 - protein, 37 aa, Unknown
  Bacterial polypetide isolated from the Sargasso Sea
QNLRVIDASIMPNITSGNTNAPTIMIAEKGADMIMNS

SEQ ID NO: 88750 - protein, 182 aa, Unknown
  Bacterial polypetide isolated from the Sargasso Sea
METFDYIILGGGSAGCVLANRLSANSKNKVLLLEAGGKDTYPWIHIPVGYFKTMHNPKVDWCFKTEPDETMNNRSIRYPRGKTLGGSSSINGLLWIRGQSEDYNIWRQLGNTGWGWNDVLPYFLKSENNELGKGEFHNDSGPITVANKKINLKLLDEFQNAAEEYGIPKTNDFNTGDNTGVG

SEQ ID NO: 88751 - protein, 256 aa, Unknown
  Bacterial polypetide isolated from the Sargasso Sea
DCLIDLPGVGENLQDHIDYITSHRVDSWELMGSRSLKFWLRAPFELLKYLLSRTGMFSSSLAEGGAFIKTSEELEMPDIQLHFVVSMVEDHGRTKLWGNGFSCHVCLLRPESKGTVKIPSKDPTAAPLIDPNYLTEERDMKVLIKGYKKMMEIMTTEPLKKFNNIRNPININDDKAIETAIRTRSDTIYHPVGTCKMGIDDMAVVDSSLRVKGVQNLRVVDASVMPTLVGGNTNAPTIMIAEKAADLIKKHGSRSF

SEQ ID NO: 88752 - protein, 288 aa, Unknown
  Bacterial polypetide isolated from the Sargasso Sea
FQRMEASHGGNSEFRGKSGPLNITHGKRDNPLHNAFVKATEQAGYTYTDDYNGFRQEGFGPADMTVWKGSRFSTAKAYLKPALAKKNVQLITKVLVDKIIFQEDKAKGVEVYHRGQKKTFSANIGVVLSAGAINSPTILQRSGIGEGNDLNNLGIKVIKNLPGVGKNLQDHLEVYFQVKCLQPVTLNKYLNPFSKLLIGMQWMFLKSGPGATNQFETLGFIRSDKNIPYPDIQFHFLPVAIRYDGKAPSEGHGFQLHVGPMRSKSRGFVKLKSSDPFDSPTIKFNYMS

SEQ ID NO: 88753 - protein, 285 aa, Unknown
  Bacterial polypetide isolated from the Sargasso Sea
TLWEEHIGSPSILMRSGIGYKEYLRTKDIDCLIDLPGVGENLQDHIDYITSHRVDSWELMGSRSVKFWLRAPFELLKYLLFRTGMFSSSLAEGGAFIKTDEGLEVPDIQLHFVVSMVEDHGRKKLSGNGFSCHVCLLRPESKGTVKIASKDPRAAPLIDPNYLTHDSDMKVLVKGYKKMMEIMSTEPLKKFDNIRNPINVNDDKAIENAIRARSDTIYHPVGTCKMGNDDMAVVDSSLRVKGAQNLRIIDASVMPTLVGGNTNAPTIMIAEKAADLIKEYGSRSL

SEQ ID NO: 88754 - protein, 126 aa, Unknown
  Bacterial polypetide isolated from the Sargasso Sea
MEEFDYIIIGAGSAGCVLANRLSSIDSNKVLLLEAGGKDTYPWIHIPVGYYKTMHNPKTDWCFKTEPDETMNNRSINYPRGKTLGGSSSINGLLYIRGQEQDYNTWRQLGNVGWSWKDVLPYFLKS

SEQ ID NO: 88755 - protein, 262 aa, Unknown
  Bacterial polypetide isolated from the Sargasso Sea
KNCGIEVIHNSPGVGKNLQDHIMMRPVYKVKNIQTLNKKINSIFGKMSIGLEYILFRKGPMTMGASQLCGFTKSDSSMETPNLQFHIQPISTDKLGGSNLHNFHAFTPTVANIRPTSRGEIYIASDDTRDDPKIKMNYLSTPEDRKVTADGLKLIRKIVLKTKAFEKYCPEEFRPGISIQDDEELVKVASNHAQTIFHPVGTCKMGKDENSVVDDRLVAHGLENLRIVDASIMPNITSGNTNAPTIMIAEKASDMIIEDSKL

SEQ ID NO: 88756 - protein, 95 aa, Unknown
  Bacterial polypetide isolated from the Sargasso Sea
MEEFDYIVIGAGSAGCVLANRLTANKNNKVLLLEAGGKDTYPWIHIPVGYYKTMHNPKVDWCFHTEKDESMNNRSIRYPRGKTLGGSSSINGLLG

SEQ ID NO: 88757 - protein, 65 aa, Unknown
  Bacterial polypetide isolated from the Sargasso Sea
AYHPCGTCKMGVDNMAVVDENLKVKGIQNLRVVDASVIPEIPSANLNAPTLMIAEKASDLILNNL

SEQ ID NO: 88758 - protein, 286 aa, Unknown
  Bacterial polypetide isolated from the Sargasso Sea
NFDYIIIGAGSAGCVLANRLSTNPKNKVLLLEAGGKDNYPWIHIPVGYYKTMHNPKVDWCFHTEKDETMNNRSIRYPRGKTLGGSSSINGLLWIRGQSNDYDNWRQQGNNGWGWDDVLPYFIKSENNELGKNEFHNDSGPIMVANKKIKLKMLEEFINASEEKGIPKVNDFNTGDNFGVGYYQFTTSHSHKGLKLRCSAAKGYLNPVKKRSNLKIVTNALVEKINFNGKKAESINYFIKDKSIEVKANKEIILSAGSIGSPHILQVSGIGDSNKLKKFGINIINEL

SEQ ID NO: 88759 - protein, 213 aa, Unknown
  Bacterial polypetide isolated from the Sargasso Sea
IKTIFRYLYNRKGPLSLSLNQGGGYINWKSLDPYPNIQLYFNPLTYSVSYKNKRPLLKTDKFSGFIIGFNSCRPKSLGEVKLRLENEEYYPSINPNYLSDERDIHDLYSAFDFIRKFSSNIHIKNIIKEPINIDPIKASDKELLDHFKSMATTIYHPCGTCRMSEDINSGVVSDKLKVHGLENLWIVDASIMPNITSGNINAPVMMISHLSSK

SEQ ID NO: 88760 - protein, 172 aa, Unknown
  Bacterial polypetide isolated from the Sargasso Sea
MNNYDFIILGAGSAGCVLANRLSENPAHKVLLLEAGGKDNYPWIHIPVGYFKTMHNPKTDWCYKTEPDESMNNISIRYPRGKTLGGSSSINGLLYIRGQNRDYDVWRQLGNTGWGWDDVLPYFIKAENQERGKDEFHGVDGPLAVSDQRIHLPLLDEFQNAAEEFGIPKTKD

SEQ ID NO: 88761 - protein, 238 aa, Unknown
  Bacterial polypetide isolated from the Sargasso Sea
MSKKNYDFIVVGGGSAGCVLANRLSEDPSNEVLVLEAGRMDYIWDLFIHMPAALTIPIGSKRYDWCYESDPEPFMNDRRIFHARGKVLGGSSSINGMIFQRGNPLDYERWAKDPGMETWDYFHCLPYFKKMENCLAGGDAYRGDKGPLELERGPGVNPLFGAFLKSVQDAGYELTSDVNGEKQEGFALFDRNVRKGKRLSAARAYYHPVKRRPNLELRCQVHTTKILFEGKKAIGIEY

SEQ ID NO: 88762 - protein, 239 aa, Unknown
  Bacterial polypetide isolated from the Sargasso Sea
MRPVYKVKNIKTLNKKVNSFFGKMLIGMEYVFFRKGPMTMGASQLCGFAKSDPSRETPNLQFHIQPISTDKLGGADLHNFDAFTPTVANIRPTSRGEVYISSADTRDDPKIKMNYLSTPEDRKVTADGLKLIRKIILETKTFAKYQPEEFRPGTEFKNDEELVKAASNYAQTIFHPVGTCKMGNDENSVVNDRLVAHGLQNLRIVDASIMPNITSGNTNAPTIMIAEKAADMIIEDSRP

SEQ ID NO: 88763 - protein, 169 aa, Unknown
  Bacterial polypetide isolated from the Sargasso Sea
HGHFLGATKNHDFHAFTPTVSNIRPTSRGHVSIVDKDSRTYAKIKQNYLSTDHDRMVTAKGLKLTRKIIMESETFKKYTPEEYRPGTHITDDEELVKEASNYAQTIFHPVGTCKMGQDEMSVVDEKLKVRGVNNLRVIDASIMPNITSGNTNAPTIMIAEKGADMILER

SEQ ID NO: 88764 - protein, 205 aa, Unknown
  Bacterial polypetide isolated from the Sargasso Sea
MVKIDTEYDYIIVGAGSAGCVLANRLTSNSKNTVLLLEAGGEDKSLTLKMPAAVLSNLKSTKHNWAFKGEPEPELNGRQLQHDRGKTIGGSSSINGMVYIRGNTLDYEGWRQMGCDGWGYADVLPYFKKMECYSGGGDDFRGESGPIKVHRSIPKDPLSLAFINAGKEAGYKETDDISGFCQEGFGIFDRTVFNGERWSASKGLP

SEQ ID NO: 88765 - protein, 273 aa, Unknown
  Bacterial polypetide isolated from the Sargasso Sea
KNNDMNGEDQEGFGMYDITIHKGQRASASKYYLEPAKKRKNLKVFTNSFAERIIFEGKKAVGIEVNIKNKVTKVYANKEVVLSGGSINSPQLLMLSGVGPEKDLKDKGINVVHSLEGVGQNLQDHLETYIQQECKTKDTLYSYVNKMNMLKIGLQWFLSKSGPCSTSFLEAGGFCKSSEDKSYPNIQFHFFPAFVIDHGLVDPDRHGYQLHASLNQPKSRGHIKLNSSNPYDYPKIQFNYLKDEYDLKETIKCVRVARKILSQDSMKPYAGKE

SEQ ID NO: 88766 - protein, 198 aa, Unknown
  Bacterial polypetide isolated from the Sargasso Sea
TMGASQVCGFLKSDSSRATPNLQFHVQPISTDILGATKMHDFDGITPTIANIRPTSRGEVNIVSHDSRENPKIKMNYLSTQEDRDVAAKSLKIVRKIMLETKAFKKYDPEEYRPGIHITDDEELVQAGSKHTQTIFHPVGTCKMGNNNSSVVSEKLKVHGIENLRVIDASIMPNITSGNTNAPTIMIAEKASDMILNK

SEQ ID NO: 88767 - protein, 277 aa, Unknown
  Bacterial polypetide isolated from the Sargasso Sea
VWRRNLYRGGKGPLKVNRSKIEEKFPLFKSVINAATEAGYNTFEDCNGFKQDGFGTFDVTIDSGKRQGVVTAYLDEVKDYKNLLVKHNTDVSKIIFKDKKAIGVEIKKNNNTEIYYCNKEIILSSGCINSPKILQLSGVGDAKLLSKNGIDVVKNLPGVGRNLQDHLEIYIQHKSKTKDTLYNLSTSYFTQAIEGIKWFLLKKGMLTHSHLEVGGFIKTSEKYKHPNIHLHFFPSLVINHGLINPSFDGFQFHASPNRPKSRGFVEIRSNNYLEKPK

SEQ ID NO: 88768 - protein, 232 aa, Unknown
  Bacterial polypetide isolated from the Sargasso Sea
TYIQQECKTPNTLYTYTKLIPKVLAGIQWFMFRSGPCSKSFLEAGGFAKSNLQRKVANIQFHFFPSFVINHGLVDPDTHGYQLHASPNHPKSRGQITLNSSDPYEYPKILFNYLKEDEDLKQTRECIHVARKILSQPALSEHAGREIGPGTDAKSDDELDDYIKSKADTAYHPCGTCKMGVDDMAVVDENLKVKGIENLRVIDASVIPEIPSANLNAPVLMIAEKGSELVLN

SEQ ID NO: 88769 - protein, 252 aa, Unknown
  Bacterial polypetide isolated from the Sargasso Sea
TLGGSSSINGLLWIRGQSNDYDNWKQQGNKGWGWDDVLPYFVKSENNELGKSKYHSDSGPIMVANKKIKLKMLDEFINAAEESGIPKTDDFNTGDNFGVGFYQFTTSHSKFGLKLRCSSAKGYLNPVKNRKNLKIVTNAVVQKITFENKKAVALSYMVGDKIFEVKSNKEIILSAGSIGSPHILQISGVGDAQKLKKHGIDIKKDLKGVGKNLQDHLMFRPVYKVKNLKSLNKKINSLFGNFLIGLEYIFNQ

SEQ ID NO: 88770 - protein, 244 aa, Unknown
  Bacterial polypetide isolated from the Sargasso Sea
MENFDYIIIGAGSAGCVLANRLSSNPNNKVLLLEAGGKDNYPWIHIPVGYFKTMHNPKVDWCFNTEKDESMNNRSIRYPRGKTLGGSSSINGLLWIRGQKEDYDIWRQLGNTGWSWNDVLPYFLKSENNELGKSEFHNDSGPITVANKKINLKLLDEFQNAAEEYGIPKTIDFNTGNNFGIGFFQFTTSFNKSILKLRCSAAKGYLNPIKKRSNLKIIVNAHVQKINFEGKKATGVSYYIGDKL

SEQ ID NO: 88771 - protein, 245 aa, Unknown
  Bacterial polypetide isolated from the Sargasso Sea
MNNFDFIILGAGSAGCVLANRLSQNPNHRVLLLEAGGKDNYPWIHIPVGYFKTMHNPKTDWCYRTEPDESMNNISIRYPRGKTLGGSSSINGLLYIRGQNRDYDIWRQLGNTGWGWDDVLPYFIKAENQERGKNEFHGVDGPLSVSDQRIHLPLLDEFQNAAVEFGIPKTKDFNTGDNHGCGYFQVTEKDGFRCSTSVGYLKPVKNRKNLKIITHAHVKKINFENKTAKEVEFWQGDQLKKVQAN

SEQ ID NO: 88772 - protein, 182 aa, Unknown
  Bacterial polypetide isolated from the Sargasso Sea
MDKFDYIIIGAGSAGCVLANRLTANPDTKVLLLEAGGKDTNPWIHIPGGYFKTMHNPDTDWCFNTEKEPNCDNRQMVYPRGKTLGGSSSINGMLYIRGQSNDYNYWRQLGNVGWSWDDVLPYFKKSEDFQFGENEFHGSGGPIAVEKIRATFKVLDLFLEAAEEHGYKRTDDFNNGDNEGMG

SEQ ID NO: 88773 - protein, 312 aa, Unknown
  Bacterial polypetide isolated from the Sargasso Sea
LPFFKKIETWSEGENEFRGGKGILPVNQSKNQNPLFRAFINASVEAGYKINNDMNGEDQEGFGMYDITIHKGQRASASKYYLEPAKKRKNLKVFTNSFAERIIFEGKKAVGIEVNIKNKVTKVYANKEIVLSGGSINSPQLLMLSGVGPERDLKDKGINVVHSLEGVGQNLQDHLETYIQQECKTKDTLYSYVNKINMFKIGIQWFLSKSGPCSTSFLEAGGFCKSSEDKSYPNIQFHFFPAFVIDHGLVDPDRHGYQLHASLNQPKSRGHIKLNSSNPYDYPKIQFNYLEDEYDLKETIKCVRVARKILSQ

SEQ ID NO: 88774 - protein, 243 aa, Unknown
  Bacterial polypetide isolated from the Sargasso Sea
MGFYDYIIVGAGSAGCVLANRLSATNDKSVLLLEAGGKDNYFWVHVPIGYLYTMNNPKTDWCLETESELGLNGRSLSYPRGKVLGGCSSINGMIYMRGQSRDYDHWRQLGNYGWSWDDVLPYFLRSEDYIHGSDQWHGEGGEWRVENQRLSWEILSAFEEAAVEFGIPRTDDFNRGNNHGVGYFQVNQKRGVRWSASKAFLNPVKHRKNLTIITKAHASAINFNNKKRASSVSFVKEGSLYEA

SEQ ID NO: 88775 - protein, 327 aa, Unknown
  Bacterial polypetide isolated from the Sargasso Sea
GPGLGNRIMNFPRGKVLGGSSSINGLLYIRGQSNDYNYWRQLGNVGWSWEDVLPYFRKAENFEHGENEFHGTGGPLSVSNQRIKLKLLDTFIEAAKEFGIPHTTDFNTGSNEGCGYFHVTEKNGLRCSTAVGYLNPAKKRGNLSIKVKAHIKNIIFDGLKAVGVQYWQNNALKKIKCNKEIILSAGAIGSPHILQASGIGSPQLLKSKGIKIIKDNENVGKNLQDHLMLRPVYTVKNIDTLNQVYHSYYRKFLVGLEYLFFRSGAMTMGPSQLCGFTKSNPSLETPDLQFHVAPLSMDTLGATALHTFPAFTPTITNVRPTSRGYVN

SEQ ID NO: 88776 - protein, 149 aa, Unknown
  Bacterial polypetide isolated from the Sargasso Sea
PKSRETIEVVSKNSSVSPNIRPNSLADPNDMQLMRVGLQLARKILEQSAFDDVRGEEISPGAIVFGKEAEEEWIRENATTVWHPTSTCRMGEDASAVVNSELKVFGIKNLRVVDASIMPTITTGNTAAPTIMIAEKASDLIKKDQGIEL

SEQ ID NO: 88777 - protein, 84 aa, Unknown
  Bacterial polypetide isolated from the Sargasso Sea
DLLDIARNIAQTIYHPTSTCKMGSDVTSVVDERLRVHGIAGLRVVDASIMPTIVSGNTNAPTIMIAEKASDMIIEDAKDHSVAA

SEQ ID NO: 88778 - protein, 308 aa, Unknown
  Bacterial polypetide isolated from the Sargasso Sea
TIKNGKRESSATAFLKPVLHRSNLKTILYALVDKIILEGKKAVGVQYTKGLNTTQVFAKKEVILSAGSFQSPQLLMLSGIGDVSDLKKHGITISHELKGVGKNLQDHLFYPICAYTKTQEGINHYISPFQQLGAAWDYFVNKKGVFCVSPLEGMAFFDLDQKSSKVNFQLHFSPICIGNEYGYDAYDIYDYPRTDGFTILPTLLHPKSRGSVSLCSSDPRDAPMIQPNFLSEKKDLDQLVKGGNLVFKIMKHNAMKNHIKAYGLPHNQDSDDQLVEHIKKTLETVYHPVGTCKMGVDPMAVVDPSLSV

SEQ ID NO: 88779 - protein, 286 aa, Unknown
  Bacterial polypetide isolated from the Sargasso Sea
MDEFDFIIIGAGSAGCVLANRLSADSNNKVLLLEAGGKDTYPWIHIPVGYFKTMHNPKVDWCFHTEKDETMNNRSIRYPRGKTLGGSSSINGLLWIRGQSNDYDNWRQQGNNGWGWDDVFPYFLKSENNELGPSEFHNDKGPITVSNKKINLDMLEEFQNAAEETGIPRTEDFNTGDNFGIGYFQFTTSRNKLLKLRCSAAKGYLNPVKNRSNLKIVTKAHVQKINFEGKKATGVSYYQKEKVVTVKATREVILSAGSIGSPHILQVSGIGDSEKLKKYGVKTIHE

SEQ ID NO: 88780 - protein, 286 aa, Unknown
  Bacterial polypetide isolated from the Sargasso Sea
MVFVRGNRNDYERWENFGLKSWSYDKILPYFKKIETWSGGENQFRGSLGLLPVDQSKNDNPLFKAFLGAASEAGHLINADMNGEFQEGFGMFDTTIHNGERASVAKYYLNPARKRKNLSVFTNSFVEKIIFDGKKAIGIQVKIKNKVQKIFANKELILSGGSINSPQLLMLSGIGNAKHLREKGVEVIQELNGVGRNLQDHLETYIMQECKTPDTLYTYTKIIPKVLAGIQWFLSKSGPCSQSYLEAGGFAKSSPEREIANIQFHFFPSFVINHGLVNPSSHGYQL

SEQ ID NO: 88781 - protein, 146 aa, Unknown
  Bacterial polypetide isolated from the Sargasso Sea
RPTSRGEINIVSNDSRIYPKIKMNYLSTDDDRYVAAQGLKLVRKIMLETKIFKKYEAQEFRPGLNIQDDEELVKAGSDYTQTIFHPVGTCKMGKDENAVVSEKLKVHGIENLRVIDASIMPNITSGNTNAPTIMIAEKGADMILND

SEQ ID NO: 88782 - protein, 289 aa, Unknown
  Bacterial polypetide isolated from the Sargasso Sea
MGEDQEGFGMYDVTIHNGERASASKYYLNPARKRNNLKVFTEAFVEKIIFDGKKAIGIEVKIKNKVEKIYANKEIILSGGSINSPQLLMLSGVGPADHLKDKGIEVIHDLKGVGKNLQDHLETYIQQECKTPDTLYSYVNKLNMVRIGIQWFLNKSGPCSTSFLEAGGFCKSSADKEYPNIQFHFFPAFVIDHGTVDPDRHGFQLHASLNQPKSRGHITLNSSNPYDYPKIQFNYLKDDYDLKETIKCIHVARKILSQNSMQPYAGKEVGPGENAQTDSQIEEYIRSKA

SEQ ID NO: 88783 - protein, 163 aa, Unknown
  Bacterial polypetide isolated from the Sargasso Sea
MHDFEGITPTIANIRPTSRGEINITSKDSRDNPKIKMNYLSTQDDRDVAAKALKIVRKIMLETKTFKKYEPEEYRPGINIVDDEELVRAASEHSQTIFHPVGTCKMGIGDDAVVNEKLSVHGLENLRIVDASIMPNITSGNTNAPTIMIAEKASDMIIEDSKI

SEQ ID NO: 88784 - protein, 111 aa, Unknown
  Bacterial polypetide isolated from the Sargasso Sea
MENFDYVIVGAGSAGCVLANRLTKNSKINVLLLEAGGKDSNPWIHIPGGYFKTMHNPETDWCFKTEKEPNCDNREMVYPRGKTLGGSSSINGMLYIRGQSNDYNYWRQLGN

SEQ ID NO: 88785 - protein, 195 aa, Unknown
  Bacterial polypetide isolated from the Sargasso Sea
MVFSRSRDGLSSPDLQLLFTPASYSERTLGKLEREDGMTVAVCPVRPASRGTIMAASSDPFVRPKIRPNYLSHPDDVRVLLAGIHQTREIFSQSALQYYSSSETAPGVHIQTSEELESFAREQGSIIYHPVSTCKMGEDTMAVVDPRLCVHGIKGLRVVDASIMPTVTTGNTNAPTIMIAEKASDMIIEDARSAL

SEQ ID NO: 88786 - protein, 160 aa, Unknown
  Bacterial polypetide isolated from the Sargasso Sea
RQTYGGNGFSCHMCLLRPESRGTVKIASKDPFEDPLIDPNYLSVQSDIDTMVEGYKRMMEIMNTDPLSNYKNIRNPIDINNDQAIVNALRERSDTIYHPVGTCKMGNDEMAVVDSELRVKGVENLRVVDASIMPTLVGGNTNAPSMMIGEKAADMIRNSK

SEQ ID NO: 88787 - protein, 227 aa, Unknown
  Bacterial polypetide isolated from the Sargasso Sea
ECKTPNTLYTYTKLIPKVLAGIQWFLSKSGPCSQSYLEAGGFAKSSPQREIPNIQFHFFPSFVINHGLVNPSSHGYQLHASPNHPKSRGSVTLNSSDPYEYPKILFNYLEDEDDLRQTRECINVARKILSQPSLAKHSGKEIGPGSDKQSDEELNEYIRSNAETAYHPCGTCKMGIDEMAVVDENLRVKGIKNLRVVDASVMPEIPSANLNAPTLMISEKASDLILN

SEQ ID NO: 88788 - protein, 283 aa, Unknown
  Bacterial polypetide isolated from the Sargasso Sea
LGGSSSINGLLYIRGQSNDYNYWRQLGNVGWSWEDVLPYFRKAENFEHGENEFHGTGGPLSVSDQRIKLKLLDTFIEAAKEFGIPHTTDFNTGSNEGCGYFHVTEKNGLRCSTAVGYLNPTKKRENLSIEIKAHIKKIIFDGLKAVGVEYWQNNELKKIKCNKEIILSAGAIGSPHILQASGIGSPNLLKSKDIEVIKDNENVGENLQDHLMLRPVYTVKNIDTLNQLYHSYYRKFLVGLEYLFFRSGAMTMGPSQLCGFTKSNPSLETPDLQFHVAPLSMDT

SEQ ID NO: 88789 - protein, 233 aa, Unknown
  Bacterial polypetide isolated from the Sargasso Sea
SINRTAHGMRLLQEIIRFGLTRSGSLSLPAGILAGFVRSREGLVGPDIQYHIANASFANPAKRVFDKFPGMTFGPCQLRPESRGTVHIKSADPFAAPAIRPNYLATAEDARVHVAGMRIARNIMQSEIIAPLVDHEIKPGTKLTSDDELLAYARETGVTLYHPVSTCRMGPSPEQGDVVDARLRVHGITGLRVVDASIMPELVSGNTNAPTIMIAEKAAVMIREDATDTRRTA

SEQ ID NO: 88790 - protein, 225 aa, Unknown
  Bacterial polypetide isolated from the Sargasso Sea
FNKKINSFIGNVAIGFEYLFNQSGPMTMGASQVCGFAKSDSSRETPNLQFHVQPISTDVLGASKLHNFDGITPTVANIRPTSRGEINIVSNDSRVYPKIKMNYLSTEDDRYVAAQGLKLVRKIMLETETFKKYEPEEYRPGIHIQDNEELVKAGSDYTQTIFHPVGTCKMGQEENAVVNDRLKVHGIENLRVVDASIMPNITSGNTNAPTIMIAEKASDMILGNT

SEQ ID NO: 88791 - protein, 303 aa, Unknown
  Bacterial polypetide isolated from the Sargasso Sea
MLGGSSSINGTAFVRGQAQDFDTWAQMGNRGWTYREVLPFFKRMETYEAAGDDNYRGRDGPIRVTDPEWRHDPLFSTVIQAAAEVGIPHNPDYNGSHQDGIAMSQATISKGRRMSTAHCYLTPIRQRINLNIITQALTERIILDGTRCMGVRYSVGGRTHQAYAREVIISGGSINSPQLLEMSGIGQPDLLRRHGIAVRHELPGVGENLRDHFAPRTRWEFGAKGYTFNDRGRGLGLIHQVLRYVFGGKGMFGMVAAPLRAFVRSRDGLDAPDLLLGWVPMLYEANPEPKISSQSGMTCYAHP

SEQ ID NO: 88792 - protein, 211 aa, Unknown
  Bacterial polypetide isolated from the Sargasso Sea
LAGIQWFLSKSGPCSKSFLEAGGFAKSSPERKIANIQFHFFPSFVIDHGLVNPSSHGYQLHASPNHPKSRGQITLNSSNPYDYPKILFNYLEDEDDLKQTRECIHVARKILSQPSLAKHSGKEVGPGSDKQNDDELDEYIRSKAETAYHPCGTCKMGVDDMAVVDENLKVKGIQNLRVVDASVMPEIPSANLNAPTLMIAEKASDLILNSI

SEQ ID NO: 88793 - protein, 293 aa, Unknown
  Bacterial polypetide isolated from the Sargasso Sea
IPNDFERWSSFGLEDWSYNKVLPYFKKIETWSEGENEYRGGNGILPVNQSKNKNPLFKAFIDSAGEAGYKINNDMNGKEQEGFGMYDVTIHKGERASVSKFYLNSAKKRKNLKIFTKAFVERIIFDGKKAIGIEVKIKNKVERVYANKEIILSGGAINSPQLLMLSGIGPSQHLKDKGIDVVHNLEGVGKNLQDHLETYVQQECKTKDTLYSYINKINMIRIGIQWFINRSGPCSSSFLEAGGFCKSSPDRKYPNIQFHFFPAFVIDHGLIEQDRHGFQIHASPNHPKSRGHI

SEQ ID NO: 88794 - protein, 287 aa, Unknown
  Bacterial polypetide isolated from the Sargasso Sea
GCVLANRLSANPNNKVLLIEAGGKDTYPWIHIPVGYFKTMHNPKVDWCFKTEPDETMNNRSIRYPRGKTLGGSSSINGLLWIRGQKEDYDIWRQLGNKGWAWDDVLPYFLKSENNELGKSEFHNDKGPITVANKKINLKLLDEFQNAAEEFGIPKTNDFNTGDNFGIGFFQFTTSFNKMGLKLRCSAAKGYLNPVKKRSNLKIEVNAHVQKINFEGKKAIGINYYVGDKLNTVTANKEIILSAGSIGSPHILQVSGIGNIQKLKNLGIEIVNESNGVGQNLQDHLMF

SEQ ID NO: 88795 - protein, 197 aa, Unknown
  Bacterial polypetide isolated from the Sargasso Sea
MGASQLCMFAKSDPSLELPDLQWHVQPMSMDTLGATKNHDFHAFTPTVSNIRPTSRGHVSIVDKDSRTYAKIKQNYLSTDHDRMIAAKGLKLTRKIIMESETFKKYTPEEYRPGIHINDDEELVKEASNYAQTIFHPVGTCKMGQDEMSVVDEKLKVRGINNLRVIDASIMPNITSGNTNAPTIMIAEKGADMILQQ

SEQ ID NO: 88796 - protein, 303 aa, Unknown
  Bacterial polypetide isolated from the Sargasso Sea
MENFDFIIIGAGSAGCVLANRCQTNSNNKVLLLEAGGKDSNPWIHIPGGYFKTMHNPETDWCFNTEKEPNCDNREMVYPRGKTLGGSSSINGMLYIRGQSNDYDYWRQLGNVGWSWEDVLPYFKKSEDFQFGENEFHGSGGPIKVEKIRATFKVLDLFLEAAEEFGYKKTDDFNSGNNEGMGYFPFTVKNGFRCSTAVGYLNPVKKRKNLKIITKAHIKNIEFEDKKAIGVNYWNNNNLVKVKANKEILLSAGTIGSPHILQASGIGPAELLKKNNIEVIKDHQSVGRNLTDHLMLRPVYKVK

SEQ ID NO: 88797 - protein, 191 aa, Unknown
  Bacterial polypetide isolated from the Sargasso Sea
MDNFDYIIVGAGSAGCVLANRISSNPKNKVLLLEAGGKDTNPWIHIPGGYFKTMHNPETDWCFNTEEEPFCDNRKMTYPRGKTLGGSSSINGMLYIRGQSNDYNYWRQLGNVGWSWDDVLPYFKKSEDFQFGKNEFHGSGGPLKVEKIRSTFKVLDLFLEAAEEFGYKKTDDFNNGDNEGMGYFPLTVKNG

SEQ ID NO: 88798 - protein, 170 aa, Unknown
  Bacterial polypetide isolated from the Sargasso Sea
MENFDFIIVGAGSAGCVLANRLSANPNNKVLLLEAGGKDSNPWIHIPGGYFKTMHNPDTDWCFNTEQEPNCDNRQMIYPRGKTLGGSSSINGMLYIRGQSNDYNYWRQLGNVGWSWEDVLPYFKKSEDFQFGENEFHGSGGPIKVEKMRATFKVLDLFLEAAEEYGYKRT

SEQ ID NO: 88799 - protein, 236 aa, Unknown
  Bacterial polypetide isolated from the Sargasso Sea
FRPVYKIKNIKSLNKKINSLFGNLLIGLEFIFNRSGPMTMGASQLCLFAKSDISRETPNLQFHVQPISTDKLGGAALHNFHAFTPTVANIRPTSRGEINIISSDSREKPKIKMNYLSTKDDRKVAADGLRLVRDIVFETKTFKKYDPEELRPGSQFKSDEELVQEGSKFTQTIFHPVGTCKMGNDENSVVNDELKVHGLQNLRVIDASIMPNITSGNTNAPTIMIAEKGADMILGK

SEQ ID NO: 88800 - protein, 229 aa, Unknown
  Bacterial polypetide isolated from the Sargasso Sea
AAEAGYEIFEDSNGFKQDGFGTFDVTIDGGKRQSVARAYLEEVKNSNNLKVKHKTDVSKIIFKDKKAIGVEIKNNNKTEVYYCNKEIILSAGSINSPKILQLSGVGDPKLLKQNNIEVIHELPGVGKNLQDHLEIYIQHKSKTKDTLYNLSTNYFTQAIEGMKWFLFKKGMLTYSHLELGGFVKTSEKYKHPNIQLHFFPSLVINHGLTNPSFDGFQFHASPNRPKSRG

SEQ ID NO: 88801 - protein, 135 aa, Unknown
  Bacterial polypetide isolated from the Sargasso Sea
EFRRCIRLSREIMSQPAMAPYRGKEIQPGDDQTSDAQIDAFIRAHAESAYHPCGTMRMGAVDDRFAVVDPTCKFIGIDRLRIADSSIFPRITNGNLNAPSIMTGEKAADHILGRTPLPRANDTPFQHPEWQQTQR

SEQ ID NO: 88802 - protein, 183 aa, Unknown
  Bacterial polypetide isolated from the Sargasso Sea
MDIFDYIIIGAGSAGCVLANRLSANSRNKVLLLEAGGKDSYPWIHIPVGYYKTMHNPKVDWCFHTEKDESMNNRSIRYPRGKTLGGSSSINGLLWIRGQSNDYDNWRQQGNTGWGWNDVLPYFIKSENNELGKSEFHSDNGPIMVANKKIKLKMLEEFINAAEEKGIPKVIDFNTGNNFGVGY

SEQ ID NO: 88803 - protein, 251 aa, Unknown
  Bacterial polypetide isolated from the Sargasso Sea
LPGVGKNLQDHVGVVSQFSCTKPVTLHRSAGVLARTLAGLRFLLFRDGDASYPPTAAGAFFRSSQDKELPDMQIHFASVAIKDVHGRDGISKQHGFSSIVYCCRPESRGCITLRDLDPHSAPAIYPNYFQSEQDLIDTRNGFRQTRRVFMQPVFDEYRGAQLKPEADLDINDDHQLDEWIKRTGETLYHPVGTCKMGSDSMAVCNERGSVHKMQSLRVVDASIMPTLIAGNTNAPTIMIAEKIAEDILNAK

SEQ ID NO: 88804 - protein, 255 aa, Unknown
  Bacterial polypetide isolated from the Sargasso Sea
NNRSIRYPRGKTLGGSSSINGLLWIRGQSSDYDNWRQQGNNGWSWNDVLPYFLKSENNEMGKSEFHNDSGPIMVSNKKINLKMLDEFLNAAEEKGIPKVDDFNTGDNFGVGFYQFTTNHSGRGLKLRCSAAKGYLNPVKKRSNLNITVNAHVQKINFEGKKAISVSYYKGKKLHTIKVNKEIILSAGSIGSPHILQVSGIGDSSKLKKYGINLINELKGVGKNLQDHLMFRPVYKVKNLQSLNKKINSLFGNLLI

SEQ ID NO: 88805 - protein, 100 aa, Unknown
  Bacterial polypetide isolated from the Sargasso Sea
QKAFDPYRGEQTKPGKDVNVDDDDQLDEWIRNTGETLYHPVGTCKMGEDDMAVVNSDLQVHGISGLRVVDASIMPTLIGGNTNAPTIMIAEKAADSIRQS

SEQ ID NO: 88806 - protein, 278 aa, Unknown
  Bacterial polypetide isolated from the Sargasso Sea
MENFDFIIIGAGSAGCVLANRLSTNPKNKVLLLEAGGKDNYPWIHIPVGYYKTMHNPKVDWCFYTEKDESMNNRSIRYPRGKTLGGSSSINGLLWIRGQSNDYDNWRQQGNNGWGWDDVLPYFIKSENNELGKNKFHSDSGPIMVANKKIKLKMLEEFINAAEEKGIPKVNDFNTGDNFGVGYYQFTTSHSHIGLKLRCSAAKGYLNPIKKRPNLKIITNAHVQKINFEGKKAISLNYINKDKSIEVKVNKEIILSAGSIGSPHILQVSGIGDSEKLK

SEQ ID NO: 88807 - protein, 130 aa, Unknown
  Bacterial polypetide isolated from the Sargasso Sea
VYPKIKMNYLSTDEDRKVAATGLKIIRKIMLETETFKKYEPEEYRPGAHITDDEELVKEGSNFTQTIFHPVGTCKMGQDEMSVVDEKLKVRGIDNLRVIDASIMPNITSGNTNAPTIMIAEKGADMILEH

SEQ ID NO: 88808 - protein, 164 aa, Unknown
  Bacterial polypetide isolated from the Sargasso Sea
GATKMHDFDGITPTVANVRPTSRGEINIASNDSRDNPKIKMNYLSTQDDRDVAAKALKIVRNIMLNTETFKKYEPEEYRPGSHITNDEELVKAASDHAQTIFHPVGTCKMGKGDEAVVNDKLQTHGIQNLRVVDASIMPNITSGNTNAPTIMIAEKASDMILNK

SEQ ID NO: 88809 - protein, 282 aa, Unknown
  Bacterial polypetide isolated from the Sargasso Sea
IGVMKTQSDKGIADRSIPWPRGRVMGGSSSINGLLYVRGQPQDFDIWSQLGCAGWSWDEVLPYFKRSENWEGTDETGLRGKDGPLSVQSARLKRDIVDHWVDAAVRAGYQRNYDYNGSTQEGVGHFQLTMKGGRRCSSAVAYIKPIKSRKNLRIITNAQTKKVNIVHGRATSVDIVIKNKMDRISARREIIICAGSIGSPQILMLSGIGPGEDLKNLGIEVVSDLDGVGKNLQDHLQARPVFKTDLSTINTETSNFLKKALIGLQYILTQRGPMTMAASLGT

SEQ ID NO: 88810 - protein, 199 aa, Unknown
  Bacterial polypetide isolated from the Sargasso Sea
MDSFDYVIIGAGSAGCVLANRLSANPNNKVLLLEAGGKDSYPWIHIPVGYYKTMHNPKVDWCFHTEKDETMNNRSIRYPRGKTLGGSSSINGLLWIRGQSNDYNNWRQQGNKGWGWDDVLPYFIKSENNELGKGKFHSDSGPIMVANKKIKLKMLDEFINAAEEKGIPKTEDFNTGDNFGVGFYQFTTSHSHFGLKLRY

SEQ ID NO: 88811 - protein, 126 aa, Unknown
  Bacterial polypetide isolated from the Sargasso Sea
MDNFDYIIIGAGSAGCVLANRISSNPKNKVLLLEAGGKDTNPWIHIPGGYFKTMHNPETDWCFNTEEEPFCDNRKMTYPRGKTLGGSSSINGMLYIRGQSNDYNYWRQLGNVGWSWEDVLPYFKKI

SEQ ID NO: 88812 - protein, 199 aa, Unknown
  Bacterial polypetide isolated from the Sargasso Sea
MTMGASQLCMFAKSDPSLELPDLQWHVQPMSMDTLGATKNHDFHAFTPTVSNIKPTSRGNVSIVDNDSRTYAKIKQNYLSTENDRLIAAKGLKLTRKIIMESKTFKKYSPEEYRPGIHLNDNEELVKEASNHAQTIFHPVGTCKMGQDEMAVVDEKLKVKGIKNLRVIDASIMPNITSGNTNAPTIMIAEKGADMILTN

SEQ ID NO: 88813 - protein, 159 aa, Unknown
  Bacterial polypetide isolated from the Sargasso Sea
AVKSRGFVAIKNADPQNSPTIKFNYLSHSDDLKDFRNAIRITRNILDQPAFKDYAGQEIQPKPTLKSNRELDEFIKSSVESAFHPCGTCKMGDPADKETVVTPECKVNGVENLYCADSSIFPSITNGNLNAPSIMVGEKAVDHILNKPLLPKENLVPYN

SEQ ID NO: 88814 - protein, 201 aa, Unknown
  Bacterial polypetide isolated from the Sargasso Sea
GPVTMGASQVCGFVKSDISRATPNLQFHVQPVSTDILGVSNMHNFEGITPTVANVRPTSRGEINVISGDSRIYPKIKMNYLSTEDDRNVAALGLKLVRKIMLETEVFKKYEPEEYRPGIHINDNEELVKAGSEYAQTIFHPVGTCKMGKDNMSVVNDKLSVHGIKNLKVIDASIMPNITSGNTNAPTIMIAEKGADLILGK

SEQ ID NO: 88815 - protein, 247 aa, Unknown
  Bacterial polypetide isolated from the Sargasso Sea
EKILPYFKKIETWSGGENQYRGSFGLLPVNQSKNNNPLFKAFLSASSEAGYKINQDMNGEIQEGFGMFDTTIHNGERASVSKYYLNPAKKRRNLNIFSNSFVERIIFDGKKAVGIEVKIKNKIHKFFAQNEIILSGGSINSPQLLMLSGIGDANHLKEKGINVVHDLKGVGKNLQDHLETYIMQECKTPDTLYKYTKLIPKVLAGMQWFLSKFGPCSKSFLEAGGFAKSSNEREIPNSQFHFFPSFV

SEQ ID NO: 88816 - protein, 242 aa, Unknown
  Bacterial polypetide isolated from the Sargasso Sea
MDKFDYIIIGAGSAGCVLANRLTANPDTKVLLLEAGGKDTNPWIHIPGGYFKTMHNPDTDWCFNTEKEPNCDNRQMVYPRGKTLGGSSSINGMLYIRGQSNDYNYWRQLGNVGWSWDDVLPYFKKSEDFQFGENEFHGSGGPIAVEKIRATFKVLDLFLEAAEEHGYKRTDDFNNGDNEGMGYFPFTIKNGFRCSTAVGYLNPVKSRKNLKIITKAHIKNIEFENKKAKKVNYWIDGKEFSV

SEQ ID NO: 88817 - protein, 242 aa, Unknown
  Bacterial polypetide isolated from the Sargasso Sea
VGKNLHDHLETIFQQECKTPNTLYTYTKLIPKVLAGIQWFMFKSGPCSKSFLEAGGFAKSSAEREISNIQFHFFPSFVINHGLEQPNAHGYQLHASPNHPKSRGHITLNSSDPYEYPKILFNYLQDEDDLKQTRECIHVARKILSQPALAEHSGKEVGPGIEAQSDDEINEYIRSKADTAYHPCGTCKMGIDDMAVVDETLKVKGTQNLRVVDASVIPEIPSANLNAPTLMIAEKASDIILN

SEQ ID NO: 88818 - protein, 93 aa, Unknown
  Bacterial polypetide isolated from the Sargasso Sea
LKHAEKEIGPGSEKKSDEDLNEYIRSNAETAYHPCGTCKMGIDEMAVVDENLRVKGIQNLRIVDASVMPEIPSANLNAPTLMIAEKASDLILN

SEQ ID NO: 88819 - protein, 111 aa, Unknown
  Bacterial polypetide isolated from the Sargasso Sea
METFDYIILGGGSAGCVLANRLSANPKNKVLLLEAGGKDTYPWIHIPVGYFKTMHNPKVDWCFKTEPDETMNNRSIRYPRGKTLGGSSSINGLLWIRGQSEDYKYLAPIRK

SEQ ID NO: 88820 - protein, 194 aa, Unknown
  Bacterial polypetide isolated from the Sargasso Sea
MCFAKSDSSRATPNLQFHVQPISTDILGATKLHNFEGITPTVANVRPTSRGEISIVSKNINDNPKIKMNYLSTDDDRYVAAQGLKLVRKIMLETKTFKKYEPEEYRPGLHIQDDEELVKAGSDFTQTIFHPVGTCKMGSDENAVVDDRLKVHGIKNLRVVDASIMPNITSGNTNAPTIMIAEKASDMILEDNLS

SEQ ID NO: 88821 - protein, 245 aa, Unknown
  Bacterial polypetide isolated from the Sargasso Sea
NGEYQEGFGMFDTTIHNGERASVAKYYLNPIKSRKNLNIFSNAFVEKIIFDGKKAIGIEVKIKGKIEKVYAEKELILSGGSINSPQLLMLSGIGDSNHLKDKGINVVNDLKGVGKNLQDHLETYIMQECKTPDTLYTYTKLVPKVLAGIQWFLSKSGPCSKSYLEAGGFAKSSPEREIPNIQFHFFPSFVIDHGLVNPSSHGYQLHASPNHPKSRGSITLRSSNPYDYPKILFNYLEDEDDLRQT

SEQ ID NO: 88822 - protein, 202 aa, Unknown
  Bacterial polypetide isolated from the Sargasso Sea
MVKIDTEYDYIIVGAGSAGCVLANRLTSNSKNSVLLLEAGGEDKSLTLRMPAAVLSNLKSTKHNWSFKGEPEPELNGRQLQHDRGKTLGGSSSINGMVYIRGNSLDYDGWRQMGCDGWGYADVLPYFKKMECYSGGGDDFRGESGPLKVHRSIPKDPLSLAFINAGKEAGYKETDDISGFCQEGFGIFDRTVFNGERWSASK

SEQ ID NO: 88823 - protein, 436 aa, Unknown
  Bacterial polypetide isolated from the Sargasso Sea
FKTMHNPKVDWCFHTEKDESMNNRSIRYPRGKTLGGSSSINGLLWIRGQKEDYDIWRQLGNTGWSWDEVLPYFLKSESNELGKSEFHNDSGPITVANKKINLKLLDEFQNAAEEYGIPKTVDFNTGNNFGIGFFQFTTSFNKFGLKLRCSAAKGYLNPVKKRSNLKIVVNAHVQKINFEGKKTTGVNYYIGDKLNTVNAKKEVILSAGSIGSPHILQVSGIGDSHKLKNLGIEIVNELNGVGKNLQDHLMFRPVYKVKNLKSLNRKVESLFGRFLMGLEYIFNQSGPVTMGASQVCGFVKSDASRATPNLQFHVSPVSTDILGVTPMHDFEGITPTVANIRPTSRGEINIVSNDSRVYPKIKMNYLSTDEDRKVAAQGLKIVRKIMLETETFKKYEPEEYRPGTHITEDEELVKAGADFTQTIFHPVGTCKMGNDD

SEQ ID NO: 88824 - protein, 233 aa, Unknown
  Bacterial polypetide isolated from the Sargasso Sea
ETYIQQECKTPNTLYTYTKLIPKVLAGIQWFLFKSGPCSKSFLEAGGFAKSSPDRKVANIQFHFFPSFVINHGLVDPDTHGYQLHASPNHPKSRGQITLSSSDPYEYPKILFNYLKEDEDLKQTRECIHVARKILSQPALLEHAGKEIGPGSEAQTDDELNEYIRSKADTAYHPCGTCKMGIDDIAVVDENLRVKGIKNLRVIDASVIPEIPSANLNAPVLMIAEKGSELVLN

SEQ ID NO: 88825 - protein, 335 aa, Unknown
  Bacterial polypetide isolated from the Sargasso Sea
ENFGLKSWSYDKILPYFKKIETWSGGENQYRGSLGLLPVNQSKNSNPLFGAFLKAASEAGHKLNPDMNGEYQEGFGMFDTTIHNGERASVAKYYLDPIKNRKNFNVFSNSFVERIIFDGKKAIGIEVKIKNKIEKVYANKELILSGGSINSPQLLMLSGVGNADHLKEKGISVVHNLRGVGRNLQDHLETYIMQECKTPDTLYTYTKLIPKVLAGMQWFLSKSGPCSQSYLEAGGFAKSSSERDIANIQFHFFPSFVINHGLVNPSSHGYQLHASPNHPKSRGFITLNSSNPYDYPKILFNYLEDEDDLKQTRECIHVARKILSQPSLAKHAEKK

SEQ ID NO: 88826 - protein, 250 aa, Unknown
  Bacterial polypetide isolated from the Sargasso Sea
MLFLEAASEAGYKINPDMNGKSQEGFGMFDTTIHNGERASVAKYYLNPIKNRKNLNIFSNSFVEKIIFDGKKAIGVEVKIKNKIKKFYAEKELILSGGSINSPQLLMLSGIGDANHLKEKGIGVVHDLKGVGKNLQDHLETYIMQECKTPDTLYTYTKLIPKVFAGVKWFLSKSGPCSQSYLEAGGFAKSSTERETPNIQFHFFPSFVINHGLINPDSHGYQLHASPNHPKSRGSVTLNSSDPYHYPKIL

SEQ ID NO: 88827 - protein, 356 aa, Unknown
  Bacterial polypetide isolated from the Sargasso Sea
MVWDTSNKLQTNGRRLSAATAYLKNCKHRKNLKIIANTAVNRIIFDGKKAISVQVKSLTETYEIESRKEIILSAGAVGSPHILMVSGVGCGHLLKKQELHVVKDLPGVGKNLQDHLQARPIFKCREKTLNTETRNLFELTRIGLQYLFFRTGPMSMAASLGVAFLKTNGNLKNPDIQFHIQPFSMDKPSLTGLHRFDAFTTSITQLRPESVGEISIRTPRIEDDPLITPNYLSSDKDCKVLLKGVKIARKIAMTEPLKHMISKEFSPGLNIGFNDDAAVLDWIRANAVTIYHPTGTCKMGNDDLAVVDQRLRVHGLLGVRIVDASIMPKITSGNTNAPTIMIGEKASDMILQDTNI

SEQ ID NO: 88828 - protein, 327 aa, Unknown
  Bacterial polypetide isolated from the Sargasso Sea
RENLSIEIKAHIKKIIFDGLKAVGVEYWQNNELKKIKCNNEIILSAGAIGSPHILQASGVGSPNLLKSKDIEVIKDNENVGENLQDHLMLRPVYTVKNIDTLNQLYHSYYRKFLVGLEYLFFRSGAMTMGPSQLCGFTKSNPSLETPDLQFHVAPLSMDTLGATALHTFPAFTPTVTNVRPTSRGYVRIENNDTRIYPEINLNYLSTKEDIDVAVRSIKLTRDIVLKSNAFKPYMPEEMRPGNDLSDEEIIKEISKYANTLFHPVGTCKMGNDNKAVVNDRLLAHGLEGLRIVDASVMPHITSGNTNAPTIMIAEKAADMILADQKN

SEQ ID NO: 88829 - protein, 200 aa, Unknown
  Bacterial polypetide isolated from the Sargasso Sea
MEKSVDADYLIVGAGSAGCVLANRLTENNENAVVLIEAGGADRWWNWKVHMPAALAYPLADDSYNWAYFSEPERYMNGRKMYCPRGRIWGGSSSINGMAYVRGHAFDYDRWSLSNGCAGWSYSECLPYFKKAESLDIGGDDYRGETGPLRVTAGKMENPLYRAWVEAGRQAGYPITVDPNGYQQEGLGRMDMTVGNGRRS

SEQ ID NO: 88830 - protein, 199 aa, Unknown
  Bacterial polypetide isolated from the Sargasso Sea
MNNYDFIILGAGSAGCVLANRLSENPSHKVLLLEAGGKDNYPWIHIPVGYFKTMHNPKTDWCYKTEPDESMNNISIRYPRGKTLGGSSSINGLLYIRGQNRDYDVWRQLGNTGWGWDDVLPYFIKAEDQERGKNEFHGVNGPLAVSDQRIHLPLLDEFQNAAEEFGIPKTKDFNTGDNHGCGYFQVTEKDGFRCSTSVG

SEQ ID NO: 88831 - protein, 477 aa, Unknown
  Bacterial polypetide isolated from the Sargasso Sea
MSKSYDYIIIGAGSAGCVLANRLSKNPKNSVLLLEAGGPDTNMNIHIPGAYLKNHKSKQDWGFWTEEQANVLNRKIYLPRGKTLGGSSSTNAMAYVRGNASDYNNWSKLGNIGWSYNDVLPYFKRSENHAQIDLMDSGYHSSSGELEVTFPTKFKSPYVKSFIDACSSLGIFPNKDYNGLKQYGASLVQSTIKNGKRESSATAFLKPVLHRSNLKTILYALVDKIILEGKKAVGVQYTKGLNTTQVFAKKEVILSAGSFQSPQLLMLSGIGDVSDLKKHGITISHELKGVGKNLQDHLFYPISAYTKTQEGINHYISPIQQLGAAWDYFVNKKGVFCVSPLEGMAFFDLDQKSSKVNFQLHFSPICIGNEYGYDAYDIYDYPRTDGFTILPTLLHPKSRGSVSLCSSDPRDAPMIQPNFLSEKKDLDQLVKGGNLVFKIMKHNAMKNHIKAYGLPHNQDSDDQLVEHIKKTLETVYH

SEQ ID NO: 88832 - protein, 432 aa, Unknown
  Bacterial polypetide isolated from the Sargasso Sea
MENFDYIIIGAGSAGCVLANRLSANPNNKILLLEAGGKDTNPWIHIPGGYFKTMHNPNTDWCFKTEKEPNCDNREMVYPRGKTLGGSSSINGMLYIRGQSNDYNYWRQLGNVGWSWEDVLPYFKKSEDFQFGENEFHGSGGPIKVEKIRSTFKVLDLFLDAAEEFGYKRTEDFNAGNNEGMGYFPFTIKNGFRCSTAVGYLNPIKKRKNLKIVTKAHTKNIEFQSKKAVGVNYWHNDKLVNVKANKEVILSAGTIGSPQILQVSGIGPGDLLKNNNVEVLKNHPGVGANLTDHLMLRPVYKIKNLETLNDIYYSAIKKIKTGLQFLLLRKGPLTVGASYVCGFIKSDSSLETPNLQFHVSPASTDLLGKSSLHKFPAFTPTITNVRPTSRGSIEIKSSDTRTSPKIKMNYLSTDEDREIAGKSIKIVRDIVM

SEQ ID NO: 88833 - protein, 457 aa, Unknown
  Bacterial polypetide isolated from the Sargasso Sea
MENFDYIIIGAGSAGCVLANRLSSVKENKVLLLEAGDKDTYPWIHIPVGYFKTMHNPKVDWCFKTEKDETMNNRSIRYPRGKTLGGSSSINGLLWIRGQSNDYDNWRQQGNTGWGWEDVLPYFLKSENNELGKSEFHNDKGPIQVSNKKINLKMLEEFQNAAEEIGIPRTNDFNTGDNFGIGYFQFTTSRQKLLKLRCSAAKGYLNPVKKRSNLKIIVNAHVEKINFEGKKAIGVNYFINRKLNTVKVNKEVILSAGSIGSPHILQVSGIGDNDKLKKNGIEVIHELKGVGKNLQDHLMFRPVYKVKNLKSLNKKINSLFGNFLIGLEYIFNQSGPMTMGASQVCGFIKSDSSRETPNLQFHVQPISTDVLGATKMHDFDGITPTIANIRPTSRGEINIISKDSRDNPKIKMNYLSTQDDRDVAAKALKIVRKIMLETKTFKKYEPEEYRPGINIIN

SEQ ID NO: 88834 - protein, 137 aa, Unknown
  Bacterial polypetide isolated from the Sargasso Sea
MNEFDYIIIGAGSAGCVLANRLTSKEENKVLLLEAGGKDNYPWIHIPVGYYKTMHNPKVDWCFHTEKDETMNNRSIRYPRGKTLGGSSSINGLLWIRGQSNDYDNWRQMGNSGWGWNDVLPYFLKSENNELGKSEFH

SEQ ID NO: 88835 - protein, 404 aa, Unknown
  Bacterial polypetide isolated from the Sargasso Sea
MKFDYIIIGAGTAGCVLANRLSENGKFNVALFEAGGSSDIWKVNMPLAILYAMHDPKYNYKYYSEPEPNLNNRRLFCPRGKMVGGCSAHNGMVYVRGNKNDYERWASFGLKSWSYENVLPFFKKIETWSEGENEFRGGNGILPVNQSKNQNPLFGAFINASVEAGYKKNNDMNGEDQEGFGMYDITIHKGQRASASKYYLEPAKKRRNLKVFTNSFAERIIFEGKKAVGIEVNIKSKVTKVYANKEVILSGGSINSPQLLMVSGVGPEKDLKDKGINVVHSLEGVGQNLQDHLETYIQQECKTKDTLYSYVNKINMLKIGIQWFLSKSGPCSTSFLEAGGFCKSSEDKSYPNIQFHFFPAFVIDHGLVDPDRHGYQLHASLNQPKSRGYIKLNSSNPYDYPKIQ

SEQ ID NO: 88836 - protein, 437 aa, Unknown
  Bacterial polypetide isolated from the Sargasso Sea
MKFDYIIIGAGSAGCVLSNRLSENQNNKVAVFEAGGTSDIWKVKMPLALLYTMHDPKYNWKYYSEPEPNLNNRRLFCPRGKMIGGCSAHNGMVFVRGNRNDYERWENFGLKSWSYKKVLPYFKKIETWSGGENQYRGSLGPLPVNQSKNDNPLFKAFINSASEAGHVVNPDMNGEEQEGFGMFDTTIHEGQRASATKYYLNPAKQRKNLNIFSNSFVEKIIFDGKKAIGIEVKIKNKVEKVYAEKEVILSGGSINSPQLLMLSGIGDADHLKEKGINVVNDVKGVGKNLQDHLETYIMQECKTPDTLYTYTKLIPKVLAGIQWFLSKSGPCSKSFLEAGGFAKSSPEREIANIQFHFFPSFVIDHGLVNPSSHGYQLHASPNHPKSRGLITLNSSNPYDYPKILFNYLEDEDDLKQTRECIHVARKILSQPSLAKHS

SEQ ID NO: 88837 - protein, 508 aa, Unknown
  Bacterial polypetide isolated from the Sargasso Sea
MIDFDYVIVGGGSAGCVLANRLTEDPNKKVCLIETGPVDKSPLIHVPGLFAFLVKEGEESEYAYQYNTEPQKGFNSVTVTEGSASMQDTLGGSYKVPESHQEKRRGFQPRGKTLGGSSSINGMLYVRGHPWDYDHWSSLGNDGWSYEEVLPYFIKSECNERLQDEYHGNNGPLNVAELRHDNPFTRFFVEAATKHYPANNDFNGKNQEGVGLYQVTQKGGQRCSAAVAYLNPVKERGNLTIFTETIVDKVEFDGLKAVGVRCIKKDKTFSIKASKEVLLCGGAYGSPSILMRSGIGNKEYLRTKDIDCLIDLPGVGENLQDHIDYITSHRVDSWELMGSRSLKFWLRAPFELLKYLLSRTGMFSSSLAEGGAFIKTSEELEMPDIQLHFVVSMVEDHGRTKLWGNGFSCHVCLLRPESKGTVKIPCKDPTAAPLIDPNYLTEERDMKVLIKGYKKMMEIMTTEPLKKFNNIRNPINIDDDKAIETAIRTRSDTIYHPVGTCKMGIDGM

SEQ ID NO: 88838 - protein, 282 aa, Unknown
  Bacterial polypetide isolated from the Sargasso Sea
MEKFDFIIIGAGSAGCVLANRIIKTGKYKVLLIEAGGKDNYPWIHIPVGYYKTMHNPKTDWCFKTEPDETMENVSIPYPRGKTLGGSSSINGLLYIRGQEQDYDLWRQLGNVGWAWKDVLPYFIKAEDQERGKDQFHGVGGPLAVSDQRIKLDILDVFMNAAEEVGIPKVNDFNKGDNFGCGYFQVTERNGLRCSTAVGYLNPIKKNKNLKIETNCHVQKINFDGNNAESVTYSKGNKSFTVRAEKEILLCAGSIGSPHILQTSGVGEASKIKDWELILSKI

SEQ ID NO: 88839 - protein, 539 aa, Unknown
  Bacterial polypetide isolated from the Sargasso Sea
MKNFDIVIVGAGSAGCIVTNQIINNTNLKVLLIEAGPSDNHPVIQIPLGYGMTFFHKKMNWNFYSEKQKKLNDREVYYPRGKVIGGSGSINAMIYARGLKTDFENWNLNKSWSWENIKDTYEKIEVPIKGKSKKIPINKIPVNDVSNEHHSILKNYFNAANDFHFQFNHQLNSSIEDQVGNYNVNIINGFRASSAKIFLKPIKNHPNLTILTNTEVLKLNYENRKISSLKIKHKKKIIVIKPNIGTILSTGSIMTPYLLLKSGIGKAEELRQYNIPVQFNSPHVGKNFQDHLGLDYLYKTHMPTLNDELGTWTGRIKTVLRYFYNRKGPLSLSLNQGGGYINWKSLDPFPNIQLYFNPLTYSVSYKNKRPLLKTDKFSGFIIGFNSCRPKSLGEVKLRLENEEYYPSINPNYLSDERDIHDLYSAFDFVRKFSSNKHIKNIIKAPINIDPIKASDKELLDHFKSMATTIYHPCGTCRMSKDINSGVVSDKLKVHGLENLWIVDASIMPNITSGNINAPVMMLSYLSSKLILEELKQYNK

SEQ ID NO: 88840 - protein, 206 aa, Unknown
  Bacterial polypetide isolated from the Sargasso Sea
MDNFDYIIIGAGSAGCVLANRISSNPKNKVLLLEAGGKDTNPWIHIPGGYFKTMHNPETDWCFNTEEEPFCDNRKMTYPRGKTLGGSSSINGMLYIRGQSNDYNYWRQLGNVGWSWDDVLPYFKKSEDFQFGKNEFHGSGGPLKVEKIRSTFKVLDLFLEAAEEFGYKKTDDFNNGDNEGMGYFPLTVKNGFRCSTAVGYLNPVKK

SEQ ID NO: 88841 - protein, 556 aa, Unknown
  Bacterial polypetide isolated from the Sargasso Sea
MLAKRSSIYRGHRPVKNSFDYLVVGGGSAGSVLASRLTEDPDVTLCLFEAGGTGDGWPVNVPAALVLMIPSRLNNWAFETVPQKGLQGRRGYQPRGKALGGSSAINAMVYTRGHHADYDDWAALGNEGWGWNDVFPYFKRSEHNERLGNEWHGRGGPLWVSDLRTDNPFQARWLDAARECGLPVTDDFNGAEQEGVGIYQVTQKNGERWSAARAYLFPHMQTRGNLTVETGAQVRRIVFDGKRAVGVEVTRGGNVETVWAKKEVILSAGAFQSPQLLMLSGVGPKDELARHGIQVVADLPGVGENLQDHPDFVLSYKTNSLDALGVSVRGAIKTLGDIRQYRNSRTGTLTTNFAEGGAFLKTRPDLERPDVQMHFVVGPVSDHGRKVRLGHGLSCHVCLLRPKSRGSVKLRSADPLDAPLIDPAFLEHDDDLEVLVEGYKLTRRLMAAPAMARFVTEDLFASRSRSDDDIRALLRERTDTVYHPVGTCRMGNDALAVVDSQLRVRGTEGLRVVDASIMPTLVGANTNAPTIMIGEKASDLIRRISRFPSAMPETAV

SEQ ID NO: 88842 - protein, 201 aa, Unknown
  Bacterial polypetide isolated from the Sargasso Sea
GPMTMGASQVCGFVKSDPSRATPNLQFHVQPISTDILGASKMHDFDGITPTVANVRPTSRGEINIASKDSRDNPKIKMNYLSTQEDRDVAAKALKIVRNIMMNTKTFKKYEPEEYRPGIHITDNEELVKAASDHAQTIFHPVGTCKMGKGEEAVVNDKLQAHGLENLRVVDASIMPNITSGNTNAPTIMIAEKASDMILNK

SEQ ID NO: 88843 - protein, 140 aa, Unknown
  Bacterial polypetide isolated from the Sargasso Sea
MDEFDFIIIGAGSAGCVLANRLSANPNNKVLLLEAGGKDTYPWIHIPVGYFKTMHNPKVDWCFHTEKDETMNNRSIRYPRGKTLGGSSSINGLLWIRGQSNDYDNWRQQGNAGWGWDDVFPYFLKSENNELGPNEFHNDK

SEQ ID NO: 88844 - protein, 61 aa, Unknown
  Bacterial polypetide isolated from the Sargasso Sea
MVGTCKMGKDENSVVDEKLKVHGVENLRVIDASIMPNITSGNTNAPTIMIAEKGADMILRS

SEQ ID NO: 88845 - protein, 165 aa, Unknown
  Bacterial polypetide isolated from the Sargasso Sea
LGASKLHDFHGITPTVANIRPTSRGEINIVSNDIRIYPKIKMNYLSTDDDRYVAAQGLKLVRKIMLETETFKKYETEEYRPGLHIQDDEELVKAGSDYAQTIFHPVGTCKMGNDDSSVVSDQLKVHGVSNLRVIDASIMPNITSGNTNAPTIMIAEKGADMILNG

SEQ ID NO: 88846 - protein, 112 aa, Unknown
  Bacterial polypetide isolated from the Sargasso Sea
AAKGLKLTRKIIMESETFKKYSPEEYRPGININDDEELVKEASNYAQTIFHPVGTCKMGQDEMSVVDEKLRVRGVRNLRVIDASIMPNITSGNTNAPTIMIAEKGADMILNH

SEQ ID NO: 88847 - protein, 99 aa, Unknown
  Bacterial polypetide isolated from the Sargasso Sea
LAQPSLAKHSGKEIGPGAEAQSDEELNEYIRSKAETAYHPCGTCKMGIDDMAVVDENLKVKGIQNLRVIDASVMPEIPSANLNAPTLMIAEKGADSILN

SEQ ID NO: 88848 - protein, 54 aa, Unknown
  Bacterial polypetide isolated from the Sargasso Sea
MGDDDMAVVNNNLQVHGLEGLRVVDASIMPTLIGGNTNAPTIMIAEKAADSIRQ

SEQ ID NO: 88849 - protein, 69 aa, Unknown
  Bacterial polypetide isolated from the Sargasso Sea
HPCGTCRMSRDINSGVVSEKLKVHGIDNLWIVDASIMPNITSGNINAPVMMLSYLSSKIILEELKQKYK

SEQ ID NO: 88850 - protein, 89 aa, Unknown
  Bacterial polypetide isolated from the Sargasso Sea
MRPGKDLNDEEIIKEISTYANTLFHPVGTCKMGNDNKAVVNDKLLAHGLEGLRIVDASIMPHITSGNTNAPTIMIAEKAADLILADQKN

SEQ ID NO: 88851 - protein, 365 aa, Unknown
  Bacterial polypetide isolated from the Sargasso Sea
SEPDEGSGFRRIEIPRGKLLGGSSSINGMVFVRGQRQDYDHWAQLGNNGWSYEEVLPYFKKMEDYKGPNSSYRGKSGPLIVTDPMEKNDFYDAMFKGAEEIGVQKNPDYNGAQQEGVGMTQATIWKGKRQSTAICYLNPVKSRQNLTVLTEAFAEELIIQNNKCIGVRLKHKGTTTIVGCNCEVLVSAGAINTPQLLELSGIGQEDVLKKAGVNVRLALPGVGENLRDHYAPRMKWSTLKGRYTYNDRARGLSIALEVAKYLANKKGFLALPAAPMRAYVKSREGLASPDLGISVNPFLIKSGVSLDKKSGFTMAVHSLRPESRGSVHIVSPSSVAPPKIQYNFLSNRIDQDTLLAGMRIVRQWD

SEQ ID NO: 88852 - protein, 313 aa, Unknown
  Bacterial polypetide isolated from the Sargasso Sea
KKIIFKNKIAKGVEFWQGDILKKINVNREIILSSGAIGSPQILQVSGIGNSEKLKNLGIEIVHNLNGVGENLHDHLMLRPIYKINGLKSLNKKINSLFGNLMIGLEYIFKRTGPMTMGASQLCMFAKSDSSLELPDLQWHVQPMSMDTLGATKNHDFHAFTPTVSNIKPTSRGHVSIVDKDSRTYAKIKQNYLSTDNDRMIAAKGLKLTRKIIMESETFKKYSPEEYRPGIKINDDEELVKEASNYAQTIFHPVGTCKMGQDEMSVVDEKLRVRGVSNLRVIDASIMPNITSGNTNAPTIMIAEKGADMILNS

SEQ ID NO: 88853 - protein, 223 aa, Unknown
  Bacterial polypetide isolated from the Sargasso Sea
SDTLYTYTKLIPKVIAGVQWFLSKSGPCSQSYLEAGGFAKSSPAREIANIQFHFFPSFVIDHGLVNPSSHGYQLHASPNHPKSRGLITLNSSNPYDYPKILFNYLEDEDDLKQTRECIHVARKILAQPSLAKHSGKEVGPGTEAQSDDELNEYIRSKAETAYHPCGTCKMGVDDMAVVDENLKVKGIQNLRVIDASVMPEIPSANLNAPTLMIAEKGADAILN

SEQ ID NO: 88854 - protein, 67 aa, Unknown
  Bacterial polypetide isolated from the Sargasso Sea
PQTIFHPVGTCKMGNDDSAVVSDKLKVHGLNKLRVIDASIMPNITSGNTNAPTIMIAEKGADMILSP

SEQ ID NO: 88855 - protein, 416 aa, Unknown
  Bacterial polypetide isolated from the Sargasso Sea
MNFDYIIIGGGSAGCVLANRLSENSNNNVLLIEAGKDSDIWKVNMPLAILYAMHDPKYNYKYYSEPEPHLNNRKIFCPRGKMIGGCSAHNGMVYVRGNPNDYSRWAKMGLDEWSYEKVLPYFKKIETWSEGGNEYRGGDGILPVNQSKNSNPLFKAFINSAGEAGYKINSDMNGKDQEGFGMYDVTIHNGERASVSKYYLKPAKSRNNLKILTEKYVKRILFDGKKAIGVEILSKNKKVEKIYSNKEIILSAGAINSPQILMLSGIGPGDHLKDNGIDVIHNLEGVGANLQDHLEVYIQQECKKPLTLYSYVNKINMVRIGIQWFLSKKGPCSYSFLEAGGFCKSSPEQEYPNIQFHFFPAFVIDHGLVDPDRHGFQLHASPNHPKSRGNIKLKSSNIFDSPTIKFNYLEHEDDMK

SEQ ID NO: 88856 - protein, 326 aa, Unknown
  Bacterial polypetide isolated from the Sargasso Sea
MKFDYIIIGAGSAGCVLSNRLSENPNNKVAVFEAGGSSDIWKVKMPLALLYTMHDPKYNWKYYSEPEPHLNNRRLFCPRGKMIGGCSAHNGMVFVRGNRNDYERWESFGLKSWSYDNILPYFKKIENWSGGENQYRGSFGLLPVNQSKNSNKLFKAFLNASSEAGHKINPDMNGEMQEGFGMFDTTIHNGERASVSKHYLNPAKKRKNLNIFSNSFVEKIIFEGKKAIGIEVKIKNKIEKIYAEKELILSGGSINSPQLLMLSGIGDADHLKDKGIKVINDLKGVGKNLQDHLETYIMQECKTPDTLYTYTKLIPKSFCRNTMVFI

SEQ ID NO: 88857 - protein, 179 aa, Unknown
  Bacterial polypetide isolated from the Sargasso Sea
LDHGRQSPSSHSFQAHVGPMRPTSRGHVKLKSNNPSASPAIKFNYMQTEHDLKEMRDGIKIAREIFHQKAFDKYRGKEINPGINSSSESDLNEFIKNKGDTAYHPSCTCKMGKDELSVVDEELKVYGIENLRVVDASIMPNIITGNLNATTVMIAEKASDLILKKETLPDVETSFYRAS

SEQ ID NO: 88858 - protein, 315 aa, Unknown
  Bacterial polypetide isolated from the Sargasso Sea
MNFDYIIVGAGSAGCVLSNRLSEDQNNKVAVFEAGSSSNIWKVKMPLALLYTMHDPKYNWKYYSEPEPNLNNRRLFCPRGKMIGGCSAHNGMVFVRGNRNDYERWENFGLKSWSYNKILPYFKKIETWSEGENQYRGSLGLLPVDQSKNDNPLFKAFLGAASEAGYKINPDMNGEFQEGFGMFDTTIHNGERASVAKYYLYPIKNRKNFSVFSNSFVERIIFDGKKAIGIEVKIKNKIEKVYANKELILSGGSINSPQLLMLSGVGNADHLKEKGISVVHNLRGVGRNLQDHLETYIMQECKTPDTLYTYTKLIP

SEQ ID NO: 88859 - protein, 222 aa, Unknown
  Bacterial polypetide isolated from the Sargasso Sea
KSVLKYLYNRSGPLSLSLNQGGGYINWNSLDPHPNIQLYFNPLTYSVSYKNRRPLLNTDKFNGFILGFNSCRPKSLGEVKLKSFKDSYLPSINPNYLSDERDIHDLYATFDFIRKFSANKNISNIIKSPVNIDPLIATDHELLDHFRSNATTIYHPCGTCRMSKDIGTGVVSDKLKVHGLDNLWIVDASIMPNITSGNINAPVMMLAHLSSKIILEELKQQY

SEQ ID NO: 88860 - protein, 43 aa, Unknown
  Bacterial polypetide isolated from the Sargasso Sea
MQVHGIQGLRVVDASIMPTLIGGNTNAPTIMIAEKAADSIRQS

SEQ ID NO: 88861 - protein, 545 aa, Unknown
  Bacterial polypetide isolated from the Sargasso Sea
MPDNSDVFDYVIVGAGTAGSILTNRLSTDGARVCLLEAGPEDYHPFIHIPAGYIKNIYSRKLTWNFKSKPTQHTANRSFILPQGRVIGGSSSINGLNHVRGQPSDYDGWSQLGNQGWSYSEVLPYFKRSEKRIGWGNDEVRGRDGELPVTDLDFIHPTCEAFIEGAASLGIPRNPDYNSGDLAGLGYFQRNIHRGLRYSSSKAFLNPVRRLQNVEVRTNAQASSIIFDGNLAVGVHYVRGNRNGAIHEVRARREVILCAGALNTPKLLQLSGVGPADLLKERGIEIQADLRGVGNNLQDHYGVRMVAQLKGVRTFNTMAQGFPLGLEILKWVFRRPSVLSVSPSLVHLFWKSSEQLELPDLEYVMTPASFRESTVGLLDKAPGMTLGVWQMRPKSRGYVKVLSRDIFEPPEINPNYLSDSYDQEILLRSIKLGRKLMATAPLQPYLEGTTNPHQSLQTDDELLNWARQEGITVYHMVGSARMGPDSDPEAVVDSQLRVKKLEKLRLADASIMPGLISGNTNAAVMMIAEKAADMILGKRLDPIDC

SEQ ID NO: 88862 - protein, 106 aa, Unknown
  Bacterial polypetide isolated from the Sargasso Sea
QERVFLQKAFDPYRGDQSKPGTDVDVDDDDQLDEWIRNTGETLYHPVGTCKMGDDHMAVVNNNLQVHGLEGLRVVDASIMPTLIGGNTNAPTIMIAEKAADSIRQS

SEQ ID NO: 88863 - protein, 151 aa, Unknown
  Bacterial polypetide isolated from the Sargasso Sea
MENFDYVIIGAGSAGCVLANRLSSNPNNKVLLLEAGGRDNYPWIHIPVGYFKTMHNPKVDWCFHTEKDESMNNRSIRYPRGKTLGGSSSINGLLWIRGQKEDYDIWRQLGNTGWSWNDVLPYFLKSENNELGKSEFHNDKRPITVANKKIN

SEQ ID NO: 88864 - protein, 251 aa, Unknown
  Bacterial polypetide isolated from the Sargasso Sea
NLQDHLGLDYLFKTHHHSLNKSLGTWSGRITSVLRYLYNRTGPLSLSINQSGGYINWNSKHHYPNLQIYFNPLTYSITHKNKRPLLKTDNFNGFIIGYNSCRPKSLGTVTLNSPNFGDTPLINPNFLSHEEDIYDVKCAINFSQVLANTNSIKKIRNESVTHDLLNSSEEEMIDHFKSNAVSIYHPCGTCKMDEDPKKGVVSERLKVHGMENLWIADASVFPNITSGNINAPVMMLANLGSQFIIEDLNKI

SEQ ID NO: 88865 - protein, 268 aa, Unknown
  Bacterial polypetide isolated from the Sargasso Sea
MDNFDYIIIGAGSAGCVLANRISSNPKNKVLLLEAGGKDTNPWIHIPGGYFKTMHNPETDWCFNTEEEPFCDNRKMTYPRGKTLGGSSSINGMLYIRGQSNDYNYWRQLGNVGWSWHDVLPYFKKSEDFQFGKSEFHGSGGPLKVEKIRSTFKVLDLFLEAAEEFGYKKTDDFNNGDNEGMGYFPLTVKNGFRCSTAVGYLNPIKSRSNLKIITKAHIKNIEFENKIAKKVNFWTGDKLNTVEANGEIILSAGTIGSPHISSSLRFGA

SEQ ID NO: 88866 - protein, 164 aa, Unknown
  Bacterial polypetide isolated from the Sargasso Sea
IDHGLVNPSSHGYQLHASPNHPKSRGLITLNSSNPYDYPKILFNYLEDEDDLKQTRECIHVARKILAQPSLVKHSGKEVGPGTEAKSDDELNEYIRSKAETAYHPCGTCKMGVDDMAVVDENLKVKGIQNLRVIDASVMPEIPSANLNAPTLMIAEKGADLILN

SEQ ID NO: 88867 - protein, 106 aa, Unknown
  Bacterial polypetide isolated from the Sargasso Sea
IASAPALQDYVVGELEPDGEVRGDDELLDFARARGNTVYHPVGTCKMGSDPKAVVNERLRVIGMQSLWVVDASIMPTLTSGNTNAPTIMIAEKAADMIKEDEKALR

SEQ ID NO: 88868 - protein, 534 aa, Unknown
  Bacterial polypetide isolated from the Sargasso Sea
MENFDFIIIGAGSAGCVLANRLSANPNNKILLLEAGGKDSNPWIHIPGGYFKTMHNPETDWCFNTEKEPNCDNRQMVYPRGKTLGGSSSINGMLYIRGQSNDYNYWRQLGNVGWSWEDVLPYFKKSEDFQFGENEFHGSGGPIKVEKIRATFKVLDLFLEAAEEFGYKKTEDFNNGNNEGMGYFPFTIKNGFRCSTAVGYLNPVKKRKNLKIVTNAHIKNIEFENKKAISVNYWIKNNLINVKANKEIILSAGTIGSPHILQASGIGPGELLKKNNINVIKDQKSVGRNLTDHLMLRPVYKIKNLETLNDIYYSIPKKILTGLKFFLFRKGPLTVGASYACGFIKSDPHLETPNLQFHISPASTDQLGKSSLHKFPAFTPTITNVRPTSRGSIELSSPDTRVSPKIKMNYLSTDEDREIAGKSLKIVRKIVMESNAYKDYQPEELRPGINITDNEALAKEAGKYANTIFHPVSTCRMGNDEDSVVNDRLVAHGLDNLRIVDASVMPHITSGNTNAPTIMIAEKASDMIIEDSKS

SEQ ID NO: 88869 - protein, 485 aa, Unknown
  Bacterial polypetide isolated from the Sargasso Sea
MNNIDIAIIGAGSAGSIIANKLLNETNFNIALIEAGPKDNNPIIDVPLGYGMTFYNKKINWNFYSEKQDNLFKRQIYYPRGKVLGGSGSINAMVYARGLETDYENWGSNKEWSFENIKKVYSSMEQQINDDKEFLTKEKVPVNNVSKHHHPILEYFFNASNEIGIKKNTNLTTSIENQVGHYNINTYKGTRHSSSKVFLKPVLKNPRLTLLDNTQVKNLIIKDKKITGIKIQNKSSEQILKLSHGAILCSGSIMTPYLLMHSGIGDKEYLKQFDKEIIIDNSNVGRNLQDHLGLDYLFKTHHHTLNKSLGTWSGRIISVLRYLYNRKGPLSLSINQSGGYINWHSKHHYPNLQIYFNPLTYSITHKNKRPLLKTDKFNGFIIGFNSCRPKSLGTVTLNSPNFGDTPLINPNFLSHEEDIYDVKCAINFSKVLANTNNIKKIRNESVTHDLLNATEEEMIDHFKSNAVSIYHPCGTCKMDEDPKKG

SEQ ID NO: 88870 - protein, 316 aa, Unknown
  Bacterial polypetide isolated from the Sargasso Sea
MQAFDYLIVGAGSAGCVVANRLSENANNSVAIFEAGGSSDIWKVKMPLALLYTMHDPKYNWKYYSEPEPYLNNRRVFCPRGKMIGGCSSHNGMVFVRGNRDDYTRWENFGLDNWSYDKVLPYFKKIETWSEGENQYRGSLGPLPVNLSKNSNPLFKAFIDAAAEAGHKTNIDMNGEEQEGFGMFDTTMHQGERAGVAKYYLNPVKNRKNLNILKNSFVEKILFEGKKAVGLQVKINNKVEKIYANKEVILSGGSINSPQLLMLSGIGDENHLRDNGIEVIHHSKGVGKNLQDHLETYIQQKCKTPNTLYTYTKLIP

SEQ ID NO: 88871 - protein, 127 aa, Unknown
  Bacterial polypetide isolated from the Sargasso Sea
PKILFNYLKEEEDLKQTRECIHVARKILSQPALAEHAGDEVGPGFNAQSDDELNEYIRSKADTAYHPCGTCKMGVDNMAVVDQDLKVNGIGNLRVIDASVIPEIPSANLNAPTLMIAEKGSEAILNN

SEQ ID NO: 88872 - protein, 540 aa, Unknown
  Bacterial polypetide isolated from the Sargasso Sea
MDRNFDYIVIGAGSAGCVMANRLSEDKENTVLSIEAGGKDRNFFIHMPSGYSQIVPTKSKLNYGFETEPEATTNNRQLYWPRGKVWGGSSSINAMVYIRGHAYDYDLWRQLGNTGWSYEDVLPYFKKAESFQGDGDEDYHGFDGPLNVKKSSRTDDPLLDIFIEAGSQAGFPLTEDFNGKEQEGFSRYEHTMKDTSFGPRRWSSARAYLHPALKRKNLSTETNVQVNKILFEGKKAIGVEYTKNGQVLTCKCNKEIIISAGAINSPQILMNSGIGDSDELSKHGIDVVHELKGVGKNLQDHYGVLNSFYATQPITLHRSAGLLKTGVAGIRYLLFGTGDAAYPPTSAGAFFKSSPDKDIPDTQLHFTAIQTPDLHGRLGIDEKHGFTAVIYICRPQSRGYIALRSANPSDAPLMYPNYLSEEQDMIDTRNALRETRRVFHQKAFDPYRGEQTKPGKDVNVDDDDQLDEWIRNTGETLYHPVGTCKMGEDDMAVVNSNLQVHGISGLRVVDASIMPTLIGGNTNAPTIMIAEKAADSIRQS

SEQ ID NO: 88873 - protein, 145 aa, Unknown
  Bacterial polypetide isolated from the Sargasso Sea
PTSRGEINIVSSDSRVYPKIKMNYLSTDEDRKVAAQGLKIVRKIMLETETFKKYEPEEYRPGVHITDDEELVKAGADFTQTIFHPVGTCKMGNDDIAVVDHSLKVRGIQNLRVIDASIMPNITSGNTNAPTIMIAEKGADMILNG

SEQ ID NO: 88874 - protein, 351 aa, Unknown
  Bacterial polypetide isolated from the Sargasso Sea
MGYFPFTIKNGFRCSTAVGYLNPVKKRSNLKIVTKAHIKNIEFQNKTAKKINYWTGEKLNSVSTNKEIILSAGTIGSPHILQASGVGPGKLLKDNGINIIKEHSGIGQNLVDHLMLRPVYKVKNLETLNDIYYSFTKKIISGLKFLITRSGPLTVGASYVCGFVKSDEYLETPNLQFHVSPASTDYLGKSALHKFPAFTPTIANVRPTSRGSIELKSSDTRIPPKIKMNYLSTEEDRQIAGKSLKIVRKIVMESEAYKDYQPEELRPGINITDNEQLAVEAGKFANTIFHPVSTCRMGNDEQAVVSDKLKVHGLENLRIVDASVMPYITSGNTNAPTIMIAEKGADLILKK

SEQ ID NO: 88875 - protein, 433 aa, Unknown
  Bacterial polypetide isolated from the Sargasso Sea
GNPKSDWCYETQSDRGIADRSIPWPRGRVMGGSSSINGLLYVRGQPRDFDIWSQLGCTGWSWDEVLPYFKRSENWDGIDETGLRGKDGPLSVQSARLKRDIVDHWVDAAVTAGYQRNYDYNGSTQEGVGHFQLTMKGGRRCSSSVAYITPIKSRKNLKIITNAQTKKVNIIDGRAISIDIDIKDKLDTISARREIIICAGAIGSPQILMLSGIGPGEDLKNLGIEVVSDLVGVGKNLQDHLQARPVFKTDLSTINTETSNYVKKALIGLQYILTQRGPMTMAASLGTGFLKTEDHLETPDIQFHIQPFSADMPSKGAHTFSAFTASVLQLRPESTGYLTLKSPNYLDHPEIHPNYLATVTDCKTIVKGVQIARKIAQCEPLKAHVSEEYAPGSEVPLEDEEGTLDWVRRTAVTIYHPTGTCKMGTDEMSVVSP

SEQ ID NO: 88876 - protein, 142 aa, Unknown
  Bacterial polypetide isolated from the Sargasso Sea
QRKITLNSSNPYDYPKILFNYLEDEDDLKQTRECIHVARKILSQPSLAKHSGKEVGPGSDKQNDDELDEYIRSKAETAYHPCGTCKMGVDDMAVVDENLKVKGIQNLRVVDASVMPEIPSANLNAPTLMIAEKASDLILHSI

SEQ ID NO: 88877 - protein, 205 aa, Unknown
  Bacterial polypetide isolated from the Sargasso Sea
IHGNSMISSTLSEVGGFFKTDPFLDRPDIQNHFVIGLIDDHLRKIHYGYGYSCHVCLLRPYSRGTVSLASAKVSDDPIIDPKFFSDLRDLKTLIKGAKLTQDILNSAPLNKYKSKEIYGVHNNLSDLEWEGHIRNRADTIYHPVGTCKMGNDELAVVDNKLKIKGLKNIRVADASIMPKITSGNTNAPTIMIAEKCSSMIFEEYS

SEQ ID NO: 88878 - protein, 237 aa, Unknown
  Bacterial polypetide isolated from the Sargasso Sea
MKYDHIIIGAGSAGCVLATRLTEDPEISVLLLEAGPDYLDIHSAPDDVKFGNNMWKSAYGQHSWGYPAFPTKHRSTPMIIPRGKVVGGSSSINGQVICRGIPEDYDNWAKWGNSEWSFEKVLPYFRKLENDLDFGSSDIHGSEGPIPVRRYKRKELLPSFEQFYESCINLGYPEDPDQNSPESFGIGMRALNNIDGVRMSTSFTYLNMSRHRLNLTVRSDVFVTKLLIENNQAIGCT

SEQ ID NO: 88879 - protein, 96 aa, Unknown
  Bacterial polypetide isolated from the Sargasso Sea
QSDEQIENFIREKAETIYHPVGTCKMGSDENAVVDDKLRVRGVENLRVVDASIMPNLVGGNTNAPTIMIAEKIADHILGNDFLPALDLSQSYKQSA

SEQ ID NO: 88880 - protein, 93 aa, Unknown
  Bacterial polypetide isolated from the Sargasso Sea
MDNFDFIIIGAGSAGCVLANRISSNPKNKVLLLEAGGKDTNPWIHIPGGYFKTMHNPETDWCFNTEEEPFCDNRKMTYPRGKTLGGSSSINGM

SEQ ID NO: 88881 - protein, 532 aa, Unknown
  Bacterial polypetide isolated from the Sargasso Sea
IVGAGSAGCIVTNQIINNTNYKILLIEAGPSDNNPVIQVPLGYGMTFYNKKMNWNFYSINQKNLHNREIYYPRGKVLGGSGSINAMIYARGLSSDFENWDLSTKWSWENIKTAYDQIEFAVNENTKRLPSNKIPVSDISKKHHPILKNFFDASKDFNFAFNKNLKSSIGNQVGNYNVNIFKGFRTSSSKVFLKPIRNHPNLTILTKTEVLKLNYENKKIVSLNIMHKNKKISVKPKIGTILSTGSIMSPYLLLKSGIGKAEDLKEHNIPVNLHNPNVGKNFQDHLGLDYLYKTFVPTLNKDLGNWGGRIKSVLKYLYNRSGPLALSLNQGGGYINWNSLDPFPNIQLYFNPLTYSVSYKNRRPLLNTDKFNGFIIGFNPCRPKSLGEVKLQSYQDDYLPTINPNYLSDERDIHDLYATFDFMRKFSSNKNISDIIKSPVNIDPIKASDDELLDHFKSNATTIYHPCGTCRMSKDIAKGVVSDKLKVHGLDNLWIVDASIMPNITSGNINAPVMMLSYLSSKIILEELKQSYK

SEQ ID NO: 88882 - protein, 83 aa, Unknown
  Bacterial polypetide isolated from the Sargasso Sea
VNVDDDDQLDEWIRQTGETLYHPVGTCKMGEDDMAVVNNNLQVHGVQGLRVVDASIMPTLIGGNTNAPTIMIAEKAADSIRQS

SEQ ID NO: 88883 - protein, 217 aa, Unknown
  Bacterial polypetide isolated from the Sargasso Sea
NHFDTVACVRSAPGVEYPDLQLCISPIAMKDNSWELLQEHAFQVHVGLMRTHSRGKIELRSKNPADPPRILVNYLKDKRDRELLRKGIHLARELLNQPAFSNIKGDEIFPGENYKSDDELDAKLNSNITSQWHLCCTARMGLKTDKHAVVDNQGRVHGFNNLRVVDASIMPFATNGNTNAPTIMIAEKISDNILGDNPLPRIELKTWQSPNYQMYQR

SEQ ID NO: 88884 - protein, 70 aa, Unknown
  Bacterial polypetide isolated from the Sargasso Sea
GGSLLHCVGTCFMGSEKDSVVDNELKVRGVKNLRVIDASIMPKIISGNTQAATIMIAEKGSDSILSENKN

SEQ ID NO: 88885 - protein, 122 aa, Unknown
  Bacterial polypetide isolated from the Sargasso Sea
YLSTQDDRDVAAKALKIVRNIMLNTKTFKKYEPEEYRPGSHITDDEELVKAASDHAQTIFHPVGTCKMGKGDEAVVNDKLQAHGVQNLRVVDASIMPNITSGNTNAPTIMIAEKASDMILNK

SEQ ID NO: 88886 - protein, 193 aa, Unknown
  Bacterial polypetide isolated from the Sargasso Sea
MGQLTEADYLVIGAGSAGCVLANRLTENNESTVTLVEAGGPDRWWNWKVHMPSALAYPLADNKYNWAYFSEPEKHLDGRRMYCPRGKIWGGSSSINGMAYVRGHALDYERWSLVSGCEGWSYSECLPYFKKAESIDIGGDDYRGGVGPLQVTAGKMDNPLYRAWIDAGRQAGYPVTSDPNGYQQEGLGRMDMT

SEQ ID NO: 88887 - protein, 175 aa, Unknown
  Bacterial polypetide isolated from the Sargasso Sea
QVHVGLMRTHSRGKIELRSNNPADPPRILVNYLKDKRDRELMRKGIHLVRELLDQPSFSDLKGEEIFPGDNCKSDADLDAKLNLHTTSQWHLACTARMGLKTDKYAVVDNSGKVHGITSLRVVDASIMPFAPNGNTNAPTIMIAEKISDEILGSKPLTRIELQTWQSPNYQTDQR

SEQ ID NO: 88888 - protein, 94 aa, Unknown
  Bacterial polypetide isolated from the Sargasso Sea
MKNFDFIIIGAGSAGCVLANRLSANPNNKVLLLEAGGKDSNPWIHIPGGYFKTMHNPETDWCFNTEQEPNCDNRQMVYPRGKTLGGSSSINGML

SEQ ID NO: 88889 - protein, 464 aa, Unknown
  Bacterial polypetide isolated from the Sargasso Sea
MDNFDFIILGAGSAGCVLANRLSENPNHKVLLLEAGGKDNYPWIHIPVGYFKTMHNPKTDWCYKTEPDESMNNISIRYPRGKTLGGSSSINGLLYIRGQNRDYDVWRQLGNTGWGWDDVLPYFIKAEDQERGKNEFHGVNGPLAVSDQRIHLPLLDEFQNAAEEFGIPKTKDFNTGDNHGCGYFQVTEKDGFRCSTSVGYLNPIKNRKNLEIITHAHVKKIIFENKIAKSVEFWQGNELKKVDANREIILSSGAIGSPQILQVSGIGSSEKLKNLGIEMVHNLNGVGENLHDHLMLRPIYKINGLKSLNKKINSLFGNLMIGLEYIFKRTGPMTMGASQLCMFAKSDSSLELPDLQWHVQPMSMDTLGATKNHDFHAFTPTVSNIKPTSRGHVSIVDKDSRTYAKIKQNYLSTDNDRMIAAKGLKLTRKIIMESETFKKYSPEEYRPGININDDEELVKEASNY

SEQ ID NO: 88890 - protein, 253 aa, Unknown
  Bacterial polypetide isolated from the Sargasso Sea
IDVVSNIKGVGRNLKDHLETYIMQECKTPDTLYTYTKLVPKVLAGIQWFLSKSGPCSKSFLEAGGFAKSSPEREIANIQFHFFPSFVIDHGLVNPSSHGYQLHASPNHPKSRGQITLNSSNPYDYPKILFNYLEDEDDLKQTRECIHVARKILSQPSLAKHSGKEVGPGSDKQNDDELDEYIRSKAETAYHPCGTCKMGVDDMAVVDENLKVKGIQNLRVVDASVMPEIPSANLNAPTLMIAEKASDLILNSI

SEQ ID NO: 88891 - protein, 395 aa, Unknown
  Bacterial polypetide isolated from the Sargasso Sea
MEFDYIIIGAGSAGCVLANRLSDSSNNILIIEAGPNNNSYKINMPASMLTNLKEKKYNWSFKGEPEKNLNNRSIQHDRGKVIGGSSSINGMVYVRGHAKDFNGWSELGCEGWSYADVLPYFIRMEAYSGGDKDYRGAEGPLKIHRPTPKDPISLAFLKSGKEKNHQTTNDINGFCQEGFGVFDSTINKGKRFSAADAYLKPAKNRNNLTILSESHVNKIIFKNKIAVGVEFFDKQKNKVLAYASKEIILSAGAIGTPHILMLSGIGPEKQLRELNIDVVKNSPGVGANLNDHPDFVLKYRCTKPVSLWPKTKMIPSIIQGLRWFLFSDGMCASNHFDVIACIRSNHSVDYPDIQLCVSPIAVDDKTWKPIQEHAFQIHIGLMQTFSKGHVRLADS

SEQ ID NO: 88892 - protein, 171 aa, Unknown
  Bacterial polypetide isolated from the Sargasso Sea
FSSFVIDHGLVNPSSHGYQLHASPNHPKSRGLITLNSSNPYDYPKILFNYLEDEDDLKQTRECIHVARKILSQPSLAKHSGKEVGPGLDKQNDDELDEYIRSKAETAYHPCGTCKMGIDEMAVVDENLKVKGIQNLRVVDASVMPEIPSANLNAPTLMIAEKASELILNNI

SEQ ID NO: 88893 - protein, 58 aa, Unknown
  Bacterial polypetide isolated from the Sargasso Sea
MGKDENAVVNDKLSVHGLQNLRVIDASIMPNITSGNTNAPTIMIAEKGADFILNNQIK

SEQ ID NO: 88894 - protein, 56 aa, Unknown
  Bacterial polypetide isolated from the Sargasso Sea
MRVVDASIMPFATNGNTNAPTIMIAEKISDNILGDNPLPRIELKTWQSPNYQMYQR

SEQ ID NO: 88895 - protein, 437 aa, Unknown
  Bacterial polypetide isolated from the Sargasso Sea
LGGSSAINGLLFIRGQSRDYDVWRQLGNTGWGWDDVLPYFIKAEDQERGKNDYHGVGGPLSVSDQRIQLPLLNEFQNAAEEFGIPKTKDFNTGDNHGCGYFQVTEKDGFRCSTAVGYLNPIKNRKNLKIITHAHVKKINFENKTAKNVEYWQENALKKVAANKEIILSSGSIGSPQILQTSGVGNSEKLKDLGVTMVHELKGVGENLQDHLMFRPIYKVNGLKSLNKKVNSLFGKLMIGLEYVFNRSGPMTMGASQMCMFAKSDPSLELPDLQWHVQPMSMDTLGATKNHDFHAFTPTVSNIRPTSRGYVNIINKDSRIYAKVKLNYLSTDYDRMVAAKGLKLTRKIVMESETFKKYKPEEYRPGIDINDDEELVKAGSNYAQTIFHPVGTCKMGQDDMAVVDENLKVKGLNNLRVIDASIMPNITSGNTNAPTIMI

SEQ ID NO: 88896 - protein, 890 aa, Unknown
  Bacterial polypetide isolated from the Sargasso Sea
DYPKILFNYLEDEDDLKQTRECIHVARKILSQPSLAKHSGKEVGPGSDKQNDDELDEYIRSKAETAYHPCGTCKMGVDDMAVVDENLKVKGIQNLRVVDASVMPEIPSAKLKCPYSNDCRKSFRSYIEYCLSMEETFVLALQNHKKNNLEAAEDLYNKILKKDPNHFESIYNLSKLLAQTKRFNLAKPLLYKATKLKPNYEKAHNNLGIILTKLKEEQKAINSFEKAIQIDPTYTDAHYNLGIALQELGEHRKAIVYYEKAIHLKPDYAKAYNNLGIALQELGEHKKATIYYEKAIQSQPNYTDAHYNLGRILQELGEHRKAIVCYEKTIHLKTDYAKAYNNLGIALQELGEHRKAINVYKKAISNVPNSIIVNGLSDLLKSIKLGNITETNSNDFKDIVLFLYRKNNINHDDIFHISKLLLFFGENENQITKAVNSNSSLLKNKVIKNLLKEELFLLMLQKSLIADKFLEKLLTKLRNEIIFSLIDSNINIGEESFDFILSLSEQCFLNEYVYVQSKKEISYVNQLNNKIINNKDINEVEIAILGCYIPLYSSKKIINKLINYKSKNILFNDLIAIHIKEPLDEIKLANSIKSFDKIIDSVSKKVREQYEEHPYPRWRYTNKYSHANFLFQLNEEIKPNRIEHSNKFVNPNVLIAGCGTGQHIASVERYLNANILGIDLSLKSLAYAKRKSLELDFKNIEFLHADILQLKNLNKKFDVIECVGTLHHMKDPIKGLKILLDLLKPNGFLKLGLYSEIARRNVVKAREFIKRKKIKKTTEDIRNFRESINNEKEDPSLLRIFNIKDFYSTSMARDLMFHVQEHRFTLPEISKILTDLNLEFLGFINPSIKNKFSKLFHKDKKYISLDSWDKFERNNQDTFSNMYQFWIRKL

SEQ ID NO: 88897 - protein, 328 aa, Unknown
  Bacterial polypetide isolated from the Sargasso Sea
MKFDYIIIGAGSAGCVLSNRLSENQNNKVAVFEAGGSSDIWKVKMPLALLYTMHDPKYNWKYYSEPEPHLNNRRLFCPRGKMIGGCSAHNGMVFVRGNRNDYERWENFGLKSWSYEKVLPYFKKIETWSGGENQYRGSLGPLPVNQSKNDNPLFKAFINSASEAGHTVNPDMNGEEQEGFGMFDTTIHEGQRASATKYYLNPAKKRKNLNIFSNSFVEKIIFEGKKAIGVEVKIKNKVEKVYAEKEVILSGGSINSPQLLMLSGVGNSDHLKEKGINVVNDVKGVGRNLQDHLETYIMQECKTPDTLYTYTKLVPKVLAGIQWFLSKS

SEQ ID NO: 88898 - protein, 304 aa, Unknown
  Bacterial polypetide isolated from the Sargasso Sea
VGVEYSKNGQVLTCKSNKEIIVSAGAINSPQILMNSGIGDAEELSKHGINIVHELKGVGKNLQDHYGVLNSFYSTQPITLHRSAGLLKTGIAGIRYLLFGNGDAAYPPTSAGAFFKSSPDKDIPDTQLHFTSIQTPDLHGRQGIDDKHGFTAVIYICRPQSRGHISLKSANPSDAPLMYPNYLSEEQDMIDTRNAFRETRRVFHQKAFDPYRGEQTKPGKNIDVEDDAQLDDWIRETGETLYHPVGTCKMGEDDMAVVNSNLQVHGVQGLRVVDASIMPTLIGGNTNAPTIMIAEKAADSIRQS

SEQ ID NO: 88899 - protein, 318 aa, Unknown
  Bacterial polypetide isolated from the Sargasso Sea
INCHVKKINFEGTKASSVSFWKNGQIHTVKANREILLSAGSIGSAQILQVSGVGDAEKLRKLGIKIIKELKGVGQNLQDHLMFRPVYKVKNIKSLNKKINSLFGNLLIGLEFIFNRSGPMTMGASQLCLFAKSDNSRETPNLQFHVQPISTDKLGGAALHDFHAFTPTVANIRPTSRGEINIVNSDSRENPKIKMNYLSTEDDRKVAADGLRLVREIVLKSETLKKYQPEELRPGFEFKSDEELVEEGSKFTQTIFHPVGTCKMGNDDYSVVNDKLEVHGIQNLRIIDASIMPNITSGNTNAPTIMIAEKGADMILEK

SEQ ID NO: 88900 - protein, 280 aa, Unknown
  Bacterial polypetide isolated from the Sargasso Sea
MGSIGSPQILQTSGIGNSEKLKDLGVTMVHELKGVGENLQDHLMFRPIYKVNGLKSLNKKVNSLFGKLMIGLEYVFNRSGPMTMGASQMCMFAKSDPSLELPDLQWHVQPMSMDTLGATKNHDFHAFTPTVSNIRPTSRGHVNIINKDSRIYAKVKLNYLSTDHDRMVAAKGLKLTRKIVMESETFKKYKPEEYRPGIDINDDEELVKAGSNYAQTIFHPVGTCKMGQDDMAVVDETLKVKGLNNLRVIDASIMPNITSGNTNAPTIMIAEKGADMILRS

SEQ ID NO: 88901 - protein, 342 aa, Unknown
  Bacterial polypetide isolated from the Sargasso Sea
SFRGSLGPLPINLSKNSNPLFKAFIDAAGQAGHKINIDMNGEEQEGFGMFDTTMHQGERAGVAKYYLNPVKNRKNLDILKNSYVEKILFDGKKAIGLQVKIKDKVKKIFANKEIILSGGSINSPQLLMLSGIGDVNHLKNKGIEIVNNVKGVGKNLQDHLETYIQQECLTPNTLYTYTKLIPKVLAGIQWFMFKSGPCSKSFLEAGGFAKSSPEREIPNIQFHFFPSFVINHGLEQPNSHGFQLHASPNHPKSRGHITLNSSDPYEYPKILFNYLQNEEDLKQTRECIHVARNILSQPALAEHAGKEVGPGINAQSDDEINEYIKSKADTAYHPCGTCKMGV

SEQ ID NO: 88902 - protein, 296 aa, Unknown
  Bacterial polypetide isolated from the Sargasso Sea
PDETMENVSIPYPRGKTLGGSSSINGLLYIRGQEQDYDLWRQLGNVGWAWKDVLPYFIKAEDQERGKDQFHGVGGPLAVSDQRIKLDILDVFMNAAEEVGIPKVNDFNKGDNFGCGYFQVTERNGLRCSTAVGYLNPIKKNKNLKIETNCHVQKINFDGNNAESVTYSKGNETFTVRAEKEILLCAGSIGSPHILQTSGVGEASKIKDLGINIVKDLKGVGKNLQDHLMFRPVYKVKNIKTLNKKINSVFGKLLIGLEYVFKRRGPMTMGASQLCGFAKSDPNRDTPKFTISYSAN

SEQ ID NO: 88903 - protein, 263 aa, Unknown
  Bacterial polypetide isolated from the Sargasso Sea
MKEFDYIIIGAGSAGCVLANRLTADKNNKVLLLEAGGKDNYPWIHIPVGYYKTMHNPKVDWCFHTEKDETMNNRSIRYPRGKTLGGSSSINGLLWIRGQSNDYDNWRQQGNTGWGWDDVLPYFLKSENNELGKNEFHNDEGPISVTNKKINLRMLEEFQNAAEEFGIPRTNDFNKGDNFGIGYFQFTTTRQKLLKLRCSAAKGYLNPVKKRPNLKITVNAHVQKINFLGKKAVSVSFYSNGKLTTIKANKEILLSAGSIGSPH

SEQ ID NO: 88904 - protein, 271 aa, Unknown
  Bacterial polypetide isolated from the Sargasso Sea
LQTSGIGNSKNLKDLGIDMVHDLKGVGENLQDHLMFRPIYKVHGLKSLNKKINSLFGNLMIGLEYVFNRSGPMTMGASQMCMFAKSDPSLELPDLQWHVQPMSMDTLGATKNHDFHAFTPTVSNIRPTSRGHVKITNKDSRIYAKVKLNYLSTEHDRMIAAKGLKLTRKIVMESETFKKYKPEEYRPGVNINDDEELVKAGSDYAQTIFHPVGTCKMGQDDMAVVDETLKVRGLNNLRVIDASIMPNITSGNTNAPTIMIAEKGADMILRG

SEQ ID NO: 88905 - protein, 264 aa, Unknown
  Bacterial polypetide isolated from the Sargasso Sea
MGKKAIGVEILSKNKKVEKIYSNKEIILSAGAINSPQILMLSGIGPGDHLKENGIDVVHNLEGVGANLQDHLEVYIQQECKKPLTLYSYVNKINMVKIGIQWFLSKKGPCSYSFLEAGGFCKSSREQEYPNIQFHFFPAFVIDHGLVDPDRHGFQLHASPNHPKSRGNIKLRSSNIFESPVIKFNYLEHEDDMKQTIECVKVARNILKQNSLKEYAGKEIGPGEDAISDESIVEYIRSKAETAYHPSCTLKMGSDKSAVVDQKL

SEQ ID NO: 88906 - protein, 255 aa, Unknown
  Bacterial polypetide isolated from the Sargasso Sea
IKDLKGVGQNLQDHLMFRPVYKVKNIKSLNKKINSLFGNLLIGLEFIFNRSGPMTMGASQLCLFAKSDISRDTPNLQFHVQPISTDKLGGAALHDFHAFTPTVANIRPTSRGEINIISSDSREKPKIKMNYLSTDDDRKVAADGLRLVRDIIFNTETFKKYSPEELRPGPTFESDEELVQEGSKFTQTIFHPVGTCKMGNDKNSVVNDELKVHGLQNLRVIDASIMPNITSGNTNAPTIMIAEKGADMILGSNAN

SEQ ID NO: 88907 - protein, 280 aa, Unknown
  Bacterial polypetide isolated from the Sargasso Sea
MGLPHILQVSGIGDSEKLKNTGIEVINELKGVGQNLQDHLMFRPVYKVKNLKSLNKKINSLFGNLLIGLEYVFFQSGPMTMGASQVCGFAKSDSSRATPNLQFHIQPISTDILGASKLHDFHGITPTVANIRPSSRGNISIISNDSRVNPKIKMNYLSTEDDRHVAAQGLKLIRRIMLDTDTFKKYEASEFRPGIHIQDDEELVKAGSDYTQTIFHPVGTCKMGQDENAVVSDRLNVYGVDNLRVVDASIMPNITSGNTNAPTIMIAEKASDMILEDSKA

SEQ ID NO: 88908 - protein, 312 aa, Unknown
  Bacterial polypetide isolated from the Sargasso Sea
VIFGKLTCPLAILYTMHDPKYNYKYYSEPEPHLHNRRLFCPRGKMIGGCSAHNGMVFVRGNPNDYQRWASFGLDDWSYEKVLPFFKKIETWSEGENEYRGGSGILPVNQSKNKNPLFKAFVDSAGEAGYKINNDMNGKEQEGFGMYDVTIHKGERASVSKYYLNPAKKRKNLKVFTEAFVEKIIFDGKKAIGIEVKIKNKIEKIYANKEVILSGGAINSPQLLMLSGVGPSQHLKDKGIDVVHNLEGVGKNLQDHLETYVQQECKTKDTLYSYVNKLNMVRIGIQWFLNRSGPCSASFLEAGGFCKSSPKRE

SEQ ID NO: 88909 - protein, 293 aa, Unknown
  Bacterial polypetide isolated from the Sargasso Sea
QATGVTLDGKRCTALTIVHNGRLARVKAGRETILSGGSIGSPQLLQLSGIGPADHLKDLGIAIHHDLPGVGENLQDHLQIRAVYKVKNTETLNERANSLIGKMGIGLEYFLFKRGPMTMAPSQLGGFAKSDINKETPNLEYHVQPLSLPKFGEPLHPFPAFTASVCNLRPESRGHVRIKSADPLQQPAICPNYLSAPIDRQVAVDALRLTRRIVSADAMKRFEPEEFLPGPEYSDDADLAREAGNIATTIFHPVGTCKMGSDPMAVVDDQLRVSGISGLRVVDASIMPTITSG

SEQ ID NO: 88910 - protein, 245 aa, Unknown
  Bacterial polypetide isolated from the Sargasso Sea
MVIVRKGFGAADMTVWRGRRWSSANAYLRPALRRGNVKLVTGALVEKILIDKKTATGVVYRKGGKQHEVTARAETVLAAGAINSPQIMQRSGVGPGAVLQNAGVDVLLDRAGVGANLQDHLEVYFQIACVQPITLYKHLNMASKAIIGLRWLMFRSGLGASNQFETLGFIRSAAGVAYPDIQFHFLPVAIRYDGTASAEGHGFQLHVGPMRSKSRGHVRILDANSFSPPQIKFNYLSHADDWTEF

SEQ ID NO: 88911 - protein, 286 aa, Unknown
  Bacterial polypetide isolated from the Sargasso Sea
KEVILSAGSIGSPHILQVSGIGESNKLKELGIDVVHELNGVGKNLQDHLMFRPVYKVKNLKSLNRKVESLFGRFLMGLEYIFNQSGPVTMGASQVCGFVKSDPSRATPNLQFHVSPVSTDILGVTPMHDFEGITPTVANIRPTSRGEIKIVSNDSRIYPKIKMNYLSTDEDRKVAALGLKIVRKIMLETETFKKYEPEEYRPGAHITDDEELVKAASDYAQTIFHPVGTCKMGSDDMAVVNDSLKVRGIENLRVIDASIMPNITSGNTNAPTIMIAEKGADMILNG

SEQ ID NO: 88912 - protein, 307 aa, Unknown
  Bacterial polypetide isolated from the Sargasso Sea
NPDMNGEYQEGFGMFDTTIHNGERASVSKYYLNPVKNRKNLSIFSNSFVEKIIFDGKKAIGIEVKIKDKVEKFYAEKELILSGGSINSPQLLMLSGVGDSNHLKEKGINIVHNLKGVGKNLQDHLETYIQQECKTPDSLYTYTKLIPKVLAGIQWFLSKSGPCSQSYLESGGFAKSSPEREIPNIQFHFFPSFVINHGLINPSSHGYQLHASPNHPKSRGSVKLNSSDPYDYPKILFNYLEDEDDLKQTRECIDVARKILSQPSLSKHAGKEVGPGSDKQSDDELNEYIRSNAETAYHPCGTCKMGI

SEQ ID NO: 88913 - protein, 248 aa, Unknown
  Bacterial polypetide isolated from the Sargasso Sea
CSNLDGVGKNLQDHLETYVQQECKTKDTLYSYVNKLNMIRIGIQWFLNKSGPCSTSFLEAGGFCKSSPEREYPNIQFHFFPAFVIDHGLVDPDRHGYQLHASPNHPKSRGHIALNSSNPYDYPKIQFNYLEHEDDLKQTIECIHVARKILGQDSLKPYAGKEIGPGEHAQTNEVFEEYIRSKAETAYHPSCTLKMGVDNMAVVDQKLKVHGVENLRVVDASVMPEITSGNLNAPTLMIAERASEFILN

SEQ ID NO: 88914 - protein, 174 aa, Unknown
  Bacterial polypetide isolated from the Sargasso Sea
QFFVQPFSLDLQTSKPHPFDALTMAVYQLRPRSRGEIRLASSDFKKQPKILPKYLSEEIDQNVLISGIKIANELANTSPLNDLITNAYETPPIKKSSEKELLEWIKATASTAYHPCGTCKMGDDKSSVVDQNLVVHGLSGLRIVDASIIPLITSGNTNAPTIMIAEKAADLIKN

SEQ ID NO: 88915 - protein, 323 aa, Unknown
  Bacterial polypetide isolated from the Sargasso Sea
SKELSWGYETDPDPNLNGRKLIWPRGRVLGGSSSINGTLYVRGQAEDYNHWRQLGNTGWSFDDVLPHFKNSEDYERGADNYRSTGGPLGVQEVSDRRPACEAFLAACREAGFKDNPDYNGATQEGIGYFQTTTRNGRRSSTATAFLKPANKRPNLRIITRALATGLNIKEGRVTGVSYSQGLKHTQASANREVILSGGSINSPQLLQLSGIGDPEHLTKLGISVVHNLPDVGRNLQDHLQVRAVYELDGLHSLNTDVRSPIRRFMMGMQYALKRNGPLTISAGQTYLFARTREELVTPDIQFLFMPLSTDKPGTDLHPYPGVT

SEQ ID NO: 88916 - protein, 235 aa, Unknown
  Bacterial polypetide isolated from the Sargasso Sea
MLSGVGNSDHLKEKGIDVVSDIKGVGKNLQDHLETYIMQECKTPNTLYTYTKLIPKVMAGIQWFLSKSGPCSKSFLEAGGFAKSSPEREIANIQFHFFPSFVIDHGLVNPSSHGYQLHASPNHPKSRGLITLNSSDPYDYPKILFNYLEDEDDLKQTRECIHVARKILSQPSLAKHSGKEVGPGSDKQSDDELDEYIRSKAETAYHPCGTCKMGVDDMAVVDESLKVKGIQNLRI

SEQ ID NO: 88917 - protein, 308 aa, Unknown
  Bacterial polypetide isolated from the Sargasso Sea
MYDVTIHKGERASVSRYYLNPAKKRKNLKVFSESYVEKIIFDGKKAVGIEVKIKNKVEKIYATKEVILSGGSINSPQLLMLSGVGPAKHLKEKGIEVVHALEGVGKNLQDHLETYVQQECKTSDTLYSYINKLNMLRVGIQWFLTKSGPCSTSFLEAGGFCKSSPEREYPNIQFHFFPAFVIDHGLVDPDRHGYQLHASPNHPKSRGHITLNSSNPYDYPKIQFNYLEHEDDLKQTIECIHVARKILGQNSLKPFAGKEIGPGEEVQTNELFEEYIRSKAETAYHPSCTLKMGIDEMAVVDEKLKITV

SEQ ID NO: 88918 - protein, 250 aa, Unknown
  Bacterial polypetide isolated from the Sargasso Sea
IEGEFGKNLQDHLMFRPVYKVKNLKSLNKKINSLFGNFLIGLEYIFNQSGPMTMGASQVCGFAKSDSSRETPNLQFHVQPISTDILGATKLHDFDGITPTVANIRPTSRGEINIVSNNIKDYPKIKMNYLSTDDDRYVAAQGLKLVRKIMLETKTFKKYQTEEYRPGLHIKDDEELVKAGSDYTQTIFHPVGTCKMGKDENSVVNDKLKVHGIENLRVVDASIMPNITSGNTNAPTIMIAEKAADMILGK

SEQ ID NO: 88919 - protein, 312 aa, Unknown
  Bacterial polypetide isolated from the Sargasso Sea
NNRSIRYPRGKTLGGSSSINGLLWIRGQRDDYNVWRQLGNNGWGWNDVLPYFLKSENNELGKSEFHNDSGPISVANKKINLKLLDEFQNAAEEVGIPKTIDFNKGDNFGVGFFQFTTSHSQFGLKLRCSAAKGYLNPVKKRKNLKIIVNAHVQKINFNNKSVDIVSFFTGDKLNHIKVNKEAILSAGAIGSPHLLQISGIGDSEKIKKHGIEVVHELKGVGKNLQDHLMFRPVYKLKNIKSLNRDVESLYSKFLMGLQYIFRQSGPITMGASQVCAFTKSDPSRATPNLQFHVQPLSTDILGVTPMHDFEGI

SEQ ID NO: 88920 - protein, 314 aa, Unknown
  Bacterial polypetide isolated from the Sargasso Sea
SHNGMVHVRGNPMDFENWAQKDLKSWNYNNVLPYFKKSESIEGLDETYRNKSGPLKLSRSSEGNELSKVYLEAAEQAGYEINNDMNGYKQEGFGLMDTTIYGGKRQSTSVTYLHPVINRRNLTVITNTIVNKVIIENDKAVGVECTKGREIKKIHAENEVILSAGAINSPQLLMLSGIGSAEELKKLDISVQHDLRGVGENLQDHLETYLQYECTKPVTLYTSYNPIRMAFIGIEWFIFKSGVAAYSNLETGGFVRSNDMVDYPNIQYHFFPSLVLDHGRQSPSSHSFQAHVGPMRPTSRGNVKLKSNNPSASP

SEQ ID NO: 88921 - protein, 305 aa, Unknown
  Bacterial polypetide isolated from the Sargasso Sea
MEKFDYIIIGAGSAGCVLANRIVKTNKYNVLLIEAGGKDTYPWIHIPVGYYKTMHNPKTDWCFKTEPDESMENVSIPYPRGKTLGGSSSINGLLYIRGQEQDYDLWRQLGNVGWAWKDVLPYFIKAEDQERGGDEFHGVGGPLAVSDQRIKLDILDVFMNAAKEVGIPKVNDFNKGDNFGCGYFQVTERNGLRCSTAVGYLNPIKKNKNLKIETNCHVQKINFDGNNADSVTYSKGNENFIVKAEKEILLCAGSIGSPHILQTSGVGEASKIKNFGIDIIKDLKGVGKNLQDHLMFRPVYKVKKY

SEQ ID NO: 88922 - protein, 257 aa, Unknown
  Bacterial polypetide isolated from the Sargasso Sea
NCLAGGDDFRGDQGPLKVERGPASTPLFQAFFQAVQQAGFELTNDVNGYRQEGFAAFDKNVFRGRRLSAARAYLHPVMNRPNLEVICRAHALCIRFEGNRALGLDFSHKGQTRSVKGGEIISCGGAFNSPQLLQLSGIGNPKDLEPLGIEIVQELPGLGENLQDHLEVYVQHACTQPVSMQPALRWWNKPWIGFQWLFFRKGPAATNHFEAGGFARSNDQVAYPNLMFHFLPLAIRYDGTSPTGGHGYQVHIGPMYS

SEQ ID NO: 88923 - protein, 260 aa, Unknown
  Bacterial polypetide isolated from the Sargasso Sea
NGIKTVHELKGVGKNLQDHLMFRPVYKVKNLKSLNGKINSLFGNFLIGLEYLFKQSGPMTMGASQVCGFAKSDPSKETPNLQFHVQPISTDILGASKLHDFDGITPTVANIRPSSRGEISLVSNDSRVNPKIKMNYLSTQDDRIVAAQGLKLVRKIMLETETFKKYEPEEYRPGVHITKDEELVKAGSEFTQTIFHPVGTCKMGKDDHAVVNDKLYIHGLKNLRVIDASIMPNITSGNTNAPTIMIAEKGAEFILNNQTQ

SEQ ID NO: 88924 - protein, 287 aa, Unknown
  Bacterial polypetide isolated from the Sargasso Sea
KKAIGIEVKIKNKVEKIYANKEVILSGGAINSPQLLMLSGIGPSQHLKDKGISVVHNLDGVGKNLQDHLETYVQQECKTKDTLYSYVNKLNMVRIGIQWFLNRSGPCSTSFLEAGGFCKSSPEREYPNIQFHFFPAFVIDHGLVDPDRHGYQLHASPNHPKSRGHITLNSSNPYDYPKIQFNYLEHEDDLKQTIECIHVARKILGQDSLKPFAGKEIGPGEHAQSNELFEEYIRSKAETAYHPSCTLKMGVDNMAVVDQKLKVHGVENLRVVDASVMPEITSGNLNA

SEQ ID NO: 88925 - protein, 155 aa, Unknown
  Bacterial polypetide isolated from the Sargasso Sea
MSNHYDYIIVGAGSAGCVLANRLSEDSSNKVLLLETGGSDKSIFIKMPTALSIPMNTDKYAWQFHTQPEPYLDNREMHCPRGKVLGGSSSINGMVYVRGHAKDFDEWQQHGANGWDYQSCLPYFQKAESFYLGENSISRWQNGPTWRYNNGNEKC

SEQ ID NO: 88926 - protein, 246 aa, Unknown
  Bacterial polypetide isolated from the Sargasso Sea
MNTDYVIVGAGSAGCAIAFRLTEAGHKVTVIEFGGGDGSPLIQMPAALSYPMNMQRFDWGYSSEPEPHLGGRKLACPRGKVLGGSSSINGMVYVRGHAKDFDKWAEMGALGWSSADVLPYFKRLENWDSAGHGGEKSYRGTNGPLNITRGTRVNPLNLAFEMAGQQAGYQTTLDYNGRQQEGFGPMDQTIKNGKRWSSAKAYLNPAVRSGKCRIIRGLVTKIKINKKQAEGVEYFKNGKLECIYAS

SEQ ID NO: 88927 - protein, 268 aa, Unknown
  Bacterial polypetide isolated from the Sargasso Sea
HDPKYNYKYYSEPEPHLHNRRLFCPRGKMIGGCSAHNGMVFVRGNPNDYQRWASFGLDDWSYEKVLPYFKKIETWSEGENEYRGGSGILPVNQSKNKNPLFKAFVDSAGEAGYKINNDMNGKEQEGFGMYDVTIHKGERASVSKYYLNPAKKRKNLKVFTEAFVERIIFDGKKAIGIEVKIKNKVEKIYANKEVILSGGAINSPQLLMLSGIGPSQHLKDKGIDVVHNLEGVGKNLQDHLETYVQQECKTKDTLYSYVNKLNMVRIGI

SEQ ID NO: 88928 - protein, 260 aa, Unknown
  Bacterial polypetide isolated from the Sargasso Sea
NGIQTIHELKGVGKNLQDHLMFRPVYKVKNLKSLNGKINSLFGNFLIGLEYLFKQSGPMTMGASQVCGFAKSDPSKETPNLQFHVQPISTDILGASKLHDFDGITPTVANIRPSSRGEISIVSNDSRVNPKIKMNYLSTQDDRIVAAQGLKLVRKIMLETETFKKYEPEEYRPGVHITDDEELVKAGSEFTQTIFHPVGTCKMGKDDNAVVNDKLYMHGLKNLRVIDASIMPNITSGNTNAPTIMIAEKGAEFILNNQTQ

SEQ ID NO: 88929 - protein, 276 aa, Unknown
  Bacterial polypetide isolated from the Sargasso Sea
SILQVSGIGEAEKLKKFCIEVVNNLKGVGKNLQDHLMMRPVYKVKNLKSLNKKVNSLFGRFVMGLEYILKQSGPITMGASQVCGFVKSDPSRATPNLQFHVSPISTDILGVTPMHDFEGITPTVANVRPTSRGEINIVSSDSREYPKIKMNYLSTEDDRHVAALGLKIIRKIMLETETFKKYEPEEYRPGIHIQDNEELVKAASDYAQTIFHPVGTCKMGSDDHSVVNDKLSVHGIENLRVIDASIMPNITSGNTNAPTIMIAEKGSDMILNGPNV

SEQ ID NO: 88930 - protein, 215 aa, Unknown
  Bacterial polypetide isolated from the Sargasso Sea
LVPKVLAGMQWFLSKSGPCSKSYLEAGGFAKSSPKREIPNIQFHFFPSFVINHGLVNPSSHGYQLHASPNHPKSRGYIALNSSDPYDYPKILFNYLDDEDDLRQTRECIHVARKILSQPSLAKHAGKEVGPGSDKQNDEELNEYIRSNAETAYHPCGTCKMGVDNMAVVDENLKVKGIENLRVVDASIMPEIPSANLNAPTLMIAEKASDLILNS

SEQ ID NO: 88931 - protein, 262 aa, Unknown
  Bacterial polypetide isolated from the Sargasso Sea
PAALSYPMNMDKFDWGYKAEPEQALNGRSLACPRGKVIGGSSSINGMIYVRGNAGDYNQWAESGAKGWDYPDVLPYFQRMEASHGGNSEFRGKSGPLNITHGKRDNPLHNAFVKATEQAGYTYTEDYNGFRQEGFGPADMNVWKGSRFSTAKAYLKPALAKKNVHLITKVLVDKIIFSEDKAKGVEVFHQGQKKIFNANIGVVLSAGAINSPTILQRSGIGDANDLNNLGIKVIKNLPGVGKNLQDHLEVYFQVKCLQPSNT

SEQ ID NO: 88932 - protein, 303 aa, Unknown
  Bacterial polypetide isolated from the Sargasso Sea
VLLIEAGGRDTNPWIHIPVGYYRTMHNPEVDWCYKTEPDETMANRSIPYPRGKTLGGSSSINGLLYIRGQEQDYNIWRQLGNKGWSWKDVLPYFIKSESQERGKDEFHGDNGPLSVSDPRIKLELLERFMDAAEEKGIPKIDDFNKGDNFGCGYFQVTEKKGLRCSAAVGYLNPVKNRKNLKIETNCHVQKINFDGTKAISVSFLRNNQSITIKANKEILLSAGSIGSTQILQTSGVGNGTKLSNLGIKIIKELKGVGQNLQDHLMFRPVYKIKNIKSLNKKINSLFGNLLIGLEFIFNRSGP

SEQ ID NO: 88933 - protein, 280 aa, Unknown
  Bacterial polypetide isolated from the Sargasso Sea
YKYYSEPEPPLHNRRLFCPRGKMIGGCSAHNGMVFVRGNPNDYQRWASFGLEDWSYEKVLPYFKKIETWSEGENGYRGGSGILPVNQSKNKNPLFKAFVDSAGEAGYKINNDMNGKEQEGFGMYDVTIHKGERASVSKYYLNPAKKRKNLKVFTEAFVERIIFDGKKAIGIEVKIKNKVEKIYANKEVILSGGAINSPQLLMLSGIGPSQHLKDKGISVVHNSVGVGKNLQDHLETYVQQECKTKDTLYSYVNKINMIRIGIQWFLNRSGPCSASFLEAG

SEQ ID NO: 88934 - protein, 305 aa, Unknown
  Bacterial polypetide isolated from the Sargasso Sea
VSAAQEAGFLATEDYNGFQQEGFGPADRTIWKGSRWSASKAYLKPSIQTKKLKIFKNALVDKINFSDRKAIGVTFSQNGKSEKILAAREVICSAGSINSPLILQRSGIGPSNLLKRHNINVLLDNQNVGENLQDHLEVYFQVKCKKPITLYKYNNFFSKGIIGLNWLLFKKGIGASNHFETLGFLRSNNKVKYPDIQFHLLPIAINYDGSSAVNDHGFQLHTGPMRSKSRGWVKITSSNPKLNPKIKFNYMTHPDDWFEFRNCIKITRKILNQPAFKDFYEEEIQPGKQKISNDDLDNFIKEEAE

SEQ ID NO: 88935 - protein, 250 aa, Unknown
  Bacterial polypetide isolated from the Sargasso Sea
IINDLKGVGENLQDHLEIYIQYKSKKKETLYDLSTNFISQSIEGSKWFTFKKGKLAHSHLELGGFVKTNKNYSHPNLQFHFFPSLVINHGLTNPEFDAFQFHACPNRPKSRGFVKIKSNDFNISPQIQFNYLQNQEDLIQMRDSVKIAKNICSQKSLLDYVDYEIRPGIDIQSNEELDEVVRNTAESAYHPSCTNKMGNDEYSVVDQKTKVHGIENLRVIDASIMPDIVSANLNASVVMIAERAADFLLD

SEQ ID NO: 88936 - protein, 325 aa, Unknown
  Bacterial polypetide isolated from the Sargasso Sea
DPIRSRKNLHIVCNRTVSRIVLEGDQATGVEIFSDENFRYIRSRREIILSAGAIDSPKLLMLSGIGPAEHLLDTGIDPVLDLAGVGRNLQDHVNVNVKYACEQPVSYTRLLEPHRKMLVGLQWLLTRKGPGATNHFEIAGYVKSRIGIDRPDLQVLFIPLLVDDDGRAPKQPHGFQVALSLLRSNSRGSVELKSANPCDPPSILFNYLESSRDYVELRKGIEKTREIFGASAFSPFLGDEIAPGKPTSEGKLDSFIKQTLRSTKHPCGTCRMGQDDESVVDHQCRVHSVGGLRVVDASIMPEITSGNTNAPTIMIAEKIADRILG

SEQ ID NO: 88937 - protein, 268 aa, Unknown
  Bacterial polypetide isolated from the Sargasso Sea
LLMLSGIGPSQHLKDKGIDVVHNLEGVGKNLQDHLETYVQQECKTKDTLYSYVNKLNMIRIGIQWFLNRSGPCSTSFLEAGGFCKSSPEREYPNIQFHFFPAFVIDHGIVDPDRHGYQLHASPNHPKSRGHITLNSSDPYDYPKIQFNYLEHEDDLKQTIECIHVARKILGQDSLKPFAGKEIGPGEHAQTNEVFEEYIRSKAETAYHPSCTLKMGVDNMAVVDQKLKVHGVENLRVVDASVMPEITSGNLNAPTLMIAERASEFILN

SEQ ID NO: 88938 - protein, 204 aa, Unknown
  Bacterial polypetide isolated from the Sargasso Sea
MCITQKVLGKNLQDHLETYIQQKCKTPNTLYTYTKLIPKILAGMQWFMFKSGPCSKSFLEAGGFAKSSSERKVANIQFHFFPSFVINHGLEDPDSHGYQLHASPNHPKSRGEITLNSSDPYDYPKILFNYLKEEEDLKQTRECIHVARKILSQPALSEHAGDEVGPGFNAQSDDELNEYIRSKADTAYHPCGTCKMGVDNMAVV

SEQ ID NO: 88939 - protein, 194 aa, Unknown
  Bacterial polypetide isolated from the Sargasso Sea
MDSFDYIIIGAGSAGCVLANRLTSDGKNKVLLLEAGGKDNYPWIHIPVGYYKTMHNPRTDWCFKTQPDKSMNNRSINYPRGKTLGGSSSINGLLYIRGQEQDYNLWRQLGNVGWSWNDVLPYFLKSEDQERGESKFHGVNGPLSVSDQRIQLPILDIFQKAANEVGIPKVDDFNKGDNFGCGYFQVTEKNGLRC

SEQ ID NO: 88940 - protein, 258 aa, Unknown
  Bacterial polypetide isolated from the Sargasso Sea
FKIGADTSWRGTSGPLRVQQAQPHNPLMRGFLKAGEQAGLKFTQDYNGESQEGFCAFDQTIFSGERFSAAKAYLSPALKTRKNIELRNGRVTRIIFEKGVAKGVEYLKGKRKHILWASKEIILAASSINSPFILMHSGIGPADHLRKYGIPIINDLPGVGENLQDHLELYIQQECTKPVSLYKYWNPISKGLIGLQWLLFKTGLGSSNQFEVGAFLKSDRNSSYPDIQIHFLPLAVRYDGSMAQGHGFQIHIGPMRSK

SEQ ID NO: 88941 - protein, 285 aa, Unknown
  Bacterial polypetide isolated from the Sargasso Sea
AYLDRISKKKNIKIITSCIADKLLFSNNKCTGLLLIKGNKKFAVGCTDGVILAAGAIGSPSILQRSGIGPPNLLKKLKIKPLVELNGVGKNLQDHLELYFQVKCKLPVSLYKHTNAFSKLSIFLKWMFFKKGVGASNQFETLGFLKTDKSQLYPNLQYHFLPLAIKYDGSFPLKGHGFQFHIGTMRSKSRGFVEITDTNPFSQPKIQFNYLSHSDDLKDFRSAIKISRKILSQPSFRKFVDKEINPGSELWTDAQLDEYIRSNVESAYHPCGSCKMGSDNDLEAV

SEQ ID NO: 88942 - protein, 138 aa, Unknown
  Bacterial polypetide isolated from the Sargasso Sea
WQEFRDAIRLTLEIINQPALDKFRGREISPGIDCQSDEQLDAFVRNHAETAFHPCGTCKMGVDEMAVVDGEGIVHGVENLRVVDASIMPQIITGNLNATTIMIGEKIADAIRGRAPLAKSTARYYVAGDAPVRKPALR

SEQ ID NO: 88943 - protein, 289 aa, Unknown
  Bacterial polypetide isolated from the Sargasso Sea
VERIIFDGKKAIGIEVKIKNKVEKVYANKEVILSGGAINSPQLLMLSGIGPSQHLKDKGINVVHNLEGVGKNLQDHLETYVQQECNTEDTLFSYLNKINMIKIGVQWFLNRSGPCSHSFLEAGGFCKSSSEREYPNIQFHFFPAFVIDHGLVEQDRHGYQLHASPNHPKSRGHITLNSSNPYDYPKIQFNYLEHEDDLKQTIECIHVARKILGQKSLKPYAGREIGPGENAQTNEVFEEYIRSKAETAYHPSCTLKMGLDNMAVVDQKLRVHGIENLRVVDASVMPEIT

SEQ ID NO: 88944 - protein, 268 aa, Unknown
  Bacterial polypetide isolated from the Sargasso Sea
GIGDEKKLVSLGISVKHHNSSVGQNLQDHLMLRPVYKVKNIKTLNKTINSFFGKMMIGMEFVFFRRGVMTMGASQLCGFAKSDESKETPNLQFHVQPISTDRLGGASLHKFNAFTPTVANIRPTSRGEIYITSNDSRDYPKIKMNYLSTEDDRQVSAAGIRLVRKIIFESETFKKYEPEEFRPGINYQSDEEIIQASSEHVQTIFHPVGTCKMGSDSTSVVSDKLKVHGIENLRVVDASIMPNITSGNTNAPTIMIAEKAADLIIADQ

SEQ ID NO: 88945 - protein, 293 aa, Unknown
  Bacterial polypetide isolated from the Sargasso Sea
CCKHYLEPAKKRINLNIFSYSFVEKIIFEGKKAVGIQVKIKNKIEKIFANKEIILSGGSINSPQLLMVSGIGDANHLKDKGISVVNDLKGVGSNLQDHLETYIMQECKTPNTLYKYTKLIPKVISGIRWFLSKTGPCSQSYLEAGGFAKSSSEREIPNVQFHFFPSFVINHGLVDPKTHGYQLHASPNHPKSRGSVKLNSSNPYDYPKILFNYLKEEDDLKQTRECIHLARNILSQKSLAKHAGKEVGPGFDKTTDDELDDYIRSNAETAYHPCGTCKMGVDKLAVVDETLES

SEQ ID NO: 88946 - protein, 288 aa, Unknown
  Bacterial polypetide isolated from the Sargasso Sea
IGVETIKKNITNKYLANKEVILCAGSINSPKILQLSGIGNEKHLKSLGIEVINNLVGVGENLQDHLEMYIQYKSKKNETLHSLATNFLYQAIEGSKWFLFKKGRLANSHLELGGFVKSDKSYNHSNLQFHFFPYLVINHGLENPNFEAFQFHVCPNRPKSRGFVKIKTNNYKDDPKIQFNYLKHEDDLKQMREGVGIAKKILSQKALKEYVGTEIRPGKNVSSQDELDEVIKNTSESAYHPSCTNKMGEDKTSVVDQNLRVHGIQNLRVVDASVMPDIVSANLNATTI

SEQ ID NO: 88947 - protein, 263 aa, Unknown
  Bacterial polypetide isolated from the Sargasso Sea
EFRKDRRTRTIKSNEIICCGGAINTPQLLQLSGIGPARVLEEAGVETLLDLPGVGENLQDHLEVYVQYACKKPVSMSPYLQYWRRPFVFLQWLLRKGPASTNHFEAGGFVRGNENVEWPNLMFHFLPIAIRYDGSTPVSGHGYQFHVGPMFSNSRGSIQIQNNNPFEKPSIRFNYLSTEEDRKEWIEAIRVARNIMDQRAFDEYNGGEISPGSTVKSDEEILEWIKKDSETALHPSCSARMGTDHMAVVDPSSMKVHGVEQLR

SEQ ID NO: 88948 - protein, 306 aa, Unknown
  Bacterial polypetide isolated from the Sargasso Sea
RSKGPVASKYYLEPAKKRKNLKVFTNSFAERIIFEGKKAVGIQVNIKNKVTKVYANKEVVLSGGSINSPQLLMLSGVGPEKDLKDKGINVVQSLEGVGQNLQDHLETYIQQECKTKDTLYSYVNKINMLKIGIQWFLSKSGPCSTSFLEAGGFCKSSEDKNYPNIQFHFFPAFVIDHGLVDPDRHGYQLHASLNQPKSRGYIKLNSSNPYDYPKIQFNYLEDEYDLKETIKCVRVARKILNQDSMKPYAGKEIGPGESATDDEQITEYIRSKAETAYHPSCTLKMGVDKMAVVNEKLKVHGLENLR

SEQ ID NO: 88949 - protein, 290 aa, Unknown
  Bacterial polypetide isolated from the Sargasso Sea
KKIYANKEVLLVLGSINSPQLLMLSGIGDANHLKEKGINVVNDVKGVGRNLQDHLETYIMQECKTPDTLYTYTKLIPKVLAGIQWFFSKSGPCSQSYLEAGGFAKSSPEREIANIQFHFFPSFVIDHGLVNPSSHGYQLHASPNHPKSRGLITLNSSNPYDYPKILFNYLEDEDDLKQTRECIHVARKILAQPSLAKHSGKEVGPGTEARSDDELNEYIRSKAETAYHPCGTCKMGVDDMAVVDENLKVKGIQNLRVIDASVMPEIPSANLNAPTLMIAEKASDIIINAN

SEQ ID NO: 88950 - protein, 271 aa, Unknown
  Bacterial polypetide isolated from the Sargasso Sea
SSDSGIGNSQKLKELCINIVHELKGVGENLQDHLMFRPIYKVHGLKSLNKKINSLFGNLMIGLEYIFKRSGPMTMGASQMCMFAKSDPSLELPDLQWHVQPMSMDTLGATKNHDFHAFTPTVSNIRPTSRGNISIVDKDSRTYAKIKMNYLSTEHDRIVAARGLKLTRKIVMESETFKKYKPEEYRPGIDINDDEELVKAGSDYTQTIFHPVGTCKMGQDDMAVVDDKLKVKGIKNLRVIDASIMPNITSGNTNAPTIMIAEKGADMILRN

SEQ ID NO: 88951 - protein, 85 aa, Unknown
  Bacterial polypetide isolated from the Sargasso Sea
GPGSDKQSDEELNEYIRANAETAYHPCGTCKMGVDETSVVDESLKVKGIKNLRVVDASIMPEIPSANLNAPTLMIAEKAADLILN

SEQ ID NO: 88952 - protein, 308 aa, Unknown
  Bacterial polypetide isolated from the Sargasso Sea
GLGGSSSINGMIYVRGHPQDFDNWSTKGASSWSFADVLPYFKKMECCEGRQSTWRGKNGPIHIKTAEQKNVLHKIFSDAAIQCGYSFTEDYNGYKQEGIGAAEMTVYKGKRWSTAQGYLKNITKQKNICIITSCLVDKLLFLNNKCNGLIFKKKSQTFSAQCKRGVILAAGSIGNPCILQRSGIGDSKHIASINIKPFLDLKGVGNNLQDHLELYFQVKCTQPVTLFRNTQLFSKAKIFLQWYMFKKGLGVSNQFETLGFLKTDRQQKYPNLQYHFLPLAINYDGSSPHRGDGFQFHVGTMRSKSKGF

SEQ ID NO: 88953 - protein, 276 aa, Unknown
  Bacterial polypetide isolated from the Sargasso Sea
ANRLSSDPKNRVLLLEAGGKDDYFWIRVPVGYLFTMNNPRTDWCFSTEASTGLNGRSLNYPRGKVLGGCSSINGMIYMRGQARDYDHWRQLGNSGWGWDEALKYFKRSEGHVLGENEMHGGNGEWRVEGQRLSWEILDAFRDAAAETGIPNTDDFNTGNNEGCGYFEVNQKQGVRWSAADAFLHPIKSRANLTVLTESHVNKLQFDGNKVVGVKFWRGNDLFEASVSGEIILASGAIGSPQIMQASGISSGALSQKIGIQNIIELPGVGENLQDHL

SEQ ID NO: 88954 - protein, 271 aa, Unknown
  Bacterial polypetide isolated from the Sargasso Sea
LLMLSGIGDANHLKDKGIEVVNNVKGVGKNLQDHLETYIQQECKTPNTLYTYTKLVPKVLAGIQWFLFKSGPCSKSFLEAGGFAKSSPEREISNIQFHFFPSFVINHGLEQPKSHGYQLHASPNHPKSRGHITLNSSDPYEYPKILFNYLKDEDDLKQTRECIHVARKILSQPALADHAGKEVGPGTQAQSDDELNEYIRSKADTAYHPCGTCKMGVDEMAVVDENLKVKGIQNLRVIDASVIPEIPSANLNAPTLMIAEKGSDCILQSRY

SEQ ID NO: 88955 - protein, 313 aa, Unknown
  Bacterial polypetide isolated from the Sargasso Sea
MEEFDYIIIGAGSAGCVLANRLTADGANNVCILEAGPPDWNPFIHIPAGFMRTLVNPKVNWLYEASPSEWTAGRVVAVPRGKTLGGSSSINGHVYNRGQRMDFDSWAQLGNSGWGYSDVLPYFKRCEQKIGEGDELYRGRNGNLKITDLDWRHPLCDAFIKGANSLGIPTNTDYNGASQEGVSYVQRTTHKRLRVSSAKAFLNPAKSRKNLTVYTESQVTSILFEERRACGVELKKGGPRGQTGKIYARKEIILSGGAINSPQLLQLSGIGSTNLLKELGIPVVHNLPGVGENLRDHYAPRFTARVKTSILLM

SEQ ID NO: 88956 - protein, 292 aa, Unknown
  Bacterial polypetide isolated from the Sargasso Sea
TTIKANKEILLSAGSIGSPHILQVSGIGEKQKLNNFGIDVIHELKGVGKNLQDHLMFRPVYKVKNLKSLNGKINSLLGNLLIGMEYIFNQSGPMTMGASQVCGFLKSDSSRATPNLQFHVQPISTDILGATKMHDFDGITPTIANIRPTSRGEINITSGDSRDNPKIKMNYLSTQDDRDVAAKSLKIVRKIMLETEAFKKYEPEEYRPGIHITEDEELVKAGSEHTQTIFHPVGTCKMGQGDDSVVDEKLKVRGLQNLRVIDASIMPNITSGNTNAPTIMIAEKASDMILNR

SEQ ID NO: 88957 - protein, 398 aa, Unknown
  Bacterial polypetide isolated from the Sargasso Sea
MDKFDYIIIGAGSAGCVLANRLTANPDTKVLLLEAGGKDTNPWIHIPGGYFKTMHNPDTDWCFNTEKEPNCDNRQMVYPRGKTLGGSSSINGMLYIRGQSNDYNYWRQLGNVGWSWDDVLPYFKKSEDFQFGENEFHGSGGPIAVEKIRATFKVLDLFLEAAEEHGYKRTDDFNNGDNEGMGYFPFTIKNGFRCSTAVGYLNPVKSRKNLKIITKAHIKNIEFENNKAKKVNYWIDGKEFSVETNKEIILSAGTIGSPHILQASGIGPGELLKENNINVLKDHQGVGRNLTDHLMLRPVYKIKNLETLNDIYYSFTKKMLSGLKFLLLRKGPLTVGASYVCGFVKSDEHLETPNLQFHISPASTDLLGKSALHKFPAFTPTITNVRPTSRGSIELKSP

SEQ ID NO: 88958 - protein, 556 aa, Unknown
  Bacterial polypetide isolated from the Sargasso Sea
MNTYNKKEYDYIILGAGSAGCVLANRLSEDPNNTVLILEAGPMDVNILRPIESLLIHMPAGVYHAYKNPQINWNYKTVVEPNCHNRELELPRGKIIGGSSSINSMVYMRGHPLDYDNWSTKYGLKEWSFDKCLPYFKRCESSDRGESEWRGASGPLGVTKGRLQNPLFDALIEAGDQSGQGTSEDLNGFKPEGISRLDSTTKNGMRCSAATAHLRPALKRPNVTLITEAFTRKILHKNGKAFGVEFDNNGEVQEVYSSNSVIVSCGAIKSPQILMLSGIGPADHLRSMDIEVKENLSGVGKNLQDHLLVATGFECTKNVTIHKITQPQQKLFAGLKWLLTRKGIVASNIWEMGGQIFGNHNVKYPNLQYHFAPAFNKYEGRKIILSQGFLLQCDQLRPKSKGSVQLKSNNPYENPNSFFNYLSHPHDLKELREAFKKMIELISQPAFDEFRGKRIKPSPDIKSNSEIDSWIRETAITDYHPSGTCKMGNEPDSVVDEKLKVHGFENLYVVDASIMPDVVSGNLNAPTQMIAEKASDFILGKKPLKPINAKFHFQNV

SEQ ID NO: 88959 - protein, 282 aa, Unknown
  Bacterial polypetide isolated from the Sargasso Sea
LSAGSIGSPQILQTSGIGDVGKLKSLGIEVTKDLKGVGKNLQDHLMFRPVFKVRNIKTLNKKINSVFGKLLIGLEYVFLRRGPMTMGASQLCGFAKSDETRETPNLQFHIQPISTDKLGGANLHDFDAFTPTVANIRPTSRGEINIISSDSRDNPKIKMNYLSTDEDRKVAADGIKLIRKIVLETKEFKKYEPEEYRPGAHIQEGEEIVKACSHYAQTIFHPVGTCKMGDDNEAVVSDQLKVHGIQNLRVIDASIMPNITSGNTNAPTIMIAEKGADMILNS

SEQ ID NO: 88960 - protein, 384 aa, Unknown
  Bacterial polypetide isolated from the Sargasso Sea
AGYEYKEDLNGMDHEGLGPCQQTIWKGRRASTAHSFISPIRSRKNLTIFTNSITNKLLFDGNKCVGLEYLKGKNINKVFADKEVIVCGGAINSPQILQLSGIGKGDYIKKWGLNVVADLPGVGENLQDHLDILSHYECTQPVTEAKYTAGGLAIFRMASILGQWLVTRKGPGVDIGLSGLSFLKTDDSLDVPDIQMHFVGSLLKDHGKTRPDSHAFSNHVCMLRPESRGYIALKSLDPKVQPIIQPNYFATQKDRDTMIKGVKMSREIINQKAFDEYRGKEINPGDHVQTDQEIEEFIKGHAETIYHPVGTCKMGSDEFAVVDDRLKVRGVENLRVIDASVMPTLIGGNTNAPTIMIAEKAADYILGNEPLSPQNVSLDNKSAA

SEQ ID NO: 88961 - protein, 355 aa, Unknown
  Bacterial polypetide isolated from the Sargasso Sea
WASFGLEDCSYDEVLPYFKKIETWSEGENEYRGGSGILPVNQSKNKNPLFKAFVDSAGEAGYKINNDMNGKEQEGFGMYDVTIHKGERASVSKYYLNPAKKRKNLKVFTEAFVERIIFDGKKAIGIEVKIKNKVEKIYANKEVILSGGAINSPQLLMLSGIGPSQHLKDKGISVVHNLDGVGKNLQDHLETYVQQECKTKDTLYSYVNKLNMVRIGIQWFLNRSGPCSASFLEAGGFCKSSPEREYPNIQFHFFPAFVIDHGLVDPDRHGYQLHASPNHPKSRGHITLNSSNPYDYPKIQFNYLEHEDDLKQTIECIHVARKILGQDSLKPFAGKEIGPGEHAQTNEVIRRIHQI

SEQ ID NO: 88962 - protein, 271 aa, Unknown
  Bacterial polypetide isolated from the Sargasso Sea
LPTSGIGNSQRLKDLGVEIVHELKGVGENLQDHLMFRPIYKVHGLKSLNKKINSLFGNLMIGLEYIFNRSGPMTMGASQMCMFAKSDSSLELPDLQWHVQPMSMDTLGATKNHDFHAFTPTVSNIRPTSRGNVTIVDKDSRTYAKIKMNYLSTDHDRMVAAKGLKLTRKIVMESETFKKYKPEEYRPGINIDDDEELVKAGSDYTQTIFHPVGTCKMGQDDMAVVDEKLKVKGIKNLRVIDASIMPNITSGNTNAPTIMIAEKGADMILTN

SEQ ID NO: 88963 - protein, 402 aa, Unknown
  Bacterial polypetide isolated from the Sargasso Sea
MVFVRGNRNDYERWENFGLKTWSYEKVLPYFKKIETWSGGENQYRGSFGPLTVNQSKNNNPLFKAFINSASEAGHNINLDMNGEEQEGFGMFDTTIHEGQRASVSKCYLNPAKKRKNLNVFSNSFVEKIIFDGKKAIGIEVKIKNKVQKIYAEKEIILSGGSINSPQLLMLSGIGDAIHLKDKGINVVNDLKGVGRNLQDHLETYIMQECKTPDTLYTYTKLIPKVMAGIQWFLSKSGPCSKSFLEAGGFAKSSPEREIANIQFHFFPSFVIDHGLVNPSSHGYQLHASPNHPKSRGLITLNSSDPYDYPKILFNYLEDEDDLKQTRECIHVARKILAQPSLAKHSGKEVGPGSDKKSDEELNEYIRSKAETAYHPCGTCKMGVDDMSVVDENLKVNGIQNL

SEQ ID NO: 88964 - protein, 533 aa, Unknown
  Bacterial polypetide isolated from the Sargasso Sea
MDNFDYIIIGAGSAGCVLANRLTKNSKINVLLLEAGGKDSNPWIHIPGGYFKTMHNPGTDWCFNTEKEPNCDNREMVYPRGKTLGGSSSINGMLYIRGQSNDYNYWRQLGNVGWSWEDVLPYFKKSEDFQFGENEFHGSGGPIKVEKIRATFKVLDLFLEAAEEFGYKKTEDFNTGDNEGMGYFPLTVKNGFRCSTAVGYLNPVKKRKNLKIITNAHIKSINFENKKATGVNYWINNELFSVKVNKEIILSAGTIGSPHILQASGIGPGKLLKDNNIEIIKDHSGVGANLTDHLMLRPVYKIKNLETLNDIYYSIPKKILTGLKFFLFRKGPLTVGASYACGFIKSDPNLETPNLQFHISPASTDVLGKASLHKFPAFTPTITNVRPTSRGSIELKSPDTRVSPKIKMNYLSTHEDREIAGKSLKIVRNIVMNSKAYKEYEPEELRPGINITDNETLATEAGKFANTIFHPVSTCRMGKDEKAVVNDRLVAHGLSNLRIVDASVMPHITSGNTNAPTIMIAEKAADMIIEDSK

SEQ ID NO: 88965 - protein, 520 aa, Unknown
  Bacterial polypetide isolated from the Sargasso Sea
IVGAGTAGCVLANRLTEKSQNNVAIFEAGKPSDIWKVNMPLAILYTMHDPKYNYKYYSEHEPYLNNRKLFCPRGKMIGGCSAHNGMVYVRGNPNDYQRWASFGLKEWCYDKVLPYFKKIETWSEGENDYRGGSGLLPVNQSKNKNPLFKAFVDSAGEAGYKINSDMNGKEQEGFGMYDVTIHKGERASVSKYYLNPAKKRKNLKVFTEAFVEKVIFDGKKAIGIEVNIKNKVEKIYASKEVILSGGAINSPQLLMLSGIGPSHHLKDKGINVVHNLEGVGKNLQDHLETYVQQECKTKDTLYSYINKLNMLRIGIQWFFNRSGPCSNSFLEAGGFCKSSPDREYPNIQFHFFPAFVIDHGLVDPDRHGYQLHASPNHPKSRGHITLNSSNPYDYPKIQFNYLEHEDDLKQTIECIHVARKILSQNSLKPYAGKEIGPGENIQSNELFEEYIRSKAETAYHPSCSLKMGIDEMSVVDEKLKIHGLQNIRVVDASVMPEITSGNLNAPTLMIAERAADFILN

SEQ ID NO: 88966 - protein, 260 aa, Unknown
  Bacterial polypetide isolated from the Sargasso Sea
NLQDHLDILTHNECTQPVTDAKYVMGPFGFLKQAWILGMWGAFRKGPGGMLPLNTLSFLKTDPSLDLPDIQMHFLSVLLQDHGAKLPDSHCFSNHICQLRPESRGYIAIKSLDSRVPPIIQPNYFAEQKDRDVMIEGVKMSRDIISQKAFDEYRGKEITPGIEVQTDEQIENFIREKAETIYHPVGTCKMGSDEYAVVDDKLRVRGVENLRVVDASIMPNLVGGNTNAPTIMIAEKISDHILGNDFLPPQHISYKDKNAA

SEQ ID NO: 88967 - protein, 371 aa, Unknown
  Bacterial polypetide isolated from the Sargasso Sea
EEFGYKKTDDFNNGNNEGMGYFPFTVKNGLRCSTAVGYLNPIKKRKNLKIVTKAHIKNIEFENKKAVSVNYWHNNNLIKVKANKEIILSAGTIGSPHILQASGIGPGELLKNNNVNVIKNHPSVGMNLTDHLMLRPVYKVKNLETLNDIYYSITKKLITGLQFFLFRKGPLTVGASYVCGFIKSDSHLETPNLQFHISPASTDLLGKSSLHKFPGFTPTITNVRPTSRGSIELKSPDTRISPKIKMNYLSTDEDREIAGKSLKIVRKIVMESNAYKKYQPEELRPGINITDNENLALEAGKYANTIFHPVSTCRMGNDENAVVNDRCIAHGLENLRVVDASIMPHITSGNTNAPTIMIAEKASDMILEDSK

SEQ ID NO: 88968 - protein, 436 aa, Unknown
  Bacterial polypetide isolated from the Sargasso Sea
MVFVRGNPNDYQRWASFGLENWSYEKVLPYFKKIETWSEGENEYRGGSGILPVNQSKNKNPLFKAFVDSAGEAGYKINNDMNGKEQEGFGMYDVTIHKGERASVSKYYLNPAKKRKNLKVFTDAFVEKIIFDGRKAIGIEVKIKNKVEKIYANKEVILSGGAINSPQLLMLSGIGPSQHLKNKGISVVNNLEGVGKNLQDHLETYVQQECKTKDTLYSYVNKINMIRVGIQWFLSRSGPCSASFLEAGGFCKSSPEREYPNVQFHFFPAFVIDHGLVDPDRHGYQLHASPNHPKSRGHITLNSSNPYDYPKIQFNYLEHEDDLKQTIECIHVARKILGQDSLKPYAGNEIGPGEHAQTNEVFEEYIRSKAETAYHPSCTLKMGIDNMAVVDQKLKVHGIENLRVVDASVMPEITSGNLNAPTLMIAERASEFILNS

SEQ ID NO: 88969 - protein, 482 aa, Unknown
  Bacterial polypetide isolated from the Sargasso Sea
MPLALLYTMHDPKYNWKYYSEPEPYLNNRRIFCPRGKMIGGCSSHNGMVFVRGNRDDYTRWENFGLKNWSYEKVLPYFKKIETWSEGENQFRGSLGPLPINLSKNSNPLFKAFIEAAGQAGHKINIDMNGEDQEGFGMFDTTMHQGERAGVAKYYLNPVKNRKNLDVLKNSFVEKILFDGKKAVGLQVKIKDKVEKIYANKEVILSGGSINSPQLLMLSGIGDADNLKGKGIEIVNDIKGVGKNLQDHLETYIQQECKTPNTLYTYTKLIPKVLAGIQWFMFKSGPCSKSFLEAGGFAKSSSERKIPNIQFHFFPSFVINHGLEQPSNHGFQLHASPNHPKSRGQITLNSSDPYEYPKILFNYLQDEEDLKQTRECIHVARNILSQPALAEHAGKEVGPGIDAQSDDEINEYIRSKADTAYHPCGTCKMGVDEMSVVEENLKVKGIQNLRVVDASVIPEIPSANLNAPTLMIAEKAADCILN

SEQ ID NO: 88970 - protein, 488 aa, Unknown
  Bacterial polypetide isolated from the Sargasso Sea
MQFNSYNYIIIGAGSAGCVLANRLSANPEINVLLIESGPSDKTWKTSMPAALLYTMHDPKYNYLYETEPEPFMNNRKMFCPRGKMLGGSSSHNGMVHVRGNPMDFENWAQKDLKSWNYNNVLPYFKKSESIEGLDETYRNKSGPLKLSRSSEGNELSKVYLEAAEQAGYEINNDMNGYKQEGFGLMDTTIYGGRRQSTSVTYLHPVINRRNLTVITNTIVNKVIIENNKAVGVECTTGRERKKIHAENEVILSAGAINSPQLLMLSGIGNAEELKKLDISVQHDLRGVGENLQDHLETYLQYECTKPVTLYTSYNPIRMAFIGIEWFIFKSGVAAYSNLETGGFVRSNDMVDYPNIQYHFFPSLVLDHGRQSPSSHSFQAHVGPMRPTSRGHVKLKSNNPSASPAIQFNYMQTEHDLKEMRDGIKIAREIFHQKAFDKYRGKEINPGINSSSESDLNEFIKNKGDTAYHPSCTCKMGKKMRYLLSMKS

SEQ ID NO: 88971 - protein, 526 aa, Unknown
  Bacterial polypetide isolated from the Sargasso Sea
MKFDYLIIGAGTAGCVLANRLSENNQNKVAIFEAGKNSDIWKVNMPLAILYTMHDPKYNYKYYSEPEPHLNNRRLFCPRGKMIGGCSAHNGMVYARGNKNDYERWSSFGLKEWSYEKVLPFFKKIETWSEGENEYRGGDGILPINQSKNKNPLFKAFLNSAKEAGYKINNDMNGKDQEGFGMYDVTIHNGERASASKYYLNPARKRENLTVFTESFVEKIIFDGKKAVGIEVKIKDKVEKIYANKEIILSGGSINSPQLLMVSGVGPGEHLKKNGIEVVHNLKGVGKNLQDHLETYIQQECKTSDTLYSYVNKLNMLRVGIQWFINKSGPCSTSFLEAGGFCKSSSDKEYPNIQFHFFPAFVIDHGSVDPDRHGYQLHASLNQPKSRGQITLKSSNPYDYPRIQFNYLQDEYDLKETIKCIHVARKILSQNSMKPYAGKEIGPGENSQSEQEIEHYIRSKAETAYHPSCTLKMGIDDMAVVDENLKIHGLENIRVADASVMPEITSGNLNAPTLMIGERAADFIQN

SEQ ID NO: 88972 - protein, 455 aa, Unknown
  Bacterial polypetide isolated from the Sargasso Sea
RTMFCPRGKMWEGSSSHNGMVHVRGNAKDFDNWGQLGLTDWTYDKVLPYFKKSESVEGLDANFRGESGPLKLSRSPNGNILSQVYLNAAQQAGYQINNDMNGERQEGFGLMDTTIFNGKRQSTSVTYLHPIKHRSNLEILTNVTVNKILFEDKKAVGVECKANGENKKYFSSKEVLLSAGAINSPQLLMLSGIGPENELSKYSIEPVECLEGVGKNLQDHLETYVQYKCKKPVTLHSAQNPLKMALIGAEWFLFKTGVAAHSNLETGGFVRSNEMSDYPNMQFHFFPSLVLDHGRKSSTCHAFQAHVGPMRPTSRGSVKLKSANPNDAPSIQFNYMQTEHDLREMREGIKIAREIFNQKEFDEYRGEEISPGSDTNNDEDLNNFIRDKGDTAYHPSCTCKMGKDNLSVVDEELKVYGIDGLRVIDASIMPNIITGNLNASTVMIAEKASDSIINN

SEQ ID NO: 88973 - protein, 417 aa, Unknown
  Bacterial polypetide isolated from the Sargasso Sea
MSITKKTPPRLEGEFDYIIVGAGTAGCVLANRLSEDPEIQVLLLEAGGKDDYHWIHVPVGYLYCIGNPRTDWLYKTQSEPGLNGRSLSYPRGRVLGGSSSINGMIYMRGQREDYDEWARVTNDASWSWNAVLPIFKRSEDHYAGASESHGAGGPWRVEKQRLKWKILEEFSRAAQQTGIPATDDFNRGDNTGVGYFDVNQKRGIRWNASKAFLRPALKRPNLTVITGAHTQRVVFEGRRCAGVEYRGDNTDYLAKARCEVILSSGAVNSPQLLELSGIGNGARLQNLGIEVVKDLRGVGENLQDHLQLRMAYKVDGVRTLNTASAHWWGKLMIGMQYAFFQSGPMSMSPSQLGAFAKSDPDDRQLTRPDLEYHVQPLSLDRFGEPLHRFNAFTASVCQLRPTSRGSIHIESPDASTP

SEQ ID NO: 88974 - protein, 246 aa, Unknown
  Bacterial polypetide isolated from the Sargasso Sea
NLQDHLMFRPVYKIKNIKSLNKKINSLFGNLMIGLEFIFNRSGPMTMGASQLCLFAKSDSSRETPNLQFHVQPISTDKLGGAALHDFHAFTPTVANIRPTSRGEINIISSDSREKPKIKMNYLSTEDDRKVAADGLRLVRDIVFQTDTFKKYKPEELRPGSQFQSDEELVQEGSKFTQTIFHPVGTCKMGNDENSVVNDELKVHGLQNLRVIDASIMPNITSGNTNAPTIMIAEKGADMILGSNAN

SEQ ID NO: 88975 - protein, 300 aa, Unknown
  Bacterial polypetide isolated from the Sargasso Sea
SSVKIKDKIQKIYANKEVILSGGSINSPQLLMLSGIGDANHLKDKGIEVVNDVKGVGKNLQDHLETYIQQECKTPNTLYTYTKLVPKVLAGVQWFMFKSGPCSKSFLEAGGFAKSSPERKISNIQFHFFPSFVINHGLEQPKSHGYQLHASPNHPKSRGHITLNSSDPYEYPKILFNYLKDEDDLKQTRECIHVARKILSQPALAEHAGKEVGPGTQAQSDDELNEYIRSKADTAYHPCGTCKMGVDDMAVVDENLKVKGIQNLRVIDASVIPEIPSANLNAPTLMIAEKGSDCILQSRY

SEQ ID NO: 88976 - protein, 183 aa, Unknown
  Bacterial polypetide isolated from the Sargasso Sea
SSSERKIPNIQFHFFPSFVINHGLVNPSSHGYQLHASPNHPKSRGSITLNSSNPYDYPKILFNYLEDEDDLKQTRECIHVARKILSQPSLAKHAGKEVGPGSDKQSDDELNEYIRSNAETAYHPCGTCKMGVDDMAVVDENLKVKGIQNLRIVDASIMPEIPSANLNAPTLMIAEKASDLILN

SEQ ID NO: 88977 - protein, 428 aa, Unknown
  Bacterial polypetide isolated from the Sargasso Sea
MNYDYLIVGAGSAGCVLANRLSDNSNHKVAIFEAGGTSDIWKVKMPLALLYTMHDPKYNWKYYSEPEPYLNNRRVFCPRGKMIGGCSSHNGMVFVRGNKDDYTRWENFGLKNWSYEKVLPYFKKIETWSEGENQFRGSLGPLPINLSKNSNPLFKAFIDAAGEAGHKINIDMNGEEQEGFGMFDTTMHNGERAGVAKYYLDPVKNRKNLDILKNSFVEKILFDGKKAVGLQVKIKDKVQKIYANKEVILSGGAINSPQLLMVSGIGDAKHLKDNGIEVINEVKGVGKNLQDHLETYIQQECKTPNTLYKYTKLIPKVLAGIQWFMFRSGPCSKSFLEAGGFAKSSPDRPVANIQFHFFPSFVINHGLVDPDTHGYQLHASPNHPKSRGHVTLNSSDPYKYPKILFNYLKDEEDLKQTRECIHVARKIL

SEQ ID NO: 88978 - protein, 527 aa, Unknown
  Bacterial polypetide isolated from the Sargasso Sea
MNFDYIIIGGGSAGCVLANRLSENSKNNVALIEAGKDSDIWKVNMPLAILYAMHDPKYNFKYYSEPEPQLNNRKIFCPRGKMIGGCSAHNGMVYVRGNPNDYSRWAKMGLDEWSYEKVLPYFKKIETWSEGGNEYRGGDGILPVNQSKNSNPLFKAFINSAGEAGYKINSDMNGKDQEGFGMYDVTIHKGERASVSKYYLKPAKSRNNLKILTEKYVKRILFDGKKAIGVEILSKNKKVEKIYSNKEIILSAGAINSPQILMLSGIGPGDHLRENGIDVIHNLEGVGANLQDHLEVYIQQECKKPLTLYSYVNKINMVRIGIQWFLSKNGPCSYSFLEAGGFCKSSPEQEYPNIQFHFFPAFVIDHGLVDPDRHGFQLHASPNHPKSRGNIKLKSSNIFDAPTIKFNYLEHEDDMKQTIECVKVARNILKQNSLKEYAGKEIGPGEDATSDETIVEYIRSKAETAYHPSCTLKMGIDKSAVVDQKLKIHGLEGIRVADASVLPEITSGNLNAPVIMVAEKASDIILN

SEQ ID NO: 88979 - protein, 556 aa, Unknown
  Bacterial polypetide isolated from the Sargasso Sea
MVKIDTEYDYIIVGAGSAGCVLANRLTSNSKNTVLLLEAGGEDKSLTLKMPAAVLSNLKSTKHNWAFKGEPEPELNGRQLQHDRGKTIGGSSSINGMVYIRGNTLDYEGWRQMGCDGWGYADVLPYFKKMECYSGGGDDFRGESGPLKVHRSIPKDPLSLAFINAGKEAGYKETDDISGFCQEGFGIFDRTVFNGERWSASKGYLDPIRNRKNLTILTNALVCNLNFKDNTAEGICFKNKNNEIVNVKAKKEVILSAGAVGSPHILMLSGIGPKEHLDSIGVNTLADLQGVGQNLQDHPDFIMKYKCLKPVSLWPKTKRLSSIGSGIQWLLTKEGMCASNHFDTVACVRSAPGVEYPDLQLCISPIAMKDNSWELLQEHAFQVHVGLMRTHSRGKIELRSKNPADPPRILVNYLKDKRDRELLRKGIHLARELLNQPAFSNIKGDEIFPGENYKSDDELDAKLNSNITSQWHLCCTARMGLKTDKHSVVDNQGRVHGFNSLRVVDASIMPFATNGNTNAPTIMIAEKISDNILGDKPLPRIELKTWQSPNYQMYQR

SEQ ID NO: 88980 - protein, 313 aa, Unknown
  Bacterial polypetide isolated from the Sargasso Sea
MDIFDYIIVGAGSAGCVLANRLSANPKNKVLLLEAGGKDSYPWIHIPVGYYKTMHNPKVDWCFHTEKDESMNNRSIRYPRGKTLGGSSSINGLLWIRGQSNDYDNWRQQGNTGWGWDDVLPYFIKSENNELGKSEFHSDSGPIMVANKKIKLKMLEEFINAAEEKGIPKVIDFNTGDNFGVGYFQFTTSHSHKGLKLRSSAAKGYLNPVKKRSNLKIITNAHVKKINFDGKRAVSVSYFLDEKLEEVHTSGEIILSAGSIGSPHILQVSGIGDSKKLKEFGINSINELKGVGKNLQDHLMFRPVYKVKNLKSL

SEQ ID NO: 88981 - protein, 267 aa, Unknown
  Bacterial polypetide isolated from the Sargasso Sea
GIGDETYLKSLGIEVINNLVGVGENLQDHLEMYIQYKSKKNETLHSLATNFLYQSIEGSKWFLFKKGRLANSHLELGGFVKSDKSYNHPNLQFHFFPYLVINHGLENPNFEAFQFHVCPNRPKSRGFVKIKTNNYKDDPKIQFNYLKHEDDLKQMREGVGIAKKILSQKALKEYVGTEIRPGKNVSNQNELDEVIKNTSESAYHPSCTNKMGEDKTSVVDQDLRVHGIQNLRVVDASVMPDIVSANLNATTIMIAEKAYDQINSTVS

SEQ ID NO: 88982 - protein, 574 aa, Unknown
  Bacterial polypetide isolated from the Sargasso Sea
MTRGVAPRDRRQTVTTQRTLEGEFDYVIVGAGTAGCVLANRLTEDPDIRVLLLEAGGKDDYHWIHIPVGYLYCIGNPRTDWLYKTQPEAALNGRALSYPRGRVLGGCSSINGMIYMRGQREDYDSWAQETGDAGWSWDSVLPIFKRSEDHHGGASDAHGAGGYWRVEKQRLRWEILESFAQAAQQTGIPATDDFNRGDNSGVGYFEVNQKRGVRWNTSKAFLRPAMARPNLTVITGAHAQRVIFDGRRAVGVEYHGGGTDYVARARAEVLLTSGAVNSPQLLELSGIGDGRRLQALGIDVVQDLPGVGENLQDHLQLRMAFRVEGVRTLNTLSAHWWGKLMIGAEYALLQRGPMSMAPSQLGAFAKSDPDDPALTRPDLEYHVQPLSLERFGEPLHSLNAFTASVCHLRPTSRGSVHIASADPGAAPAIAPNYLSTDHDRRVAANALRLTRRIASAPALARYRPEEILPGLQYRSEAELIEAAGAVGTTIFHPVGTCRMGRADDERAVVDSRLRVRGVAGLRIVDASVMPFITSGNTNSPTLMIAERASDMIRADRRAAREATPVRTEPAVTAA

SEQ ID NO: 88983 - protein, 349 aa, Unknown
  Bacterial polypetide isolated from the Sargasso Sea
MVFVRGNPNDYQRWESFGLDHWSYDKVLPYFKKIETWSEGENEYRGGNGILPVNQSKNKNPLFKAFVDSAGEAGYKINNDMNGKEQEGFGMYDVTIHKGERASVSKYYLNPAKKRKNLKVFTEAFVEKIIFDGVKAIGIEVKIKNKIEKIYANKEVILSGGAINSPQLLMLSGIGPSQHLKDRGISVVHNLEGVGKNLQDHLETYVQQECKTKDTLYSYVNKINMIRVGIQWFLNRSGPCSASFLEAGGFCKSSPEREYPNIQFHFFPAFVIDHGLVDPDRHGYQLHASPNHPKSRGHITLNSSNPYDYPKIQFNYLEHEDDLKQTIECIHVARKILGQDSLKPFAGKE

SEQ ID NO: 88984 - protein, 531 aa, Unknown
  Bacterial polypetide isolated from the Sargasso Sea
MENFDYIIIGAGSAGCVLANRLSENPNTKVVLIEAGGKDNYPWIHIPVGYFKTMHNPSVDWCYKTEPDASMNNRSIRYPRGKTLGGSSSINGLLYIRGQSRDYDIWRQLGNTGWGWDDVLPYFIKAENQERGKDEFHGIGGPLSVSDQRIQLPLLNEFQNAAEEFGIPKTKDFNTGDNHGCGYFQVTEKDGFRCSTAVGYLNPIKNRQNLRTITNAHVKKINFDGKTAKGIEYWQGDELKKLNCNKEIILSSGSIGSPQILQTSGIGNSQKLNDLGIDVVQELKGVGENLQDHLMFRPIYKIQGLKSLNKKVNSLFGKLMIGLEYVFNRSGPMTMGASQMCMFAKSDPSLELPDLQWHVQPMSMDTLGATKNHDFHAFTPTVSNIRPTSRGHVSIVDKDSRTYAKIKMNYLSTDHDRMIAARGLKLTRKIVMESETFKKYKPEEYRPGIDINNDEELVKAGSDFAQTIFHPVGTCKMGQDDMAVVDEKLKVKGIENLRVIDASIMPNITSGNTNAPTIMIAEKGADMILTH

SEQ ID NO: 88985 - protein, 438 aa, Unknown
  Bacterial polypetide isolated from the Sargasso Sea
MLYVRGHKWDYDLWAELGNEGWSYDDVLPYFKKSEDNELLDNEYHGKGGPLTVSQLRHDNPFSRYFVEAASKHYKKNDDFNGEDQEGIGLYQVTQRKGKRCSAAVAFLNDVKHKQNLTVFTETVVDKVNFENDLAVSVTGINKGKVMDFHANKEIILCGGAYGSPTILMRSGVGDKDKLSRLDIDCKFDLKGVGENLQDHLDYITAHRVDSWDLMGQPFRSAKFILRAPYELLKYLINQTGMFSSTLAEGGAFIKSNDSLEIPDIQLHFVVGMVEDHGREEIWGNGFSCHMCLLRPESRGTVSISSKNPMEDPVIDPNYLSNKNDLKTMIEGYKKMMQIMNTAPLDQFDNVRNPVNLKDDKSIESAIRARADTIYHPVGTCKMGNDEMSVVDSNLVVRGTKNLRVVDASIMPTLVGGNTNAPTIMIAEKIADNIKGTS

SEQ ID NO: 88986 - protein, 526 aa, Unknown
  Bacterial polypetide isolated from the Sargasso Sea
MNLDYLIIGAGSAGCVLANRLTENSQNNVAIFEAGKPSDIWKVNMPLAILYTMHDPKYNYKYYSEPEPYLHNRRLFCPRGKMIGGCSAHNGMVFVRGNPNDYQRWASFGLDDWSYEKVLPYFKKIETWSEGENEYRGGKGILPVNQSKNKNPLFKAFVDSAGEAGYKINNDMNGKEQEGFGMYDVTIHKGERASVSKYYLNPAKKRKNLKVFTEAYVEKIIFDGKKAIGIEVKIKNKVEKIYANKEVILSGGAINSPQLLMLSGIGPSQHLKDKGIDVVHNLEGVGKNLQDHLETYVQQECRTKDTLYSYVNKLNMVRIGIQWFLNRSGPCSTSFLEAGGFCKSSPEREYPNIQFHFFPAFVIDHGLVDPDRHGYQLHASPNHPKSRGHITLKSSNPYDYPKIQFNYLEHEDDLKQTIECIHVARKILGQDSLKPFAGKEIGPGEHAQTNEVFEEYIRSKAETAYHPSCTLKMGVDNMSVVDQKLKVHGVENLRVVDASVMPEITSGNLNAPTLMIAERASEFILN

SEQ ID NO: 88987 - protein, 309 aa, Unknown
  Bacterial polypetide isolated from the Sargasso Sea
RIIFENSVAVGVEYFTNNKTKKYFANKEVILSAGAINSPKILQLSGIGNQSHLKDLGIKVINDLKGVGENLQDHLEVYIQYKSKSNDTLYNLTTNMITQCIEGAKWFLLGKGKLSHSHLELGGFVKSSSIYNHPNLQFHFFPSLVINHGLENPKFDSFQFHACPNRPKSRGFVKISSSNFTKDPKIQFNYLQHKEDLEQMRQSVKIVQNICSQKSLLEYIDYEIRPGREVVNQEQLDEVIRNTAESAYHPSCSNKMGIDKDSVVDQDARVYGVQNLRVIDASIMPDIVSANLNANVVMIAEKAADIILN

SEQ ID NO: 88988 - protein, 479 aa, Unknown
  Bacterial polypetide isolated from the Sargasso Sea
RKHAGYSGGSYKVPESHQEKRRGFQPRGKTLGGSSSINGMLYVRGHPWDYDHWSSLGNDGWSYEEVLPYFIKSECNERLQDEYHGNSGPLNVAELRHDNPFTRFFVEAATKHHPANDDFNGKNQEGVGLYQVTQKGGQRCSAAVAYLNPVKERGNLTVFTETIVDKVEFDGLKAVGVRCIKKDKTFSIKASKEVLLCGGAYGSPSILMRSGIGNKEYLRTKDIDCLIDLPGVGENLQDHIDYITSHRVDSWELMGSRSLKFWLRAPFELLKYLLSRTGMFSSSLAEGGAFIKTSEELEMPDIQLHFVVSMVEDHGRTKLWGNGFSCHVCLLRPESKGTVKIPSKDPTAAPLIDPNYLTEERDMKVLIKGYKKMMEIMTTEPLKKFNNIRNPLNINDDKAIETAIRTRSDTIYHPVGTCKMGIDDMAVVDSSLRVKGVQNLRVVDASVMPTLVGGNTNAPTIMIAEKAADLIKKHGSRSF

SEQ ID NO: 88989 - protein, 288 aa, Unknown
  Bacterial polypetide isolated from the Sargasso Sea
MDADFIIIGAGSAGCVLSYRLSKDKNSKILLLENGGSDKSPLIQMPAALSYPMNMKKYDWGFMSDPEPKLNNRRLATPRGNVIGGSSSINGMVFVRGHARDFDNWAQSGARGWSYADVLPYFKKMETWHGDRDTNSEKFRGFSGPLHISRGDQKNPLFKAFVKAGNQAGFEITSDYNGFKQEGFGVMEQTIYKGRRWSAANAYLRPVLKRNNLKILRCYAEKIVFDGLKAVGVEVNIKGKIKKYFAKKEIIISASSINSPRLLLLSGVGPANELKGLGINPIVDRKGV

SEQ ID NO: 88990 - protein, 350 aa, Unknown
  Bacterial polypetide isolated from the Sargasso Sea
EGFGMFDTTMHQGERAGVAKYYLNPVKNRKNLNILKNSFVEKILFEGKKAVGLQVKINNKVEKIYANKEVILSGGSINSPQLLMLSGIGDETHLRDNGIEVVHHSKGVGKNLQDHLETYIQQKCKTPNTLYTYTKLIPKILAGMQWFMFKSGPCSKSFLEAGGFAKSSPDRKVANIQFHFFPSFVINHGLEEPDTHGYQLHASPNHPKSRGEITLNSSDPYDYPKILFNYLKEEEDLKQTRECIHVARKILAQPALAEHAGNEVGPGFDAQSDDELNEYIRSKADTAYHPCGTCKMGVDDMAVVDQDLRVNGIGNLRVIDASVIPEIPSANLNAPTLMIAEKGSEAILNN

SEQ ID NO: 88991 - protein, 250 aa, Unknown
  Bacterial polypetide isolated from the Sargasso Sea
MYKPITLYKYWNLISKAKIGLQWLITKKGHGASNHFESAAFIRSRAGVEYPNIQFHFLPLAVRYDGKTSADSHSWQAHVGPMRSSSRGQISLKSKDPNIPPSIKFNYMSHEQDWIDFRHCVRITREIFNQKAFEEFKGKEIQPGDHCNSNDEIDNFIKQHVESAYHPCGTCKMGSKSDPLAVVDEECNVIGLQNLRVVDSSIFPNITNGNLNGPTIMVAEKASDHIIGKGVLPKSHFEPWINTNWEIKDR

SEQ ID NO: 88992 - protein, 419 aa, Unknown
  Bacterial polypetide isolated from the Sargasso Sea
GWSWREVLPYFIKAEDQERGASEFHGKGGPLAVSDQRITLDILDVFQNAASEVGIPKVDDFNKGDNFGCGYFQVTERNGLRCSAAVGYLNPIKKNNNLKIETKCHVQKINFENKKAVSVNYLKGDKKFTVKANKEIILSAGSIGSPQILQTSGIGESSKLKNLGLEIVNDLKGVGKNLQDHLMFRPVYKVKNIKTLNKKINSVFGKLLIGLEYVFARRGPMTMGASQLCGFAKSDENRETPNLQFHIQPISTDKLGGANLHDFDAFTPTVANIRPTSRGEINIISSDSRDNPKIKMNYLSTEEDRKVAADGIKLIRKIVMETDEFKKYEPEEFRPGAHIQEGEEIVKACSHYAQTIFHPVGTCKMGNDNDAVVSDELKVHGINNLRVIDASIMPNITSGNTNAPTIMIAEKGADMILNS

SEQ ID NO: 88993 - protein, 306 aa, Unknown
  Bacterial polypetide isolated from the Sargasso Sea
KTAIGVETIKKNITNNYLANKEVILCAGSINSPKILQLSGIGNEKHLKSLGIEVINNLVGVGENLQDHLEMYIQYKSKKNETLHSLATNFVYQAIEGSKWFLFKKGRLANSHLELGGFVKSDKSYNHPNLQFHFFPYLVINHGLENPNFEAFQFHVCPNRPKSRGFVNIKTNNYKDDPKIQFNYLKHEDDLKQMREGVGIAKKILSQKALKEYVGTEIRPGKNVSNQNELDEVIKNTSESAYHPSCTNKMGEDKTSVVDQNLRVHGIQNLRVIDASVMPDIVSANLNATTIMIAEKAYDQIKSTVC

SEQ ID NO: 88994 - protein, 517 aa, Unknown
  Bacterial polypetide isolated from the Sargasso Sea
GCVLANRLSESPKIKVLLIEAGGKDNYPWIHIPVGYFKTMHNPTVDWCYKTEPDETMNNRSIRYPRGKTLGGSSAINGLLYIRGQSRDYDVWRQSGNTGWGWDDVLPYFIKAENQERGGNDYHGVGGPLSVSDQRIQLPLLNEFQNAAEEFGIPKTKDFNTGDNHGCGYFQVTEKDGFRCSTAVGYLNPIKKRNNLKIITNAHVKKINFDNKTAKNVEYWIGNELRNVSANKEIILSSGSIGSPQILQTSGIGNSNNLREFGVNVVHDLKGVGENLQDHLMFRPIYKVHGLKSLNKKINSLFGNLMIGLEYIFNRSGPMTMGASQMCMFAKSDPSLELPDLQWHVQPMSMDTLGATKNHDFHAFTPTVSNIRPTSRGHVKITNKDSRIYAKVKLNYLSTDHDRMIAAKGLKLTRKIVMESETFKKYKPEEYRPGISINDDEELVKAGSDYAQTIFHPVGTCKMGQDDMAVVDETLKVRGLNNLRVIDASIMPNITSGNTNAPTIMIAEKGADMILRS

SEQ ID NO: 88995 - protein, 362 aa, Unknown
  Bacterial polypetide isolated from the Sargasso Sea
MKNEEYNFIIVGAGSAGCVLANRLSKNPDCKILLIESGPSDKTWKTAMPAALLYTMHDPKYNYLYETEPEPFMNNRRMFCPRGKMLGGSSSHNGMVHVRGNAKDFDNWAQQGLTNWSYEKVLPYFKKSESINGLDKEYRNDTGPLKLSRSPNGNILTQVYLDAARQAGYQINNDMNGKNQEGFGLMDTTIYKGKRQSTSVTYLHPIIHRNNLNVLTNVTVNKILFENKKAIGVECKINGKVKKFLSSQEVLISAGAINSPQLLMLSGIGPEKELKKHNIEPLECLKGVGENLQDHLETYVQYECKKPVTLYSAQNPIRMALIGMEWFLFKTGIAANSNLETGGFIKSNEMVDYPNIQYHFFP

SEQ ID NO: 88996 - protein, 318 aa, Unknown
  Bacterial polypetide isolated from the Sargasso Sea
MNEFDYIIVGAGSAGCVLANRLTSKEENKVLLLEAGGKDNYPWIHIPVGYYKTMHNPKVDWCFHTEKDETMNNRSIRYPRGKTLGGSSSINGLLWIRGQSNDYDNWRQMGNSGWGWNDVLPYFLKSENNELGKSEFHNDSGPIMVSNKKINLKMLDEFQNAAEECGIPKTNDFNTGDNTGIGFFQFTTNHNKSLFKLRCSAAKGYLNPVKKRNNLKIITEAHVQKINFDGKKAESVSFYQGNEVVTIKARREIILSAGSIGSPHILQVSGVGNSSKLKKNGIQTVHELKGVGKNLQDHLMFRPVYKVKNLKSLNGKIN

SEQ ID NO: 88997 - protein, 296 aa, Unknown
  Bacterial polypetide isolated from the Sargasso Sea
MLPLKARREIILSAGSIGSPHILQVSGVGDSNKLKKNGIQTIHELKGVGKNLQDHLMFRPVYKVKNLKSLNGKINSLFGSFLIGLEYLFKQSGPMTMGASQVCGFAKSDPSKETPNLQFHVQPISTDILGASKLHDFDGITPTVANIRPSSRGEISIVSNDSRVNPKIKMNYLSTQDDRIVAAQGLKLVRKIMLESETFKKYEPEEYRPGVHITDDEELVKAGSEFTQTIFHPVGTCKMGKDDNAVVNDKLYMHGLKNLRVIDASIMPNITSGNTNAPTIMIAEKGAEFILNNQTQ

SEQ ID NO: 88998 - protein, 528 aa, Unknown
  Bacterial polypetide isolated from the Sargasso Sea
MQAFDYLIVGAGSAGCVVANRLSENPNNSVAIFEAGGSSDIWKVKMPLALLYTMHDPKYNWKYYSEPEPYLNNRRVFCPRGKMIGGCSSHNGMVFVRGNRDDYTRWENFGLDDWSYDKVLPYFKKIETWSEGENQYRGSLGPLPINLSKNSNPLFKAFIDAAAEAGHKTNIDMNGEEQEGFGMFDTTMHQGERAGVAKYYLNPVKNRKNLNILKNSFVEKILFEGKKAVGLQVKINNKVEKIYANKEVILSGGSINSPQLLMLSGIGDETHLRDNGIKVIHHSKGVGKNLQDHLETYIQQKCKTPNTLYTYTKLIPKILAGMQWFMFKSGPCSKSFLEAGGFAKSSPERKVANIQFHFFPSFVINHGLEDPDSHGYQLHASPNHPKSRGEITLNSSDPYDYPKILFNYLKEEEDLKQTRECIHVARKILSQPALAEHAGDEVGPGFDAQSDDELNEYVRSKADTAYHPCGTCKMGVDGMAVVDQDLKVNGIGNLRVIDASVIPEIPSANLNAPTLMIAEKGSEAILNN

SEQ ID NO: 88999 - protein, 301 aa, Unknown
  Bacterial polypetide isolated from the Sargasso Sea
MNFDYIIAGGGSAGCVLANRLSKNPDVKVLLLEAGGTDWHPFIKMPSGVSKIMAGETFDAKLYNYAYYTEGQPHLNNRKLFFPRGKGVGGSSNINGMLYIRGHARDYDIWRQLGNAGWSYDEVLPYFKKSENNENGSDLYHGSNGELKVSNPNLDTNPLHYAFIEAGQQAGYKYNPDFNGEDQEGVGPVSQNIDNGRRASTAYSFIEPVKNRKNLTIYTNSVTSKLLFEKNKCIGVEFLRKNKLEKVFADREVIVCGGAINSPQILLLSGIGKADYLKKWDLNVVSDLPGVGENLQDHLDI

SEQ ID NO: 89000 - protein, 465 aa, Unknown
  Bacterial polypetide isolated from the Sargasso Sea
NNRSIRYPRGKTLGGSSSINGLLWIRGQSEDYNIWRQLGNTGWGWNDVLPYFLKSENNELGKGEFHNDNGPITVANKKINLKLLDEFQNAAEEYGIPKTNDFNTGDNTGVGFFQFTTSFNKPGLKLRCSAAKGYLNPVKKRSNLKIIVKAHVQKINFEGKKAIGANYYNGDKIVEVKANKEIILSAGAIGSPHILQVSGIGNKEKLKKLGIDIVHESNGVGLNLQDHLMFRPVYKVKNLKSLNRKVESLFGRFLMGLEYILNQSGPVTMGASQVCGFVKSDPSRATPNLQFHVSPVSTDILGVTPMHDFEGITPTVANIRPTSRGEINIVSADSRVYPKIKMNYLSTDEDRKVAATGLKIIRKIMLETETFKKYEPEEYRPGVHITDDEELVKEGSNFTQTIFHPVGTCKMGQDEMSVVDEKLKVRGIDNLRVIDASIMPNITSGNTNAPTIMIAEKGADMILEH

SEQ ID NO: 89001 - protein, 325 aa, Unknown
  Bacterial polypetide isolated from the Sargasso Sea
KVLKLNYENNKIISLKIKHKNKVISVKPKIGTILSSGAIMTPYLLLKSGIGNAEELNNYNIPINLHSPHIGKNLQDHLGLDYLYKTSMTTLNYDLGTWSGRIKSILKYLYNRTGPFALSLNQGGGYINWNSLDPYPNIQLYFNPLTYSVSYKKNRPLLKTDKFNGFIIGFNSCRPKSLGEVKLRASKTDYLPSIDPKYLSDERDIHDLYSAFDFIRNFSTNRHLKEIIDSSVNITPINANNEELLGHFKSNAGTVYHPCGTCRMSKDINSGVVSEKLKVHGIKNLWIVDASIMPNITSGNINAPVMMLSYLSSKIIIEELKQKYK

SEQ ID NO: 89002 - protein, 531 aa, Unknown
  Bacterial polypetide isolated from the Sargasso Sea
MDNFDFIILGAGSAGCVLANRLSANPKNKVLLLEAGGKDNYPWIHIPVGYFKTMHNPKTDWCYKTEPDESMNNISIRYPRGKTLGGSSSINGLLYIRGQNRDYDVWRQLGNTGWGWDDVLPYFIKAENQERGENEFHGIDGPLSVSDQRIHLPLLDEFQNAAEEFGIPKTKDFNTGDNHGCGYFQVTEKDGFRCSTSVGYLNPIKNRKNLKIITHAHVKKIIFENKIAKEVEFWQGDELKKVEANKEIILSSGAIGSPQILQVSGIGNMEKLKNLGIETVQNLNGVGENLHDHLMLRPIYKINGLKSLNKKINSLFGNLMIGLEYIFKRTGPMTMGASQLCMFAKSDSSLELPDLQWHVQPMSMDTLGATKNHDFHAFTPTVSNIKPTSRGHVSIVDKDSRTYAKIKQNYLSTDNDRMIAAKGLKLTRKIIMESETFKKYSPEEYRPGISINDDEELVKEASNYAQTIFHPVGTCKMGQDEMSVVDEKLRVRGVKNLRVIDASIMPNITSGNTNAPTIMIAEKGADMILQQ

SEQ ID NO: 89003 - protein, 534 aa, Unknown
  Bacterial polypetide isolated from the Sargasso Sea
MDKFDYIIIGAGSAGCVLANRLTVNPDTKVLLLEAGGKDTNPWIHIPGGYFKTMHNPDTDWCFNTEKEPNCDNRQMVYPRGKTLGGSSSINGMLYIRGQSNDYNYWRQLGNVGWSWDDVLPYFKKSEDFQFGENEFHGSGGPIAVEKIRATFKVLDLFLEAAEEHGYKRTDDFNNGDNEGMGYFPFTIKNGFRCSTAVGYLNPVKSRKNLKIITKAHIKNIEFENNKAKKVNYWIDGNEFSVETNKEIILSAGTIGSPHILQASGIGPGELLKENNINVLKDHQGVGRNLTDHLMLRPVYKIKNLETLNDIYYSFTKKMLSGLKFLLLRKGPLTVGASYVCGFVKSDEHLETPNLQFHISPASTDLLGKSALHKFPAFTPTITNVRPTSRGSIELKSPDTRVSPKIKMNYLSTDEDREIAGKALKIVRKIVMESKAYKDYQPEELRPGINITDNEELATEAGKFANTIFHPVSTCRMGKDENAVVNDRLVAHGLENLRVVDASVMPHITSGNTNAPTIMIAEKAADMIIEDSRR

SEQ ID NO: 89004 - protein, 513 aa, Unknown
  Bacterial polypetide isolated from the Sargasso Sea
ANPSNKVLLIEAGGKDNYPWIHIPVGYFKTMHNPKVDWCFKTEPDETMNNRSIRYPRGKTLGGSSSINGLLWIRGQKEDYDVWRQLGNTGWSWENVLPYFLKSENNELGKSEFHNDSGPITVANKKINLKLLDEFQNAAEEYGIPKTNDFNTGNNFGVGFFQFTTNFNKVGLKLRCSAAKGYLNPVKKRSNLKIVTNAHVQKINFEGKRAIGVNYFTGERINTVNANKEVILSAGSIGSPHILQVSGIGEVNKLKNLGIEIVHESNGVGKNLQDHLMFRPVYKVKNLKSLNRKVESLFGRFLMGLEYLLNQSGPVTMGASQVCGFVKSDPSRATPNLQFHVSPVSTDILGVTPMHDFEGITPTVANVRPTSRGEINIVSSDSRIYPKIKMNYLSTDDDRTVAAQGLKIVRKIMLETETFKQYEPEEYRPGVHITDDEELVKAGSDFTQTIFHPVGTCKMGQDNMAVVDEKLRVKGIQNLRVIDASIMPNITSGNTNAPTIMIAEKGADMILRS

SEQ ID NO: 89005 - protein, 525 aa, Unknown
  Bacterial polypetide isolated from the Sargasso Sea
IILGAGSAGCVLANRLSENPGHKVLLLEAGGKDNYPWIHIPVGYFKTMHNPKTDWCYKTEPDESMNNISIRYPRGKTLGGSSSINGLLYIRGQNRDYDVWRQLGNTGWGWDDVLPYFIKAEDQERGKNEFHGVDGPLAVSDQRIHLPLLDEFQNAAEEFGIPKTKDFNTGDNLGCGYFQVTEKDGFRCSTSVGYLNPIKNRKNLEIITHAHVKKIIFENKIAKSVEFWKGDELKKVEASREIILSSGAIGSPQILQVSGIGSSEKLKNLGIEMVHNLNGVGENLHDHLMLRPIYKINGLKSLNKKINSLFGNLMIGLEYIFKRTGPMTMGASQLCMFAKSDSSLELPDLQWHVQPMSMDTLGATKNHDFHAFTPTVSNIKPTSRGHVSIVDKDSRTYAKIKQNYLSTDNDRMIAAKGLKLTRKIIMESETFKKYSPEEYRPGININDDEELVKEASNYAQTIFHPVGTCKMGQDEMSVVDEKLRVRGVSNLRVIDASIMPNITSGNTNAPTIMIAEKGADMILNH

SEQ ID NO: 89006 - protein, 94 aa, Unknown
  Bacterial polypetide isolated from the Sargasso Sea
IRDYVESAYHPCGTCKMGNKTDPKSVVDPETRVIGVDKLRVADSSIFPQITNGNLNAPSIMVGEKASDHILGKDLLPRSNEVPWIHPDWQTSQR

SEQ ID NO: 89007 - protein, 531 aa, Unknown
  Bacterial polypetide isolated from the Sargasso Sea
MDNFDYIIIGAGSAGCVLANRISSNPKNKVLLLEAGGKDTNPWIHIPGGYFKTMHNPETDWCFNTEEEPFCDNRKMTYPRGKTLGGSSSINGMLYIRGQSNDYNYWRQLGNVGWSWDDVLPYFKKSEDFQFGKNEFHGSGGPLKVEKIRSTFKVLDLFLEAAEEFGYKKTDDFNNGDNEGMGYFPLTIKNGFRCSTAVGYLNPIKNRSNLKIITKAHIKNIEFENKIAKKVNFWTGDKLNTVEANGEIILSAGTIGSPHILQASGLGPAKLLKDNGIEVLMENKSIGQNLTDHLMLRPVYKIKNLETLNDIYYSLTKKIFTGLKFFLTRTGPLTVGASYLCGFVKSDPHLETPNLQFHVSPASTDLLGKSSLHKFPAFTPTITNVRPTSRGSIELKSSDTRIPPKIKMNYLSTHEDREIAGKSLKIVRKIVMESKAYKDYEPEELRPGININNIEQLAIEAGKYANTIFHPVSTCRMGKDENAVVSDQLKVHGIKNLRVIDASVMPYITSGNTNAPTIMIAEKGADMILQQ

SEQ ID NO: 89008 - protein, 526 aa, Unknown
  Bacterial polypetide isolated from the Sargasso Sea
MKFDYLIIGAGSAGCVLANRLTENGQNNVAIFEAGKPSDIWKVNMPLAILYTMHDPKYNYKYYSEPEPHLNNRNLFCPRGKMIGGCSAHNGMVFVRGNPNDYERWSSFGLKDWSYEKVLPYFKKIETWSEGENEFRGGSGILPVNQSKNKNPLFKAFVDSAGEAGFKINKDMNGKEQEGFGMYDVTIHKGERASVSRYYLNPAKKRGNLKIYSESFVEKIIFEGKKAIGIEVKIKNKVEKIYANKEVILSGGSINSPQLLMLSGVGPAEHLKEKGIDVVHALEGVGKNLQDHLETYVQQECKTSDTLYSYINKLNMLRVGIQWFLTKSGPCSASFLEAGGFCKSSAEREYPNIQFHFFPAFVIDHGLVDPDRHGYQLHASPNHPKSRGHITLNSSNPYDYPKIQFNYLEHEDDLKQTIECIHVARKILGQDSLKPFAGKEVGPGEDVQSNELFEEYIRSKAETAYHPSCTLKMGIDKMSVVDEKLKIYGLENIRVVDASVMPEITSGNLNAPTLMIAERAAEFILN

SEQ ID NO: 89009 - protein, 433 aa, Unknown
  Bacterial polypetide isolated from the Sargasso Sea
MENFDFIIIGAGSAGCVLANRLSANPKNKVLLLEAGGKDSYPWIHIPVGYYKTMHNPKVDWCFHTEKDETMNNRSIRYPRGKTLGGSSSINGLLWIRGQSNDYDNWRQQGNNGWGWDDVLPYFIKSENNELGKNEFHNDSGPIMVANKKIKLKMLEEFINASEEKGIPRVNDFNTGDNFGVGYYQFTTSHSHKGLKLRCSAAKGYLNPVKKRPNLKIVTNAYVEKINFNGKKAESINYFIKGKSIEVKTNKEIILSAGSIGSPHILQVSGIGDSNKLKKFGINIINELKGVGRNLQDHLMFRPVYKVKNLKSLNKKINSLFGNFLIALEYIFNQSGPMTMGASQVCGFAKSDSSRETPNLQFHVQPISTDILGATKLHDFEGITPTVANVRPTSRGEINIVSNNIKDYPKNKMNYLSTDDDRYVAAQGLKLVR

SEQ ID NO: 89010 - protein, 560 aa, Unknown
  Bacterial polypetide isolated from the Sargasso Sea
MIDFDYVIVGGGSAGCVLANRLTEDPDNKICLIETGPVDKSPLIHVPGLFAFLVKEGEESEYAYQYNTEPQKGFNNVTVTEGAASMQDTLGGSYKVPESYQEKRRGFQPRGKTLGGSSSINGMLYVRGHRWDYDHWSSLGNDGWSYDEVLPYFIKSECNERLQDEYHGNDGPLNIAELRHDNPFTRFFVEAASKHYPENNDFNGEKQEGVGLYQVTQKNGQRCSAAVAYLNPVKDRKNLTIFTETVVEKVEFDGLKAVGVKCIKKDKTFSIKANKEILLCGGAYGSPSILMRSGIGNKEYLRTKDIDCLVDLPGVGENLQDHIDYITSHRVDSWELMGSRSFKFWFRAPFELLKYLLFRTGMFSSSLAEGGAFIKTDKTLEMPDIQLHFVVSMVEDHGRTKLWGNGFSCHVCLLRPESKGTVKIASKDPSVAPLIDPNYLTAESDMEVLIKGYKKMMEIMTTEPLKKFNNIRNPINIDDDKAIEKAIRTRSDTIYHPVGTCKMGIDNMAVVDNSLRVKGVHNLRVIDASIMPTLVGGNTNAPTIMIAEKAADLIKGHGTV

SEQ ID NO: 89011 - protein, 526 aa, Unknown
  Bacterial polypetide isolated from the Sargasso Sea
MKFDYLIIGAGTAGCVLANRLTEQSKNKVAIFEAGKDSDIWKVNMPLAILYAMHDPKYNYKYYSEPEPHLNNRKLFCPRGKMIGGCSAHNGMVYVRGNKNDYERWASFGLKNWSYENVLPFFKKIETWSGGENNYRGGKGILPVNQSNNKNPLFKAFLDSAKEAGHKINSDMNGEDQEGFGMYDVTIHKGERASASKYYLKPAKSRENLKVFTESFVEKIIFDGKKAIGIQVKIKNETKTIYANKEIILSGGSINSPQLLMLSGVGPSNHLKEKGIEVIHDSKGVGKNLQDHLETYIQQECKTPDTLYSYVNKFNMVKVGIQWFLNKSGPCSTSFLEAGGFCKSSPDKKYPNIQFHFFPAFVIDHGLVDPDRHGYQLHASLNQPKSRGEITLKSSNPYDYPKIQFNYLKDDYDLKETIKCVRVARKILCQNSMKPFAGKEIGPGDNANSDEEIEEYVRSKAETAYHPSCTLKMGIDDMAVVDEKLKIRGLQNIRVADASVMPEITSGNLNAPTLMIGERAADFILN

SEQ ID NO: 89012 - protein, 350 aa, Unknown
  Bacterial polypetide isolated from the Sargasso Sea
QEGFGMFDTTIHNGERASVAKYYLNPIKQRKNLNIFSNSFVEKIIFEGKKAIGIEVKIKNKIEKIYAEKELILSGGSINSPQLLMLSGIGDSNHLQEKGIKVVHDLKGVGRNLQDHLETYIMQECKTPNTLYTYTKLIPKVLAGIQWFLSKSGPCSQSYLEAGGFAKSSPQREIPNIQFHFFPSFVINHGLVNPDSHGYQLHASPNHPKSRGTVTLNSSDPYDYPKILFNYLEDEDDLKQTRECIQVARKILSQPSLLEHSGKEVGPGSDKQSEEELNEYIRSNAETAYHPCGTCKMGVDQMSVVDEKLKVKGIHNLRVVDASVMPEIPSANLNAPTLMIAEKASDLILN

SEQ ID NO: 89013 - protein, 348 aa, Unknown
  Bacterial polypetide isolated from the Sargasso Sea
GHADDFDQWENEGATGWGYADCLPYFKRAEGWMMGGDTYRGGAGPLTTCNGNDMRNPLYQAFIDAGREAGYGVTEDYNGYRQEGFGPMHMTVRGGERCSTDLAYLEPARRRPNLTVITEANVDRLTFSGMRVTGARYRLGGQEHSVKAHQEVIISAGSIGSPTLLQRSGVGPMSVLMAAGVPVRHDLPGVGENLQDHLEVYFQYRCRQPITINGHLGLLSKLRIGAQWVLTKSGLGATNHFESCGFIRSRAGVAAPDIQYHFLPAAIRYDGQAAFDGHGFQVHVGPNKPDSRGHVRISGPDSIHEPLIQFNYLSTEKDLADWRQCLRLTREILQQPALDEFRGGEIQP

SEQ ID NO: 89014 - protein, 273 aa, Unknown
  Bacterial polypetide isolated from the Sargasso Sea
PKLLLLSGIGPAAELKSKGITVVANRPGVGKNLQDHLELYIQMASKKPVSLYKFWNPIGKAWVGLRWFISKSGPGASNQFESAAFIRSKAGVEYPDIQYHFLPLAVRYDGKLPVKGHGFQAHVGPMRSQSRGDVALRSSDPKEPPKIQFNYMSHETDWADFRNCIRLTREIFSQPAFEPFADSEISPGKEVQSDEQLNDFIRDNVESAYHPCGTCKMGDKSDLMSVVDPETRVIGVDKLRVADSSIFPQITNGNLNGPSIMVGEKASDHILGK

SEQ ID NO: 89015 - protein, 262 aa, Unknown
  Bacterial polypetide isolated from the Sargasso Sea
GPDYRLDFRTQMPAALAFPLQGRRYNWAYETDPEPYMNNRRMECGRGKGLGGSSLINGMCYIRGNALDFDNWATAKGLEDWTYLDCLPYFRKAESRDIGPNDYHGDDGPVSVTTPKAGNNPLFHAMVEAGVQAGYPRTDDLNGYQQEGFGPMDRTVTPEGRRASTARGYLDQARARPNLTIITHATTDRILFDGKRASGVSYLIGNANDATEARARREVLLCAGAIASPQILQRSGVGPAALLRELDIALVHELPGVGQNLQ

SEQ ID NO: 89016 - protein, 282 aa, Unknown
  Bacterial polypetide isolated from the Sargasso Sea
TDHLSKFGIETICDLPGVGSNLQDHLELYIQQECNKPISLYKYWNPLSKALIGIKWLIFRTGLGASNQFEAGAFLRSSAGVPYPDIQFHFLPIAIRYDGGLAKGHGFQIHVGPMRSKSRGTVRLKNSDPRSSPEIKFNYMSHESDWEDFRKSIRLVREIFSQKAFDPYRGEEIQPGANVTSDKALNHFIKENVESAYHPCGTCKMGKPNDPMAVVDSECRVLGVGNLRVVDSSIFPTITNGNINAPTIMVGEKASDHILGKNPLPKLNVLPWENKRWKKSNK

SEQ ID NO: 89017 - protein, 306 aa, Unknown
  Bacterial polypetide isolated from the Sargasso Sea
LGGSSSINGMFYVRGHACDFDFWGDSGATGWNFTNVLPYFKKMENWNSHERDKNIYWRGDGGPLHISRGSCKNPLFRAFIEAGIQAGFEATPDYNGEKQEGFGVMEQTIFQGRRWSASNAYLKPALKRENMNLVRAFARRIIFEGKVAVAVEVSQGTRIFQVRANKEIILAASAINSPKILMHSGIGPGEHLKEHGIKVISNRAGVGSNLQDHLEVYLQQECLKPISLNKHWNILSKILIGAKWILTKKGLGASNQFESAAFVRSAPGIKYPDIQFHFLPIAIRYDGKVANLGHGFQAHVGPMRSE

SEQ ID NO: 89018 - protein, 173 aa, Unknown
  Bacterial polypetide isolated from the Sargasso Sea
RGRIQLKSKDPRQHPSILFNYMSADQDWQEFRDGIRLTREIMAQPALDPYRGREISPGAHVQSDAELDAFIREHAETAFHPSCSCKMGEDDMAVVDGQGRVHGLQGLRVVDASIMPEIITGNLNATTIMIAEKIADRIRGRQPLPRSNAPYFVAGERPVRGTPLRSQQDRLVG

SEQ ID NO: 89019 - protein, 143 aa, Unknown
  Bacterial polypetide isolated from the Sargasso Sea
MEADYIIVGSGSSGSVLADRLSKSGKYSIILVEFGGSDRSPLIQMPAALSYPMNMDKFDWGYQSEPEPNLNNRRLAVPRGKVIGGSSSINGMVYVRGHACDFDFWAANGASGWSYADVLPYFKRMENCSNIESDANSSWRGNK

SEQ ID NO: 89020 - protein, 277 aa, Unknown
  Bacterial polypetide isolated from the Sargasso Sea
DFNHKGQTRSVQGGEIISCGGAFNSPQLLQLSGIGNPNDLELLGIEIVQELPGVGENLQDHLEVYVQHACNQPVSMQPALRWWNKPWIGFQWLFFRKGPAATNHFEAGGFARSNDQVAYPNLMIHFLPLAIRYDGTSPTGGHGYQVHIGPMYSNSRGSVKIKSTDPFAKPSLRMNYLSTPEDRKEWVEAIHCARKILEQSAFDEFSGGEISPGPSVDSDEEILEWVRRDGETAYHPSCSCAMGTGPQSVVDPKDFKVHGMEGIRVVDASTMPYVPNA

SEQ ID NO: 89021 - protein, 313 aa, Unknown
  Bacterial polypetide isolated from the Sargasso Sea
GENPKLKILVLEFGGLDKSPFIQMPAALSYPMNMDKFDWGYKAEPEQALNGRSLACPRGKVIGGSSSINGMIYVRGNAGDYNQWAESGAKGWDYPNVLPYFQRMEASHGGNSEFRGKSGPLNITHGKRDNPLHDAFVKATEQAGYTYTEDYNGFRQEGFGPADMNVWKGSRFSTAKAYLKPALAKKNVHLITKVLVDKIIFSEDKAKGVEVFHQGQKKIFNANIGVVLSAGAINSPTILQRSGIGEGNDLNNLGIKVIKNLPGVGKNLQDHLEVYFQVKCLQPVTLNKYLNPFSKLLIGMQWMFLKRGPVPQT

SEQ ID NO: 89022 - protein, 275 aa, Unknown
  Bacterial polypetide isolated from the Sargasso Sea
GGGYGSPLIQMPAALSYPMSMKRYDWGYWSEPEPHLGGRKLACPRGKVLGGSSSINGMVYVRGHPKDFDKWAEMGALGWSSSDVLPYYQRLENWDSAGHGGEKIYRGTNGPLNITRGTRINPLNFAFEKAGQQAGYQTTLDYNGKQQEGFGPMDQTIKNGKRWSSAKAYLEPAIRSGKCQIVRGLVAKIIINEKQAKGVEYFQNGKTDCVYASKEVIIAASAINSPKILLLSGIGPAKELKANGIEVIVDRPGVGKNLQDHLELYIQMMAKTPVS

SEQ ID NO: 89023 - protein, 273 aa, Unknown
  Bacterial polypetide isolated from the Sargasso Sea
AYPLSNDSVNWAYKSEADPYMNNRQMYCPRGRVLGGSSSINGMAYVRGHAFDYNRWAQIDGCQGWSYSDCLPYFKRAESLDIGGDTYRGSDGPLKVTAGKMNNPLHKAWMKAGKEAGYPITEDPNGYQQEGFGRMDMTVDNGRRCSAAKAYLRQASTRKGLTTKKNTIVNRIIIEDGKAIGIEFIKRGSKICVYAAKEVILSAGAINSPQLLMLSGIGPANHLAGLGIPIVQDLPGVGENLQDHLEIYLQMECSQPISLYGVQTPIYKLMIGL

SEQ ID NO: 89024 - protein, 463 aa, Unknown
  Bacterial polypetide isolated from the Sargasso Sea
FGPFIQMPSALSYPMNFNRYNWGYETEPEEGLNNRRLSCPRGKVLGGSSSINGMIYVRGNAEDFNFWEESGARGWGFADVLPYFKRQENSHEGDSSWRGKNGPLHITRGTRENPLNDVLVSAAQEAGFLATEDYNGFQQEGFGPADRTIWKGSRWSAAKAYLKPSIQTKKLKIFKNALVDKINFSNRKAIGVTFSQNGRSGKILARREVICSAGSINSPLILQRSGIGPSKLLKSHNIDVLLDNQNVGENLQDHLEVYFQVKCKKPITLYKYNNFFSKGIIGLNWLLFKKGIGASNHFETLGFLRSNNKVKYPDIQFHLLPIAINYDGSSAVNDHGFQLHTGPMRSKSRGWVKITSSNPKSNPKIKFNYMKHPDDWIEFRNCIKITRKILNQPAFKDFYGEEIQPGKQKISNDDLDNFIKEEAESAYHPCGTIKMGDKNDPSSVVDPNCKVIGIENLRISRFI

SEQ ID NO: 89025 - protein, 553 aa, Unknown
  Bacterial polypetide isolated from the Sargasso Sea
MEADYIIVGAGSAGCATAFRLCEAGHRVIVLEYGGSDRSPLIQMPGALSYPMNMPKYDWGFFSEPEPYLNGRRLACPRGKVVGGSSSINGMVYVRGHALDYDTWSEMGASGWAYADILPYFKKLESWNSAGHGGDPAWRGKSGPLHVTRGSRSNKLVKAFVNAGCEAGYEVTDDYNGRKQEGFGPMDHTIFQGQRWSAAKAYLRPAIKTGLCRLISGFARKIIIENGIATGVEYDGISQAKAILNANKEVILSASSINSPKLLMLSGIGPARHLKENGIEVLADRPGVGQNLQDHLELYIQMAANEPVSLYKYWNLLGKAYVGLRWMISKTGPGASNQFESAAFIRTKAGVKYPDIQYHFLPIAVRYDGKAAVSGHGFQAHVGPMRSPSRGSVTLRSNDPYDHPAILFNYMSTEKDWDDFRICIRLTREIFEQPSIKKFIKYEIQPGDSLQTDDELDEFISQNVESAYHPCGTCKMGDISDPMAVVDKFTRVIGVEKLRVVDSSIFPQITNGNLNGPTIMVGEKASDHILGKDPMPRANENVWVHSNWEDQQR

SEQ ID NO: 89026 - protein, 538 aa, Unknown
  Bacterial polypetide isolated from the Sargasso Sea
MEDFNKAFDYIIVGAGSAGCTLANRLTEDVSRTVLLLEAGGKDSNPWIHIPVGFVKTLDMPGLNWRFETEPEPNSKNRRIPIPRGRVLGGSSSINGMVYVRGQPLDYDTWSQLGNRGWSYESVLPYFSKSENYESSDEAWRGKNGELVTAEGREKAELLDVVLDAAEQCGYPKNADYNSGEQEGFGYFQVTQKNGRRWSTAKAFLEPALKRPNLSLEINAHTTGILTDGGRATGVKFEQNGKTRTVTAAKGVVLCAGAVQSPQILELSGIGNPNILRQYGVEVVHPLPGVGENYQDHYMVRQTWEIKKKITLNEQTRGVSLIREALRYAFTRRGIMTYPAGILAGFVRTRPEIATPDVQYHIAHASFLDVKKRILDKHPGMTISPCQLRPESRGSIHIKSSNPEDQPAIKGNFLAEENDRRTLIEGMKIAKRIASAPALKDFVAKELNPNEEIQSDDELLDFARERGNTVYHPVGTCKMGSDPKAVVDDRLRVMGMQSLRVVDASIMPTLTSGNTNAPTIMIAEKAADMIKEDEASLR

SEQ ID NO: 89027 - protein, 481 aa, Unknown
  Bacterial polypetide isolated from the Sargasso Sea
MYDYIIVGAGSAGCVLANRLSANPTNKVLLLETGGSDKSIFIKMPTALSIPMNTEKYAWQFQTEQEPYLDNREMHCPRGKVLGGSSSINGMVYVRGHAKDFDEWEQHGAKDWDYQSCLPYFQKAETWYKGTDTYRGDTGNIGVNNGNEMKNPLYGAFVKAGEQAGYDITSDYNGQQQEGFGPMHMTVKGGVRSSTSREYLDPIKFRTNLTIVTGALVTKVILDNKVAKGVEYRVKGETQIASCAEEVILSAGSIGSPHILQLSGIGDTEVLSNAGIDTLHHLPGVGKNLQDHLEFYFQYKCKKPITLNRKLDVISKGMIGAQWLVNRSGLGATNHFESCAFIRSKAGVEWPDIQYHFLPAAIRYDGKSAFDGDGFQVHVGHNKPKSRGSVSVVSSDPTVAPKIRFNYLEHQDDIEGFRACVRLTREIISQPAFEAFSDGEIQPGEHVQTDEQIDAFVRQAVESAYHPSCSCKMGEDDMASR

SEQ ID NO: 89028 - protein, 352 aa, Unknown
  Bacterial polypetide isolated from the Sargasso Sea
MNKTYDFIIVGGGSAGCVLANRLSENPENHVLLLEAGRPDSIWDIFIHMPAGLSIPIGNRFYDWIYETEPEPYMNGRRIYQGRGKVLGGSSSINGMIFQRGNPQDYERWAADPGMEEWDYAHCLPYFKKMENCLAGGDDFRGDQGPLKVERGPASTPLFQAFFQAVQQAGFELTNDVNGFRQEGFAAFDKNVFRGRRLSAARAYLHPVMHRPNLEVICRAHALCIRFEGNRAVGVDFNHKGQTRSVQGGEIISCGGAFNSPQLLQLSGIGNPEDLEPLGIEIVQELPGVGENLQDHLEVYVQHACTQPVSMQPALRWWNKPWIGFQWLFFRKGPAATNHFEAGGFARKHDQV

SEQ ID NO: 89029 - protein, 199 aa, Unknown
  Bacterial polypetide isolated from the Sargasso Sea
LIFISFLTLAVRYDGKLPIKGHGFQAHVGPMRSKSRGYVALQSNDPKEAPKIQFNYMSHDSDWADFRNCIRLTREIFSQPAFGPFARMEVSPGDALQSDDQLNNYIRNNVESAYHPCGTCKMGDRADRMSVVDPETRVIGVDKLRVADSSIFPQITNGNLNAPSIMVGEKASDHILGKNLLPKSNDVPWIHPDWETTQR

SEQ ID NO: 89030 - protein, 500 aa, Unknown
  Bacterial polypetide isolated from the Sargasso Sea
MSREICGTIVNTDYVIVGAGSAGCAIAFRLTEAGYKVTVIEFGGGDGSPLIQMPAALSYPMNMQRYDWGYWSEPEPHLGGRKLACPRGKVLGGSSSINGMVYVRGHAKDFDNWAEMGAIGWSSADVLPYYKRLENWDSAGHSGEKSYRGTNGPLNITRGTRVNPLNLAFEKAGQQAGYHTTLDYNGKQQEGFGPMDQTIKNGKRWSSAKAYLEPAIKSGKCQIIRGLVTKIIINKKQAEGVEYFQNGKTEYVYASKEVIIAASAINSPKILLLSGIGPAEELKTNGIEVIADRPGVGKNLQDHLELYIQMMAKTPVSLYKYWNPLGKALVGLQWLLSKSGPGASNQFESAAFIRSKAGVEYPDIQYHFLPLAVRYDGKLPVKGHGFQAHVGPMRSKSRGYVALRSNNPTEAPKIQFNYMSHESDWSDFRNCIRLTREIFSQPAFKPFADSEISPGKAIQSDEQLNDFIRDNVESAYHPCGTCKMGNKTDPTSVVDSETRV

SEQ ID NO: 89031 - protein, 539 aa, Unknown
  Bacterial polypetide isolated from the Sargasso Sea
MESFDYVIIGAGSAGCVLANRLSANPNNKVLLLEAGGKDTYPWIHIPVGYYKTMHNPKVDWCFHTEKDETMNNRSIRYPRGKTLGGSSSINGLLWIRGQSNDYDNWRQQGNKGWGWDDVLPYFIKSENNELGKGKFHSDSGPIMVANKKIKLKMLDEFINAAEEKGIPKSEDFNTGDNFGVGFYQFTTSHSHFGLKLRCSAAKGYLNPVKSRSNLKIITNAHVQKINFENKKVVSVSYIHNDKLIETKSNKETILSAGSIGSPHILQVSGIGESKKLKEFNINIINELKGVGKNLQDHLMFRPVYKVKNLKSLNGKINSLFGNFLIGLEYIFNQSGPMTMGASQVCGFAKSDSSRETPNLQFHVQPISTDILGATKLHDFDGITPTVANIRPTSRGEINIVSNDMKDYPKIKMNYLSTEDDRYVAAQGLKLIRKIMLETKTFKKYEPEEYRPGIHIKEDEELVKAGSDYTQTIFHPVGTCKMGHDENAVVDDRLKVHGIENLRVVDASIMPNITSGNTNAPTIMIAEKASDMILEDRSK

SEQ ID NO: 89032 - protein, 566 aa, Unknown
  Bacterial polypetide isolated from the Sargasso Sea
MTTREYDYIICGAGSAGNVLATRLTEDPDVTVLLLEAGGPDYRFDFRTQMPAALAYPLQGRRYNWAYETDPEPHMDNRRMECGRGKGLGGSSLINGMCYIRGNALDYDNWSTHKGLENWTYLDCLPYFKKAETRDVGPNDYHGGSGPVSVTTSKPGVNPLFEAMVDAGVQAGYPRTDDLNGYQQEGFGPMDRTVTPKGRRASTARGYLDQAKVRSNLEIVTHALADRILFDGKRASGVTYLRGSERATAHARREVLVCSGAIASPQLLQRSGVGPGAWLKALDIPVVLDLPGVGQNLQDHLEMYIQYECKEPVSLYPALKWWNQPKIGLEWMLNGTGLGASNHFEAGGFIRTRDDDLWPNIQYHFLPVAINYNGSNAIEMHGFQAHVGSMRSPSRGRVKLRSRDPNDHPSILFNYMAEALDWREFRDAIRATREIMRQPALDRYRGRELNPGADCKSDKELDAFVRARAETAFHPSCSCKMGYDDMAVVDEEGRVHGLEGLRVVDASIMPIITTGNLNAPTIMIAEKIADRIRGRKPLARVDVPYFVANGAMARNVAKAVRQPETV

SEQ ID NO: 89033 - protein, 315 aa, Unknown
  Bacterial polypetide isolated from the Sargasso Sea
LVNGKTETAASNEVILSAGSIGSPHILQLSGIGDKDILEKAGVDVKHHLPGVGQNLQDHLEFYFQYKCKQPITLNRKLGLISKGLIGARWLLNRSGLGATNHFESCAFIRSKADVEWPDIQYHFLPAAIRYDGKSAFDGDGFQVHVGHNKPKSRGSVTLQSANPTVPPKILFNYLQHPDDIEGFRACVRLTREIIAQSAFDDFRDGEIQPGEHIQTDEEMDAFVREAVESAYHPSCSCKMGEDDMAVVDSQTNVHGIEGLRVVDSSIFPTIPNGNLNAPTIMVAEKAADIILGKPALPPQNVPVDIHPHWQTEQR

SEQ ID NO: 89034 - protein, 254 aa, Unknown
  Bacterial polypetide isolated from the Sargasso Sea
NARNRVSLYPALQWWNQPAIGLEWMLNGTGIGASNQFEAGGFIRTRDDDLWPNIQYHFLPVAINYNGSNAIKMHGFQAHVGSMRSPSRGRVKLKSRDPAAHPSILFNYMADPLDWREFRDGIRITRDIMRQPALDRYRGRELNPGADLTTDEQLDTFVRMRAETAFHPSCSCKMGYDDMAVVDGEGRVHGMEALRVVDASIMPQITTGNLNAPTIMLAEKIADRIRGRDALARVETPYFVARGVASRKREAAAV

SEQ ID NO: 89035 - protein, 275 aa, Unknown
  Bacterial polypetide isolated from the Sargasso Sea
MAEELKKLDISVQHDLRGVGENLQDHLETYLQYECTKPVTLYTSYNPIRMAFIGIEWFIFKSGVASYSNLETGGFVRSNDMVDYPNIQYHFFPSLVLDHGRQSPSSHSFQAHVGPMRPTSRGHVKLKSNNPSASPAIQFNYMQTEHDLKEMRDGIKIAREIFHQKAFDKYRGKEINPGINSSSEGDLNEFIKNKGDTAYHPSCTCKMGKDELSVVDEELKVYGVENLRVVDASIMPNIITGNLNATTVMIAEKASDLILKKETLPDVETSFYRAS

SEQ ID NO: 89036 - protein, 536 aa, Unknown
  Bacterial polypetide isolated from the Sargasso Sea
MESFDYIILGAGSAGCVLANRLSADPKNKVLLLEAGGKDNYPWIHIPVGYFKTMHNPKVDWCFRTEPDETMNNRSIRYPRGKTLGGSSSINGLLWVRGQSEDYNIWRQLGNTGWGWNDVLPYFLKSENNELGKSEFHNNSGPITVANKKINLKLLDEFQNAAEEYGIPKTNDFNTGDNTGIGFFQFTTSFNKPGLKLRCSAAKGYLKPAKKRNNLKIVVKAHVQKINFEGKKAIGASYYNGDKLIEVKANKEVILSSGSIGSPHILQVSGIGNKEKLKKLGIDIVHESNGVGLNLQDHLMFRPVYKVKNLKSLNRKVESIFGRFMMGLEYVLNQSGPVTMGASQVCGFVKSDPSRATPNLQFHVSPVSTDILGVTPMHDFEGITPTVANVRPTSRGEINIVSADSRIYPKIKMNYLSTNEDRKVAAEGLKIIRKIMLETETFKKYEPEEYRPGVHITDDEELVKEGSNFTQTIFHPVGTCKMGQDEMSVVDEKLRVRGVDNLRVIDASIMPNITSGNTNAPTIMIAEKGADMILQQ

SEQ ID NO: 89037 - protein, 462 aa, Unknown
  Bacterial polypetide isolated from the Sargasso Sea
MQTFDYIIVGAGSAGCVLANRLSENPKHKVLLLETGGSDKSIFIKMPTALSIPMNTDKYAWQFNTEKEPYLNNREMHCPRGKVLGGSSSINGMVYVRGHAKDFDEWEAHGAEGWNYQACLPYFQKAETWYKGNDAYRGGNGELGVNNGNEMKNPLYTAFIKAGEQAGYDITSDYNGKQQEGFGPMHMTVKDGVRSSASREYLDPVKSRKNLTIVTGALVTKVVLEDKVAKGVEYVVNGKAETAAASHEVILSAGSIGSPHILQLSGIGDKDILEKAGVDVKHHLPGVGQNLQDHLEFYFQYKCKQPITLNRKLGLISKGLIGARWLLNRSGLGATNHFESCAFIRSKADVEWPDIQYHFLPAAIRYDGKSAFDGDGFQVHVGHNKPKSRGSVTLQSANPTVPPKILFNYLQHPDDIEGFRACVRLTREIIAQSAFDDFRDGEIQPGEHIQTDEEIDAFVREA

SEQ ID NO: 89038 - protein, 552 aa, Unknown
  Bacterial polypetide isolated from the Sargasso Sea
MFENPDYIVIGSGSAGSTIAYRLGENPKLKILVLEFGGLDKSPFIQMPAALSYPMNMDKFDWGYKAEPEQALNGRSLACPRGKVIGGSSSINGMIYVRGNAGDYNQWAESGAKGWDYPDVLPYFQRMEASHGGNSEFRGKSGPLNITHGKRDNPLHNAFVKATEQAGYTYTEDYNGFRQEGFGPADMNVWKGSRFSTAKAYLKPALAKKNVHLITKVLVDRIIFSEDKAKGVEVFHQGQKKIFNANIGVVLSAGAINSPTILQRSGIGEGNDLNNLGIKVIKNLPGVGKNLQDHLEVYFQVKCLQPVTLNKYLNPFSKLLIGMQWMFLKSGPGSTNQFETLGFIRSDKNILYPDIQFHFLPVAIRYDGKAPSKGHGFQLHVGPMRSKSRGFVKLKSSNPFEAPIIKFNYMSHKDDFPNFRKSLRLSREILNQDALAPFKGSEIQPGDNVVSDEGLDEFIKNNCESAYHPCGTCKIGEEDDPSSVVQNDCKVKGFSNFYLADSSIFPQICNGNLNAPSIMTGEKASDHILGKPLLAPSNLQPYTHPNWQNSQR

SEQ ID NO: 89039 - protein, 539 aa, Unknown
  Bacterial polypetide isolated from the Sargasso Sea
MENFDYIIIGAGSAGCVLANRLSKNPKNKVLLLEAGGKDNYPWIHIPVGYYKTMHNPKVDWCFRTEKDETMNNRSIRYPRGKTLGGSSSINGLLWIRGQSNDYDNWRQQGNKGWGWDDVLPYFIKSENNELGKGKFHSDEGPIMVANKKIKLKMLDEFINAAEEKGIPKVNDFNTGDNFGVGFFQFTTTFNKLGLKLRYSAAKGYLNPAKKRSNLKIITNAHVQKINFEGKKASGIEYFLGENLRKISVNKEVILSAGSIGSPHILQVSGIGDGDKLSKIGIDLIKNLKGVGKNLQDHLMFRPVYKVKNLKSLNKKINSLFGKFLIGLEYIFNQSGPMTMGASQVCGFAKSDSSRETPNLQFHVQPISTDILGETKLHDFDGITPTVANIRPTSRGEINIVSKNIKDNPKIKMNYLSTDDDRYVAAQGLKLVRKIMLDTETFKKYEPEEYRPGAHIKDDEELVKAGSDYAQTIFHPVGTCKMGQDENSVVNDRLKVHGVENLRVVDASIMPNITSGNTNAPTIMIAEKASDMILEDNLQ

SEQ ID NO: 89040 - protein, 536 aa, Unknown
  Bacterial polypetide isolated from the Sargasso Sea
MENFDYIIIGAGSAGCVLANRLSSNPNNKVLLLEAGGKDNYPWIHIPVGYFKTMHNPKVDWCFHTEKDESMNNRSIRYPRGKTLGGSSSINGLLWIRGQKEDYDIWRQLGNTGWGWDDVLPYFLKSENNELGKSEFHNDSGPITVANKKINLKLLDEFQNAAEEYGIPKTIDFNTGNNFGIGFFQFTTSFNKFGLKLRCSAAKGYLNPIKKRSNLKIVVNAHVQKINFEGKKATGVSYYTGDKLNTVSAKKEVILSAGSIGSPHILQVSGIGDSHKLKNLGIKVIHELNGVGKNLQDHLMFRPVYKVKNLKSLNRKVESLFGRFLMGLEYVFNQSGPVTMGASQVCGFVKSDASRATPNLQFHVSPVSTDILGVTPMHDFEGITPTVANVRPTSRGEINIVSNDSRVYPKIKMNYLSTDEDRKVAAQGLKIIRKIMLETKTFKKYEPEEYRPGVHITEDEELVKAGADFTQTIFHPVGTCKMGNDDMAVVDDSLRVRGIQNLRVIDASIMPNITSGNTNAPTIMIAEKGADMILNG

SEQ ID NO: 89041 - protein, 337 aa, Unknown
  Bacterial polypetide isolated from the Sargasso Sea
MFEKPDYIVIGSGSAGSTIAYRLGENPQLKILVLEFGGNDNSPFIQMPAALSYPMNMNKFDWGYKAEPEPTLNGRSLVCPRGKVIGGSSSINGMIYVRGNAGDYNQWAESGAKGWDYPDVLPYFQRMEASHGGNSEFRGKSGPLNITHGKRDNPLHNAFVKATEQAGYTYTDDYNGFRQEGFGPADMTVWRGSRFSTAKAYLKPALAKKNVQLITKVLVDKIIFHEDKANGVEVFHRGQKKTFSANIGVILSAGAINSPTILQRSGIGEGNDLNSLGIKVIKNLPGVGKNLQDHLEVYFQVKCLQPVTLNKYLNPFSKLLIGMQWMFLKSGPKVQQT

SEQ ID NO: 89042 - protein, 534 aa, Unknown
  Bacterial polypetide isolated from the Sargasso Sea
YIIIGAGSAGCVLANRLTSKEENKVLLLEAGGNDDYPWIHIPVGYYKTMHNPKVDWCFRTEKDETMNNRSIRYPRGKTLGGSSSINGLLWIRGQSNDYNNWRQMGNNGWGWNDVLPYFLKSENNELGKSEYHNDSGPIMVSNKKIDLKMLDEFQNAAEECGIPKTKDFNTGDNTGIGFFQFTTNHNKSLLKLRCSAAKGYLNPVKKRKNLKIITDAHVQKINFKGTKADSVSFYRGDKVVTSKARKEIILSAGSIGSPHILQVSGIGNADKLSKIGIKTIHELKGVGMNLQDHLMFRPVYKVKNLKSLNGKINSLFGNFLIGLEYIFKQSGPMTMGASQVCGFAKSDPSKETPNLQFHVQPISTDILGASKLHDFDGITPTVANIRPSSRGEISIVSNDSRINPKIKMNYLSTQDDRIVAAQGLKLVRKIMLETETFKKYEPEEYRPGIHITEDEELVKAGSEFTQTIFHPVGTCKMGNDENAVVNDKLYVHGLQNLRVIDASIMPNITSGNTNAPTIMIAEKGAEFILSNQTK

SEQ ID NO: 89043 - protein, 142 aa, Unknown
  Bacterial polypetide isolated from the Sargasso Sea
MNLNRLKEEIEFILKNAGKYMTIKPNRDDIKSVFAGLRPLAATSDKKSTKEVSRSHKIDISPSGLISVLGGKWTTYRKIAEDAIDAAISINKLKKKKCRTEKTKLFGYKKNIDWSDQMHVYGSLKKKVESLGGKEDNKSLSS

SEQ ID NO: 89044 - protein, 219 aa, Unknown
  Bacterial polypetide isolated from the Sargasso Sea
MSPKPLNEEIDFILDNASRYMTLKPKKSDIKSAFAGLRPLAATSNKKSTKEVSRSHKIDIAPSGLISVLGGKWTTYRKIAEDAINAAISINRLKNKKCKTEKLKLAGYKKIVNWNDPMHVYGSQKKKVESLGGVNDNKSLSNKFHITNNIIEWSIIHEMALKIEDVLARRTRCIFLDAKESKRIAPQVAKKMAKVLEKDQEWIDEELKNFNKLIKNYMT

SEQ ID NO: 89045 - protein, 272 aa, Unknown
  Bacterial polypetide isolated from the Sargasso Sea
GVIYHDGQFDDSRMAITLALTADSKKTALLNYCSVEKLLKDKDEIIGVEFQDTLNSKKYKVKGKVVINATGVFAEEIIRMDQPDIDKMIQPSQGVHIVLEKKFLKSKHAILIPQTSDGRVLFAVPWKNYVVVGTTDTQVKTASIEPSPLKDEIEFILNNASQYMSVKPKISDIKSVFAGLRPLAATSNKKSTKEVSRSHKIDIAPSGLISVLGGKWTTYRKIAEDAINAAISINKLNKKKCKTQKTKLFGYKKRVEWSDPMHVYGSLKKEVE

SEQ ID NO: 89046 - protein, 140 aa, Unknown
  Bacterial polypetide isolated from the Sargasso Sea
LPAPLRGSALYRHGDRTPAWLGDTRQHRSLICECEMVTAGEVQYAVENLAVNSLLDLRRRTRIGMGTCQGELCACRAAGLLQRFNITTPAQSLTQLSDFLNERWKGVQPIAWGDALRESEFTRWVYLGLCGLPKESQDEI

SEQ ID NO: 89047 - protein, 209 aa, Unknown
  Bacterial polypetide isolated from the Sargasso Sea
KFILKNAGSYMKSAPTIKDIKSVFAGLRPLAAPENNEKATKEISRHHKVTVSTSGLISILGGKWTTYRKMAEDTVNTARSVAGLQERECITHNLTIHGYDYSSNWENPIHFYGTDIEKIENLCNEGNISISEKFFISKNQIIWSIRNEMAMTLEDVMARRTRSLFLDARESLKISPKVLEIMAKEMKKNIDWIKNESANFEKIARNYIV

SEQ ID NO: 89048 - protein, 251 aa, Unknown
  Bacterial polypetide isolated from the Sargasso Sea
MKRITTQVVIIGGGATGAGIMRDCALRGIDCILLERDDIAAGTTGRNHGLLHSGARYAVTDQESARECIQENRILKRIASHCVEDTGGLFITLPEDDINFQNTFMDACALAGIDARQLDPADALRLEPNVNPALIGAIQVPDGTVDPFRLAAANVLDAKEHGARIFTHSKVLGLLRTQDRVHGVKAINTRTGEAFEVECQEVINAAGIWGQQICEYADLGIRMFPAKGSLLIMDYRINQLVLNRARKPADA

SEQ ID NO: 89049 - protein, 383 aa, Unknown
  Bacterial polypetide isolated from the Sargasso Sea
MSKVFDLFIIGGGINGAGLARDAAGRGLSVCLADKGEIGGATSSWSTKLIHGGLRYLENYEFKLVRESLKERETIYKIAKPISKPIPFIIPYVDKIRPAWLIKIGLFLYDNLGGKTIIPKSNTLDISKKLPNILKKKYKTGFQYFDVQIDDKKLTKLNIKSAKRYKAKVLEYNKVKKAEIDGNEWVIHLQKGKKIKSKILINASGPWINETLKKNIKIKSKNKIRLVKGSHIITKKLYKKDVAFTFQNTDKRIIFVIPYKKKFSLIGTTEVEVKSPENKEISKKEIQYLIRSVNNYLEKQISTKDIVDSYSGIRPLIEDFNQASKVTRDYIFDLNIIKKLPLLSIYGGKLTTYRKLAENVLLDLEKFLPKTKMGPWTHKKNLF

SEQ ID NO: 89050 - protein, 461 aa, Unknown
  Bacterial polypetide isolated from the Sargasso Sea
MPCAKPNLPTGSTRGCSALASGRPPTWWPSRPSRSTPAPQIPPRSAAMKFDSIVIGGGMAGLSAALRLAEAGQKTLLMASGQSALHFSSGSVDLLESEGDPRAALPAFMAANPEHPYNKVGLTHIAASLDDLQRHCAAQGLPLFRQERNHQRLTPIGTLKATWLSPDTCACVTDAPAPDAILLATLEGFRDFHPELAAANLATHTRFAHCRILTGELRLPQLAEFSRNPHEFRSADIARLFDKQGNGQRDLLTDLAREISRLVQESGEPRCHHLVLPACLSLGLVGPRLAELEQRTGCIIKEVATMPPSLIGMRMQEALKRRFMALGGTFLTSERVLGARYEGDRVIGVHSQNGDDQLFEADHFVLASGSFFSRGLESRLRGIREPIFNADVLSLPERDAWAGRRLFDHHPFMGFGVKTDDKLRVLRGGKPLANLYGAGSVLAHYDPIKEGSGSGVAVATG

SEQ ID NO: 89051 - protein, 216 aa, Unknown
  Bacterial polypetide isolated from the Sargasso Sea
RNVSRGIVLFDHAQRDGLEGFITITGGKLMTYRLMAEWATDAVCRKLGNTQPCTTADTALPGSQESTEHTLKRVISLPAPLRGSAVYRHGDRTPAWLSEGRQHRSLVCECEAVTAGEVQYAVENLTVNSLLDLRRRTRVGMGTCQGELCACRAAGLLQRFNVTTAAQSITQLSDFLNERWKGVQPIAWGDALRESEFTRWVYQGLCGLEKEHQDEI

SEQ ID NO: 89052 - protein, 83 aa, Unknown
  Bacterial polypetide isolated from the Sargasso Sea
MKFDTVIIGGGLAGLLCGLQLQKSGLRCTIVTRGQSALHFSSGSLDLLSSLPDGQPVTDIEAGLNALHTQAPAHPYSTIGNAE

SEQ ID NO: 89053 - protein, 383 aa, Unknown
  Bacterial polypetide isolated from the Sargasso Sea
MSKKFDLFIIGGGINGAGIARDAAGRGLSVCLADKGEIGGATSSWSTKLVHGGLRYLENYEFKLVRESLKEREIVYKIARHISKPIPFIIPYADKIRPAWLIKIGLFLYDNLGGKSNIPKSKTFDLTKKFSNILKQKYKTGFQYFDIQIDDKKLTKLNAKDAKRNKAKILEYNKVKKAEIIGNEWIISLEKGEKVKSKILINASGPWINETLNKNIKIKSKKKIRLVKGSHIITKKLYKENVAFTFQNTDKRIIFVIPYKGKFSLIGTTEVEVKSPENKGISKKEITYLIRSVNNYLKKQIRTKDIVDTYSGIRPLIEDFNTASKVTRDYVFDLKIIKKLPLLNIYGGKLTTYRKLSEKVLFDLRKFLPKTKKGPWTHKKKLL

SEQ ID NO: 89054 - protein, 380 aa, Unknown
  Bacterial polypetide isolated from the Sargasso Sea
MYDIFIIGGGINGAGIARDASGRDLKVYLAEKGKVGSATSSWSSKLIHGGLRYLENYELKLVRESLKEREIITNIAPNITKSIPFVIPHTKKLRSKFLIRLGLFLYDNLGGKSKIPKSSKINFNKKYQNILQSKFSDGFQYYDVQVDDKKLVEMNIDDAKKMGAIIAEDTKVINANRIDNYWEITLNNKNKIKSKILINAAGPWINETVNNVLKINAKKSIRLVRGSHIITKKLYEEEVAFTLQNDDNRIVFVIPYKDEYSLIGTTEVDVHSPDNPSISDEEKIYLINTINNHFIRQISQEDIVDTYSGIRPLIEDFKEASKVTRDYVFDLNCEDNNVPLLNIYGGKLTTYRKLSEKVMEELSPYLPDTKTRNWTDSKPL

SEQ ID NO: 89055 - protein, 383 aa, Unknown
  Bacterial polypetide isolated from the Sargasso Sea
MSKVFDLFIIGGGINGAGIARDAAGRGLSVCLADKGEIGGATSSWSTKLVHGGLRYLENYEFKLVRESLKEREIVYKIARHISKPIPFIIPYADKIRPAWLIKIGLFFYDNLGGKSNIPKSKTFDLTKKFPNILKEKYKTGFQYFDIQIDDKKLTKLNAKDAKRNNAKILEYNKVKKAEIIGNEWIISLENDEKVKSKILINASGPWINETLIKNIKIKSKKKIRLVKGSHIITKKLYKENVAFTFQNTDKRIIFVIPYKGKFSLIGTTEVEVKSPENKGISKKEIRYLIQSVNNYLKKQIRTKDIVDTYSGIRPLIEDFNTASKVTRDYVFDLKIIKKLPLLNIYGGKLTTYRKLSEKVLIDLRKFLPKTKKGPWTDKKKLF

SEQ ID NO: 89056 - protein, 383 aa, Unknown
  Bacterial polypetide isolated from the Sargasso Sea
MSKIFDLFIIGGGINGAGIARDAAGRGLSVCLADKGEIGGATSSWSTKLVHGGLRYLENYEFKLVRESLKEREIVYKIAKHISKPIPFIIPYADKIRPAWLIKFGLFLYDNLGGKSNIPKSKKFDLTKKYSNILKEKYKTGFQYFDIQIDDKKLTKLNAQDAKRNNAKILEYNKVKKAEIINNEWVISLQNGKKIKSKVLINASGPWINETLNKNIKIKSKKKIRLVKGSHIITKKLYKENVAFTFQNTDKRIIFVLPYKGKFSLIGTTEVEVKSPENKGISKKEISYLINSVNNYLKKQIRTKDIVDTYSGIRPLIEDFNSASKVTRDYVFDLKIIKKLPLLNIYGGKLTTYRKLSEKVLVDLKRFLPKTKKGPWTHKKKLF

SEQ ID NO: 89057 - protein, 383 aa, Unknown
  Bacterial polypetide isolated from the Sargasso Sea
MSKVFDLFIIGGGINGAGIARDASGRGLSVCLADKGEIGGATSSWSTKLIHGGLRYLENYEFKLVRESLKEREIVYKIAKHISRPIPFIIPHTDKIRPAWLIKFGLFLYDNLGGKTNIPKSKTFDLNKKFPNILKEKYKTGFQYFDIQIDDKKLTKLNARDAKRNKAKILEYNKVKKAEIINNEWVINLQDGKKIKSKVLINASGPWINDTLNKNIKIKSKNKIRLVKGSHIITKKLYKEDVAFTFQNTDKRIIFVIPYKKKFSLIGTTEVEVKSPENNGISNQEIQYLIKSVNNYLKKQIKKKDIVDTYSGIRPLIEDFKEASKVTRDYVFDLHIVKKLPLLNIYGGKLTTYRKLSEKVLIDLKKFLPKTKKGPWTDKKRLF

SEQ ID NO: 89058 - protein, 383 aa, Unknown
  Bacterial polypetide isolated from the Sargasso Sea
MSKIFDLFIIGGGINGAGIARDAAGRGLSVCLADKGEIGGATSSWSTKLIHGGLRYLENYEFKLVRESLREREIVYKIAKHISKPIPFIIPYADKIRPAWLIKIGLFLYDNLGGKSNIPKSKTFDLRKKFSNILKEKYKTGFQYFDIQIDDKKLTKLNTKDAKRNNAKILEYNKVKKAEIIGNEWIISLENGEKVKSKILINASGPWINETLNKNIKIKSKKKIRLVKGSHIITKKLYKENVAFTFQNTDKRIIFVIPYKGKFSLIGTTEEEVKSPENKGISKKEIRYLISSVNNYLKKQITSKDIVDTYSGIRPLIEDFKTASKVTRDYVFDLKIIKKLPLLNIYGGKLTTYRKLSEKVLIDLEKFLPKTKKGPWTHKKKLL

SEQ ID NO: 89059 - protein, 486 aa, Unknown
  Bacterial polypetide isolated from the Sargasso Sea
METKDLIVIGGGINGAGIAADAAGRGLSVLMLEAQDLACATSSASSKLIHGGLRYLEHYEFRLVSEALAEREVLLKMAPHIAFPMRFRLPHRPHLRPAWMIRIGLFMYDHLGKRTSLPSSTGLRFGADSVMKPEIVRGFEYSDCWVDDARLVLANAQMVVRKGGEVLTRTRATSARRENGLWIVEAEDIDTGKKHTWQARGLVNATGPWVKEFFDDGMHLPSPYGIRLIKGSHIVVPRVHTQKQAYILQNEDKRIVFVIPWMDEFSIIGTTDVEYKGDPKAVKIDESEINYLLKVYNAHFKKQLGRDDIVWTYSGVRPLCDDESDSPQAITRDYTLDIHDENGKAPLLSVFGGKLTTYRKLAEHAMEKLASYYQGIGPAWTKECILPGGDIGGDREDYAAKLRRRYPFLTESLARHYSRTYGSNTEWVIGEATSLAELGEDFGHEFYEAELKYLVDHEWVRRAEDALWRRTKEGMWLNAEQQSRMT

SEQ ID NO: 89060 - protein, 383 aa, Unknown
  Bacterial polypetide isolated from the Sargasso Sea
MNETFDILIIGGGINGAGIVRDASGRNLKVCLVEKNTVGSATSSWSTKLIHGGLRYLENYEFRLVRESLKEREVIKKIASNITTPLPFIIPYQKSLRPKWLIKLGLFLYDNIGGKMTIPKSSTINIKKEMPNILKDQFKIGFQYYDLQVDDKKLVQLNVEDAKKKGATIIQNRKVIDAKRNKNIWDITLDDNTILKSKILINAAGPWINEVLSNVIKLNSNKSIRLVKGSHIITKSLYSQKKAFTLQNEDNRIIFVIPYKDEYSLIGTTETEVFSPENPKIDESEIDYLLNSVNKYFIKQISRVDVVSSYSGIRPLIEDFKEASKVTRDYIFDLNEDGSQAPLLNIYGGKLTTYRKLAENVLLTLNKHIPINKENSWTAKQKL

SEQ ID NO: 89061 - protein, 383 aa, Unknown
  Bacterial polypetide isolated from the Sargasso Sea
MSKVFDLFIIGGGINGAGIARDAAGRGLSVCLADKGEIGGATSSWSTKLIHGGLRYLENYEFKLVRESLKEREIVYKIARHISKPIPFIIPHTDKIRPAWLIKFGLFLYDNLGGKTNIPKSKTYDLAKKFPNILKEKYKTGFQYYDIQIDDKKLTKLNAKDAKRNKAKILEYSKVKKAEIIDNEWVISLQNRKKIKSKVLINASGPWINETLHKNIKIKSTKKIRLVKGSHIITKKLYKADVAFTFQNTDKRIIFVIPYKKKFSLIGTTEIEVKSPENKGISNKEIKYLINSVNNYLKKQISKKDIVDTYSGIRPLIEDFKAASKVTRDYVFDLKIIKKLPLLNIYGGKLTTYRKLSEKVLIDLKKFLPKTKKGPWTDKKKLF

SEQ ID NO: 89062 - protein, 310 aa, Unknown
  Bacterial polypetide isolated from the Sargasso Sea
AGIARDCALRGLHVTLVERHDIATGATGRNHGLLHSGARYAVTDGESARECISENRILRRIARHCIEPTNGLFITLPEDDLAWQQTFISACQQTGIKTRQLSPAEALRIEPTVNPTLLGAVQVPDGTIDPFRLTAANMLDAREHGATILTGCEITGLIRRGERVCGVEFYDHQQRERRTLYAGVVVNAAGIWGQRIAEYADLRIAMFPAKGSLLILDHRINRQVINRCRKPADADILVPGDTISLIGTTSEHIPYDEIDDNRVTTAEVDTLLREGEKLAPVLGRTRVLRAYSGVRPLVASDDDPSGRSVS

SEQ ID NO: 89063 - protein, 296 aa, Unknown
  Bacterial polypetide isolated from the Sargasso Sea
LSSPEVPVWPLSAQRICVVGISGLLDFQAHLAAASLRQRNLSVETAEIELPELDVLRDNPTEFRAVNIARLLDNEDKWSLLYDALLPMAKTCDMIIMPACFGLADERLWQWLNERLPCSLTLLPTLPPSVLGMRLHNKLQRQFVRQGGVWMPGDEVKKITCQDGVVSEIWTRNHADIPLRPRFAVLASGSFFSSGLVATREAIHEPILGLDVQQTATRAEWYQRDVFDPQPWQLFGVTTDATLRPSLAGKTIENMYAIGSVLGGFDPIAQGCGGGVCAVSALHAAHHIAKRAGGQQ

SEQ ID NO: 89064 - protein, 251 aa, Unknown
  Bacterial polypetide isolated from the Sargasso Sea
MKTRDSQTSDVIIIGGGATGAGIARDCALRGLRVILVERHDIATGATGRNHGLLHSGARYAVTDAESARECISENQILKRIARHCVEPTDGLFITLPEDELSFQATFIRACEEAGIRAEAIDPQQARIIEPSVNPQLIGAVKVPDGTVDPFRLTAANMLDAREHGAVILTAHEVTGLLREGATVCGVNVRNHLTGEMQSLHAPVVVNAAGIWGQRIAEYADLSIRMFPAKGSLLIMDHRINQHVINRCRKP

SEQ ID NO: 89065 - protein, 137 aa, Unknown
  Bacterial polypetide isolated from the Sargasso Sea
MSEFNEQSGTRRDFLYVSTAAVGAITVGGAIWPLINQMNPSADVKALASIEVDVAGLEPGSQLTVKWLGKPVFIRRRTKDEIEAARSVDLALLPDQTSGNKNITESDASDANRTIDPAGEWLVMIGVCTHLGCVPLG

SEQ ID NO: 89066 - protein, 158 aa, Unknown
  Bacterial polypetide isolated from the Sargasso Sea
MNTNTKNKPSPIDEEKRDFLFITTAGLAIAGGGAFAWSMIDTMNPSKDVLALSTTEVDLSPLEEGQSLTVMWRGKPIFIRHRSESEISSADNVSVDDLPHKETDESRVKNPKWLVVVGVCSHLGCVPLGQKVGDSKGEYGGWFCPCHGSHYDTSGRIR

SEQ ID NO: 89067 - protein, 133 aa, Unknown
  Bacterial polypetide isolated from the Sargasso Sea
MIVFHRLAEYSTTAVNSGAVTRALKTPAHSIEYDVSNHTVAKAGDPDKRAFTYFVMTGGRMIYASALRLAVLKFLMSMSASADVLALASLEVDLSKVESGSTVTVKWRGKPVFIRRRTPAEVAKEAAVDVASL

SEQ ID NO: 89068 - protein, 41 aa, Unknown
  Bacterial polypetide isolated from the Sargasso Sea
MVCPCHGSHYDISGRIRKGPAPENLEVPPYSFVSENVIKIG

SEQ ID NO: 89069 - protein, 310 aa, Unknown
  Bacterial polypetide isolated from the Sargasso Sea
FQKMTENPEFIDMEFSTSFAEISSWAPLITKNRNPSTNIAATRIGRGTDINFEALTKEYLSLVSLNKNVEIRYKTELVNLKKIDKKQWELEISSEGRKSSIRTGYVFLGAGGKTINYLQKSKIPEGKNYGGFPVSGKWLICEKKDLTEKHNSKVYGKADIGSPPMSVPHLDTRWIDNKKLLLYGPFAGFTTKFLKQSSYLDLFSSIKKNNIFSMLDVGFKNNDLINYLISQSLKNHNSRVENLKNMMPSANSSDWYLKNAGQRVQIIKKTEAGGSLKFGTEVVNSSDGSLSALLGASPGASTAVSIMVRF

SEQ ID NO: 89070 - protein, 130 aa, Unknown
  Bacterial polypetide isolated from the Sargasso Sea
MSKEEKKVNRRDFLFTASYTVGAVGVGAVIWPMIDQMNPDKAQQALATTEVDISNIEPGKSITVLWRGKPVFLKRRTPEEIAEARAVNMDDLPDPQKDEERVKEGKDEWLVMLGVCTHLGCVPLKDKGDF

SEQ ID NO: 89071 - protein, 134 aa, Unknown
  Bacterial polypetide isolated from the Sargasso Sea
MSNSNKPSNRRKFLTNLTQIMGGVGGVFALIPFLSTMSPSEKAKSAGAPVEIDVSTLMPGSYKVVEWRGKPVWVVRRTEEMILNTLENDEILSDPNSLEEHQPSYTQNKYRSINPEFLVLLGVCTHLGCSPLYK

SEQ ID NO: 89072 - protein, 217 aa, Unknown
  Bacterial polypetide isolated from the Sargasso Sea
METKLIDVMGTDLTVVNAARVSFGKKKEKFEKGDEKLIKYLAKHNHWSPFGHCMLQFHIKAPVFVARQLVKHQIGLVWNEISRRYVDTEPEFYEVDKWRGKPIDKKQGSDGEVEKQGSCYHSKQMVENNARIAYNSLLDAGVAPEQARMVLPQSLMTEWYWSGSLYAFARVCNLRCAKDSQYETRLIANEIDKQCEIKFPVSWKELRTWVEKDTQNT

SEQ ID NO: 89073 - protein, 189 aa, Unknown
  Bacterial polypetide isolated from the Sargasso Sea
MSEVDLKKRRLLQSAGAWGVLGAVGAAVPFLQSLNPSRVTRLKGMPVEVDVSNMSDGQQKTVMWRGKPVWIIKRSKEMLTSLDVLKGNLKDPSSESSSQPSYAQNQYRSVDPNYLVLLGVCTHLGCAPTYRPEKGAIDSEWQGGFFCSCHGSKFDLAGRVFEGVPAPTNLEVPPHHFQEGSLVIGEDGE

SEQ ID NO: 89074 - protein, 121 aa, Unknown
  Bacterial polypetide isolated from the Sargasso Sea
MDKSDKKTTRRDFLFTTSYTVGAVGLGAVIWPLIDQMNPDRAQKALATTEVDISQIEPGKSITVLWRGKPVFLKRRTQEEILEARSVSLEDLPHPEKDEERVKSGKDEWLVMLGVCTHLGC

SEQ ID NO: 89075 - protein, 123 aa, Unknown
  Bacterial polypetide isolated from the Sargasso Sea
MPEEKKTKRRDFLFTASYTVGAVGIAASVWPLVDQMNPDTSVKALASTEVDVSSLEPGNSITVLWRGKPVFIKRRTQKEIAEARDVKLEDLKHPEKDEDRAKNPEWLVMLGVCTHLGCVPLGD

SEQ ID NO: 89076 - protein, 39 aa, Unknown
  Bacterial polypetide isolated from the Sargasso Sea
CPCHGSHYDTSGRIRKGPAPTNLEVPKYEFVNSNLIKIG

SEQ ID NO: 89077 - protein, 45 aa, Unknown
  Bacterial polypetide isolated from the Sargasso Sea
DYNAWFCPCHGSHYDTSGRIRKGPAPTNLEIPKYEFVDNNIIKIE

SEQ ID NO: 89078 - protein, 123 aa, Unknown
  Bacterial polypetide isolated from the Sargasso Sea
MSKEEKKVNRRDFLFTASYTVGAVGVGAVIWPMIDQMNPDKAQQALATTEVDVSSIEPGKSVTVLWRGKPIFIKKRTSEEIAEARAVKLDDLPDPQKDEDRVKEGKDEWLVMLGVCTHLGCVP

SEQ ID NO: 89079 - protein, 36 aa, Unknown
  Bacterial polypetide isolated from the Sargasso Sea
MSSKALGCVPLSDKGEYDGWFCPCHGSHYDTSGRIR

SEQ ID NO: 89080 - protein, 39 aa, Unknown
  Bacterial polypetide isolated from the Sargasso Sea
CPCHGSHYDTSGRIRKGPAPTILEIPDYVFLNDNTIKIG

SEQ ID NO: 89081 - protein, 130 aa, Unknown
  Bacterial polypetide isolated from the Sargasso Sea
MSDQKKPKRRDFLFTASYAIGAVGIGAAVWPLVDQMNPDRSVKALASTEVDVSSLEPGKSITVLWRGKPVFIKRRTQDEIAEARSVDLKDLPHPEKDEDRAKNPEWLVMLGVCTHLGCVPLGDKGEYNGW

SEQ ID NO: 89082 - protein, 130 aa, Unknown
  Bacterial polypetide isolated from the Sargasso Sea
MQEKDKTRRKVLIGLTSAVGLSGLPFAATPFIAAWNPSAKAKAAGAPVKLDVSKMQYGQQIQVAWRKQPVFIVRHTKESLASLDLTLPKLADPNSDQIVELYKGLNPSRSKSPEYSVMSGVCTHLGCAPK

SEQ ID NO: 89083 - protein, 40 aa, Unknown
  Bacterial polypetide isolated from the Sargasso Sea
FCPCHGSHYDTSGRIRKGPAPTNMEVPKYVFVNSTTIKIG

SEQ ID NO: 89084 - protein, 51 aa, Unknown
  Bacterial polypetide isolated from the Sargasso Sea
LTNKGDYEGGWFCPCHGSHYDTSGRIRSGPAPTNLEVPEYKFVDSNTIKIG

SEQ ID NO: 89085 - protein, 193 aa, Unknown
  Bacterial polypetide isolated from the Sargasso Sea
MQDKDKTRRKVLIGLTSAVGLSGLPFAATPFIAAWNPSAKAKAAGAAVKLDVSKMQYGQQIQVSWRKQPVFIVRHTEESIASLDLALPKLADPNSDQIEEPYRGLNPSRSKSPEYSVFSGVCTHLGCAPKYFPEIEPKPWDASWNGGFFCPCHGSMFDIVGRVFKGVPAPTNLIVPPHMFDGSILTIGEDKEL

SEQ ID NO: 89086 - protein, 49 aa, Unknown
  Bacterial polypetide isolated from the Sargasso Sea
SDKGEYNGWFCPCHGSHYDTSGRIRKGPAPTNMEVPKYEFVNSNTIKIG

SEQ ID NO: 89087 - protein, 170 aa, Unknown
  Bacterial polypetide isolated from the Sargasso Sea
MDKSGKKDRRDFLFTASYTVGAIGIGATVWPFIDQMNPDSSVKALASTEVDLSQIQPGKAITVLWRGKPVFIKRRTSEEIAEAKKVNLEDLKHPEKDEDRVKKEEWLVMLGICTHLGCVPLSDKGDFNGWFCPCHGSHYDTSGRIRKGPAPTNMEVPKYEFVDNNTIKIG

SEQ ID NO: 89088 - protein, 148 aa, Unknown
  Bacterial polypetide isolated from the Sargasso Sea
MSDINDQPTRRDFIHVASVSAAALGAACVAWPLIDQMNPAADTLALSTTEFDVSGVQEGMSVSVVWRGKPVFVRHRTKAEIEEAAAVELSDLPDPQTDADRTPRPEILVLLGVCTHLGCVPLGQKATDPKGEWGGWFCPCHGSHYDTS

SEQ ID NO: 89089 - protein, 122 aa, Unknown
  Bacterial polypetide isolated from the Sargasso Sea
MEEDKKTNRRDFIFTASYALGAVGVGAAVWPLIDQMNPDASVKALASTEVDISGVEKGQSITVLWRGKPVFIRRRTDEEIEKAKDVKLEDLPHPETDEERAKNPEWLVMLGVCTHLGCVPLG

SEQ ID NO: 89090 - protein, 131 aa, Unknown
  Bacterial polypetide isolated from the Sargasso Sea
VSWRKQPVFIVRHTEESIASLDLALPKLADPNSDQIEEPYRGLNPSRSKSPEYSVFSGVCTHLGCAPKYFPEIEPKPWDATWNGGFFCPCHGSMFDIVGRVFKGVPAPTNLIVPPHMFDGSILTIGEDKEL

SEQ ID NO: 89091 - protein, 82 aa, Unknown
  Bacterial polypetide isolated from the Sargasso Sea
KNPEFFIVEGVCTHLGCAPIEKFAIAPADMGPDWKGGFYCPCHGSKFDLSGRVYAGVPAPSNLRVPAHQFIDETTLLVGENS

SEQ ID NO: 89092 - protein, 193 aa, Unknown
  Bacterial polypetide isolated from the Sargasso Sea
MQDKDKTRRKVLIGLTSAVGLSGIPFAATPFIAAWNPSAKAKAAGAPVKLDVSKMQYGQQIQVSWRKQPVFIVRHTDNSLKSLDLSVSKLADPNSDQIEEPYRGLNLSRSKSPEYSVFSGVCTHLGCAPKYFPEIEPKPWDASWKGGFFCPCHGSMFDIVGRVFKGVPAPTNLLVPPHMFDGSILTIGEDREL

SEQ ID NO: 89093 - protein, 191 aa, Unknown
  Bacterial polypetide isolated from the Sargasso Sea
MSENLNRRKFLSIATSVTSAVGGIFALGAFVSTFQPSKKAKALGASIRVSLSKLEPGSIIKVIYRGKPIWVLRRTEQMINELDNENSNLRDPESDLSVQPDFAKNRFRSKNPEFFVVEGVCTHLGCAPIEKFAIAPADMGPDWKGGFYCPCHGSKFDLSGRVYAGVPAPSNLRVPAHQFIDETTLLVGENS

SEQ ID NO: 89094 - protein, 170 aa, Unknown
  Bacterial polypetide isolated from the Sargasso Sea
MSKEIKPKRRDFLYTATYTIGAVGLGATIWPLVDQMNPDSSVKALSTTEIDISSIEAGKTITVLWRGKPIFIRRRTKKEISEASKVDLKDLKDPEKDSDRTKNPEWLVMVGVCTHLGCVPLGDKGEYKAWFCPCHGSHYDTSGRIRKGPAPKNLEIPKYEFVNSSTIKIG

SEQ ID NO: 89095 - protein, 134 aa, Unknown
  Bacterial polypetide isolated from the Sargasso Sea
NPDASVKALASTEVDISSVEPGNTITVLWRGKPVFIRRRTQDEISEARSVKLEELPHPEKDEDRAKNPEWLVMLGICTHLGCVPLNDKGDYDGWFCPCHGSHYDTSGRIRKGPAPTNMEVPKYEFVNSNTIKIG

SEQ ID NO: 89096 - protein, 130 aa, Unknown
  Bacterial polypetide isolated from the Sargasso Sea
SWRKQPVFIVRHTKESIANLELGLTKLADPNSDQIEEPYKGLNPSRSKSPEYSVFSGVCTHLGCAPKYFPEVEPKPWDATWNGGFFCPCHGSMFDIVGRVFKGVPAPTNLIVPPHMFEGSILTIGEDKEL

SEQ ID NO: 89097 - protein, 156 aa, Unknown
  Bacterial polypetide isolated from the Sargasso Sea
MQEKDKTRRKVLIGLTSAVGLSGIPFAATPFIAAWNPSAKAKAAGAPVKLDVSKMQFGQQIQVSWRKQPVFIVRHTEESIANLELGVTKLADPNSDQIEEPYKGLNPSRSKSPEYSVFSGVCTHLGCAPKYFPEIEPKPWDATWNGGFFCPCHGSM

SEQ ID NO: 89098 - protein, 191 aa, Unknown
  Bacterial polypetide isolated from the Sargasso Sea
MEKVGVTDSESQENDSSPHEETRRDFLMISTVSVGAIGAGLAAWPFIDLMNPSKDVLALASTEIDLSGIEEGQSITAMWRGKPIFIRRRTDREINEAQTVKLSDLKDPETDDQRVKKGKSQWLVMVGICTHLGCIPMGNKSGQTRGEYNGWFCPCHGSHYDTSGRIRKGPAPKNFPIPPYKFLSDNTILIG

SEQ ID NO: 89099 - protein, 194 aa, Unknown
  Bacterial polypetide isolated from the Sargasso Sea
MEEKNTTRRKVLISMTSAVGAVGASFAVVPFIASWNPSAKAKAVGGPVKVDVSKMQVGQKIQVSWRKQPVFVIRHSKEALAGLSKVESKLDDPSSLKIDEPYRDVNPTRSTSNEYTVIAGVCTHLGCAPKYYPEMESQPWDESWVGGFFCPCHGSMFDIVGRVFKGVPAPTNLKVPPHYFDGSILTIGEERGTA

SEQ ID NO: 89100 - protein, 120 aa, Unknown
  Bacterial polypetide isolated from the Sargasso Sea
MSDKKPKRREFLFTASYAVGAVGLGAAAWPLVDQMNPDASVKALASTEVDVSSVQPGNTITVLWRGKPVFIRRRTKEEIEEARSVKMEELIHPEKDEDRAKNPEWLVMLGVCTHLGCVPL

SEQ ID NO: 89101 - protein, 170 aa, Unknown
  Bacterial polypetide isolated from the Sargasso Sea
MSDKKKIHRRDFIFTASYALGAVGVGSVVWPLVDQMNPDRSVKALASTEVDISSLEPGKSITVLWRGKPVFIKRRTQKEIEEARNVKIEDLPHPEKDEDRAKNPEWLVMLGICTHLGCVPLGDKGEYNGWFCPCHGSHYDTSGRIRKGPAPTNLEVPKYEFVNNNTIKIG

SEQ ID NO: 89102 - protein, 44 aa, Unknown
  Bacterial polypetide isolated from the Sargasso Sea
FNGWFCPCHGSHYDTSGRIRKGPAPENLAVPKAVFVDDTTIKLG

SEQ ID NO: 89103 - protein, 122 aa, Unknown
  Bacterial polypetide isolated from the Sargasso Sea
EVDISQIDPGKSITVLWRGKPVFIKRRTDSEISEAQSVSLDDLKHPEKDEDRVKKAEWLVMMGICSHLGCVPLSDKGEYNGWFCPCHGSHYDTSGRIRKGPAPTNMEIPKYAFVDENTIRIG

SEQ ID NO: 89104 - protein, 65 aa, Unknown
  Bacterial polypetide isolated from the Sargasso Sea
WLVMLGVCTHLGCVPLTDKGDYNAWFCPCHGSHYDTSGRIRKGPAPTNLEIPKYVFLNSTTIKIG

SEQ ID NO: 89105 - protein, 42 aa, Unknown
  Bacterial polypetide isolated from the Sargasso Sea
GWFCPCHGSHYDTSGRIRKGPAPLNLEIPPYEFVSDDIIRIG

SEQ ID NO: 89106 - protein, 186 aa, Unknown
  Bacterial polypetide isolated from the Sargasso Sea
MEDNSEDKKGNRRDFLYISTAAVGAVTVGAAVWPLVNQMNPSADVAALSSIEVDLNDLEPGSQLTVKWLGKPVFIRRRTDEEISAAREVNFEDLPDKSAQNANIKDGDASDKFRTIDEKGEWLVMMGVCTHLGCVPLGDAGDFGGWFCPCHGSHYDTAGRIRRGPAPTNLPIPVASLSDDGILKLG

SEQ ID NO: 89107 - protein, 170 aa, Unknown
  Bacterial polypetide isolated from the Sargasso Sea
MSKEIKPKRRDFLFTATYTIGAVGLGAAVWPLIDQMNPDSSVKALSTTEVDISNVEPGKTITVLWRGKPIFIRRRTQKEIEEAANVDLKDLKDPEKDSDRAKNPEWLVMVGVCTHLGCVPLNGKGEYNAWFCPCHGTHYDTSGRVRKGPAPKNLEIPKYEFVDNSTIKIG

SEQ ID NO: 89108 - protein, 122 aa, Unknown
  Bacterial polypetide isolated from the Sargasso Sea
MSESDNKKPNRRDFIVTATTAAGAVGVGVAAWPLIDQMNPDASVKALASTEVDISEVQPGQSITVLWRGKPVFIKRRTKEEIDSARAVDLKDLKHPEKDEDRAKNPEWLVMLGVCTHLGCVP

SEQ ID NO: 89109 - protein, 141 aa, Unknown
  Bacterial polypetide isolated from the Sargasso Sea
WPIVSQMNPDYSVKAMSTVEVDISKVDKGKEITVMWRGKPVFIKRRTEDEITKARNISLEELPHPEKDKKRVIKDEWLVVVGICTHLGCVPINGKGEYGGWFCPCHGSHYDTSGRIRKGPAPTNLEVPKYKFVGKDKIIIG

SEQ ID NO: 89110 - protein, 52 aa, Unknown
  Bacterial polypetide isolated from the Sargasso Sea
VPLSDKGEYNGWFCPCHGSHYDTSGRIRKGPAPTNMEIPKYSFVDDNTIKIG

SEQ ID NO: 89111 - protein, 117 aa, Unknown
  Bacterial polypetide isolated from the Sargasso Sea
AVEPGQSITVLWRGKPVFIKRRTKEEIDSARAVDLSELKHPEKDEDRAKNPEWLVMLGVCTHLGCVPLTDKGDYGAWFCPCHGSHYDTSGRIRKGPAPTNMEVPKYEFVNSNTIKIG

SEQ ID NO: 89112 - protein, 110 aa, Unknown
  Bacterial polypetide isolated from the Sargasso Sea
NELRDPGSDLSVQPNFAKNEFRSMKPKYLVVEGVCTHLGCAPIEKFSVAPTDMGPDWNGGFYCPCHGSKFDLSGRVYSGVPAPSNLRVPPHRFENDSILVVGENPGEADV

SEQ ID NO: 89113 - protein, 171 aa, Unknown
  Bacterial polypetide isolated from the Sargasso Sea
MNNSGKKNNRRDFLFTATYTIGAVGIGATIWPFVDQMNPDSSVKALATTEVDISQIEPGKSITVLWRGKPVFIKRRTQTEISEAQSVSLDELKHPEKDQDRVKKAEWLVMMGICSHLGCVPLSDKGEYNGWFCPCHGSHYDTSGRIRKGPAPTNMEIPKYAFVDDNTIKIG

SEQ ID NO: 89114 - protein, 112 aa, Unknown
  Bacterial polypetide isolated from the Sargasso Sea
LSGLTSVISKLADPNSDNIDEPYKNINATRSLSSEYSVLSGVCTHLGCSPKYYPEVEPKPWDSSWEGGFFCPCHGSMFDLVGRVYKGVPAPTNLTVPPHFFEGSILTIGEEA

SEQ ID NO: 89115 - protein, 139 aa, Unknown
  Bacterial polypetide isolated from the Sargasso Sea
MAKKPKNKRRDFLQLSTVTLGAVGTAAFIWPFLKSMSPAEDTLAAGSTEVDISAIEEGQSITIKWRGKPVFIKKRTKDEIEAAKMVQAGDLRDPQDDADRVQKEEWLVLVGVCTHLGCVPLGQKVSDMKGEYDGWYCPC

SEQ ID NO: 89116 - protein, 146 aa, Unknown
  Bacterial polypetide isolated from the Sargasso Sea
MGATIWPFIDQMNPDSSVKALATTEVDISQIEPGKSITVLWRGKPVFIKRRTDSEISEAQSVSLDDLKHPEKDEDRVKKAEWLVMMGICSHLGCVPLSDKGEYNGWFCPCHGSHYDTSGRIRKGPAPTNMEIPKYAFVDENTIRIG

SEQ ID NO: 89117 - protein, 95 aa, Unknown
  Bacterial polypetide isolated from the Sargasso Sea
NAAKIVQASELKDPQDDSERVQKEEWLVLVGVCTHLGCVPLGQKISDMKGEYDGWYCPCHGSHYDTSGRIRKGPAPKNLDVPPYTFLNDTTIKIG

SEQ ID NO: 89118 - protein, 180 aa, Unknown
  Bacterial polypetide isolated from the Sargasso Sea
MQKKDKTRRKVLLGLTSITGLAGLPFAATPFIAAWNPSAKAKAQGASVKIDVSKMQYGQQIQIAWRKQPVFVVRHTIESLKNLELSLSKLDDPNSDKIEEPYKNINATRSQSKEYTVLTGVCTHLGCSPKYYPEVEPKAWDSSWTGGFFCPCHGSMFDMVGKSFSRYAGTIKFTSTTSFF

SEQ ID NO: 89119 - protein, 92 aa, Unknown
  Bacterial polypetide isolated from the Sargasso Sea
EIDSARAVDLKDLKHPEKDEDRAKNPEWLVMLGVCTHLGCVPLTDKGDYNAWFCPCHGSHYDTSGRIRKGPAPTNLEVPKYVFLDSKTIKIG

SEQ ID NO: 89120 - protein, 174 aa, Unknown
  Bacterial polypetide isolated from the Sargasso Sea
MSDSEPKKPSKRRDFILTATTAAGAVGVGAVVWPLVDQMNPDASVKALASTEVDISGVQPGQSITVLWRGKPVFIKRRTDDEIESARKVDLKDLKHPEKDEDRAKNPEWLVTLGICTHLGCVPLTNQGDYEGGWFCPCHGSHYDTSGRVRSGPAPTNLEVPEYKFVDSNTIKIG

SEQ ID NO: 89121 - protein, 171 aa, Unknown
  Bacterial polypetide isolated from the Sargasso Sea
MDQKQEKKNRRDFLYTASYTLGAVGLGAAIWPFIDQMNPDKSVEALASTEVNISSVEPGKSITVLWRGKPVFIKRRTPEEIAEAKKVKLEELKHPEKDEDRVKKEEWLVMLGICTHLGCVPLSNKGEYNGWFCPCHGSHYDTSGRIRKGPAPTNMEVPKYEFVDSNTIKIG

SEQ ID NO: 89122 - protein, 190 aa, Unknown
  Bacterial polypetide isolated from the Sargasso Sea
MNENENKNSQTTNEPDQGRRKVLIGLTAGVAAAGVAFAATPFVTTWNPSARAKAIGSAVKVDVSKMMVGQQIQVSWRKQPILIIRHSSSALSGLASVTSKLADPNSDSIDEPYKNINATRSLSTEYSVLSGVCTHLGCSPKYYPEVEPKPWDSSWAGGFFCPCHGSMFDLVGRVYKGVPAQQNLLYPPIF

SEQ ID NO: 89123 - protein, 168 aa, Unknown
  Bacterial polypetide isolated from the Sargasso Sea
KRRSFLQLSTISLGAVGTAAFMWPFLKSMNPAEDTLALGSTEVNIADIEEGQGITVKWRGKPVFIRKRTQQEISEAKTVNLEDLKDPAIDDDRVKKDEWLVLVGICTHLGCVPLGQKITDMKGEYNGWYCPCHGSHYDSSGRIRKGPAPTNLAVPPYSFINDTTIKIG

SEQ ID NO: 89124 - protein, 84 aa, Unknown
  Bacterial polypetide isolated from the Sargasso Sea
RDPQDDADRVQKEEWLVLVGVCTHLGCVPLGQKVSDMKGEYDGWYCPCHGSHYDTSGRIRKGPAPKNLDVPPYTFLNDNTIKIG

SEQ ID NO: 89125 - protein, 213 aa, Unknown
  Bacterial polypetide isolated from the Sargasso Sea
MKHSEEFQGRDRNVVVGQNGVQRGESQMSDNAETASSAEFDEKTRRDFLFTTTATVGAVGAATAVWPFIDQMNPAADTLALSSTEVDLEPIAEGQSITVVWRGKPVFIRHRTAPEIEAAQRDDKADLPDPQADLDRVQNAKWLVMVGVCTHFGCIPLGNKSGESKGEFGGWFCPCHGSHYDTSGRIRKGPAPKNLEVPDYKFLSDTQLKIGEE

SEQ ID NO: 89126 - protein, 133 aa, Unknown
  Bacterial polypetide isolated from the Sargasso Sea
MSDPEKKKPNRRDFIVTATTAAGAVGVGAVVWPLVDQMNPDASVKALASTEVDISAVEPGQSITVLWRGKPVFIKRRTQDEIDSARAVDLSELKHPEKDEDRAKNPEWLVMLGVCTHLGCVPLNDKGDYGAWF

SEQ ID NO: 89127 - protein, 92 aa, Unknown
  Bacterial polypetide isolated from the Sargasso Sea
YKGLNPSRSRSPEYSVMSGVCTHLGCAPKYFPEVEPKPWDATWSGGFFCPCHGSMFDIVGRVFKGVPAPTNLVVPPHMFDGSILTIGEDKDL

SEQ ID NO: 89128 - protein, 189 aa, Unknown
  Bacterial polypetide isolated from the Sargasso Sea
TTRRKVLIGMTAGVGAVGASFAVVPFIASWNPSAKAKAVGGPVKVDVSKMQVGQKIQVSWRKQPVFVIRHSKEALANLVQVESKLDDPSSMKIDEPYRGANATRSTSTEYTVIAGVCTHLGCAPKYYPEMESQPWDESWVGGFFCPCHGSMFDIVGRVFKGVPAPTNLKVPPHYFDGSILTIGEERGTA

SEQ ID NO: 89129 - protein, 216 aa, Unknown
  Bacterial polypetide isolated from the Sargasso Sea
DNLRSILDGFGISISKENAYKKSDISNEPDQGRRKVLIGLTAGFAAAGVAFAATPFVTTWNPSARAKAIGSAVKVDVSKMMVGQQIQVSWRKQPILIIRHSPSALSGLASVTSKLADPNSDSIDEPYKNINATRSLSAEYSVLSGVCTHLGCSPKYYPEVEPKPWDSSWEGGFFCPCHGSMFDLVGRVYKGVPAPTNLTVPPHFFEGSILTIGEEA

SEQ ID NO: 89130 - protein, 116 aa, Unknown
  Bacterial polypetide isolated from the Sargasso Sea
VEPEKTITVLWRGKPVFIKRRTPEEIQEARNVKLEDLPHPEKDEDRAKNPEWLVMLGICTHLGCVPLNDKGDYNGWFCPCHGSHYDTSGRIRKGPAPTNMEVPKYEFVNSNTIKIG

SEQ ID NO: 89131 - protein, 71 aa, Unknown
  Bacterial polypetide isolated from the Sargasso Sea
AKKPEWLVTLGICTHLGCVPLTNKGDFEGGWFCPCHGSHYDTSGRIRSGPAPTNLEIPEYTFVDNNTIKIG

SEQ ID NO: 89132 - protein, 145 aa, Unknown
  Bacterial polypetide isolated from the Sargasso Sea
MAKKPKNKRRDFLQLSTVTLGAVGTAAFIWPFLKSMSPAEDTLAAGSTEVDISAIEEGQSITIKWRGKPVFIKKRTKDEIDAAKMVQASDLRDPQDDADRVQKEEWLVLVGVCTHLGCVPLGQKVSDMKGEYDGWYCPCTWFTLR

SEQ ID NO: 89133 - protein, 150 aa, Unknown
  Bacterial polypetide isolated from the Sargasso Sea
MAENRNNKRRDFLQLSTISIGAIGTAAFVWPFLSSMNPAEDTLALGTTEVDISSIAEGQSITVKWRGKPVFIRKRTKEEIEEAKEVDFTDLIDPEQDIDRVKKEEWLVLIGVCTHLGCVPLGQKLTDNKGEYNGWYCPCHGSHYDTSGRI

SEQ ID NO: 89134 - protein, 59 aa, Unknown
  Bacterial polypetide isolated from the Sargasso Sea
GCVPLGQKLADTKGEYNGWFCPCHGSHYDTSGRIRKGPAPENLAVPPYEFINDTLIKIG

SEQ ID NO: 89135 - protein, 120 aa, Unknown
  Bacterial polypetide isolated from the Sargasso Sea
IIRHSPSALSGLVSVTSKLADPNSDSIDEPYKNINATRSLSKEYSVLSGVCTHLGCSPKYYPEVEPKPWDSSWAGGFFCPCHGSMFDLVGRVYKGVPAPTNLTVPPHFFEGSLLTIGEEA

SEQ ID NO: 89136 - protein, 147 aa, Unknown
  Bacterial polypetide isolated from the Sargasso Sea
MSDKPVTRRNFLYITTGTFTAAGAASLVWPFVDQMNPDASVKALASTEVDLRPIAPGQSITVLWRGKPVFIRRRTPEEISEAKAVSLDELPDPQDDAARAKNPEWLVMVGICTHLGCIPLGQKGEYNGWFCPCHGSHYDTSGRIRKG

SEQ ID NO: 89137 - protein, 143 aa, Unknown
  Bacterial polypetide isolated from the Sargasso Sea
MSKNNNEAKRDFLIISTYAMAGIGAASVAWPLIDQMNPAADTLALASTEVDLSSLEEGQAITVTWRGKPVFVRHRTPEEIKLAKEVSLDEMRHPETDKERVPNEKFIVLVGVCTHLGCVPLGQKTGDVKGQYGGWFCPCHGSH

SEQ ID NO: 89138 - protein, 191 aa, Unknown; identical to SEQ ID NO: 89093
  Bacterial polypetide isolated from the Sargasso Sea

SEQ ID NO: 89139 - protein, 59 aa, Unknown
  Bacterial polypetide isolated from the Sargasso Sea
GCVPLGQKIGDSKGEYGGWFCPCHGSHYDTSGRIRKGPAPLNLEIPPYKFVSDDIIRIG

SEQ ID NO: 89140 - protein, 197 aa, Unknown
  Bacterial polypetide isolated from the Sargasso Sea
MQPKSPPNPGRRKFLTYTTSFLGVIGAFFTAIPFVSAFKPSAKAEAAGAPVKVDVSKLLPGEMMTVEWRGKPVFVVNIPEENTNFITKNLERLADPDMEDPSQPEYAKNEIRSRKKGIAVLTGVCTHLGCAPKYYPEAKPEDFDSNWQGGFFCPCHGSKFDLVGRVYANVPAPTNLVVPPHFFEKDNLLVIGSDGVS

SEQ ID NO: 89141 - protein, 115 aa, Unknown
  Bacterial polypetide isolated from the Sargasso Sea
ITVKWRGKPVFIRKRTQQEISEAKTVNLEDLKDPAIDDDRVKKDEWLVLVGICTHLGCVPLGQKITDMKGEYNGWYCPCHGSHYDSSGRIRKGPAPTNLAVPPYKFINDTTIKIG

SEQ ID NO: 89142 - protein, 173 aa, Unknown
  Bacterial polypetide isolated from the Sargasso Sea
MTKLKKTKKKARRSFIHQASGAMGIAAVGAAGWPLIDQMNPSKDVEALSKIEVDVSGLKEGDSKTVLWRGKPLFIKHRSQNEINEAKKVKLSDLLDPEKDEDRAINPKFLVLVGICTHLGCVPASNKGEFNGWFCPCHGSHYDTSGRIRKGPAPKNLEIPPYKFTSDNTILIG

SEQ ID NO: 89143 - protein, 152 aa, Unknown
  Bacterial polypetide isolated from the Sargasso Sea
MDKSGKKNRRDFLFTASYTVGAVGLGATIWPLIDQMNPDNSVKALATTEVDISQIQPGNSITVLWRGKPVFIKRRTETEIAEAKKVKLTDLKHPEKDEDRAKNPEWLVMLGICTHLGCVPLADKGEYNGWFCPCHGSHYDTSGRIRKGPAPS

SEQ ID NO: 89144 - protein, 149 aa, Unknown
  Bacterial polypetide isolated from the Sargasso Sea
MSDQIKPKRRDFLFTASYAIGAVGVGAAVWPLIDQMNPDTSVKALASTEVDVSTVEPGKSITVLWRGKPVFIKRRTPEEITEARKVKIEELKHPEKDEDRAKNPEWLVMLGVCTHLGCVPLGDKGDYKGWFCPCHGSHYDTSGRIEKDQ

SEQ ID NO: 89145 - protein, 152 aa, Unknown
  Bacterial polypetide isolated from the Sargasso Sea
AVGAVGVAGVVWPFVDQMNPDASVKALASTEVDISSVEPGKSITVLWRGKPVFIKRRTQEEIDKARSVDINELKLPEKDEDRAAIPEWLVMLGICTHLGCVPLNDKGDYDGWFCPCHGSHYDTSGRFRKGPAPTNMEVPKYEFINSKTIKIG

SEQ ID NO: 89146 - protein, 191 aa, Unknown
  Bacterial polypetide isolated from the Sargasso Sea
MEETITTRRKVLIGMTATVGAVGASFAAVPFIASWNPSAKAKAVGGPVRIDVSKMQIGQKIQVSWRKQPIFIIRHSKEAIENLSKVESKLDDPNSLNIEEPYRDLNPTRSTSEEYTVVAGVCTHLGCAPKFYPEIQPQPWDDSWIGGFFCPCHGSMFDIVGRVFKGVPAPTNLKVPPHFFDGSILTIGEER

SEQ ID NO: 89147 - protein, 171 aa, Unknown
  Bacterial polypetide isolated from the Sargasso Sea
MDKPEKKGNRRDFIFTASYTVGAIGIGATIWPLIDQMNPDSSVKALASTEVDISQIEPGKSVTVLWRGKPVFIKRRTQEEIAEAQSVSLDDLPHPEKDQDRVKNPEWLVMLGICTHLGCVPLSDKGEYNGWFCPCHGSHYDTSGRIRKGPAPTNMEIPKYAFVDDNTIKIG

SEQ ID NO: 89148 - protein, 191 aa, Unknown
  Bacterial polypetide isolated from the Sargasso Sea
MAENLNRRKFLSIATSLTSAVGGIFAVGAFVSTFQPSKKAKALGASIKVSLSKLEPGSIIKVIYRGKPIWVLRRTDQMISELANENAYLRDPESDLSIQPDFAKNKFRSKNPEFFVVEGVCTHLGCAPIEKFAIAPADMGPDWKGGFYCPCHGSKFDLSGRVYAGVPAPSNLRVPAHTFIDETTLLVGENS

SEQ ID NO: 89149 - protein, 193 aa, Unknown
  Bacterial polypetide isolated from the Sargasso Sea
MQEKDKTRRKVLIGLTSAIGLSGVPFAATPFIAAWNPSAKAKAAGAPVKLDVSKMQFGQQIQVSWRKQPVFIVRHTKESIASLDLALPKLADPNSDDIIEPYKGLNPSRSKSPEYSVFSGVCTHLGCAPKYFPEVEPKPWDASWSGGFFCPCHGSMFDMVGRVFKGVPAPTNLVVPPHMFEGSILTIGEDKEL

SEQ ID NO: 89150 - protein, 158 aa, Unknown
  Bacterial polypetide isolated from the Sargasso Sea
PSARAEAAGAPVKVNISKLSPGELMTVEWRGMPVFVYKVSSEAQNALSADKSKLADPNSDQQQQPEYAQNDTRSRKKGIAVVKGVCTHLGCAPKFYPEATSQDFDPNWQGGFFCPCHGSKFDLAGRVYANVPAPTNLEVPPHYFETDSTLVIGSDGAS

SEQ ID NO: 89151 - protein, 197 aa, Unknown
  Bacterial polypetide isolated from the Sargasso Sea
MSDTENNSNRRKFLTRSTQILGGVGGVFALIPFLSTMSPSERAKSAGAPIEVDVSNIQPGMYKVFEWRGKPVWVVRRTQEMINQIADRDDKLSDPMSNEEFQPSYAKNKYRSIKPEFLVLVGVCTHLGCSPLYKPNSQSTELGLDWKGGFFCPCHGSKFDLSGRVHKAMPAPSNLEVPPYYFASETKIVIGQDGESA

SEQ ID NO: 89152 - protein, 172 aa, Unknown
  Bacterial polypetide isolated from the Sargasso Sea
MSDPEKKKTNRRDFIVTATTAAGAVGVGAVVWPLVDQMNPDASVKALASTEVDISTVEPGQSITVLWRGKPVFIKRRTQDEIDSARAVDLSELKHPEKDEDRAKNPEWLVMLGICTHLGCVPLNDKGDYGAWFCPCHGSHYDTSGRIRKGPAPTNMEVPKYEFVNSNTIKIG

SEQ ID NO: 89153 - protein, 182 aa, Unknown
  Bacterial polypetide isolated from the Sargasso Sea
MIGLTSAVGLSGLPFAATPFIAAWNPSAKAKAAGAAVKLDVSKMQYGQQIQVSWRKQPVFIVRHTEESIASLDLALPKLADPNSDQIEEPYRGLNPSRSKSPEYSVFSGVCTHLGCAPKYFPEIEPKPWDATWNGGFFCPCHGSMFDIVGRVFKGVPAPTNLIVPPHMFDGSILTIGEDKEL

SEQ ID NO: 89154 - protein, 143 aa, Unknown
  Bacterial polypetide isolated from the Sargasso Sea
MYQRCNIGQQIQVAWRKQPVFIVRHTKESLSSLDLSVSKLADPNSDQIEEPYKGLNASRSRSPEYSVFSGVCTHLGCAPKYFPEVESKPWDATWNGGFFCPCHGSMFDIVGRVFKGVPAPTNLIVPPHMFEGSILTIGEDKEL

SEQ ID NO: 89155 - protein, 80 aa, Unknown
  Bacterial polypetide isolated from the Sargasso Sea
EYSVFSGVCTHLGCAPKYFPEIEPKPWDATWNGGFFCPCHGSMFDIVGRVFKGVPAPTNLVVPPHMFDGSILTIGEDKEL

SEQ ID NO: 89156 - protein, 83 aa, Unknown
  Bacterial polypetide isolated from the Sargasso Sea
MEILNIPEKDEDRAKNPEWLVMLGICTHLGCVPLGDKGEYNGWFCPCHGSHYDTSGRIRKGPAPTNLEVPKYEFVNSNTIKIG

SEQ ID NO: 89157 - protein, 91 aa, Unknown
  Bacterial polypetide isolated from the Sargasso Sea
MVQASDLRDPQDDADRVQKEEWLVLVGVCTHLGCVPLGQKVSDMKGEYDGWYCPCHGSHYDTSGRIRKGPAPKNLDVPPYTFLNDNTIKIG

SEQ ID NO: 89158 - protein, 175 aa, Unknown
  Bacterial polypetide isolated from the Sargasso Sea
MAEVKNNKRRSFLQLSTISLGAIGTAGFIWPFLKSMNPAEDTLALGSTEVNIADIEEGQGITVKWRGKPVFIRKRTQEEISEAKAVKLEDLKDPAIDDDRVKKDEWLVLVGICTHLGCVPLGQKITDMKGEYNGWYCPCHGSHYDSSGRIRKGPAPTNLAVPPYSFINDTTIKIG

SEQ ID NO: 89159 - protein, 88 aa, Unknown
  Bacterial polypetide isolated from the Sargasso Sea
ASDLRDPQDDADRVQKEEWLVLVGVCTHLGCVPLGQKVSDMKGEYDGWYCPCHGSHYDTSGRIRKGPAPKNLDVPPYTFLNDNTIKIG

SEQ ID NO: 89160 - protein, 193 aa, Unknown
  Bacterial polypetide isolated from the Sargasso Sea
MQNKDKTRRKVLIGLTSAVGLSGLPFAATPFIAAWNPSAKAKAAGASVKLDVSKMQYGQQIQVSWRKQPVFIVRHTDNSLKSLDLSVSKLADPNSDNIEEPYRGLNASRSKSPEYSVFSGVCTHLGCAPKYFPEIEPKPWDATWKGGFFCPCHGSMFDLVGRVFKGVPAPTNLIVPPHMFEGSILTIGEDKEL

SEQ ID NO: 89161 - protein, 85 aa, Unknown
  Bacterial polypetide isolated from the Sargasso Sea
VSLDDLKHPEKDEDRVKKPEWLVMMGICSHLGCVPLSDKGEYNGWFCPCHGSHYDTSGRIRKGPAPTNMEIPKYAFIDDNTIRIG

SEQ ID NO: 89162 - protein, 112 aa, Unknown
  Bacterial polypetide isolated from the Sargasso Sea
NTITVLLRGKPVFIRRRTQSEIDEAKKVKLEELKHPEKDEDRAKNPEWLVMLGICTHLGCVPLNDKGDYNGWFCPCHGSHYDTSGRIRKGPAPTNMEVPKYEFVNDKTIKIG

SEQ ID NO: 89163 - protein, 76 aa, Unknown
  Bacterial polypetide isolated from the Sargasso Sea
EKDEDRAKNPEWLFMLGICTHLGCVPLGDKGEYNGWFCPCHGSHYDTSGRIRKGPAPTNMEIPKYEFVNSNTIKIG

SEQ ID NO: 89164 - protein, 193 aa, Unknown
  Bacterial polypetide isolated from the Sargasso Sea
MQEKDKTRRKVLIGLTSAIGLSGIPFAATPFIAAWNPSAKAKAAGAPVKLDVSKMQFGQQIQVSWRKQPVFIVRHTKESIESLNLALSKLADPNSDNIDEPYKGLNPSRSKSPEYSVFSGVCTHLGCAPKYFPEVEPKPWDATWTGGFFCPCHGSMFDIVGRVFKGVPAPTNLVVPPHMFEGSILTIGEDKEL

SEQ ID NO: 89165 - protein, 143 aa, Unknown
  Bacterial polypetide isolated from the Sargasso Sea
TIWPLIDQMNPDSSVKALASTEVDISQIEPGKSVTVLWRGKPVFIKRRTQEEIAEAQSVSLDDLPHPEKDQDRVKNPEWLVMLGICTHLGCVPLSDKGEYNGWFCPCHGSHYDTSGRIRKGPAPTNMEIPKYAFVDDNTIKIG

SEQ ID NO: 89166 - protein, 211 aa, Unknown
  Bacterial polypetide isolated from the Sargasso Sea
MGCAVNAVQQQESVDDNRRAWLIATSVAGGIAGVATLAPFVDSLAPSERAKAAGAPVTADIGNLRGGEMMTVAWRGMPVFLVNRTDRMLADVAAADSMVADPATRHPFSMPLPGYCRNEYRSRSDHRNLLVVIGVCTHLGCTPGARFQEGPQPSLPDNWPGGFLCPCHGSTYDLAGRVFRNKPAPQNLDVPRFMFPSPTTVSIGRDEQGDA

SEQ ID NO: 89167 - protein, 192 aa, Unknown
  Bacterial polypetide isolated from the Sargasso Sea
INNEPDQGRRKVLIGLTAGFAAAGVAFAATPFVTTWNPSARAKAIGSAVKVDVSKMMVGQQIQVSWRKQPILIIRHSPSALSGLASVTSKLADPNSDSIDEPYKNINATRSLSTEYSVLSGVCTHLGCSPKYYPEVEPKPWDSSWAGGFFCPCHGSMFDLVGRVYKGVPAPTNLTVPPHFFEGSILTIGEEA

SEQ ID NO: 89168 - protein, 191 aa, Unknown
  Bacterial polypetide isolated from the Sargasso Sea
MSENLNRRKFLSIATSVTSAVGGIFALGAFISTFQPSKKAKALGASIRVSLSKLEPGSIIKVIYRGKPIWVLRRTEQMINELDNENSNLRDPESNLSVQPDFAKNRFRSKNPEFFVVEGVCTHLGCAPIEKFAIAPADMGPDWKGGFYCPCHGSKFDLSGRVYAGVPAPSNLRVPAHQFIDETTLLVGENS

SEQ ID NO: 89169 - protein, 185 aa, Unknown
  Bacterial polypetide isolated from the Sargasso Sea
TRRKVLIGMTAAVGAAGVSMAAVPFIASWNPSAKAKAVGGPVRIDVSKMQIGQKIQVSWRKQPIFIIRHSKEAIENLSKVESKLDDPSSLKIDEPYRDINPTRSTSKEYTVIAGVCTHLGCAPKFYPEIQPQPWDDSWIGGFFCPCHGSMFDIVGRVFKGVPAPTNLKVPPHYFDGSILTIGEER

SEQ ID NO: 89170 - protein, 197 aa, Unknown
  Bacterial polypetide isolated from the Sargasso Sea
MSNSNKPSNRRKFLTNLTQIMGGVGGVFALIPFLSTMSPSEKAKSAGAPVEIDVSTLMPGSYKVVEWRGKPVWVVRRTKEMIQNTLENDEILSDPNSLEELQPSYTQNKYRSINPEFLVLLGVCTHLGCSPLYKPSPKSAELGLDWNGGFFCPCHGSKFDLSGRVHKAMPAPSNLEVPPYYFASENKIIVGEDGEES

SEQ ID NO: 89171 - protein, 112 aa, Unknown
  Bacterial polypetide isolated from the Sargasso Sea
SLDLALPKIADPNSDQIEEPYRGLNPSRSKSPEYSVFSGVCTHLGCAPKYFPEIEPKPWDASWNGGFFCPCHGSMFDIVGRVFKGVPAPTNLIVPPHMFDGSILTIGEDKEL

SEQ ID NO: 89172 - protein, 109 aa, Unknown
  Bacterial polypetide isolated from the Sargasso Sea
TVIWRGKPVFIKRRTQDEIDSARAVDLSELKHPEKDEDRAKDPEWLVMLGVCTHLGCVPLTDKGDYNAWFCPCHGSHYDTSGRIRKGPAPTNMEVPKYEFVNSNTIKIG

SEQ ID NO: 89173 - protein, 193 aa, Unknown
  Bacterial polypetide isolated from the Sargasso Sea
MQEKDKTRRKVLIGLTSAVGLSGLPFAATPFIAAWNPSAKAKAAGAAVKLDVSKMQYGQQIQVSWRKQPVFIVRHTKESIASLDLALPKLADPNSDQIEEPYRGLNPSRSKSPEYSVFSGVCTHLGCAPKYFPEIEPKPWDATWNGGFFCPCHGSMFDIVGRVFKGVPAPTNLIVPPHMFDGSILTIGEDKEL

SEQ ID NO: 89174 - protein, 150 aa, Unknown
  Bacterial polypetide isolated from the Sargasso Sea
MSDQKHEKKTNRRDFLFTATAAAGAVGVGAAVWPLVDQMNPDASVKALASTEVDVSSMQPGQSLTVLWRGKPVFIKRRTDDEIKKARAVDINDLKHPEKDEDRAKNPEWLVMLGICTHLGCVPLTDKGDYDGWFCPCHGSHYDTSGRIEK

SEQ ID NO: 89175 - protein, 191 aa, Unknown
  Bacterial polypetide isolated from the Sargasso Sea
MAENLNRRKFLSIATSLTSAVGGIFAVGAFVSSFQPSKKAKALGASIKVSVSKLEPGSIIKVIYRGKPIWVLRRTEQMISELGNENSYLRDPESDLSIQPDFAKNKFRSKNPEFFVVEGVCTHLGCAPIEKFAIAPADMGPDWKGGFYCPCHGSKFDLSGRVYAGVPAPSNLRVPAHNFIDETTLLVGENS

SEQ ID NO: 89176 - protein, 193 aa, Unknown
  Bacterial polypetide isolated from the Sargasso Sea
MQEKDKTRRKVLIGLTSAVGLSGIPFAATPFIAAWNPSAKAKAAGAPVKLDVSKMQFGQQIQVSWRKQPVFIVRHTEESIANLELGVTKLADPNSDQIEEPYKGLNPSRSKSPEYSVFSGVCTHLGCAPKYFPEVEPKPWDATWNGGFFCPCHGSMFDIVGRVFKGVPAPTNLIVPPHMFEGSILTIGEDKEL

SEQ ID NO: 89177 - protein, 112 aa, Unknown
  Bacterial polypetide isolated from the Sargasso Sea
MWRGKPIFIRHRSESEINSASIVSVDDLPHKESDESRVQNPRWLVVVGVCSHLGCVPLGQKIGDSKGEFGGWFCPCHGSHYDTSGRIRKGPAPLNLEIPPYKFVSDDIIRIG

SEQ ID NO: 89178 - protein, 170 aa, Unknown
  Bacterial polypetide isolated from the Sargasso Sea
MDKSGKKNRRDFLFTASYTVGAIGLGATVWPFIDQMNPDKSVKALASTEVDLTTIQPGNSVTVLWRGKPVFIKRRTPDEIAEAKNVNIKDLKHPEKDEDRVKKEEWLVMLGICTHLGCVPLSDKGEYNGWFCPCHGSHYDTSGRIRKGPAPTNMEIPKYEFVDNNTIKIG

SEQ ID NO: 89179 - protein, 171 aa, Unknown; identical to SEQ ID NO: 89147
  Bacterial polypetide isolated from the Sargasso Sea

SEQ ID NO: 89180 - protein, 191 aa, Unknown
  Bacterial polypetide isolated from the Sargasso Sea
MAENLNRRKFLSIATSITSAVGGIFAVGAFVSTFQPSKKAKALGASIKVSLSKLEPGSIIKVIYRGKPIWVLRRTDQMISELDNENSYLRDPESDLSIQPDFAKNKFRSKNPEFFVVEGVCTHLGCAPIEKFAIAPADMGPDWKGGFYCPCHGSKFDLSGRVYAGVPAPSNLRVPAHTFIDETTLLVGENS

SEQ ID NO: 89181 - protein, 289 aa, Unknown
  Bacterial polypetide isolated from the Sargasso Sea
MTEITEKYLTLRGANNDIYFFQKRVSEKVADIIGTSFVKISLRTKNLSEAISTRDDLLDALNELENCDTLEISDNSRRTMDSLGISLLNENEHKNSQTTNEPDQGRRKVLIGLTAGVAAAGVAFAATPFVTTWNPSARAKAIGSAVKVDVSKMMVGQQIQVSWRKQPILIIRHSSSALSGLASVTSKLADPNSDSIDEPYKNINATRSLSTEYSVLSGVCTHLGCSPKYYPEVEPKPWDSSWAGGFFCPCHGSMFDLVGRVYKGVPAPTNLTVPPHFFEGSILTIGEEA

SEQ ID NO: 89182 - protein, 256 aa, Unknown
  Bacterial polypetide isolated from the Sargasso Sea
GTSFVKTSLKTNDLTEAISSRDELVDALNQLENSDILDISDNLRNILDGFGISITKKNAHKKSDTSNEPDQGRRKVLIGLTAGFAAAGVAFAATPFVTTWNPSARAKAIGSAVKVDVSKMMVGQQIQVSWRKQPILIIRHSPSALSSLASVTSKLADPNSDSIDEPYKNINATRSLSAEYSVLSGVCTHLGCSPKYYPEVEPKPWDSSWEGGFFCPCHGSMFDLVGRVYKGVPAPTNLTVPPHFFEGSILTIGEEA

SEQ ID NO: 89183 - protein, 274 aa, Unknown
  Bacterial polypetide isolated from the Sargasso Sea
MIFISSKKESVKRVADIIGTSFVKTSLRTKDLSEAISIRDDLLDALNELENSVTQEISDNSRSVMDCFGISLLNENEHKSSQIINEPDQGRRKVLIGLTAGFAAAGVAFAATPFVTTWNPSARAKAIGSAVKVDVSKMMVGQQIQVSWRKQPILIVRHSPSALSGLTSVTSKLADPNSDNIDEPYKNINTTRSLSAEYSVLSGVCTHLGCSPKYYPEVEPKPWDSSWGGGFFCPCHGSMFDLVGRVYKGVPAPTNLTVPPHFFEGSILTIGEEA

SEQ ID NO: 89184 - protein, 150 aa, Unknown
  Bacterial polypetide isolated from the Sargasso Sea
MSDNNDKKKTERRDFLFTATAAAGVVGVGAAIWPVVDQMNPDASVKALASTEVDISSVQPGQSLTVLWRGKPVFIKRRTDQEIQKAREVSLGDLKHPEKDEDRVKKPEWLVMLGVCTHLGCVPLTDKGDYDGWFCPCHGSHYDTSGRIRK

SEQ ID NO: 89185 - protein, 153 aa, Unknown
  Bacterial polypetide isolated from the Sargasso Sea
MDKSEKKKNRRDFIFTASYTIGAVGLGATIWPLIDQMNPDSSVKALATTEVDISQIQPGKSITVLWRGKPVFIKRRTQSEISEAQSVKLEELKHPEKDQDRVKKPEWLVMLGICTHLGCVPLSDKGEYKGWFCPCHGSHYDTSGRIRKGPAPV

SEQ ID NO: 89186 - protein, 173 aa, Unknown
  Bacterial polypetide isolated from the Sargasso Sea
MSKEEKKVNRRDFLFTASYTVGAVGVGAVIWPMIDQMNPDKAQQALATTEVDISNIEPGKSVTVLWRGKPVFLKRRTPEEIAEARAVKMDDLPDPQKDEERVKEGKDEWLVMLGVCTHLGCVPLKDKGDFNGWFCPCHGSHYDVSGRIRKGPAPTNMEIPKFEFVDSNTIKIG

SEQ ID NO: 89187 - protein, 172 aa, Unknown
  Bacterial polypetide isolated from the Sargasso Sea
MSESDKKKPNRRDFILTATTAAGAVGVGAAVWPLIDQMNPDASVKALASTEVDISGVEPGQSITVLWRGKPVFIKRRTQEEIDSARSVDLKDLKHPEKDEDRAKNPEWLVMLGVCTHLGCVPLTDKGDYNAWFCPCHGSHYDTSGRIRKGPAPTNMEVPKYVFVNSTTIKIG

SEQ ID NO: 89188 - protein, 172 aa, Unknown
  Bacterial polypetide isolated from the Sargasso Sea
MSDTEKKKPNRRDFIVTATTAAGAVGVGAVVWPLVDQMNPDASVKALASTEVDISAVEPGQSITVLWRGKPVFIKRRTQDEIDSARAVDLSELKHPEKDEDRAKNPEWLVMLGVCTHLGCVPLNDKGDYGAWFCPCHGSHYDTSGRIRKGPAPTNMEVPKYEFVNSNTIKIG

SEQ ID NO: 89189 - protein, 148 aa, Unknown
  Bacterial polypetide isolated from the Sargasso Sea
VGIGAVAWPLIDQMNPDASVKALASTEVDVSSVEPGNTITVLWRGKPVFIRRRTQDEITEAKKVKMEELKHPEKDEDRAKDPEWLVMLGICTHLGCVPLNDKGDYNGWFCPCHGSHYDTSGRIRKGPAPTNMEVPKYEFVNTNTIKIG

SEQ ID NO: 89190 - protein, 112 aa, Unknown
  Bacterial polypetide isolated from the Sargasso Sea
KTITVLWRGKPVFIRRRTEDEIAEARSVKLEDLKHPESDEERAKNPEWLVMLGVCTHLGCVPLDQKGDYNGWFCPCHGSHYDISGRIRKGPAPTNMEIPKYEFVNSNTIKIG

SEQ ID NO: 89191 - protein, 163 aa, Unknown
  Bacterial polypetide isolated from the Sargasso Sea
RDFLFTASYTIGAVGVGAAIWPLIDQMNPDKAQKALATTEVDISQIEPGKSITVLWRGKPVFLKRRTQEEIQEARSVNVLDLPDPQKDEDRVKDGKDEWLVMLGVCTHLGCVPLKDKGDYKGWFCPCHGSHYDLSGRIRKGPAPKNMEVPKYEFVDNNTIKIG

SEQ ID NO: 89192 - protein, 157 aa, Unknown
  Bacterial polypetide isolated from the Sargasso Sea
MEEDKKTNRRDFIFTASYALGAVGVGAAVWPLIDQMNPDASVKALASTEVDISGVEKGQSITVLWRGKPVFIRRRTEEEIVKAKDVKLEDLPHPETDEERAKNPEWLVMLGVCTHLGCVPLGDKGEYGGWFCPCHGSHYDTSGRIRKGPAPTNMEVP

SEQ ID NO: 89193 - protein, 152 aa, Unknown
  Bacterial polypetide isolated from the Sargasso Sea
VTQMNPSADVKALASIRVDVSDVEPGTQLTVKWLGKPVFIRRRTEDEIQEARSVSLNDLPDGTARNENIPESSAADENRSLDEAGEWLVMMGVCTHLGCVPLGDGAGEFGGWFCPCHGSHYDSSGRIRKGPAPENLPVPVASFVDETTIKLG

SEQ ID NO: 89194 - protein, 164 aa, Unknown
  Bacterial polypetide isolated from the Sargasso Sea
MSDSDKKKPNRRDFIITATTAAGAVGVGAAVWPLVDQMNPDASVKALASTEVDISSIEPGQSITVLWRGKPVFIKRRTKKEIESARSVDLKDLKHPEKDEDRAKNPEWLVMLGVCTHLGCVPLTDKGDYNAWFCPCHGSHYDTSGRIRKGPAPTNMEVPKYEFV

SEQ ID NO: 89195 - protein, 139 aa, Unknown
  Bacterial polypetide isolated from the Sargasso Sea
MIDQMNPDASVKALASTEVDVSNVNPGKTITVLWRGKPVFIRRRTTEEISEAKSVNLEDLKDPQKDEDRAKDPEWLVMLGVCTHLGCVPLDQKGDYNGWFCPCHGSHYDTSGRIRKGPAPTNMEIPKYEFVNANTIKIG

SEQ ID NO: 89196 - protein, 173 aa, Unknown
  Bacterial polypetide isolated from the Sargasso Sea
MSKEEKKVNRRYFLFTASYTVGAVGVGAVIWPMIDQMNPDKAQQALATTEVDISNIEPGKSITVLWRGKPVFLKRRTSEEIAEARAVKLDDLPDPQKDEDRVKEGKDEWLVMLGVCTHLGCVPLKDKGDFNGWFCPCHGSHYDVSGRIRKGPAPTNMEIPKFEFVDSNTIKIG

SEQ ID NO: 89197 - protein, 169 aa, Unknown
  Bacterial polypetide isolated from the Sargasso Sea
MSDQKDEKKTNRRDFLFTATAAAGAVGVGAAVWPLVDQMNPDASVKALASTEVDVSSMQPGQSLTVLWRGKPVFIKRRTDDEIKKARAVDINDLKHPEKDEDRAKNPEWLVMLGICTHLGCVPLTDKGDYDGWFCPCHGSHYDTSGRIRKGPAPTNMEIPKYEFVNTNT

SEQ ID NO: 89198 - protein, 173 aa, Unknown
  Bacterial polypetide isolated from the Sargasso Sea
MSKEEKNVNRRDFLFTASYTVGAVGLGAVVWPLIHQMNPDRAQKALATTEVDISQVEPGKSITVLWRGKPVFLKRRTQEEIAQARAVSLEDLPDPEKDEERVKEGKDEWLVMLGVCTHLGCVPLKDKGDYQGWFCPCHGSHYDVSGRIRKGPAPKNMEIPKFEFVDNNTIKIG

SEQ ID NO: 89199 - protein, 172 aa, Unknown
  Bacterial polypetide isolated from the Sargasso Sea
MSESDKKKPNRRDFILTATTAAGAVGVGAAVWPLVDQMNPDASVKALASTEVDVSSVQPGQSITVIWRGKPVFIKRRTQDEIDSARAVDLSELKHPEKDEDRAKDPEWLVMLGVCTHLGCVPLTDKGDYNAWFCPCHGSHYDTSGRIRKGPAPTNMEVPKYEFVNSNTIKIG

SEQ ID NO: 89200 - protein, 175 aa, Unknown
  Bacterial polypetide isolated from the Sargasso Sea
MAKKPDQKKRDFLQLSTITLGAVGTAAFIWPFIKSMSPAEDTLAAGSTEVDISAIEEGQSITIKWRGKPVFIKKRTIEEIEAAKTTKASDLKDPQDDADRVQKDEWLVLVGVCTHLGCVPLGQKVSDMKGEYDGWYCPCHGSHYDTSGRIRKGPAPKNLDVPPYTFLNDTTIKIG

SEQ ID NO: 89201 - protein, 107 aa, Unknown
  Bacterial polypetide isolated from the Sargasso Sea
YWRGKPVFIRRRTQEEITEARSVKLEDLKDPQKDEERAKNPEWLVMLGVCTHLGCVPLDQKGDYNGWFCPCHGSHYDTSGRIRKGPAPTNMEIPKYEFVNANTIKIG

SEQ ID NO: 89202 - protein, 181 aa, Unknown
  Bacterial polypetide isolated from the Sargasso Sea
MSTNPTSKTKKSEGKRDFLIISTYAMAGIGAASVAWPLIDQMNPAADTLALASTEVDLSSLEEGQAITVKWRGKPVFVRHRTPDEIKQAKEVSLDGMRDPESDEDRVANEKYIVLVGVCTHLGCVPLGQKSGDVKGQYGGWFCPCHGSHYDHSGRIRKGPAPTNLEVPSYKFLSDNVIKIG

SEQ ID NO: 89203 - protein, 180 aa, Unknown
  Bacterial polypetide isolated from the Sargasso Sea
MSKNSKSKNIREGKRDFLIISTYAMAGIGAASVAWPLIDQMNPAADTLALASTEVDLSSLEEGQAITVTWRGKPVFVRHRTPEEIKLAKEVSLDEMRHPETDEERVTNEKFIVLVGVCTHLGCVPLGQKSGDVKGQYGGWFCPCHGSHYDHSGRIRKGPAPTNLEVPSYKFLSDNIIKIG

SEQ ID NO: 89204 - protein, 135 aa, Unknown
  Bacterial polypetide isolated from the Sargasso Sea
DTLALASTEVDLEQLEEGQAITVTWRGKPVFIRHRTKEEIASAKDQLLDGLRDPQTDDERVQNEKYIVLVGVCTHLGCVPLGQKSGDVKGEYGGWFCPCHGSHYDHSGRIRKGPAPTNLEIPQYSFLSNTLIKIG

SEQ ID NO: 89205 - protein, 87 aa, Unknown
  Bacterial polypetide isolated from the Sargasso Sea
REVDIKNLKHPEKDEDRAKNPEWLVMLGVCTHLGCVPLGDKGEYGGWFCPCHGSHYDTSGRIRKGPAPTNMEIPKYEFVNTNTIKIG

SEQ ID NO: 89206 - protein, 151 aa, Unknown
  Bacterial polypetide isolated from the Sargasso Sea
MSEKKTKRRDFLFTATYAVGAVGVGATIWPMIDQMNPDASVKALASTEVDVSSVNPGKTITVLWRGKPVFIRRRTQEEIAEAKAVSLKDLKHPEKDEDRAKDPEWLVMLGVCTHLGCVPLDQKGDYNGWFCPCHGSHYDTSGRIRKGPAPT

SEQ ID NO: 89207 - protein, 173 aa, Unknown
  Bacterial polypetide isolated from the Sargasso Sea
MSKEEKKVNRRDFLFTASYTVGAVGVGAVIWPMIDQMNPDKAQQALATTEVDISSIEPGKSITVLWRGKPIFIKKRTSEEIAEARAVKLDDLPDPQKDEDRVKEGKDEWLVMLGVCTHLGCVPLKDKGDFNGWFCPCHGSHYDVSGRIRKGPAPTNMEIPKFEFVDSNTIKIG

SEQ ID NO: 89208 - protein, 159 aa, Unknown
  Bacterial polypetide isolated from the Sargasso Sea
FLFTATYAVGAVGVGATIWPMIDQMNPDASVKALASTEVDVSAVNPGKTITVLWRGKPVFIRRRTQDEIAEARSVKLEELKHPESDEDRAKDPEWLVMLGVCTHLGCVPLDQKGDYNGWFCPCHGSHYDTSGRIRKGPAPTNMEIPKYEFVNSNTIKIG

SEQ ID NO: 89209 - protein, 154 aa, Unknown
  Bacterial polypetide isolated from the Sargasso Sea
AVGTAAFIWPFLSSMNPAEDTLALGTTEVDISSIEEGQSITVKWRGKPVFIRKRTKEEIEEAKEVNFTDLIDPEQDIDRVKKEEWLVLIGVCTHLGCVPLGQKLTDNKGEYNGWYCPCHGSHYDTSGRIRKGPAPNNLPVPPYSFLNDTTIKIG

SEQ ID NO: 89210 - protein, 148 aa, Unknown
  Bacterial polypetide isolated from the Sargasso Sea
VGAAAVVWPMIDQMNPDASVKALASTEVDISSLTPGNTLTVLWRGKPVFIRRRTQEEIDEARSVKMEDLIHPEKDEDRAKNPEWLVMLGVCTHLGCVPLNDKGDYNGWFCPCHGSHYDTSGRIRKGPAPWNMEVPKYEFVNTNTIKIG

SEQ ID NO: 89211 - protein, 170 aa, Unknown
  Bacterial polypetide isolated from the Sargasso Sea
MSDKKKVNRRDFIYTASTVVGVVGVGAAAWPLIDQMNPDASVKALATTEVDVSLVKPGQSITVLWRGKPVFIKRRTENEITEAKAVSLTELKHPEKDEDRATNPEWLVMLGVCTHLGCVPLADKGDYNGWFCPCHGSHYDTSGRIRKGPAPTNLEIPKYEFVNSNTIKIG

SEQ ID NO: 89212 - protein, 169 aa, Unknown
  Bacterial polypetide isolated from the Sargasso Sea
MSDKNPKRREFLFTATYAIGVVGVGAVAWPLIDQMNPDASVKALASTEVDVSSVEPGNTITVLWRGKPVFIRRRTQDEIAEAKAVKMEELKHPEKDEDRAKDPEWLVMLGICTHLGCVPLNDKGDYNGWFCPCHGSHYDTSGRIRKGPAPTNMKVPKYEFVNANTIIIG

SEQ ID NO: 89213 - protein, 132 aa, Unknown
  Bacterial polypetide isolated from the Sargasso Sea
DRSVKALATTEVDISQIEPGKSITVLWRGKPVFIKRRTESEISEAESVSLNELIHPEKDQDRVKKSEWLVMLGVCTHLGCVPLADKGEYNGWFCPCHGSHYDTSGRIRKGPAPTNMEIPKYEFEDSNTIKIG

SEQ ID NO: 89214 - protein, 153 aa, Unknown
  Bacterial polypetide isolated from the Sargasso Sea
MINQMNPSADVKALASIRVDISDIEPGTQLTVKWLGKPVFIRRRTEAEIEEAQSVNLDELLDNTARNDNIAEASADDRNRSLDENGEWLVMMGVCTHLGCVPLGDGAGEFNGWFCPCHGSHYDTSGRIRKGPAPENLAVPKAIFVDDTTIKLG

SEQ ID NO: 89215 - protein, 65 aa, Unknown
  Bacterial polypetide isolated from the Sargasso Sea
LVMMGVCTHLGCVPLGDGAGEFNGWFCPCHGSHYDTSGRIRKGPAPENLAVPKAVFVDDTTIKLG

SEQ ID NO: 89216 - protein, 202 aa, Unknown
  Bacterial polypetide isolated from the Sargasso Sea
MKCYFINHTETLWRQPVSDTHAADGTRRDFLYYATAGAGAVTATAAVWPLINQMNPSADVKALASIRVDVSDVEPGTQLTVKWLGKPVFIRRRTEDEIQEARSVSLNDLPDGTARNENIPETSAADENRSLDEAGEWLVMMGVCTHLGCVPLGDGAGEFGGWFCPCHGSHYDSSGRIRKGPAPENLPVPVASFVDETTIKLG

SEQ ID NO: 89217 - protein, 127 aa, Unknown
  Bacterial polypetide isolated from the Sargasso Sea
SSCSTEVDISNIEKGQSITVLWRGKPVFIRRRTSEEIAKAKNVKLEDLPHPETDEDRAKNPEWLVMLGVCTHLGCVPLGDKGEYGGWFCPCHGSHYDTSGRIRKGPAPTNMEVPKYEFVNSNTIKIG

SEQ ID NO: 89218 - protein, 166 aa, Unknown
  Bacterial polypetide isolated from the Sargasso Sea
MSEKDKKDPNRRDFIITATTTVGAVGAGAAVWPLIDQMNPDASVKALASTEVDVSNIQPGQSITVLWRGKPVFIKRRTNEEIEKARSVDLKELKHPEKDEERAKNPEWLVMLGICTHLGCVPLGDKGDYNGWFCPCHGSHYDTSGRIRKGPAPTNLEVPKYEFVNS

SEQ ID NO: 89219 - protein, 173 aa, Unknown; identical to SEQ ID NO: 89207
  Bacterial polypetide isolated from the Sargasso Sea

SEQ ID NO: 89220 - protein, 172 aa, Unknown
  Bacterial polypetide isolated from the Sargasso Sea
MSESDKKKPNRRDFILTATTAAGAVGVGAAVWPLIDQMNPDASVKALASTEVDISGVEPGQSITVLWRGKPVFIKRRTQEEIDSARSVDLKDLKHPEKDEDRAKDPEWLVMLGVCTHLGCVPLTDKGDYNAWFCPCHGSHYDTSGRIRKGPAPTNLEVPKYVFVNSKTIKIG

SEQ ID NO: 89221 - protein, 104 aa, Unknown
  Bacterial polypetide isolated from the Sargasso Sea
DGRSVDVGQLIDKTAQNPNKDEVVPATDENRTLDEAGEWLVMIGVCTHLGCVPIGDGAGEFGGWFCPCHGSHYDTAGRIRKGPAPQNLHIPVAAFVDDTTIKLG

SEQ ID NO: 89222 - protein, 152 aa, Unknown
  Bacterial polypetide isolated from the Sargasso Sea
LINQMNPSADVQALSSIEVDVSDLEPGAQITVKWLGKPVFIRRRTEDEIEEARAVDLADLPDISAENKNLKEADANDANRTIDEEGEWLVMVGVCTHLGCVPLNNAGEFGGWFCPCHGSHYDISGRIRKGPAPKNLEVPVAKFIDDGIIKLG

SEQ ID NO: 89223 - protein, 169 aa, Unknown
  Bacterial polypetide isolated from the Sargasso Sea
MSEKKINRRDFLFTATYAVGAVGAGAVVWPMIDQMNPDASVKALASTEVDISSVNPGKTITVLWRGKPVFIRRRTEDEIMEARSVKLEELKHPETDEDRAKNPEWLVMLGVCTHLGCVPLDQKGDYNGWFCPCHGSHYDISGRIRKGPAPTNMEIPKYEFVDANTIKIG

SEQ ID NO: 89224 - protein, 170 aa, Unknown
  Bacterial polypetide isolated from the Sargasso Sea
MTDIKKPKRRDFLLTVTAATGAVGVGAAAWPLIDQMNPDASVKALASTEVDISSVEPGQSITVLWRGKPVFIKRRTQEEIKKARSVVVKDLKHPEKDEDRAKDPEWLVMLGVCTHLGCVPLSDKGEYGGWFCPCHGSHYDTSGRIRKGPAPTNMEVPKYEFLNSNTIKIG

SEQ ID NO: 89225 - protein, 148 aa, Unknown
  Bacterial polypetide isolated from the Sargasso Sea
SWSCAAAWPLIDQMNLDASVKALATTEVDVSLVKPGQSITVLWRGKPVFIKRRTENEISEAKSVSLTELKHPEKDEDRAANPEWLVMLGVCTHLGCVPLADKGDYNGWFCPCHGSHYDTSGRIRKGPAPTNLEIPRYEFVNSNTIKIG

SEQ ID NO: 89226 - protein, 173 aa, Unknown
  Bacterial polypetide isolated from the Sargasso Sea
MSKEEKKVNRRDFLFTASYTVGAVGLGAIVWPLVHQMNPDKAQQALATTEVDISQIEPGKSITVLWRGKPVFLKRRTQEEINEARSVNLQDLPDPEKDEDRVKKGKDEWLVMLGVCTHLGCVPLKDKGDYKGWFCPCHGSHYDLSGRIRKGPAPTNMEIPKFEFVDSNTIKIG

SEQ ID NO: 89227 - protein, 169 aa, Unknown
  Bacterial polypetide isolated from the Sargasso Sea
MSDKKPNRRDFLTTVTAATGAVGVGAVVWPLIDQMNPDASVKALASTEVDISLVEPGQSITVLWRGKPVFIKRRTLEEIEKARQVNLEDLKHPEKDEDRAKNPEWLVMLGVCTHLGCVPLGDKGEYGGWFCPCHGSHYDTSGRIRKGPAPTNMEVPKYEFVNSNTIKIG

SEQ ID NO: 89228 - protein, 109 aa, Unknown
  Bacterial polypetide isolated from the Sargasso Sea
TVLWRGKPVFIRRRTQEEIAEAKSVKIEDLKHPEKDEDRAKNPEWLVMLGVCTHLGCVPLDQKGDYNGWFCPCHGSHYDTSGRIRKGPAPTNMEIPEYKFVDANTIKIG

SEQ ID NO: 89229 - protein, 144 aa, Unknown
  Bacterial polypetide isolated from the Sargasso Sea
AVVWPMIDQMNPDSFVKALASTEVDVSSLTPGNTLTVLWRGKPVFIRRRTQEEIDEARAVKMEDLIHPEKDEDRAKNPEWLVMLGVCTHLGCVPLNDKGDYNGWFCPCHGSHYDTSGRIRKGPAPWNMEVPKYEFVDANTIKIG

SEQ ID NO: 89230 - protein, 170 aa, Unknown
  Bacterial polypetide isolated from the Sargasso Sea
MEEDKKTNRRDFIFTASYALGAVGVGAVVWPLIDQMNPDASVKALASTEVDVSGVEKGQSITVLWRGKPVFIRRRTEEEIAKAKDVKLEDLPHPETDEERAKNPEWLVMLGVCTHLGCVPLGDKGEYGGWFCPCHGSHYDTSGRIRKGPAPTNMEVPKYEFVNSNTIKIG

SEQ ID NO: 89231 - protein, 157 aa, Unknown
  Bacterial polypetide isolated from the Sargasso Sea
VSATTAAGAVGVGAAVWPLIDQMNPDASVKALASTEVDISGLQPGQSITVLWRGKPVFIKRRTKEEIDSARAVDLKELKHPEKDEDRAKNPEWLVMLGVCTHLGCVPLTDKGDYNAWFCPCHGSHYDTSGRIRKGPAPTNLEVPKYEFVNSNTIKIG

SEQ ID NO: 89232 - protein, 164 aa, Unknown
  Bacterial polypetide isolated from the Sargasso Sea
MSDSDKKKPNRRDFILTATTAAGAVGVGAAVWPLVDQMNPDASVKALASTEVDISSVQPGQSITVIWRGKPVFIKRRTQDEIDSARAVDLSELKHPEKDEDRAKNPEWLVMLGVCTHLGCVPLTDKGDYNAWFCPCHGSHYDTSGRIRKGPAPTNMEVPKYEFV

SEQ ID NO: 89233 - protein, 163 aa, Unknown
  Bacterial polypetide isolated from the Sargasso Sea
MSESDKKKPNRRDFILTATTAAGAVGVGAAVWPLVDQMNPDASVKALASTEVDVSSVQPGQSITVIWRGKPVFIKRRTQDEIDSARAVDLSELKHPEKDEDRAKNPEWLVMLGVCTHLGCVPLTDKGDYNAWFCPCHGSHYDTSGRIRKGPAPTNMEVPKYEF

SEQ ID NO: 89234 - protein, 173 aa, Unknown
  Bacterial polypetide isolated from the Sargasso Sea
MSKEEKKVNRRDFLFTASYTVGAVGLGAVVWPLVHQMNPDKAQQALATTEVDISQIEPGKSITVLWRGKPVFLKRRTEEEITEARSVSLKDLPDPQKDEDRVKKGKEEWLVMLGVCTHLGCVPLKDKGDYKGWFCPCHGSHYDLSGRIRKGPAPTNMEIPKFEFVDNNTIKIG

SEQ ID NO: 89235 - protein, 169 aa, Unknown
  Bacterial polypetide isolated from the Sargasso Sea
MAEKKTNRRDFLFTATYAVGAVGVGATVWPMIDQMNPDASVKALASTEVDVSSVNPGKTITVLWRGKPVFIRRRTDDEIAEARSVKLEDLKHPEKDEDRAQNPEWLVMLGVCTHLGCVPLDQKGDYNGWFCPCHGSHYDTSGRIRKGPAPTNMEIPKYEFVNANTIKIG

SEQ ID NO: 89236 - protein, 157 aa, Unknown
  Bacterial polypetide isolated from the Sargasso Sea
MAENPDNKRRDFLQLSTVTIGAVGTAAFIWPFLKSMNPAEDTIALGTTEVDISQIEEGQSITVKWRGKPVFIRKRTSNEIEEAKTVNISDLKDPEEDIDRVKKDEWLVLVGVCTHLGCVPLGQKLTDSKGEYNGWYCPCHGSHYDTSGRIRKGPAPE

SEQ ID NO: 89237 - protein, 155 aa, Unknown
  Bacterial polypetide isolated from the Sargasso Sea
TTGAFAAAGAASLAWPFVDQMNPDASVKALASTEIDLRPIIPGQSITVMWRGKPVFIRRRTQAEIDEAKKVNLADLPHPEADSDRAQNPEWLVMVGICTHLGCVPLGQKGDYNGWFCPCHGSHYDTSGRIRKGPAPTNLEIPDYVFLNETTIKIG

SEQ ID NO: 89238 - protein, 169 aa, Unknown
  Bacterial polypetide isolated from the Sargasso Sea
MSEKKTKRRDFLFTATYAVGAVGVGATVWPMIDQMNPDASVKALASTEVDVSAVNPGKTITVLWRGKPVFIRRRTQDEIAEARSVKLDDLKHPETDEDRAKNPEWLVMLGVCTHLGCVPLDQKGDYNGWFCPCHGSHYDTSGRIRKGPAPTNMEIPKYEFVDANTIKIG

SEQ ID NO: 89239 - protein, 173 aa, Unknown
  Bacterial polypetide isolated from the Sargasso Sea
MSKEEKKVNRRDFLFTASYTVGAVGLGAVVWPLVHQMNPDKAQQALATTEVDISQIEPGKSITVLWRGKPVFLKRRTQEEIAEARSVNLKDLPDPQKDEDRVKKGKDEWLVMLGVCTHLGCVPLKDKGDYKGWFCPCHGSHYDLSGRIRKGPAPTNMEIPKFEFVDNNIIKIG

SEQ ID NO: 89240 - protein, 169 aa, Unknown
  Bacterial polypetide isolated from the Sargasso Sea
NKRRDFLQLSTVTIGAVGTAAFIWPFLKSMNPAEDTIALGTTEVDVSQIEEGQSITVKWRGKPVFIRKRTKDEIDEAKTVNMSDLKDPEEDVDRVKKDEWLVLVGVCTHLGCVPLGQKLTDSKGEYNGWYCPCHGSHYDTSGRIRKGPAPENLAVPPYSFLNDTTIKIG

SEQ ID NO: 89241 - protein, 158 aa, Unknown
  Bacterial polypetide isolated from the Sargasso Sea
MAKKPDNKRRDFLQLSTVTLGAVGTAAFIWPFLKSMSPAEDTLAAGSTEVDISSIEEGQSITVKWRGKPVFIKKRTKEEIEAAKIVKASDLRDPQDDSDRVQKEEWLILVGVCTHLGCVPLGQKVSDMKGEYNGWYCPCHGSHYDTSGRIRKGPAPKN

SEQ ID NO: 89242 - protein, 161 aa, Unknown
  Bacterial polypetide isolated from the Sargasso Sea
RDFLFTATTAVGAVGAAAVVWPMIDQMNPDASVKALASTEVDVSSLTPGNTLTVLWRGKPVFIRRRTKEEIEEARAVKMEDLIHPEKDEDRAKNPEWLVMLGVCTHLGCVPLNDKGDYNGWFCPCHGSHYDTSGRIRKGPAPWNMEVPKYEFVNANTIKIG

SEQ ID NO: 89243 - protein, 169 aa, Unknown
  Bacterial polypetide isolated from the Sargasso Sea
MSEKKTNRRDFLFTATYAVGAVGVGATIWPMIDQMNPDASVKALASTEVDVSSVNPGKTITVLWRGKPVFIRRRTQDEISEARSVKLEDLKDPQKDEDRAKDPEWLVMLGVCTHLGCVPLDQKGDYNGWFCPCHGSHYDTSGRIRKGPAPTNMEIPKYEFVNANTIKIG

SEQ ID NO: 89244 - protein, 126 aa, Unknown
  Bacterial polypetide isolated from the Sargasso Sea
LASTEVDLSAIEQGQAITVIWRGKPVFIRHRTAKEISQAEDTNLEALPDPQADSERVQKAEWLILVGVCTHLGCVPLSHTGEYEGWFCPCHGSHYDTSGRIRKGPAPANLAVPEYVFIDDLKVRIG

SEQ ID NO: 89245 - protein, 170 aa, Unknown
  Bacterial polypetide isolated from the Sargasso Sea
MSEEKKTNRRDFIFTASYALGAVGVGAAVWPLVDQMNPDASVKALASTEVDVSGVEVGQSITVLWRGKPVFIRRRTSEEIAKAKDVNLDDLPHPETDEDRAKNPEWLVMLGVCTHLGCVPLGDKGEYGGWFCPCHGSHYDTSGRIRKGPAPTNMEVPKYEFVNSNTIKIG

SEQ ID NO: 89246 - protein, 101 aa, Unknown
  Bacterial polypetide isolated from the Sargasso Sea
VFIRRRTQDEIAEARSVKLEDLKDPQKDEDRATNPEWLVMLGVCTHLGCVPLDQKGDFNGWFCPCHGSHYDTSGRIRKGPAPTNMEIPKYKFVDANTIKIG

SEQ ID NO: 89247 - protein, 169 aa, Unknown
  Bacterial polypetide isolated from the Sargasso Sea
MSEKKTNRRDFLFTATYAVGAVGAGAVIWPMIDQMNPDASVKALASTEVDVSTVNPGKTITVLWRGKPVFIRRRTPEEIAEAKSVKIEDLKHPEKDEDRAKNPEWLVMLGVCTHLGCVPLDQKGDYNGWFCPCHGSHYDTSGRIRKGPAPTNMEIPEYKFVDANTIKIG

SEQ ID NO: 89248 - protein, 112 aa, Unknown
  Bacterial polypetide isolated from the Sargasso Sea
KWRGKPVFIRRRTQEEIVESRNVSIDSLRDPQKDEERVQKDEWLIVLGVCTHLGCVPLGQKASDIKGEYGGWFCPCHGSHYDSSGRIRKGPAPQNLEIPPYNFISDSIVKIG

SEQ ID NO: 89249 - protein, 155 aa, Unknown
  Bacterial polypetide isolated from the Sargasso Sea
MSDKKPKRREFLFTATYALGAVGAGAVVWPLIDQMNPDASVKALASTEVDVSSVEPGNTITVLWRGKPVFIRRRTQDEIAEAKAVKMEELKHPERDEDRAKDPEWLVMLGICTHLGCVPLNDKGDYNGWFCPCHGSHYDTSGRIRKGPAPTNMEV

SEQ ID NO: 89250 - protein, 172 aa, Unknown
  Bacterial polypetide isolated from the Sargasso Sea
MSDSDKKKPNRRDFILTATAAAGAVGVGAAVWPLVDQMNPDASVKALASTEVDISSIEPGQSITVLWRGKPVFIKRRTEDEIKSARAVDLKDLKHPEKDEDRAKNPEWLVMLGVCTHLGCVPLTDKGDYNAWFCPCHGSHYDTSGRIRKGPAPTNMEVPKYEFVNNNTIKIG

SEQ ID NO: 89251 - protein, 170 aa, Unknown
  Bacterial polypetide isolated from the Sargasso Sea
MSKEKKIKRRDFIFTASYVLGGVGVGAAVWPLIDQMNPDASVKALASTEVDVSSVQPGQSITVLWRGKPVFIKRRTQDEIAEAKAVDLKDLKHPEKDEDRAKNPEWLVMLGICTHLGCVPLGDKGEYNGWFCPCHGSHYDTSGRIRKGPAPTNLEIPKYEFVNNNTIKIG

SEQ ID NO: 89252 - protein, 188 aa, Unknown
  Bacterial polypetide isolated from the Sargasso Sea
MSKEEKKVNRRDFLFTASYTVGAVGLGAVIWPLIDQMNPDKAQQALATTEVDISNIEPGKEITVLWRGKPVFLKRRTPEEIAEARAVSLDDLPDPQKDEERVKQGKDEWLVMLGVCTHLGCVPLKNKGEYKGWFCPCHGSHYDVSGRIRKGPAPKNLEIPKFEFVDSNTIKDRDKNMKRTRDIQQKSK

SEQ ID NO: 89253 - protein, 173 aa, Unknown
  Bacterial polypetide isolated from the Sargasso Sea
MSKEEKKVNRRDFLFTASYTIGAVGVGAVIWPMIDQMNPDKAQQALATTEVDISSIEPGKSITVLWRGKPIFIKKRTSEEIAEARAVKLDDLPDPQKDEDRVKEGKDEWLVMLGVCTHLGCVPLKDKGDFNGWFCPCHGSHYDVSGRIRKGPAPTNMEIPKFEFVDSNTIKIG

SEQ ID NO: 89254 - protein, 169 aa, Unknown
  Bacterial polypetide isolated from the Sargasso Sea
EEDKKTNRRDFIFTASYALGAVGVGAAVWPLIDQMNPDASVKALASTEVDVSGVEKGQSITVLWRGKPVFIRRRTEEEISKAKNVKLEDLPHPETDEDRAKNPEWLVMLGVCTHLGCVPLGDKGEYGGWFCPCHGSHYDTSGRIRKGPAPTNMEVPKYEFVNSNTIKIG

SEQ ID NO: 89255 - protein, 177 aa, Unknown
  Bacterial polypetide isolated from the Sargasso Sea
KIKCQTVENQRRDFIKLSAMTLEGVGAASLLIPFISSMNPGKDTLALASTEIDLSPLEEGQSLTVIWRGKPVFIKHRTKSEIDIAKNTSLDELPDAEEDSARVQKDNWLVVLGVCTHLGCVPLGQKASDTKGDYGGWFCPCHGSHYDTSGRIRKGPAPTNLPVPPYVFLTDNRIKIG

SEQ ID NO: 89256 - protein, 132 aa, Unknown
  Bacterial polypetide isolated from the Sargasso Sea
MHRVKALASTEVDVSGVEKGQSITVLWRGKPVFIRRRTDEEITKAKNVKLEDLPHPETDEERAKNPEWLVMLGVCTHLGCVPLGDKGEYGGWFCPCHGSHYDTSGRIRKGPAPTNMEVPKYEFVNSNTIKIG

SEQ ID NO: 89257 - protein, 147 aa, Unknown
  Bacterial polypetide isolated from the Sargasso Sea
IWPFLKSMNPAEDTIALGTTEVDISQIEEGQSITVKWRGKPVFIRKRTKGEIDEAKTVNISDLKDPEKDVDRVKKDEWLVLVGVCTHLGCVPLGQKLTDSKGEYNGWYCPCHGSHYDTSGRIRKGPAPENLAVPPYSFLNDSTIKIG

SEQ ID NO: 89258 - protein, 102 aa, Unknown
  Bacterial polypetide isolated from the Sargasso Sea
YKAEIDEAAGVKLTDLPDPEPDSKRVKKGEAEWLVLVGVCTHLGCIPLGTSQGETKGEYDGWFCPCHGSHYDSSGRIRKGPAPRNLEVPDYNFISDSVIKIG

SEQ ID NO: 89259 - protein, 92 aa, Unknown
  Bacterial polypetide isolated from the Sargasso Sea
EIDEARSVKMEELIHPEKDEDRAKNPEWLVMLGVCTHLGCVPLNDKGDFNGWFCPCHGSHYDTSGRIRKGPAPWNMEVPKYEFVNANTIKIG

SEQ ID NO: 89260 - protein, 161 aa, Unknown
  Bacterial polypetide isolated from the Sargasso Sea
DKKPKRRDFLFTASYAVGAVGAAAVVWPLVDQMNPDASVKALASTEVDISSLTPGNTITVLWRGKPVFIRRRTQEEIAEARSVKMEDLIHPEKDEDRAKNPEWLVMLGVCTHLGCVPLNDKGDYNGWFCPCHGSHYDTSGRIRKVQHHGTWKFPNMNLVNT

SEQ ID NO: 89261 - protein, 172 aa, Unknown
  Bacterial polypetide isolated from the Sargasso Sea
MSESDKKKPNRRDFILTATTAAGAVGVGAAVWPLVDQMNPDASVKALASTEVDVSSVQPGQSITVIWRGKPVFIKRRTQDEIDSARAVDLSELKHPEKDEDRAKDPEWLVMLGVCTHLGCVPLTDKGDYNAWFCPCHGSHYDTSGRIRKGPAPTNMEIPKYEFVNSNTIKIG

SEQ ID NO: 89262 - protein, 176 aa, Unknown
  Bacterial polypetide isolated from the Sargasso Sea
FMAENSNNKRRDFLQLSTVTIGAVGTAAFIWPFLKSMNPAEDTIALGTTEVDVSQIEEGQSITVKWRGKPVFIRKRTKDEIDEAKTVNMSDLKDPEEDVDRVKKDEWLVLVGVCTHLGCVPLGQKLTDSKGEYNGWYCPCHGSHYDTSGRIRKGPAPENLAVPPYSFLNDSTIKIG

SEQ ID NO: 89263 - protein, 174 aa, Unknown
  Bacterial polypetide isolated from the Sargasso Sea
MYKSEKKTTTRRDFLFTTSYTLGAVGLGAVIWPLIDQMNPDKAQKALATTEVDISQIEPGKSITVLWRGKPVFLKRRTQEEILEARSVSLDDLPHPEKDEERVKSGKDEWLVMLGVCTHLGCVPLSDKGDYKGWFCPCHGSHYDLSGRIRKGPAPKNMEIPKYEFVDANTIKIG

SEQ ID NO: 89264 - protein, 170 aa, Unknown
  Bacterial polypetide isolated from the Sargasso Sea
MSDKKPKNRRDFIVTATTAAGAVGVGAAIWPLVDQMNPDASVKALASTEVDISSVKPGQSITVVWRGKPVFIKRRTQDEIDKARSVSLNELKHPEKDEDRVKNPEWLVMLGICTHLGCVPLSDKGEYDGWFCPCHGSHYDTSGRIRKGPAPINMEIPEYVFLNESTIKIG

SEQ ID NO: 89265 - protein, 172 aa, Unknown
  Bacterial polypetide isolated from the Sargasso Sea
MSESDKKKPNRRDFIFTATAAAGAVGVGTAVWPLIDQMNPDASVKAMASTEVDISSVQPGQSITVLWRGKPVFIKRRTQKEIDSARSVDLKDLKHPEKDEDRAKNPEWLVMLGVCTHLGCVPLTDKGDYNAWFCPCHGSHYDTSGRIRKGPAPTNLEVPKYVFVDSKTIKIG

SEQ ID NO: 89266 - protein, 110 aa, Unknown
  Bacterial polypetide isolated from the Sargasso Sea
RGKPVFIRRRTEEEILEAKSVDLNILKDPMSDEDRVKKEEWLVLEGVCTHLGCVPLGQKMSDTKGEYNGWFCPCHGSHYDSSGRIRKGPAPDNLAIPPYQFINDTTIKIG

SEQ ID NO: 89267 - protein, 135 aa, Unknown
  Bacterial polypetide isolated from the Sargasso Sea
MNPDASVKALASTEVDISSLTPGNTITVLWRGKPVFIRRRTQEEIAEARSVKMKDLIHPEKDEDRAKNPEWLVMLGVCTHLGCVPLNDKGDYNGWFCPCHGSHYDTSGRIRKGPAPWNMEIPKYEFVNANTIKIG

SEQ ID NO: 89268 - protein, 157 aa, Unknown
  Bacterial polypetide isolated from the Sargasso Sea
SIGGIGTAAFIWPFLKSMNPAEDTLALGSTEVDISEIGVGEAITVKWRGKPIFIRRRTQEEIQEAKIVDIKSLKDPENDSDRIEKEEWLVVLGVCTHLGCVPLGQKMSDSKGEYNGWFCPCHGSHYDSSGRIRKGPAPDNLAVPPYSFINETTIKIG

SEQ ID NO: 89269 - protein, 162 aa, Unknown
  Bacterial polypetide isolated from the Sargasso Sea
RRDFLFTATTAVGAVGAAAVVWPMIDQMNPDASVKALASTEVDISSLTPGNTLTVLWRGKPVFIRRRTQEEIDEARSVKMEDLIHPEKDEDRAKNPEWLVMLGVCTHLGCVPLNDKGDYNGWFCPCHGSHYDTSGRIRKGPAPWNMEVPKYEFVNTNTIKIG

SEQ ID NO: 89270 - protein, 162 aa, Unknown
  Bacterial polypetide isolated from the Sargasso Sea
MSKEEKKVNRRDFLFTASYTIGAVGAGAIIWPMIDQMNPDKAQQALATTEVDISSIEPGKSITVLWRGKPIFIKKRTSEEIAEARAVKLDDLPDPQKDEDRVKEGKDEWLVMLGVCTHLGCVPLKDKGDFNGWFCPCHGSHYDVSGRIRKGPAPTNMEIPKF

SEQ ID NO: 89271 - protein, 170 aa, Unknown
  Bacterial polypetide isolated from the Sargasso Sea
MSDKKQKNRRDFIFTATAAAGAVGVGAAVWPLVDQMNPDASVKALASTEVDISSVKPGQSITVVWRGKPVFIKRRTQDEINKARSVSLDELKHPEKDEDRVKNPEWLVMLGICTHLGCVPLSDKGEYDGWFCPCHGSHYDTSGRIRKGPAPINMEIPEYVFLNDNTIKIG

SEQ ID NO: 89272 - protein, 153 aa, Unknown
  Bacterial polypetide isolated from the Sargasso Sea
TAVGAVGAAAVVWPMIDQMNPDASVKALASTEVDVSSLTPGNTLTVLWRGKPVFIRRRTQEEIDEARKVKMEDLIHPEKDEDRAKNPEWLVMLGVCTHLGCVPLNDKGDYNGWFCPCHGSHYDTSGRIRKGPAPWNMEVPKYEFVDANTIKIG

SEQ ID NO: 89273 - protein, 153 aa, Unknown
  Bacterial polypetide isolated from the Sargasso Sea
YALGAVGVGAAVWPLIDQMNPDSSVRALANTEVDVSTIEPGKSITVLWRGKPVFIKRRTEEEIAEAKAVNLKDLKHPEKDEDRAKNPEWLVMIGVCTHLGCVPLGDKGEYNGWFCPCHGSHYDTSGRIRKGPAPTNLEIPKYEFVNSNTIKIG

SEQ ID NO: 89274 - protein, 169 aa, Unknown
  Bacterial polypetide isolated from the Sargasso Sea
MSEKKTNRRDFLFTATYAVGAVGAGAVIWPMIDQMNPDASVKALASTEVDVSAVDLGKTITVLWRGKPVFIRRRTQEEIAEARSVKMEDLKHPEKDEDRAKNPEWLVMLGVCTHLGCVPLDQKGDYNGWFCPCHGSHYDTSGRIRKGPAPTNMEIPEYKFVDANTIKIG

SEQ ID NO: 89275 - protein, 173 aa, Unknown
  Bacterial polypetide isolated from the Sargasso Sea
MSKEEKKVNRRDFLFTASYTVGAVGVGAVIWPMIDQMNPDKAQQALATTEVDISKIEPGKSITVLWRGKPVFLKRRTAEEIAEARAVNMDDLPDPQKDEERVKEGKDEWLVMLGVCTHLGCVPLKDKGDFNGWFCPCHGSHYDVSGRIRKGPAPTNMEIPKFEFVDSNTIKIG

SEQ ID NO: 89276 - protein, 102 aa, Unknown
  Bacterial polypetide isolated from the Sargasso Sea
PVFIKRRTQKEISEARDVKLEDLKHPEKDEDRAKNPEWLVMLGVCTHLGCVPLGDKGEYKGWFCPCHGSHYDTSGRIRKGPAPTNLEVPKYEFVNSTTIKIG

SEQ ID NO: 89277 - protein, 127 aa, Unknown
  Bacterial polypetide isolated from the Sargasso Sea
ATTEVDISNIEPGKSITVLWRGKPVFLKRRTSEEIAEARSVNLDDLPDPQKDEDRVKEGKDEWLVMLGVCTHLGCVPLKDKGDFNGWFCPCHGSHYDVSGRIRKGPAPTNMEIPKFEFVDSNTIKIG

SEQ ID NO: 89278 - protein, 160 aa, Unknown
  Bacterial polypetide isolated from the Sargasso Sea
DFIVTATTAAGAVGVGAAVWPLIDQMNPDASVKALASTEVDISGLQPGQSITVLWRGKPVFIKRRTQEEIDSAREVDLKDLKHPEKDEDRAKNPEWLVMLGVCTHLGCVPLTDKGDYNAWFCPCHGSHYDTSGRIRKGPAPTNLEVPKYVFIDSKTIKIG

SEQ ID NO: 89279 - protein, 165 aa, Unknown
  Bacterial polypetide isolated from the Sargasso Sea
KTKRRDFLFTATTAVGAVGAAAVVWPMIDQMNPDASVKALASTEVDVSSLTPGNTLTVLWRGKPVFIRRRTQDEINEARAVKMEDLIHPEKDEDRAKNPEWLVMLGVCTHLGCVPLNDKGDYNGWFCPCHGSHYDTSGRIRKGPAPWNMEVPKYEFVNANTIKIG

SEQ ID NO: 89280 - protein, 174 aa, Unknown
  Bacterial polypetide isolated from the Sargasso Sea
MSDSKKPRRDFIKLSAMTLGGVGAASLLIPFISSMNPGKDTLALASTEIDLSPLEEGQSLTVIWRGKPVFIKHRTKSEIDSARNISLEELPDAEEDSARVQKDNWLVVLGVCTHLGCVPLGQKASDTKGDYGGWFCPCHGSHYDTSGRIRKGPAPTNLPVPPYVFLTDNRIKIG

SEQ ID NO: 89281 - protein, 171 aa, Unknown
  Bacterial polypetide isolated from the Sargasso Sea
MDNSGKKNNRRDFLFTATYAVGAVGIGATIWPFIDQMNPDSSVKALATTEVDISQIQPGKSITVLWRGKPVFIKRRTEDEISEAQMVSLDDLKHPEKDKDRVKKPEWLVMMGICTHLGCVPLSDKGEYKGWFCPCHGSHYDTSGRIRKGPAPTNMEIPKYAFVDENTIKIG

SEQ ID NO: 89282 - protein, 170 aa, Unknown
  Bacterial polypetide isolated from the Sargasso Sea
MSEEKKTNRRDFIFTASYALGAVGVGAVVWPLIDQMNPDASVKALASTEVDISNVEKGQSITVLWRGKPVFIRRRTSEEIAKAKNVKLEDLPHPETDEDRAKNPEWLVMLGVCTHLGCVPLGDKGEYGGWFCPCHGSHYDTSGRIRKGPAPTNMEVPKYEFVNSNTIKIG

SEQ ID NO: 89283 - protein, 169 aa, Unknown
  Bacterial polypetide isolated from the Sargasso Sea
MSEKEPKRREFLFTATYAVGAVGVGAVVWPMIDQMNPDASVKALASTEVDISSVTPGKTITVLWRGKPVFIRRRTQDEIDDAKSVKLEELKDPEKDEDRAKNPEWLVMLGVCTHLGCVPLNDKGDYNGWFCPCHGSHYDTSGRIRKGPAPTNMEVPKYEFVNANTIKIG

SEQ ID NO: 89284 - protein, 170 aa, Unknown
  Bacterial polypetide isolated from the Sargasso Sea
MAEEKKTKRRDFIFTASYTLGAVGVGAAVWPLIDQMNPDASVKALASTEVDISSLQPGQSITVLWRGKPVFIKRRTEEEILEARKVELKELPDPEKDEDRAKNPEWLVMLGMCTHLGCVPLADKGEYGGWFCPCHGSHYDTSGRIRKGPAPTNLEIPKYEFLNTNIIKIG

SEQ ID NO: 89285 - protein, 172 aa, Unknown
  Bacterial polypetide isolated from the Sargasso Sea
MSDSDKKKPNRRDFIVTATTAAGAVGVGAAIWPLVDQMNPDASVKALASTEVDISDMLPGQSITVLWRGKPVFIKRRTQEEIDSAREVDLKDLKHPEKDEDRAKNPEWLVMLGVCTHLGCVPLTDKGDYNAWFCPCHGSHYDTSGRIRKGPAPTNLEVPKYVFVDSKTIKIG

SEQ ID NO: 89286 - protein, 82 aa, Unknown
  Bacterial polypetide isolated from the Sargasso Sea
MPDPQKDEDRVKEGKDEWLVMLGVCTHLGCVPLKDKGDFNGWFCPCHGSHYDVSGRIRKGPAPTNMEIPKFEFVDSNTIKIG

SEQ ID NO: 89287 - protein, 169 aa, Unknown
  Bacterial polypetide isolated from the Sargasso Sea
MSEKQVTRRNFLYVTTGAFAAAGAASLAWPFVDQMNPDASVKALASTEIDLRPIIPGQSITVMWRGKPVFIRRRTQAEIDEAKKVNLADLPHPEEDSDRAQNPEWLVMVGICTHLGCVPLGQKGDYNGWFCPCHGSHYDTSGRIRKGPAPTNLEIPDYVFLNETTIKIG

SEQ ID NO: 89288 - protein, 175 aa, Unknown
  Bacterial polypetide isolated from the Sargasso Sea
MAKKPKNKRRDFLQLSTVTLGAVGTAAFIWPFLKSMSPAEDTLAAGSTEVDISAIEEGQSITIKWRGKPVFIKKRTKDEINAAKMVQASDLRDPQDDADRVQKEEWLVLVGVCTHLGCVPLGQKVSDMKGEYDGWYCPCHGSHYDTSGRIRKGPAPKNLDVPPYTFLNDNTIKIG

SEQ ID NO: 89289 - protein, 169 aa, Unknown
  Bacterial polypetide isolated from the Sargasso Sea
MSDKPVTRRNFLYITTGTFTAAGAASLVWPFVDQMNPDASVKALASTEVDLRPIAPGQSITVLWRGKPVFIRRRTPEEISEAKAVSLDDLPDPQDDAARAINPEWLVMVGICTHLGCIPLGQKGEYNGWFCPCHGSHYDTSGRIRKGPAPTNLEIPDYVFLNDNTIKIG

SEQ ID NO: 89290 - protein, 170 aa, Unknown
  Bacterial polypetide isolated from the Sargasso Sea
MSDKKKPNRRDFIFTATAAVGAVGAGAAAWPLIDQMNPDASVKALASTEVDVSSLQPGQSITVLWRGKPVFIKRRTENEISEARNVKISDLKHPEKDEDRAQNPEWLVMLGVCTHLGCVPLADKGEYGGWFCPCHGSHYDTSGRIRKGPAPTNLEIPKYEFVNSNTIKIG

SEQ ID NO: 89291 - protein, 163 aa, Unknown
  Bacterial polypetide isolated from the Sargasso Sea
MSEKKTKRRDFLFTATYAVGAVGAAAVVWPMIDQMNPDASVKALASTEVDISSMNPGKTITVLWRGKPVFIRRRTQKEIAEAKAVKLEDLKHPEKDEDRAKNPEWLVMLGVCTHLGCVPLDQKGDYNGWFCPCHGSHYDTSGRIRKGPAPTNMEIPEYKFVNT

SEQ ID NO: 89292 - protein, 153 aa, Unknown
  Bacterial polypetide isolated from the Sargasso Sea
TAAGAVGVGAAIWPLVDQMNPDASVKALASTEVDISSIEPGQSITVLWRGKPVFIKRRTDEEIKSARAVNLKDLKHPEKDEDRAKNPEWLVMLGVCTHLGCVPLTNKGDYNAWFCPCHGSHYDTSGRIRKGPAPTNMEIPKYEFVNANIIKIG

SEQ ID NO: 89293 - protein, 144 aa, Unknown
  Bacterial polypetide isolated from the Sargasso Sea
AAVWPLVDQMNPDASVKALASTEVDISSVKPGQSITVVWRGKPVFIKRRTQDEIDKARSVSLNELKHPEKDEDRVKNPEWLVMLGICTHLGCVPLSDKGEYDGWFCPCHGSHYDTSGRIRKGPAPINMEIPEYVFLNENTIKIG

SEQ ID NO: 89294 - protein, 169 aa, Unknown
  Bacterial polypetide isolated from the Sargasso Sea
MSEKKVKRRDFIFTATYAVGAVGVAATVWPLVDQMNPDASVKALASTEVDVSSVEPGKTITVLWRGKPVFIKRRTQNEIDEARSVRMEDLPDPEKDEDRAKNPEWLVMLGVCTHLGCVPLNDKGDYNGWFCPCHGSHYDTSGRIRKGPAPTNMSIPNYEFLENNIIKIG

SEQ ID NO: 89295 - protein, 172 aa, Unknown
  Bacterial polypetide isolated from the Sargasso Sea
MSDSDKKKPPRRDFILTATTAAGAVGVGAAVWPLIDQMNPDASVKALASTEVDISGVEPGQSITVLWRGKPVFIKRRTQEEIDSARSVDLKDLKHPERDEDRAKNPEWLVMLGVCTHLGCVPLTDKGDYNAWFCPCHGSHYDTSGRIRKGPAPTNMEVPKYVFLNSKTIKIG

SEQ ID NO: 89296 - protein, 172 aa, Unknown
  Bacterial polypetide isolated from the Sargasso Sea
MPESDKKKQNRRDFIFTATAAAGAVGVGAAAWPLIDQMNPDASVKAMASTEVDISAVQPGQSITVLWRGKPVFIKRRTQEEIDSARSVDLKDLKHPEKDEDRAKNPEWLVMLGVCTHLGCVPLTDKGDYNAWFCPCHGSHYDTSGRIRKGPAPTNLEVPKYEFVNSNTIKIG

SEQ ID NO: 89297 - protein, 170 aa, Unknown
  Bacterial polypetide isolated from the Sargasso Sea
MSDKKPKNRRDFIFTATAAAGAVGVGAAVWPLVDQMNPDASVKALASTEVDISSVKPGQSITVVWRGKPVFIKRRTQDEIDKARSVSLDELKHPEKDEDRVKNPEWLVMLGICTHLGCVPLSDKGEYDGWFCPCHGSHYDTSGRIRKGPAPINMEIPEYVFLNDNTIKIG

SEQ ID NO: 89298 - protein, 173 aa, Unknown
  Bacterial polypetide isolated from the Sargasso Sea
MSKEEKKVNRRDFLFTASYTVGAVGLGAVVWPLVDQMNPDKAQQALATTEVDISQIEPGKSITVLWRGKPVFLKRRTQEEITEARSVNLNDLPDPQKDEDRVKKGKDEWLVMLGVCTHLGCVPLKDKGDYKGWFCPCHGSHYDLSGRIRKGPAPTNMEIPKFEFVDNNTIKIG

SEQ ID NO: 89299 - protein, 175 aa, Unknown
  Bacterial polypetide isolated from the Sargasso Sea
MADNPDNKRRDFLQLSTISIGAVGTAAFIWPFIKSMNPAEDTIALGTTEVDVSNIVEGQSVTVKWRGKPVFIRKRTKDEIDAAKKVNIADLPDPEEDVDRVKKDEWLVLVGVCTHLGCVPLGQKLTDSKGEYNGWYCPCHGSHYDTSGRIRKGPAPENLAVPPYSFLNDTTIKIG

SEQ ID NO: 89300 - protein, 169 aa, Unknown
  Bacterial polypetide isolated from the Sargasso Sea
MSEKQVTRRNFLYVTTGAFTAAGAASIAWPFIDQMNPDASVKALASTEIDLRPIVPGQSITVLWRGKPVFIRRRTQEEINEAQMVSLTDLPDPQDDSERALNPEWLVMVGICTHLGCIPLGQKGDYNGWFCPCHGSHYDTSGRIRKGPAPTNLEIPEYVFLNDNTIKIG

SEQ ID NO: 89301 - protein, 169 aa, Unknown
  Bacterial polypetide isolated from the Sargasso Sea
MSEKKTNRRDFLFTATYAVGAVGVGATVWPMIDQMNPDASVKALASTEVDISSVTPGKTITVLWRGKPVFIRRRTQEEITEAKSVKMEELKDPEKDEDRAKNPEWLVMLGVCTHLGCVPLNDKGDYNGWFCPCHGSHYDTSGRIRKGPAPTNMEVPKYEFVNSNTIKIG

SEQ ID NO: 89302 - protein, 173 aa, Unknown
  Bacterial polypetide isolated from the Sargasso Sea
MSQKEKKTNRRDFLYTASYTVGAVGLGAVIWPLIDQMNPDKAQKALATTEVDITNIEPGKEITVLWRGKPVFLKRRTPEEIAEARSVKMDDLPDPQRDEERVKEGKDEWLVMLGVCTHLGCVPLKNKGDYKGWFCPCHGSHYDVSGRIRKGPAPKNMEIPKFEFVDNNTIKIG

SEQ ID NO: 89303 - protein, 173 aa, Unknown
  Bacterial polypetide isolated from the Sargasso Sea
MSDTLDDDKPTRRDFLYITTGAFGVVGAASVAWPLIDQLNPDASVKAVSTIEVDISSIEPGSFLKVAWRGKPIYIRRRTNEEIADAEKDDNLNLPDPQKDIDRVQKKEWLVVVGVCTHLGCIPIANQGEYEGWFCPCHGSHYDISGRIRKGPAPTNLEVPPYEFVSDSLIKIG

SEQ ID NO: 89304 - protein, 170 aa, Unknown
  Bacterial polypetide isolated from the Sargasso Sea
MEEDKKTNRRDFIFTASYALGAVGVGAVVWPLIDQMNPDASVKALASTEVDVSGVERGQSITVLWRGKPVFIRRRTEEEIAKAKDVKLEDLPHPETDEDRAKNPEWLVMLGVCTHLGCVPLGDKGEYGGWFCPCHGSHYDTSGRIRKGPAPTNMEVPKYEFVNSNTIKIG

SEQ ID NO: 89305 - protein, 98 aa, Unknown
  Bacterial polypetide isolated from the Sargasso Sea
RRRTSEEIAEAEKDDNVSLPDPEKDVDRVLKKEWLVVVGVCTHLGCIPIANQGEYEGWFCPCHGSHYDISGRIRKGPAPTNLEVPPYEFVSDSLIKIG

SEQ ID NO: 89306 - protein, 111 aa, Unknown
  Bacterial polypetide isolated from the Sargasso Sea
TVLWRGKPVFIKKRTLEEIAEARAVKLDDLPDPQKDEDRVKDGKDEWLVMLGVCTHLGCVPLKDKGDFNGWFCPCHGSHYDVSGRIRKGPAPTNMEIPKFEFVDSNTIKIG

SEQ ID NO: 89307 - protein, 168 aa, Unknown
  Bacterial polypetide isolated from the Sargasso Sea
MSEDKKTNRRDFIFTASYALGAVGVGAAVWPLIDQMNPDASVKALASTEVDISGVEVGQSITVLWRGKPVFIRRRTSEEIAKAKDVNLDDLPHPESDEDRAKNPEWLVMLGVCTHLGCVPLGDKGEYGGWFCPCHGSHYDTSGRIRKGPAPTNMEVPKYEFVNNNIIK

SEQ ID NO: 89308 - protein, 122 aa, Unknown
  Bacterial polypetide isolated from the Sargasso Sea
AIEEGQSITIKWRGKPVFIKKRTKDEIDAAKMVEAADLRDPQDDSDRVQKEEWLVLVGVCTHLGCVPLGQKVSDMKGEYDGWYCPCHGSHYDTSGRIRKGPAPKNLDVPPYTFLNDTTIKIG

SEQ ID NO: 89309 - protein, 169 aa, Unknown
  Bacterial polypetide isolated from the Sargasso Sea
MSEKKTNRRDFLFTATYAVGAVGVGATIWPMIDQMNPDASVKALASTEVDVSAVNPGKTITVLWRGKPVFIRRRTQDEIAEARSVKLEDLKHPEKDEDRAANPEWLVMLGVCTHLGCVPLDQKGEYNGWFCPCHGSHYDISGRIRKGPAPTNMEIPKYEFVNANTIKIG

SEQ ID NO: 89310 - protein, 170 aa, Unknown
  Bacterial polypetide isolated from the Sargasso Sea
MAEQKKSKRRDFIFTASYALGAVGVGATVWPLIDQMNPDASVKALASTEVDISSIERGQSITVLWRGKPVFIRRRTEEEIAKAKEVNLKDLKHPEKDEDRAKNPEWLVMLGVCTHLGCVPLGDKGEYGGWFCPCHGSHYDTSGRIRKGPAPTNMEVPKYEFVNNNTIKIG

SEQ ID NO: 89311 - protein, 169 aa, Unknown
  Bacterial polypetide isolated from the Sargasso Sea
MSDKKPKRREFLFTATTAVGAVGAAAVVWPMVDQMNPDASVKALASTEVDVSSVKPGNTITVLWRGKPVFIRRRTKEEIEEARSVKMEELIHPEKDEDRAKNPEWLVMVGVCTHLGCVPLNDKGDYNGWFCPCHGSHYDTSGRIRKGPAPWNMEVPKYEFVNANTIKIG

SEQ ID NO: 89312 - protein, 170 aa, Unknown; identical to SEQ ID NO: 89230
  Bacterial polypetide isolated from the Sargasso Sea

SEQ ID NO: 89313 - protein, 175 aa, Unknown
  Bacterial polypetide isolated from the Sargasso Sea
MAENSKNKRRDFLQLSTVTIGAVGTAAFIWPFLKSMNPAEDTIALGTTEVDVSQIEEGQSITVKWRGKPVFIRKRTKDEIDEAKTVNMSDLKDPEEDVDRVKKDEWLVLVGVCTHLGCVPLGQKLTDSKGEYNGWYCPCHGSHYDTSGRIRKGPAPENLAVPPYSFLNDTTIKIG

SEQ ID NO: 89314 - protein, 173 aa, Unknown
  Bacterial polypetide isolated from the Sargasso Sea
MSKEEKKVNRRDFLFTASYTVGAVGVGAVIWPMIDQMNPDKAQQALATTEVDISSIEPGKSITVLWRGKPVFLKRRTSEEIAEARAVKLDDLPDPQKDEDRVKEGKDEWLVMLGVCTHLGCVPLKDKGDFNGWFCPCHGSHYDVSGRIRKGPAPTNMEIPKFEFVDNNTIKIG

SEQ ID NO: 89315 - protein, 121 aa, Unknown
  Bacterial polypetide isolated from the Sargasso Sea
VDISGVEKGQSITVLWRGKPVFIRRRTEEEIAKAKDVKLDDLPHPETDEERAKNPEWLVMLGVCTHLGCVPLGDKGEYGGWFCPCHGSHYDTSGRIRKGPAPTNMEIPKYEFVNSNTIKIG

SEQ ID NO: 89316 - protein, 172 aa, Unknown
  Bacterial polypetide isolated from the Sargasso Sea
MSDSEKKKPNRRDFIVTATTAAGAVGVGAVVWPLVDQMNPDASVKALASTEVDISAVEPGQSITVLWRGKPVFIKRRTQDEIDSARAVDLSELKHPEKDEDRAKNPEWLVMLGVCTHLGCVPLNDKGDYGAWFCPCHGSHYDTSGRIRKGPAPTNMEVPKYEFVNSNTIKIG

SEQ ID NO: 89317 - protein, 169 aa, Unknown
  Bacterial polypetide isolated from the Sargasso Sea
MSDKKPERRDFLFTASYAVGAVGAAAVVWPLIDQMNPDASVKALASTEVDISSVKRGNTITVLWRGKPVFIRRRTEEEIKEARSVKMEDLIHPEKDEDRAKNPEWLVMLGVCTHLGCVPLNDKGDYDGWFCPCHGSHYDTSGRIRKGPAPLNMEVPKYEFVNANTIKIG

SEQ ID NO: 89318 - protein, 169 aa, Unknown
  Bacterial polypetide isolated from the Sargasso Sea
MSDKKVKRRDFIFTTSYALGAVGVGAAVWPLIDQMNPDASVKALASTEVDVSSVEPGQSITVLWRGKPVFIKRRTQEEIAKAREVDIKILKHPEKDEDRAKNPEWLVMLGVCTHLGCVPLGDKGEYGGWFCPCHGSHYDTSGRIRKGPAPTNMEIPKYEFVNTNTIKIG

SEQ ID NO: 89319 - protein, 110 aa, Unknown
  Bacterial polypetide isolated from the Sargasso Sea
VLWRGKPVFLKRRTSEEIAEARAVSLDDLPDPQKDEDRVKDGKDEWLVMLGVCTHLGCVPLKDKGDYKGWFCPCHGSHYDISGRIRKGPAPKNMEIPKFEFVDNNTIKIG

SEQ ID NO: 89320 - protein, 169 aa, Unknown
  Bacterial polypetide isolated from the Sargasso Sea
MSDKPVTRRNFLYITTGTFTAAGAASLVWPFVDQMNPDASVKALASTEVDLRPIAPGQSITVLWRGKPVFIRRRTPEEISEAKAVSLDELPDPQDDSARAKNPEWLVMVGICTHLGCIPLGQKGEYNGWFCPCHGSHYDTSGRIRKGPAPTNLEIPDYVFLNDNTIKIG

SEQ ID NO: 89321 - protein, 118 aa, Unknown
  Bacterial polypetide isolated from the Sargasso Sea
STVNPGKTITVLWRGKPVFIRRRTQEEIAEAKSVKLEDLKHPEKDEDRAKNPEWLVMLGVCTHLGCVPLDQKGDYNGWFCPCHGSHYDTSGRIRKGPAPTNMEIPEYKFVDANTIKIG

SEQ ID NO: 89322 - protein, 170 aa, Unknown
  Bacterial polypetide isolated from the Sargasso Sea
MSEEKKTNRRDFIFTASYALGAVGVGAAVWPLVDQMNPDASVKALASTEVDISGVEVGQSITVLWRGKPVFIRRRTSEEIAKAKDVKIDDLPHPETDEDRAKNPEWLVMLGVCTHLGCVPLGDKGEYGGWFCPCHGSHYDTSGRIRKGPAPTNMEVPKYEFVDSNTIKIG

SEQ ID NO: 89323 - protein, 170 aa, Unknown
  Bacterial polypetide isolated from the Sargasso Sea
MSDQKKVNRRDFIYTASTVVGVVGVGAAAWPLIDQMNPDASVKALATTEVDVSLVKPGQSITVLWRGKPVFIKRRTENEITEAKAVSLTELKHPEKDEDRASNPEWLVMLGVCTHLGCVPLADKGDYNGWFCPCHGSHYDTSGRIRKGPAPTNLEIPKYEFVNSNTIKIG

SEQ ID NO: 89324 - protein, 174 aa, Unknown
  Bacterial polypetide isolated from the Sargasso Sea
MSDSRKPRRDFIKLSAMTLGGVGAASLLIPFISSMNPGKDTLALASTEIDLSPLEEGQSLTVIWRGKPVFIKHRTKSEIDIAKNTSLDELPDAEEDSARVQKDNWLVVLGVCTHLGCVPLGQKASDTKGDYGGWFCPCHGSHYDTSGRIRKGPAPTNLPVPPYVFLTDNRIKIG

SEQ ID NO: 89325 - protein, 169 aa, Unknown
  Bacterial polypetide isolated from the Sargasso Sea
MSDKKPKRREFLFTVTYAIGAVGAGAVVWPLIDQMNPDASVKALASTEVDVSLVEPGNTITVLWRGKPVFIRRRTQDEISEAKAVKMEELKHPEKDEDRAKNPEWLVMLGICTHLGCVPLNDKGDYNGWFCPCHGSHYDTSGRIRKGPAPTNMEVPKYEFVNANTIKIG

SEQ ID NO: 89326 - protein, 169 aa, Unknown
  Bacterial polypetide isolated from the Sargasso Sea
MSEKKVKRREFIFTATYAVGAVGVGATIWPLIDQMNPDASVKALASTEVDISNVERGQSITVLWRGKPVFIRRRTEEEISKAKEVDLKDLKHPERDEDRAKNPEWLVMLGVCTHLGCVPLGDTGEYGGWFCPCHGSHYDTSGRIRKGPAPTNMEVPKYEFVNNNIIKIG

SEQ ID NO: 89327 - protein, 139 aa, Unknown
  Bacterial polypetide isolated from the Sargasso Sea
MIDQMNPDASVKALASTEVDVSSVNPGKTITVLWRGKPVFIRRRTQDEIAEAKSVSLKDLKHPEKDEDRAKNPEWLVMLGVCTHLGCVPLDQKGDYNGWFCPCHGSHYDISGRIRKGPAPTNMEIPKYEFVNANTIKIG

SEQ ID NO: 89328 - protein, 170 aa, Unknown
  Bacterial polypetide isolated from the Sargasso Sea
MSEDKTVTRRNFLYITTGSFFAAGSAAVVWPFVHQMNPDASVKALASTEVDLTPILPGQSITVLWRGKPVFIRRRTSEEIAEAKKVSLTELPDPEVDEDRVKNPEWLVMVGICTHLGCIPLGQKGEYNGWFCPCHGSHYDTSGRIRKGPAPKNLEIPQYVFLDENTVKIG

SEQ ID NO: 89329 - protein, 214 aa, Unknown
  Bacterial polypetide isolated from the Sargasso Sea
MTNDCFPPTRRILDDGGEQRRRHAGAQDARALHRVRRVHHTVAKAGDPDKRAFTYFVMTGGRMIYASALRLAVLKFLMSMSASADVLALASLEVDLSKVESGSTVTVKWRGKPVFIRRRTPAEVAKEAAVDVASLRDPQADSERAQNPEWLVAVGVCTHLGCVPIANAGDYNGWFCPCHGSHYDASGRIRKGPAPENLEVPEYKFLEGDKMLIG

SEQ ID NO: 89330 - protein, 175 aa, Unknown
  Bacterial polypetide isolated from the Sargasso Sea
MAKKPKNKRRDFLQLSTVTLGAVGTAAFIWPFLKSMSPAEDTLAAGSTEVDISAIEEGQSITIKWRGKPVFIKKRTKEEIDAAKMVQASDLRDPEDDADRVQKEEWLVLVGVCTHLGCVPLGQKVSDMKGEYDGWYCPCHGSHYDTSGRIRKGPAPKNLDVPPYAFLNDNTIKIG

SEQ ID NO: 89331 - protein, 173 aa, Unknown
  Bacterial polypetide isolated from the Sargasso Sea
MSKEEKNTNRRDFLFTASYTVGAVGIGAIIWPLIDQMNPDKAQQALATTEVDISSVEPGKSITVLWRGKPVFLKRRTKEEIAEARNVNLDDLPDPQKDEDRVKEGKDEWLVMLGVCTHLGCVPLKDKGDYNGWFCPCHGSHYDVSGRIRKGPAPTNMEIPKFEFVDNNTIKIG

SEQ ID NO: 89332 - protein, 199 aa, Unknown
  Bacterial polypetide isolated from the Sargasso Sea
MCHCYHRNISFLLYEIIYYQRYKILKMSDQKDEKKTNRRDFLFTATAAAGAVGVGAAVWPLVDQMNPDASVKALASTEVDVSSMQPGQSLTVLWRGKPVFIKRRTEDEIKKARTVDINDLKHPEKDEDRAKNPEWLVMLGICTHLGCVPLTDKGDYDGWFCPCHGSHYDTSGRIRKGPAPTNMEIPKYEFVNTNTIKIG

SEQ ID NO: 89333 - protein, 199 aa, Unknown
  Bacterial polypetide isolated from the Sargasso Sea
MCHCYHRNISFLLYEIIYYQRYKILKMSDQKDEKKTNRRDFLFTATAAAGAVGVGAAVWPLVDQMNPDASVKALASTEVDVSSMQPGQSLTVLWRGKPVFIKRRTDDEIKKARAVDINDLKHPEKDEDRAKNPEWLVMLGICTHLGCVPLTDKGDYDGWFCPCHGSHYDTSGRIRKGPAPTNMEIPKYEFVNTNTIKIG

SEQ ID NO: 89334 - protein, 289 aa, Unknown
  Bacterial polypetide isolated from the Sargasso Sea
QVARGLYGPLVVYDHDPNENDIGSNIVILADDWLLNSDEQIDANSFGNLGHWSHGGRLGNALSINGKFKPAIHVSSHGPVRLRFLNAANARILNFELSGGVMMKVICLDGSPCESFDTNRITLGPAQRVDVLIEDASQLVELLEVSSSKALNAAIFKPISSQLTSVKNSLSSEPFYSWPDTKNAKKIDVHMQGGAMGNLSKATFEGEERSLRDLALKEAKLWAFNGNIGGYGLNLAEIEIGEVVVIKAWNDTAWPHAMHLHGHHFWVDSSEFGTKKRALLRDTYLMQPG

SEQ ID NO: 89335 - protein, 409 aa, Unknown
  Bacterial polypetide isolated from the Sargasso Sea
MINRRKFLQSVSACISFFVLRNSEVNASLITRYELIASKSSHKFAYNLPASNLWLYNNVCPGPILTARKGEILEVLFTNNLEQPSTIHWHGIRNINGMDGVPELTQPAIEPGDSFTYRFPVNDSGTFWYHAHFKAWEQVARGLYGALIVTEQEDELNEQDILIIADDWKFTDDYQIDVDSFGNLHDWSHGGRFGTGLTINGESEIIKIPVPTNGQLRLRFINTANARILQFQILEKHPFHVISLDGAPCEPFEQDIITLSPGQRMDVIINDISDLCTLYEVSTGKFFEAAKIVPKISLKQKIFNFKYSTPWYPMPSLDNAKVIDIHMQGGAMGNLASAVFEGNERSLRDLAMNESKLWALNGKIGGYDHTLAEVSLGETVILRIWNDTSWEHSMHLHGHHFWVQSREFN

SEQ ID NO: 89336 - protein, 281 aa, Unknown
  Bacterial polypetide isolated from the Sargasso Sea
MKGAHDAEVGALQATSIAALAAAESANTAALAAKEDEHAAAKTEAKDAHNKAIEGMKGAHDAEIKQLQAAQAVETTQLQLSHAVETTNLQNNHTAALAALQAKLEEQGSAHQEQTAALAAEQAAALAAKENEHAAALAATQSAYAALEELKLSHAAEIKQLQAAQAVETTQLQLSHAAEIKQLQAAQAVETTQLQLSHAVETTNLQNNHTAALEAERKKSTIDSLQKQVNHLDGIKEIRFAHAAETKQLQDKHAAALAEKDAAHEADKAATQSAHAAALEA

SEQ ID NO: 89337 - protein, 318 aa, Unknown
  Bacterial polypetide isolated from the Sargasso Sea
RNFYANGWGGLGGTGAGIGTPASGLQSQDRSTDLSGTEFALTIGRTPVNFTGHLRYALTVNGSIPAPILRWKQGSEVTLRVTNTLATQTSIHWHGILVPFAMDGVPGVSFPGIPAHQTFVYKFKVRQAGTYWYHSHTRFQEQLGLYGPLVIEPQRPAPIPSDRDYVVMLSDWTDEDPENVFLHLKQSSDFYNFQLPTVTDFVADVRAAGLSKALARRRMWNQMRMNPTDLADVSAATYCYLVNGATPFTNWTAIAEAGEYVRLRFINGSATTTFDVRIPGLTMRVCAADGQDVEPVNVDEFRIGVAETYDVLVQMPRE

SEQ ID NO: 89338 - protein, 159 aa, Unknown
  Bacterial polypetide isolated from the Sargasso Sea
AGSSFKDNAATGYAPELSGKVIELTIAESLVNFTGVVRTATTINGSIPAPTLRLREGDEVTIKVTNTLSVPSSIHWHGIILPYQMDGVPGLSFKGIMPGETFVYKFNLQQSGTYWYHSHSGFQEMTGMYGALIIEPREQDIIVADREYVVQLSDWTDDD

SEQ ID NO: 89339 - protein, 273 aa, Unknown
  Bacterial polypetide isolated from the Sargasso Sea
MTNSELNNSRRRFVFGASAMLALMSIPFPKNAVANALSQSLSQLSGKVFDLTIDYKMVNFTGKSARATVVNQLLPAPLLRWKEGETVTLRVKNNLDHDSSIHWHGIILPTEMDGVPGFSFDGIKPGETFEYQFTVQQSGTYWYHSHSGYQEQTGLFGAIVIDPATPDPVIYDRDYVIMLSDWSDEAPENIYAKLKKQADYYNYRERTVMDFFSDVNKNGLANTWNARSMWNNARMSDRDISDVTGSTYTYLMNGNPPQQGWQGLFEQGEKVRL

SEQ ID NO: 89340 - protein, 240 aa, Unknown
  Bacterial polypetide isolated from the Sargasso Sea
GAAPVLKGNEFDLVIAESAVNFTGKPGMATTINGSLPAPTLRWREGETVTIRVTNKLREATSIHWHGIILPYQMDGVPGISFAGIPPGETFTYRFKVQQSGSYWYHSHSGMQELTGMYGAIIIDPAGPETIRADRDHVVLFSDWTDEDPMRVFAKLKVQGDYYNYNQPTVFDFFRDASRDGVSAALDKRKMWNEMRMNPTDLADLSSATLTYLANGVTPAGNWTALFRPGERVRLRMVNG

SEQ ID NO: 89341 - protein, 244 aa, Unknown
  Bacterial polypetide isolated from the Sargasso Sea
PSAKHLYGTTFNLEINELPVNFTGSTVMATAINGQLPAPTLHWREGDTITINVTNRLKESTSIHWHGIILPSEMDGVPGLSYSGIGPGETFQYRFKVQQAGTYWYHSHTRFQEQTGIYGAIVIEPREPRFSSDQDHVVLLSDWSDTDPETIFTNLKKMSSYYSQTEPTTSELLNSTTFTDAWNMRMMWNKMRMSPRDLSDVTGYTYTFLTNGVTPAGNWTVLFKRGQKIRLRFVNASAMTYFDV

SEQ ID NO: 89342 - protein, 228 aa, Unknown
  Bacterial polypetide isolated from the Sargasso Sea
MDDNKFKLPASISRRRFVQGLAVGGVIASFPHVVRAGSSFKDNAATGSAPELSGKVIELTIAESLVNFTGVVRTATTINGSIPAPTLRLREGDEVTIKVTNTLSVPSSIHWHGIILPYQMDGVPGLSFKGIMPGETFVYKFNLQQSGTYWYHSHSGFQEMTGMYGALIIEPREQDIIVADREYVVQLSDWTDDDPMKVFSKLKVQGDIYNYNQPTVRDFFRDKVRKRA

SEQ ID NO: 89343 - protein, 312 aa, Unknown
  Bacterial polypetide isolated from the Sargasso Sea
KEGQHVTINVTNNLLESTSIHWHGLILPYTMDGVPGVSFPGIAAGSTFTYEFDIEQNGTYWYHSHSGLQEQLGHLGPMVIEPKDGDIGADREHTIILSDWTFEDPHDVFRHLKVAEGYYNYQQRTVENTIKDIKSQGLINTVKERAMWSRMRMNPRDILDVTGATYTYLMNGRDPQTNWTALYKPGESIRLRLINGSAMTYFDFQVPGLDLTVVAVDGQPVKPVTVGEIRIAVAETYDVIVKPKDTKTYTIFAQSMDRSGYARGTLATSVGKEASIPALRPMPELGMDAMGMSGMDEMANMDSMAATNNKET

SEQ ID NO: 89344 - protein, 228 aa, Unknown
  Bacterial polypetide isolated from the Sargasso Sea
MSDRHFYAGVSRRRFIQGAATMGLLAGFDSLLPAYARGQLDNTNAFHTVRNGADIYDLTVARTPLKIGGTVSEQPITINGTLPAPLVRLKQGREAILRVTNTLPEATSIHWHGLILPYQMDGVPGVSFPGIMPGETFEYRFPVEQHGTYWYHSHSGLQEQLGHYGPIIIDPAEPESVAYDREYVVVLSDWTFDSPEDVFRNLKVAEGYYNYNQRTVSDFFKDVETMGW

SEQ ID NO: 89345 - protein, 260 aa, Unknown
  Bacterial polypetide isolated from the Sargasso Sea
MTNSELNNSRRRFVFGASAMLALMSIPFPKNAVANALSQSLSQLSGKVFDLTIDYKMVNFTGKSARATVVNQLLPAPLLRWKEGETVTLRVKNNLDHDSSIHWHGIILPTEMDGVPGFSFDGIKPGETFEYQFTVQQSGTYWYHSHSGYQEQTGLFGAIVIDPATPDPVIYDRDYVIMLSDWSDEAPENIYAKLKKQADYYNYRERTVMDFFSDVNKNGLANTWNARSMWNNARMSDRDISDVTGSTYTYLMNGNPPQQG

SEQ ID NO: 89346 - protein, 291 aa, Unknown
  Bacterial polypetide isolated from the Sargasso Sea
MTNSELNNSRRRFVFGASAMLALMSIPFPKNAVANALSQSLSQLSGKVFDLTIDYKMVNFTGKSARATVVNQLLPAPLLRWKEGETVTLRVKNNLDHDSSIHWHGIILPTEMDGVPGFSFDGIKPGETFEYQFTVQQSGTYWYHSHSGYQEQTGLFGAIVIDPATPDPVIYDRDYVIMLSDWSDEAPENIYAKLKKQADYYNYRERTVMDFFSDVNKNGLANTWNARSMWNNARMSDRDISDVTGSTYTYLMNGNPPQQGWQGLFEQGEKVRLRFINSSAMTIFDVRIPGL

SEQ ID NO: 89347 - protein, 567 aa, Unknown
  Bacterial polypetide isolated from the Sargasso Sea
PRAWKSWSRRRFIGTGGRAVLAAYALSVPGIARASAELARGTGPELDATSPEGVDLFIERKTIDIGGRPSSAITINGGIPGPLIRMREGRDALIRVHNRLDESTSIHWHGLLVPFTMDGVPGVSFEGIDPGTTFEYRFPVRQNGTYWYHSHSGLQEQLGHYGQLIIDPADKDPVEYDIEYSVVLSDWTHMDPYVVMHKLKTMEGYFNFQRPTLANLKTQAEATGQSITEVLKTRLSWQRMRMDPTDIADVTGSTYTFLMNGRTPDENWTAVAQPGQRVRLRIVNASALTYYDFRVNGLPMTVVQADGQNIEPVETDELRIAVAETYDVIVTLPDDRPRTLFAEAMDRSGFARGTIGPRPDIEAAIPERRRRPMLTMADMGMMHAVMNDNSSDAGSMEHGSHGNMSVAADTAHINEGSASSVEDLPTSGLPEQVEHGPDTHGPGSIVMGRTKYRQLSDPGPGLGDDGRRVLTYSQLRCLETPADRRPPTRQFDLHLTGNMHKYIWGFDGKKWSEADMIRFQYGERLRINMVNDTMMNHPIHLHGMWMDLYAGNKYAKNPRKHTVNVQP

SEQ ID NO: 89348 - protein, 532 aa, Unknown
  Bacterial polypetide isolated from the Sargasso Sea
MQSKTTRRTFVKGLAATGIIGGLGLWRTPVWAVNSPGQPNVLTGNEFDLFIGETPVNITGAARTAMTINGSLPGPILRWREGDTVTLRVRNRLKEDTSIHWHGIILPANMDGVPGLSFHGIAPDGMYEYKFKVNQNGTYWYHSHSGLQEQVGVYGALVIDAKEPEPFSYDRDYVVLLSDWTDENPTRVLAKLKKQSDYYNQHKRTVGDFIDDVSEMGWSAAVADRKMWAEMKMSPTDLADVSGYTYTYLMNGQAPNGNWTGIFKPGEKIRLRFINASAMTYFDVRIPGLKMTVVAADGLHVKPVSVDEFRIAVAETYDVIVEPDSEQAYTVFAQSMDRTGYARGTLAVQEGLSAPVPSPDPRPLIAMGDMGMDHGSMGGMDHGNMAGMDQGNMAGMDHGSMQGGMAGMDHSQMAGMDHSNMAGMAGMAGNMQAHPASETNNPLVDMQTMTPTHKLDDPGIGLRDNGRRVLTYSDLRSTFPDPDGREPSRTIELHLTGHMEKFSWSFDGNQFSDAEPLRLKYGERVRITLVND

SEQ ID NO: 89349 - protein, 363 aa, Unknown
  Bacterial polypetide isolated from the Sargasso Sea
MNDVHSKNGFNPSISRRKFVKGIAAGGVVASIPMSINAKEELPQKVYSSVLSGTVIDLVVEEVVVNFTGSTRIATVVNRSIPAPTLRLKEGDEVTLRVTNKLSEPTSIHWHGIILPFEMDGVPGISFNGIKPGSTFTYKFTLEQSGTYWYHSHSGSQEQTGMYGALIIEPKEGEIISADRDYVVLLSDWTDEHPMRILSKLKSQSDYYNFNQPTAINFINDVSNSGLKVAFTKRQMWNEMRMNSTDLADLSSATLTYLMNGTTPNGNWTGVFNKGEKIRLRFINGAGGSFYDVRIPGIKMTVVQTDGVDIEPIDVDEFRFGPGETYDVIVQPIDNAHTIFAQSMDRTGFARGTLSTAIGLSAP

SEQ ID NO: 89350 - protein, 530 aa, Unknown
  Bacterial polypetide isolated from the Sargasso Sea
MPGPLIRLKEGQRAHLNVTNHLNQDTSIHWHGIILPPDMDGVPGVSFAGIKPGETFKYAFDVEQNGTYWYHSHSGLQEQLGHLGPLVIDPADGDIGADREHTIILSDWTFSDPHDVMRKLKVAEGYYNYQKRTIFDTLEDVKKKGLADTWEERAMWGAMRMSPRDIADVTGSTYTYLMNGRTPQDNWQALFKVGEKIRLRIINGSAMTYFDFRIPGLEMTVVAADGQPVKPVNVDEFRIAVAETYDVIVQPKERKAYTFFAESFDRSGYARGTLTPSIGLTAEVPPQRVITERGMAAMGMDMSGMKGMNMDKSKVDSSGMAAPKGEMKGMGQHSAHTMHGTQMEGEMTPSKKLPVESIDIVHSEDGHGAGAAMIAKNPSSRLDEPGIGLEDSPHRVLVYTDLVGESPWPDEREPERQIELHLTGNMERYMWSFDGKKFSEVDGYVRFNYGERLRLILVNDTMMDHPIHLHGMWMELENGQYPRPRKHTISLKPGEKVSLQISADAPGEWAFHCHLLYHMEAGMFRVVQVA

SEQ ID NO: 89351 - protein, 660 aa, Unknown
  Bacterial polypetide isolated from the Sargasso Sea
MTNSELNNSRRRFVFGASAMLALMSIPFPKNAVANALSQSLSQLSGKVFDLTIDYKMVNFTGKSARATVVNQLLPAPLLRWKEGETVTLRVKNNLDHDSSIHWHGIILPTEMDGVPGFSFDGIKPGETFEYQFTVQQSGTYWYHSHSGYQEQTGLFGAIVIDPATPDPVIYDRDYVIMLSDWSDEAPENIYAKLKKQADYYNYRERTVMDFFSDVNKNGLANTWNARSMWNNARMSDRDISDVTGSTYTYLMNGNPPQQGWQGLFEQGEKVRLRFINSSAMTIFDVRIPGLKMSVVASDGQNIQPVSVDEFRIGVAETYDVVIEPEVDNAYCIFAQSIDRTGFTVGNLTSDASLHAPIPPMDPRPVLGHSDMGMDMSDMDMSGMDHSKMDMGAGDMSGMDHSKMAMGGGDMSGMDHSKMAMDGGDMSGMDHSKMAMGSGDMSGMDHSKMAMGGGDMSGMDHSKMAMDAAKATVSGLGLAGFGSNNEIKHIDTEFGPQVDMRADAPKSGLHDPGIGLRDHQQQFNRKVLTYGDIKGLHPTYDTRQPSREIQLHLTGNMNRYMWSVNGVKFMDAAPLEFEYGERLRITLVNDTMMTHPMHLHGMWSELETGDPDFIPRKHTVLVQPGSKISYLVTADAKGQWAYHCHLLFHMPGMFRKVVVK

SEQ ID NO: 89352 - protein, 105 aa, Unknown
  Bacterial polypetide isolated from the Sargasso Sea
MTQLSSNDVPSMGRRQFMNLLTFGTATGVALGALYPVANYFMPLRAGGGGGGTSAKDELGNPITKTGWLATHPAGDRSLVQGLKGDPTYLIVNEGGEIGEFGLNA

SEQ ID NO: 89353 - protein, 105 aa, Unknown
  Bacterial polypetide isolated from the Sargasso Sea
MTQLSSNDVPSMGRRQFMNLLTFGTATGVALGALYPVANYFMPLRAGGGGGGTSAKDELGNPITKTGWLATHQAGDRSLVQGLKGDPTYLIVNEGGEIGEFGLNA

SEQ ID NO: 89354 - protein, 226 aa, Unknown
  Bacterial polypetide isolated from the Sargasso Sea
METQNDEEVEIVETVPPEPFVTPDPMTVGVSRRQFFNRGIVGMMGLSIAGFGGASLAFLWPQGVSGFGSKIKVGNIPEILAEIKANNGFLYKPEGRMWLTAYPNGAVEKARSTYSSSEISGMAAGVDQGFEAGVVALYQKCPHLGCRVPNCVSSQWFECPCHGSQYNQVGEKRGGPAPRGMDRFAVTVNDGVLTVNTGAIIQGPPIGVNTTGQEAEGPNCIGQSDH

SEQ ID NO: 89355 - protein, 227 aa, Unknown
  Bacterial polypetide isolated from the Sargasso Sea
MSKETRQSDISSEKPEPEETGISQISGKEIERAAVIERQGGKEIVVQEQSTPVPWVAPDEETVGIARRQFLNRSIVALMGISLSSFGAACIAFLYGGGGGGGFGSKITVGNITDIQARIDAANGFLYVPEGRMWVTKYPAGSVKKAETAYSSQELAGMRSGLVALYQKCPHLGCRVPECQTSQWFECPCHGSQYNRVGEKRGGPAPRGKDRFAMEVKDGVFIVIPEP

SEQ ID NO: 89356 - protein, 163 aa, Unknown
  Bacterial polypetide isolated from the Sargasso Sea
MKNYIFQIFTIFSIITLSQAFYNNLRLSKKVILKNSKNNELPIPDIQKRHLMNSILLKSVYLSCGSLLGGYLSFFYPVVNSDSSGGLVAKDKDGNDVLLDDWLKNHPYPNRELIQGFKGDPYYIITTDNNNLEKFALNAICTHLGCVVPWNKAEQKFMCPCHG

SEQ ID NO: 89357 - protein, 53 aa, Unknown
  Bacterial polypetide isolated from the Sargasso Sea
PCHGSQYDTNGKVVRGPAPLSLALAHVDIEDDNVLVKQWSETDFRTNENPWWA

SEQ ID NO: 89358 - protein, 59 aa, Unknown
  Bacterial polypetide isolated from the Sargasso Sea
ANKYMCPCHGSQYDSTGKVVRGPAPLSLAIAHVSIEDDQVLVSQWTETDFRTGTDPWWG

SEQ ID NO: 89359 - protein, 178 aa, Unknown
  Bacterial polypetide isolated from the Sargasso Sea
MTQLSSNDVPSMGRRQFMNLLTFGTATGVALGALYPVANYFMPLRAGGGGGGTSAKDELGNPITKTGWLATHQAGDRSLVQGLKGDPTYLIVNEGGEIGEFGLNAICTHLGCVVPWDSGANKFICPCHGSQYDTNGKVVRGPAPLSLALAHVDIEDDAVLVKQWSETDFRTNENPWWA

SEQ ID NO: 89360 - protein, 176 aa, Unknown
  Bacterial polypetide isolated from the Sargasso Sea
MTQLSSNDVPSMGRRQFMNLLTFGTATGVALGALYPVANYFMPLRAGGGGGGTSAKDELGNPITKTGWLATHQAGDRSLVQGLKGDPTYLIVNEGGEIGEFGLNAICTHLGCVVPWDSGANKFICPCHGSQYDTNGKVVRGPAPLSLALAHVDIEDDAVLVKQWSETDFRTNENPW

SEQ ID NO: 89361 - protein, 178 aa, Unknown; identical to SEQ ID NO: 89359
  Bacterial polypetide isolated from the Sargasso Sea

SEQ ID NO: 89362 - protein, 60 aa, Unknown
  Bacterial polypetide isolated from the Sargasso Sea
GANKFICPCHGSQYDTNGKVVRGPAPLSLALAHVDVDDDAVLVKQWSETDFRTNENPWWA

SEQ ID NO: 89363 - protein, 178 aa, Unknown
  Bacterial polypetide isolated from the Sargasso Sea
MTQLSSSDVPGMGRRQFMNLLTFGSVTGVALGALYPVVNYFIPPKAAGSGGGTSAKDELGNPVTASGWLSNHADGDRSLVQGLKGDPTYLIVEGDDAIGSYGINAICTHLGCVVPWNSGANKFMCPCHGSQYDATGKVVRGPAPLSLALANVSVENDNVFVSQWSETDFRTGDKPWWV

SEQ ID NO: 89364 - protein, 169 aa, Unknown
  Bacterial polypetide isolated from the Sargasso Sea
MKKRILMNKILLYGGVYPTLGGLAVPYLMFFVPKTKSGGNSQFALDRNGNSIGLEDWIDSHGINSRSLVQGLDGDPSYLIVDDNKNIKDFALNAICTHLGCVVPWVPAENKFMCPCHGSQYDTNGYVVRGPAPLPLKLQEVSVDENKKITISKWTKTDFRNGMEPWWVK

SEQ ID NO: 89365 - protein, 161 aa, Unknown
  Bacterial polypetide isolated from the Sargasso Sea
MNLLTFGTATGVALGALYPVANYFMPLRAGGGGGGTSAKDELGNPITKTGWLATHQSGDRSLVQGLKGDPTYLIVNEDGEIGEFGLNAICTHLGCVVPWDSGANKFICPCHGSQYDTNGKVVRGPAPLSLALAHVDIDDDAVLVKQWSETDFRTNENPWWA

SEQ ID NO: 89366 - protein, 178 aa, Unknown
  Bacterial polypetide isolated from the Sargasso Sea
MTQLSSSDVPGMGRRQFMNLLTFGSVTGVALGALYPVANYFIPPKAAGSGGGTSAKDELGNDVSASGWLASHPEGDRSLVQGLKGDPTYLIVEGEDAIGSYGINAICTHLGCVVPWNSGANKFMCPCHGSQYDATGKVVRGPAPLSLALANVSVENDNVFVSQWTETDFRTGDKPWWA

SEQ ID NO: 89367 - protein, 178 aa, Unknown
  Bacterial polypetide isolated from the Sargasso Sea
MTQLSSNDVPSMGRRQFMNLLTFGTATGVALGALYPVANYFMPLRAGGGGGGTSAKDELGNPITKTGWLTNHQAGDRSLVQGLKGDPTYLIINEGGEIGEFGLNAICTHLGCVVPWDSGANKFICPCHGSQYDTNGKVVRGPAPLSLALAHVDIEDDAVLVKQWSETDFRTNENPWWA

SEQ ID NO: 89368 - protein, 111 aa, Unknown
  Bacterial polypetide isolated from the Sargasso Sea
WLATHQEGDRSLVRGLKGDPTYLIVNEGGGIGEFGLNAICTHLGCVVPWDSGANKFICPCHGSQYDTNGKVVRGPAPLSLALAHVDIEDDAVLVKQWSETDFRTNENPWWA

SEQ ID NO: 89369 - protein, 178 aa, Unknown
  Bacterial polypetide isolated from the Sargasso Sea
MTQLSSNEVPSMGRRQFMNLLTFGTATGVALGALYPVANYFMPLRAGGGGGGTSAKDELGNPVTKTGWLASHQAGDRSLVQGLKGDPTYLIVNSEGEIGEFGLNAICTHLGCVVPWDSGANKFICPCHGSQYDTNGKVVRGPAPLSLALAHVDVDDDAVLVKQWSETDFRTNENPWWA

SEQ ID NO: 89370 - protein, 86 aa, Unknown
  Bacterial polypetide isolated from the Sargasso Sea
EGPDAIGSYGINAICTHLGCVVPWNSGANKFMCPCHGSQYDATGKVVRGPAPLSLALANVSVENDNVFVSQWTETDFRTGDKPWWA

SEQ ID NO: 89371 - protein, 136 aa, Unknown
  Bacterial polypetide isolated from the Sargasso Sea
MTQISAKDVPGMGRRQFMNLLTFGSVTGVALGALYPVVNYFIPPKAAGAGGGTTAKDELGNPVTASGWLADHKEGDRSLVQGLKGDPTYLIVDGPDSIGDYGINAICTHLGCVVPWNAGANKFMCPCHGSQYDATG

SEQ ID NO: 89372 - protein, 165 aa, Unknown
  Bacterial polypetide isolated from the Sargasso Sea
MSDVYAFEADSLTGQRVPLSQYKGKVLLIVNTASKCGFTPQYAGLEAVYKRLHDKGLEVLGFPCNQFGKQEPGGEDEIGAFCEKNYGVSFPMFGKIDVNGSNAHPLYKWLTSEKPGVLGIGAIKWNFTKFLLRRDGTVYKRYAPMTKPEEIADDIERLLAEPDPA

SEQ ID NO: 89373 - protein, 157 aa, Unknown
  Bacterial polypetide isolated from the Sargasso Sea
MAISVSSVSVTTPDGSSKSLGDYAGKVLLIVNVASRCGFTKQYAGLQALNEAYAAKGLAVLGFPCNDFGAQEPGTLDEIKSFCSTTYGADFELFDKVHAKGSTTEPYTTLNQMDPAGDVEWNFEKFLVGKDGTVIARFKSGVTPEDLKSAIEAALAA

SEQ ID NO: 89374 - protein, 159 aa, Unknown
  Bacterial polypetide isolated from the Sargasso Sea
MTSIYSFSARTLGGEEVSLERYQGKVLLIVNTASECGFTPQYAGLQKLYDTYAARGLAVLGFPCNQFGKQEPGDAAQIGSFCEKNYGVTFPMFEKIDVNGANAHPLFRYLTGEAPGLLGLEAIKWNFTKFLIGRDGNVVKRYAPLTKPEAIVEDIEKLL

SEQ ID NO: 89375 - protein, 159 aa, Unknown
  Bacterial polypetide isolated from the Sargasso Sea
MSTLYSFSAETLAGAPASLDAYRGKVLLIVNTASECGFTPQYAGLQKLYDQYAARGFYVLGFPCNQFGKQEPGDATQIGAFCERNYGVTFPMFAKIDVKGDHAHPLYRYLTDEAPGILGLKAIKWNFTKFLVDRDGRIVKRYAPSTKPEEIAADIDKLL

SEQ ID NO: 89376 - protein, 183 aa, Unknown
  Bacterial polypetide isolated from the Sargasso Sea
MQNTILDTEVTTIDGEVTSLQPYSGNVLLIVNVASKCGLTPQYEQLENLQKTWHQQGFSVLGFPCNQFLGQEPGSEEEIKTYCSTTWGVTFPMFSKIDVNGEGRHPLYQKLIDAAPTAVAPADSGFYERMASKGRAPLYPDDILWNFEKFLVGRDGKVLQRFSPDMTPEDPILVQTIKQALAN

SEQ ID NO: 89377 - protein, 159 aa, Unknown
  Bacterial polypetide isolated from the Sargasso Sea
METIYNFSVKDADLTDISLKKYENKIILIVNVASFCGLTYQYKGLENIYKKYKDEGFEIIGFPCNQFAFQEPGSNQEIKEFCDTNYGVTFEIMSKIKVNGPKADPLFKFLKKQKSGIAGTPQIKWNFTKFLINRDGEVIKRFGPKIEAKDIESTIQKIL

SEQ ID NO: 89378 - protein, 130 aa, Unknown
  Bacterial polypetide isolated from the Sargasso Sea
MKKIDGTDQDLSDYSGKVVLVVNVASQCGYTSQYAGLQKLYDTFKDKGFVILGFPANDFGAQEPGSNSEIASFCSKNYGVTFDMFSKISVKGSGKANLYKTLTESANPSGEVGWDFEKFLIDRNGAVVGR

SEQ ID NO: 89379 - protein, 159 aa, Unknown
  Bacterial polypetide isolated from the Sargasso Sea
METIYNFSVKDAELTDISLKKYENKIILIVNVASFCGLTYQYKGLENIYKKYKDEGFEIIGFPCNQFAFQEPGSNQEIKEFCDTNYGVTFEIMNKIKVNGPKADPLFKFLKKQRSGIAGTPQIKWNFTKFLINRDGEVIKRFGPKIEAKDIESTIQKIL

SEQ ID NO: 89380 - protein, 159 aa, Unknown
  Bacterial polypetide isolated from the Sargasso Sea
MKTIYDFSIKDSELNDISLENFKGKVLLIVNVASYCGLTYQYKGLEKLYKKYRDKDFEILGFPCNQFALQEPGSNKDIKDFCDTKYGITFKILNKINVNGSKEDPFYTFLKKEKPGVGGTKQIKWNFTKFLINRNGEVINRFSPQAEPKDIESSILELL

SEQ ID NO: 89381 - protein, 100 aa, Unknown
  Bacterial polypetide isolated from the Sargasso Sea
MTKNIYQFSCNDNKGNEVNLNDFEGKVLLIVNTASQCGFTPQYEGLEKLQKLFPEDSFSVLAFPCNQFGGQEPGSNEEIVEFCRINYGTTFPVFSKIDVK

SEQ ID NO: 89382 - protein, 162 aa, Unknown
  Bacterial polypetide isolated from the Sargasso Sea
MTKNIYQFSCEDSSGQEINLGDFKGKTLLIVNTASQCGFTPQYKGLEQLQTKYSSEKFSVLAFPCNQFGGQEPGSNEEIVEFCSLNYGSTFPIFSKIDVNGDNAHPLFKFLTTEKKGLLGTEKIKWNFTKFLINKDGEPVNRYGSSTTPEQIQTDIEKLINS

SEQ ID NO: 89383 - protein, 82 aa, Unknown
  Bacterial polypetide isolated from the Sargasso Sea
MPKVHHFKVKDSQDQDVDLAQYRDKVVLIVNTASQCGFTSQYQELEALYQQYKDQGFVVLAFPCNQFGAQEPGSNAEIQQFC

SEQ ID NO: 89384 - protein, 159 aa, Unknown
  Bacterial polypetide isolated from the Sargasso Sea
MSKIYEYKIRDKDNSEIKMSEYKDKVLLIVNTASKCGFTPQYDGLNELQKKYSDQGFSVLAFPCNQFGKQEPGSNEDIQEFCSLNFDVSFPVLGKIEVNGDNEEPLFEHLKSEQPGIMGSKGIKWNFTKFLVNRDGEVLHRFAPKTTPAEIEKQIQSIL

SEQ ID NO: 89385 - protein, 159 aa, Unknown
  Bacterial polypetide isolated from the Sargasso Sea
MSKIYEYKIRDKDNSEIKMSEYKDKVLLIVNTASKCGFTPQYDGLNELQKKYADQGFSVLAFPCNQFGKQEPGSNEDIQEFCSVNFDVSFPVLAKIEVNGDNEEPLFEHLKSEQPGIMGSKGIKWNFTKFLVNRDGEVLHRFAPKTTPAEIEKQIQSIL

SEQ ID NO: 89386 - protein, 159 aa, Unknown
  Bacterial polypetide isolated from the Sargasso Sea
MSKIYEYKIRDKDNSEIKMSEYKDKVLLIVNTASKCGFTPQYDGLNELQKKYADQGFSVLAFPCNQFGKQEPGSNEDIQEFCSLNFDVSFPVLGKIEVNGDNEEPLFEHLKSEQPGIMGSKGIKWNFTKFLVNRDGEVLHRFAPKTTPAEIEKQIQSIL

SEQ ID NO: 89387 - protein, 159 aa, Unknown
  Bacterial polypetide isolated from the Sargasso Sea
MTKIYEYTVKDKDNSEIKMSDYRDKVLLIVNTASKCGFTPQYDGLNELQKKYAGNGFSVLAFPCNQFGKQEPGSNLEIQEFCSMNYDISFPVLAKIEVNGEKEEPLFSHLKSEQPGIMGSKGIKWNFTKFLVSRDGKVLHRFAPKTTPAEIEKEIESIL

SEQ ID NO: 89388 - protein, 159 aa, Unknown
  Bacterial polypetide isolated from the Sargasso Sea
MTQIYEYTVKDKDNSEIKMSDYRDKVLLIVNTASKCGFTPQYDGLNELQKKYAGNGFSVLAFPCNQFGKQEPGSNSEIQEFCSMNYDISFPVLAKIEVNGEKEEPLFGHLKSEQPGIMGSKGIKWNFTKFLVSRDGKVLHRFAPKTTPAEIEKEIESIL

SEQ ID NO: 89389 - protein, 159 aa, Unknown
  Bacterial polypetide isolated from the Sargasso Sea
MSKIYEYKVRDKNNSEIKMSEYKDKVLLIVNTASKCGFTPQYDGLNELQKKYADQGFSVLAFPCNQFGKQEPGSNEDIQEFCSLNFDVSFPVLGKIEVNGDNEEPLYEHLKSEQPGIMGSKGIKWNFTKFLVNRDGEVLHRFAPKTTPAEIEKQIQSIL

SEQ ID NO: 89390 - protein, 176 aa, Unknown
  Bacterial polypetide isolated from the Sargasso Sea
MLTVGDEFPQFSVQACTGTEKEDIKLLTSADYSGKWTVFFFYPKDFTFVCPTELAEFNKQLKSFSDRDTSVVGGSTDNEWCHMMWRRSHADLKDLAYPLIAAQKLGAELGILEQTEGYCQRATFIVDPNGVIQWVDVNQGRVGRNVAEVIRVLDALQSDELCPCNWKKGDPYVKVG

SEQ ID NO: 89391 - protein, 191 aa, Unknown
  Bacterial polypetide isolated from the Sargasso Sea
MSVLVGRQAPDFTSAAVLASGEIVDTFNFHQHIAGKYALVFFYPLDFTFVCPSELIALSQAMGEFESRGVEVVSVSIDSHFTHNAWRNTPVDAGGIGPVRYTMAADMKHSICQDYGVEHPDAGVAFRGVFLIDQNKVVRAQIVNDLPLGRSIQEILRLVDALQFTEEHGEVCPANWKKGEVAMTATPEGVA

SEQ ID NO: 89392 - protein, 154 aa, Unknown
  Bacterial polypetide isolated from the Sargasso Sea
PLDFTFVCPTEITAFSDEFNKFSDLNTEVLGVSVDSKHCHLAWIQTPRNEGGIGDINYPLVSDLKREICQAYNVLNDDGEADRGLFLINPEGIVMHTTVNKAPVGRNVDETLRILQGYQYVAANPDEVCPANWTPGEKTMLEDPKGSKEYFSAL

SEQ ID NO: 89393 - protein, 128 aa, Unknown
  Bacterial polypetide isolated from the Sargasso Sea
VYNLWAFEVYSVSTDTHFTHKAWHDTSDTIKKINFPMLADPTGVISRNFGVMIEEEGLALRGTFVINPEGQVKVAEIHDLGIGRSASELVRKIQAAQYVATHDGEVCPAKWQPGDETLAPSLDLVGKI

SEQ ID NO: 89394 - protein, 172 aa, Unknown
  Bacterial polypetide isolated from the Sargasso Sea
MFWYPKDFTFVCPTELHAFQAALPEFEKRNTIVIGASCDTNEVHFAWLNTPKSNGGIEGVTYPILADTNRNLANILGILDIESTSYSEETDSVIIEGSNVTYRATYLIDETGKIFHESVNDMPLGRNVAEYLRLVDAYTHVQTKGEVCPANWEEGKEAMFATREGVASYLNN

SEQ ID NO: 89395 - protein, 211 aa, Unknown
  Bacterial polypetide isolated from the Sargasso Sea
MALVGKKFPNITVDAISHMGDNLRINVLEEAVNNKKKVVLFWYPKDFTFVCPTELHAFQNALGEFEKRNTLVIGASCDTNEVHFAWLNTAKDNGGIEGVTYPLLADTTRNLAANLDILDAEWVFDEELNDEILEGSNVTFRATYLIDEEGKIFHESVNDMPLGRNVNEYLRLIDAYTHVQTKGEVCPANWEEGKEAMNADRLSTAAYLSQN

SEQ ID NO: 89396 - protein, 210 aa, Unknown
  Bacterial polypetide isolated from the Sargasso Sea
MTTLVGKKAPSFEAAAVINGGEIVQNFSLEQYLGKNQVILFFYPKDFTFVCPSELHAFQDALADFESRGVKVVACSTDTEESHWGWLQVPKNKGGIEGVKYPIVADTSKTIADAYGVLTGEYDYDVEGNLVATGSMISYRGLFLIDKEGLVRHMLINDLPLGRNVEEAIRIVDALQFNEEHGEVCPANWQKGKDGMTASFDGVADYLANH

SEQ ID NO: 89397 - protein, 199 aa, Unknown
  Bacterial polypetide isolated from the Sargasso Sea
MLPVGVGETVPEFKMETFEPSTGQFGEVSLADLKADGKWTILVFYPADFTFVCPTELADLAAQDAKLTELGAKVIGVSTDTKFSHLAWCNEEKLMDDVKYTLAADTTGVVSSLFGVYDDATGLALRGTFVISPEGKLVSATVNFYNVGRNMEELVRVMEANVHCAANPEEACPAKWTPGEKTLTPNEGMVGNVYEALNG

SEQ ID NO: 89398 - protein, 88 aa, Unknown
  Bacterial polypetide isolated from the Sargasso Sea
PTGALTRNFDNMREDEGLADRATFVVDPQGIIQAIEVTAEGIGRDASDLLRKIKAAQYVASHPGEVCPAKWKEGEATLAPSLDLVGKI

SEQ ID NO: 89399 - protein, 201 aa, Unknown
  Bacterial polypetide isolated from the Sargasso Sea
MTILVGREAPDFTVPAVLGSGEIVDNFNFKDAVSGQYGLVFFYPLDFTFVCPSELIALDHVVEEFKKRDVEVIAVSIDSQFTHNAWRNTSVDKGGIGPVKFTLAADVAHNICRSYGVEHPEAGVAFRGTFIIDKQGIVRSQVVNDLPLGRNIHDLLRTIDALQFFEEHGEVCPANWKKGAAGMKASPQGVSEYLSEYADSL

SEQ ID NO: 89400 - protein, 199 aa, Unknown
  Bacterial polypetide isolated from the Sargasso Sea
MPENGCLRVGQMAPDFTATAVVDQEFKEISLSQYRGKYVVLFFYPLDFTFVCPTEITAFSDRYADFSSKNTEVLAVSVDSKFSHLAWIQTPRNQGGIGDITYPLVADLKKEICAAYNVLNEDGEADRGLFIINPQGMVMHMTINKAPVGRNVDETLRVLQAYQYVEANPDEVCPANWTPGDKTMKEDPKGSKEYFSAIG

SEQ ID NO: 89401 - protein, 201 aa, Unknown
  Bacterial polypetide isolated from the Sargasso Sea
MGVLVGRQAPDFTAAAVLGNGEIVDSYNLHETIKGKKAVIFFYPLDFTFVCPSELIAFDKRFEEFKKRGVEVIGVSIDSQFSHNAWRNTPVADGGIGKVQYALVADVKHEICKAYDVEHPEAGVAFRGSFLIDEEGNVRHQVVNDLPLGRNIDEMIRMVDALAFHSENGEVCPAGWTEGKKGMDASPEGVAKFLSENEGEL

SEQ ID NO: 89402 - protein, 176 aa, Unknown
  Bacterial polypetide isolated from the Sargasso Sea
MLTVGDSFPKFSCQACVGTEKDDIKLLSSADYEGKWTVFFFYPKDFTFVCPTELAEFNKQLKNFTDRDTSVVGGSTDNEWSHMMWRRSHADLKDLAYPLIAAQKLAPELGIVEKTEGYCQRATFIVDPHGIIQWVDVNQGRVGRNVAEVLRVLDALQSDELCPCNWKKGDPYVKVG

SEQ ID NO: 89403 - protein, 167 aa, Unknown
  Bacterial polypetide isolated from the Sargasso Sea
MSKNIFRLLGEYKKEIAIFAGLFIIDRLVKVYLLNFLQENQLNSLRLNNFFEVVLVWNRGVSYGLFPQQSYAGQLIIIFFSLIICVWIAKFITNSEIRYRSITLILILAGASSNIIDRLIYGAVADFFHFEIATYSWYVFNIADIYIVSGLLILIYAFIYPNIKNSP

SEQ ID NO: 89404 - protein, 176 aa, Unknown
  Bacterial polypetide isolated from the Sargasso Sea
LQPGHPTSRGKAAVLFFYPLDFTFVCPSELIAFDHRLEEFNKRGVEVIGVSIDSEFSHNAWRNTKIEDGGIGPVKYPLVADIKHEICKAYDVEHPEAGVAFRGSFLIDKNGVVRHQVVNDLPLGRNIDEMLRMVDALQFHEEHGEVCPAQWEKGKKGMTASPDGVAKYLSENAASL

SEQ ID NO: 89405 - protein, 132 aa, Unknown
  Bacterial polypetide isolated from the Sargasso Sea
MTETGCLRVGQQAPDFTATAVVDQEFKEISLSQYRGKYVVLFFYPLDFTFVCPTEITAFSDRYADFSSKNTEVLGVSVDSQFSHLAWIQTPRNQGGLGDINYPLVADLKKEIATAYNVLDDAEGVALRGLFI

SEQ ID NO: 89406 - protein, 182 aa, Unknown
  Bacterial polypetide isolated from the Sargasso Sea
MSSIINSTIKPFKATAFHHGKFVPVTEQDLAGKWSVVVFYPADFTFVCPTELGDLADFYPKFQEIGVEVYSVSTDTHFTHKAWHDASETIKKINYPMIGDPTGTITRNFGVMIEEEGLALRGTFVINPQGEIKVAEIHDLGIGRSAAELFRKVQAAQYVANHDGEVCPAKWTPGEATLAPSL

SEQ ID NO: 89407 - protein, 187 aa, Unknown
  Bacterial polypetide isolated from the Sargasso Sea
MSIINSKIKPFNAQAFHQGKFVSVSDQDLIGKWSVVCFYPADFTFVCPTELGDLADFYPKFQEIGVEVYSVSTDTHFTHKAWHDASETIKKINYPMVADPTGVITRNFDVMIEEEGLALRGTFVINPEGIVKVAEIHDLGIGRSAAELFRKVQAAQYVANHDGEVCPAKWTPGEKTLAPSLDLVGKI

SEQ ID NO: 89408 - protein, 148 aa, Unknown
  Bacterial polypetide isolated from the Sargasso Sea
PADFTFVCPTELGDLADHYAELQSRDVEVFSVSTDTHFTHKAWHDASDTIGKVQYTMIGDPTGEITRNFDVMREGQGLADRGTFIVDPDGIIQAMEITAEGIGRNASDLLRKVKAAQYVRAHPGEVCPAAWEEGEETLAPSLNLVGKI

SEQ ID NO: 89409 - protein, 176 aa, Unknown
  Bacterial polypetide isolated from the Sargasso Sea
MSALVAKPAPDFTAQAVMPDGSFKEIKLSDYQGKYVILFFYPLDFTFVCPTEIIAFSAKMDEFKKRNTEVLGVSIDSHFSHLAWRNTDRKQGGLGDIAYPLVADVNKKITYDYGVMHEAGIAFRGLFLIDKDGVIQHQLINNLPLGRNIDEALRMVDALQFHEKNGEVCPANWSEG

SEQ ID NO: 89410 - protein, 263 aa, Unknown
  Bacterial polypetide isolated from the Sargasso Sea
FNDRLDEFKALNTNVIAVSTDSEYSHLAWTMTERERGGLGPMRIPIVADRTKEISAKYGVLLEDRGIALRGLFIIDDEGVVQQITMNNLPVGRSVDETLRLVRAFQFTAEHGEVCPAGWTPGAPTMVGDPEGSKEYFEQHAGKASNAEGAAASSDFAAKLRPITSRADFEALVAGPNPVVVDFMANWCGKCRQIAPEVDKLIDQYPNVVFAKFDTALADLAPFSKEMGIEAMPTFKFYKEGREVNEVIGYKPKLLRTAVEEFA

SEQ ID NO: 89411 - protein, 188 aa, Unknown
  Bacterial polypetide isolated from the Sargasso Sea
MSSIINSTIKPFKATAFHHGKFVPVTEQDLLGKWSVVVFYPADFTFVCPTELGDLADFYAKFQEIGVEVYSVSTDTHFTHKAWHDASETIKKINYPMIGDPTGTITRNFGVMIEEEGLALRGTFVINPQGEIKVAEIHDLGIGRSAAELFRKVQAAQYVANHDGEVCPAKWTPGEATLAPSLDLVGKI

SEQ ID NO: 89412 - protein, 189 aa, Unknown
  Bacterial polypetide isolated from the Sargasso Sea
MTQSIINSTIKPFKATAYHNGEFVPVTEQDLLGKWSVVFFYPADFTFVCPTELGDMADHYAKLQSMGVEVYSVSTDTHFTHKAWHDTSDTIKKINFPMLADPTGVISRNFGVMIEEEGLALRGTFVINPEGQVKVAEIHDLGIGRSAQELVRKIQAAQYVATHDGEVCPAKWQPGDETLAPSLDLVGKI

SEQ ID NO: 89413 - protein, 189 aa, Unknown
  Bacterial polypetide isolated from the Sargasso Sea
MTQSIINSTIKPFKATAYHNGEFVPVTEQDLLGKWSVVFFYPADFTFVCPTELGDMADHYAKLQSMGVEVYSVSTDTHFTHKAWHDTSDTIKKINFPMLADPTGVISRNFGVMIEEEGLALRGTFVINPEGQVKVAEIHDLGIGRSASELVRKIQAAQYVATHDGEVCPAKWQPGDETLAPSLDLVGKI

SEQ ID NO: 89414 - protein, 188 aa, Unknown
  Bacterial polypetide isolated from the Sargasso Sea
MSTYINTEIKPFNATAYHNGKFVQVSDADLKGKWSVVFFYPADFTFVCPTELGDLADNYAEFQKLGVEIYSVSTDTHFTHKAWHDTSDTIQKIQYPMIGDPTGTITRNFGVMIEEAGLADRGTFVIDPQGIIQIVEINAGGIGRDALELLRKVKAAQYVAAHPGEVCPAKWKEGDATLAPSLDLVGKI

SEQ ID NO: 89415 - protein, 187 aa, Unknown
  Bacterial polypetide isolated from the Sargasso Sea
MPIINTQIKPFKATAYHNGEFVPVSEENFKGKWSVVVFYPADFTFVCPTELGDLADRYAEFQKLGVEIYGVSTDTHFTHKAWHDTSDTIAKIKYPLVGDPTLTLSRNFDVLIEEEGMALRGTFVINPEGEIKLCEIHDNGIGRDAGELLRKVQAAQYIAAHPGEVCPAKWTPGAETLTPSLDLIGKI

SEQ ID NO: 89416 - protein, 120 aa, Unknown
  Bacterial polypetide isolated from the Sargasso Sea
MLQRKTTLLSALAVAVSLALTTHIASAESMNKGNQFWWPEQLNLAPLRQHGVESSPMDQGFNYAEEFKKLDLKAVKADITKLMTTPQDWWPPDYGHYGPFFIRMAWHSAGTYRVSDGRGG

SEQ ID NO: 89417 - protein, 260 aa, Unknown
  Bacterial polypetide isolated from the Sargasso Sea
CVDTFARMGMNNEETVALVAGGHTFGKAHGAAVADHVGAEPEGGSIEQQGLGWHSDYESGKGVHTISSGIEGAWKPNPTRWDGGYFEMMFTYEWELSKSPAGAWQWHPKDVREEHLIPDAHDPTKSSPPMMTTADLSLRFDPAYEPISRRFRDNQDAFADAFARAWFKLTHRDLGPRSLYLGPEVPQEVLIWQDPIPPVDHPLIAAAEIDDLKHKLQSSGLSVAELVSTAWASASSFRGSDKRGGANGARLRLAPQRSWE

SEQ ID NO: 89418 - protein, 288 aa, Unknown
  Bacterial polypetide isolated from the Sargasso Sea
EEELIWQDPVPQGHSNYDVEVVKAKILSSGLTTQEMVETAWASASTFRGSDMRGGANGARIRLAPQKDWEVNKPEQLKKVLGILEPIAKDTGASIADVIVLAGNVGVEKATGMEVPFTPGRGDTTQEKTDIESFEVLEPEADAFRNYLKMNYDVTAEELMLDKAQLLGLTAPEMTVLVGGMRSMGISSDQRGLFVDTKGKLTNSFFDKLLDMGVSWKPTGSNSYEATDKITGEKVRTASRVDLVFGSNSQLRAIAELYASDDSEEKMKKDFIKAWNKVMNADRFDLEK

SEQ ID NO: 89419 - protein, 312 aa, Unknown
  Bacterial polypetide isolated from the Sargasso Sea
SVKVLTMMTTADMQMREDPEYRKVSEKFHKDPEYFADQFARAWFKLLHRDMGPKTRYMGPEVPEEELIWQDPVPQGHSNYDVETVKAKILNSGLTTQEMVETAWASASTFRGSDMRGGANGARIRLSPQKDWEVNKPEQLKKVLGILEPIAKETGASVADVIVLAGNVGVEQATGMEVPFTPGRGDTTQDKTDIDSFGVLEPEADAFRNYLKMNYDVTAEELMLDKAQLLGLTAPEMTVLVGGMRSMGISSDQRGLFVDTKGKLTNDFFDKLLDMGVSWKPTGSNSYEATDKITGEKVRTASRVDLVFGSNS

SEQ ID NO: 89420 - protein, 86 aa, Unknown
  Bacterial polypetide isolated from the Sargasso Sea
DSFINLLDMNIKWKEVSSKEDLFEGRDRKTKKLKWIGTRADLIFGSNSQLRALAEVYATDDSKDKFISDFTSAWTKVMNLDRFDLN

SEQ ID NO: 89421 - protein, 114 aa, Unknown
  Bacterial polypetide isolated from the Sargasso Sea
VGGMRVLNTNFDKSKHGVFTKKPEALTNDFFVNLLDMNTTWKEVSKEEDLFNGRNRKTNKVKWTGTRFDLIFGSNSQLRALAEVYACEDSKPKFVADFISAWTKVMNLDRFDLK

SEQ ID NO: 89422 - protein, 166 aa, Unknown
  Bacterial polypetide isolated from the Sargasso Sea
QTEFRNFKWLEPLHDGFRNFVKSDYSVMPEELLLERASLMGLTAQEMTCLVGGMRVLGTNHESSKNKGVFTDKVGALTNDFFLNLVDMKFIWKPTGKNSYDIIDRKTKKIKYTASRADLVFGSNSILRSYAEIYAQDDNKEKFVKDFVSIWTKIMNADRVDLKKLN

SEQ ID NO: 89423 - protein, 218 aa, Unknown
  Bacterial polypetide isolated from the Sargasso Sea
MGQIKEKFNSEQSNGKRISLADIIVLGGCAAIEKAAKNAGNDIKVPFKPGRTDAEQDQTDISSFSVLEPNADGFRNYSKNNFSISTEEMLVDKAQLLTLTAPEMTVLIGGLRVLNINTDNSNHGIFTKKKDSLTNDFFVNLLDLDISWSPKSNNDNIFEGRNRLTNEIIWNGTRVDLIFGSNSELRSLAEVYACSDSNELFINDFVAAWDKVMNLDRF

SEQ ID NO: 89424 - protein, 309 aa, Unknown
  Bacterial polypetide isolated from the Sargasso Sea
FAGGREDIWHPEKDVYWGAEKEWLAPSDERYQNVDKPDTMENPLASVQMGLIYVNPEGVNGKPDPLKTAAQVRETFARMAMNDEETAALTVGGHTVGKTHGNGKESNLGPEPEAADISEQGMGWNNHKTRGIGRDTMTSGIEGAWTTHPTKWDNGYCDLLLNYEWELTKSPAGAHQWEPVNIKEEDKPVDVEDPSIRLNPIMTDADMAMKMDPAYRKIIERFHNDFEYFSDVFARAWFKLTHRDLGPKARYLGADVPSEDLIWQDPIPSVDYTLTDTEIADLKVTLLNCGVSASDLINTAWDSARTYRG

SEQ ID NO: 89425 - protein, 257 aa, Unknown
  Bacterial polypetide isolated from the Sargasso Sea
TSWAAAASFRGTDLRGGANGARLALAPQKDWAVNNPAEVAKVLKKLQGIQQDFNKAQSGGKKVSLADLIVLAGGAAVEQAAKAGGITVEVPFTPGRTDASQAQTDVASFAVLEPMADGFRNYYSKDTLLSPAEALVDKANLLTLSVPEMTVLIGGLRALDANTGGAKHGVFTSKPGTLSNDFFVNLLDMSTEWRKSAKTEGMYEGVDRKTGTLKWTATPVDLVFGSHSELRAIAEVYAAQDGKVKFTKDFVDAWTKV

SEQ ID NO: 89426 - protein, 263 aa, Unknown
  Bacterial polypetide isolated from the Sargasso Sea
PEYRKISERFYKDPKFFEDSFARAWFKLTHRTMGSKENYIGPWAPKEDLLWQGNVSYPKKKYNVNKVKKMIAASKLSACDLITTAWDSARTYRITDKRGGANGSRIRLAPMKNWEANEPEKLSKILKVLESIAKKTGATVADTIILAGNVGLEKAIKKAGSKVKVSFNPGRGDASQEQTEVKNFKWLEPLHDGFRNYVKSDYSVMPEELLLERASLMGLTAKEMTCLVGGMRVLGTNHKSAKDKGVFTDKVGTLTNDFFVNLV

SEQ ID NO: 89427 - protein, 189 aa, Unknown
  Bacterial polypetide isolated from the Sargasso Sea
AAKKAGHKVDVPFSAGRGDASQDQTDINSFGLLEPKADGFRNYLNSDTNISAEELLVDKAQLMRLTAPEMTVLVGGMRVLNANYDGSDNGVFTKKPGSLSNDYFKNLLDMNTTWKEVDKREQLFVGKDRNTNKVKWKGTRVDLIFGSNSQLRAIAEVYACEDGEKKFISDFVAAWTKVMNSDRFDLKLN

SEQ ID NO: 89428 - protein, 183 aa, Unknown
  Bacterial polypetide isolated from the Sargasso Sea
YVNPQGPDANPDLLLAAHDIRETFGRMAMNDYETVALVAGGHTFGKSHGAASESYKGPDPEASRIQDQSTGWNSDYKSGKGVDTISSGIEGAWTQSPIKWDMGYFDCLFNHEWELTKSLAGAHQWTPKQNGQKIKMVPDAHDKNKMHPPMMQTTDLSLRMDLSYGPISKHFYNNLAEFADAFA

SEQ ID NO: 89429 - protein, 223 aa, Unknown
  Bacterial polypetide isolated from the Sargasso Sea
FSAGRGQTVRDFWPNSLNLKILSQHSNLSNPMDKKFNYAKEFKKLNYSALKKDLKKLMTDSQEWWPADYGHYGPLFIRLAWHAAGTYRTGDGRGGAGTGNQRFAPLNSWPDNVNLDKARLLLWPIKKKYGRKISWADLFILVGNVALDSMGFKTFGFGAGRTDIWEPEDDIYWGSEKEMLGVERYSGKRDLEQPLGASHMGLIYVNPSRSGRKSRSTISSTRY

SEQ ID NO: 89430 - protein, 190 aa, Unknown
  Bacterial polypetide isolated from the Sargasso Sea
KAIKKVGSKVKVPFSAGRGDSSQEQTELKSFKWLEPLHDGFRNYVKADYSATPEELLLERASLMGLTAQEMTCLVGGMRVLGTNHESAKDKGVLTNKVGALTNDFFINLVDMKYTWIPKSKNSYDIVDRKTNKVKYTASRTDLVFGSNSILRSYAEVYAQDDNKEKFIEDFVKIWTKIMNADRPNSKKLN

SEQ ID NO: 89431 - protein, 250 aa, Unknown
  Bacterial polypetide isolated from the Sargasso Sea
ARIRLAPQKDWEVNNPSQISKIIKILEKIKKSFDNKKKEVSIADLIVLSGGVAIEKAAKKAGQKVNVPFTPGRGDASQNQTDIYSFGLLEPKADGFRNYIVNKPNGSSNKPTVSAEEMLVDRAQLMKLTPPEMTVLVGGMRVLNTNFDKSNYGIFTKKKETLTNDFFINLLDMNIKWQEVDKNEELFEGRDRKTNKVKWKGSRVDLIFGSNSQLRAIAEVYACEDSKSKFINDFILAWTKVMNLDRFDLK

SEQ ID NO: 89432 - protein, 274 aa, Unknown
  Bacterial polypetide isolated from the Sargasso Sea
IPESLVPVQLIGKLTFNRNPDNTFAETEQVAFHPGHLVPGIDFSNDPLLQGRLFSYSDTQLSRLGSPNFHELPINRPIAAVANNQRDGHMRQAIVRGRVSYEPNTLGGGCPMQRPWEQGGFVSHAEPMQGEKVRARSPRFADHFSQPGLFWRSQADWEQAHIVDAFCFELGKVTVPAIRERMLANLTQVDAALAQRVADGLGMPVPPPPAGAENLPHTDKPAMDAALSMVTTRKGSLIGRKVAVLVANDVDGTPLESMRVALTAAGATLKVMRR

SEQ ID NO: 89433 - protein, 294 aa, Unknown
  Bacterial polypetide isolated from the Sargasso Sea
AWTSNPTQWDNGYFDLLLNYEWKLTKSPAGAHIWHAVDQREEHKAPDAEDASIKVPTMMTTADMAMKEDPSYRKISEGYYRNPDSLSENFAKAWFKLLHRDMGPKTRYLGPEAPKEDLIWQDPIPKGNSNYDIEKCKTLLSQAGLSISEMVETAWASASTFRSSDMRGGANGSRIRLDPQINWEVNKPDQIKKVLKKYENISSETGASISDIIVLGGCVGIEKSSGKPVVFLPGRGDASQENTDIESFSVLEPLADGFRNFQKEDYEVSPEEMLLDRSQLLDLTASEMTVLLAG

SEQ ID NO: 89434 - protein, 292 aa, Unknown
  Bacterial polypetide isolated from the Sargasso Sea
KDIINLKAKILKSGLSISQMVSTAWASASTFRGSDKRGGANGSRIRLSPQKDWKVNNPSQLSKTLKVYEKIKKSFDTKNKVVSIADLIVLAGSVAIEIAAKKAGKKINVPFVPGRGDASQDQTDKFSFGLLEPKADGFRNYIVEKSNGSTKKNNVSAEELLIDRAQLMKLTAPEMTVLLGGMRVLNTNYDKSKNGVFTNKPEVLTNDYFVNLLDMKTTWKEIDDNEELFKGVDRKTNKVKWTASRVDLIIGSNSQLRAIAEVYATEDSQTKFVSDFVSAWTKVMNLDRYDIN

SEQ ID NO: 89435 - protein, 236 aa, Unknown
  Bacterial polypetide isolated from the Sargasso Sea
GSDIDGEAEYDRSGSSVALSSDGSVVAIGAPGNGHNGNLDHSSGHVRIYQNIGGNWDLIGSDIDGEAAGDRSGSSVALSSDGSIVAIGARGNDGNGEVSGHVRIYQNIGGYWDQIGSDIDGEAGDFSGHLVALSSDGSVVAIGGYWDQIRIYQNIGGNWDLIGSDINGEAAGDNALYSVSLSSDGSVVAIGAERNDGNGSNSGHVRIYKNIGGNWDQIGSDIDGEAANDYFGSSVA

SEQ ID NO: 89436 - protein, 111 aa, Unknown
  Bacterial polypetide isolated from the Sargasso Sea
MRVLNANFDKSKHGVFTKKPETLTNDFFVNLLDMSTTWKETSKDEQLFTGKDRKTNKIKWTGTRFDLIFGSNSQLRALAEVYACEDSKPKFVADFISAWSKVMNLDRFDLK

SEQ ID NO: 89437 - protein, 180 aa, Unknown
  Bacterial polypetide isolated from the Sargasso Sea
MDAESKCPVMHGAITKNMGEGTSNREWWPNQLNLNILHQHDRKSDPMEVGFNYREEFKKIDYAALKKDLNDLMTDSQDWWPADYGHYGGFFIRMTWHAAGTYRTGDGRGGGGTGAQRFAPLNSWPDNGNLDKARRLLWAIKKKYGNKISWADLFILTGNVAIESMGGKTFGFSGGRPDIW

SEQ ID NO: 89438 - protein, 293 aa, Unknown
  Bacterial polypetide isolated from the Sargasso Sea
ANVPPAIDFSNDPLLQGRLFSYLDTQLSRLGGPNFAQIPINTPKCPFHNMQRDGHMQMQVPKGRVNYEPSSLLGDTPRASLAQGFRHVAQADDGVKGRVRPESFADHYSQARMFYRSQNPLEQAHMASALVFELSKVGTPHVREAVVGHLLHVDADLAQRVADGLGLQTLPPAPATTEPVQDLPLSPALRIIDRMKPTLQGRCIGILVADGSNGTSVANLRKALEKVGATVKIVAPKVGGAVLKDGTLLPTDGQLAGTPSAVFDAVASILSPDMGAQLAKEAAAVDWFRDASA

SEQ ID NO: 89439 - protein, 268 aa, Unknown
  Bacterial polypetide isolated from the Sargasso Sea
QDPVPQGNNDYDVDAIKAKLSDCGLSIQEMVETAWASASTFRGSDLRGGANGSRIRLAPQKDWEANKPEQLARVLGVYESIASESNASLADVIVLGGNVGIEKASGAQVPFTPGRGDASEEQTDADSFDALEPIADGFRNFQKEGSSLPSEEMLLDKAQLLGLTAPEMTVLIGGMRALGISSNNHGVFTETPGKLTNDFFVNLLDMGVEWKSTGNNSYEAIDRQSGEKVRTATRVDLVFGSNSQLRAIAEVYASDDSKEKFVSDFIAA

SEQ ID NO: 89440 - protein, 159 aa, Unknown
  Bacterial polypetide isolated from the Sargasso Sea
RADGFRNFVTKKINGSSHKLKISAEEMLIDKAQLMKLTAPEMTVLIGGMRVLNTNFDGSNHGVFTKKKEVLSNDFFINLLDLSTTWKEIDKEETIFEGRDRKTNKIKWTGTRADLIFGSNSQLRALAEVYACDDSMSKFIADFVSAWSKVMNLDRFDLK

SEQ ID NO: 89441 - protein, 304 aa, Unknown
  Bacterial polypetide isolated from the Sargasso Sea
DHVQAEPEGAPLKEMGFGWTSSYGSGVGSDTITSGIEGAWTANPTQWDNGYFDLLFGYEWELTKSPAGAHIWHAVGQKEEDMAPDAEDASVKVPTMMTTADMAMREDPSYKEISKRFHENPDEFADAFARAWFKLLHRDMGPKTRYMGPEVPEEELIWQDPVPAGDSTYDVSAVKEKILNCGLSIQEMIETAWSSASTYRGSDMRGGANGARIRLEPQKNWEANNPDQLSKVLEIYEAIAEETGASVADVIVLAGNVAIEKASGIEVPFTPGRGDATQENTDVESFEVLEPQSDGFKNFHKAGL

SEQ ID NO: 89442 - protein, 43 aa, Unknown
  Bacterial polypetide isolated from the Sargasso Sea
SNSQLRALAEVYACEDSSKKFVDDFIAAWVKVMNADRFDLKLN

SEQ ID NO: 89443 - protein, 131 aa, Unknown
  Bacterial polypetide isolated from the Sargasso Sea
MLLDRAQLMGLTAPEMTVLLGGMRVLGTNYGGTKHGVFTDRVGQLTNDFFVNLTDMSNRWEPTGKNSYNIVDRNSGNTKFTATRVDLVFGSNSILRAYAEVYAQDDNEEKFVKDFVAAWSKVMNADRFDVE

SEQ ID NO: 89444 - protein, 52 aa, Unknown
  Bacterial polypetide isolated from the Sargasso Sea
RRASRTDLVFGSNSQLRALAEVYAQSDSSDKFTADFIKAWNKVMNADRFDLN

SEQ ID NO: 89445 - protein, 185 aa, Unknown
  Bacterial polypetide isolated from the Sargasso Sea
MSNEIYKEKSKCPFTGIGTPAKHSTGKGTSNRDWWPNNLNLKILSQHSSLVNPMDEKFSYAKEFKKLDYKKLKKDLQKLMTDSQDWWPADYGHYGPLFIRLAWHAAGTYRTADGRGGAGTGNQRFAPLNSWPDNVNLDKARLLLWPIKKKYGNKISWADLFILVGNVALDSMGFKTFGFGAGRED

SEQ ID NO: 89446 - protein, 289 aa, Unknown
  Bacterial polypetide isolated from the Sargasso Sea
DILFGKCHGAGDDGLVGVGPEDAPMEQQQFGWKNGYGKGMGRDTITSGLEGPWTSNPTQWDNGYFENLFKYEYELVKSPAGAFQWHPKNLEEENHAPDVEDSSKKVTTIMLTSDLALREDPEYRKISLNFRDNPEEFADAFARAWFKLLHRDMGPKSRYLGPEVPDEELIWQDPVPSGSVDYDVNSLKAKISASGLSTQEMVETAWASASTFRGSDLRGGANGSRIRLAPQKDWDVNKPEQLSKVLDILQPLADEAGASLADAIVLAGNVGIEQASGVEVPFSPGRGDA

SEQ ID NO: 89447 - protein, 275 aa, Unknown
  Bacterial polypetide isolated from the Sargasso Sea
NIDKVKKMIASSKLSTADLITTAWDSARTYRVTDKRGGANGARIRLAPMKDWEANEPEKLSKTLKVLEGIAKKSGASVADTIILAGNVGLEKAIKKAGSKVKVPFNPGRGDSSQKQTEIKNFKWLEPLHDGFRNYVKSDYSVMPEELLLERASLMGLTAQEMTCLVGGMRVLGTNHESAKSKGILTDKAGTLTNDFFINLVDMKYTWKPTGKNSYDIIDRKTNKVKFTASRADLVFGSNSILRSYSEVYAQDDNKEKFVKDFVAVWTKIMDADRP

SEQ ID NO: 89448 - protein, 145 aa, Unknown
  Bacterial polypetide isolated from the Sargasso Sea
SKNGKSNVSAEEKLVDKAQLMQLTAPEMTVLIGGMRVLDTNYDKSKNGVFTKNPGTLSTDYFVNLLDMNTTWKETDNSEQYFIGKDRKSNKNKWKGSRVDLIFGSNSQLRALAEVYACKDSSQKFVKDFVSAWTKVMNLDRFDLN

SEQ ID NO: 89449 - protein, 127 aa, Unknown
  Bacterial polypetide isolated from the Sargasso Sea
MGLTAQEMTCLIGGMRVLGTNHESAKNKGVFTDKVGTLTNDFFINLVDMKYTWKPTGKNSYEIIDRKTNKIKFTASRADLVFGSNSILRSYSEVYAQDDNKEKFIKDFVAVWTKVMNADRPNLKKLN

SEQ ID NO: 89450 - protein, 251 aa, Unknown
  Bacterial polypetide isolated from the Sargasso Sea
ETAWASASTFRGSDMRGGANGARIRLSPQKDWEVNKPEQLKKVLGILEPIANETGASIADVIVLAGNVGVEQASGMKVPFTPGRGDTTQEKTDIDSFAVLEPEADAFRNYLKMNYDVTAEELMLDKAQLLGLTAPEMTVLVGGMRSMGISSDQRGLFVDAKGKLTNDFFDKLLDMTVSWKPTGSNSYEATDKITGEKVRTASRVDLVFGSNSQLRAIAELYASDDSEEKMKKDFIKAWNKVMNADRFDLEK

SEQ ID NO: 89451 - protein, 155 aa, Unknown
  Bacterial polypetide isolated from the Sargasso Sea
MSKCPFTGAGTPAKFSAGRGQTVRDFWPNSLNLKILSQHSNLSNPMDKKFNYAKEFKKLNYKALKKDLKKLMTDSQEWWPADYGHYGPLFIRLAWHAAGTYRTGDGRGGAGTGNQRFAPLNSWPDNVNLDKARLLLWPIKKKYGRKISWADLFIL

SEQ ID NO: 89452 - protein, 115 aa, Unknown
  Bacterial polypetide isolated from the Sargasso Sea
TSYNPNTKGAWLDQPDFSEPPLSIEWAADHWNHRVDDDYYSQPGDLFRLMTAAQQQMLFDNTARAMYGVSRPVRDLHVEHCTKADPAYGAGVSAALAALDAYVSSAVRSEPEVTK

SEQ ID NO: 89453 - protein, 264 aa, Unknown
  Bacterial polypetide isolated from the Sargasso Sea
GGHTFGKAHGAGDPALVGAEPEGAPLEQMGLGWNNLHGSGVGRDTTTSGIEGPWTPNPTQWDNGYFDMLLGYEWKLVKSPAGAQIWHAIDQKEEHMAPQVDDPSVKVPTMMTTADMAMREDPEYRKVSEKFHKDPEYFADQFARAWFKLLHRDMGPKTRYMGPEVPEEELIWQDPVPNGHSNYHVETVKAKILKSGLTTQEMVETAWASASTFRGSDMRGGANGARIRLSPQKDWEVNKPEQLKKVLGILEPIAKETGASVADV

SEQ ID NO: 89454 - protein, 267 aa, Unknown
  Bacterial polypetide isolated from the Sargasso Sea
GPRSRYLGPEVPDEELIWQDPVPQGNNDYDVDAIKAKLSDCGLSIQEMVETAWASASTFRGSDLRGGANGSRIRLAPQKDWEANKPEQLARVLGVYESIASESNVSLADVIVLGGNVGIEKASGAQVPFTPGRGDASEEQTDADSFDALEPIADGFRNFQKEGSSLPSEEMMLDKAQLLGLTAPEMTVLIGGMRALGISSNNHGVFTETPGKLTNDFFVNLLDMGVEWKSTGENSYEAIDRQSGDKVRTATRVDLVFGSNSQLRAIA

SEQ ID NO: 89455 - protein, 279 aa, Unknown
  Bacterial polypetide isolated from the Sargasso Sea
PIPKSKYKLKNKDINLLKSKILKSGLSISQLVSTAWASASTFRGSDRRGGANGARIRLEPQKNWEVNNPSELSKILKIYEKIKKNFDSKNKKASIADLIVLGGCVGIEKAAKNAGKKVSVPFKPGREDASQDQTDVFSFSLLEPKADAFRNYMVNKPNGSSSKTSVSAEEMLVDRAQLMKLSPPEMTVLIGGMRALNTNFDKSKHGILTNKTDKLTNDFFVNLLDMGTTWKEIDEHEEFFEGRDRKTNKIKWKASRVDLIFGSNSQLRAIAEVYACEDS

SEQ ID NO: 89456 - protein, 245 aa, Unknown
  Bacterial polypetide isolated from the Sargasso Sea
WASASSYRGSDMRGGANGARIRLEPQKNWDANKPEQLSRVLSTIEGIADEVGASVADMIVLAGCVGIEKASGSSVPFTPGRGDSSQEETDIESFAVLEPIADAFRNYKKESVDVNIEEMMLDKSQLMGLTAPEMTVLIGGLRSLGVSTDNQGVFTDNQDKLSNDFFNNLLDMTVQWKPNGTGSTFEGINRQTGEKMRSATSVDLVFGSNSQLRAIAEVYASDDGQDKFVSDFIDAWVKVMELDLY

SEQ ID NO: 89457 - protein, 239 aa, Unknown
  Bacterial polypetide isolated from the Sargasso Sea
MSSEINKEISKCPFHGEGIPQKHPTGKGQTNKDWWPNSLNLKILSQHSSLVNPMDKKFDYKKEFKKLNFKALKKDLNKLMTDSQEWWPADYGHYGPLFVRLAWHAAGTYRTGDGRGGAGTGNQRFAPLNSWPDNVNLDKARLLLWPIKKKYGKKISWADLFILVGNVAIESMGLKTFGFGGGREDIWEPEEDIYWGSEKEWLANNRYDKNRELENPLGAVQMGLIYVNPQGPDGNPDPY

SEQ ID NO: 89458 - protein, 137 aa, Unknown
  Bacterial polypetide isolated from the Sargasso Sea
TSAEEMLIDKAQLMGLTSPEMTVLIGGMRVLNTNFDGSKFGVFTNKPGTLTNDYFVNLLDMNVTWNEVNDNEQLFEGKDRKTNKTKWNGTRVDLIFGSNSQLRALAEVYACEDSERKFINDFIKAWNKVMNLDRFDK

SEQ ID NO: 89459 - protein, 245 aa, Unknown
  Bacterial polypetide isolated from the Sargasso Sea
AVGQTEDDMAPDAEDASKKVPTMMTTADMAMRMDPSYNKISKRFHENPDQFADAFARAWFKLLHRDMGPKTRYVGPEVPEEELIWQDPVPVGNTNYDVLKVKELLSDSGLTIQEMIEVAWASASTYRGSDMRGGANGARIRLAPQKDWEANNPAQLSKALEIYESISKETGASVADVIVLAGNVAIEKASGVEVPFTPGRGDATQESTDIESFEVLEPKSDAFRNYHPQGVNIAPEEIMLDKAQL

SEQ ID NO: 89460 - protein, 98 aa, Unknown
  Bacterial polypetide isolated from the Sargasso Sea
GVFTKKAEVLSNDFFTNLLDMRTTWKEIDKEETLFEGRDRKTNKIKWIGSRVDLIFGSNSQLRAIAEVYASEDSKSKFINDFVAAWTKVMNLDRFDLK

SEQ ID NO: 89461 - protein, 187 aa, Unknown
  Bacterial polypetide isolated from the Sargasso Sea
VPFKAGRGDAKQDQTDKNSFNLLEPIADGFRNYIKLHAKGYTNGKGIPTNSAEEMLIDKAQLLGLTGPEMTVLIGGMRVLNTNFDGSDYGVFTKKPGSLTNDFFVNLLDMKTTWREVDKEEQFFEGVDRKTKKVKWRATRADLIFGSNSQLRALSEVYATDDSNEKFLNDFISAWTKVMNLDRFDLN

SEQ ID NO: 89462 - protein, 68 aa, Unknown
  Bacterial polypetide isolated from the Sargasso Sea
QTFLGKDRKTLKTKWKATRVDLIFGSNSQLRALAEVYACADSAHKFVNDFIKAWVKVMNSDRFDLKLN

SEQ ID NO: 89463 - protein, 213 aa, Unknown
  Bacterial polypetide isolated from the Sargasso Sea
EQLAKVLGVLEGIASETGASVADVIVLAGNVAIEKASGVEVPFLSGRGDATSEHTDVESFEVLEPLADGFRNYQKTDFSVTPEEMLVDKAQLLGLTAPEMTVLVGGLRSLGVSADGHGVFTDNINTLSNDFFKTLLDMSVEWKPVSKNSYEATDRVSGEKIRTASRVDLVFGSNSQLRAIAEVYAEDDSKDKFVNDFIAAWNKVMNADRFDLG

SEQ ID NO: 89464 - protein, 182 aa, Unknown
  Bacterial polypetide isolated from the Sargasso Sea
IEKASGVEVPFSPGRGDALEEQTDPESFRVLEPLADGFRNYQKTEYSVSPEEMLVDKAQLLGLTAPEMTVLVGGMRSLGISHSGLGLFSDNADKLDNHFFKTLLDMSVEWKPSGTNAYDAFDRVSGEKIRSASRVDLVFGSNSQLRSIAEVYAMDDSNDKFIKDFISAWNKVMNADRFDLDA

SEQ ID NO: 89465 - protein, 235 aa, Unknown
  Bacterial polypetide isolated from the Sargasso Sea
MQKIGEIQNAFNASASGGKKVSMADLIVLAGCAAIEKAAQDGGVAVTVPFTPGRMDALEEWTDGPSFEALRPVADGFRNYYHESHFMAPEEALVDKAHLLRLSAPEMTVLVGGMRVLGTNSDGGQEGVFTKRVGTLSNDFFVNLLSMQNEWVATEHKNRFQGLDRKTRQPTWTATRVDLIFGAQSELRAQAEVYGMADGNEKFVQDFVKAWDKVMNVDRLDIGKPADNFSQKLSA

SEQ ID NO: 89466 - protein, 201 aa, Unknown
  Bacterial polypetide isolated from the Sargasso Sea
ETISSETGASIADIIILGGNLGIEKASGKTLDFTPGRGDSSQDQTDIDSFAYLEPLSDGFRNYHRDGLDVKAEEMMLDRAQLLGLTAPEMTVLLGGLRSLGITHNGYGNFSENPNELTNDYLTKLLDMSVSWQTNGTGNSFESIDRTTGDKVSSASRVDLVFGSNSQLRAIAELYAQEDSKDKFVSDFISAWNKVMNSDLY

SEQ ID NO: 89467 - protein, 168 aa, Unknown
  Bacterial polypetide isolated from the Sargasso Sea
SYGSGVGSDTITSGIEGAWTANPTQWDNGYFDLLFGYEWELTKSPAGAHIWHAVGQKEEDMAPDAEDASVKVPTMMTTADMAMREDPSYKEISKRFHENPDEFADAFARAWFKLLHRDMGPKTRYMGPEVPEEELIWQDPVPAGNSTYDVSAVKEKILNCGLSIQEID

SEQ ID NO: 89468 - protein, 253 aa, Unknown
  Bacterial polypetide isolated from the Sargasso Sea
MSNDKIKVAILGVGNCASSFVQGIEHYSNSDNEDGLISDVIGGYKVSDIEVVAAYDINSLKVGKDLSEAIFAEPNNTMKFCDVPKTGVTVQPGVKNDGVGKFVKDIINTSPDSDNFEESLRESGAEILINLLPVGSDEAVKYYAQAAINSNVGFINCIPVFIARDEEWYQKFKDASVPLIGDDIKSQVGATIVHRALAQLFSDRGVKLENTYQLNVGGNMDFLNMLEEDRLETKRTSKTSSVTSVANKRYRHS

SEQ ID NO: 89469 - protein, 201 aa, Unknown
  Bacterial polypetide isolated from the Sargasso Sea
VGIEKAAKKAGHKITVPFVPGRGDASQDQTDNYSFGLLEPKADGFRNYITKTSNGSGSKPTVSAEEMLVDKAQLMKLTAPEMTVLVGGMRVLNTNFDKSKNGVFTKKPETLTNDFFVNLLDMGTTWKEVSKDEDLFEGRDRKTNKLKWIGTRADLIFGSNSQLRAIAEVYACEDSETKFIGDFISTWVKVMNLDRFDIKKN

SEQ ID NO: 89470 - protein, 168 aa, Unknown
  Bacterial polypetide isolated from the Sargasso Sea
VSGVGASPDKMLQARLFAYADAQRYRIGANYNQLPVNCPHATKANHHQRAGAMAGTQCPYHGSQTGGDAAANYGPNSTAGALVEPANFAEPPLRLDGEAARYSRYNQDDYTQAGNLYRIFSEAEKARLVETISGSLRQASLDVQQRMLAHFHKADADYGQRIQTALGL

SEQ ID NO: 89471 - protein, 79 aa, Unknown
  Bacterial polypetide isolated from the Sargasso Sea
FWICQSNGEATGSNSYQATDRKSGSKVRRASRTDLVFGSNSQLRALAEVYAQSDSHDKFVADFVSAWNKVMNADRFDLS

SEQ ID NO: 89472 - protein, 229 aa, Unknown
  Bacterial polypetide isolated from the Sargasso Sea
MALELDLSHKKIGEVNKPEQLEKVLSAYENISSETGVSVADIIILGGNLGIEKASGKSVDFTPGRGDSSQDQTDIDSFSYLEPLSDGFRNYHRDGLDVRAEEMMLDRAQLLGLTAPEMTVLLGGLRSLGITHNGYGNFTEDPNELTNDYLVKLLDMSVSWQPNGTGNSFESVDRESGEKVSSASRVDLVFGSNSQLRAITELYAQEDSKEKFVSDFISAWNKVMNSDLY

SEQ ID NO: 89473 - protein, 177 aa, Unknown
  Bacterial polypetide isolated from the Sargasso Sea
KQDQTDKNSFNLIEPIADGFRNYIKMHAKGYTNGKGIPTNSAEEMLIDKAQLLGLTGPEMTVLIGGMRVLNTNYDGSDYGVFTKKPGSLTNDFFVNLLDMKTTWREVDKEEQFFEGIDRKTKRVKWRATRADLIFGSNSQLRALSEVYATDDSNEKFLNDFISAWTKVMNLDRFDLN

SEQ ID NO: 89474 - protein, 92 aa, Unknown
  Bacterial polypetide isolated from the Sargasso Sea
PGTLTNDFFVNLLDMNTEWKSKANSTEVFEGRNRQSGQLQWIATRADLIFGSNSELRALAEVYASDDAKEKFINDFVLAWSKVMNLDRFDLM

SEQ ID NO: 89475 - protein, 146 aa, Unknown
  Bacterial polypetide isolated from the Sargasso Sea
MKVTLFKTAVAHTALAAALVALPVIDTVARSTPKSTQAWWPASLDLTPLRQNERSTNPLGADFDYAAEFARLDLEALKADINKTLTTSQPWWPADYGNYGPFFVRMAWHSAGTYRTSDGRGGADGGQQRFEPLNSWPDNGNLDKAR

SEQ ID NO: 89476 - protein, 292 aa, Unknown
  Bacterial polypetide isolated from the Sargasso Sea
PIYKKISKRFHENPDEFADAFARAWFKLLHRDMGPRSRYLGPEVPEEELIWQDPVPEGNADYDVGSVKSKINESGLSIQQMVETAWASASTFRGSDLRGGANGARIRLAPQKDWEANKPKELSKVLNVLEGIASETGASIADVIVLAGNVGIEKASGTEVPFTPGRGDASAEQTDEESFGVLEPISDAFRNYHQSGINMPSEELMLDKAQLLGLTAPEMTVLVGGMRTLGVSADGHGVFTDDINNLSNDFFGTLLDMSVEWKPNGTGNSYEAIDRVCGEKVRTASRSDLAFG

SEQ ID NO: 89477 - protein, 209 aa, Unknown
  Bacterial polypetide isolated from the Sargasso Sea
KSVSMADLIVLAGGVGIEMAAKKAGHKVNVPFSAGRGDARQDQTDIHSFGLLEPQADGFRNYLNGGASIVSAEEKLVDKAQLMGLTAPEMTALIGGMRVLNTNYDDSNYGIFTNKPGSLTNDYFVNLLDMNTTWKEEDKSEQTFVGRDRKTQKPKWRATRVDLIFGSNSQLRALAEVYACEDSSEKFVKDFIAAWAKVMNSDRFDLKLN

SEQ ID NO: 89478 - protein, 245 aa, Unknown
  Bacterial polypetide isolated from the Sargasso Sea
MSNDKIKVAILGVGNCASSFVQGIEHYSNTDNEDGLISDVIGGYKVSDIEVVAAYDINSLKVGKDLSEAIFAEPNNTMKFCDVPKTGVTVQPGVINDGVGKFVKDIINTSPDSDNFEDSLRESGAEILINLLPVGSDEAVKYYAQAAINSNVGFINCIPVFIARDEEWYQKFKDASVPLIGDDIKSQVGATIVHRALAQLFSDRGVKLENTYQLNVGGNMDFLNMLEEDRLETKRTSKTSSVTSV

SEQ ID NO: 89479 - protein, 215 aa, Unknown
  Bacterial polypetide isolated from the Sargasso Sea
TAWSSASTFRGSDMRGGANGARVRLAPQKDWDANKPEQLAKVLGVLEGIASETGASVADVIVLAGNVAIEKASGVEVPFLSGRGDATSEHTDVESFEVLEPLADGFRNYQKTDFSVTPEEMLVDKAQLLGLTAPEMTVLVGGLRSLGVSADGHGVFTDNINTLSNDFFKTLLDMSVEWKPVSKNSYEATDRVSGEKIRTASRVDLVFGSNSQLRA

SEQ ID NO: 89480 - protein, 202 aa, Unknown
  Bacterial polypetide isolated from the Sargasso Sea
MSKCPFTGAGTPAKFSAGRGQTVRDFWPNSLNLKILSQHSNLSNPMDKKFNYAKEFKKLNYKALKKDLKKLMTDSQEWWPADYGHYGPLFIRLAWHAAGTYRTGDGRGGAGTGNQRFAPLNSWPDNVNLDKARLLLWPIKKKYGRKISWADLFILVGNVALDSMGFKTFGFGAGRTDIWEPEDDIYWGSEKEMLGGKDIVKE

SEQ ID NO: 89481 - protein, 259 aa, Unknown
  Bacterial polypetide isolated from the Sargasso Sea
STFRGSDKRGGANGARLRLEPQKSWKINKVSKTDKVIKVLEKIKNNFDGKKKSVSVADLIVLGGCAAIEKAAKKAGHNVKVPFSPGRGDASQEQTDINSFGLLEPKADGFKNYLNSDINISAEEMLVDKSQLLRLTTTEMTVLVGGMRVLNTNYDGSNLGVFTKKPGSLSNDYFKNLLDMNTTWKEIDKREQEFVGKDRKTNKVKWRGTRVDLIFGSNSQLRAIAEVYACEDGEKKFVGDFVAAWAKVMNSDRFDLKLN

SEQ ID NO: 89482 - protein, 208 aa, Unknown
  Bacterial polypetide isolated from the Sargasso Sea
LKKIGEVNNPNELSKVIKAYEKIKKSFDGKKKLVSLADLIVLGGCAAIEKAAQKAGHKVSVPFTPGRGDATQDQTDTFSFDLLKPKADGFINYKYSNGSKISAEEMLIDKACLMDLTGPEMTVLVGGMRALNANFDGSKKGIFTKKSETLTNDFFINLLDMKTTWKETDESEELFEGSDRETKEVKWLGSRVDLIFGSNSQLRSWAEV

SEQ ID NO: 89483 - protein, 248 aa, Unknown
  Bacterial polypetide isolated from the Sargasso Sea
MSTENFKNKSFKTNELSKCPFTGAGTPAKFSAGRGQSVRDFWPNSLNLKILSQHSNLSNPMNKKFNYSKEFKKLNYKALKKDLKKLMTDSQEWWPADYGHYGPLFIRLAWHAAGTYRTGDGRGGAGTGNQRFAPLNSWPDNVNLDKARLLLWPIKKKYGNKISWADLFILVGNVALDSMGFKTFGFGAGRTDIWEPEDDIYWGSEKEMLGVERYTEKRDLEQPLGASHMGLIYVNPQGPDANPDPKLA

SEQ ID NO: 89484 - protein, 233 aa, Unknown
  Bacterial polypetide isolated from the Sargasso Sea
KKNGQEIKMVPDAHEKGVLHPPMMQTTDISMKVDPSYGPITKHFHENPKEFHDAFARAWFKLTHRDMGPKACYLGSDVPKEELIWQDPVDKQKYKLKDKDIKDLRSKILNSKISVTDLVATAWASASTFRGSDKRGGANGARIMLEPQKNWKVNNPQKLSKVISILKKIKIKFDDKKKTVSMADLIVLAGCVGVEIAAKKSGYKVKVPFSPGRGDARQDQTDVNSFGLLEPPS

SEQ ID NO: 89485 - protein, 267 aa, Unknown
  Bacterial polypetide isolated from the Sargasso Sea
NPDKFADAFAKAWFKLTHRDMGPVDRYLGPEVPQEELIWQDPIPKTSHELIDDSDESILKMKILDTGLPVSQLISVAWASASSFRNSDKRGGANGARVSLSPQKYWDVNEPIQLGKVLDALTAIKNDFNKSNNKKQVSLADLIVLAGSAAVEKAAKDAGYEVNVPFTAGRTDATQEKTDVESFSVLEPLADGFRNYLKKQYAVGAEKLLIDKAQLMTLTAPEMTALVGGMRVLNANFNGTEHGVLTNRPGILSNDFFVNLLDMNTTW

SEQ ID NO: 89486 - protein, 289 aa, Unknown
  Bacterial polypetide isolated from the Sargasso Sea
VGAEPEGSSIEEQGFGWKNEHGSGLGRDTITSGIEGSWTSNPTQWDNGYFDLLFKYEDTWKLVKSPAGANQWTPENPDAEDLAPDAEDPSIRVPTMMTTADMAMIRDPEYRKISKKFHENPDIFADAFARAWFKLLHRDMGPKSRYLGPDVPNEDLIWQDPVPKGNTSYDVNAIKDAIKSSGLSVSEMVETAWASASTFRGSDNRGGANGARIRLSPQKDWQANKPEQLSKVLSVLSEIAGANGVSVADTIILAGNVGIEMASGMDVPFMPGRGDATEEQTDIDSFAVL

SEQ ID NO: 89487 - protein, 273 aa, Unknown
  Bacterial polypetide isolated from the Sargasso Sea
KAHGASTEDHVNTEPEGAPLEEMGFGWTSSYGSGVGSDTITSGIEGAWTANPTQWDNGYFDLLFGYEWELTKSPAGAHIWHAIDQKEEDMAPDAEDASIKVPTMMTTADMAMREDPSYREVSKRFHENPEEFADAFARAWFKLLHRDMGPKTRYMGPEIPEEELIWQDPVPAGNSDYDVSAVKEMILASGLSIQEMIETAWSSASTFRGSDMRGGANGARIRLEPQRNWEANNPDQLNKVLDVYTSIAEETGVSVADIIVLAGNVAIEKASGL

SEQ ID NO: 89488 - protein, 123 aa, Unknown
  Bacterial polypetide isolated from the Sargasso Sea
AQEMTCLIGGMRVLGTNHESAKNKGVFTDKVGTLTNDFFINLVDMKYTWKPTGKNSYEIIDRKTNKIKFTASRADLVFGSNSILRSYSEVYAQDDNKEKFIKDFVAVWTKVMNADRPNLKKLN

SEQ ID NO: 89489 - protein, 77 aa, Unknown
  Bacterial polypetide isolated from the Sargasso Sea
DIRETFGRMAMNDYETVALIAGGHTFGKCHGAGDDGLVGVGPEDAPMEQQQFGWKNGYGKGMGRDTITSGLEGPWTK

SEQ ID NO: 89490 - protein, 185 aa, Unknown
  Bacterial polypetide isolated from the Sargasso Sea
DAGKKIKLPFSPGRGDASQDQTDIHSFSLLEPQADGFRNYANSQSATKAEELLVDKAQLMQLSGPEMTVLIGGMRVLGTNFDGSKNGVFTKRPGKLTNDFFVNLLDMDIKWKEISNKEDIFSGVNRKSGKVLWTGTRADLIFGSNSQLRALAEVYATDDSSDKFVNDFTAAWSKVMNADRFDLQK

SEQ ID NO: 89491 - protein, 137 aa, Unknown
  Bacterial polypetide isolated from the Sargasso Sea
EELLLERASLMGLTAQEMTCLIGGMRVLGTNHESAKNKGVFTDKVGTLTNDFFINLVDMKYTWKPTGKNSYEIIDRKTNKIKFTASRADLVFGSNSILRSYSEVYAQDDNKEKFIKDFVTVWTKVMNADRPNLKKLN

SEQ ID NO: 89492 - protein, 167 aa, Unknown
  Bacterial polypetide isolated from the Sargasso Sea
MSTENFKSKTFKANELSKCPFTGAGTPAKFSAGRGQTNKDFWPNSLNLKILSQHSNLSNPMDEKFKYSKEFKKLNFKALKKDLKKLMTDSQSWWPADYGHYGPLFIRLAWHAAGTYRTGDGRGGAGTGNQRFAPLNSWPDNVNLDKARLLLWPNKKKYGKKISWADL

SEQ ID NO: 89493 - protein, 146 aa, Unknown
  Bacterial polypetide isolated from the Sargasso Sea
RSDGFRNYHEAGIEVKPEEMLLDKSQLLGLTAPEMTVLIGGMRSLGINHSDYGIKPENPDALDNDFFKTLLDMRVSWKPNGTGNSYEGSDRVTGESVRTATRPDLVFGSNSQLRALVEVYAANDSKEKFLKDFVNAWDKVMTNDLF

SEQ ID NO: 89494 - protein, 195 aa, Unknown
  Bacterial polypetide isolated from the Sargasso Sea
KKSVKKNKVPFKAGRGDAKQDQTDKNSFNLIEPIADGFRNYIKMHAKGYTNGKGIPTNSAEEMLIDKAQLLGLTGPEMTVLIGGMRVLNTNYDGSDYGVFTKKPGSLTNDFFVNLLDMKTTWREVDKEEQFFEGIDRKTKRVKWRATRADLIFGSNSQLRALSEVYATDDSNEKFLNDFISAWTKVMNLDRFDLN

SEQ ID NO: 89495 - protein, 211 aa, Unknown
  Bacterial polypetide isolated from the Sargasso Sea
SERFHKNPDQFQDAFARAWFKLLHRDLGPRTRYMGPEVPKEEFIWQDPVPKGNSNYDINAIKEKISNSGLSIQEMVETSWASASTFRVTDMRGGSNGARIRLEPQKNWEANKPDQLTKVLSVLEGIAKESGVSVADVIVLAGNVGIEKASGVSVPFIPGRGDATQEDTDVESFAVLEPQADGFRNYLKKNFSIAPEELMLDKAHLLGLTAP

SEQ ID NO: 89496 - protein, 77 aa, Unknown
  Bacterial polypetide isolated from the Sargasso Sea
LLDMSVTWQPVGDGTYQAFKRSDNTPIRTATGADLVFGSNSQLRALAEVYAADGAHEKFVSDFISAWNKVMNADRFE

SEQ ID NO: 89497 - protein, 241 aa, Unknown
  Bacterial polypetide isolated from the Sargasso Sea
IEQMGLGWISSFGSGKGRDAITSGIEGAWTANPTQWDNGYFNLLFGYEWKLVKSPAGAHIWHAIDPKPEDLAPDAEDSSIRVPTMMTTADMAMREDPEYRKISKRFHENPEEFADAFARAWFKLLHRDMGPRTRYIGPEAPTEEMIWQDPVPAGNSQFDVDSVKAKIAKSGLTIQEMVETAWASASTYRGTDMRGGANGARIRLAPQKDWSANKPDQLQKVLSVLEPIAAESGASVADVIV

SEQ ID NO: 89498 - protein, 139 aa, Unknown
  Bacterial polypetide isolated from the Sargasso Sea
MFNKYFLLIFSLFFISNCEQTYVDKNGDSSFRGKFKTNREWWPNQLDLSVLRKHSSLSNPMDSNFNYEEAFNSLDYQALKKDLKDLMTDSKDWWPADYGHYGGLFIRMAWHSAGTYRTGDGRGGTREGQHRFAPQNSWP

SEQ ID NO: 89499 - protein, 42 aa, Unknown
  Bacterial polypetide isolated from the Sargasso Sea
MLLRIVGPDNANLDKARRLIWPIKQKYGNKISWADLMILTGN

SEQ ID NO: 89500 - protein, 249 aa, Unknown
  Bacterial polypetide isolated from the Sargasso Sea
MDCRTGSGGRLRARTLDCRTVPEGPLRARTLDCRTGSAGWLRARTLDCRTGPRGPLRARTLDCHTGSGGRLRARTLDCRTVPEGPLRARTLDCRTGSAGRLRARPLDCRAGPRGPLRVRNLDCRTVPEGPLRARTLDCRTGSAGRLRARPLDCRAGPRGPLRVRNLDCRTVPKGPLRARTLDCRTGSGGRLRARTLDCRTGPRGPLRARTLDCRTGSGGRLRARTLDCRTVPEGPLRARTLDCRTGSAG

SEQ ID NO: 89501 - protein, 191 aa, Unknown
  Bacterial polypetide isolated from the Sargasso Sea
MAVKKAGKKIEVPFSPGRGDATQEQTDVHSFGLLEPQADGFRNYNKDEKTKVSAEEKLIDKSQLMGLTAPEMTVLIGGMRVLDTNFDNSKNGVFTKKPGTLTNDYFVNLLDMNTTWKETDSSEQLFEGKDRKTNKVKWHGTRVDLIFGSNSQLRALAEVYASNDSSEKFINDFVSAWTKVMNSDRFDLKLN

SEQ ID NO: 89502 - protein, 187 aa, Unknown
  Bacterial polypetide isolated from the Sargasso Sea
MSSEINKEISKCPFHGDGIPQKNPTGKGQTNKDWWPNSLNLKILSQHSSLVNPMDKKFDYKKEFKKLNFKALKKDLHKLMTDSQEWWPADYGHYGPLFVRLAWHAAGTYRTGDGRGGAGTGNQRFAPLNSWPDNVNLDKARLLLWPIKKKYGKKISWADLFILVGNVAIESMGLKTFGFGGGREDIW

SEQ ID NO: 89503 - protein, 219 aa, Unknown
  Bacterial polypetide isolated from the Sargasso Sea
VLRVLENIANKTGATIADTIILAGNVGLEKAIKKGGSKVKVPFSPGRGDSSQEQTELKSFKWLEPRHDGFRNYVKADYSAMPEELLLERASLMGLTAKEMTCLVGGMRVLGTNHESAKDKGVFTSKVGALTNDFFINLLDMKYNWKPTGKNSYDIVDRKTNKVKYTASRADLVFGSNSILRSYAEVYAQDDNKEKFIEDFVKIWTKIMNADRQNYKKLN

SEQ ID NO: 89504 - protein, 667 aa, Unknown
  Bacterial polypetide isolated from the Sargasso Sea
MAVQSGRAADGAGAVGSATMIQIRAVVIYSHDGRHRVVPFAPGRVNIISGDPRTGKSSLVGIIEYAMGAKEIDVPEGKVRRNVAWFGLLLETGRGQAFVARQLPKGDGKSNEAIYVEANDKVTIPEAEALRATTNREGLRAMLASWVGMGDYLHEPPPGQTREPLAASISHALTFCFQAQPEIAQRKYLFHGSNDRFVAQAIKDTLPYFLGAVTDDYVAQQQELKRVRTELRQIERRLAEAAAIRGEGLSRADTLLAEAKAVGLSTLDDDAAWQEKIEALRAIQNTPIPTAAAEAGEDVEFRRLSDVRSGLVREQRSLLSTLERARSFEGSSRGYAGEAREHTARLQAVTVFEHDAPGHACPLCMQDLPEASQVPSISDLRAAQDYIGERSGAMDAATPRIATAIQQVETQLADVRRRLDDNRALLTAVKRGSQRLQLASDTEARRAMVLGRISLYMENIPQMPDISEQQARLTELRVQEGELNEAVSTDTIQAKLDSCLSNVNRYLSDYARRIDLEYSESPLRLDPRNLTVVADTPDRPVPMREIGSGENHVGYHIVAHLALHTWFASRGRPVPAFLLLDQLSQAHFSPDTAPGDGVTQEKIDTDRRAVKRLFGLIFDVVERLEGKFQVLITDHPDFSDDARFQAALRERWRDGSKLVPENWPRAA

SEQ ID NO: 89505 - protein, 166 aa, Unknown
  Bacterial polypetide isolated from the Sargasso Sea
GSTDIHSFSLLEPQADGFRNYANSESSTQAEELLIDKAQLLQLTGPEMTVLVGGMRVLGTNYDGSKHGVFTKRPGKLTNDFFINLLDMNIKWKETSDKEDFFNGVDRKSGKVLWTGTRADLIFGSNSQLRALAEVYATDDSSDKFVNDFTVAWTKVMNADRFDLQK

SEQ ID NO: 89506 - protein, 151 aa, Unknown
  Bacterial polypetide isolated from the Sargasso Sea
FRNYMKKGKSHVSAEEKLIDKAQLMGLTAPEMTVLVGGMRVLDTNYDNSKNGVFTKKSGTLSTDYFVNLLDMSTTWKETDKSEQYFVGKDRKSKKTKWKGSRVDLIFGSNSQLRALAEVYACKDSSDKFVKDFVSAWVKVMNADRFDLRLN

SEQ ID NO: 89507 - protein, 229 aa, Unknown
  Bacterial polypetide isolated from the Sargasso Sea
MSSELIKEQSKCPFTGAGTPPKHATGKGTTNRDWWPNALNLKILSQHSSLVDPMDNKFNYAKEFKKLNFKNLKKDLHKLMTNSQSWWPADYGHYGPLFIRLAWHAAGTYRTGDGRGGAGTGNQRFAPLNSWPDNVNLDKARLLLWPIKKKYGKRISWADLFILVGNISLESMGFKTFGFGAGREDIWEPEEDIYWGSEKEWLGVNRYSGKRDLEQPLGASHMGLIYVNP

SEQ ID NO: 89508 - protein, 214 aa, Unknown
  Bacterial polypetide isolated from the Sargasso Sea
KPEQLNKVLGVLESIASETGASVADVIVLAGNVGIEKASGITVPFTPGRGDATQEHTDVESFAVIEPEADGFRNYLKKNFTVTPEEFLLDRAHLLGLTAPEMTVLVGGMRALGISSDDRGVFSNAEKLDNSFFTTLLDMSVKWEATGSNSYQASDRKSGEKVRRASRADLVFGSNSQLRALAELYAQADNHDKFVNDFISAWNKVMNADRFDIS

SEQ ID NO: 89509 - protein, 143 aa, Unknown
  Bacterial polypetide isolated from the Sargasso Sea
MNGEAKCPVSHGSSDQHTNRAQTNKEWWPDQVNLSILHQHDAKTNPMSNGFNYNDEFNKLDYNALKKDLNDLMTDSQEWWPADYGHYGPFFIRMTWHAAGTYRTADGRGGGGTGSQRFAPTNSWPDNTNLDKARRLLWPIKQK

SEQ ID NO: 89510 - protein, 84 aa, Unknown
  Bacterial polypetide isolated from the Sargasso Sea
MTSSIILLDMTTVQWKPNGTGNTFEGINRQTGEKMRSATSVDLVFGSNSQLRAIAEVYASDDGQDKFVSDFIDAWVKVMELDLH

SEQ ID NO: 89511 - protein, 285 aa, Unknown
  Bacterial polypetide isolated from the Sargasso Sea
LIWQDPVPSGNSKYDEDSVKKMITDSGLSIQEMIETAWASASTYRGSDMRGGANGSRIRLAPQKDWEANNPSQLKKVLDIYENISNESGASIADIIVLAGNVGIEIASGVEVPFTPGRGDASQEQTDIESFEVLEPKSDAFRNFHAKGVNTAPEEIMLDKAQLLGLTAPEMTVLVGGMRSLGISSNGYGVFTEDSNKLSNDYFKILLDMSVKWKPNGTGNSYEAFDRSSGEKLRTASRSDLVFGSNSQLRAIVEVYAEDDSSEKFVNDFIFAWNKVMNADRFDVQ

SEQ ID NO: 89512 - protein, 81 aa, Unknown
  Bacterial polypetide isolated from the Sargasso Sea
LLDMGTTWKEVDSNEQLFIGRDRKSNKVRWTASRVDLIFGSNSQLRAIAEVYAQEDSKSQFVNDFVAAWTKVMNLDRFDLN

SEQ ID NO: 89513 - protein, 61 aa, Unknown
  Bacterial polypetide isolated from the Sargasso Sea
LTVNLGSKVRRASRTDLVFGSNSQLRALAEVYAQSDSHDKFVADFVLAWTKVMNADRFDLN

SEQ ID NO: 89514 - protein, 88 aa, Unknown
  Bacterial polypetide isolated from the Sargasso Sea
DYFVNLLDMNTTWKEEDKSEQTFVGKDRKTQKTKWKATRVDLIFGSNSQLRALAEVYACEDSSEKFVKDFIAAWVKVMNSDRFDLKLN

SEQ ID NO: 89515 - protein, 130 aa, Unknown
  Bacterial polypetide isolated from the Sargasso Sea
MFDDQKCPIIHGSIVSNNSKNSGITNKDWWPNQLNLGILHQHDKRSNPMDEGFDYREEFQKLDYYALKKDLEALMTDSQDWWPADYGHYGPFFIRMTWHAAGTYRVGDGRGGGGTGAQRFAPLNSWPDNG

SEQ ID NO: 89516 - protein, 50 aa, Unknown
  Bacterial polypetide isolated from the Sargasso Sea
WTGTRVDLIFGSNSQLRALAEVYATDDSHDKFVKDFVAAWTKIMNSDRFN

SEQ ID NO: 89517 - protein, 194 aa, Unknown
  Bacterial polypetide isolated from the Sargasso Sea
NKVSVADVIVLAGNIGIEMATGKSLTFSPGRGDASQDQTDIESFAVLEPFSDGFRNYHNKDFSINAENMLLDKAHLLGLNAPEMTVLVGGMRSLGIDFNENGNFTDDKNSLTNDFFNNLLDMNVKWEPTGRNSYNGNDRSSGEVIRSATRADLVFGSNSQLRALAEIYSQDDSSEKFVNDFIDAWTKVMNNDRF

SEQ ID NO: 89518 - protein, 44 aa, Unknown
  Bacterial polypetide isolated from the Sargasso Sea
GSNSQLRALAEVYACEDSGDKFINDFIAAWVKVMNSDRFDLKLN

SEQ ID NO: 89519 - protein, 168 aa, Unknown
  Bacterial polypetide isolated from the Sargasso Sea
RGDATSDMTDAHSFAPFEPLSDPFRNFIKDKYASKAEEMMVDRAHLLGLSAPEMTVLLGGMRVLGTNYNNGKEGVFTDNVGSLTNDFFVNLTDMNNKWEIIAENDYKVIDRKSGNVKWSATSVDLVFGSNSILRSYAEVYAQDDNKEKFVSDFVNIWVKIMNNDRFDI

SEQ ID NO: 89520 - protein, 107 aa, Unknown
  Bacterial polypetide isolated from the Sargasso Sea
MPARCPVIGPVAPSKARHTAAGSLSNADWWPDQLNLRILKAHAGAPPPIGHEFDYAEAFKSLDFQAMKTDLQAAMTTSQEWWPADYGHYGPLFIRMAWHSAGTYRTA

SEQ ID NO: 89521 - protein, 167 aa, Unknown
  Bacterial polypetide isolated from the Sargasso Sea
AAFSPANVVPGVSFSPDRMLQARLFSYGDAQRYRLGVNFNHIPVNAPRCPFHSYHRDGQMRTDGNLGGTISYQPNSKGVWDNRPEYAEPALAMTGAADRYDHYVDDDHYEQPGDLFRLMTPAQQQVLFANTAANLAGVSRDIQNRHIANCTKADPAYGAGVAKALGR

SEQ ID NO: 89522 - protein, 211 aa, Unknown
  Bacterial polypetide isolated from the Sargasso Sea
KKKSVSLADLLVLGGNVGIEMAAKKAGTKIEVPFSPGRGDATQEQTDVHSFGLLEPQADGFRNYNKDEKSKVSAEEKLIDKSQLMGLTAPEMTVLIGGMRVLDTNFDNSKNGVFTKKPGTLTNDYFVNLLDMNTTWKETDSSEQLFEGKDRKTNKVKWHGTRVDLIFGSNSQLRALAEVYACNDSSDKFINDFVSAWTKVMNSDRFDLKLN

SEQ ID NO: 89523 - protein, 65 aa, Unknown
  Bacterial polypetide isolated from the Sargasso Sea
FFEGKDRKTNKVKWRGTRVDLIFGSNSQLRALAEVYASEDSMSKFVNDFISAWTKVMNLDRFDLR

SEQ ID NO: 89524 - protein, 218 aa, Unknown
  Bacterial polypetide isolated from the Sargasso Sea
LKIETYLIKVIHPGIDVYDDFITEDDKKNVADIVGNNSPVITTLARVEERKGHMFVLKALPEVKKKFPNVLYLIAGKGPYLEKIQNITKEMNLENNVKFLGWITEPEKSLILKRSDLFVMTPTTVGESVEGFGMAYIDASFHGVASIGSDSGGVSDAILNNKTGIICESGNQKMITEKILLLLENKKLRESMGVNGKSRANQNYAWDKKIIEYLDAIK

SEQ ID NO: 89525 - protein, 136 aa, Unknown
  Bacterial polypetide isolated from the Sargasso Sea
NYTVTPEEFMLDRAHLLGLTAPEMTVLVGGMRAMGISSDDRGVFSNNGKLDNSFFTTLLDMTVKWEATGSNSYQATDRQSGEKVRRASRTDLVFGSNSQLRALAEVYAQSDNHEKFLTDFISAWNKVMNADRFDIN

SEQ ID NO: 89526 - protein, 724 aa, Unknown
  Bacterial polypetide isolated from the Sargasso Sea
MSVDFKKNGNGKCPVMHGGITKAGESNTSRLWPNSINLDILHQHDTKTNPLPGFNYKKEVKKLNFKALKKDLLKLMTDSQEWWPADLGSYTGLMVRLTWHQVGTYREFDGRPNVGSHRFSPQDSWPDNTNLDKARRLLWPIKKKYGNRLSWSDLMVLAGTMAYEKAGFKTFGFSFGREDIWAPEKDVYWGKETVPLAVNRYGDPQDRSSLEAPLAASHFQLVYVNPEGVEGKPDPVRTAMDVRETFGRMGMNDVETAALTVGGHSIGRAHGNGDPANLGPEPAGADIHEQGFGWVQKNGGTGVNQITSGLEGAWTTNPDKWDHQYLDLLLNYEWESKKSPAGAWQWEPINLEEEKKPVDLGDPTKKARLMFTDADMAMAMDPEYRKISERFYKDPKFFEDSFARAWFKLTHRTMGSKDNYIGPWAPKEDLLWQGNVQPSKKKYSVEKVKKMIAASKLSNSDLITTAWDSARTYRRTDKRGGANGARIRLEPMKNWEANEPKRLSKVLKVLENIAKKNGASIADTIVLAGNVGLEKAIKKGGSKVKVPFNPGRGDSTQEQTENRNFKWLEPLHDGFRNFVKSDYSVMPEELLLERASLMGLTAQEMTCLVGGMRVLGTNHESAKNKGVFTEKVGSLTNDFFLNLVDMKYIWKPTGKNSYDVIDRKTNKAKYTASRADLVFGSNSILRAYAEVYAQDDNKEKFVKDFVSAWTKIMNADRPNIKKLN

SEQ ID NO: 89527 - protein, 254 aa, Unknown
  Bacterial polypetide isolated from the Sargasso Sea
MSAEFGKFKSTELGKCPFTGAGTPAKHTAGKGQTVKDFWPNSLNLDILSQHSNLSNPMDKKFNYSKEFKKLNYKALKKDLKKLMTDSQDWWPADYGHYGPFFIRLAWHAAGTYRTGDGRGGAGTGNQRFAPLNAWPDNVNLDKARLLLWPIKKKYGKKISWGDLFILVGNVALESMGFKTFGFGAGRVDIWEPEDDIYWGSEKEMLGVNRYSGKRDLEQPLGASHMGLIYVNPQGPDANPDPLLAAHDIRETFG

SEQ ID NO: 89528 - protein, 213 aa, Unknown
  Bacterial polypetide isolated from the Sargasso Sea
MEKNIKVAILGIGNCASSFVQGIEHYSNSDNEDGLISDVIGGFKVSDIEVVAAYDINTTKVGKDLSEAIFAEPNNTIKFSDVSTTGVIVQPGVANDGVGKFVKDIISTSPDSEDFEESLKNSGAEILINLLPVGSDEAVKFYAQSAINIGIGFINCIPVFIARDKEWYQKFRDAGVPLIGDDIKSQVGATIVHRVLAQLFSDRGVNLENTYQL

SEQ ID NO: 89529 - protein, 190 aa, Unknown
  Bacterial polypetide isolated from the Sargasso Sea
KIKVSFKAGRGDANQEQTDINSFNLLEPLADGFRNYVKLNANGYSNGKSVPTISSEELLIDKAQLLGLTGPEMTVLIGGMRVLDTNYDGSDFGVFTKKPGALTNDFFINLLDMRTTWKEIDKEEQFFQGLDRKTKKVKWKATRADLIFGSNSQLRALSEVYATDDASEKFINDFVSAWTKVMNLDRFDLN

SEQ ID NO: 89530 - protein, 150 aa, Unknown
  Bacterial polypetide isolated from the Sargasso Sea
FRNYVKSDYSVMPEELLLERASLMGLTAQEMTCLIGGMRVLGTNHESAKNKGVFTDKVGALTNDFFINLVDMKYTWKPTGKNSYDIIDRKTNKIKYTASRADLVFGSNSILRSYSEVYAQDDNKEKFIKDFVAVWTKIMNADRPYLKKLN

SEQ ID NO: 89531 - protein, 294 aa, Unknown
  Bacterial polypetide isolated from the Sargasso Sea
QKYKLKAGDIKYLENKILKTGLSVSQLVSTAWASCSTFRGSDKRGGANGARIRLQPQKDWDINKIAKVDKVIKALEKIKKNFDSKTKNVSLADLIVLAGNTAIEKAAKKAGHKIKVPFLQGRGDAKQEHTDVFSFNLLEPKADGFVNYQRGKSSTSPEEMLIDKAQLMKLTAPEMSVLFGGMRVLSTNFDGSHYGVFTRKPGALTNDYFKNLLDMDITWSEKDDAEQYFQGKNRKTNKIIWEGSRVDLIFGSNSQLRAISEVYASEESDKKFVRDFVNVWSKVMNLDRFDKKIN

SEQ ID NO: 89532 - protein, 186 aa, Unknown
  Bacterial polypetide isolated from the Sargasso Sea
AGNVAIEKASGVEVPFLSGRGDATSEHTDVESFEVLEPLADGFRNYQKIDFSVTPEEMLVDKAQLLGLTAPEMTVLVGGLRSLGVSADGHGVFTDNINTLSNDFFKTLLDMSVEWKPVSKNSYEATDRVSGEKIRTASRVDLVFGSNSQLRAIAEVYAEDDSKDKFVNDFIAAWNKVMNADRFDLG

SEQ ID NO: 89533 - protein, 188 aa, Unknown
  Bacterial polypetide isolated from the Sargasso Sea
MSTENFNNKSFKANELSKCPFTGAGTPAKFSAGRGQTVRDFWPNSLNLKILSQHSDLSNPMDKKFNYPKEFKKLNYKALKKDLKKLMTDSQEWWPADYGHYGPLFIRLAWHAAGTYRTGDGRGGAGTGNQRFAPLNSWPDNVNLDKARLLLWPIKKKYGRKISWADLLILVGNVALDSMGFKTFGFGA

SEQ ID NO: 89534 - protein, 232 aa, Unknown
  Bacterial polypetide isolated from the Sargasso Sea
YPKFLKLLEKIKKNFDTKKKNVSFADLIILGGCAAIEKAAKKGGHNVKVPFSPGRGDASQDQTDVHSFGLLEPKADGFRNYIVRSTNGSSRKPTVSAEETLIDKAQLLKLSAPEMTVLIGGLRVLNTNFDNSKHGVFTKKPETLTNDFFVNLLDMNTTWKETSKEEDSFTGKNRKTNKVQWTGSRFDLIFGSNSQLRALAEVYACEDSKPKFITDFISAWTKVMNLDRFDLK

SEQ ID NO: 89535 - protein, 332 aa, Unknown
  Bacterial polypetide isolated from the Sargasso Sea
MHPPMMQTTDLSLRMDKSYGPISKHFYQNPDEFADAFARAWFKLTHRDMGPRACYLGSEVPKEQLIWQDPIDKPKYKLKSKDIRDLKSKLSKSKISVSDLVSTAWASASTYRGSDKRGGANGARIMLEPQRSWKVNNPKKLSKVIKALQKIKKKFDTNKKSVSMADLIVLGGNVGIEMAAKKAGHKIQVPFTPGRGDARQDQTDVNSFGLLEPQADGFRNYMKKGKSNVSAEEKLIDKAQLMGLTAPEMTVLVGGMRVLDTNYDSSKNGVFTKKPGTLSTDYFVNLLDMSTTWKETDKSEQYFVGKDRKSKKTKWKGSRVDLIFGSNSQLRA

SEQ ID NO: 89536 - protein, 255 aa, Unknown
  Bacterial polypetide isolated from the Sargasso Sea
MSNELIKEQSKCPFTGAGTPPKHPTGKGQTNKDWWPNNLNLKILSQHSSLVNPMGEKFNYKKEFKKLNFKALKKDLHKLMTDTQDWWPADYGHYGPFFIRLAWHAAGTYRTGDGRGGAGTGNQRFAPLNSWPDNVNLDKARLLLWPIKKKYGKKISWADLFILVGNISLESMGFKTFGFGAGREDIWEPEEDIYWGSEKEWLGVNRYSGKRELENPLGASHMGLIYVNPQGPDANPDPYLAAHDIRETFGRMAMN

SEQ ID NO: 89537 - protein, 247 aa, Unknown
  Bacterial polypetide isolated from the Sargasso Sea
TAWASASTFRGSDLRGGANGARIRLEPQKNWEVNKPEQLEKVLSVYETISSETGASIADIIILGGNLGIEKASGKTLDFTPGRGDSSQDQTDIDSFAYLEPLSDGFRNYHRDGLDVKAEEMMLDRAQLLGLTAPEMTVLLGGLRSLGITHNGYGNFSENSNELTNDYLTKLLDMSVSWQTNGTGNSFESIDRTTGDKVSSASRVDLVFGSNSQLRAIAELYAQEDSKDKFVSDFISAWNKVMNSDLY

SEQ ID NO: 89538 - protein, 286 aa, Unknown
  Bacterial polypetide isolated from the Sargasso Sea
RMGFGWTSTYGSGVGSDTITSGIEGAWTANPTQWDNGYFDLLFGYDWELTKSPAGAHIWHAVGQKEEDMAPDAEDSSKKVPTMMTTADMALREDPSYNKISKRFHENPEEFADAFARAWFKLLHRDMGPKTRYMGPEVPEEELIWQDPVPAGNSDYDIQNVKKLITESGLSIQEMVETAWASASTFRGSDMRGGANGARIRLAPQKDWEANNPSRLSKILEIYKSISNTTGASIADVIVLAGNVGIEMATGEEVLFTPGRGDASQEQTDIESFEVLEPKSDAFRNF

SEQ ID NO: 89539 - protein, 305 aa, Unknown
  Bacterial polypetide isolated from the Sargasso Sea
MGNKISWADLFILTGNVAIESMGGKTFGFSGGRPDIWAPEEDIYWGVEEEWLQNKRYTGERVLDNPLAAVQMGLIYVNPEGPDGKADPLASAKDIRETFARMAMNDTETVALTAGGHTFGKAHGAGDPALVGAEPEGAPLEQMGLGWNNLHGSGVGRDTTTSGIEGPWTPNPTQWDNGYFDMLLGYEWKLVKSPAGAQIWHAIDQKEEHMAPQVDDPSIKVPTMMTTADMAMREDPEYRKVSEKFHKDPEYFADQFARAWFKLLHRDMGPKTRYLGPEVPEEELIWQDPVPKGHSNYDVEAVKAK

SEQ ID NO: 89540 - protein, 157 aa, Unknown
  Bacterial polypetide isolated from the Sargasso Sea
MENEGKCPVMHGAMTSNSSSGTSNKDWWPEQLNLNILHQHDRKSDPMDEGFDYRKEFEDIDYDALKKDLNDLMTDSQEWWPADYGHYGPFFIRMTWHAAGTYRSTDGRGGGGTGAQRFAPLNSWPDNGNLDKARRLLWPIKQKYGKKISWADLLILA

SEQ ID NO: 89541 - protein, 313 aa, Unknown
  Bacterial polypetide isolated from the Sargasso Sea
DTITSGIEGAWTTNPTKWDNGYFDLLLGYDWKLTKSPAGANIWHAVGQKKEHMAPDAEDSSKKVPTMMTTADMAMREDPEYRKISEHFHKNPDQFQDAFARAWFKLLHRDMGPKTRYMGPEAPEEDLIWQDPIPAGNANYDVDAVKSKIENSELSIQEMVETAWASASTYRHTDMRGGANGARIRLEPQRSWEVNKPEQLNKVLGVLEGIASETGASVADVIVLAGNVGIEKASGITVPFTPGRGDATQEHTDVESFAVIEPEADGFRNYLKKNFTVTPEEFLLDRAHLLGLTAPEMTVLVGGMRALGISSDD

SEQ ID NO: 89542 - protein, 306 aa, Unknown
  Bacterial polypetide isolated from the Sargasso Sea
MIIQKKVTTMMTTADMAMREDPSYKVISKRFHENPDQFQDAFARAWFKLLHRDMGPKTRYLGPEVPEEELIWQDPVPSGNKNYDIGAVKSLLSESGLSIKQMVETAWASASTFRGTDMRGGANGARIRLEPQKSWEVNKPNELSKILEVYSSISEKTGASISDVIVLAGNVGIETASGKSLEFTSGRGDATQEKTDVDSFAVLEPVVDGFRNYQKEDYGISPEEMLLDKAQIMGLTAPEMTVLIGGLRSLGISADGHGVFSKDTSKLSNDYFVNLLDMGIDWKPINSNTYQGVSRSTSEKINTATR

SEQ ID NO: 89543 - protein, 296 aa, Unknown
  Bacterial polypetide isolated from the Sargasso Sea
EPEGSKIQDQSTGWNSNYKSGLGADTISSGIEGAWTSNPIKWDMGYFDNLFGYDWELSKSPAGAYQWKPKKNGHAIAMTPDAHIKGKENMPMMQTTDLSLKIDPKFGLISRHFHNNPDEFADAFARAWFKLTHRDMGPRVNYLGNEVPKEDLIWQDPIPRNKYKLKNKDIETLKKSIVKSGLTISELVMIAWASASTFRGSDKRGGANGSRIRLAPQKDWESNNPKLLSKVLGKYNKIQKQFNSKSKFVSIADLIVLGGNVGIEKAAQRAGKKIKVPFKSGRGDATQDQTDIHSFG

SEQ ID NO: 89544 - protein, 306 aa, Unknown
  Bacterial polypetide isolated from the Sargasso Sea
GWKRRIFGNPKKIFIGGSEKEWLGVNRYSGKRELENPLGASHMGLIYVNPQGPDANPDPLLAAHDIRETFGRMAMNDYETVALVAGGHTFGKSHGAASESYKGPEPEGSKIQDQSTGWNSTYKSGKGVDTISSGLEGAWTQNPKKWDMGYFDNLFGYDWTLSKSPAGAHQWTPKKNGHAIKMVKDAHDKTKKHAPMMLTTDLSMRVDPKYGPISKHFHNNPKEFADAFARAWFKLTHRDMGPRSCYLGPEVPKEQLIWQDPIPKSKYKLKKKDIKLLKIKILKSGISISQLVSTAWASASTFRGSD

SEQ ID NO: 89545 - protein, 157 aa, Unknown
  Bacterial polypetide isolated from the Sargasso Sea
EPQADGFRNYLNGGQSIVSAEEKLIDKAQLMGLTAPEMTVLMGGMRVLDTNFDNSKHGVFTKKLGALTNDYFTNLLDMNTTWKETDKSEQTFVGVDRKTKKTKWKGTRVDLIFGSNSQLRALAEVYACEDSQDKFVSDFIAAWVKVMNADRFDLRLN

SEQ ID NO: 89546 - protein, 287 aa, Unknown
  Bacterial polypetide isolated from the Sargasso Sea
KAHGAGDAALVGPEPESAPMEEMGFGWISKHASGKGSDTITSGIEGAWTANPTVWDNGYFDLLLGYDWKLTKSPAGANIWHAVDQKEEHMAPDAEDSSKKVPTMMTTADMAMREDPEYRKISERFHKNPDQFQDAFARAWFKLLHRDMGPKTRYMGPESPEEILIWQDPVPAGNSKYDVDAVKTKIEESGLSIQEMVETAWASASTYRHTDMRGGANGARIRLEPQKNWEVNKPNQLSKVLTKLEAIASETGASVADVIVLAGNVGIEKASGKKVPFTPGRGDATQE

SEQ ID NO: 89547 - protein, 194 aa, Unknown
  Bacterial polypetide isolated from the Sargasso Sea
MSDETKCPVIHGSNTKTAGSHSNVNWWPQQLNLNILHQHDKKTNPMEEDFNYKEEFEKIDYKALKQDLYDLMTDSQEWWPADYGHYGPFFVRLTWHAAGTYRIGDGRGGAGTGAQRFSPLNSWPDNGNLDKARRLLWPIKQKYGKQLSWADLLVLAGNAAIESMGGKTFGFGGGREDIWHPEEDIYWGPEEEML

SEQ ID NO: 89548 - protein, 207 aa, Unknown
  Bacterial polypetide isolated from the Sargasso Sea
FILVGNISLESMGFKTFGFGAGREDIWEPEEDIYWGSEKEWLGVNRYSGKRDLENPLGASHMGLIYVNPQGPDANPDPYLAAHDIRETFGRMAMNDYETVALVAGGHTFGKSHGAAPESHKGPEPEGSKIQDQATGWKSNYKSGLGVDTISSGIEGAWTSNPIKWDMGYFDNLFGYDWELTKSPAGAHQWKPKRNGHDIKMTPDAHN

SEQ ID NO: 89549 - protein, 308 aa, Unknown
  Bacterial polypetide isolated from the Sargasso Sea
MNDYETVHLTAGGHTFGKAHGAASEDHKGPEPEAAAMEEMGFGWSSDYKSGVGRDTITSGIEGAWTANPTQWDNGYFDLLFKYEYELKQSPAGAHQWHPVNPSEEDMAPDPEDPTKKVNTIMTTADMAMKMDPEYNKISKHFHENPEEFADAFARAWFKLLHRDMGPKKRYLGPEVPSEDLIWQDPVPEGSTDYNVESVKKQIKESDLSIQEMVETAWASASTYRHTDMRGGANGARIRLAPQKDWVVNKPEQLQKVLNILEPIAEQNKVSVADVIVLAGNIGIEMATGKSLTFSPGRGDASQDQTEY

SEQ ID NO: 89550 - protein, 309 aa, Unknown
  Bacterial polypetide isolated from the Sargasso Sea
KSKCPFTGVGTPPKHPTGKGTSNRDWWPNSLNLKILSQHSSLVNPMDKRFNYAKEFKKLNYKKLKKDLIKLMTDSQEWWPADYGHYGPLFIRLAWHAAGTYRTADGRGGAGTGNQRFAPLNSWPDNVNLDKARLLLWPIKKKYGDKISWADLFILVGNVALDSMGFKTFGFGAGREDIWEPEDDIYWGSEKEWLGVNRYSGKRDLEQPLGASHMGLIYVNPQGPDANPDPLLAAHDIRETFGRMAMNDYETAALVAGGHTFGKSHGAAPESHKGPEPEGSKIHEQSTGWNSNYKSGKGIDTISSGIEGA

SEQ ID NO: 89551 - protein, 311 aa, Unknown
  Bacterial polypetide isolated from the Sargasso Sea
KWDMGYLDCLYGHEWELTKSPAGAHQWTPKKNGQEIKMVPDAHDKSVFHPPMMQTTDISMKVDPSYGPITKHFHENPREFHDAFARAWFKLTHRDMGPRACYLGADVPKEELIWQDPVDKPKYKLKSKDIKDLKSKISKSKISISELVSTAWASASTFRGSDKRGGANGARIMLEPQKSWKVNNPTRLSKIISKLEKIKNKFDNKKKTVSMADLIVLAGGVGVEMAAKKAGHKINVPFTPGRGDARQEQTDVNSFGLLEPQADGFRNYLNGDKSIVSAEEKLIDKAQLMGLTAPEMTVLVGGMRVLDTNFD

SEQ ID NO: 89552 - protein, 244 aa, Unknown
  Bacterial polypetide isolated from the Sargasso Sea
TGWNSNYKSGLGADTISSGIEGAWTSNPIKWDMGYFDNLFGYEWELTKSPAGAHQWKPKQNGHAIDMTPDAHIKSKKNFPMMQTTDLSLKLDPSYGPISKHFHNNHKEFADAFARAWFKLTHRDMGPRACYLGPEIPKEELIWQDPTSKLKYKLNKKDINLLSAKIAKSGLSVSQLVSTAWASASTFRGSDKRGGANGARLRLLPQKNWEANNPKELSKVLKVFEKIKDKFDSNKKSVSIADLI

SEQ ID NO: 89553 - protein, 153 aa, Unknown
  Bacterial polypetide isolated from the Sargasso Sea
MTKPAGAKGQGSAQMGVARNNQFWWPDQLDLSPLRDHDARSNPYGANFNYAEAFSKLNLAAVKKDIDTLLTQSQDWWPADFGNYGPFFIRMTWHSAGTYRTLDGRGGADGGQQRFDPLNSWPDNGNLDKARRLLWPIKQKYGEALSWADLMVL

SEQ ID NO: 89554 - protein, 314 aa, Unknown
  Bacterial polypetide isolated from the Sargasso Sea
DPGKYVGAEPEGSPIEQMGFGWKNLYQSGVGDDTITSGIEGAWTSNPTQWDNGYFDLLLGYDWTLVKSPAGAFQWHPLEVKDKDLAPAAHDSSKRVTTMMTTADMAMREDPSYRKISEHFYANPEQFSDAFARAWFKLLHRDMGPKSRYLGPEVPNEELIWQDPVPLGRTDYDIEAVKRKIASSNLTIQQLVETAWASASTFRETDKRGGANGARIQLAPQKDWEVNKPTQLDAVLNVLRPIAEASEASLADVIVIAGNVGLEKAIGKSIPFKPGRGDATEEQTDASSFEVLEPIADAFRNYQNKNYAYNPAEV

SEQ ID NO: 89555 - protein, 282 aa, Unknown
  Bacterial polypetide isolated from the Sargasso Sea
GKSHGAAPESHKGPEPEGSKIQEQATGWNSNYKSGKGVDTISSGIEGAWTNNPIKWDMGYFDNLFGYEWELTKSPAGAHQWKPKRNGHDIKLTPDAHIKSKKNLPMMQTTDLSLKMDPIYGPISRNFYENPDEFADAFARAWFKLTHRDMGPRACYLGSDVPKEELIWQDPIPKTKYRLKNKDIKILKYQLLKSGLSISQLVTTAWASASTFRGSDKRGGANGARIRLSPQKNWEVNNPIELSKVLKTLGKIKKNFDNKKRFVSVADLIVLGGSVAIKKQRK

SEQ ID NO: 89556 - protein, 265 aa, Unknown
  Bacterial polypetide isolated from the Sargasso Sea
PGQLPIELLHSLSPSANPLGEDFDYPAAFASLDLDAVKKDILALLTTSQDFWPADYGNYGPQMIRMAWHSAGSYRVFDGRGGSAQGLQRFAPLYSWEDNGNIDKSIRLLQPIKLKYGDNISWADLIMLTGNLALEQMGFKTFGFGGGRIDCWEADDATYWGPETEMATQDKRWTGEPGTEDYDLENPLAASRQSLIYVHPEGPFGNMDPISSAQEIRITFGRMGMNDEETVALIAGGHAFGKSHGGSDKSHLGPEPSGAPIENQG

SEQ ID NO: 89557 - protein, 310 aa, Unknown
  Bacterial polypetide isolated from the Sargasso Sea
FWANNPQSLHQSTILMSDRGIPLSYRHVNGYSSHTLSFWNNAGQRYWVKWHFKTNQGIKTLTSEEAAKMPAYGAQQDLVESIDNGEFPSWTVNVQIMTEEEARNYHINPFDLTKVWPHSDFPLIEVGQLELNRNVDNYFAETEQAAFAPSNLVPGIGASPDRMLQARLIGYQDAHRYRIGANYNQIPVNAPRCPVHNYQRDGAFAGINPALAGSGANFYPNNRARVGEPAEAPEVQEPPMPLEQDAWLDIYDNRDEDNYSQAGDLFRIMSEDQKQQLVNNIADGLSQATKDVQEAMFVPYDLADSDYGTR

SEQ ID NO: 89558 - protein, 171 aa, Unknown
  Bacterial polypetide isolated from the Sargasso Sea
MKEFQTKNNSELSKNGECPFMHGSSTKPETSPLKWWPKRLNLDILHQHDQKSNPYSNDFDYREVVKTLDFKGLENDMLELMTTPQDWWPADWGHYGGLMIRMAWHAAGTYRVADGRGGAGTGNLRFAPLNSWPDNGNLDKARRLLWPIKKKYGNKISWADLFILAGNIAYE

SEQ ID NO: 89559 - protein, 198 aa, Unknown
  Bacterial polypetide isolated from the Sargasso Sea
MSDNDNKCPVIHGSLTSNSNSGTSNRDWWPDQLDLNILHQHDKKSDPMDEDFDYAEEFKKLDYDSLKKDLNDLMTDSQDWWPADYGHYGPFFIRMTWHAAGTYRIGDGRGGGGTGAQRFAPLNSWPDNGNLDKARRLLWPIKQKYGKQISWADLLILAGNVAIESMGGKTFGFGGGRPDIWAPEEDIHWGAETEWLTN

SEQ ID NO: 89560 - protein, 203 aa, Unknown
  Bacterial polypetide isolated from the Sargasso Sea
MSTEFRNKDFKNKELSKCPVTGAGTTAKFSAGRGQTNRDFWPNSLNLKILSQHSNLTNPMDKKFNYAKEFKKLNYKALKKDLTKLMTDSQEWWPADYGHYGPFFIRLAWHAAGTYRTGDGRGGAGTGNQRFAPLNAWPDNVNLDKARLLLWPIKQKYGKQISWADLFILVGNVALESMGFKTFGFGAGRVDIWEPEDDIYWGS

SEQ ID NO: 89561 - protein, 286 aa, Unknown
  Bacterial polypetide isolated from the Sargasso Sea
ILVGNVALDSMGFKTFGFGGGREDIWEPEEDIYWGSEKEWLGVNRYSGKRDLEQPLGASHMGLIYVNPQGPDANPDPLLAAHDIRETFGRMAMNDYETAALVAGGHTFGKSHGAAPESHKGPEPEGSKIHEQATGWNSNYKSGKGVDTISSGIEGAWTQNPIKWDMGYLDCLYGHEWELTKSPAGAHQWTPKKNGQEIKMVPDAHERGKKHPPMMQTTDISLKVDPSYGPITRHFHKNPKEFHDAFARAWFKLTHRDMGPRACYLGPDVPKEQLIGKIQYQNKNTK

SEQ ID NO: 89562 - protein, 239 aa, Unknown
  Bacterial polypetide isolated from the Sargasso Sea
LENPLGASHMGLIYVNPQGPDANPDPYLAAHDIRETFGRMAMNDYETVALVAGGHTFGKSHGAAPESHKGPEPEGSKIQDQSTGWNSNYKSGLGIDTISSGIEGAWTSNPIKWDMGYFDNLFGYDWELTKSPAGAHQWKPKRNGHDIEMTPDAHDKSKKNLPMMQTTDLSLKLDPKYGPISKHFHQNPNEFADAFARAWFKLTHRDMGPKANYLGSDVPKENLIWQDPIPKNKYKLKNK

SEQ ID NO: 89563 - protein, 196 aa, Unknown
  Bacterial polypetide isolated from the Sargasso Sea
KGERELDNPLAAVQMGLIYVNPQGPDGNPDPLASAHDIRETFGRMAMNDEETVALVAGGHTFGKAHGAGAETHVQSEPESAPLEEMGFGWTSTYGSGVGSDTITSGIEGAWTANPTQWDNGYFDLLFGYDWELTKSPAGAHIWHAVGQKEEDMAPDAEDSSIKVPTMMTTADMALREDPSYNKISKRFHENPDEFA

SEQ ID NO: 89564 - protein, 273 aa, Unknown
  Bacterial polypetide isolated from the Sargasso Sea
KDIVFLKNTILGSGLSISELVSTAWASASTFRGSDNRGGANGSRIRLQPQNAWDVNKPDQLNKVLNTLEKIRTDFNLQSKTKKVSMADLIVLGGCAAIEDAARKTGNIINVPFSPGRMDATQDQTDIESVGVLEPIADGFRNYLKEKYIFSTEELLVDKAQLLKLTAPEMTVLIGGMRVLNTNYDNSKHGVFTNRSGLLTNDYFINLLDMSTEWSPKEGTQEFFEGRDRKTGGLKWTATRADLIFGSNSELRAISEVYASDDASKKFVSDFVR

SEQ ID NO: 89565 - protein, 273 aa, Unknown
  Bacterial polypetide isolated from the Sargasso Sea
LIWQDPIPKNKYKLKNKDIELLKKKISKSGLSVSQLVTTAWASASTFRGSDKRGGANGARIALEPQKDWKVNNPSKLSAVIRIFSKIKKSFDSKNKSVSLADLIVLGGSVGIENAAKKSGKKIKVPFKAGRGDARQDQTDQNSFNLLEPIADGFRNYIKLHDEGYTNGKGIPTNSAEEMLIDKAQLLGLTGPEMTVLIGGMRVLNTNYDGSDYGVFTKKPGSLTNDFFVNLLDMKTTWREVDKEEQFFEGIDRKTKRVKWRATRADLYLDLIL

SEQ ID NO: 89566 - protein, 267 aa, Unknown
  Bacterial polypetide isolated from the Sargasso Sea
IESVKAQIKDSGLTIQEMVETAWASASTYRGTDMRGGANGARIRLEPQRNWEVNKPEQLNKVLAVYESISASSGASVADVIVLGGGVGIEQASGSVVPFKPGRGDSSQEQTDVESFAVLEPVSDGFRNYHQQSAGIPSEEMMLDKAHLLSLTAPEMTVLLGGMRSLGISHDDRGLFGIEQGKLTNEWFTKLLDMSVKWSPDGTGNSFDGVDRVSGETVRSATRVDLAFGSNSQLRALAEVYASDDGKDKFVKDFISAWTKVMENDLV

SEQ ID NO: 89567 - protein, 267 aa, Unknown
  Bacterial polypetide isolated from the Sargasso Sea
SDLVSTAWASASTYRGSDKRGGANGARILLEPQKSWKVNNPKKLTKITKALKKIKKSFDTKNKSVSMADLIVLGGNVGIEIAAKKSGHKVKVPFSPGRGDARQDQTDIHSFGLLEPQADGFRNYLRTGKTNVSAEEKLIDKAQLMGLTAPEMTVLVGGMRVLNTNYDNSKNGVFTNKPGTLTNDFFVNLLDMGTTWKETDKSEQSFVGKDRKTMKTRWKGSRIDLIFGSNSQLRAISEVYASKDSPGKFIKDFVSAWVKVMNADRLI

SEQ ID NO: 89568 - protein, 247 aa, Unknown
  Bacterial polypetide isolated from the Sargasso Sea
IKNKEIKILKAKILKSGLSISQLVSTAWASASTFRGSDKRGGANGARIRLAPQKDWEVNNPSQLSKVIKILEKIKKSFDNKKKVVSLADLIVLGGCVAIEKAAKKAGYNVNVPFLPGRGDASQEQTDEYSFGLLEPKADGFRNYIINRSNGSSSKPTVSAEEMLVDRAQLMKLTAPEMVVLLGGMRVLNTNFDKSNNGVFTKKPETLTNDFFVNLLDMKTTWKEVDKSEELFQGKNRTTNKIKWTAS

SEQ ID NO: 89569 - protein, 169 aa, Unknown
  Bacterial polypetide isolated from the Sargasso Sea
LFTPGRGDATQEQTDVDSFGVLEPFSDGFRNYHNKDFTVNSENMLLDKAQLLGLTATEMTVLVGGMRSLGISADGHGVFTDEPGKLSNDFFVNLLDMNVKWEATGRNTYEGTDRSSGEKLRTATRVDLVFGSNSQLRALAEVYACDDSKDKFLNDFVAAWNKVMNVDRF

SEQ ID NO: 89570 - protein, 319 aa, Unknown
  Bacterial polypetide isolated from the Sargasso Sea
KGFDTISSGIEGAWTQFPTKWDMGYFDCLFSHEWELSKSPAGAHQWTPKKNGQRIKMVPDAHDKNKTHPPMMQTTDLSLRMDKNYGPISKYFYNNPNEFADAFARAWFKLTHRDMGPRACYLGSEVPKEELIWQDPIDKPKYKLKSVDIKNLKSKVLKSKITVSDLVSTAWASASTYRGSDKRGGANGARILLEPQKSWKVNNPKQLRKVIKSLQKIKKSFDTKNKSVSMADLIVLGGNVGIEIAAKRAGHKVNVPFLPGRGDARQNQTDIHSFGLLEPQADGFRNYQKNVKSNVSAEEKLVDKAQLMQLTAPEMTVLI

SEQ ID NO: 89571 - protein, 197 aa, Unknown
  Bacterial polypetide isolated from the Sargasso Sea
MDAESKCPVMHGAITKNMGEGTSNREWWPNQLNLNILHQHDRKSDPMETGFNYREEFKKLDYAALKKDLHNLMTDSQDWWPADYGHYGGFFIRMTWHAAGTYRTGDGRGGGGTGAQRFAPLNSWPDNGNLDKARRLLWPIKKKYGNKISWADLFILTGNVAIESMGGKTFGFSGGRPDIWAPEEDIYWGVEEEWLQN

SEQ ID NO: 89572 - protein, 289 aa, Unknown
  Bacterial polypetide isolated from the Sargasso Sea
SHKGPEPEGSRIQDQSTGWNSDYKSGLGADTISSGIEGAWTSNPIKWDMGYFDNLFGYEWELTKSPAGAHQWKPVKNGHAPEMTPDAHIKGKKNLPMMQTTDLSMRFDPEFGRISRHFHNNPDEFADAFARAWFKLTHRDMGPKINYLGNEVPKEDLIWQDPISKNKYKLKNTDIEYLKSKISKSGLSISQLVSTAWASASTFRASDKRGGANGARVTLAPQKDWKVNNPSQLSKVIKLYEKIQKAFNSKKKHVSLADLIILGGNVGVEKAAAAAGKKIKLTFSPGRGD

SEQ ID NO: 89573 - protein, 246 aa, Unknown
  Bacterial polypetide isolated from the Sargasso Sea
AEDHVQSEPEGAPLEEMGFGWTSTYASGVGSDTITSGIEGAWTANPTQWDNGYFDLLFGYEWELTKSPAGAHIWHAVGQTEEDMAPDAEDASKKVPTMMTTADMALREDPSYKKISKRFHENPDEFADAFARAWFKLLHRDMGPKSRYMGPEVPGEELIWQDPVPLGNSDYDIDKVKEIISKSGLSIQEMVETAWASASTYRGSDMRGGANGSRIRLAPQKDWEANNPSQLSKVLDIYESISNETG

SEQ ID NO: 89574 - protein, 256 aa, Unknown
  Bacterial polypetide isolated from the Sargasso Sea
DLFILVGNVALDSMGFKTFGFGAGRDDIWEPEDDIYWGSEKEMLGVERYSGKRDLEQPLGASHMGLIYVNPQGPDANPDPLLAAHDIRETFGRMAMNDYETAALVAGGHTFGKSHGAASESYKGPDPEASKLQDQSTGWNSGYKSGKGVDTISSGIEGAWTQNPTKWDMGYLDCLYGHDWELTKSPAGAHQWTPKKNGQKIKMVPDAHQKGVLHPPMMQTTDISMKVDPSYGPITKHFHQNPKEFHDAFARAWFKL

SEQ ID NO: 89575 - protein, 215 aa, Unknown
  Bacterial polypetide isolated from the Sargasso Sea
TKKRIVSLADLIVLGGSVGIEKAAKKAGYKINVPFIAGRGDASQAQTDEFSFGLLEPKADGFRNYTVKKTNGSSKNSISDEEMLIDKAQLMKLTAPEMTVLVGGMRMLNTNFDGSNYGVFTKKRETLTNDFFVNLLDMNTTWKETDKDETTFEGKDRRTNKVMWKATRADLIFGSNSQLRALSEVYACEDSMPKFINDFVSAWTKVMNLDRFDVQ

SEQ ID NO: 89576 - protein, 264 aa, Unknown
  Bacterial polypetide isolated from the Sargasso Sea
KWDNGYFDLLFGYEWELTKSPAGAHIWHAIGQTEEDMAPDAEDASKKVPTMMTTADMALRVDPAYNKISKRFHENPDEFADAFARAWFKLLHRDMGPKSRYMGPEVPQEELIWQDPVPEGNSKYDIDEVKKMISESGLSIQEMVETAWASASTYRGSDMRGGANGARIRLEPQKNWEANNPNQLNKILDIYESISSKTGASMADVIVLAGNVAIEKASGVMVPFTPGRGDATQDQTDVESFEVLEPKSDAFRNYHAKGVNIAPR

SEQ ID NO: 89577 - protein, 236 aa, Unknown
  Bacterial polypetide isolated from the Sargasso Sea
MSRETNSDISKCPFHGEGIPQKHPSGKGQTNRDWWPNSLNLKILSQHSSMVNPMDKKFNYKKEFKKLNFKALKKDLHKLMTQSQNWWPADYGHYGPLFIRLAWHAAGTYRTGDGRGGAGTGNQRFAPINSWPDNVNLDKARLLLWPIKKKYGKRISWADLFILVGNVALESMGFKTFGFGGGREDIWEPEEDIYWGSEKEWLANDRYNSKRELENPLGAVQMGLIYVNPQGPDGNP

SEQ ID NO: 89578 - protein, 306 aa, Unknown
  Bacterial polypetide isolated from the Sargasso Sea
GIEGAWTQNPIKWTWGYLDCLYGHEWELTKSPAGAHQWTPKKNGQEIKMVPDAHDKNTLHPPMMQTTDISLKVDPSYGPITRHFHKNPREFHDAFARAWFKLTHRDMGPRACYLGGDVPKEELIWQDPIDKPKYKLKSKDIKDLKSKVLKSKISISDLVSTAWASASTFRGSDKRGGANGARVMLEPQKNWKVNNPIRLSKVISNLKKIKKNFDSKKKSVSMADLIVLAGNVGVEMAAKKAGHKAIVPFTPGRGDARQDQTDVNSFGLLEPQADGFRNYLDGGESNVSAEEKLIDKAQLMGLTSPE

SEQ ID NO: 89579 - protein, 272 aa, Unknown
  Bacterial polypetide isolated from the Sargasso Sea
FARAWFKLTHRDMGPKANYLGSDVPKENLIWQDPIPKNKYKLKIKDIELLKKKISKSGLSVSQLVTTAWASASTFRGSDKRGGANGARIALEPQKDWKVNNPSKLSAVIRIFNKIKKGFDSKNKSVSLADLIVLGGSVGIENAAKKSGKKIKVPFKAGRGDAKQDQTDKNSFNLLEPIADGFRNYIKLHAKGYTNGKGIPTNSAEEMLIDKAQLLGLTGPEMTVLIGGMRVLNTNYDGSDYGVFTKKPGSLTNDFFVNLLDMKTTWREVDKG

SEQ ID NO: 89580 - protein, 286 aa, Unknown
  Bacterial polypetide isolated from the Sargasso Sea
RIQDQSTGWNSGYKSGKGIDTISSGIEGAWTQNPIKWDMGYLDCLYDHDWELTKSPAGAHQWTPKKNGQKIKMVPDAHNKNVLHPPMMQTTDISMKVDPSYGPITKHFHKNPKEFHDAFARAWFKLTHRDMGPRVCYLGSDVPKEQLIWQDPIDKPKYKLKSKDIKFLKSKISKSKISISELVSTAWASASTFRGSDKRGGANGARILLEPQKSWKVNNPIKLTKIISILKKIKKKFDSKMKTVSMADLIVLAGGVGVEMAAKKAGYKVKVPFSPGRGDARQDQTD

SEQ ID NO: 89581 - protein, 259 aa, Unknown
  Bacterial polypetide isolated from the Sargasso Sea
MSSEINNEINKCPFHGEGIPQKHNSGKGQTNRDWWPNSLNLKILSQHSSMVNPMDKKFDYKKEFKKLNFKGLKKDLNKLMTQSQSWWPADYGHYGPLFIRLAWHAAGTYRTGDGRGGAGTGNQRFAPINSWPDNVNLDKARLLLWPIKKKYGKRISWADLFILVGNVALESMGFKTYGFGGGREDIWEPEEDIYWGSEKEWLANNRYNSKRELENPLGAVQMGLIYVNPQGPDGNPDPLLAARDIRETFGRMAMNDYEI

SEQ ID NO: 89582 - protein, 298 aa, Unknown
  Bacterial polypetide isolated from the Sargasso Sea
QTNPIKWDNGYFDLLLTYEWELTKSPAGANIWHAVNQKDEHKAPDAEDASKRVPTMMTTADMAMREDPSYRKISERFHKNPDEFQDAFARAWFKLLHRDMGPKTRYMGPEVPEEELIWQDPIPKGNADYNIDSAKAKILESGLSIQEMIETAWASASTFRGTDMRGGANGGRIRLEPQKNWEVNKPDQLSKVLSIFEGIASDIGASVADIIVLAGNVGIEKASGVSVPFTPGRGDATQENTDIESFNVLEPEADGFRNYLKKNYTVTPEELMLDKAHLLGLTAPEMTVLVGGMRSLGI

SEQ ID NO: 89583 - protein, 154 aa, Unknown
  Bacterial polypetide isolated from the Sargasso Sea
MNKPVKCPVMHGSVTRNGESGTSNRDWWPNQLNINILHQHGEKSNPLGKNFNYREEFEKLDYFALKKDLLNLMTDSQEWWPADYGHYGPFFIRMTWHAAGTYRSGDGRGGGGTGAQRFAPLNSWPDNGNLDKARRLLWPIKRKYGQKISWADLL

SEQ ID NO: 89584 - protein, 257 aa, Unknown
  Bacterial polypetide isolated from the Sargasso Sea
LSIQEMVETAWASASTYRHTDMRGGANGARIRLEPQKNWEVNKPDQLSKVLDKLESIASETGASVADVIVLAGNVGIEKASGEQVPFTPGRGDATQEHTDVESFAVLEPEADGFRNYLKKNYTVTPEEFMLDRSHLLGLTAPEMTVLVGGMRAMGISSDDRGVFSDKGTLNNSFFTTLLDMTVKWEATGSNSYQATDRQSGEKVRRASRADLVFGSNSQLRALAEVYAQSDNHEKFLADFISAWNKVMNADRFDLEK

SEQ ID NO: 89585 - protein, 282 aa, Unknown
  Bacterial polypetide isolated from the Sargasso Sea
ISWADLIILTGNVAIESMGGKVFGFGGGRDDIWAPEKDIFWGKETEWLTNERYTGERELDQPLAAVQMGLIYVNPQGPDGNPDPLKSAVDIRETFKRMAMNDYETVALTAGGHTFGKAHGAASEDYKGPEPEAAAIEEMGFGWTSDHGSGVGRDTITSGIEGAWTANPIQWDNGYFDLLFKYEYELKQSPAGAHQWHPVNPSEDDMAPDPEDPTKKVNTIMTTADMAMKMDPEYNKISKHFHENPEEFADAFARAWFKLLHRDMGPKKRYLGPEVPSEELIG

SEQ ID NO: 89586 - protein, 262 aa, Unknown
  Bacterial polypetide isolated from the Sargasso Sea
LPNQVIIPRNGETAWASASTFRGSDMRGGANGARIRLAPQKDWEANNPTQLNKILDVYQTISNDSGASIADIIILAGNVAIEMASGIEVPFTPGRGDASQEQTDIESFEVLEPKSDAFRNFHAQGVNTAPEEIMLDKAQLLGLTAPEMTVLMGGMRSLGISSNGHGIFTEDSNKLSNNYFKTLLDMSVQWKPNGTGNSYEAFDRNSGEKVRTASRSDLVFGSNSQLRAIVEVYAEDDSSEKFNRDFVNAWNKVMNADRFDVQ

SEQ ID NO: 89587 - protein, 257 aa, Unknown
  Bacterial polypetide isolated from the Sargasso Sea
KQQIYQMKVDPSYGPITKHFHQNPKEFHDAFARAWFKLTHRDMGPRVCYLGSDVPKEKLIWQDPIDKPKYKLKSKDIKDLKHKISKSKISISDLVSTAWASASTFRGSDKRGGANGARIMLEPQKNWKVNNPKKLSTVIKALDKVKSKFDSKNKSVSMADLIVLAGGVGIEMAAKKAGYKVNVPFSGGRGDARQDQTDVNSFGLLEPQADGFRNYLNGEASNVSAEEKLVDKAQLIGLTAPEMTVLIGGMRVLKTNF

SEQ ID NO: 89588 - protein, 253 aa, Unknown
  Bacterial polypetide isolated from the Sargasso Sea
MSKESFKEQSKCPFTGKGTPSKHSTGKGTSNRDWWPNSLNLKILSQHSSLVDPMDKKFNYSKEFKKLNLKALKKDLNKLMTKSQDWWPADYGHYGPLFIRLAWHAAGTYRTGDGRGGAGTGNQRFAPLNSWPDNVNLDKARLLLWPIKKKYGKKISWADLFILVGNVALESMGFKTFGFGGGREDIWEPEEDIYWGSEKEWLGVNRYSGKRELENPLGAAHMGLIYVNPPGPDAYPDPLLAATILEKLLVVWA

SEQ ID NO: 89589 - protein, 43 aa, Unknown
  Bacterial polypetide isolated from the Sargasso Sea
GGTGAQRFAPLNSWPDNGNLDKARRLLWPIKQKYGKKIVGLIY

SEQ ID NO: 89590 - protein, 248 aa, Unknown
  Bacterial polypetide isolated from the Sargasso Sea
GVDTISSGIEGAWTQNPIKWDMGYLDCLYGHDWELTKSPAGAHQWTPKKNGQKIKMVPDAHQKGVLHPPMMQTTDISLKVDPSYGPITKHFHQNPKEFHDAFARAWFKLTHRDMGPRVCYLGSDVPKEQLIWQDPIDKPKYKLKLKDIKDLKNKISKSKISISDLVSTAWASASTFRGSDKRGGANGARIMLEPQKGWDVNNPEKLSIVIKGLKKIKDQFDNKNKSVSMADLIVLAGGVGIEMAAKKA

SEQ ID NO: 89591 - protein, 277 aa, Unknown
  Bacterial polypetide isolated from the Sargasso Sea
KGIDTISSGIEGAWTQNPIKWDMGYLDCLYGHEWELTKSPAGAHQWTPKRNGQHIKMVPDAHDKNKKHPPMMQTTDISLKVDPSYGPITKHFHKNPKEFHDAFARAWFKLTHRDMGPKVCYLGPEVPKEDLIWQDPVPKQKYKLKAKDINYLESKIIKSGLSVSQLVSTAWASCSTFRGSDKRGGANGARIRLQPQKDWDINKIAKVDKVIKVLEKIKKNFDSKTKNVSLADLIVLAGNTAIEKAAKKAGHKIKVPFLQGKGDAKQEHTDVFSFNLL

SEQ ID NO: 89592 - protein, 276 aa, Unknown
  Bacterial polypetide isolated from the Sargasso Sea
NVAIESMGGKTFGFSGGRPDIWAPEEDIYWGVEEEWLQNKRYTGDRVLDNPLAAVQMGLIYVNPEGPDGKADPLASAKDIRETFARMAMNDTETVALTAGGHTFGKAHGAGDPALVGAEPEGAPLEQMGLGWNNLHASGVGRDATTSGIEGPWTPNPTQWDNGYFDMLLGYEWKLVKSPAGAQIWHAIDQKEEHMAPQVDDPSVKVPTMMTTADMAMREDPEYRKVSEKFHKDPEYFADQFARAWFKLLHRDMGPKTRYMGPEVPEEELIWQDPVP

SEQ ID NO: 89593 - protein, 294 aa, Unknown
  Bacterial polypetide isolated from the Sargasso Sea
NPTQWDNGYFDLLFGYELELTKSPAGAHIWHAVGQTEEDMAPDAEDASKKVPTMMTTADMALREDPSYKKISKRFHENPDEFADAFARAWFKLLHRDMGPKSRYMGPEIPSEELIWQDPVPLGNSDYDIEKVKEMISKSGLSIQEMVETAWASASTYRGSDMRGGANGSRIRLAPQKDWEANNPSQLSKVLDIYESISNETGASVADIIVLAGNLAIEKASGVEVPFTPGRGDASQEKTDIESFEVLEPKSDAFRNYHAKGVNTSPEEIMLDKAQLLGLTAPEMTVLVGGLRSL

SEQ ID NO: 89594 - protein, 248 aa, Unknown
  Bacterial polypetide isolated from the Sargasso Sea
KFNYAKEFKKLNFKNLKKDLHKLMTNSQSWWPADYGHYGPLFIRLAWHAAGTYRTGDGRGGAGTGNQRFAPLNSWPDNVNLDKARLLLWPIKKKYGKRISWADLFILVGNISLESMGFKTFGFGAGREDIWEPEEDIYWGSEKEWLGVNRYSGKRDLEQPLGASHMGLIYVNPQGPDANPDPLLAAHDIRETFGRMAMNDYETVALVAGGHTFGKSHGAAPESHKGPEPEGSKIQEQATGWNSNYKSG

SEQ ID NO: 89595 - protein, 249 aa, Unknown
  Bacterial polypetide isolated from the Sargasso Sea
RELENPLGAVQMGLIYVNPQGPDGNPDPLLAARDIRETFGRMAMNDYEIVALVAGGHTFGKSHGAAPESHKGPEPEGSKIQEQSTGWNSNYKSGLGADTISSGIEGAWTSNPIKWDMGYFDNLFGYEWELDKSPAGAHQWKPVKNGHAPNMTPDAHIKGKKNLPMMQTTDLSMRYDPEFGRISKHFHNNPDEFCDAFARAWFKLTHRDMGPKINYLGSEVPKEDLIWQDPIPKNKFKLKNKDIESLKAK

SEQ ID NO: 89596 - protein, 325 aa, Unknown
  Bacterial polypetide isolated from the Sargasso Sea
HGAASESHKGPEPEGSKIQEQATGWNSNYKTGKGVDTISSGLEGAWTQNPKKWDMGYFDNLFGYEWELTKSPAGAHQWKPKKNGHAIEMVPDAHDKNKKHLPMMLTTDLSMRMDPKYGPISKHFHNNPKEFADAFARAWFKLTHRDMGPRACYLGPEVPKEKLIWQDPISKPKYKLKNKDIKTLKVNILKSGHSISQLVSTAWASASTFRGSDKRGGANGARIRLEPQKNWEVNNPSQLSKVIKSLEKIKKKFDTKTKSVSLADLIVLAGNTAIEKAAKKAGHNIKVPFRPGRGDASQDQTDTNSFSLLEQKADGFRKYMGTMTN

SEQ ID NO: 89597 - protein, 239 aa, Unknown
  Bacterial polypetide isolated from the Sargasso Sea
EPEGSKIQDQASGWNSNYKSGLGVDTISSGIEGSWTSNPIKWDMGYFDNLFGYDWELTKSPAGAHQWKPKRNGHDIEMTPDAHDRSKKNLPMMQTTDLSLKLDPKYGPISKHFHQNPNEFADAFARAWFKLTHRDMGPKANYLGSDVPKENLIWQDPIPKNKYKLKNKDIELLKKKISKSGLSVSQLVTTAWASASTFRGSDKRGGANGARIALEPQKDWKVNNPSKLSAVIRIFNKIK

SEQ ID NO: 89598 - protein, 127 aa, Unknown
  Bacterial polypetide isolated from the Sargasso Sea
QLLTLTAPEMTVLIGGLRVLGTNVNFPEMGRFTDKPETLTNDFFVNLLDMGLEWKVSSICDHFYEGSDRETGKVKWRASSVDLVFGSNSQLRAISEIYASSDGETRFVNDFVAAWNKVMNLDRFDLN

SEQ ID NO: 89599 - protein, 153 aa, Unknown
  Bacterial polypetide isolated from the Sargasso Sea
MSSEVNKNGSGKCPVMHGSMTAQTTPTHWWPKNLNLDILHQHDSKTNPMDKKFNYKKEVKKLNFKGIKKDLLKLMTDSQDWWPADLGHYGGLFIRMAWHSAGTYRIADGRGGSGTGNHRFAPLNSWPDNTNLDKARRLLWPIKKKYGNKISWA

SEQ ID NO: 89600 - protein, 304 aa, Unknown
  Bacterial polypetide isolated from the Sargasso Sea
KSPAGANIWHAVGQTEEHMAPDAEDSSKKVPTMMTTADMAMREDPEYRKISEHFHKNPDQFQDAFARAWFKLLHRDMGPKTRYMGPEAPEEDLIWQDPIPAGNANYDVDAVKSKIENSELSIQEMVETAWASASTYRHTDMRGGANGARIRLEPQRNWEVNKPEQLNKVLGILEGIASETGASVADVIVLAGNVGIEKASGITVPFTPGRGDATQEHTDVESFAVIEPEADGFRNYLKKNFTVTPEEFLLDRAHLLGLTAPEMTVLVGGMRALGISSDDRGVFSNAEKLDNSFFTTLLDMSVKW

SEQ ID NO: 89601 - protein, 222 aa, Unknown
  Bacterial polypetide isolated from the Sargasso Sea
GFKTFGFGGGREDIWEPEEDIYWGSEKEWLANNRYNSKRELENPLGAVQMGLIYVNPQGPDGNPDPLLAARDIRETFGRMAMNDYEIVALVAGGHTFGKSHGAAPESHKGPEPEGSKIQDQSTGWNSNYKSGLGSDTISSGIEGAWTSNPIKWDMGYFDNLFGYEWELTKSPAGAHQWKPVKNGHAPNMTPDAHIKGKKNLPMMQTTDLSMRFDPEFGRISK

SEQ ID NO: 89602 - protein, 243 aa, Unknown
  Bacterial polypetide isolated from the Sargasso Sea
CLSLQRNWKVNNPKKLSKVIKALQKIKKRFDTNKKSVSMADLIVLGGNVGVEMAAKKAGHKIQVPFNPGRGDARQDQTDVNSFGLLEPQADGFRNYMKKGKSNVSAEEKLIDKAQLMGLTAPEMTVLVGGMRVLDTNYDSSKNGVFTKKPGTLSTDYFLNLLDMSTTWKETDKSEQYFVGKDRKSKKTKWKGSRVDLIFGSNSQLRALAEVYACKDSSDKFVKDFVSAWVKVMNADRFDLRLN

SEQ ID NO: 89603 - protein, 315 aa, Unknown
  Bacterial polypetide isolated from the Sargasso Sea
ILETPLGAVQMGLIYVNPQGPDGKPDPLASAHDIRETFSRMAMNDEETVALTAGGHTFGKAHGAAPESNVGPEPEGAPIEQMGFGWKNVHGIGKGRDAITSGIEGPWTSNPTKWDNGYFDLLFKYDWELVKSPAGAFQWHPINPEKEDLAPDSSDPSKMVTTIMTTADMAMKEDPDYNKVSKRFHENPELFADTFAKAWFKLLHRDMGPKSRYIGPEVPKEDLIWQDPIPEGNKNFDINKAKDLIKSSGLSIQELVETAWASASTYRHTDMRGGANGARIRLSPPKDWDVNKPDQLSKVIKIYEGIASNVEASVA

SEQ ID NO: 89604 - protein, 211 aa, Unknown
  Bacterial polypetide isolated from the Sargasso Sea
MSAEFHKSKTFKSTELSKCPFTGAGTPAKFSAGKGQTNRDFWPNSLNLKILSQHSNLSNPMEKKFNYSKEFKKLNYKALKKDLNKLMTDSQDWWPADYGHYGPLFIRLAWHAAGTYRTGDGRGGAGTGNQRFAPLNAWPDNVNLDKARLLLWPIKQKYGKRISWADLFILVGNVALESMGFKTFGFGAGRTDIWEPEDDILLGFRKRNVGC

SEQ ID NO: 89605 - protein, 201 aa, Unknown
  Bacterial polypetide isolated from the Sargasso Sea
MADLIVLGGCAAIEKAAKDGGRRVKVPFTPGRMDATQNQTDIKSMGVLEPVADGFRNYLKTKYIFTTEELLVDKAQLLTLTAPEMTVLLGGMRVLNTNYDNSNHGVFTEKPGTLTNDFFVNLLDMNTEWKAMPNSKEKFEGRDRKTGDLRWTATRADLIFGSNSELRALSEVYASDDAKNKFVDDFVSAWDKVMNLDRFDI

SEQ ID NO: 89606 - protein, 179 aa, Unknown
  Bacterial polypetide isolated from the Sargasso Sea
MSEKSKCPFTGAGTPSKFPTGKGTSNRDWWPNSLNLKILSQHSSLVDPMDKKFNYAKEFKKLNYKALKKDLHKLMTNSQDWWPADYGHYGPLFIRLTWHAAGTYRTGDGRGGGGTGNQRFAPLNSWPDNVNLDKARLLLWPIKKKYGKNISWADLFILVGNVALESMGFKTFGFGGGRE

SEQ ID NO: 89607 - protein, 272 aa, Unknown
  Bacterial polypetide isolated from the Sargasso Sea
MNDYETAALVAGGHTFGKSHGAASESYKGPEPEGSKIHEQSTGWNSNYKTGKGVDTISSGIEGAWTQNPTKWDMGYLDCLYDHEWELTKSPAGAHQWTPKKNGQKIKMVPDAHIKGKMHPPMMQTTDISLKVDPSYGPITKHFHKNPKEFHDAFARAWFKLTHRDMGPKVCYLGPDVPKEELIWQDPIPRNKYKLKNKDINELKKRILKSDLSISQLVSTAWASASTFRGSDKRGGANGSRIRLSPQRDWEINKKANINKVIKVLDKIKKDF

SEQ ID NO: 89608 - protein, 235 aa, Unknown
  Bacterial polypetide isolated from the Sargasso Sea
HENPKEFHDAFARAWFKLTHRDMGPRACYLGGDVPKEELIWQDPIDKPKYKLKSKDIKDLKSKILKSKLSTSDMVSVAWASASTFRGSDKRGGANGARILLEPQKNWKVNNPINLSKVTSVLKKIKGKFDSKKKSISMADLIVLAGGVGIEMAAKKAGYKINVPFSAGRGDARQDQTDIYSFGLLEPQADGFRNYLNGGASNISAEEKLVDKAQLMGLTAPEMKILIGGMRVLDT

SEQ ID NO: 89609 - protein, 127 aa, Unknown
  Bacterial polypetide isolated from the Sargasso Sea
MTNLKDPQAMWDFWSLNPEAMHQVTILMSDRGIPANYRQMHGYGSHTFSFWNAKGERFWVKFHFKSQQGVVNLTNEQADKLKGIDPDSSQRDMVVAVTDGNFPRWTVNVQIMPESDANTYHINPFDL

SEQ ID NO: 89610 - protein, 205 aa, Unknown
  Bacterial polypetide isolated from the Sargasso Sea
MADLIVLAGGVGVEMAAKKAGHKVNVPFSAGRGDARQDQTDIHSFGLLEPQADGFRNYLNGGASNVSAEEKLVDKAQLMGLTAPEMTALIGGMRVLNTNYDGSNYGVFTNKPGSLTNDYFVNLLDMNTTWKEEDKSEQTFVGKDRKTQKTKWKATRVDLIFGSNSQLRALAEVYACEDSSEKFVKDFIAAWVKVMNSDRFDLKLN

SEQ ID NO: 89611 - protein, 152 aa, Unknown
  Bacterial polypetide isolated from the Sargasso Sea
MPAYGAQQDLVESIDNGEFPSWTVNVQIMTEEEARNYHINPFDLTKVWPHSDFPLIEVGQLELNRNVDNYFAETEQAAFAPSNLVPGIGASPDRMLQARLIGYQDAHRYRIGANYNQIPVNAPRCPVHNYQRDGAFAGINPALAGSGANFYP

SEQ ID NO: 89612 - protein, 228 aa, Unknown
  Bacterial polypetide isolated from the Sargasso Sea
MSSEINNEISKCPFHGEGIPQKHNSGKGQSNRDWWPNSLNLKILSQHSSLVNPMDEKFDYKKEFKKLNLKALKKDLHKLMTQSQNWWPADYGHYGPLFIRLAWHAAGTYRTGDGRGGAGTGNQRFAPINSWPDNVNLDKARLLLWPIKKKYGKRISWADLFILVGNVALESMGFKTFGFGGGREDIWEPEEDIYWGSEKEWLANNRYNSKRELENPLGAVQMGLIYVN

SEQ ID NO: 89613 - protein, 197 aa, Unknown
  Bacterial polypetide isolated from the Sargasso Sea
TGASIADVIVLAGNVGIEKASGASVPFVPGRGDASQESTDVESFSVLEPEADGFRNYLKKNFSITPEELMLDRAHLLGLSAPEMTVLVGGMRALGISSDERGIFTDKPEKLTNDFFIKLLDMEVKWEVTGSNTYQAINRETGEKVRRASRVDLVFGSNSQLRALAEVYAQSDSHDKFINDFISAWNKVMNADRFDKL

SEQ ID NO: 89614 - protein, 148 aa, Unknown
  Bacterial polypetide isolated from the Sargasso Sea
MNYLIIILIICSCSNKSEISNDDSNKAKCPIHFGKDQTSGQITTNQGNTNRDWWPNQLDLTILRQNSEKSNPMDKDFNYKKAFESLDYFALKKDIEKTMTESKEWWPADYGNYGGLFIRMAWHSAGTYRTGDGRGGTRAGQQRFAPQN

SEQ ID NO: 89615 - protein, 309 aa, Unknown
  Bacterial polypetide isolated from the Sargasso Sea
SNYKSGKGVHAISSGIEGAWTQAPTQWDMGYFDCLFNHEWELTKGPAGAFQWTPKKNGQRIKMVPDAHDKNKMHPPMMQTTDLSLRMDKSYGPISKHFYQNPDEFADAFARAWFKLTHRDMGPRACYLGSEVPKEQLIWQDPIDKPKYKLKSNDIRDLKTKLSKSKISVSDLVSTAWASASTYRGSDKRGGANGARIMLEPQRSWKVNNPKKLSKVIKALQKIKKQFDTNKKSVSMADLIVLGGNVGIEMAAKKAGHKIQVPFSPGRGDARQDQTDVNSFGLLEPQADGFRNYMKKGKSHVSAEEKIID

SEQ ID NO: 89616 - protein, 115 aa, Unknown
  Bacterial polypetide isolated from the Sargasso Sea
EMTVLVAGMRSLGISSDGHGVFTDNPDQLSNDFFTTLLGMDVDWKPTGSNGYAGVDRDSGKTVRTGTRVDLVFGSNSQLRALAEVYASDDSTDKFRIDFVAAWAKVMNNDRFDTA

SEQ ID NO: 89617 - protein, 166 aa, Unknown
  Bacterial polypetide isolated from the Sargasso Sea
KYGKISKHFHENPEEFADAFARAWFKLTHRDMGPRTCYLGPEVPKEKLIWQDPIPKTTYRLKNKDLKALKSKIMKSGLSISQLVSTAWASASTFRGSDKRGGANGARIMLEPQKNWEVNNPSQLSTVLKTLEKIKKTFASKKKNVSMADLIVLGGCVAIEKAAKKS

SEQ ID NO: 89618 - protein, 252 aa, Unknown
  Bacterial polypetide isolated from the Sargasso Sea
MEVELDYHHKKIGEVNNPSQLSKTIKTLEKIKKGFDTKKKNVSIADLIVMGGCAAIEKAAKKAGHKINVPFKGGRGDATQDQTDTFSFGLLEPKADGFRNYITRLKNGSSNKTTVSAEEMLVDKAQLMKLSAPEMTVLVGGMRVLNTNFDKSEIGVFTKKTETLTNDFFINLLDMNTTWKEIDKSEELFLGRDRKTNKVKWTASRVDLIFGSNSQLRAIAEVYACEDSKNKFISDFVSTWTKVMNLDRFDLN

SEQ ID NO: 89619 - protein, 240 aa, Unknown
  Bacterial polypetide isolated from the Sargasso Sea
LLLFRSSDKRGGANGARIRLAPQKDWKVNNPSQLSKIIKVYEKIQKSFNSKNKNVSLSDLIVLGGNVGIEKAAKDAGKKIKLPFSSGRGDASQDQTDIHSFSLLEPQADGFRNYANSESTTQAEELLIDKAQLMQLTGPEMTVLVGGMRVLGTNFDGSRDGVFTKRLGKLTNDFFVNLLDMNVKWKETSAKEDKFMGVDRKSGKVLWTGTRADLIFGSNSQLRALAEVYATDDSSDKFVN

SEQ ID NO: 89620 - protein, 180 aa, Unknown
  Bacterial polypetide isolated from the Sargasso Sea
MEHLQKNGSSTNAMENGKCPFVHGASTSPDTSPLKWWPKRLNLDILHQHDQKTNPYSKDFDYREEVKSLDFEALEKDMHELMTTPQSWWPADWGHYGGLMIRMAWHAAGTYRVADGRGGAGTGNLRFAPLNSWPDNGNLDKARRLMWPIKKKYGNKISWADLFILAGNIAYESMGLKTFG

SEQ ID NO: 89621 - protein, 169 aa, Unknown
  Bacterial polypetide isolated from the Sargasso Sea
GDATQEMTDVESFAQLEPIHDGFRNWKKENYTESGEELLLDRAQLMGLTAVEMTVLLGGMRAMGVNHNDNQNGVFTDKVGALTNDFFVNLVDMAHKWKPSNGHYEIIDRANGDVKWNATSVDLVFGSNSILRSYAEVYAQDDNKEKFIEDFVAAWTKVMNSDRFDLLAN

SEQ ID NO: 89622 - protein, 276 aa, Unknown
  Bacterial polypetide isolated from the Sargasso Sea
IYWGSEKEWLGVNRYSGKRDLENPLGASHMGLIYVNPQGPDANPDPYLAAHDIRETFGRMAMNDYETVALVAGGHTFGKSHGAAPESNKGPEPEGSKIQEQSTGWNSNYKSGFGADTISSGIEGAWTSNPIKWDMGYFDNLFGYDWELTKSPAGAYQWKPKKNGHDISMTPDAHIKSKNNLPMMQTTDLSLKMDPKYGPISRHFHKNPKEFADAFARAWFKLTHRDMGPIACYLGPEVPKEKLIWQDPITKNKYKLKNKDIKNLKIKILKSGLSIS

SEQ ID NO: 89623 - protein, 269 aa, Unknown
  Bacterial polypetide isolated from the Sargasso Sea
MSGELIKEQSKCPFTGAGTPPKHPTGKGQTNKDWWPNSLNLKILSQHSSLVNPMGEKFNYKKEFKKLNFKALKKDLHKLMTDTQDWWPADYGHYGPFFIRLAWHAAGTYRTGDGRGGAGTGNQRFAPLNSWPDNVNLDKARLLLWPIKKKYGKKISWADLFILVGNISLESMGFKTFGFGAGREDIWEPEEDIYWGSEKEWLGVNRYSGKRELENPLGASHMGLIYVNPPGPDANPDPYLAAHDIRENFGRMAMNDNETVALVAGGHTF

SEQ ID NO: 89624 - protein, 222 aa, Unknown
  Bacterial polypetide isolated from the Sargasso Sea
LKEQSKCPFTSLGTPSKHPTGKGTSNRDWWPNSLNLKILSQHSSLVNPMDKKFDYSNEFKKLNFKALKKDLKNLMTDSQDWWPADYGHYGGLFIRLAWHAAGTYRTGDGRGGAGTGNQRFAPLNSWPDNVNLDKARLLLWPIKKKYGKKISWADLFILVGNVALESMGFKTFGFGGGREDIWEPEEDIYWGSEKEWLGVNRYSGKRELENPLGASHMGLIYV

SEQ ID NO: 89625 - protein, 251 aa, Unknown
  Bacterial polypetide isolated from the Sargasso Sea
NMGFETYGFAGGRTDDWEPDMVYWGPEVEMLASDREDASGKLERPLGATHMGLIYVNPEGPKGVPDPIGSAKNIRVAFSRMAMNDEETLALIAGGHTFGKMHGAHKPKDCVGAEPAAAGIEEQGLGWKNKCGKGHSEDTVSSGLEGAWTQAPTRWSSLYLSNLLNFEWKQTRSPAGAIQWIPTDESLHNAVPDAHIKGKFNAPVMTTADLALKFDPEYRKIAERFLNDPKEYQMAFAKAWYKLTHRDMGPP
